United States Patent Application Publication US 2026/0041763 A1 - sequence listing, part 3

SEQ ID NO: 61302 - protein, 9 aa, synthetic construct
  source 1..9: note = Seed: SQMEIDFLE
SLMEIDFLM

SEQ ID NO: 61303 - protein, 9 aa, synthetic construct
  source 1..9: note = Seed: SQMEIDFLE
SLMEIDFLS

SEQ ID NO: 61304 - protein, 9 aa, synthetic construct
  source 1..9: note = Seed: SQMEIDFLE
SLMEIDFLT

SEQ ID NO: 61305 - protein, 9 aa, synthetic construct
  source 1..9: note = Seed: SQMEIDFLE
SLMEIDFLV

SEQ ID NO: 61306 - protein, 9 aa, synthetic construct
  source 1..9: note = Seed: SMMGFKMNY
SLMGFKMNF

SEQ ID NO: 61307 - protein, 9 aa, synthetic construct
  source 1..9: note = Seed: SMMGFKMNY
SLMGFKMNI

SEQ ID NO: 61308 - protein, 9 aa, synthetic construct
  source 1..9: note = Seed: SMMGFKMNY
SLMGFKMNK

SEQ ID NO: 61309 - protein, 9 aa, synthetic construct
  source 1..9: note = Seed: SMMGFKMNY
SLMGFKMNR

SEQ ID NO: 61310 - protein, 9 aa, synthetic construct
  source 1..9: note = Seed: SMMGFKMNY
SLMGFKMNW

SEQ ID NO: 61311 - protein, 9 aa, synthetic construct
  source 1..9: note = Seed: SMMGFKMNY
SLMGFKMNY

SEQ ID NO: 61312 - protein, 10 aa, synthetic construct
  source 1..10: note = Seed: SMMGFKMNYQ
SLMGFKMNYK

SEQ ID NO: 61313 - protein, 11 aa, synthetic construct
  source 1..11: note = Seed: SMMGFKMNYQV
SLMGFKMNYQA

SEQ ID NO: 61314 - protein, 11 aa, synthetic construct
  source 1..11: note = Seed: SMMGFKMNYQV
SLMGFKMNYQI

SEQ ID NO: 61315 - protein, 11 aa, synthetic construct
  source 1..11: note = Seed: SMMGFKMNYQV
SLMGFKMNYQL

SEQ ID NO: 61316 - protein, 11 aa, synthetic construct
  source 1..11: note = Seed: SMMGFKMNYQV
SLMGFKMNYQM

SEQ ID NO: 61317 - protein, 11 aa, synthetic construct
  source 1..11: note = Seed: SMMGFKMNYQV
SLMGFKMNYQV

SEQ ID NO: 61318 - protein, 10 aa, synthetic construct
  source 1..10: note = Seed: SMMGFKMNYQ
SLMGFKMNYR

SEQ ID NO: 61319 - protein, 10 aa, synthetic construct
  source 1..10: note = Seed: SMMGFKMNYQ
SLMGFKMNYY

SEQ ID NO: 61320 - protein, 10 aa, synthetic construct
  source 1..10: note = Seed: SMMILSDDAV
SLMILSDDAL

SEQ ID NO: 61321 - protein, 10 aa, synthetic construct
  source 1..10: note = Seed: SMMILSDDAV
SLMILSDDAV

SEQ ID NO: 61322 - protein, 9 aa, synthetic construct
  source 1..9: note = Seed: SMMILSDDA
SLMILSDDL

SEQ ID NO: 61323 - protein, 9 aa, synthetic construct
  source 1..9: note = Seed: SMMILSDDA
SLMILSDDV

SEQ ID NO: 61324 - protein, 9 aa, synthetic construct
  source 1..9: note = Seed: SAMQTMLFT
SLMQTMLFA

SEQ ID NO: 61325 - protein, 9 aa, synthetic construct
  source 1..9: note = Seed: SAMQTMLFT
SLMQTMLFI

SEQ ID NO: 61326 - protein, 9 aa, synthetic construct
  source 1..9: note = Seed: SAMQTMLFT
SLMQTMLFL

SEQ ID NO: 61327 - protein, 9 aa, synthetic construct
  source 1..9: note = Seed: SAMQTMLFT
SLMQTMLFM

SEQ ID NO: 61328 - protein, 10 aa, synthetic construct
  source 1..10: note = Seed: SAMQTMLFTM
SLMQTMLFTA

SEQ ID NO: 61329 - protein, 10 aa, synthetic construct
  source 1..10: note = Seed: SAMQTMLFTM
SLMQTMLFTF

SEQ ID NO: 61330 - protein, 10 aa, synthetic construct
  source 1..10: note = Seed: SAMQTMLFTM
SLMQTMLFTI

SEQ ID NO: 61331 - protein, 10 aa, synthetic construct
  source 1..10: note = Seed: SAMQTMLFTM
SLMQTMLFTL

SEQ ID NO: 61332 - protein, 10 aa, synthetic construct
  source 1..10: note = Seed: SAMQTMLFTM
SLMQTMLFTM

SEQ ID NO: 61333 - protein, 10 aa, synthetic construct
  source 1..10: note = Seed: SAMQTMLFTM
SLMQTMLFTS

SEQ ID NO: 61334 - protein, 10 aa, synthetic construct
  source 1..10: note = Seed: SAMQTMLFTM
SLMQTMLFTT

SEQ ID NO: 61335 - protein, 10 aa, synthetic construct
  source 1..10: note = Seed: SAMQTMLFTM
SLMQTMLFTV

SEQ ID NO: 61336 - protein, 10 aa, synthetic construct
  source 1..10: note = Seed: SAMQTMLFTM
SLMQTMLFTW

SEQ ID NO: 61337 - protein, 10 aa, synthetic construct
  source 1..10: note = Seed: SAMQTMLFTM
SLMQTMLFTY

SEQ ID NO: 61338 - protein, 9 aa, synthetic construct
  source 1..9: note = Seed: SAMQTMLFT
SLMQTMLFV

SEQ ID NO: 61339 - protein, 11 aa, synthetic construct
  source 1..11: note = Seed: SKMSDVKCTSV
SLMSDVKCTSI

SEQ ID NO: 61340 - protein, 11 aa, synthetic construct
  source 1..11: note = Seed: SKMSDVKCTSV
SLMSDVKCTSL

SEQ ID NO: 61341 - protein, 11 aa, synthetic construct
  source 1..11: note = Seed: SKMSDVKCTSV
SLMSDVKCTSV

SEQ ID NO: 61342 - protein, 11 aa, synthetic construct
  source 1..11: note = Seed: STMTNRQFHQK
SLMTNRQFHQR

SEQ ID NO: 61343 - protein, 9 aa, synthetic construct
  source 1..9: note = Seed: STMTNRQFH
SLMTNRQFK

SEQ ID NO: 61344 - protein, 9 aa, synthetic construct
  source 1..9: note = Seed: SAMVRMYIF
SLMVRMYIA

SEQ ID NO: 61345 - protein, 9 aa, synthetic construct
  source 1..9: note = Seed: SAMVRMYIF
SLMVRMYIF

SEQ ID NO: 61346 - protein, 9 aa, synthetic construct
  source 1..9: note = Seed: SAMVRMYIF
SLMVRMYII

SEQ ID NO: 61347 - protein, 9 aa, synthetic construct
  source 1..9: note = Seed: SAMVRMYIF
SLMVRMYIL

SEQ ID NO: 61348 - protein, 9 aa, synthetic construct
  source 1..9: note = Seed: SAMVRMYIF
SLMVRMYIM

SEQ ID NO: 61349 - protein, 9 aa, synthetic construct
  source 1..9: note = Seed: SAMVRMYIF
SLMVRMYIV

SEQ ID NO: 61350 - protein, 9 aa, synthetic construct
  source 1..9: note = Seed: SAMVRMYIF
SLMVRMYIW

SEQ ID NO: 61351 - protein, 9 aa, synthetic construct
  source 1..9: note = Seed: SAMVRMYIF
SLMVRMYIY

SEQ ID NO: 61352 - protein, 8 aa, synthetic construct
  source 1..8: note = Seed: SAMVRMYI
SLMVRMYL

SEQ ID NO: 61353 - protein, 8 aa, synthetic construct
  source 1..8: note = Seed: SAMVRMYI
SLMVRMYM

SEQ ID NO: 61354 - protein, 10 aa, synthetic construct
  source 1..10: note = Seed: SSNFGAISSV
SLNFGAISSA

SEQ ID NO: 61355 - protein, 10 aa, synthetic construct
  source 1..10: note = Seed: SSNFGAISSV
SLNFGAISSI

SEQ ID NO: 61356 - protein, 10 aa, synthetic construct
  source 1..10: note = Seed: SSNFGAISSV
SLNFGAISSL

SEQ ID NO: 61357 - protein, 10 aa, synthetic construct
  source 1..10: note = Seed: SSNFGAISSV
SLNFGAISSM

SEQ ID NO: 61358 - protein, 10 aa, synthetic construct
  source 1..10: note = Seed: SSNFGAISSV
SLNFGAISST

SEQ ID NO: 61359 - protein, 10 aa, synthetic construct
  source 1..10: note = Seed: SSNFGAISSV
SLNFGAISSV

SEQ ID NO: 61360 - protein, 11 aa, synthetic construct
  source 1..11: note = Seed: SLNGVTLIGEA
SLNGVTLIGEV

SEQ ID NO: 61361 - protein, 9 aa, synthetic construct
  source 1..9: note = Seed: SANNCTFEY
SLNNCTFEF

SEQ ID NO: 61362 - protein, 9 aa, synthetic construct
  source 1..9: note = Seed: SANNCTFEY
SLNNCTFEK

SEQ ID NO: 61363 - protein, 9 aa, synthetic construct
  source 1..9: note = Seed: SANNCTFEY
SLNNCTFEY

SEQ ID NO: 61364 - protein, 10 aa, synthetic construct
  source 1..10: note = Seed: SANNCTFEYV
SLNNCTFEYA

SEQ ID NO: 61365 - protein, 10 aa, synthetic construct
  source 1..10: note = Seed: SANNCTFEYV
SLNNCTFEYI

SEQ ID NO: 61366 - protein, 10 aa, synthetic construct
  source 1..10: note = Seed: SANNCTFEYV
SLNNCTFEYL

SEQ ID NO: 61367 - protein, 10 aa, synthetic construct
  source 1..10: note = Seed: SANNCTFEYV
SLNNCTFEYM

SEQ ID NO: 61368 - protein, 10 aa, synthetic construct
  source 1..10: note = Seed: SANNCTFEYV
SLNNCTFEYV

SEQ ID NO: 61369 - protein, 9 aa, synthetic construct
  source 1..9: note = Seed: SSNVANYQK
SLNVANYQK

SEQ ID NO: 61370 - protein, 9 aa, synthetic construct
  source 1..9: note = Seed: SSNVANYQK
SLNVANYQR

SEQ ID NO: 61371 - protein, 9 aa, synthetic construct
  source 1..9: note = Seed: SLPGVFCGV
SLPGVFCGA

SEQ ID NO: 61372 - protein, 9 aa, synthetic construct
  source 1..9: note = Seed: SLPGVFCGV
SLPGVFCGI

SEQ ID NO: 61373 - protein, 9 aa, synthetic construct
  source 1..9: note = Seed: SLPGVFCGV
SLPGVFCGL

SEQ ID NO: 61374 - protein, 9 aa, synthetic construct
  source 1..9: note = Seed: SLPGVFCGV
SLPGVFCGM

SEQ ID NO: 61375 - protein, 9 aa, synthetic construct
  source 1..9: note = Seed: SLPGVFCGV
SLPGVFCGT

SEQ ID NO: 61376 - protein, 9 aa, synthetic construct
  source 1..9: note = Seed: SAPHGVVFL
SLPHGVVFL

SEQ ID NO: 61377 - protein, 9 aa, synthetic construct
  source 1..9: note = Seed: SSQAWQPGV
SLQAWQPGA

SEQ ID NO: 61378 - protein, 9 aa, synthetic construct
  source 1..9: note = Seed: SSQAWQPGV
SLQAWQPGI

SEQ ID NO: 61379 - protein, 9 aa, synthetic construct
  source 1..9: note = Seed: SSQAWQPGV
SLQAWQPGL

SEQ ID NO: 61380 - protein, 9 aa, synthetic construct
  source 1..9: note = Seed: SSQAWQPGV
SLQAWQPGM

SEQ ID NO: 61381 - protein, 9 aa, synthetic construct
  source 1..9: note = Seed: SSQAWQPGV
SLQAWQPGV

SEQ ID NO: 61382 - protein, 11 aa, synthetic construct
  source 1..11: note = Seed: SSQAWQPGVAM
SLQAWQPGVAY

SEQ ID NO: 61383 - protein, 10 aa, synthetic construct
  source 1..10: note = Seed: SMQGAVDINK
SLQGAVDINK

SEQ ID NO: 61384 - protein, 10 aa, synthetic construct
  source 1..10: note = Seed: SRQRLTKYTM
SLQRLTKYTY

SEQ ID NO: 61385 - protein, 11 aa, synthetic construct
  source 1..11: note = Seed: SLQTYVTQQLI
SLQTYVTQQLV

SEQ ID NO: 61386 - protein, 10 aa, synthetic construct
  source 1..10: note = Seed: SLQTYVTQQL
SLQTYVTQQV

SEQ ID NO: 61387 - protein, 9 aa, synthetic construct
  source 1..9: note = Seed: SFRLFARTR
SLRLFARTK

SEQ ID NO: 61388 - protein, 9 aa, synthetic construct
  source 1..9: note = Seed: SFRLFARTR
SLRLFARTR

SEQ ID NO: 61389 - protein, 9 aa, synthetic construct
  source 1..9: note = Seed: SSRLSFKEL
SLRLSFKEK

SEQ ID NO: 61390 - protein, 9 aa, synthetic construct
  source 1..9: note = Seed: SLRPDTRYV
SLRPDTRYI

SEQ ID NO: 61391 - protein, 9 aa, synthetic construct
  source 1..9: note = Seed: SLRPDTRYV
SLRPDTRYK

SEQ ID NO: 61392 - protein, 10 aa, synthetic construct
  source 1..10: note = Seed: SLRPDTRYVL
SLRPDTRYVV

SEQ ID NO: 61393 - protein, 10 aa, synthetic construct
  source 1..10: note = Seed: SQRVAGDSGF
SLRVAGDSGF

SEQ ID NO: 61394 - protein, 10 aa, synthetic construct
  source 1..10: note = Seed: SQRVAGDSGF
SLRVAGDSGY

SEQ ID NO: 61395 - protein, 10 aa, synthetic construct
  source 1..10: note = Seed: SPRWYFYYLG
SLRWYFYYLF

SEQ ID NO: 61396 - protein, 10 aa, synthetic construct
  source 1..10: note = Seed: SPRWYFYYLG
SLRWYFYYLK

SEQ ID NO: 61397 - protein, 10 aa, synthetic construct
  source 1..10: note = Seed: SPRWYFYYLG
SLRWYFYYLL

SEQ ID NO: 61398 - protein, 10 aa, synthetic construct
  source 1..10: note = Seed: SPRWYFYYLG
SLRWYFYYLM

SEQ ID NO: 61399 - protein, 9 aa, synthetic construct
  source 1..9: note = Seed: STSAFVETV
SLSAFVETA

SEQ ID NO: 61400 - protein, 9 aa, synthetic construct
  source 1..9: note = Seed: STSAFVETV
SLSAFVETI

SEQ ID NO: 61401 - protein, 9 aa, synthetic construct
  source 1..9: note = Seed: STSAFVETV
SLSAFVETL

SEQ ID NO: 61402 - protein, 9 aa, synthetic construct
  source 1..9: note = Seed: STSAFVETV
SLSAFVETM

SEQ ID NO: 61403 - protein, 9 aa, synthetic construct
  source 1..9: note = Seed: STSAFVETV
SLSAFVETT

SEQ ID NO: 61404 - protein, 9 aa, synthetic construct
  source 1..9: note = Seed: STSAFVETV
SLSAFVETV

SEQ ID NO: 61405 - protein, 10 aa, synthetic construct
  source 1..10: note = Seed: STSAFVETVK
SLSAFVETVK

SEQ ID NO: 61406 - protein, 10 aa, synthetic construct
  source 1..10: note = Seed: STSAFVETVK
SLSAFVETVR

SEQ ID NO: 61407 - protein, 9 aa, synthetic construct
  source 1..9: note = Seed: SSSDNIALL
SLSDNIALA

SEQ ID NO: 61408 - protein, 9 aa, synthetic construct
  source 1..9: note = Seed: SSSDNIALL
SLSDNIALC

SEQ ID NO: 61409 - protein, 9 aa, synthetic construct
  source 1..9: note = Seed: SSSDNIALL
SLSDNIALI

SEQ ID NO: 61410 - protein, 9 aa, synthetic construct
  source 1..9: note = Seed: SSSDNIALL
SLSDNIALL

SEQ ID NO: 61411 - protein, 10 aa, synthetic construct
  source 1..10: note = Seed: SSSDNIALLV
SLSDNIALLV

SEQ ID NO: 61412 - protein, 10 aa, synthetic construct
  source 1..10: note = Seed: SSSDNIALLV
SLSDNIALLY

SEQ ID NO: 61413 - protein, 9 aa, synthetic construct
  source 1..9: note = Seed: SSSDNIALL
SLSDNIALM

SEQ ID NO: 61414 - protein, 9 aa, synthetic construct
  source 1..9: note = Seed: SSSDNIALL
SLSDNIALT

SEQ ID NO: 61415 - protein, 9 aa, synthetic construct
  source 1..9: note = Seed: SSSDNIALL
SLSDNIALV

SEQ ID NO: 61416 - protein, 10 aa, synthetic construct
  source 1..10: note = Seed: SLSEQLRKQI
SLSEQLRKQV

SEQ ID NO: 61417 - protein, 10 aa, synthetic construct
  source 1..10: note = Seed: SASFSTFKCY
SLSFSTFKCF

SEQ ID NO: 61418 - protein, 10 aa, synthetic construct
  source 1..10: note = Seed: SASFSTFKCY
SLSFSTFKCY

SEQ ID NO: 61419 - protein, 10 aa, synthetic construct
  source 1..10: note = Seed: SASVYYSQLM
SLSVYYSQLF

SEQ ID NO: 61420 - protein, 10 aa, synthetic construct
  source 1..10: note = Seed: SASVYYSQLM
SLSVYYSQLW

SEQ ID NO: 61421 - protein, 10 aa, synthetic construct
  source 1..10: note = Seed: SASVYYSQLM
SLSVYYSQLY

SEQ ID NO: 61422 - protein, 9 aa, synthetic construct
  source 1..9: note = Seed: SSTCMMCYK
SLTCMMCYK

SEQ ID NO: 61423 - protein, 10 aa, synthetic construct
  source 1..10: note = Seed: SSTCMMCYKR
SLTCMMCYKK

SEQ ID NO: 61424 - protein, 10 aa, synthetic construct
  source 1..10: note = Seed: SSTCMMCYKR
SLTCMMCYKR

SEQ ID NO: 61425 - protein, 9 aa, synthetic construct
  source 1..9: note = Seed: SSTCMMCYK
SLTCMMCYR

SEQ ID NO: 61426 - protein, 10 aa, synthetic construct
  source 1..10: note = Seed: SLTENKYSQL
SLTENKYSQV

SEQ ID NO: 61427 - protein, 9 aa, synthetic construct
  source 1..9: note = Seed: SVTSNYSGV
SLTSNYSGI

SEQ ID NO: 61428 - protein, 9 aa, synthetic construct
  source 1..9: note = Seed: SVTSNYSGV
SLTSNYSGL

SEQ ID NO: 61429 - protein, 9 aa, synthetic construct
  source 1..9: note = Seed: SVTSNYSGV
SLTSNYSGV

SEQ ID NO: 61430 - protein, 10 aa, synthetic construct
  source 1..10: note = Seed: SVTSNYSGVV
SLTSNYSGVV

SEQ ID NO: 61431 - protein, 9 aa, synthetic construct
  source 1..9: note = Seed: SVTTEILPV
SLTTEILPA

SEQ ID NO: 61432 - protein, 9 aa, synthetic construct
  source 1..9: note = Seed: SVTTEILPV
SLTTEILPI

SEQ ID NO: 61433 - protein, 9 aa, synthetic construct
  source 1..9: note = Seed: SVTTEILPV
SLTTEILPL

SEQ ID NO: 61434 - protein, 9 aa, synthetic construct
  source 1..9: note = Seed: SVTTEILPV
SLTTEILPV

SEQ ID NO: 61435 - protein, 11 aa, synthetic construct
  source 1..11: note = Seed: SDTYACWHHSI
SLTYACWHHSF

SEQ ID NO: 61436 - protein, 11 aa, synthetic construct
  source 1..11: note = Seed: SDTYACWHHSI
SLTYACWHHSI

SEQ ID NO: 61437 - protein, 11 aa, synthetic construct
  source 1..11: note = Seed: SDTYACWHHSI
SLTYACWHHSL

SEQ ID NO: 61438 - protein, 11 aa, synthetic construct
  source 1..11: note = Seed: SDTYACWHHSI
SLTYACWHHSW

SEQ ID NO: 61439 - protein, 10 aa, synthetic construct
  source 1..10: note = Seed: SIVCRFDTRV
SLVCRFDTRV

SEQ ID NO: 61440 - protein, 11 aa, synthetic construct
  source 1..11: note = Seed: SVVLLSVLQQL
SLVLLSVLQQI

SEQ ID NO: 61441 - protein, 11 aa, synthetic construct
  source 1..11: note = Seed: SVVLLSVLQQL
SLVLLSVLQQV

SEQ ID NO: 61442 - protein, 10 aa, synthetic construct
  source 1..10: note = Seed: SSVLNDILSR
SLVLNDILSK

SEQ ID NO: 61443 - protein, 11 aa, synthetic construct
  source 1..11: note = Seed: SSVLNDILSRL
SLVLNDILSRL

SEQ ID NO: 61444 - protein, 11 aa, synthetic construct
  source 1..11: note = Seed: SSVLNDILSRL
SLVLNDILSRV

SEQ ID NO: 61445 - protein, 10 aa, synthetic construct
  source 1..10: note = Seed: SAVLQSGFRK
SLVLQSGFRK

SEQ ID NO: 61446 - protein, 10 aa, synthetic construct
  source 1..10: note = Seed: SAVLQSGFRK
SLVLQSGFRR

SEQ ID NO: 61447 - protein, 10 aa, synthetic construct
  source 1..10: note = Seed: SWVMRIMTWL
SLVMRIMTWA

SEQ ID NO: 61448 - protein, 10 aa, synthetic construct
  source 1..10: note = Seed: SWVMRIMTWL
SLVMRIMTWI

SEQ ID NO: 61449 - protein, 10 aa, synthetic construct
  source 1..10: note = Seed: SWVMRIMTWL
SLVMRIMTWL

SEQ ID NO: 61450 - protein, 10 aa, synthetic construct
  source 1..10: note = Seed: SWVMRIMTWL
SLVMRIMTWV

SEQ ID NO: 61451 - protein, 10 aa, synthetic construct
  source 1..10: note = Seed: SLWVYKQFDT
SLWVYKQFDA

SEQ ID NO: 61452 - protein, 10 aa, synthetic construct
  source 1..10: note = Seed: SLWVYKQFDT
SLWVYKQFDI

SEQ ID NO: 61453 - protein, 10 aa, synthetic construct
  source 1..10: note = Seed: SLWVYKQFDT
SLWVYKQFDL

SEQ ID NO: 61454 - protein, 10 aa, synthetic construct
  source 1..10: note = Seed: SLWVYKQFDT
SLWVYKQFDV

SEQ ID NO: 61455 - protein, 10 aa, synthetic construct
  source 1..10: note = Seed: SDYDYYRYNL
SLYDYYRYNF

SEQ ID NO: 61456 - protein, 9 aa, synthetic construct
  source 1..9: note = Seed: SFYEDFLEY
SLYEDFLEF

SEQ ID NO: 61457 - protein, 9 aa, synthetic construct
  source 1..9: note = Seed: SFYEDFLEY
SLYEDFLEM

SEQ ID NO: 61458 - protein, 9 aa, synthetic construct
  source 1..9: note = Seed: SFYEDFLEY
SLYEDFLEY

SEQ ID NO: 61459 - protein, 9 aa, synthetic construct
  source 1..9: note = Seed: SAYENFNQH
SLYENFNQF

SEQ ID NO: 61460 - protein, 9 aa, synthetic construct
  source 1..9: note = Seed: SAYENFNQH
SLYENFNQM

SEQ ID NO: 61461 - protein, 9 aa, synthetic construct
  source 1..9: note = Seed: SAYENFNQH
SLYENFNQY

SEQ ID NO: 61462 - protein, 10 aa, synthetic construct
  source 1..10: note = Seed: SSYIVDSVTV
SLYIVDSVTF

SEQ ID NO: 61463 - protein, 10 aa, synthetic construct
  source 1..10: note = Seed: SSYIVDSVTV
SLYIVDSVTI

SEQ ID NO: 61464 - protein, 10 aa, synthetic construct
  source 1..10: note = Seed: SSYIVDSVTV
SLYIVDSVTL

SEQ ID NO: 61465 - protein, 10 aa, synthetic construct
  source 1..10: note = Seed: SSYIVDSVTV
SLYIVDSVTW

SEQ ID NO: 61466 - protein, 9 aa, synthetic construct
  source 1..9: note = Seed: SNYLKRRVV
SLYLKRRVA

SEQ ID NO: 61467 - protein, 9 aa, synthetic construct
  source 1..9: note = Seed: SNYLKRRVV
SLYLKRRVF

SEQ ID NO: 61468 - protein, 9 aa, synthetic construct
  source 1..9: note = Seed: SNYLKRRVV
SLYLKRRVI

SEQ ID NO: 61469 - protein, 9 aa, synthetic construct
  source 1..9: note = Seed: SNYLKRRVV
SLYLKRRVL

SEQ ID NO: 61470 - protein, 9 aa, synthetic construct
  source 1..9: note = Seed: SNYLKRRVV
SLYLKRRVM

SEQ ID NO: 61471 - protein, 9 aa, synthetic construct
  source 1..9: note = Seed: SNYLKRRVV
SLYLKRRVV

SEQ ID NO: 61472 - protein, 10 aa, synthetic construct
  source 1..10: note = Seed: SRYRIGNYKL
SLYRIGNYKF

SEQ ID NO: 61473 - protein, 9 aa, synthetic construct
  source 1..9: note = Seed: SYYSLLMPI
SLYSLLMPA

SEQ ID NO: 61474 - protein, 9 aa, synthetic construct
  source 1..9: note = Seed: SYYSLLMPI
SLYSLLMPC

SEQ ID NO: 61475 - protein, 9 aa, synthetic construct
  source 1..9: note = Seed: SYYSLLMPI
SLYSLLMPF

SEQ ID NO: 61476 - protein, 9 aa, synthetic construct
  source 1..9: note = Seed: SYYSLLMPI
SLYSLLMPG

SEQ ID NO: 61477 - protein, 9 aa, synthetic construct
  source 1..9: note = Seed: SYYSLLMPI
SLYSLLMPI

SEQ ID NO: 61478 - protein, 10 aa, synthetic construct
  source 1..10: note = Seed: SYYSLLMPIL
SLYSLLMPIF

SEQ ID NO: 61479 - protein, 9 aa, synthetic construct
  source 1..9: note = Seed: SYYSLLMPI
SLYSLLMPK

SEQ ID NO: 61480 - protein, 9 aa, synthetic construct
  source 1..9: note = Seed: SYYSLLMPI
SLYSLLMPL

SEQ ID NO: 61481 - protein, 9 aa, synthetic construct
  source 1..9: note = Seed: SYYSLLMPI
SLYSLLMPM

SEQ ID NO: 61482 - protein, 9 aa, synthetic construct
  source 1..9: note = Seed: SYYSLLMPI
SLYSLLMPS

SEQ ID NO: 61483 - protein, 9 aa, synthetic construct
  source 1..9: note = Seed: SYYSLLMPI
SLYSLLMPT

SEQ ID NO: 61484 - protein, 9 aa, synthetic construct
  source 1..9: note = Seed: SYYSLLMPI
SLYSLLMPV

SEQ ID NO: 61485 - protein, 9 aa, synthetic construct
  source 1..9: note = Seed: SYYSLLMPI
SLYSLLMPW

SEQ ID NO: 61486 - protein, 9 aa, synthetic construct
  source 1..9: note = Seed: SYYSLLMPI
SLYSLLMPY

SEQ ID NO: 61487 - protein, 9 aa, synthetic construct
  source 1..9: note = Seed: SLYVKPGGT
SLYVKPGGA

SEQ ID NO: 61488 - protein, 9 aa, synthetic construct
  source 1..9: note = Seed: SLYVKPGGT
SLYVKPGGI

SEQ ID NO: 61489 - protein, 9 aa, synthetic construct
  source 1..9: note = Seed: SLYVKPGGT
SLYVKPGGV

SEQ ID NO: 61490 - protein, 9 aa, synthetic construct
  source 1..9: note = Seed: SLYVNKHAF
SLYVNKHAY

SEQ ID NO: 61491 - protein, 9 aa, synthetic construct
  source 1..9: note = Seed: SFYYVWKSY
SLYYVWKSF

SEQ ID NO: 61492 - protein, 9 aa, synthetic construct
  source 1..9: note = Seed: SFYYVWKSY
SLYYVWKSY

SEQ ID NO: 61493 - protein, 10 aa, synthetic construct
  source 1..10: note = Seed: SFYYVWKSYV
SLYYVWKSYF

SEQ ID NO: 61494 - protein, 10 aa, synthetic construct
  source 1..10: note = Seed: SFYYVWKSYV
SLYYVWKSYW

SEQ ID NO: 61495 - protein, 10 aa, synthetic construct
  source 1..10: note = Seed: SEAFLIGCNY
SMAFLIGCNF

SEQ ID NO: 61496 - protein, 10 aa, synthetic construct
  source 1..10: note = Seed: SEAFLIGCNY
SMAFLIGCNY

SEQ ID NO: 61497 - protein, 11 aa, synthetic construct
  source 1..11: note = Seed: SVAIKITEHSW
SMAIKITEHSW

SEQ ID NO: 61498 - protein, 10 aa, synthetic construct
  source 1..10: note = Seed: SIAIPTNFTI
SMAIPTNFTA

SEQ ID NO: 61499 - protein, 10 aa, synthetic construct
  source 1..10: note = Seed: SIAIPTNFTI
SMAIPTNFTF

SEQ ID NO: 61500 - protein, 10 aa, synthetic construct
  source 1..10: note = Seed: SIAIPTNFTI
SMAIPTNFTI

SEQ ID NO: 61501 - protein, 10 aa, synthetic construct
  source 1..10: note = Seed: SIAIPTNFTI
SMAIPTNFTL

SEQ ID NO: 61502 - protein, 10 aa, synthetic construct
  source 1..10: note = Seed: SIAIPTNFTI
SMAIPTNFTM

SEQ ID NO: 61503 - protein, 10 aa, synthetic construct
  source 1..10: note = Seed: SIAIPTNFTI
SMAIPTNFTV

SEQ ID NO: 61504 - protein, 10 aa, synthetic construct
  source 1..10: note = Seed: SIAIPTNFTI
SMAIPTNFTW

SEQ ID NO: 61505 - protein, 10 aa, synthetic construct
  source 1..10: note = Seed: SAAKKNNLPF
SMAKKNNLPF

SEQ ID NO: 61506 - protein, 10 aa, synthetic construct
  source 1..10: note = Seed: SAAKKNNLPF
SMAKKNNLPM

SEQ ID NO: 61507 - protein, 10 aa, synthetic construct
  source 1..10: note = Seed: SAAKKNNLPF
SMAKKNNLPY

SEQ ID NO: 61508 - protein, 10 aa, synthetic construct
  source 1..10: note = Seed: SSANNCTFEY
SMANNCTFEF

SEQ ID NO: 61509 - protein, 10 aa, synthetic construct
  source 1..10: note = Seed: SSANNCTFEY
SMANNCTFEK

SEQ ID NO: 61510 - protein, 10 aa, synthetic construct
  source 1..10: note = Seed: SSANNCTFEY
SMANNCTFEW

SEQ ID NO: 61511 - protein, 10 aa, synthetic construct
  source 1..10: note = Seed: SSANNCTFEY
SMANNCTFEY

SEQ ID NO: 61512 - protein, 10 aa, synthetic construct
  source 1..10: note = Seed: STASDTYACW
SMASDTYACW

SEQ ID NO: 61513 - protein, 10 aa, synthetic construct
  source 1..10: note = Seed: SQAWQPGVAM
SMAWQPGVAF

SEQ ID NO: 61514 - protein, 10 aa, synthetic construct
  source 1..10: note = Seed: SQAWQPGVAM
SMAWQPGVAM

SEQ ID NO: 61515 - protein, 10 aa, synthetic construct
  source 1..10: note = Seed: SQAWQPGVAM
SMAWQPGVAY

SEQ ID NO: 61516 - protein, 9 aa, synthetic construct
  source 1..9: note = Seed: SQAWQPGVA
SMAWQPGVF

SEQ ID NO: 61517 - protein, 9 aa, synthetic construct
  source 1..9: note = Seed: SQAWQPGVA
SMAWQPGVM

SEQ ID NO: 61518 - protein, 9 aa, synthetic construct
  source 1..9: note = Seed: SQAWQPGVA
SMAWQPGVY

SEQ ID NO: 61519 - protein, 11 aa, synthetic construct
  source 1..11: note = Seed: SFCAFAVDAAK
SMCAFAVDAAR

SEQ ID NO: 61520 - protein, 10 aa, synthetic construct
  source 1..10: note = Seed: SVCLSGLDSL
SMCLSGLDSV

SEQ ID NO: 61521 - protein, 9 aa, synthetic construct
  source 1..9: note = Seed: STCMMCYKR
SMCMMCYKK

SEQ ID NO: 61522 - protein, 9 aa, synthetic construct
  source 1..9: note = Seed: STCMMCYKR
SMCMMCYKR

SEQ ID NO: 61523 - protein, 11 aa, synthetic construct
  source 1..11: note = Seed: STCMMCYKRNR
SMCMMCYKRNR

SEQ ID NO: 61524 - protein, 10 aa, synthetic construct
  source 1..10: note = Seed: STCMMCYKRN
SMCMMCYKRR

SEQ ID NO: 61525 - protein, 8 aa, synthetic construct
  source 1..8: note = Seed: STCMMCYK
SMCMMCYR

SEQ ID NO: 61526 - protein, 9 aa, synthetic construct
  source 1..9: note = Seed: SICSTMTNR
SMCSTMTNK

SEQ ID NO: 61527 - protein, 9 aa, synthetic construct
  source 1..9: note = Seed: SICSTMTNR
SMCSTMTNR

SEQ ID NO: 61528 - protein, 9 aa, synthetic construct
  source 1..9: note = Seed: SIDAFKLNI
SMDAFKLNA

SEQ ID NO: 61529 - protein, 9 aa, synthetic construct
  source 1..9: note = Seed: SIDAFKLNI
SMDAFKLNI

SEQ ID NO: 61530 - protein, 10 aa, synthetic construct
  source 1..10: note = Seed: SIDAFKLNIK
SMDAFKLNIK

SEQ ID NO: 61531 - protein, 9 aa, synthetic construct
  source 1..9: note = Seed: SIDAFKLNI
SMDAFKLNL

SEQ ID NO: 61532 - protein, 9 aa, synthetic construct
  source 1..9: note = Seed: SIDAFKLNI
SMDAFKLNM

SEQ ID NO: 61533 - protein, 9 aa, synthetic construct
  source 1..9: note = Seed: SIDAFKLNI
SMDAFKLNV

SEQ ID NO: 61534 - protein, 9 aa, synthetic construct
  source 1..9: note = Seed: SSDNIALLV
SMDNIALLA

SEQ ID NO: 61535 - protein, 9 aa, synthetic construct
  source 1..9: note = Seed: SSDNIALLV
SMDNIALLF

SEQ ID NO: 61536 - protein, 9 aa, synthetic construct
  source 1..9: note = Seed: SSDNIALLV
SMDNIALLI

SEQ ID NO: 61537 - protein, 9 aa, synthetic construct
  source 1..9: note = Seed: SSDNIALLV
SMDNIALLL

SEQ ID NO: 61538 - protein, 9 aa, synthetic construct
  source 1..9: note = Seed: SSDNIALLV
SMDNIALLM

SEQ ID NO: 61539 - protein, 9 aa, synthetic construct
  source 1..9: note = Seed: SSDNIALLV
SMDNIALLV

SEQ ID NO: 61540 - protein, 9 aa, synthetic construct
  source 1..9: note = Seed: SSDNIALLV
SMDNIALLY

SEQ ID NO: 61541 - protein, 9 aa, synthetic construct
  source 1..9: note = Seed: SMDNSPNLA
SMDNSPNLI

SEQ ID NO: 61542 - protein, 9 aa, synthetic construct
  source 1..9: note = Seed: SMDNSPNLA
SMDNSPNLL

SEQ ID NO: 61543 - protein, 9 aa, synthetic construct
  source 1..9: note = Seed: SMDNSPNLA
SMDNSPNLV

SEQ ID NO: 61544 - protein, 10 aa, synthetic construct
  source 1..10: note = Seed: SYELQTPFEI
SMELQTPFEL

SEQ ID NO: 61545 - protein, 10 aa, synthetic construct
  source 1..10: note = Seed: SYELQTPFEI
SMELQTPFEW

SEQ ID NO: 61546 - protein, 8 aa, synthetic construct
  source 1..8: note = Seed: SGFAAYSR
SMFAAYSR

SEQ ID NO: 61547 - protein, 9 aa, synthetic construct
  source 1..9: note = Seed: SGFAAYSRY
SMFAAYSRF

SEQ ID NO: 61548 - protein, 9 aa, synthetic construct
  source 1..9: note = Seed: SGFAAYSRY
SMFAAYSRI

SEQ ID NO: 61549 - protein, 9 aa, synthetic construct
  source 1..9: note = Seed: SGFAAYSRY
SMFAAYSRL

SEQ ID NO: 61550 - protein, 9 aa, synthetic construct
  source 1..9: note = Seed: SGFAAYSRY
SMFAAYSRM

SEQ ID NO: 61551 - protein, 9 aa, synthetic construct
  source 1..9: note = Seed: SGFAAYSRY
SMFAAYSRW

SEQ ID NO: 61552 - protein, 9 aa, synthetic construct
  source 1..9: note = Seed: SGFAAYSRY
SMFAAYSRY

SEQ ID NO: 61553 - protein, 9 aa, synthetic construct
  source 1..9: note = Seed: SAFAMMFVK
SMFAMMFVK

SEQ ID NO: 61554 - protein, 11 aa, synthetic construct
  source 1..11: note = Seed: SAFAMMFVKHK
SMFAMMFVKHK

SEQ ID NO: 61555 - protein, 11 aa, synthetic construct
  source 1..11: note = Seed: SAFAMMFVKHK
SMFAMMFVKHR

SEQ ID NO: 61556 - protein, 10 aa, synthetic construct
  source 1..10: note = Seed: SAFAMMFVKH
SMFAMMFVKK

SEQ ID NO: 61557 - protein, 9 aa, synthetic construct
  source 1..9: note = Seed: SAFAMMFVK
SMFAMMFVR

SEQ ID NO: 61558 - protein, 9 aa, synthetic construct
  source 1..9: note = Seed: SAFAMMFVK
SMFAMMFVY

SEQ ID NO: 61559 - protein, 11 aa, synthetic construct
  source 1..11: note = Seed: STFEEAALCTF
SMFEEAALCTF

SEQ ID NO: 61560 - protein, 11 aa, synthetic construct
  source 1..11: note = Seed: STFEEAALCTF
SMFEEAALCTM

SEQ ID NO: 61561 - protein, 11 aa, synthetic construct
  source 1..11: note = Seed: STFEEAALCTF
SMFEEAALCTY

SEQ ID NO: 61562 - protein, 9 aa, synthetic construct
  source 1..9: note = Seed: SNFGAISSV
SMFGAISSA

SEQ ID NO: 61563 - protein, 9 aa, synthetic construct
  source 1..9: note = Seed: SNFGAISSV
SMFGAISSC

SEQ ID NO: 61564 - protein, 9 aa, synthetic construct
  source 1..9: note = Seed: SNFGAISSV
SMFGAISSI

SEQ ID NO: 61565 - protein, 9 aa, synthetic construct
  source 1..9: note = Seed: SNFGAISSV
SMFGAISSL

SEQ ID NO: 61566 - protein, 9 aa, synthetic construct
  source 1..9: note = Seed: SNFGAISSV
SMFGAISSM

SEQ ID NO: 61567 - protein, 9 aa, synthetic construct
  source 1..9: note = Seed: SNFGAISSV
SMFGAISSS

SEQ ID NO: 61568 - protein, 9 aa, synthetic construct
  source 1..9: note = Seed: SNFGAISSV
SMFGAISST

SEQ ID NO: 61569 - protein, 9 aa, synthetic construct
  source 1..9: note = Seed: SNFGAISSV
SMFGAISSV

SEQ ID NO: 61570 - protein, 9 aa, synthetic construct
  source 1..9: note = Seed: SNFGAISSV
SMFGAISSY

SEQ ID NO: 61571 - protein, 8 aa, synthetic construct
  source 1..8: note = Seed: SYFIASFR
SMFIASFR

SEQ ID NO: 61572 - protein, 9 aa, synthetic construct
  source 1..9: note = Seed: SYFIASFRL
SMFIASFRF

SEQ ID NO: 61573 - protein, 10 aa, synthetic construct
  source 1..10: note = Seed: SYFIASFRLF
SMFIASFRLF

SEQ ID NO: 61574 - protein, 11 aa, synthetic construct
  source 1..11: note = Seed: SYFIASFRLFA
SMFIASFRLFK

SEQ ID NO: 61575 - protein, 10 aa, synthetic construct
  source 1..10: note = Seed: SYFIASFRLF
SMFIASFRLM

SEQ ID NO: 61576 - protein, 10 aa, synthetic construct
  source 1..10: note = Seed: SYFIASFRLF
SMFIASFRLY

SEQ ID NO: 61577 - protein, 9 aa, synthetic construct
  source 1..9: note = Seed: SYFIASFRL
SMFIASFRW

SEQ ID NO: 61578 - protein, 9 aa, synthetic construct
  source 1..9: note = Seed: SYFIASFRL
SMFIASFRY

SEQ ID NO: 61579 - protein, 10 aa, synthetic construct
  source 1..10: note = Seed: STFISDEVAR
SMFISDEVAR

SEQ ID NO: 61580 - protein, 9 aa, synthetic construct
  source 1..9: note = Seed: STFKCYGVS
SMFKCYGVK

SEQ ID NO: 61581 - protein, 9 aa, synthetic construct
  source 1..9: note = Seed: SVFNICQAV
SMFNICQAA

SEQ ID NO: 61582 - protein, 9 aa, synthetic construct
  source 1..9: note = Seed: SVFNICQAV
SMFNICQAC

SEQ ID NO: 61583 - protein, 9 aa, synthetic construct
  source 1..9: note = Seed: SVFNICQAV
SMFNICQAF

SEQ ID NO: 61584 - protein, 9 aa, synthetic construct
  source 1..9: note = Seed: SVFNICQAV
SMFNICQAI

SEQ ID NO: 61585 - protein, 9 aa, synthetic construct
  source 1..9: note = Seed: SVFNICQAV
SMFNICQAL

SEQ ID NO: 61586 - protein, 9 aa, synthetic construct
  source 1..9: note = Seed: SVFNICQAV
SMFNICQAM

SEQ ID NO: 61587 - protein, 9 aa, synthetic construct
  source 1..9: note = Seed: SVFNICQAV
SMFNICQAT

SEQ ID NO: 61588 - protein, 9 aa, synthetic construct
  source 1..9: note = Seed: SVFNICQAV
SMFNICQAV

SEQ ID NO: 61589 - protein, 10 aa, synthetic construct
  source 1..10: note = Seed: SVFNICQAVT
SMFNICQAVA

SEQ ID NO: 61590 - protein, 10 aa, synthetic construct
  source 1..10: note = Seed: SVFNICQAVT
SMFNICQAVC

SEQ ID NO: 61591 - protein, 10 aa, synthetic construct
  source 1..10: note = Seed: SVFNICQAVT
SMFNICQAVF

SEQ ID NO: 61592 - protein, 10 aa, synthetic construct
  source 1..10: note = Seed: SVFNICQAVT
SMFNICQAVG

SEQ ID NO: 61593 - protein, 10 aa, synthetic construct
  source 1..10: note = Seed: SVFNICQAVT
SMFNICQAVI

SEQ ID NO: 61594 - protein, 10 aa, synthetic construct
  source 1..10: note = Seed: SVFNICQAVT
SMFNICQAVL

SEQ ID NO: 61595 - protein, 10 aa, synthetic construct
  source 1..10: note = Seed: SVFNICQAVT
SMFNICQAVM

SEQ ID NO: 61596 - protein, 10 aa, synthetic construct
  source 1..10: note = Seed: SVFNICQAVT
SMFNICQAVP

SEQ ID NO: 61597 - protein, 10 aa, synthetic construct
  source 1..10: note = Seed: SVFNICQAVT
SMFNICQAVS

SEQ ID NO: 61598 - protein, 10 aa, synthetic construct
  source 1..10: note = Seed: SVFNICQAVT
SMFNICQAVT

SEQ ID NO: 61599 - protein, 10 aa, synthetic construct
  source 1..10: note = Seed: SVFNICQAVT
SMFNICQAVV

SEQ ID NO: 61600 - protein, 9 aa, synthetic construct
  source 1..9: note = Seed: SVFNICQAV
SMFNICQAY

SEQ ID NO: 61601 - protein, 11 aa, synthetic construct
  source 1..11: note = Seed: SKFPLKLRGTA
SMFPLKLRGTL

SEQ ID NO: 61602 - protein, 11 aa, synthetic construct
  source 1..11: note = Seed: SKFPLKLRGTA
SMFPLKLRGTM

SEQ ID NO: 61603 - protein, 11 aa, synthetic construct
  source 1..11: note = Seed: SWFTALTQHGK
SMFTALTQHGK

SEQ ID NO: 61604 - protein, 11 aa, synthetic construct
  source 1..11: note = Seed: SWFTALTQHGK
SMFTALTQHGR

SEQ ID NO: 61605 - protein, 10 aa, synthetic construct
  source 1..10: note = Seed: SYFTSDYYQL
SMFTSDYYQF

SEQ ID NO: 61606 - protein, 11 aa, synthetic construct
  source 1..11: note = Seed: SYFTSDYYQLY
SMFTSDYYQLY

SEQ ID NO: 61607 - protein, 10 aa, synthetic construct
  source 1..10: note = Seed: SYFTSDYYQL
SMFTSDYYQY

SEQ ID NO: 61608 - protein, 10 aa, synthetic construct
  source 1..10: note = Seed: SHFVNLDNLR
SMFVNLDNLR

SEQ ID NO: 61609 - protein, 9 aa, synthetic construct
  source 1..9: note = Seed: SSGDATTAY
SMGDATTAF

SEQ ID NO: 61610 - protein, 9 aa, synthetic construct
  source 1..9: note = Seed: SSGDATTAY
SMGDATTAM

SEQ ID NO: 61611 - protein, 9 aa, synthetic construct
  source 1..9: note = Seed: SSGDATTAY
SMGDATTAY

SEQ ID NO: 61612 - protein, 10 aa, synthetic construct
  source 1..10: note = Seed: SFGGASCCLY
SMGGASCCLY

SEQ ID NO: 61613 - protein, 10 aa, synthetic construct
  source 1..10: note = Seed: STGSNVFQTR
SMGSNVFQTK

SEQ ID NO: 61614 - protein, 10 aa, synthetic construct
  source 1..10: note = Seed: STGSNVFQTR
SMGSNVFQTR

SEQ ID NO: 61615 - protein, 9 aa, synthetic construct
  source 1..9: note = Seed: SDIDITFLK
SMIDITFLK

SEQ ID NO: 61616 - protein, 10 aa, synthetic construct
  source 1..10: note = Seed: SDIDITFLKK
SMIDITFLKK

SEQ ID NO: 61617 - protein, 10 aa, synthetic construct
  source 1..10: note = Seed: SDIDITFLKK
SMIDITFLKR

SEQ ID NO: 61618 - protein, 10 aa, synthetic construct
  source 1..10: note = Seed: SDIDITFLKK
SMIDITFLKY

SEQ ID NO: 61619 - protein, 9 aa, synthetic construct
  source 1..9: note = Seed: SDIDITFLK
SMIDITFLR

SEQ ID NO: 61620 - protein, 9 aa, synthetic construct
  source 1..9: note = Seed: SDIDITFLK
SMIDITFLY

SEQ ID NO: 61621 - protein, 10 aa, synthetic construct
  source 1..10: note = Seed: SVIDLLLDDF
SMIDLLLDDF

SEQ ID NO: 61622 - protein, 10 aa, synthetic construct
  source 1..10: note = Seed: SVIDLLLDDF
SMIDLLLDDY

SEQ ID NO: 61623 - protein, 10 aa, synthetic construct
  source 1..10: note = Seed: SRIIPARARV
SMIIPARARV

SEQ ID NO: 61624 - protein, 9 aa, synthetic construct
  source 1..9: note = Seed: SRILGAGCF
SMILGAGCF

SEQ ID NO: 61625 - protein, 10 aa, synthetic construct
  source 1..10: note = Seed: SRILGAGCFV
SMILGAGCFA

SEQ ID NO: 61626 - protein, 10 aa, synthetic construct
  source 1..10: note = Seed: SRILGAGCFV
SMILGAGCFI

SEQ ID NO: 61627 - protein, 10 aa, synthetic construct
  source 1..10: note = Seed: SRILGAGCFV
SMILGAGCFL

SEQ ID NO: 61628 - protein, 10 aa, synthetic construct
  source 1..10: note = Seed: SRILGAGCFV
SMILGAGCFV

SEQ ID NO: 61629 - protein, 9 aa, synthetic construct
  source 1..9: note = Seed: SRILGAGCF
SMILGAGCM

SEQ ID NO: 61630 - protein, 9 aa, synthetic construct
  source 1..9: note = Seed: SRILGAGCF
SMILGAGCY

SEQ ID NO: 61631 - protein, 8 aa, synthetic construct
  source 1..8: note = Seed: SIINNTVY
SMINNTVY

SEQ ID NO: 61632 - protein, 10 aa, synthetic construct
  source 1..10: note = Seed: SAINRPQIGV
SMINRPQIGA

SEQ ID NO: 61633 - protein, 10 aa, synthetic construct
  source 1..10: note = Seed: SAINRPQIGV
SMINRPQIGI

SEQ ID NO: 61634 - protein, 10 aa, synthetic construct
  source 1..10: note = Seed: SAINRPQIGV
SMINRPQIGV

SEQ ID NO: 61635 - protein, 9 aa, synthetic construct
  source 1..9: note = Seed: SLINTLNDL
SMINTLNDA

SEQ ID NO: 61636 - protein, 9 aa, synthetic construct
  source 1..9: note = Seed: SLINTLNDL
SMINTLNDI

SEQ ID NO: 61637 - protein, 9 aa, synthetic construct
  source 1..9: note = Seed: SLINTLNDL
SMINTLNDL

SEQ ID NO: 61638 - protein, 10 aa, synthetic construct
  source 1..10: note = Seed: SLINTLNDLN
SMINTLNDLA

SEQ ID NO: 61639 - protein, 10 aa, synthetic construct
  source 1..10: note = Seed: SLINTLNDLN
SMINTLNDLI

SEQ ID NO: 61640 - protein, 10 aa, synthetic construct
  source 1..10: note = Seed: SLINTLNDLN
SMINTLNDLL

SEQ ID NO: 61641 - protein, 10 aa, synthetic construct
  source 1..10: note = Seed: SLINTLNDLN
SMINTLNDLV

SEQ ID NO: 61642 - protein, 9 aa, synthetic construct
  source 1..9: note = Seed: SLINTLNDL
SMINTLNDM

SEQ ID NO: 61643 - protein, 9 aa, synthetic construct
  source 1..9: note = Seed: SLINTLNDL
SMINTLNDV

SEQ ID NO: 61644 - protein, 10 aa, synthetic construct
  source 1..10: note = Seed: SYIVDSVTVK
SMIVDSVTVK

SEQ ID NO: 61645 - protein, 9 aa, synthetic construct
  source 1..9: note = Seed: SKIVQLSEI
SMIVQLSEF

SEQ ID NO: 61646 - protein, 9 aa, synthetic construct
  source 1..9: note = Seed: SKIVQLSEI
SMIVQLSEM

SEQ ID NO: 61647 - protein, 9 aa, synthetic construct
  source 1..9: note = Seed: SKIVQLSEI
SMIVQLSEY

SEQ ID NO: 61648 - protein, 11 aa, synthetic construct
  source 1..11: note = Seed: SFKEELDKYFK
SMKEELDKYFR

SEQ ID NO: 61649 - protein, 9 aa, synthetic construct
  source 1..9: note = Seed: SIKNFKSVL
SMKNFKSVK

SEQ ID NO: 61650 - protein, 9 aa, synthetic construct
  source 1..9: note = Seed: SIKNFKSVL
SMKNFKSVL

SEQ ID NO: 61651 - protein, 10 aa, synthetic construct
  source 1..10: note = Seed: SIKNFKSVLY
SMKNFKSVLF

SEQ ID NO: 61652 - protein, 10 aa, synthetic construct
  source 1..10: note = Seed: SIKNFKSVLY
SMKNFKSVLK

SEQ ID NO: 61653 - protein, 10 aa, synthetic construct
  source 1..10: note = Seed: SIKNFKSVLY
SMKNFKSVLY

SEQ ID NO: 61654 - protein, 11 aa, synthetic construct
  source 1..11: note = Seed: SIKNFKSVLYY
SMKNFKSVLYF

SEQ ID NO: 61655 - protein, 11 aa, synthetic construct
  source 1..11: note = Seed: SIKNFKSVLYY
SMKNFKSVLYK

SEQ ID NO: 61656 - protein, 11 aa, synthetic construct
  source 1..11: note = Seed: SIKNFKSVLYY
SMKNFKSVLYY

SEQ ID NO: 61657 - protein, 9 aa, synthetic construct
  source 1..9: note = Seed: SAKNRARTV
SMKNRARTA

SEQ ID NO: 61658 - protein, 9 aa, synthetic construct
  source 1..9: note = Seed: SAKNRARTV
SMKNRARTF

SEQ ID NO: 61659 - protein, 9 aa, synthetic construct
  source 1..9: note = Seed: SAKNRARTV
SMKNRARTI

SEQ ID NO: 61660 - protein, 9 aa, synthetic construct
  source 1..9: note = Seed: SAKNRARTV
SMKNRARTK

SEQ ID NO: 61661 - protein, 9 aa, synthetic construct
  source 1..9: note = Seed: SAKNRARTV
SMKNRARTL

SEQ ID NO: 61662 - protein, 9 aa, synthetic construct
  source 1..9: note = Seed: SAKNRARTV
SMKNRARTM

SEQ ID NO: 61663 - protein, 9 aa, synthetic construct
  source 1..9: note = Seed: SAKNRARTV
SMKNRARTV

SEQ ID NO: 61664 - protein, 10 aa, synthetic construct
  source 1..10: note = Seed: SAKNRARTVA
SMKNRARTVK

SEQ ID NO: 61665 - protein, 11 aa, synthetic construct
  source 1..11: note = Seed: SKKPRQKRTAT
SMKPRQKRTAF

SEQ ID NO: 61666 - protein, 11 aa, synthetic construct
  source 1..11: note = Seed: SKKPRQKRTAT
SMKPRQKRTAI

SEQ ID NO: 61667 - protein, 11 aa, synthetic construct
  source 1..11: note = Seed: SKKPRQKRTAT
SMKPRQKRTAL

SEQ ID NO: 61668 - protein, 11 aa, synthetic construct
  source 1..11: note = Seed: SKKPRQKRTAT
SMKPRQKRTAM

SEQ ID NO: 61669 - protein, 11 aa, synthetic construct
  source 1..11: note = Seed: SKKPRQKRTAT
SMKPRQKRTAV

SEQ ID NO: 61670 - protein, 9 aa, synthetic construct
  source 1..9: note = Seed: SGKPVPYCY
SMKPVPYCY

SEQ ID NO: 61671 - protein, 11 aa, synthetic construct
  source 1..11: note = Seed: SEKSYELQTPF
SMKSYELQTPF

SEQ ID NO: 61672 - protein, 11 aa, synthetic construct
  source 1..11: note = Seed: SEKSYELQTPF
SMKSYELQTPW

SEQ ID NO: 61673 - protein, 11 aa, synthetic construct
  source 1..11: note = Seed: SEKSYELQTPF
SMKSYELQTPY

SEQ ID NO: 61674 - protein, 10 aa, synthetic construct
  source 1..10: note = Seed: SIKWADNNCY
SMKWADNNCF

SEQ ID NO: 61675 - protein, 10 aa, synthetic construct
  source 1..10: note = Seed: SIKWADNNCY
SMKWADNNCY

SEQ ID NO: 61676 - protein, 9 aa, synthetic construct
  source 1..9: note = Seed: SMKYFVKIG
SMKYFVKIK

SEQ ID NO: 61677 - protein, 10 aa, synthetic construct
  source 1..10: note = Seed: SFLAHIQWMV
SMLAHIQWMA

SEQ ID NO: 61678 - protein, 10 aa, synthetic construct
  source 1..10: note = Seed: SFLAHIQWMV
SMLAHIQWMI

SEQ ID NO: 61679 - protein, 10 aa, synthetic construct
  source 1..10: note = Seed: SFLAHIQWMV
SMLAHIQWML

SEQ ID NO: 61680 - protein, 10 aa, synthetic construct
  source 1..10: note = Seed: SFLAHIQWMV
SMLAHIQWMM

SEQ ID NO: 61681 - protein, 10 aa, synthetic construct
  source 1..10: note = Seed: SFLAHIQWMV
SMLAHIQWMT

SEQ ID NO: 61682 - protein, 10 aa, synthetic construct
  source 1..10: note = Seed: SFLAHIQWMV
SMLAHIQWMV

SEQ ID NO: 61683 - protein, 10 aa, synthetic construct
  source 1..10: note = Seed: SDLATNNLVV
SMLATNNLVL

SEQ ID NO: 61684 - protein, 10 aa, synthetic construct
  source 1..10: note = Seed: SDLATNNLVV
SMLATNNLVV

SEQ ID NO: 61685 - protein, 10 aa, synthetic construct
  source 1..10: note = Seed: SRLDKVEAEV
SMLDKVEAEA

SEQ ID NO: 61686 - protein, 10 aa, synthetic construct
  source 1..10: note = Seed: SRLDKVEAEV
SMLDKVEAEI

SEQ ID NO: 61687 - protein, 10 aa, synthetic construct
  source 1..10: note = Seed: SRLDKVEAEV
SMLDKVEAEL

SEQ ID NO: 61688 - protein, 10 aa, synthetic construct
  source 1..10: note = Seed: SRLDKVEAEV
SMLDKVEAEM

SEQ ID NO: 61689 - protein, 10 aa, synthetic construct
  source 1..10: note = Seed: SRLDKVEAEV
SMLDKVEAEV

SEQ ID NO: 61690 - protein, 9 aa, synthetic construct
  source 1..9: note = Seed: SGLDSLDTY
SMLDSLDTF

SEQ ID NO: 61691 - protein, 9 aa, synthetic construct
  source 1..9: note = Seed: SGLDSLDTY
SMLDSLDTM

SEQ ID NO: 61692 - protein, 9 aa, synthetic construct
  source 1..9: note = Seed: SGLDSLDTY
SMLDSLDTY

SEQ ID NO: 61693 - protein, 11 aa, synthetic construct
  source 1..11: note = Seed: STLEQYVFCTV
SMLEQYVFCTA

SEQ ID NO: 61694 - protein, 11 aa, synthetic construct
  source 1..11: note = Seed: STLEQYVFCTV
SMLEQYVFCTI

SEQ ID NO: 61695 - protein, 11 aa, synthetic construct
  source 1..11: note = Seed: STLEQYVFCTV
SMLEQYVFCTL

SEQ ID NO: 61696 - protein, 11 aa, synthetic construct
  source 1..11: note = Seed: STLEQYVFCTV
SMLEQYVFCTV

SEQ ID NO: 61697 - protein, 10 aa, synthetic construct
  source 1..10: note = Seed: SFLGRYMSAL
SMLGRYMSAA

SEQ ID NO: 61698 - protein, 10 aa, synthetic construct
  source 1..10: note = Seed: SFLGRYMSAL
SMLGRYMSAI

SEQ ID NO: 61699 - protein, 10 aa, synthetic construct
  source 1..10: note = Seed: SFLGRYMSAL
SMLGRYMSAL

SEQ ID NO: 61700 - protein, 10 aa, synthetic construct
  source 1..10: note = Seed: SFLGRYMSAL
SMLGRYMSAV

SEQ ID NO: 61701 - protein, 9 aa, synthetic construct
  source 1..9: note = Seed: SFLGRYMSA
SMLGRYMSF

SEQ ID NO: 61702 - protein, 9 aa, synthetic construct
  source 1..9: note = Seed: SFLGRYMSA
SMLGRYMSK

SEQ ID NO: 61703 - protein, 9 aa, synthetic construct
  source 1..9: note = Seed: SFLGRYMSA
SMLGRYMSM

SEQ ID NO: 61704 - protein, 9 aa, synthetic construct
  source 1..9: note = Seed: SFLGRYMSA
SMLGRYMSY

SEQ ID NO: 61705 - protein, 9 aa, synthetic construct
  source 1..9: note = Seed: SVLLFLAFV
SMLLFLAFA

SEQ ID NO: 61706 - protein, 9 aa, synthetic construct
  source 1..9: note = Seed: SVLLFLAFV
SMLLFLAFI

SEQ ID NO: 61707 - protein, 9 aa, synthetic construct
  source 1..9: note = Seed: SVLLFLAFV
SMLLFLAFL

SEQ ID NO: 61708 - protein, 9 aa, synthetic construct
  source 1..9: note = Seed: SVLLFLAFV
SMLLFLAFM

SEQ ID NO: 61709 - protein, 9 aa, synthetic construct
  source 1..9: note = Seed: SVLLFLAFV
SMLLFLAFT

SEQ ID NO: 61710 - protein, 9 aa, synthetic construct
  source 1..9: note = Seed: SVLLFLAFV
SMLLFLAFV

SEQ ID NO: 61711 - protein, 10 aa, synthetic construct
  source 1..10: note = Seed: SVLLFLAFVV
SMLLFLAFVA

SEQ ID NO: 61712 - protein, 10 aa, synthetic construct
  source 1..10: note = Seed: SVLLFLAFVV
SMLLFLAFVI

SEQ ID NO: 61713 - protein, 10 aa, synthetic construct
  source 1..10: note = Seed: SVLLFLAFVV
SMLLFLAFVL

SEQ ID NO: 61714 - protein, 10 aa, synthetic construct
  source 1..10: note = Seed: SVLLFLAFVV
SMLLFLAFVM

SEQ ID NO: 61715 - protein, 10 aa, synthetic construct
  source 1..10: note = Seed: SVLLFLAFVV
SMLLFLAFVT

SEQ ID NO: 61716 - protein, 10 aa, synthetic construct
  source 1..10: note = Seed: SVLLFLAFVV
SMLLFLAFVV

SEQ ID NO: 61717 - protein, 10 aa, synthetic construct
  source 1..10: note = Seed: SNLLLQYGSF
SMLLLQYGSF

SEQ ID NO: 61718 - protein, 10 aa, synthetic construct
  source 1..10: note = Seed: SNLLLQYGSF
SMLLLQYGSY

SEQ ID NO: 61719 - protein, 9 aa, synthetic construct
  source 1..9: note = Seed: SQLMCQPIL
SMLMCQPIF

SEQ ID NO: 61720 - protein, 10 aa, synthetic construct
  source 1..10: note = Seed: SQLMCQPILL
SMLMCQPILA

SEQ ID NO: 61721 - protein, 10 aa, synthetic construct
  source 1..10: note = Seed: SQLMCQPILL
SMLMCQPILI

SEQ ID NO: 61722 - protein, 10 aa, synthetic construct
  source 1..10: note = Seed: SQLMCQPILL
SMLMCQPILL

SEQ ID NO: 61723 - protein, 11 aa, synthetic construct
  source 1..11: note = Seed: SQLMCQPILLL
SMLMCQPILLL

SEQ ID NO: 61724 - protein, 11 aa, synthetic construct
  source 1..11: note = Seed: SQLMCQPILLL
SMLMCQPILLV

SEQ ID NO: 61725 - protein, 10 aa, synthetic construct
  source 1..10: note = Seed: SQLMCQPILL
SMLMCQPILM

SEQ ID NO: 61726 - protein, 10 aa, synthetic construct
  source 1..10: note = Seed: SQLMCQPILL
SMLMCQPILV

SEQ ID NO: 61727 - protein, 9 aa, synthetic construct
  source 1..9: note = Seed: SQLMCQPIL
SMLMCQPIM

SEQ ID NO: 61728 - protein, 9 aa, synthetic construct
  source 1..9: note = Seed: SQLMCQPIL
SMLMCQPIV

SEQ ID NO: 61729 - protein, 9 aa, synthetic construct
  source 1..9: note = Seed: SQLMCQPIL
SMLMCQPIY

SEQ ID NO: 61730 - protein, 9 aa, synthetic construct
  source 1..9: note = Seed: SLLMPILTL
SMLMPILTA

SEQ ID NO: 61731 - protein, 9 aa, synthetic construct
  source 1..9: note = Seed: SLLMPILTL
SMLMPILTF

SEQ ID NO: 61732 - protein, 9 aa, synthetic construct
  source 1..9: note = Seed: SLLMPILTL
SMLMPILTI

SEQ ID NO: 61733 - protein, 9 aa, synthetic construct
  source 1..9: note = Seed: SLLMPILTL
SMLMPILTL

SEQ ID NO: 61734 - protein, 9 aa, synthetic construct
  source 1..9: note = Seed: SLLMPILTL
SMLMPILTM

SEQ ID NO: 61735 - protein, 9 aa, synthetic construct
  source 1..9: note = Seed: SLLMPILTL
SMLMPILTT

SEQ ID NO: 61736 - protein, 9 aa, synthetic construct
  source 1..9: note = Seed: SLLMPILTL
SMLMPILTV

SEQ ID NO: 61737 - protein, 9 aa, synthetic construct
  source 1..9: note = Seed: SLLMPILTL
SMLMPILTW

SEQ ID NO: 61738 - protein, 9 aa, synthetic construct
  source 1..9: note = Seed: SLLMPILTL
SMLMPILTY

SEQ ID NO: 61739 - protein, 10 aa, synthetic construct
  source 1..10: note = Seed: SWLMWLIINL
SMLMWLIINA

SEQ ID NO: 61740 - protein, 10 aa, synthetic construct
  source 1..10: note = Seed: SWLMWLIINL
SMLMWLIINI

SEQ ID NO: 61741 - protein, 10 aa, synthetic construct
  source 1..10: note = Seed: SWLMWLIINL
SMLMWLIINL

SEQ ID NO: 61742 - protein, 11 aa, synthetic construct
  source 1..11: note = Seed: SWLMWLIINLV
SMLMWLIINLV

SEQ ID NO: 61743 - protein, 10 aa, synthetic construct
  source 1..10: note = Seed: SWLMWLIINL
SMLMWLIINM

SEQ ID NO: 61744 - protein, 10 aa, synthetic construct
  source 1..10: note = Seed: SWLMWLIINL
SMLMWLIINT

SEQ ID NO: 61745 - protein, 10 aa, synthetic construct
  source 1..10: note = Seed: SWLMWLIINL
SMLMWLIINV

SEQ ID NO: 61746 - protein, 10 aa, synthetic construct
  source 1..10: note = Seed: SDLNDFVSDA
SMLNDFVSDA

SEQ ID NO: 61747 - protein, 10 aa, synthetic construct
  source 1..10: note = Seed: SDLNDFVSDA
SMLNDFVSDI

SEQ ID NO: 61748 - protein, 10 aa, synthetic construct
  source 1..10: note = Seed: SDLNDFVSDA
SMLNDFVSDL

SEQ ID NO: 61749 - protein, 10 aa, synthetic construct
  source 1..10: note = Seed: SDLNDFVSDA
SMLNDFVSDV

SEQ ID NO: 61750 - protein, 9 aa, synthetic construct
  source 1..9: note = Seed: SVLNDILSR
SMLNDILSK

SEQ ID NO: 61751 - protein, 9 aa, synthetic construct
  source 1..9: note = Seed: SVLNDILSR
SMLNDILSR

SEQ ID NO: 61752 - protein, 10 aa, synthetic construct
  source 1..10: note = Seed: SVLNDILSRL
SMLNDILSRA

SEQ ID NO: 61753 - protein, 10 aa, synthetic construct
  source 1..10: note = Seed: SVLNDILSRL
SMLNDILSRI

SEQ ID NO: 61754 - protein, 10 aa, synthetic construct
  source 1..10: note = Seed: SVLNDILSRL
SMLNDILSRL

SEQ ID NO: 61755 - protein, 10 aa, synthetic construct
  source 1..10: note = Seed: SVLNDILSRL
SMLNDILSRM

SEQ ID NO: 61756 - protein, 10 aa, synthetic construct
  source 1..10: note = Seed: SVLNDILSRL
SMLNDILSRV

SEQ ID NO: 61757 - protein, 9 aa, synthetic construct
  source 1..9: note = Seed: SFLPGVYSV
SMLPGVYSA

SEQ ID NO: 61758 - protein, 9 aa, synthetic construct
  source 1..9: note = Seed: SFLPGVYSV
SMLPGVYSC

SEQ ID NO: 61759 - protein, 9 aa, synthetic construct
  source 1..9: note = Seed: SFLPGVYSV
SMLPGVYSF

SEQ ID NO: 61760 - protein, 9 aa, synthetic construct
  source 1..9: note = Seed: SFLPGVYSV
SMLPGVYSI

SEQ ID NO: 61761 - protein, 9 aa, synthetic construct
  source 1..9: note = Seed: SFLPGVYSV
SMLPGVYSL

SEQ ID NO: 61762 - protein, 9 aa, synthetic construct
  source 1..9: note = Seed: SFLPGVYSV
SMLPGVYSM

SEQ ID NO: 61763 - protein, 9 aa, synthetic construct
  source 1..9: note = Seed: SFLPGVYSV
SMLPGVYSS

SEQ ID NO: 61764 - protein, 9 aa, synthetic construct
  source 1..9: note = Seed: SFLPGVYSV
SMLPGVYST

SEQ ID NO: 61765 - protein, 9 aa, synthetic construct
  source 1..9: note = Seed: SFLPGVYSV
SMLPGVYSV

SEQ ID NO: 61766 - protein, 9 aa, synthetic construct
  source 1..9: note = Seed: SFLPGVYSV
SMLPGVYSW

SEQ ID NO: 61767 - protein, 11 aa, synthetic construct
  source 1..11: note = Seed: SLLSKGRLIIR
SMLSKGRLIIR

SEQ ID NO: 61768 - protein, 9 aa, synthetic construct
  source 1..9: note = Seed: SLLSKGRLI
SMLSKGRLV

SEQ ID NO: 61769 - protein, 11 aa, synthetic construct
  source 1..11: note = Seed: SELVIGAVILR
SMLVIGAVILR

SEQ ID NO: 61770 - protein, 9 aa, synthetic construct
  source 1..9: note = Seed: SLLVLVQST
SMLVLVQSA

SEQ ID NO: 61771 - protein, 9 aa, synthetic construct
  source 1..9: note = Seed: SLLVLVQST
SMLVLVQSI

SEQ ID NO: 61772 - protein, 9 aa, synthetic construct
  source 1..9: note = Seed: SLLVLVQST
SMLVLVQSL

SEQ ID NO: 61773 - protein, 9 aa, synthetic construct
  source 1..9: note = Seed: SLLVLVQST
SMLVLVQSM

SEQ ID NO: 61774 - protein, 9 aa, synthetic construct
  source 1..9: note = Seed: SLLVLVQST
SMLVLVQSV

SEQ ID NO: 61775 - protein, 9 aa, synthetic construct
  source 1..9: note = Seed: SVLYYQNNV
SMLYYQNNA

SEQ ID NO: 61776 - protein, 9 aa, synthetic construct
  source 1..9: note = Seed: SVLYYQNNV
SMLYYQNNI

SEQ ID NO: 61777 - protein, 9 aa, synthetic construct
  source 1..9: note = Seed: SVLYYQNNV
SMLYYQNNL

SEQ ID NO: 61778 - protein, 9 aa, synthetic construct
  source 1..9: note = Seed: SVLYYQNNV
SMLYYQNNM

SEQ ID NO: 61779 - protein, 9 aa, synthetic construct
  source 1..9: note = Seed: SVLYYQNNV
SMLYYQNNV

SEQ ID NO: 61780 - protein, 10 aa, synthetic construct
  source 1..10: note = Seed: SVLYYQNNVF
SMLYYQNNVF

SEQ ID NO: 61781 - protein, 11 aa, synthetic construct
  source 1..11: note = Seed: SVLYYQNNVFM
SMLYYQNNVFF

SEQ ID NO: 61782 - protein, 11 aa, synthetic construct
  source 1..11: note = Seed: SVLYYQNNVFM
SMLYYQNNVFW

SEQ ID NO: 61783 - protein, 10 aa, synthetic construct
  source 1..10: note = Seed: SVLYYQNNVF
SMLYYQNNVM

SEQ ID NO: 61784 - protein, 10 aa, synthetic construct
  source 1..10: note = Seed: SVLYYQNNVF
SMLYYQNNVY

SEQ ID NO: 61785 - protein, 9 aa, synthetic construct
  source 1..9: note = Seed: SQMEIDFLE
SMMEIDFLA

SEQ ID NO: 61786 - protein, 9 aa, synthetic construct
  source 1..9: note = Seed: SQMEIDFLE
SMMEIDFLC

SEQ ID NO: 61787 - protein, 10 aa, synthetic construct
  source 1..10: note = Seed: SQMEIDFLEL
SMMEIDFLEA

SEQ ID NO: 61788 - protein, 10 aa, synthetic construct
  source 1..10: note = Seed: SQMEIDFLEL
SMMEIDFLEC

SEQ ID NO: 61789 - protein, 10 aa, synthetic construct
  source 1..10: note = Seed: SQMEIDFLEL
SMMEIDFLEF

SEQ ID NO: 61790 - protein, 10 aa, synthetic construct
  source 1..10: note = Seed: SQMEIDFLEL
SMMEIDFLEI

SEQ ID NO: 61791 - protein, 10 aa, synthetic construct
  source 1..10: note = Seed: SQMEIDFLEL
SMMEIDFLEL

SEQ ID NO: 61792 - protein, 11 aa, synthetic construct
  source 1..11: note = Seed: SQMEIDFLELA
SMMEIDFLELA

SEQ ID NO: 61793 - protein, 11 aa, synthetic construct
  source 1..11: note = Seed: SQMEIDFLELA
SMMEIDFLELC

SEQ ID NO: 61794 - protein, 11 aa, synthetic construct
  source 1..11: note = Seed: SQMEIDFLELA
SMMEIDFLELD

SEQ ID NO: 61795 - protein, 11 aa, synthetic construct
  source 1..11: note = Seed: SQMEIDFLELA
SMMEIDFLELE

SEQ ID NO: 61796 - protein, 11 aa, synthetic construct
  source 1..11: note = Seed: SQMEIDFLELA
SMMEIDFLELF

SEQ ID NO: 61797 - protein, 11 aa, synthetic construct
  source 1..11: note = Seed: SQMEIDFLELA
SMMEIDFLELG

SEQ ID NO: 61798 - protein, 11 aa, synthetic construct
  source 1..11: note = Seed: SQMEIDFLELA
SMMEIDFLELH

SEQ ID NO: 61799 - protein, 11 aa, synthetic construct
  source 1..11: note = Seed: SQMEIDFLELA
SMMEIDFLELI

SEQ ID NO: 61800 - protein, 11 aa, synthetic construct
  source 1..11: note = Seed: SQMEIDFLELA
SMMEIDFLELK

SEQ ID NO: 61801 - protein, 11 aa, synthetic construct
  source 1..11: note = Seed: SQMEIDFLELA
SMMEIDFLELL

SEQ ID NO: 61802 - protein, 11 aa, synthetic construct
  source 1..11: note = Seed: SQMEIDFLELA
SMMEIDFLELM

SEQ ID NO: 61803 - protein, 11 aa, synthetic construct
  source 1..11: note = Seed: SQMEIDFLELA
SMMEIDFLELN

SEQ ID NO: 61804 - protein, 11 aa, synthetic construct
  source 1..11: note = Seed: SQMEIDFLELA
SMMEIDFLELP

SEQ ID NO: 61805 - protein, 11 aa, synthetic construct
  source 1..11: note = Seed: SQMEIDFLELA
SMMEIDFLELQ

SEQ ID NO: 61806 - protein, 11 aa, synthetic construct
  source 1..11: note = Seed: SQMEIDFLELA
SMMEIDFLELR

SEQ ID NO: 61807 - protein, 11 aa, synthetic construct
  source 1..11: note = Seed: SQMEIDFLELA
SMMEIDFLELS

SEQ ID NO: 61808 - protein, 11 aa, synthetic construct
  source 1..11: note = Seed: SQMEIDFLELA
SMMEIDFLELT

SEQ ID NO: 61809 - protein, 11 aa, synthetic construct
  source 1..11: note = Seed: SQMEIDFLELA
SMMEIDFLELV

SEQ ID NO: 61810 - protein, 11 aa, synthetic construct
  source 1..11: note = Seed: SQMEIDFLELA
SMMEIDFLELW

SEQ ID NO: 61811 - protein, 11 aa, synthetic construct
  source 1..11: note = Seed: SQMEIDFLELA
SMMEIDFLELY

SEQ ID NO: 61812 - protein, 10 aa, synthetic construct
  source 1..10: note = Seed: SQMEIDFLEL
SMMEIDFLEM

SEQ ID NO: 61813 - protein, 10 aa, synthetic construct
  source 1..10: note = Seed: SQMEIDFLEL
SMMEIDFLES

SEQ ID NO: 61814 - protein, 10 aa, synthetic construct
  source 1..10: note = Seed: SQMEIDFLEL
SMMEIDFLET

SEQ ID NO: 61815 - protein, 10 aa, synthetic construct
  source 1..10: note = Seed: SQMEIDFLEL
SMMEIDFLEV

SEQ ID NO: 61816 - protein, 10 aa, synthetic construct
  source 1..10: note = Seed: SQMEIDFLEL
SMMEIDFLEY

SEQ ID NO: 61817 - protein, 9 aa, synthetic construct
  source 1..9: note = Seed: SQMEIDFLE
SMMEIDFLF

SEQ ID NO: 61818 - protein, 9 aa, synthetic construct
  source 1..9: note = Seed: SQMEIDFLE
SMMEIDFLI

SEQ ID NO: 61819 - protein, 9 aa, synthetic construct
  source 1..9: note = Seed: SQMEIDFLE
SMMEIDFLL

SEQ ID NO: 61820 - protein, 9 aa, synthetic construct
  source 1..9: note = Seed: SQMEIDFLE
SMMEIDFLM

SEQ ID NO: 61821 - protein, 9 aa, synthetic construct
  source 1..9: note = Seed: SQMEIDFLE
SMMEIDFLS

SEQ ID NO: 61822 - protein, 9 aa, synthetic construct
  source 1..9: note = Seed: SQMEIDFLE
SMMEIDFLT

SEQ ID NO: 61823 - protein, 9 aa, synthetic construct
  source 1..9: note = Seed: SQMEIDFLE
SMMEIDFLV

SEQ ID NO: 61824 - protein, 9 aa, synthetic construct
  source 1..9: note = Seed: SMMGFKMNY
SMMGFKMNF

SEQ ID NO: 61825 - protein, 9 aa, synthetic construct
  source 1..9: note = Seed: SMMGFKMNY
SMMGFKMNI

SEQ ID NO: 61826 - protein, 9 aa, synthetic construct
  source 1..9: note = Seed: SMMGFKMNY
SMMGFKMNK

SEQ ID NO: 61827 - protein, 9 aa, synthetic construct
  source 1..9: note = Seed: SMMGFKMNY
SMMGFKMNL

SEQ ID NO: 61828 - protein, 9 aa, synthetic construct
  source 1..9: note = Seed: SMMGFKMNY
SMMGFKMNM

SEQ ID NO: 61829 - protein, 9 aa, synthetic construct
  source 1..9: note = Seed: SMMGFKMNY
SMMGFKMNR

SEQ ID NO: 61830 - protein, 9 aa, synthetic construct
  source 1..9: note = Seed: SMMGFKMNY
SMMGFKMNW

SEQ ID NO: 61831 - protein, 10 aa, synthetic construct
  source 1..10: note = Seed: SMMGFKMNYQ
SMMGFKMNYF

SEQ ID NO: 61832 - protein, 10 aa, synthetic construct
  source 1..10: note = Seed: SMMGFKMNYQ
SMMGFKMNYK

SEQ ID NO: 61833 - protein, 10 aa, synthetic construct
  source 1..10: note = Seed: SMMGFKMNYQ
SMMGFKMNYM

SEQ ID NO: 61834 - protein, 11 aa, synthetic construct
  source 1..11: note = Seed: SMMGFKMNYQV
SMMGFKMNYQA

SEQ ID NO: 61835 - protein, 11 aa, synthetic construct
  source 1..11: note = Seed: SMMGFKMNYQV
SMMGFKMNYQI

SEQ ID NO: 61836 - protein, 11 aa, synthetic construct
  source 1..11: note = Seed: SMMGFKMNYQV
SMMGFKMNYQL

SEQ ID NO: 61837 - protein, 11 aa, synthetic construct
  source 1..11: note = Seed: SMMGFKMNYQV
SMMGFKMNYQM

SEQ ID NO: 61838 - protein, 10 aa, synthetic construct
  source 1..10: note = Seed: SMMGFKMNYQ
SMMGFKMNYR

SEQ ID NO: 61839 - protein, 10 aa, synthetic construct
  source 1..10: note = Seed: SMMGFKMNYQ
SMMGFKMNYY

SEQ ID NO: 61840 - protein, 10 aa, synthetic construct
  source 1..10: note = Seed: SMMILSDDAV
SMMILSDDAL

SEQ ID NO: 61841 - protein, 9 aa, synthetic construct
  source 1..9: note = Seed: SMMILSDDA
SMMILSDDI

SEQ ID NO: 61842 - protein, 9 aa, synthetic construct
  source 1..9: note = Seed: SMMILSDDA
SMMILSDDL

SEQ ID NO: 61843 - protein, 9 aa, synthetic construct
  source 1..9: note = Seed: SMMILSDDA
SMMILSDDV

SEQ ID NO: 61844 - protein, 8 aa, synthetic construct
  source 1..8: note = Seed: SAMQTMLF
SMMQTMLF

SEQ ID NO: 61845 - protein, 9 aa, synthetic construct
  source 1..9: note = Seed: SAMQTMLFT
SMMQTMLFA

SEQ ID NO: 61846 - protein, 9 aa, synthetic construct
  source 1..9: note = Seed: SAMQTMLFT
SMMQTMLFI

SEQ ID NO: 61847 - protein, 9 aa, synthetic construct
  source 1..9: note = Seed: SAMQTMLFT
SMMQTMLFL

SEQ ID NO: 61848 - protein, 9 aa, synthetic construct
  source 1..9: note = Seed: SAMQTMLFT
SMMQTMLFM

SEQ ID NO: 61849 - protein, 9 aa, synthetic construct
  source 1..9: note = Seed: SAMQTMLFT
SMMQTMLFT

SEQ ID NO: 61850 - protein, 10 aa, synthetic construct
  source 1..10: note = Seed: SAMQTMLFTM
SMMQTMLFTA

SEQ ID NO: 61851 - protein, 10 aa, synthetic construct
  source 1..10: note = Seed: SAMQTMLFTM
SMMQTMLFTC

SEQ ID NO: 61852 - protein, 10 aa, synthetic construct
  source 1..10: note = Seed: SAMQTMLFTM
SMMQTMLFTF

SEQ ID NO: 61853 - protein, 10 aa, synthetic construct
  source 1..10: note = Seed: SAMQTMLFTM
SMMQTMLFTI

SEQ ID NO: 61854 - protein, 10 aa, synthetic construct
  source 1..10: note = Seed: SAMQTMLFTM
SMMQTMLFTL

SEQ ID NO: 61855 - protein, 10 aa, synthetic construct
  source 1..10: note = Seed: SAMQTMLFTM
SMMQTMLFTM

SEQ ID NO: 61856 - protein, 10 aa, synthetic construct
  source 1..10: note = Seed: SAMQTMLFTM
SMMQTMLFTS

SEQ ID NO: 61857 - protein, 10 aa, synthetic construct
  source 1..10: note = Seed: SAMQTMLFTM
SMMQTMLFTT

SEQ ID NO: 61858 - protein, 10 aa, synthetic construct
  source 1..10: note = Seed: SAMQTMLFTM
SMMQTMLFTV

SEQ ID NO: 61859 - protein, 10 aa, synthetic construct
  source 1..10: note = Seed: SAMQTMLFTM
SMMQTMLFTW

SEQ ID NO: 61860 - protein, 10 aa, synthetic construct
  source 1..10: note = Seed: SAMQTMLFTM
SMMQTMLFTY

SEQ ID NO: 61861 - protein, 9 aa, synthetic construct
  source 1..9: note = Seed: SAMQTMLFT
SMMQTMLFV

SEQ ID NO: 61862 - protein, 8 aa, synthetic construct
  source 1..8: note = Seed: SAMQTMLF
SMMQTMLY

SEQ ID NO: 61863 - protein, 11 aa, synthetic construct
  source 1..11: note = Seed: SKMSDVKCTSV
SMMSDVKCTSA

SEQ ID NO: 61864 - protein, 11 aa, synthetic construct
  source 1..11: note = Seed: SKMSDVKCTSV
SMMSDVKCTSI

SEQ ID NO: 61865 - protein, 11 aa, synthetic construct
  source 1..11: note = Seed: SKMSDVKCTSV
SMMSDVKCTSL

SEQ ID NO: 61866 - protein, 11 aa, synthetic construct
  source 1..11: note = Seed: SKMSDVKCTSV
SMMSDVKCTSV

SEQ ID NO: 61867 - protein, 11 aa, synthetic construct
  source 1..11: note = Seed: STMTNRQFHQK
SMMTNRQFHQK

SEQ ID NO: 61868 - protein, 11 aa, synthetic construct
  source 1..11: note = Seed: STMTNRQFHQK
SMMTNRQFHQR

SEQ ID NO: 61869 - protein, 9 aa, synthetic construct
  source 1..9: note = Seed: STMTNRQFH
SMMTNRQFK

SEQ ID NO: 61870 - protein, 8 aa, synthetic construct
  source 1..8: note = Seed: SAMVRMYI
SMMVRMYI

SEQ ID NO: 61871 - protein, 9 aa, synthetic construct
  source 1..9: note = Seed: SAMVRMYIF
SMMVRMYIA

SEQ ID NO: 61872 - protein, 9 aa, synthetic construct
  source 1..9: note = Seed: SAMVRMYIF
SMMVRMYIF

SEQ ID NO: 61873 - protein, 9 aa, synthetic construct
  source 1..9: note = Seed: SAMVRMYIF
SMMVRMYII

SEQ ID NO: 61874 - protein, 9 aa, synthetic construct
  source 1..9: note = Seed: SAMVRMYIF
SMMVRMYIL

SEQ ID NO: 61875 - protein, 9 aa, synthetic construct
  source 1..9: note = Seed: SAMVRMYIF
SMMVRMYIM

SEQ ID NO: 61876 - protein, 9 aa, synthetic construct
  source 1..9: note = Seed: SAMVRMYIF
SMMVRMYIV

SEQ ID NO: 61877 - protein, 9 aa, synthetic construct
  source 1..9: note = Seed: SAMVRMYIF
SMMVRMYIW

SEQ ID NO: 61878 - protein, 9 aa, synthetic construct
  source 1..9: note = Seed: SAMVRMYIF
SMMVRMYIY

SEQ ID NO: 61879 - protein, 8 aa, synthetic construct
  source 1..8: note = Seed: SAMVRMYI
SMMVRMYL

SEQ ID NO: 61880 - protein, 8 aa, synthetic construct
  source 1..8: note = Seed: SAMVRMYI
SMMVRMYM

SEQ ID NO: 61881 - protein, 10 aa, synthetic construct
  source 1..10: note = Seed: SSNFGAISSV
SMNFGAISSA

SEQ ID NO: 61882 - protein, 10 aa, synthetic construct
  source 1..10: note = Seed: SSNFGAISSV
SMNFGAISSI

SEQ ID NO: 61883 - protein, 10 aa, synthetic construct
  source 1..10: note = Seed: SSNFGAISSV
SMNFGAISSL

SEQ ID NO: 61884 - protein, 10 aa, synthetic construct
  source 1..10: note = Seed: SSNFGAISSV
SMNFGAISSM

SEQ ID NO: 61885 - protein, 10 aa, synthetic construct
  source 1..10: note = Seed: SSNFGAISSV
SMNFGAISST

SEQ ID NO: 61886 - protein, 10 aa, synthetic construct
  source 1..10: note = Seed: SSNFGAISSV
SMNFGAISSV

SEQ ID NO: 61887 - protein, 11 aa, synthetic construct
  source 1..11: note = Seed: SLNGVTLIGEA
SMNGVTLIGEV

SEQ ID NO: 61888 - protein, 9 aa, synthetic construct
  source 1..9: note = Seed: SANNCTFEY
SMNNCTFEF

SEQ ID NO: 61889 - protein, 9 aa, synthetic construct
  source 1..9: note = Seed: SANNCTFEY
SMNNCTFEK

SEQ ID NO: 61890 - protein, 9 aa, synthetic construct
  source 1..9: note = Seed: SANNCTFEY
SMNNCTFEL

SEQ ID NO: 61891 - protein, 9 aa, synthetic construct
  source 1..9: note = Seed: SANNCTFEY
SMNNCTFEM

SEQ ID NO: 61892 - protein, 9 aa, synthetic construct
  source 1..9: note = Seed: SANNCTFEY
SMNNCTFEW

SEQ ID NO: 61893 - protein, 9 aa, synthetic construct
  source 1..9: note = Seed: SANNCTFEY
SMNNCTFEY

SEQ ID NO: 61894 - protein, 10 aa, synthetic construct
  source 1..10: note = Seed: SANNCTFEYV
SMNNCTFEYA

SEQ ID NO: 61895 - protein, 10 aa, synthetic construct
  source 1..10: note = Seed: SANNCTFEYV
SMNNCTFEYI

SEQ ID NO: 61896 - protein, 10 aa, synthetic construct
  source 1..10: note = Seed: SANNCTFEYV
SMNNCTFEYL

SEQ ID NO: 61897 - protein, 10 aa, synthetic construct
  source 1..10: note = Seed: SANNCTFEYV
SMNNCTFEYM

SEQ ID NO: 61898 - protein, 10 aa, synthetic construct
  source 1..10: note = Seed: SANNCTFEYV
SMNNCTFEYV

SEQ ID NO: 61899 - protein, 9 aa, synthetic construct
  source 1..9: note = Seed: SSNVANYQK
SMNVANYQK

SEQ ID NO: 61900 - protein, 9 aa, synthetic construct
  source 1..9: note = Seed: SSNVANYQK
SMNVANYQR

SEQ ID NO: 61901 - protein, 9 aa, synthetic construct
  source 1..9: note = Seed: SLPGVFCGV
SMPGVFCGA

SEQ ID NO: 61902 - protein, 9 aa, synthetic construct
  source 1..9: note = Seed: SLPGVFCGV
SMPGVFCGI

SEQ ID NO: 61903 - protein, 9 aa, synthetic construct
  source 1..9: note = Seed: SLPGVFCGV
SMPGVFCGL

SEQ ID NO: 61904 - protein, 9 aa, synthetic construct
  source 1..9: note = Seed: SLPGVFCGV
SMPGVFCGM

SEQ ID NO: 61905 - protein, 9 aa, synthetic construct
  source 1..9: note = Seed: SLPGVFCGV
SMPGVFCGV

SEQ ID NO: 61906 - protein, 9 aa, synthetic construct
  source 1..9: note = Seed: SAPHGVVFL
SMPHGVVFL

SEQ ID NO: 61907 - protein, 9 aa, synthetic construct
  source 1..9: note = Seed: SSQAWQPGV
SMQAWQPGA

SEQ ID NO: 61908 - protein, 9 aa, synthetic construct
  source 1..9: note = Seed: SSQAWQPGV
SMQAWQPGI

SEQ ID NO: 61909 - protein, 9 aa, synthetic construct
  source 1..9: note = Seed: SSQAWQPGV
SMQAWQPGL

SEQ ID NO: 61910 - protein, 9 aa, synthetic construct
  source 1..9: note = Seed: SSQAWQPGV
SMQAWQPGM

SEQ ID NO: 61911 - protein, 9 aa, synthetic construct
  source 1..9: note = Seed: SSQAWQPGV
SMQAWQPGV

SEQ ID NO: 61912 - protein, 11 aa, synthetic construct
  source 1..11: note = Seed: SSQAWQPGVAM
SMQAWQPGVAF

SEQ ID NO: 61913 - protein, 11 aa, synthetic construct
  source 1..11: note = Seed: SSQAWQPGVAM
SMQAWQPGVAM

SEQ ID NO: 61914 - protein, 11 aa, synthetic construct
  source 1..11: note = Seed: SSQAWQPGVAM
SMQAWQPGVAY

SEQ ID NO: 61915 - protein, 8 aa, synthetic construct
  source 1..8: note = Seed: SLQFKRPI
SMQFKRPL

SEQ ID NO: 61916 - protein, 10 aa, synthetic construct
  source 1..10: note = Seed: SMQGAVDINK
SMQGAVDINR

SEQ ID NO: 61917 - protein, 10 aa, synthetic construct
  source 1..10: note = Seed: SRQRLTKYTM
SMQRLTKYTF

SEQ ID NO: 61918 - protein, 10 aa, synthetic construct
  source 1..10: note = Seed: SRQRLTKYTM
SMQRLTKYTY

SEQ ID NO: 61919 - protein, 10 aa, synthetic construct
  source 1..10: note = Seed: SLQTYVTQQL
SMQTYVTQQL

SEQ ID NO: 61920 - protein, 11 aa, synthetic construct
  source 1..11: note = Seed: SLQTYVTQQLI
SMQTYVTQQLV

SEQ ID NO: 61921 - protein, 10 aa, synthetic construct
  source 1..10: note = Seed: SLQTYVTQQL
SMQTYVTQQV

SEQ ID NO: 61922 - protein, 9 aa, synthetic construct
  source 1..9: note = Seed: SFRLFARTR
SMRLFARTA

SEQ ID NO: 61923 - protein, 9 aa, synthetic construct
  source 1..9: note = Seed: SFRLFARTR
SMRLFARTK

SEQ ID NO: 61924 - protein, 9 aa, synthetic construct
  source 1..9: note = Seed: SFRLFARTR
SMRLFARTR

SEQ ID NO: 61925 - protein, 10 aa, synthetic construct
  source 1..10: note = Seed: SFRLFARTRS
SMRLFARTRK

SEQ ID NO: 61926 - protein, 9 aa, synthetic construct
  source 1..9: note = Seed: SFRLFARTR
SMRLFARTV

SEQ ID NO: 61927 - protein, 9 aa, synthetic construct
  source 1..9: note = Seed: SSRLSFKEL
SMRLSFKEA

SEQ ID NO: 61928 - protein, 9 aa, synthetic construct
  source 1..9: note = Seed: SSRLSFKEL
SMRLSFKEK

SEQ ID NO: 61929 - protein, 9 aa, synthetic construct
  source 1..9: note = Seed: SLRPDTRYV
SMRPDTRYA

SEQ ID NO: 61930 - protein, 9 aa, synthetic construct
  source 1..9: note = Seed: SLRPDTRYV
SMRPDTRYI

SEQ ID NO: 61931 - protein, 9 aa, synthetic construct
  source 1..9: note = Seed: SLRPDTRYV
SMRPDTRYK

SEQ ID NO: 61932 - protein, 9 aa, synthetic construct
  source 1..9: note = Seed: SLRPDTRYV
SMRPDTRYV

SEQ ID NO: 61933 - protein, 10 aa, synthetic construct
  source 1..10: note = Seed: SQRVAGDSGF
SMRVAGDSGF

SEQ ID NO: 61934 - protein, 10 aa, synthetic construct
  source 1..10: note = Seed: SQRVAGDSGF
SMRVAGDSGM

SEQ ID NO: 61935 - protein, 10 aa, synthetic construct
  source 1..10: note = Seed: SQRVAGDSGF
SMRVAGDSGY

SEQ ID NO: 61936 - protein, 9 aa, synthetic construct
  source 1..9: note = Seed: SVRVLQKAA
SMRVLQKAK

SEQ ID NO: 61937 - protein, 10 aa, synthetic construct
  source 1..10: note = Seed: SGRWVLNNDY
SMRWVLNNDY

SEQ ID NO: 61938 - protein, 9 aa, synthetic construct
  source 1..9: note = Seed: SPRWYFYYL
SMRWYFYYL

SEQ ID NO: 61939 - protein, 10 aa, synthetic construct
  source 1..10: note = Seed: SPRWYFYYLG
SMRWYFYYLF

SEQ ID NO: 61940 - protein, 10 aa, synthetic construct
  source 1..10: note = Seed: SPRWYFYYLG
SMRWYFYYLK

SEQ ID NO: 61941 - protein, 10 aa, synthetic construct
  source 1..10: note = Seed: SPRWYFYYLG
SMRWYFYYLL

SEQ ID NO: 61942 - protein, 10 aa, synthetic construct
  source 1..10: note = Seed: SPRWYFYYLG
SMRWYFYYLM

SEQ ID NO: 61943 - protein, 10 aa, synthetic construct
  source 1..10: note = Seed: SPRWYFYYLG
SMRWYFYYLR

SEQ ID NO: 61944 - protein, 9 aa, synthetic construct
  source 1..9: note = Seed: STSAFVETV
SMSAFVETA

SEQ ID NO: 61945 - protein, 9 aa, synthetic construct
  source 1..9: note = Seed: STSAFVETV
SMSAFVETI

SEQ ID NO: 61946 - protein, 9 aa, synthetic construct
  source 1..9: note = Seed: STSAFVETV
SMSAFVETL

SEQ ID NO: 61947 - protein, 9 aa, synthetic construct
  source 1..9: note = Seed: STSAFVETV
SMSAFVETM

SEQ ID NO: 61948 - protein, 9 aa, synthetic construct
  source 1..9: note = Seed: STSAFVETV
SMSAFVETT

SEQ ID NO: 61949 - protein, 9 aa, synthetic construct
  source 1..9: note = Seed: STSAFVETV
SMSAFVETV

SEQ ID NO: 61950 - protein, 10 aa, synthetic construct
  source 1..10: note = Seed: STSAFVETVK
SMSAFVETVK

SEQ ID NO: 61951 - protein, 10 aa, synthetic construct
  source 1..10: note = Seed: STSAFVETVK
SMSAFVETVR

SEQ ID NO: 61952 - protein, 9 aa, synthetic construct
  source 1..9: note = Seed: SSSDNIALL
SMSDNIALA

SEQ ID NO: 61953 - protein, 9 aa, synthetic construct
  source 1..9: note = Seed: SSSDNIALL
SMSDNIALC

SEQ ID NO: 61954 - protein, 9 aa, synthetic construct
  source 1..9: note = Seed: SSSDNIALL
SMSDNIALI

SEQ ID NO: 61955 - protein, 9 aa, synthetic construct
  source 1..9: note = Seed: SSSDNIALL
SMSDNIALL

SEQ ID NO: 61956 - protein, 10 aa, synthetic construct
  source 1..10: note = Seed: SSSDNIALLV
SMSDNIALLV

SEQ ID NO: 61957 - protein, 10 aa, synthetic construct
  source 1..10: note = Seed: SSSDNIALLV
SMSDNIALLY

SEQ ID NO: 61958 - protein, 9 aa, synthetic construct
  source 1..9: note = Seed: SSSDNIALL
SMSDNIALM

SEQ ID NO: 61959 - protein, 9 aa, synthetic construct
  source 1..9: note = Seed: SSSDNIALL
SMSDNIALT

SEQ ID NO: 61960 - protein, 9 aa, synthetic construct
  source 1..9: note = Seed: SSSDNIALL
SMSDNIALV

SEQ ID NO: 61961 - protein, 10 aa, synthetic construct
  source 1..10: note = Seed: SLSEQLRKQI
SMSEQLRKQV

SEQ ID NO: 61962 - protein, 10 aa, synthetic construct
  source 1..10: note = Seed: SASFSTFKCY
SMSFSTFKCF

SEQ ID NO: 61963 - protein, 10 aa, synthetic construct
  source 1..10: note = Seed: SASFSTFKCY
SMSFSTFKCW

SEQ ID NO: 61964 - protein, 10 aa, synthetic construct
  source 1..10: note = Seed: SASFSTFKCY
SMSFSTFKCY

SEQ ID NO: 61965 - protein, 9 aa, synthetic construct
  source 1..9: note = Seed: SKSLTENKY
SMSLTENKF

SEQ ID NO: 61966 - protein, 10 aa, synthetic construct
  source 1..10: note = Seed: SASVYYSQLM
SMSVYYSQLF

SEQ ID NO: 61967 - protein, 10 aa, synthetic construct
  source 1..10: note = Seed: SASVYYSQLM
SMSVYYSQLW

SEQ ID NO: 61968 - protein, 10 aa, synthetic construct
  source 1..10: note = Seed: SASVYYSQLM
SMSVYYSQLY

SEQ ID NO: 61969 - protein, 9 aa, synthetic construct
  source 1..9: note = Seed: SNSWLMWLI
SMSWLMWLV

SEQ ID NO: 61970 - protein, 9 aa, synthetic construct
  source 1..9: note = Seed: SSTCMMCYK
SMTCMMCYK

SEQ ID NO: 61971 - protein, 10 aa, synthetic construct
  source 1..10: note = Seed: SSTCMMCYKR
SMTCMMCYKK

SEQ ID NO: 61972 - protein, 10 aa, synthetic construct
  source 1..10: note = Seed: SSTCMMCYKR
SMTCMMCYKR

SEQ ID NO: 61973 - protein, 9 aa, synthetic construct
  source 1..9: note = Seed: SSTCMMCYK
SMTCMMCYR

SEQ ID NO: 61974 - protein, 10 aa, synthetic construct
  source 1..10: note = Seed: SLTENKYSQL
SMTENKYSQV

SEQ ID NO: 61975 - protein, 10 aa, synthetic construct
  source 1..10: note = Seed: SETKCTLKSF
SMTKCTLKSF

SEQ ID NO: 61976 - protein, 11 aa, synthetic construct
  source 1..11: note = Seed: SFTRGVYYPDK
SMTRGVYYPDR

SEQ ID NO: 61977 - protein, 9 aa, synthetic construct
  source 1..9: note = Seed: SVTSNYSGV
SMTSNYSGI

SEQ ID NO: 61978 - protein, 9 aa, synthetic construct
  source 1..9: note = Seed: SVTSNYSGV
SMTSNYSGL

SEQ ID NO: 61979 - protein, 9 aa, synthetic construct
  source 1..9: note = Seed: SVTSNYSGV
SMTSNYSGV

SEQ ID NO: 61980 - protein, 10 aa, synthetic construct
  source 1..10: note = Seed: SVTSNYSGVV
SMTSNYSGVV

SEQ ID NO: 61981 - protein, 9 aa, synthetic construct
  source 1..9: note = Seed: SVTTEILPV
SMTTEILPA

SEQ ID NO: 61982 - protein, 9 aa, synthetic construct
  source 1..9: note = Seed: SVTTEILPV
SMTTEILPI

SEQ ID NO: 61983 - protein, 9 aa, synthetic construct
  source 1..9: note = Seed: SVTTEILPV
SMTTEILPL

SEQ ID NO: 61984 - protein, 9 aa, synthetic construct
  source 1..9: note = Seed: SVTTEILPV
SMTTEILPV

SEQ ID NO: 61985 - protein, 9 aa, synthetic construct
  source 1..9: note = Seed: STTTNIVTR
SMTTNIVTK

SEQ ID NO: 61986 - protein, 11 aa, synthetic construct
  source 1..11: note = Seed: SDTYACWHHSI
SMTYACWHHSF

SEQ ID NO: 61987 - protein, 11 aa, synthetic construct
  source 1..11: note = Seed: SDTYACWHHSI
SMTYACWHHSI

SEQ ID NO: 61988 - protein, 11 aa, synthetic construct
  source 1..11: note = Seed: SDTYACWHHSI
SMTYACWHHSL

SEQ ID NO: 61989 - protein, 11 aa, synthetic construct
  source 1..11: note = Seed: SDTYACWHHSI
SMTYACWHHSW

SEQ ID NO: 61990 - protein, 9 aa, synthetic construct
  source 1..9: note = Seed: SIVCRFDTR
SMVCRFDTR

SEQ ID NO: 61991 - protein, 10 aa, synthetic construct
  source 1..10: note = Seed: SIVCRFDTRV
SMVCRFDTRV

SEQ ID NO: 61992 - protein, 9 aa, synthetic construct
  source 1..9: note = Seed: SKVGGNYNY
SMVGGNYNF

SEQ ID NO: 61993 - protein, 9 aa, synthetic construct
  source 1..9: note = Seed: SKVGGNYNY
SMVGGNYNM

SEQ ID NO: 61994 - protein, 9 aa, synthetic construct
  source 1..9: note = Seed: SKVGGNYNY
SMVGGNYNY

SEQ ID NO: 61995 - protein, 11 aa, synthetic construct
  source 1..11: note = Seed: SVVLLSVLQQL
SMVLLSVLQQI

SEQ ID NO: 61996 - protein, 11 aa, synthetic construct
  source 1..11: note = Seed: SVVLLSVLQQL
SMVLLSVLQQL

SEQ ID NO: 61997 - protein, 11 aa, synthetic construct
  source 1..11: note = Seed: SVVLLSVLQQL
SMVLLSVLQQV

SEQ ID NO: 61998 - protein, 10 aa, synthetic construct
  source 1..10: note = Seed: SSVLNDILSR
SMVLNDILSK

SEQ ID NO: 61999 - protein, 11 aa, synthetic construct
  source 1..11: note = Seed: SSVLNDILSRL
SMVLNDILSRA

SEQ ID NO: 62000 - protein, 11 aa, synthetic construct
  source 1..11: note = Seed: SSVLNDILSRL
SMVLNDILSRI

SEQ ID NO: 62001 - protein, 11 aa, synthetic construct
  source 1..11: note = Seed: SSVLNDILSRL
SMVLNDILSRL

SEQ ID NO: 62002 - protein, 11 aa, synthetic construct
  source 1..11: note = Seed: SSVLNDILSRL
SMVLNDILSRV

SEQ ID NO: 62003 - protein, 9 aa, synthetic construct
  source 1..9: note = Seed: SAVLQSGFR
SMVLQSGFR

SEQ ID NO: 62004 - protein, 10 aa, synthetic construct
  source 1..10: note = Seed: SAVLQSGFRK
SMVLQSGFRK

SEQ ID NO: 62005 - protein, 10 aa, synthetic construct
  source 1..10: note = Seed: SAVLQSGFRK
SMVLQSGFRR

SEQ ID NO: 62006 - protein, 10 aa, synthetic construct
  source 1..10: note = Seed: SWVMRIMTWL
SMVMRIMTWA

SEQ ID NO: 62007 - protein, 10 aa, synthetic construct
  source 1..10: note = Seed: SWVMRIMTWL
SMVMRIMTWI

SEQ ID NO: 62008 - protein, 10 aa, synthetic construct
  source 1..10: note = Seed: SWVMRIMTWL
SMVMRIMTWL

SEQ ID NO: 62009 - protein, 10 aa, synthetic construct
  source 1..10: note = Seed: SWVMRIMTWL
SMVMRIMTWV

SEQ ID NO: 62010 - protein, 9 aa, synthetic construct
  source 1..9: note = Seed: SGVTRELMR
SMVTRELMR

SEQ ID NO: 62011 - protein, 9 aa, synthetic construct
  source 1..9: note = Seed: SLVVRCSFY
SMVVRCSFF

SEQ ID NO: 62012 - protein, 9 aa, synthetic construct
  source 1..9: note = Seed: SLVVRCSFY
SMVVRCSFY

SEQ ID NO: 62013 - protein, 8 aa, synthetic construct
  source 1..8: note = Seed: SLVVRCSF
SMVVRCSL

SEQ ID NO: 62014 - protein, 9 aa, synthetic construct
  source 1..9: note = Seed: SGVYQCAMR
SMVYQCAMR

SEQ ID NO: 62015 - protein, 10 aa, synthetic construct
  source 1..10: note = Seed: SLWVYKQFDT
SMWVYKQFDA

SEQ ID NO: 62016 - protein, 10 aa, synthetic construct
  source 1..10: note = Seed: SLWVYKQFDT
SMWVYKQFDI

SEQ ID NO: 62017 - protein, 10 aa, synthetic construct
  source 1..10: note = Seed: SLWVYKQFDT
SMWVYKQFDL

SEQ ID NO: 62018 - protein, 10 aa, synthetic construct
  source 1..10: note = Seed: SLWVYKQFDT
SMWVYKQFDV

SEQ ID NO: 62019 - protein, 10 aa, synthetic construct
  source 1..10: note = Seed: SDYDYYRYNL
SMYDYYRYNF

SEQ ID NO: 62020 - protein, 10 aa, synthetic construct
  source 1..10: note = Seed: SDYDYYRYNL
SMYDYYRYNW

SEQ ID NO: 62021 - protein, 9 aa, synthetic construct
  source 1..9: note = Seed: SFYEDFLEY
SMYEDFLEA

SEQ ID NO: 62022 - protein, 9 aa, synthetic construct
  source 1..9: note = Seed: SFYEDFLEY
SMYEDFLEF

SEQ ID NO: 62023 - protein, 9 aa, synthetic construct
  source 1..9: note = Seed: SFYEDFLEY
SMYEDFLEH

SEQ ID NO: 62024 - protein, 9 aa, synthetic construct
  source 1..9: note = Seed: SFYEDFLEY
SMYEDFLEI

SEQ ID NO: 62025 - protein, 9 aa, synthetic construct
  source 1..9: note = Seed: SFYEDFLEY
SMYEDFLEL

SEQ ID NO: 62026 - protein, 9 aa, synthetic construct
  source 1..9: note = Seed: SFYEDFLEY
SMYEDFLEM

SEQ ID NO: 62027 - protein, 9 aa, synthetic construct
  source 1..9: note = Seed: SFYEDFLEY
SMYEDFLEV

SEQ ID NO: 62028 - protein, 9 aa, synthetic construct
  source 1..9: note = Seed: SFYEDFLEY
SMYEDFLEW

SEQ ID NO: 62029 - protein, 9 aa, synthetic construct
  source 1..9: note = Seed: SFYEDFLEY
SMYEDFLEY

SEQ ID NO: 62030 - protein, 9 aa, synthetic construct
  source 1..9: note = Seed: SAYENFNQH
SMYENFNQF

SEQ ID NO: 62031 - protein, 9 aa, synthetic construct
  source 1..9: note = Seed: SAYENFNQH
SMYENFNQI

SEQ ID NO: 62032 - protein, 9 aa, synthetic construct
  source 1..9: note = Seed: SAYENFNQH
SMYENFNQL

SEQ ID NO: 62033 - protein, 9 aa, synthetic construct
  source 1..9: note = Seed: SAYENFNQH
SMYENFNQM

SEQ ID NO: 62034 - protein, 9 aa, synthetic construct
  source 1..9: note = Seed: SAYENFNQH
SMYENFNQV

SEQ ID NO: 62035 - protein, 9 aa, synthetic construct
  source 1..9: note = Seed: SAYENFNQH
SMYENFNQW

SEQ ID NO: 62036 - protein, 9 aa, synthetic construct
  source 1..9: note = Seed: SAYENFNQH
SMYENFNQY

SEQ ID NO: 62037 - protein, 10 aa, synthetic construct
  source 1..10: note = Seed: SSYIVDSVTV
SMYIVDSVTF

SEQ ID NO: 62038 - protein, 10 aa, synthetic construct
  source 1..10: note = Seed: SSYIVDSVTV
SMYIVDSVTI

SEQ ID NO: 62039 - protein, 10 aa, synthetic construct
  source 1..10: note = Seed: SSYIVDSVTV
SMYIVDSVTL

SEQ ID NO: 62040 - protein, 11 aa, synthetic construct
  source 1..11: note = Seed: SSYIVDSVTVK
SMYIVDSVTVK

SEQ ID NO: 62041 - protein, 10 aa, synthetic construct
  source 1..10: note = Seed: SSYIVDSVTV
SMYIVDSVTW

SEQ ID NO: 62042 - protein, 9 aa, synthetic construct
  source 1..9: note = Seed: SYYKLGASQ
SMYKLGASF

SEQ ID NO: 62043 - protein, 9 aa, synthetic construct
  source 1..9: note = Seed: SYYKLGASQ
SMYKLGASM

SEQ ID NO: 62044 - protein, 10 aa, synthetic construct
  source 1..10: note = Seed: SYYKLGASQR
SMYKLGASQR

SEQ ID NO: 62045 - protein, 9 aa, synthetic construct
  source 1..9: note = Seed: SYYKLGASQ
SMYKLGASY

SEQ ID NO: 62046 - protein, 9 aa, synthetic construct
  source 1..9: note = Seed: SNYLKRRVV
SMYLKRRVA

SEQ ID NO: 62047 - protein, 9 aa, synthetic construct
  source 1..9: note = Seed: SNYLKRRVV
SMYLKRRVF

SEQ ID NO: 62048 - protein, 9 aa, synthetic construct
  source 1..9: note = Seed: SNYLKRRVV
SMYLKRRVI

SEQ ID NO: 62049 - protein, 9 aa, synthetic construct
  source 1..9: note = Seed: SNYLKRRVV
SMYLKRRVL

SEQ ID NO: 62050 - protein, 9 aa, synthetic construct
  source 1..9: note = Seed: SNYLKRRVV
SMYLKRRVM

SEQ ID NO: 62051 - protein, 9 aa, synthetic construct
  source 1..9: note = Seed: SNYLKRRVV
SMYLKRRVV

SEQ ID NO: 62052 - protein, 10 aa, synthetic construct
  source 1..10: note = Seed: SNYLKRRVVF
SMYLKRRVVF

SEQ ID NO: 62053 - protein, 10 aa, synthetic construct
  source 1..10: note = Seed: SNYLKRRVVF
SMYLKRRVVY

SEQ ID NO: 62054 - protein, 9 aa, synthetic construct
  source 1..9: note = Seed: SPYNSQNAV
SMYNSQNAY

SEQ ID NO: 62055 - protein, 10 aa, synthetic construct
  source 1..10: note = Seed: SRYRIGNYKL
SMYRIGNYKF

SEQ ID NO: 62056 - protein, 9 aa, synthetic construct
  source 1..9: note = Seed: SYYSLLMPI
SMYSLLMPA

SEQ ID NO: 62057 - protein, 9 aa, synthetic construct
  source 1..9: note = Seed: SYYSLLMPI
SMYSLLMPC

SEQ ID NO: 62058 - protein, 9 aa, synthetic construct
  source 1..9: note = Seed: SYYSLLMPI
SMYSLLMPF

SEQ ID NO: 62059 - protein, 9 aa, synthetic construct
  source 1..9: note = Seed: SYYSLLMPI
SMYSLLMPG

SEQ ID NO: 62060 - protein, 9 aa, synthetic construct
  source 1..9: note = Seed: SYYSLLMPI
SMYSLLMPH

SEQ ID NO: 62061 - protein, 9 aa, synthetic construct
  source 1..9: note = Seed: SYYSLLMPI
SMYSLLMPI

SEQ ID NO: 62062 - protein, 10 aa, synthetic construct
  source 1..10: note = Seed: SYYSLLMPIL
SMYSLLMPIF

SEQ ID NO: 62063 - protein, 9 aa, synthetic construct
  source 1..9: note = Seed: SYYSLLMPI
SMYSLLMPK

SEQ ID NO: 62064 - protein, 9 aa, synthetic construct
  source 1..9: note = Seed: SYYSLLMPI
SMYSLLMPL

SEQ ID NO: 62065 - protein, 9 aa, synthetic construct
  source 1..9: note = Seed: SYYSLLMPI
SMYSLLMPM

SEQ ID NO: 62066 - protein, 9 aa, synthetic construct
  source 1..9: note = Seed: SYYSLLMPI
SMYSLLMPS

SEQ ID NO: 62067 - protein, 9 aa, synthetic construct
  source 1..9: note = Seed: SYYSLLMPI
SMYSLLMPT

SEQ ID NO: 62068 - protein, 9 aa, synthetic construct
  source 1..9: note = Seed: SYYSLLMPI
SMYSLLMPV

SEQ ID NO: 62069 - protein, 9 aa, synthetic construct
  source 1..9: note = Seed: SYYSLLMPI
SMYSLLMPW

SEQ ID NO: 62070 - protein, 9 aa, synthetic construct
  source 1..9: note = Seed: SYYSLLMPI
SMYSLLMPY

SEQ ID NO: 62071 - protein, 9 aa, synthetic construct
  source 1..9: note = Seed: SLYVKPGGT
SMYVKPGGA

SEQ ID NO: 62072 - protein, 9 aa, synthetic construct
  source 1..9: note = Seed: SLYVKPGGT
SMYVKPGGI

SEQ ID NO: 62073 - protein, 9 aa, synthetic construct
  source 1..9: note = Seed: SLYVKPGGT
SMYVKPGGV

SEQ ID NO: 62074 - protein, 9 aa, synthetic construct
  source 1..9: note = Seed: SLYVNKHAF
SMYVNKHAF

SEQ ID NO: 62075 - protein, 9 aa, synthetic construct
  source 1..9: note = Seed: SLYVNKHAF
SMYVNKHAL

SEQ ID NO: 62076 - protein, 9 aa, synthetic construct
  source 1..9: note = Seed: SLYVNKHAF
SMYVNKHAM

SEQ ID NO: 62077 - protein, 9 aa, synthetic construct
  source 1..9: note = Seed: SLYVNKHAF
SMYVNKHAW

SEQ ID NO: 62078 - protein, 9 aa, synthetic construct
  source 1..9: note = Seed: SLYVNKHAF
SMYVNKHAY

SEQ ID NO: 62079 - protein, 10 aa, synthetic construct
  source 1..10: note = Seed: SFYVYANGGK
SMYVYANGGR

SEQ ID NO: 62080 - protein, 9 aa, synthetic construct
  source 1..9: note = Seed: SFYYVWKSY
SMYYVWKSF

SEQ ID NO: 62081 - protein, 9 aa, synthetic construct
  source 1..9: note = Seed: SFYYVWKSY
SMYYVWKSL

SEQ ID NO: 62082 - protein, 9 aa, synthetic construct
  source 1..9: note = Seed: SFYYVWKSY
SMYYVWKSM

SEQ ID NO: 62083 - protein, 9 aa, synthetic construct
  source 1..9: note = Seed: SFYYVWKSY
SMYYVWKSY

SEQ ID NO: 62084 - protein, 10 aa, synthetic construct
  source 1..10: note = Seed: SFYYVWKSYV
SMYYVWKSYF

SEQ ID NO: 62085 - protein, 10 aa, synthetic construct
  source 1..10: note = Seed: SFYYVWKSYV
SMYYVWKSYM

SEQ ID NO: 62086 - protein, 10 aa, synthetic construct
  source 1..10: note = Seed: SFYYVWKSYV
SMYYVWKSYW

SEQ ID NO: 62087 - protein, 10 aa, synthetic construct
  source 1..10: note = Seed: SIAIPTNFTI
SNAIPTNFTF

SEQ ID NO: 62088 - protein, 10 aa, synthetic construct
  source 1..10: note = Seed: SIAIPTNFTI
SNAIPTNFTW

SEQ ID NO: 62089 - protein, 10 aa, synthetic construct
  source 1..10: note = Seed: SSANNCTFEY
SNANNCTFEK

SEQ ID NO: 62090 - protein, 10 aa, synthetic construct
  source 1..10: note = Seed: SSANNCTFEY
SNANNCTFEW

SEQ ID NO: 62091 - protein, 10 aa, synthetic construct
  source 1..10: note = Seed: SQAWQPGVAM
SNAWQPGVAY

SEQ ID NO: 62092 - protein, 11 aa, synthetic construct
  source 1..11: note = Seed: SFCAFAVDAAK
SNCAFAVDAAR

SEQ ID NO: 62093 - protein, 9 aa, synthetic construct
  source 1..9: note = Seed: SSDNIALLV
SNDNIALLY

SEQ ID NO: 62094 - protein, 10 aa, synthetic construct
  source 1..10: note = Seed: SYELQTPFEI
SNELQTPFEL

SEQ ID NO: 62095 - protein, 10 aa, synthetic construct
  source 1..10: note = Seed: SYELQTPFEI
SNELQTPFEW

SEQ ID NO: 62096 - protein, 9 aa, synthetic construct
  source 1..9: note = Seed: SGFAAYSRY
SNFAAYSRF

SEQ ID NO: 62097 - protein, 9 aa, synthetic construct
  source 1..9: note = Seed: SGFAAYSRY
SNFAAYSRY

SEQ ID NO: 62098 - protein, 9 aa, synthetic construct
  source 1..9: note = Seed: SAFAMMFVK
SNFAMMFVK

SEQ ID NO: 62099 - protein, 9 aa, synthetic construct
  source 1..9: note = Seed: SAFAMMFVK
SNFAMMFVR

SEQ ID NO: 62100 - protein, 10 aa, synthetic construct
  source 1..10: note = Seed: SYFIASFRLF
SNFIASFRLF

SEQ ID NO: 62101 - protein, 10 aa, synthetic construct
  source 1..10: note = Seed: SYFIASFRLF
SNFIASFRLY

SEQ ID NO: 62102 - protein, 9 aa, synthetic construct
  source 1..9: note = Seed: SYFIASFRL
SNFIASFRY

SEQ ID NO: 62103 - protein, 11 aa, synthetic construct
  source 1..11: note = Seed: SKFPLKLRGTA
SNFPLKLRGTL

SEQ ID NO: 62104 - protein, 11 aa, synthetic construct
  source 1..11: note = Seed: SKFPLKLRGTA
SNFPLKLRGTM

SEQ ID NO: 62105 - protein, 10 aa, synthetic construct
  source 1..10: note = Seed: SYFTSDYYQL
SNFTSDYYQF

SEQ ID NO: 62106 - protein, 9 aa, synthetic construct
  source 1..9: note = Seed: SDIDITFLK
SNIDITFLK

SEQ ID NO: 62107 - protein, 9 aa, synthetic construct
  source 1..9: note = Seed: SDIDITFLK
SNIDITFLR

SEQ ID NO: 62108 - protein, 11 aa, synthetic construct
  source 1..11: note = Seed: SKKPRQKRTAT
SNKPRQKRTAF

SEQ ID NO: 62109 - protein, 11 aa, synthetic construct
  source 1..11: note = Seed: SKKPRQKRTAT
SNKPRQKRTAI

SEQ ID NO: 62110 - protein, 11 aa, synthetic construct
  source 1..11: note = Seed: SKKPRQKRTAT
SNKPRQKRTAL

SEQ ID NO: 62111 - protein, 11 aa, synthetic construct
  source 1..11: note = Seed: SKKPRQKRTAT
SNKPRQKRTAM

SEQ ID NO: 62112 - protein, 11 aa, synthetic construct
  source 1..11: note = Seed: SKKPRQKRTAT
SNKPRQKRTAV

SEQ ID NO: 62113 - protein, 11 aa, synthetic construct
  source 1..11: note = Seed: SEKSYELQTPF
SNKSYELQTPW

SEQ ID NO: 62114 - protein, 10 aa, synthetic construct
  source 1..10: note = Seed: SFLAHIQWMV
SNLAHIQWMA

SEQ ID NO: 62115 - protein, 10 aa, synthetic construct
  source 1..10: note = Seed: SFLAHIQWMV
SNLAHIQWMI

SEQ ID NO: 62116 - protein, 10 aa, synthetic construct
  source 1..10: note = Seed: SFLAHIQWMV
SNLAHIQWML

SEQ ID NO: 62117 - protein, 10 aa, synthetic construct
  source 1..10: note = Seed: SFLAHIQWMV
SNLAHIQWMV

SEQ ID NO: 62118 - protein, 10 aa, synthetic construct
  source 1..10: note = Seed: SFLGRYMSAL
SNLGRYMSAV

SEQ ID NO: 62119 - protein, 10 aa, synthetic construct
  source 1..10: note = Seed: SVLLFLAFVV
SNLLFLAFVI

SEQ ID NO: 62120 - protein, 10 aa, synthetic construct
  source 1..10: note = Seed: SVLLFLAFVV
SNLLFLAFVL

SEQ ID NO: 62121 - protein, 10 aa, synthetic construct
  source 1..10: note = Seed: SVLLFLAFVV
SNLLFLAFVV

SEQ ID NO: 62122 - protein, 10 aa, synthetic construct
  source 1..10: note = Seed: SQLMCQPILL
SNLMCQPILA

SEQ ID NO: 62123 - protein, 10 aa, synthetic construct
  source 1..10: note = Seed: SQLMCQPILL
SNLMCQPILI

SEQ ID NO: 62124 - protein, 10 aa, synthetic construct
  source 1..10: note = Seed: SQLMCQPILL
SNLMCQPILL

SEQ ID NO: 62125 - protein, 10 aa, synthetic construct
  source 1..10: note = Seed: SQLMCQPILL
SNLMCQPILV

SEQ ID NO: 62126 - protein, 9 aa, synthetic construct
  source 1..9: note = Seed: SLLMPILTL
SNLMPILTF

SEQ ID NO: 62127 - protein, 9 aa, synthetic construct
  source 1..9: note = Seed: SLLMPILTL
SNLMPILTY

SEQ ID NO: 62128 - protein, 10 aa, synthetic construct
  source 1..10: note = Seed: SWLMWLIINL
SNLMWLIINA

SEQ ID NO: 62129 - protein, 10 aa, synthetic construct
  source 1..10: note = Seed: SWLMWLIINL
SNLMWLIINI

SEQ ID NO: 62130 - protein, 10 aa, synthetic construct
  source 1..10: note = Seed: SWLMWLIINL
SNLMWLIINL

SEQ ID NO: 62131 - protein, 10 aa, synthetic construct
  source 1..10: note = Seed: SWLMWLIINL
SNLMWLIINM

SEQ ID NO: 62132 - protein, 10 aa, synthetic construct
  source 1..10: note = Seed: SWLMWLIINL
SNLMWLIINT

SEQ ID NO: 62133 - protein, 10 aa, synthetic construct
  source 1..10: note = Seed: SWLMWLIINL
SNLMWLIINV

SEQ ID NO: 62134 - protein, 10 aa, synthetic construct
  source 1..10: note = Seed: SDLNDFVSDA
SNLNDFVSDI

SEQ ID NO: 62135 - protein, 10 aa, synthetic construct
  source 1..10: note = Seed: SDLNDFVSDA
SNLNDFVSDL

SEQ ID NO: 62136 - protein, 10 aa, synthetic construct
  source 1..10: note = Seed: SDLNDFVSDA
SNLNDFVSDV

SEQ ID NO: 62137 - protein, 10 aa, synthetic construct
  source 1..10: note = Seed: SVLNDILSRL
SNLNDILSRA

SEQ ID NO: 62138 - protein, 10 aa, synthetic construct
  source 1..10: note = Seed: SVLNDILSRL
SNLNDILSRI

SEQ ID NO: 62139 - protein, 10 aa, synthetic construct
  source 1..10: note = Seed: SVLNDILSRL
SNLNDILSRL

SEQ ID NO: 62140 - protein, 10 aa, synthetic construct
  source 1..10: note = Seed: SVLNDILSRL
SNLNDILSRV

SEQ ID NO: 62141 - protein, 11 aa, synthetic construct
  source 1..11: note = Seed: SELVIGAVILR
SNLVIGAVILR

SEQ ID NO: 62142 - protein, 10 aa, synthetic construct
  source 1..10: note = Seed: SVLYYQNNVF
SNLYYQNNVF

SEQ ID NO: 62143 - protein, 11 aa, synthetic construct
  source 1..11: note = Seed: SVLYYQNNVFM
SNLYYQNNVFF

SEQ ID NO: 62144 - protein, 11 aa, synthetic construct
  source 1..11: note = Seed: SVLYYQNNVFM
SNLYYQNNVFW

SEQ ID NO: 62145 - protein, 10 aa, synthetic construct
  source 1..10: note = Seed: SVLYYQNNVF
SNLYYQNNVY

SEQ ID NO: 62146 - protein, 9 aa, synthetic construct
  source 1..9: note = Seed: SMMGFKMNY
SNMGFKMNR

SEQ ID NO: 62147 - protein, 9 aa, synthetic construct
  source 1..9: note = Seed: SMMGFKMNY
SNMGFKMNY

SEQ ID NO: 62148 - protein, 10 aa, synthetic construct
  source 1..10: note = Seed: SMMGFKMNYQ
SNMGFKMNYK

SEQ ID NO: 62149 - protein, 10 aa, synthetic construct
  source 1..10: note = Seed: SMMGFKMNYQ
SNMGFKMNYR

SEQ ID NO: 62150 - protein, 10 aa, synthetic construct
  source 1..10: note = Seed: SMMGFKMNYQ
SNMGFKMNYY

SEQ ID NO: 62151 - protein, 10 aa, synthetic construct
  source 1..10: note = Seed: SAMQTMLFTM
SNMQTMLFTA

SEQ ID NO: 62152 - protein, 10 aa, synthetic construct
  source 1..10: note = Seed: SAMQTMLFTM
SNMQTMLFTI

SEQ ID NO: 62153 - protein, 10 aa, synthetic construct
  source 1..10: note = Seed: SAMQTMLFTM
SNMQTMLFTL

SEQ ID NO: 62154 - protein, 10 aa, synthetic construct
  source 1..10: note = Seed: SAMQTMLFTM
SNMQTMLFTV

SEQ ID NO: 62155 - protein, 10 aa, synthetic construct
  source 1..10: note = Seed: SAMQTMLFTM
SNMQTMLFTW

SEQ ID NO: 62156 - protein, 10 aa, synthetic construct
  source 1..10: note = Seed: SAMQTMLFTM
SNMQTMLFTY

SEQ ID NO: 62157 - protein, 9 aa, synthetic construct
  source 1..9: note = Seed: SAMVRMYIF
SNMVRMYIL

SEQ ID NO: 62158 - protein, 9 aa, synthetic construct
  source 1..9: note = Seed: SAMVRMYIF
SNMVRMYIM

SEQ ID NO: 62159 - protein, 9 aa, synthetic construct
  source 1..9: note = Seed: SANNCTFEY
SNNNCTFEY

SEQ ID NO: 62160 - protein, 9 aa, synthetic construct
  source 1..9: note = Seed: SFRLFARTR
SNRLFARTK

SEQ ID NO: 62161 - protein, 10 aa, synthetic construct
  source 1..10: note = Seed: SPRWYFYYLG
SNRWYFYYLF

SEQ ID NO: 62162 - protein, 10 aa, synthetic construct
  source 1..10: note = Seed: SPRWYFYYLG
SNRWYFYYLK

SEQ ID NO: 62163 - protein, 10 aa, synthetic construct
  source 1..10: note = Seed: SPRWYFYYLG
SNRWYFYYLL

SEQ ID NO: 62164 - protein, 10 aa, synthetic construct
  source 1..10: note = Seed: SPRWYFYYLG
SNRWYFYYLM

SEQ ID NO: 62165 - protein, 10 aa, synthetic construct
  source 1..10: note = Seed: STSAFVETVK
SNSAFVETVR

SEQ ID NO: 62166 - protein, 10 aa, synthetic construct
  source 1..10: note = Seed: SSSDNIALLV
SNSDNIALLY

SEQ ID NO: 62167 - protein, 10 aa, synthetic construct
  source 1..10: note = Seed: SASVYYSQLM
SNSVYYSQLF

SEQ ID NO: 62168 - protein, 10 aa, synthetic construct
  source 1..10: note = Seed: SASVYYSQLM
SNSVYYSQLW

SEQ ID NO: 62169 - protein, 10 aa, synthetic construct
  source 1..10: note = Seed: SASVYYSQLM
SNSVYYSQLY

SEQ ID NO: 62170 - protein, 10 aa, synthetic construct
  source 1..10: note = Seed: SSTCMMCYKR
SNTCMMCYKR

SEQ ID NO: 62171 - protein, 9 aa, synthetic construct
  source 1..9: note = Seed: SSTCMMCYK
SNTCMMCYR

SEQ ID NO: 62172 - protein, 11 aa, synthetic construct
  source 1..11: note = Seed: SDTYACWHHSI
SNTYACWHHSF

SEQ ID NO: 62173 - protein, 11 aa, synthetic construct
  source 1..11: note = Seed: SDTYACWHHSI
SNTYACWHHSI

SEQ ID NO: 62174 - protein, 11 aa, synthetic construct
  source 1..11: note = Seed: SDTYACWHHSI
SNTYACWHHSL

SEQ ID NO: 62175 - protein, 11 aa, synthetic construct
  source 1..11: note = Seed: SDTYACWHHSI
SNTYACWHHSW

SEQ ID NO: 62176 - protein, 11 aa, synthetic construct
  source 1..11: note = Seed: SVVLLSVLQQL
SNVLLSVLQQI

SEQ ID NO: 62177 - protein, 11 aa, synthetic construct
  source 1..11: note = Seed: SVVLLSVLQQL
SNVLLSVLQQV

SEQ ID NO: 62178 - protein, 10 aa, synthetic construct
  source 1..10: note = Seed: SSVLNDILSR
SNVLNDILSK

SEQ ID NO: 62179 - protein, 11 aa, synthetic construct
  source 1..11: note = Seed: SSVLNDILSRL
SNVLNDILSRV

SEQ ID NO: 62180 - protein, 10 aa, synthetic construct
  source 1..10: note = Seed: SAVLQSGFRK
SNVLQSGFRK

SEQ ID NO: 62181 - protein, 10 aa, synthetic construct
  source 1..10: note = Seed: SWVMRIMTWL
SNVMRIMTWV

SEQ ID NO: 62182 - protein, 10 aa, synthetic construct
  source 1..10: note = Seed: SDYDYYRYNL
SNYDYYRYNF

SEQ ID NO: 62183 - protein, 9 aa, synthetic construct
  source 1..9: note = Seed: SFYEDFLEY
SNYEDFLEF

SEQ ID NO: 62184 - protein, 9 aa, synthetic construct
  source 1..9: note = Seed: SFYEDFLEY
SNYEDFLEY

SEQ ID NO: 62185 - protein, 9 aa, synthetic construct
  source 1..9: note = Seed: SAYENFNQH
SNYENFNQF

SEQ ID NO: 62186 - protein, 9 aa, synthetic construct
  source 1..9: note = Seed: SAYENFNQH
SNYENFNQY

SEQ ID NO: 62187 - protein, 10 aa, synthetic construct
  source 1..10: note = Seed: SSYIVDSVTV
SNYIVDSVTF

SEQ ID NO: 62188 - protein, 10 aa, synthetic construct
  source 1..10: note = Seed: SSYIVDSVTV
SNYIVDSVTI

SEQ ID NO: 62189 - protein, 10 aa, synthetic construct
  source 1..10: note = Seed: SSYIVDSVTV
SNYIVDSVTL

SEQ ID NO: 62190 - protein, 10 aa, synthetic construct
  source 1..10: note = Seed: SSYIVDSVTV
SNYIVDSVTW

SEQ ID NO: 62191 - protein, 10 aa, synthetic construct
  source 1..10: note = Seed: SRYRIGNYKL
SNYRIGNYKF

SEQ ID NO: 62192 - protein, 9 aa, synthetic construct
  source 1..9: note = Seed: SYYSLLMPI
SNYSLLMPF

SEQ ID NO: 62193 - protein, 10 aa, synthetic construct
  source 1..10: note = Seed: SYYSLLMPIL
SNYSLLMPIF

SEQ ID NO: 62194 - protein, 9 aa, synthetic construct
  source 1..9: note = Seed: SYYSLLMPI
SNYSLLMPM

SEQ ID NO: 62195 - protein, 9 aa, synthetic construct
  source 1..9: note = Seed: SYYSLLMPI
SNYSLLMPY

SEQ ID NO: 62196 - protein, 10 aa, synthetic construct
  source 1..10: note = Seed: SFYYVWKSYV
SNYYVWKSYF

SEQ ID NO: 62197 - protein, 10 aa, synthetic construct
  source 1..10: note = Seed: SFYYVWKSYV
SNYYVWKSYW

SEQ ID NO: 62198 - protein, 10 aa, synthetic construct
  source 1..10: note = Seed: SIAIPTNFTI
SPAIPTNFTF

SEQ ID NO: 62199 - protein, 10 aa, synthetic construct
  source 1..10: note = Seed: SIAIPTNFTI
SPAIPTNFTW

SEQ ID NO: 62200 - protein, 10 aa, synthetic construct
  source 1..10: note = Seed: SSANNCTFEY
SPANNCTFEF

SEQ ID NO: 62201 - protein, 10 aa, synthetic construct
  source 1..10: note = Seed: SSANNCTFEY
SPANNCTFEK

SEQ ID NO: 62202 - protein, 10 aa, synthetic construct
  source 1..10: note = Seed: SSANNCTFEY
SPANNCTFEW

SEQ ID NO: 62203 - protein, 10 aa, synthetic construct
  source 1..10: note = Seed: SSANNCTFEY
SPANNCTFEY

SEQ ID NO: 62204 - protein, 10 aa, synthetic construct
  source 1..10: note = Seed: SQAWQPGVAM
SPAWQPGVAF

SEQ ID NO: 62205 - protein, 10 aa, synthetic construct
  source 1..10: note = Seed: SQAWQPGVAM
SPAWQPGVAM

SEQ ID NO: 62206 - protein, 10 aa, synthetic construct
  source 1..10: note = Seed: SQAWQPGVAM
SPAWQPGVAY

SEQ ID NO: 62207 - protein, 11 aa, synthetic construct
  source 1..11: note = Seed: SFCAFAVDAAK
SPCAFAVDAAR

SEQ ID NO: 62208 - protein, 10 aa, synthetic construct
  source 1..10: note = Seed: SYELQTPFEI
SPELQTPFEL

SEQ ID NO: 62209 - protein, 10 aa, synthetic construct
  source 1..10: note = Seed: SYELQTPFEI
SPELQTPFEW

SEQ ID NO: 62210 - protein, 9 aa, synthetic construct
  source 1..9: note = Seed: SAFAMMFVK
SPFAMMFVR

SEQ ID NO: 62211 - protein, 10 aa, synthetic construct
  source 1..10: note = Seed: SYFIASFRLF
SPFIASFRLF

SEQ ID NO: 62212 - protein, 10 aa, synthetic construct
  source 1..10: note = Seed: SYFIASFRLF
SPFIASFRLY

SEQ ID NO: 62213 - protein, 11 aa, synthetic construct
  source 1..11: note = Seed: SKFPLKLRGTA
SPFPLKLRGTL

SEQ ID NO: 62214 - protein, 11 aa, synthetic construct
  source 1..11: note = Seed: SKFPLKLRGTA
SPFPLKLRGTM

SEQ ID NO: 62215 - protein, 10 aa, synthetic construct
  source 1..10: note = Seed: SYFTSDYYQL
SPFTSDYYQF

SEQ ID NO: 62216 - protein, 9 aa, synthetic construct
  source 1..9: note = Seed: SSGDATTAY
SPGDATTAF

SEQ ID NO: 62217 - protein, 9 aa, synthetic construct
  source 1..9: note = Seed: SSGDATTAY
SPGDATTAM

SEQ ID NO: 62218 - protein, 9 aa, synthetic construct
  source 1..9: note = Seed: SSGDATTAY
SPGDATTAY

SEQ ID NO: 62219 - protein, 9 aa, synthetic construct
  source 1..9: note = Seed: SVGPKQASL
SPGPKQASF

SEQ ID NO: 62220 - protein, 9 aa, synthetic construct
  source 1..9: note = Seed: SVGPKQASL
SPGPKQASI

SEQ ID NO: 62221 - protein, 9 aa, synthetic construct
  source 1..9: note = Seed: SVGPKQASL
SPGPKQASL

SEQ ID NO: 62222 - protein, 9 aa, synthetic construct
  source 1..9: note = Seed: SVGPKQASL
SPGPKQASM

SEQ ID NO: 62223 - protein, 9 aa, synthetic construct
  source 1..9: note = Seed: SVGPKQASL
SPGPKQASV

SEQ ID NO: 62224 - protein, 9 aa, synthetic construct
  source 1..9: note = Seed: SDIDITFLK
SPIDITFLK

SEQ ID NO: 62225 - protein, 9 aa, synthetic construct
  source 1..9: note = Seed: SDIDITFLK
SPIDITFLR

SEQ ID NO: 62226 - protein, 9 aa, synthetic construct
  source 1..9: note = Seed: SIKNFKSVL
SPKNFKSVA

SEQ ID NO: 62227 - protein, 9 aa, synthetic construct
  source 1..9: note = Seed: SIKNFKSVL
SPKNFKSVF

SEQ ID NO: 62228 - protein, 9 aa, synthetic construct
  source 1..9: note = Seed: SIKNFKSVL
SPKNFKSVI

SEQ ID NO: 62229 - protein, 9 aa, synthetic construct
  source 1..9: note = Seed: SIKNFKSVL
SPKNFKSVL

SEQ ID NO: 62230 - protein, 9 aa, synthetic construct
  source 1..9: note = Seed: SIKNFKSVL
SPKNFKSVM

SEQ ID NO: 62231 - protein, 9 aa, synthetic construct
  source 1..9: note = Seed: SIKNFKSVL
SPKNFKSVV

SEQ ID NO: 62232 - protein, 9 aa, synthetic construct
  source 1..9: note = Seed: SAKNRARTV
SPKNRARTL

SEQ ID NO: 62233 - protein, 9 aa, synthetic construct
  source 1..9: note = Seed: SAKNRARTV
SPKNRARTM

SEQ ID NO: 62234 - protein, 11 aa, synthetic construct
  source 1..11: note = Seed: SKKPRQKRTAT
SPKPRQKRTAF

SEQ ID NO: 62235 - protein, 11 aa, synthetic construct
  source 1..11: note = Seed: SKKPRQKRTAT
SPKPRQKRTAI

SEQ ID NO: 62236 - protein, 11 aa, synthetic construct
  source 1..11: note = Seed: SKKPRQKRTAT
SPKPRQKRTAL

SEQ ID NO: 62237 - protein, 11 aa, synthetic construct
  source 1..11: note = Seed: SKKPRQKRTAT
SPKPRQKRTAM

SEQ ID NO: 62238 - protein, 11 aa, synthetic construct
  source 1..11: note = Seed: SKKPRQKRTAT
SPKPRQKRTAV

SEQ ID NO: 62239 - protein, 11 aa, synthetic construct
  source 1..11: note = Seed: SEKSYELQTPF
SPKSYELQTPW

SEQ ID NO: 62240 - protein, 10 aa, synthetic construct
  source 1..10: note = Seed: SFLAHIQWMV
SPLAHIQWMA

SEQ ID NO: 62241 - protein, 10 aa, synthetic construct
  source 1..10: note = Seed: SFLAHIQWMV
SPLAHIQWMI

SEQ ID NO: 62242 - protein, 10 aa, synthetic construct
  source 1..10: note = Seed: SFLAHIQWMV
SPLAHIQWML

SEQ ID NO: 62243 - protein, 10 aa, synthetic construct
  source 1..10: note = Seed: SFLAHIQWMV
SPLAHIQWMV

SEQ ID NO: 62244 - protein, 10 aa, synthetic construct
  source 1..10: note = Seed: SFLGRYMSAL
SPLGRYMSAV

SEQ ID NO: 62245 - protein, 10 aa, synthetic construct
  source 1..10: note = Seed: SVLLFLAFVV
SPLLFLAFVI

SEQ ID NO: 62246 - protein, 10 aa, synthetic construct
  source 1..10: note = Seed: SVLLFLAFVV
SPLLFLAFVL

SEQ ID NO: 62247 - protein, 10 aa, synthetic construct
  source 1..10: note = Seed: SVLLFLAFVV
SPLLFLAFVV

SEQ ID NO: 62248 - protein, 10 aa, synthetic construct
  source 1..10: note = Seed: SQLMCQPILL
SPLMCQPILA

SEQ ID NO: 62249 - protein, 10 aa, synthetic construct
  source 1..10: note = Seed: SQLMCQPILL
SPLMCQPILI

SEQ ID NO: 62250 - protein, 10 aa, synthetic construct
  source 1..10: note = Seed: SQLMCQPILL
SPLMCQPILL

SEQ ID NO: 62251 - protein, 10 aa, synthetic construct
  source 1..10: note = Seed: SQLMCQPILL
SPLMCQPILV

SEQ ID NO: 62252 - protein, 10 aa, synthetic construct
  source 1..10: note = Seed: SWLMWLIINL
SPLMWLIINA

SEQ ID NO: 62253 - protein, 10 aa, synthetic construct
  source 1..10: note = Seed: SWLMWLIINL
SPLMWLIINI

SEQ ID NO: 62254 - protein, 10 aa, synthetic construct
  source 1..10: note = Seed: SWLMWLIINL
SPLMWLIINL

SEQ ID NO: 62255 - protein, 10 aa, synthetic construct
  source 1..10: note = Seed: SWLMWLIINL
SPLMWLIINM

SEQ ID NO: 62256 - protein, 10 aa, synthetic construct
  source 1..10: note = Seed: SWLMWLIINL
SPLMWLIINT

SEQ ID NO: 62257 - protein, 10 aa, synthetic construct
  source 1..10: note = Seed: SWLMWLIINL
SPLMWLIINV

SEQ ID NO: 62258 - protein, 10 aa, synthetic construct
  source 1..10: note = Seed: SDLNDFVSDA
SPLNDFVSDI

SEQ ID NO: 62259 - protein, 10 aa, synthetic construct
  source 1..10: note = Seed: SDLNDFVSDA
SPLNDFVSDL

SEQ ID NO: 62260 - protein, 10 aa, synthetic construct
  source 1..10: note = Seed: SDLNDFVSDA
SPLNDFVSDV

SEQ ID NO: 62261 - protein, 10 aa, synthetic construct
  source 1..10: note = Seed: SVLNDILSRL
SPLNDILSRA

SEQ ID NO: 62262 - protein, 10 aa, synthetic construct
  source 1..10: note = Seed: SVLNDILSRL
SPLNDILSRI

SEQ ID NO: 62263 - protein, 10 aa, synthetic construct
  source 1..10: note = Seed: SVLNDILSRL
SPLNDILSRL

SEQ ID NO: 62264 - protein, 10 aa, synthetic construct
  source 1..10: note = Seed: SVLNDILSRL
SPLNDILSRV

SEQ ID NO: 62265 - protein, 11 aa, synthetic construct
  source 1..11: note = Seed: SELVIGAVILR
SPLVIGAVILR

SEQ ID NO: 62266 - protein, 10 aa, synthetic construct
  source 1..10: note = Seed: SVLYYQNNVF
SPLYYQNNVF

SEQ ID NO: 62267 - protein, 11 aa, synthetic construct
  source 1..11: note = Seed: SVLYYQNNVFM
SPLYYQNNVFF

SEQ ID NO: 62268 - protein, 11 aa, synthetic construct
  source 1..11: note = Seed: SVLYYQNNVFM
SPLYYQNNVFW

SEQ ID NO: 62269 - protein, 10 aa, synthetic construct
  source 1..10: note = Seed: SVLYYQNNVF
SPLYYQNNVY

SEQ ID NO: 62270 - protein, 9 aa, synthetic construct
  source 1..9: note = Seed: SMMGFKMNY
SPMGFKMNF

SEQ ID NO: 62271 - protein, 9 aa, synthetic construct
  source 1..9: note = Seed: SMMGFKMNY
SPMGFKMNM

SEQ ID NO: 62272 - protein, 9 aa, synthetic construct
  source 1..9: note = Seed: SMMGFKMNY
SPMGFKMNY

SEQ ID NO: 62273 - protein, 10 aa, synthetic construct
  source 1..10: note = Seed: SMMGFKMNYQ
SPMGFKMNYR

SEQ ID NO: 62274 - protein, 10 aa, synthetic construct
  source 1..10: note = Seed: SAMQTMLFTM
SPMQTMLFTA

SEQ ID NO: 62275 - protein, 10 aa, synthetic construct
  source 1..10: note = Seed: SAMQTMLFTM
SPMQTMLFTF

SEQ ID NO: 62276 - protein, 10 aa, synthetic construct
  source 1..10: note = Seed: SAMQTMLFTM
SPMQTMLFTI

SEQ ID NO: 62277 - protein, 10 aa, synthetic construct
  source 1..10: note = Seed: SAMQTMLFTM
SPMQTMLFTL

SEQ ID NO: 62278 - protein, 10 aa, synthetic construct
  source 1..10: note = Seed: SAMQTMLFTM
SPMQTMLFTM

SEQ ID NO: 62279 - protein, 10 aa, synthetic construct
  source 1..10: note = Seed: SAMQTMLFTM
SPMQTMLFTV

SEQ ID NO: 62280 - protein, 10 aa, synthetic construct
  source 1..10: note = Seed: SAMQTMLFTM
SPMQTMLFTY

SEQ ID NO: 62281 - protein, 9 aa, synthetic construct
  source 1..9: note = Seed: SAMVRMYIF
SPMVRMYIA

SEQ ID NO: 62282 - protein, 9 aa, synthetic construct
  source 1..9: note = Seed: SAMVRMYIF
SPMVRMYIC

SEQ ID NO: 62283 - protein, 9 aa, synthetic construct
  source 1..9: note = Seed: SAMVRMYIF
SPMVRMYIF

SEQ ID NO: 62284 - protein, 9 aa, synthetic construct
  source 1..9: note = Seed: SAMVRMYIF
SPMVRMYII

SEQ ID NO: 62285 - protein, 9 aa, synthetic construct
  source 1..9: note = Seed: SAMVRMYIF
SPMVRMYIL

SEQ ID NO: 62286 - protein, 9 aa, synthetic construct
  source 1..9: note = Seed: SAMVRMYIF
SPMVRMYIM

SEQ ID NO: 62287 - protein, 9 aa, synthetic construct
  source 1..9: note = Seed: SAMVRMYIF
SPMVRMYIT

SEQ ID NO: 62288 - protein, 9 aa, synthetic construct
  source 1..9: note = Seed: SAMVRMYIF
SPMVRMYIV

SEQ ID NO: 62289 - protein, 9 aa, synthetic construct
  source 1..9: note = Seed: SAMVRMYIF
SPMVRMYIY

SEQ ID NO: 62290 - protein, 8 aa, synthetic construct
  source 1..8: note = Seed: SAMVRMYI
SPMVRMYL

SEQ ID NO: 62291 - protein, 10 aa, synthetic construct
  source 1..10: note = Seed: SPNLAWPLIV
SPNLAWPLIL

SEQ ID NO: 62292 - protein, 10 aa, synthetic construct
  source 1..10: note = Seed: SPNLAWPLIV
SPNLAWPLIM

SEQ ID NO: 62293 - protein, 9 aa, synthetic construct
  source 1..9: note = Seed: SPNLAWPLI
SPNLAWPLL

SEQ ID NO: 62294 - protein, 9 aa, synthetic construct
  source 1..9: note = Seed: SPNLAWPLI
SPNLAWPLM

SEQ ID NO: 62295 - protein, 8 aa, synthetic construct
  source 1..8: note = Seed: SPNLAWPL
SPNLAWPM

SEQ ID NO: 62296 - protein, 9 aa, synthetic construct
  source 1..9: note = Seed: SLNMARKTL
SPNMARKTA

SEQ ID NO: 62297 - protein, 9 aa, synthetic construct
  source 1..9: note = Seed: SLNMARKTL
SPNMARKTC

SEQ ID NO: 62298 - protein, 9 aa, synthetic construct
  source 1..9: note = Seed: SLNMARKTL
SPNMARKTF

SEQ ID NO: 62299 - protein, 9 aa, synthetic construct
  source 1..9: note = Seed: SLNMARKTL
SPNMARKTI

SEQ ID NO: 62300 - protein, 9 aa, synthetic construct
  source 1..9: note = Seed: SLNMARKTL
SPNMARKTL

SEQ ID NO: 62301 - protein, 9 aa, synthetic construct
  source 1..9: note = Seed: SLNMARKTL
SPNMARKTM

SEQ ID NO: 62302 - protein, 9 aa, synthetic construct
  source 1..9: note = Seed: SLNMARKTL
SPNMARKTV

SEQ ID NO: 62303 - protein, 9 aa, synthetic construct
  source 1..9: note = Seed: SANNCTFEY
SPNNCTFEF

SEQ ID NO: 62304 - protein, 9 aa, synthetic construct
  source 1..9: note = Seed: SANNCTFEY
SPNNCTFEL

SEQ ID NO: 62305 - protein, 9 aa, synthetic construct
  source 1..9: note = Seed: SANNCTFEY
SPNNCTFEM

SEQ ID NO: 62306 - protein, 9 aa, synthetic construct
  source 1..9: note = Seed: SANNCTFEY
SPNNCTFEY

SEQ ID NO: 62307 - protein, 9 aa, synthetic construct
  source 1..9: note = Seed: SSRLSFKEL
SPRLSFKEA

SEQ ID NO: 62308 - protein, 9 aa, synthetic construct
  source 1..9: note = Seed: SSRLSFKEL
SPRLSFKEC

SEQ ID NO: 62309 - protein, 9 aa, synthetic construct
  source 1..9: note = Seed: SSRLSFKEL
SPRLSFKEF

SEQ ID NO: 62310 - protein, 9 aa, synthetic construct
  source 1..9: note = Seed: SSRLSFKEL
SPRLSFKEI

SEQ ID NO: 62311 - protein, 9 aa, synthetic construct
  source 1..9: note = Seed: SSRLSFKEL
SPRLSFKEL

SEQ ID NO: 62312 - protein, 9 aa, synthetic construct
  source 1..9: note = Seed: SSRLSFKEL
SPRLSFKEM

SEQ ID NO: 62313 - protein, 9 aa, synthetic construct
  source 1..9: note = Seed: SSRLSFKEL
SPRLSFKET

SEQ ID NO: 62314 - protein, 9 aa, synthetic construct
  source 1..9: note = Seed: SSRLSFKEL
SPRLSFKEV

SEQ ID NO: 62315 - protein, 10 aa, synthetic construct
  source 1..10: note = Seed: SLRPDTRYVL
SPRPDTRYVA

SEQ ID NO: 62316 - protein, 10 aa, synthetic construct
  source 1..10: note = Seed: SLRPDTRYVL
SPRPDTRYVF

SEQ ID NO: 62317 - protein, 10 aa, synthetic construct
  source 1..10: note = Seed: SLRPDTRYVL
SPRPDTRYVI

SEQ ID NO: 62318 - protein, 10 aa, synthetic construct
  source 1..10: note = Seed: SLRPDTRYVL
SPRPDTRYVL

SEQ ID NO: 62319 - protein, 10 aa, synthetic construct
  source 1..10: note = Seed: SLRPDTRYVL
SPRPDTRYVM

SEQ ID NO: 62320 - protein, 10 aa, synthetic construct
  source 1..10: note = Seed: SLRPDTRYVL
SPRPDTRYVV

SEQ ID NO: 62321 - protein, 9 aa, synthetic construct
  source 1..9: note = Seed: SPRWYFYYL
SPRWYFYYA

SEQ ID NO: 62322 - protein, 9 aa, synthetic construct
  source 1..9: note = Seed: SPRWYFYYL
SPRWYFYYF

SEQ ID NO: 62323 - protein, 9 aa, synthetic construct
  source 1..9: note = Seed: SPRWYFYYL
SPRWYFYYI

SEQ ID NO: 62324 - protein, 10 aa, synthetic construct
  source 1..10: note = Seed: SPRWYFYYLG
SPRWYFYYLF

SEQ ID NO: 62325 - protein, 10 aa, synthetic construct
  source 1..10: note = Seed: SPRWYFYYLG
SPRWYFYYLI

SEQ ID NO: 62326 - protein, 10 aa, synthetic construct
  source 1..10: note = Seed: SPRWYFYYLG
SPRWYFYYLK

SEQ ID NO: 62327 - protein, 10 aa, synthetic construct
  source 1..10: note = Seed: SPRWYFYYLG
SPRWYFYYLL

SEQ ID NO: 62328 - protein, 10 aa, synthetic construct
  source 1..10: note = Seed: SPRWYFYYLG
SPRWYFYYLM

SEQ ID NO: 62329 - protein, 9 aa, synthetic construct
  source 1..9: note = Seed: SPRWYFYYL
SPRWYFYYM

SEQ ID NO: 62330 - protein, 9 aa, synthetic construct
  source 1..9: note = Seed: SPRWYFYYL
SPRWYFYYT

SEQ ID NO: 62331 - protein, 9 aa, synthetic construct
  source 1..9: note = Seed: SPRWYFYYL
SPRWYFYYV

SEQ ID NO: 62332 - protein, 9 aa, synthetic construct
  source 1..9: note = Seed: SPRWYFYYL
SPRWYFYYY

SEQ ID NO: 62333 - protein, 10 aa, synthetic construct
  source 1..10: note = Seed: STSAFVETVK
SPSAFVETVR

SEQ ID NO: 62334 - protein, 10 aa, synthetic construct
  source 1..10: note = Seed: SSSDNIALLV
SPSDNIALLY

SEQ ID NO: 62335 - protein, 10 aa, synthetic construct
  source 1..10: note = Seed: SASVYYSQLM
SPSVYYSQLF

SEQ ID NO: 62336 - protein, 10 aa, synthetic construct
  source 1..10: note = Seed: SASVYYSQLM
SPSVYYSQLW

SEQ ID NO: 62337 - protein, 10 aa, synthetic construct
  source 1..10: note = Seed: SASVYYSQLM
SPSVYYSQLY

SEQ ID NO: 62338 - protein, 11 aa, synthetic construct
  source 1..11: note = Seed: SDTYACWHHSI
SPTYACWHHSF

SEQ ID NO: 62339 - protein, 11 aa, synthetic construct
  source 1..11: note = Seed: SDTYACWHHSI
SPTYACWHHSI

SEQ ID NO: 62340 - protein, 11 aa, synthetic construct
  source 1..11: note = Seed: SDTYACWHHSI
SPTYACWHHSL

SEQ ID NO: 62341 - protein, 11 aa, synthetic construct
  source 1..11: note = Seed: SDTYACWHHSI
SPTYACWHHSW

SEQ ID NO: 62342 - protein, 8 aa, synthetic construct
  source 1..8: note = Seed: SPVALRQM
SPVALRQL

SEQ ID NO: 62343 - protein, 11 aa, synthetic construct
  source 1..11: note = Seed: SVVLLSVLQQL
SPVLLSVLQQI

SEQ ID NO: 62344 - protein, 11 aa, synthetic construct
  source 1..11: note = Seed: SVVLLSVLQQL
SPVLLSVLQQV

SEQ ID NO: 62345 - protein, 10 aa, synthetic construct
  source 1..10: note = Seed: SSVLNDILSR
SPVLNDILSK

SEQ ID NO: 62346 - protein, 11 aa, synthetic construct
  source 1..11: note = Seed: SSVLNDILSRL
SPVLNDILSRV

SEQ ID NO: 62347 - protein, 10 aa, synthetic construct
  source 1..10: note = Seed: SAVLQSGFRK
SPVLQSGFRK

SEQ ID NO: 62348 - protein, 10 aa, synthetic construct
  source 1..10: note = Seed: SWVMRIMTWL
SPVMRIMTWV

SEQ ID NO: 62349 - protein, 10 aa, synthetic construct
  source 1..10: note = Seed: SDYDYYRYNL
SPYDYYRYNF

SEQ ID NO: 62350 - protein, 9 aa, synthetic construct
  source 1..9: note = Seed: SFYEDFLEY
SPYEDFLEA

SEQ ID NO: 62351 - protein, 9 aa, synthetic construct
  source 1..9: note = Seed: SFYEDFLEY
SPYEDFLEF

SEQ ID NO: 62352 - protein, 9 aa, synthetic construct
  source 1..9: note = Seed: SFYEDFLEY
SPYEDFLEH

SEQ ID NO: 62353 - protein, 9 aa, synthetic construct
  source 1..9: note = Seed: SFYEDFLEY
SPYEDFLEI

SEQ ID NO: 62354 - protein, 9 aa, synthetic construct
  source 1..9: note = Seed: SFYEDFLEY
SPYEDFLEL

SEQ ID NO: 62355 - protein, 9 aa, synthetic construct
  source 1..9: note = Seed: SFYEDFLEY
SPYEDFLEM

SEQ ID NO: 62356 - protein, 9 aa, synthetic construct
  source 1..9: note = Seed: SFYEDFLEY
SPYEDFLEV

SEQ ID NO: 62357 - protein, 9 aa, synthetic construct
  source 1..9: note = Seed: SFYEDFLEY
SPYEDFLEW

SEQ ID NO: 62358 - protein, 9 aa, synthetic construct
  source 1..9: note = Seed: SFYEDFLEY
SPYEDFLEY

SEQ ID NO: 62359 - protein, 9 aa, synthetic construct
  source 1..9: note = Seed: SAYENFNQH
SPYENFNQF

SEQ ID NO: 62360 - protein, 9 aa, synthetic construct
  source 1..9: note = Seed: SAYENFNQH
SPYENFNQL

SEQ ID NO: 62361 - protein, 9 aa, synthetic construct
  source 1..9: note = Seed: SAYENFNQH
SPYENFNQM

SEQ ID NO: 62362 - protein, 9 aa, synthetic construct
  source 1..9: note = Seed: SAYENFNQH
SPYENFNQY

SEQ ID NO: 62363 - protein, 10 aa, synthetic construct
  source 1..10: note = Seed: SSYIVDSVTV
SPYIVDSVTF

SEQ ID NO: 62364 - protein, 10 aa, synthetic construct
  source 1..10: note = Seed: SSYIVDSVTV
SPYIVDSVTI

SEQ ID NO: 62365 - protein, 10 aa, synthetic construct
  source 1..10: note = Seed: SSYIVDSVTV
SPYIVDSVTL

SEQ ID NO: 62366 - protein, 10 aa, synthetic construct
  source 1..10: note = Seed: SSYIVDSVTV
SPYIVDSVTW

SEQ ID NO: 62367 - protein, 9 aa, synthetic construct
  source 1..9: note = Seed: SNYLKRRVV
SPYLKRRVI

SEQ ID NO: 62368 - protein, 9 aa, synthetic construct
  source 1..9: note = Seed: SNYLKRRVV
SPYLKRRVL

SEQ ID NO: 62369 - protein, 9 aa, synthetic construct
  source 1..9: note = Seed: SNYLKRRVV
SPYLKRRVM

SEQ ID NO: 62370 - protein, 9 aa, synthetic construct
  source 1..9: note = Seed: SNYLKRRVV
SPYLKRRVV

SEQ ID NO: 62371 - protein, 9 aa, synthetic construct
  source 1..9: note = Seed: SPYNSQNAV
SPYNSQNAA

SEQ ID NO: 62372 - protein, 9 aa, synthetic construct
  source 1..9: note = Seed: SPYNSQNAV
SPYNSQNAF

SEQ ID NO: 62373 - protein, 9 aa, synthetic construct
  source 1..9: note = Seed: SPYNSQNAV
SPYNSQNAI

SEQ ID NO: 62374 - protein, 9 aa, synthetic construct
  source 1..9: note = Seed: SPYNSQNAV
SPYNSQNAL

SEQ ID NO: 62375 - protein, 9 aa, synthetic construct
  source 1..9: note = Seed: SPYNSQNAV
SPYNSQNAM

SEQ ID NO: 62376 - protein, 10 aa, synthetic construct
  source 1..10: note = Seed: SPYNSQNAVA
SPYNSQNAVF

SEQ ID NO: 62377 - protein, 10 aa, synthetic construct
  source 1..10: note = Seed: SPYNSQNAVA
SPYNSQNAVI

SEQ ID NO: 62378 - protein, 10 aa, synthetic construct
  source 1..10: note = Seed: SPYNSQNAVA
SPYNSQNAVL

SEQ ID NO: 62379 - protein, 10 aa, synthetic construct
  source 1..10: note = Seed: SPYNSQNAVA
SPYNSQNAVM

SEQ ID NO: 62380 - protein, 10 aa, synthetic construct
  source 1..10: note = Seed: SPYNSQNAVA
SPYNSQNAVV

SEQ ID NO: 62381 - protein, 9 aa, synthetic construct
  source 1..9: note = Seed: SPYNSQNAV
SPYNSQNAY

SEQ ID NO: 62382 - protein, 10 aa, synthetic construct
  source 1..10: note = Seed: SRYRIGNYKL
SPYRIGNYKF

SEQ ID NO: 62383 - protein, 10 aa, synthetic construct
  source 1..10: note = Seed: SYYSLLMPIL
SPYSLLMPIF

SEQ ID NO: 62384 - protein, 10 aa, synthetic construct
  source 1..10: note = Seed: SFYYVWKSYV
SPYYVWKSYF

SEQ ID NO: 62385 - protein, 10 aa, synthetic construct
  source 1..10: note = Seed: SFYYVWKSYV
SPYYVWKSYW

SEQ ID NO: 62386 - protein, 10 aa, synthetic construct
  source 1..10: note = Seed: SEAFLIGCNY
SQAFLIGCNF

SEQ ID NO: 62387 - protein, 10 aa, synthetic construct
  source 1..10: note = Seed: SEAFLIGCNY
SQAFLIGCNM

SEQ ID NO: 62388 - protein, 10 aa, synthetic construct
  source 1..10: note = Seed: SEAFLIGCNY
SQAFLIGCNY

SEQ ID NO: 62389 - protein, 10 aa, synthetic construct
  source 1..10: note = Seed: SIAIPTNFTI
SQAIPTNFTF

SEQ ID NO: 62390 - protein, 10 aa, synthetic construct
  source 1..10: note = Seed: SIAIPTNFTI
SQAIPTNFTV

SEQ ID NO: 62391 - protein, 10 aa, synthetic construct
  source 1..10: note = Seed: SIAIPTNFTI
SQAIPTNFTW

SEQ ID NO: 62392 - protein, 10 aa, synthetic construct
  source 1..10: note = Seed: SAAKKNNLPF
SQAKKNNLPF

SEQ ID NO: 62393 - protein, 10 aa, synthetic construct
  source 1..10: note = Seed: SAAKKNNLPF
SQAKKNNLPM

SEQ ID NO: 62394 - protein, 10 aa, synthetic construct
  source 1..10: note = Seed: SAAKKNNLPF
SQAKKNNLPY

SEQ ID NO: 62395 - protein, 10 aa, synthetic construct
  source 1..10: note = Seed: SSANNCTFEY
SQANNCTFEF

SEQ ID NO: 62396 - protein, 10 aa, synthetic construct
  source 1..10: note = Seed: SSANNCTFEY
SQANNCTFEK

SEQ ID NO: 62397 - protein, 10 aa, synthetic construct
  source 1..10: note = Seed: SSANNCTFEY
SQANNCTFEM

SEQ ID NO: 62398 - protein, 10 aa, synthetic construct
  source 1..10: note = Seed: SSANNCTFEY
SQANNCTFEW

SEQ ID NO: 62399 - protein, 10 aa, synthetic construct
  source 1..10: note = Seed: SSANNCTFEY
SQANNCTFEY

SEQ ID NO: 62400 - protein, 10 aa, synthetic construct
  source 1..10: note = Seed: SQAWQPGVAM
SQAWQPGVAF

SEQ ID NO: 62401 - protein, 10 aa, synthetic construct
  source 1..10: note = Seed: SQAWQPGVAM
SQAWQPGVAL

SEQ ID NO: 62402 - protein, 10 aa, synthetic construct
  source 1..10: note = Seed: SQAWQPGVAM
SQAWQPGVAY

SEQ ID NO: 62403 - protein, 9 aa, synthetic construct
  source 1..9: note = Seed: SQAWQPGVA
SQAWQPGVF

SEQ ID NO: 62404 - protein, 9 aa, synthetic construct
  source 1..9: note = Seed: SQAWQPGVA
SQAWQPGVL

SEQ ID NO: 62405 - protein, 9 aa, synthetic construct
  source 1..9: note = Seed: SQAWQPGVA
SQAWQPGVM

SEQ ID NO: 62406 - protein, 9 aa, synthetic construct
  source 1..9: note = Seed: SQAWQPGVA
SQAWQPGVY

SEQ ID NO: 62407 - protein, 11 aa, synthetic construct
  source 1..11: note = Seed: SFCAFAVDAAK
SQCAFAVDAAR

SEQ ID NO: 62408 - protein, 10 aa, synthetic construct
  source 1..10: note = Seed: SVCLSGLDSL
SQCLSGLDSV

SEQ ID NO: 62409 - protein, 9 aa, synthetic construct
  source 1..9: note = Seed: STCMMCYKR
SQCMMCYKR

SEQ ID NO: 62410 - protein, 11 aa, synthetic construct
  source 1..11: note = Seed: STCMMCYKRNR
SQCMMCYKRNR

SEQ ID NO: 62411 - protein, 10 aa, synthetic construct
  source 1..10: note = Seed: STCMMCYKRN
SQCMMCYKRR

SEQ ID NO: 62412 - protein, 9 aa, synthetic construct
  source 1..9: note = Seed: SICSTMTNR
SQCSTMTNK

SEQ ID NO: 62413 - protein, 9 aa, synthetic construct
  source 1..9: note = Seed: SICSTMTNR
SQCSTMTNR

SEQ ID NO: 62414 - protein, 9 aa, synthetic construct
  source 1..9: note = Seed: SSDNIALLV
SQDNIALLV

SEQ ID NO: 62415 - protein, 9 aa, synthetic construct
  source 1..9: note = Seed: SSDNIALLV
SQDNIALLY

SEQ ID NO: 62416 - protein, 10 aa, synthetic construct
  source 1..10: note = Seed: SYELQTPFEI
SQELQTPFEL

SEQ ID NO: 62417 - protein, 10 aa, synthetic construct
  source 1..10: note = Seed: SYELQTPFEI
SQELQTPFEW

SEQ ID NO: 62418 - protein, 9 aa, synthetic construct
  source 1..9: note = Seed: SGFAAYSRY
SQFAAYSRA

SEQ ID NO: 62419 - protein, 9 aa, synthetic construct
  source 1..9: note = Seed: SGFAAYSRY
SQFAAYSRF

SEQ ID NO: 62420 - protein, 9 aa, synthetic construct
  source 1..9: note = Seed: SGFAAYSRY
SQFAAYSRH

SEQ ID NO: 62421 - protein, 9 aa, synthetic construct
  source 1..9: note = Seed: SGFAAYSRY
SQFAAYSRI

SEQ ID NO: 62422 - protein, 9 aa, synthetic construct
  source 1..9: note = Seed: SGFAAYSRY
SQFAAYSRL

SEQ ID NO: 62423 - protein, 9 aa, synthetic construct
  source 1..9: note = Seed: SGFAAYSRY
SQFAAYSRM

SEQ ID NO: 62424 - protein, 9 aa, synthetic construct
  source 1..9: note = Seed: SGFAAYSRY
SQFAAYSRV

SEQ ID NO: 62425 - protein, 9 aa, synthetic construct
  source 1..9: note = Seed: SGFAAYSRY
SQFAAYSRW

SEQ ID NO: 62426 - protein, 9 aa, synthetic construct
  source 1..9: note = Seed: SGFAAYSRY
SQFAAYSRY

SEQ ID NO: 62427 - protein, 9 aa, synthetic construct
  source 1..9: note = Seed: SAFAMMFVK
SQFAMMFVK

SEQ ID NO: 62428 - protein, 11 aa, synthetic construct
  source 1..11: note = Seed: SAFAMMFVKHK
SQFAMMFVKHR

SEQ ID NO: 62429 - protein, 10 aa, synthetic construct
  source 1..10: note = Seed: SAFAMMFVKH
SQFAMMFVKK

SEQ ID NO: 62430 - protein, 9 aa, synthetic construct
  source 1..9: note = Seed: SAFAMMFVK
SQFAMMFVR

SEQ ID NO: 62431 - protein, 11 aa, synthetic construct
  source 1..11: note = Seed: STFEEAALCTF
SQFEEAALCTF

SEQ ID NO: 62432 - protein, 11 aa, synthetic construct
  source 1..11: note = Seed: STFEEAALCTF
SQFEEAALCTM

SEQ ID NO: 62433 - protein, 11 aa, synthetic construct
  source 1..11: note = Seed: STFEEAALCTF
SQFEEAALCTY

SEQ ID NO: 62434 - protein, 9 aa, synthetic construct
  source 1..9: note = Seed: SNFGAISSV
SQFGAISSA

SEQ ID NO: 62435 - protein, 9 aa, synthetic construct
  source 1..9: note = Seed: SNFGAISSV
SQFGAISSC

SEQ ID NO: 62436 - protein, 9 aa, synthetic construct
  source 1..9: note = Seed: SNFGAISSV
SQFGAISSF

SEQ ID NO: 62437 - protein, 9 aa, synthetic construct
  source 1..9: note = Seed: SNFGAISSV
SQFGAISSI

SEQ ID NO: 62438 - protein, 9 aa, synthetic construct
  source 1..9: note = Seed: SNFGAISSV
SQFGAISSL

SEQ ID NO: 62439 - protein, 9 aa, synthetic construct
  source 1..9: note = Seed: SNFGAISSV
SQFGAISSM

SEQ ID NO: 62440 - protein, 9 aa, synthetic construct
  source 1..9: note = Seed: SNFGAISSV
SQFGAISST

SEQ ID NO: 62441 - protein, 9 aa, synthetic construct
  source 1..9: note = Seed: SNFGAISSV
SQFGAISSV

SEQ ID NO: 62442 - protein, 9 aa, synthetic construct
  source 1..9: note = Seed: SNFGAISSV
SQFGAISSY

SEQ ID NO: 62443 - protein, 10 aa, synthetic construct
  source 1..10: note = Seed: SYFIASFRLF
SQFIASFRLF

SEQ ID NO: 62444 - protein, 10 aa, synthetic construct
  source 1..10: note = Seed: SYFIASFRLF
SQFIASFRLL

SEQ ID NO: 62445 - protein, 10 aa, synthetic construct
  source 1..10: note = Seed: SYFIASFRLF
SQFIASFRLM

SEQ ID NO: 62446 - protein, 10 aa, synthetic construct
  source 1..10: note = Seed: SYFIASFRLF
SQFIASFRLY

SEQ ID NO: 62447 - protein, 9 aa, synthetic construct
  source 1..9: note = Seed: SYFIASFRL
SQFIASFRY

SEQ ID NO: 62448 - protein, 9 aa, synthetic construct
  source 1..9: note = Seed: SVFNICQAV
SQFNICQAA

SEQ ID NO: 62449 - protein, 9 aa, synthetic construct
  source 1..9: note = Seed: SVFNICQAV
SQFNICQAI

SEQ ID NO: 62450 - protein, 9 aa, synthetic construct
  source 1..9: note = Seed: SVFNICQAV
SQFNICQAL

SEQ ID NO: 62451 - protein, 9 aa, synthetic construct
  source 1..9: note = Seed: SVFNICQAV
SQFNICQAV

SEQ ID NO: 62452 - protein, 10 aa, synthetic construct
  source 1..10: note = Seed: SVFNICQAVT
SQFNICQAVV

SEQ ID NO: 62453 - protein, 11 aa, synthetic construct
  source 1..11: note = Seed: SKFPLKLRGTA
SQFPLKLRGTL

SEQ ID NO: 62454 - protein, 11 aa, synthetic construct
  source 1..11: note = Seed: SKFPLKLRGTA
SQFPLKLRGTM

SEQ ID NO: 62455 - protein, 10 aa, synthetic construct
  source 1..10: note = Seed: SYFTSDYYQL
SQFTSDYYQF

SEQ ID NO: 62456 - protein, 9 aa, synthetic construct
  source 1..9: note = Seed: SSGDATTAY
SQGDATTAF

SEQ ID NO: 62457 - protein, 9 aa, synthetic construct
  source 1..9: note = Seed: SSGDATTAY
SQGDATTAL

SEQ ID NO: 62458 - protein, 9 aa, synthetic construct
  source 1..9: note = Seed: SSGDATTAY
SQGDATTAM

SEQ ID NO: 62459 - protein, 9 aa, synthetic construct
  source 1..9: note = Seed: SSGDATTAY
SQGDATTAY

SEQ ID NO: 62460 - protein, 9 aa, synthetic construct
  source 1..9: note = Seed: SDIDITFLK
SQIDITFLK

SEQ ID NO: 62461 - protein, 10 aa, synthetic construct
  source 1..10: note = Seed: SDIDITFLKK
SQIDITFLKK

SEQ ID NO: 62462 - protein, 9 aa, synthetic construct
  source 1..9: note = Seed: SDIDITFLK
SQIDITFLR

SEQ ID NO: 62463 - protein, 10 aa, synthetic construct
  source 1..10: note = Seed: SVIDLLLDDF
SQIDLLLDDF

SEQ ID NO: 62464 - protein, 10 aa, synthetic construct
  source 1..10: note = Seed: SVIDLLLDDF
SQIDLLLDDY

SEQ ID NO: 62465 - protein, 9 aa, synthetic construct
  source 1..9: note = Seed: SRILGAGCF
SQILGAGCF

SEQ ID NO: 62466 - protein, 10 aa, synthetic construct
  source 1..10: note = Seed: SRILGAGCFV
SQILGAGCFV

SEQ ID NO: 62467 - protein, 9 aa, synthetic construct
  source 1..9: note = Seed: SRILGAGCF
SQILGAGCL

SEQ ID NO: 62468 - protein, 9 aa, synthetic construct
  source 1..9: note = Seed: SRILGAGCF
SQILGAGCM

SEQ ID NO: 62469 - protein, 9 aa, synthetic construct
  source 1..9: note = Seed: SRILGAGCF
SQILGAGCY

SEQ ID NO: 62470 - protein, 9 aa, synthetic construct
  source 1..9: note = Seed: SLINTLNDL
SQINTLNDI

SEQ ID NO: 62471 - protein, 9 aa, synthetic construct
  source 1..9: note = Seed: SLINTLNDL
SQINTLNDL

SEQ ID NO: 62472 - protein, 10 aa, synthetic construct
  source 1..10: note = Seed: SLINTLNDLN
SQINTLNDLV

SEQ ID NO: 62473 - protein, 9 aa, synthetic construct
  source 1..9: note = Seed: SLINTLNDL
SQINTLNDV

SEQ ID NO: 62474 - protein, 9 aa, synthetic construct
  source 1..9: note = Seed: SKIVQLSEI
SQIVQLSEF

SEQ ID NO: 62475 - protein, 9 aa, synthetic construct
  source 1..9: note = Seed: SKIVQLSEI
SQIVQLSEL

SEQ ID NO: 62476 - protein, 9 aa, synthetic construct
  source 1..9: note = Seed: SKIVQLSEI
SQIVQLSEM

SEQ ID NO: 62477 - protein, 9 aa, synthetic construct
  source 1..9: note = Seed: SKIVQLSEI
SQIVQLSEY

SEQ ID NO: 62478 - protein, 9 aa, synthetic construct
  source 1..9: note = Seed: SIKNFKSVL
SQKNFKSVK

SEQ ID NO: 62479 - protein, 10 aa, synthetic construct
  source 1..10: note = Seed: SIKNFKSVLY
SQKNFKSVLF

SEQ ID NO: 62480 - protein, 10 aa, synthetic construct
  source 1..10: note = Seed: SIKNFKSVLY
SQKNFKSVLK

SEQ ID NO: 62481 - protein, 10 aa, synthetic construct
  source 1..10: note = Seed: SIKNFKSVLY
SQKNFKSVLM

SEQ ID NO: 62482 - protein, 10 aa, synthetic construct
  source 1..10: note = Seed: SIKNFKSVLY
SQKNFKSVLY

SEQ ID NO: 62483 - protein, 11 aa, synthetic construct
  source 1..11: note = Seed: SIKNFKSVLYY
SQKNFKSVLYF

SEQ ID NO: 62484 - protein, 11 aa, synthetic construct
  source 1..11: note = Seed: SIKNFKSVLYY
SQKNFKSVLYK

SEQ ID NO: 62485 - protein, 11 aa, synthetic construct
  source 1..11: note = Seed: SIKNFKSVLYY
SQKNFKSVLYY

SEQ ID NO: 62486 - protein, 9 aa, synthetic construct
  source 1..9: note = Seed: SAKNRARTV
SQKNRARTK

SEQ ID NO: 62487 - protein, 11 aa, synthetic construct
  source 1..11: note = Seed: SKKPRQKRTAT
SQKPRQKRTAF

SEQ ID NO: 62488 - protein, 11 aa, synthetic construct
  source 1..11: note = Seed: SKKPRQKRTAT
SQKPRQKRTAI

SEQ ID NO: 62489 - protein, 11 aa, synthetic construct
  source 1..11: note = Seed: SKKPRQKRTAT
SQKPRQKRTAL

SEQ ID NO: 62490 - protein, 11 aa, synthetic construct
  source 1..11: note = Seed: SKKPRQKRTAT
SQKPRQKRTAM

SEQ ID NO: 62491 - protein, 11 aa, synthetic construct
  source 1..11: note = Seed: SKKPRQKRTAT
SQKPRQKRTAV

SEQ ID NO: 62492 - protein, 11 aa, synthetic construct
  source 1..11: note = Seed: SEKSYELQTPF
SQKSYELQTPF

SEQ ID NO: 62493 - protein, 11 aa, synthetic construct
  source 1..11: note = Seed: SEKSYELQTPF
SQKSYELQTPM

SEQ ID NO: 62494 - protein, 11 aa, synthetic construct
  source 1..11: note = Seed: SEKSYELQTPF
SQKSYELQTPW

SEQ ID NO: 62495 - protein, 11 aa, synthetic construct
  source 1..11: note = Seed: SEKSYELQTPF
SQKSYELQTPY

SEQ ID NO: 62496 - protein, 10 aa, synthetic construct
  source 1..10: note = Seed: SIKWADNNCY
SQKWADNNCF

SEQ ID NO: 62497 - protein, 10 aa, synthetic construct
  source 1..10: note = Seed: SIKWADNNCY
SQKWADNNCY

SEQ ID NO: 62498 - protein, 9 aa, synthetic construct
  source 1..9: note = Seed: SMKYFVKIG
SQKYFVKIK

SEQ ID NO: 62499 - protein, 10 aa, synthetic construct
  source 1..10: note = Seed: SFLAHIQWMV
SQLAHIQWMA

SEQ ID NO: 62500 - protein, 10 aa, synthetic construct
  source 1..10: note = Seed: SFLAHIQWMV
SQLAHIQWMI

SEQ ID NO: 62501 - protein, 10 aa, synthetic construct
  source 1..10: note = Seed: SFLAHIQWMV
SQLAHIQWML

SEQ ID NO: 62502 - protein, 10 aa, synthetic construct
  source 1..10: note = Seed: SFLAHIQWMV
SQLAHIQWMM

SEQ ID NO: 62503 - protein, 10 aa, synthetic construct
  source 1..10: note = Seed: SFLAHIQWMV
SQLAHIQWMV

SEQ ID NO: 62504 - protein, 10 aa, synthetic construct
  source 1..10: note = Seed: SRLDKVEAEV
SQLDKVEAEV

SEQ ID NO: 62505 - protein, 9 aa, synthetic construct
  source 1..9: note = Seed: SGLDSLDTY
SQLDSLDTF

SEQ ID NO: 62506 - protein, 9 aa, synthetic construct
  source 1..9: note = Seed: SGLDSLDTY
SQLDSLDTM

SEQ ID NO: 62507 - protein, 9 aa, synthetic construct
  source 1..9: note = Seed: SGLDSLDTY
SQLDSLDTY

SEQ ID NO: 62508 - protein, 11 aa, synthetic construct
  source 1..11: note = Seed: STLEQYVFCTV
SQLEQYVFCTV

SEQ ID NO: 62509 - protein, 8 aa, synthetic construct
  source 1..8: note = Seed: SQLGGLHL
SQLGGLHF

SEQ ID NO: 62510 - protein, 8 aa, synthetic construct
  source 1..8: note = Seed: SQLGGLHL
SQLGGLHY

SEQ ID NO: 62511 - protein, 10 aa, synthetic construct
  source 1..10: note = Seed: SFLGRYMSAL
SQLGRYMSAI

SEQ ID NO: 62512 - protein, 10 aa, synthetic construct
  source 1..10: note = Seed: SFLGRYMSAL
SQLGRYMSAV

SEQ ID NO: 62513 - protein, 9 aa, synthetic construct
  source 1..9: note = Seed: SFLGRYMSA
SQLGRYMSK

SEQ ID NO: 62514 - protein, 9 aa, synthetic construct
  source 1..9: note = Seed: SVLLFLAFV
SQLLFLAFA

SEQ ID NO: 62515 - protein, 9 aa, synthetic construct
  source 1..9: note = Seed: SVLLFLAFV
SQLLFLAFI

SEQ ID NO: 62516 - protein, 9 aa, synthetic construct
  source 1..9: note = Seed: SVLLFLAFV
SQLLFLAFL

SEQ ID NO: 62517 - protein, 9 aa, synthetic construct
  source 1..9: note = Seed: SVLLFLAFV
SQLLFLAFM

SEQ ID NO: 62518 - protein, 9 aa, synthetic construct
  source 1..9: note = Seed: SVLLFLAFV
SQLLFLAFT

SEQ ID NO: 62519 - protein, 9 aa, synthetic construct
  source 1..9: note = Seed: SVLLFLAFV
SQLLFLAFV

SEQ ID NO: 62520 - protein, 10 aa, synthetic construct
  source 1..10: note = Seed: SVLLFLAFVV
SQLLFLAFVA

SEQ ID NO: 62521 - protein, 10 aa, synthetic construct
  source 1..10: note = Seed: SVLLFLAFVV
SQLLFLAFVI

SEQ ID NO: 62522 - protein, 10 aa, synthetic construct
  source 1..10: note = Seed: SVLLFLAFVV
SQLLFLAFVL

SEQ ID NO: 62523 - protein, 10 aa, synthetic construct
  source 1..10: note = Seed: SVLLFLAFVV
SQLLFLAFVV

SEQ ID NO: 62524 - protein, 10 aa, synthetic construct
  source 1..10: note = Seed: SNLLLQYGSF
SQLLLQYGSF

SEQ ID NO: 62525 - protein, 10 aa, synthetic construct
  source 1..10: note = Seed: SNLLLQYGSF
SQLLLQYGSY

SEQ ID NO: 62526 - protein, 8 aa, synthetic construct
  source 1..8: note = Seed: SQLMCQPI
SQLMCQPF

SEQ ID NO: 62527 - protein, 9 aa, synthetic construct
  source 1..9: note = Seed: SQLMCQPIL
SQLMCQPIF

SEQ ID NO: 62528 - protein, 10 aa, synthetic construct
  source 1..10: note = Seed: SQLMCQPILL
SQLMCQPILA

SEQ ID NO: 62529 - protein, 10 aa, synthetic construct
  source 1..10: note = Seed: SQLMCQPILL
SQLMCQPILF

SEQ ID NO: 62530 - protein, 10 aa, synthetic construct
  source 1..10: note = Seed: SQLMCQPILL
SQLMCQPILI

SEQ ID NO: 62531 - protein, 10 aa, synthetic construct
  source 1..10: note = Seed: SQLMCQPILL
SQLMCQPILM

SEQ ID NO: 62532 - protein, 10 aa, synthetic construct
  source 1..10: note = Seed: SQLMCQPILL
SQLMCQPILV

SEQ ID NO: 62533 - protein, 10 aa, synthetic construct
  source 1..10: note = Seed: SQLMCQPILL
SQLMCQPILY

SEQ ID NO: 62534 - protein, 9 aa, synthetic construct
  source 1..9: note = Seed: SQLMCQPIL
SQLMCQPIM

SEQ ID NO: 62535 - protein, 9 aa, synthetic construct
  source 1..9: note = Seed: SQLMCQPIL
SQLMCQPIV

SEQ ID NO: 62536 - protein, 9 aa, synthetic construct
  source 1..9: note = Seed: SQLMCQPIL
SQLMCQPIY

SEQ ID NO: 62537 - protein, 8 aa, synthetic construct
  source 1..8: note = Seed: SQLMCQPI
SQLMCQPM

SEQ ID NO: 62538 - protein, 8 aa, synthetic construct
  source 1..8: note = Seed: SQLMCQPI
SQLMCQPY

SEQ ID NO: 62539 - protein, 9 aa, synthetic construct
  source 1..9: note = Seed: SLLMPILTL
SQLMPILTF

SEQ ID NO: 62540 - protein, 9 aa, synthetic construct
  source 1..9: note = Seed: SLLMPILTL
SQLMPILTH

SEQ ID NO: 62541 - protein, 9 aa, synthetic construct
  source 1..9: note = Seed: SLLMPILTL
SQLMPILTI

SEQ ID NO: 62542 - protein, 9 aa, synthetic construct
  source 1..9: note = Seed: SLLMPILTL
SQLMPILTL

SEQ ID NO: 62543 - protein, 9 aa, synthetic construct
  source 1..9: note = Seed: SLLMPILTL
SQLMPILTM

SEQ ID NO: 62544 - protein, 9 aa, synthetic construct
  source 1..9: note = Seed: SLLMPILTL
SQLMPILTV

SEQ ID NO: 62545 - protein, 9 aa, synthetic construct
  source 1..9: note = Seed: SLLMPILTL
SQLMPILTY

SEQ ID NO: 62546 - protein, 10 aa, synthetic construct
  source 1..10: note = Seed: SWLMWLIINL
SQLMWLIINA

SEQ ID NO: 62547 - protein, 10 aa, synthetic construct
  source 1..10: note = Seed: SWLMWLIINL
SQLMWLIINI

SEQ ID NO: 62548 - protein, 10 aa, synthetic construct
  source 1..10: note = Seed: SWLMWLIINL
SQLMWLIINL

SEQ ID NO: 62549 - protein, 10 aa, synthetic construct
  source 1..10: note = Seed: SWLMWLIINL
SQLMWLIINM

SEQ ID NO: 62550 - protein, 10 aa, synthetic construct
  source 1..10: note = Seed: SWLMWLIINL
SQLMWLIINT

SEQ ID NO: 62551 - protein, 10 aa, synthetic construct
  source 1..10: note = Seed: SWLMWLIINL
SQLMWLIINV

SEQ ID NO: 62552 - protein, 10 aa, synthetic construct
  source 1..10: note = Seed: SDLNDFVSDA
SQLNDFVSDI

SEQ ID NO: 62553 - protein, 10 aa, synthetic construct
  source 1..10: note = Seed: SDLNDFVSDA
SQLNDFVSDL

SEQ ID NO: 62554 - protein, 10 aa, synthetic construct
  source 1..10: note = Seed: SDLNDFVSDA
SQLNDFVSDV

SEQ ID NO: 62555 - protein, 9 aa, synthetic construct
  source 1..9: note = Seed: SVLNDILSR
SQLNDILSK

SEQ ID NO: 62556 - protein, 10 aa, synthetic construct
  source 1..10: note = Seed: SVLNDILSRL
SQLNDILSRA

SEQ ID NO: 62557 - protein, 10 aa, synthetic construct
  source 1..10: note = Seed: SVLNDILSRL
SQLNDILSRI

SEQ ID NO: 62558 - protein, 10 aa, synthetic construct
  source 1..10: note = Seed: SVLNDILSRL
SQLNDILSRL

SEQ ID NO: 62559 - protein, 10 aa, synthetic construct
  source 1..10: note = Seed: SVLNDILSRL
SQLNDILSRV

SEQ ID NO: 62560 - protein, 9 aa, synthetic construct
  source 1..9: note = Seed: SFLPGVYSV
SQLPGVYSA

SEQ ID NO: 62561 - protein, 9 aa, synthetic construct
  source 1..9: note = Seed: SFLPGVYSV
SQLPGVYSC

SEQ ID NO: 62562 - protein, 9 aa, synthetic construct
  source 1..9: note = Seed: SFLPGVYSV
SQLPGVYSF

SEQ ID NO: 62563 - protein, 9 aa, synthetic construct
  source 1..9: note = Seed: SFLPGVYSV
SQLPGVYSI

SEQ ID NO: 62564 - protein, 9 aa, synthetic construct
  source 1..9: note = Seed: SFLPGVYSV
SQLPGVYSL

SEQ ID NO: 62565 - protein, 9 aa, synthetic construct
  source 1..9: note = Seed: SFLPGVYSV
SQLPGVYSM

SEQ ID NO: 62566 - protein, 9 aa, synthetic construct
  source 1..9: note = Seed: SFLPGVYSV
SQLPGVYST

SEQ ID NO: 62567 - protein, 9 aa, synthetic construct
  source 1..9: note = Seed: SFLPGVYSV
SQLPGVYSV

SEQ ID NO: 62568 - protein, 9 aa, synthetic construct
  source 1..9: note = Seed: SFLPGVYSV
SQLPGVYSW

SEQ ID NO: 62569 - protein, 11 aa, synthetic construct
  source 1..11: note = Seed: SELVIGAVILR
SQLVIGAVILR

SEQ ID NO: 62570 - protein, 9 aa, synthetic construct
  source 1..9: note = Seed: SLLVLVQST
SQLVLVQSV

SEQ ID NO: 62571 - protein, 9 aa, synthetic construct
  source 1..9: note = Seed: SVLYYQNNV
SQLYYQNNV

SEQ ID NO: 62572 - protein, 10 aa, synthetic construct
  source 1..10: note = Seed: SVLYYQNNVF
SQLYYQNNVF

SEQ ID NO: 62573 - protein, 11 aa, synthetic construct
  source 1..11: note = Seed: SVLYYQNNVFM
SQLYYQNNVFF

SEQ ID NO: 62574 - protein, 11 aa, synthetic construct
  source 1..11: note = Seed: SVLYYQNNVFM
SQLYYQNNVFW

SEQ ID NO: 62575 - protein, 10 aa, synthetic construct
  source 1..10: note = Seed: SVLYYQNNVF
SQLYYQNNVL

SEQ ID NO: 62576 - protein, 10 aa, synthetic construct
  source 1..10: note = Seed: SVLYYQNNVF
SQLYYQNNVM

SEQ ID NO: 62577 - protein, 10 aa, synthetic construct
  source 1..10: note = Seed: SVLYYQNNVF
SQLYYQNNVY

SEQ ID NO: 62578 - protein, 9 aa, synthetic construct
  source 1..9: note = Seed: SQMEIDFLE
SQMEIDFLA

SEQ ID NO: 62579 - protein, 9 aa, synthetic construct
  source 1..9: note = Seed: SQMEIDFLE
SQMEIDFLC

SEQ ID NO: 62580 - protein, 10 aa, synthetic construct
  source 1..10: note = Seed: SQMEIDFLEL
SQMEIDFLEA

SEQ ID NO: 62581 - protein, 10 aa, synthetic construct
  source 1..10: note = Seed: SQMEIDFLEL
SQMEIDFLEF

SEQ ID NO: 62582 - protein, 10 aa, synthetic construct
  source 1..10: note = Seed: SQMEIDFLEL
SQMEIDFLEI

SEQ ID NO: 62583 - protein, 11 aa, synthetic construct
  source 1..11: note = Seed: SQMEIDFLELA
SQMEIDFLELI

SEQ ID NO: 62584 - protein, 11 aa, synthetic construct
  source 1..11: note = Seed: SQMEIDFLELA
SQMEIDFLELL

SEQ ID NO: 62585 - protein, 11 aa, synthetic construct
  source 1..11: note = Seed: SQMEIDFLELA
SQMEIDFLELM

SEQ ID NO: 62586 - protein, 11 aa, synthetic construct
  source 1..11: note = Seed: SQMEIDFLELA
SQMEIDFLELV

SEQ ID NO: 62587 - protein, 10 aa, synthetic construct
  source 1..10: note = Seed: SQMEIDFLEL
SQMEIDFLEM

SEQ ID NO: 62588 - protein, 10 aa, synthetic construct
  source 1..10: note = Seed: SQMEIDFLEL
SQMEIDFLET

SEQ ID NO: 62589 - protein, 10 aa, synthetic construct
  source 1..10: note = Seed: SQMEIDFLEL
SQMEIDFLEV

SEQ ID NO: 62590 - protein, 10 aa, synthetic construct
  source 1..10: note = Seed: SQMEIDFLEL
SQMEIDFLEW

SEQ ID NO: 62591 - protein, 10 aa, synthetic construct
  source 1..10: note = Seed: SQMEIDFLEL
SQMEIDFLEY

SEQ ID NO: 62592 - protein, 9 aa, synthetic construct
  source 1..9: note = Seed: SQMEIDFLE
SQMEIDFLF

SEQ ID NO: 62593 - protein, 9 aa, synthetic construct
  source 1..9: note = Seed: SQMEIDFLE
SQMEIDFLI

SEQ ID NO: 62594 - protein, 9 aa, synthetic construct
  source 1..9: note = Seed: SQMEIDFLE
SQMEIDFLL

SEQ ID NO: 62595 - protein, 9 aa, synthetic construct
  source 1..9: note = Seed: SQMEIDFLE
SQMEIDFLM

SEQ ID NO: 62596 - protein, 9 aa, synthetic construct
  source 1..9: note = Seed: SQMEIDFLE
SQMEIDFLS

SEQ ID NO: 62597 - protein, 9 aa, synthetic construct
  source 1..9: note = Seed: SQMEIDFLE
SQMEIDFLT

SEQ ID NO: 62598 - protein, 9 aa, synthetic construct
  source 1..9: note = Seed: SQMEIDFLE
SQMEIDFLV

SEQ ID NO: 62599 - protein, 9 aa, synthetic construct
  source 1..9: note = Seed: SMMGFKMNY
SQMGFKMNF

SEQ ID NO: 62600 - protein, 9 aa, synthetic construct
  source 1..9: note = Seed: SMMGFKMNY
SQMGFKMNI

SEQ ID NO: 62601 - protein, 9 aa, synthetic construct
  source 1..9: note = Seed: SMMGFKMNY
SQMGFKMNK

SEQ ID NO: 62602 - protein, 9 aa, synthetic construct
  source 1..9: note = Seed: SMMGFKMNY
SQMGFKMNL

SEQ ID NO: 62603 - protein, 9 aa, synthetic construct
  source 1..9: note = Seed: SMMGFKMNY
SQMGFKMNM

SEQ ID NO: 62604 - protein, 9 aa, synthetic construct
  source 1..9: note = Seed: SMMGFKMNY
SQMGFKMNR

SEQ ID NO: 62605 - protein, 9 aa, synthetic construct
  source 1..9: note = Seed: SMMGFKMNY
SQMGFKMNW

SEQ ID NO: 62606 - protein, 9 aa, synthetic construct
  source 1..9: note = Seed: SMMGFKMNY
SQMGFKMNY

SEQ ID NO: 62607 - protein, 10 aa, synthetic construct
  source 1..10: note = Seed: SMMGFKMNYQ
SQMGFKMNYF

SEQ ID NO: 62608 - protein, 10 aa, synthetic construct
  source 1..10: note = Seed: SMMGFKMNYQ
SQMGFKMNYK

SEQ ID NO: 62609 - protein, 10 aa, synthetic construct
  source 1..10: note = Seed: SMMGFKMNYQ
SQMGFKMNYL

SEQ ID NO: 62610 - protein, 10 aa, synthetic construct
  source 1..10: note = Seed: SMMGFKMNYQ
SQMGFKMNYM

SEQ ID NO: 62611 - protein, 11 aa, synthetic construct
  source 1..11: note = Seed: SMMGFKMNYQV
SQMGFKMNYQI

SEQ ID NO: 62612 - protein, 11 aa, synthetic construct
  source 1..11: note = Seed: SMMGFKMNYQV
SQMGFKMNYQV

SEQ ID NO: 62613 - protein, 10 aa, synthetic construct
  source 1..10: note = Seed: SMMGFKMNYQ
SQMGFKMNYR

SEQ ID NO: 62614 - protein, 10 aa, synthetic construct
  source 1..10: note = Seed: SMMGFKMNYQ
SQMGFKMNYY

SEQ ID NO: 62615 - protein, 8 aa, synthetic construct
  source 1..8: note = Seed: SAMQTMLF
SQMQTMLF

SEQ ID NO: 62616 - protein, 9 aa, synthetic construct
  source 1..9: note = Seed: SAMQTMLFT
SQMQTMLFA

SEQ ID NO: 62617 - protein, 9 aa, synthetic construct
  source 1..9: note = Seed: SAMQTMLFT
SQMQTMLFF

SEQ ID NO: 62618 - protein, 9 aa, synthetic construct
  source 1..9: note = Seed: SAMQTMLFT
SQMQTMLFI

SEQ ID NO: 62619 - protein, 9 aa, synthetic construct
  source 1..9: note = Seed: SAMQTMLFT
SQMQTMLFL

SEQ ID NO: 62620 - protein, 9 aa, synthetic construct
  source 1..9: note = Seed: SAMQTMLFT
SQMQTMLFM

SEQ ID NO: 62621 - protein, 9 aa, synthetic construct
  source 1..9: note = Seed: SAMQTMLFT
SQMQTMLFT

SEQ ID NO: 62622 - protein, 10 aa, synthetic construct
  source 1..10: note = Seed: SAMQTMLFTM
SQMQTMLFTA

SEQ ID NO: 62623 - protein, 10 aa, synthetic construct
  source 1..10: note = Seed: SAMQTMLFTM
SQMQTMLFTF

SEQ ID NO: 62624 - protein, 10 aa, synthetic construct
  source 1..10: note = Seed: SAMQTMLFTM
SQMQTMLFTI

SEQ ID NO: 62625 - protein, 10 aa, synthetic construct
  source 1..10: note = Seed: SAMQTMLFTM
SQMQTMLFTL

SEQ ID NO: 62626 - protein, 10 aa, synthetic construct
  source 1..10: note = Seed: SAMQTMLFTM
SQMQTMLFTM

SEQ ID NO: 62627 - protein, 10 aa, synthetic construct
  source 1..10: note = Seed: SAMQTMLFTM
SQMQTMLFTT

SEQ ID NO: 62628 - protein, 10 aa, synthetic construct
  source 1..10: note = Seed: SAMQTMLFTM
SQMQTMLFTV

SEQ ID NO: 62629 - protein, 10 aa, synthetic construct
  source 1..10: note = Seed: SAMQTMLFTM
SQMQTMLFTW

SEQ ID NO: 62630 - protein, 10 aa, synthetic construct
  source 1..10: note = Seed: SAMQTMLFTM
SQMQTMLFTY

SEQ ID NO: 62631 - protein, 9 aa, synthetic construct
  source 1..9: note = Seed: SAMQTMLFT
SQMQTMLFV

SEQ ID NO: 62632 - protein, 8 aa, synthetic construct
  source 1..8: note = Seed: SAMQTMLF
SQMQTMLM

SEQ ID NO: 62633 - protein, 8 aa, synthetic construct
  source 1..8: note = Seed: SAMQTMLF
SQMQTMLY

SEQ ID NO: 62634 - protein, 11 aa, synthetic construct
  source 1..11: note = Seed: STMTNRQFHQK
SQMTNRQFHQR

SEQ ID NO: 62635 - protein, 9 aa, synthetic construct
  source 1..9: note = Seed: STMTNRQFH
SQMTNRQFK

SEQ ID NO: 62636 - protein, 9 aa, synthetic construct
  source 1..9: note = Seed: SAMVRMYIF
SQMVRMYIF

SEQ ID NO: 62637 - protein, 9 aa, synthetic construct
  source 1..9: note = Seed: SAMVRMYIF
SQMVRMYIL

SEQ ID NO: 62638 - protein, 9 aa, synthetic construct
  source 1..9: note = Seed: SAMVRMYIF
SQMVRMYIM

SEQ ID NO: 62639 - protein, 9 aa, synthetic construct
  source 1..9: note = Seed: SAMVRMYIF
SQMVRMYIW

SEQ ID NO: 62640 - protein, 9 aa, synthetic construct
  source 1..9: note = Seed: SAMVRMYIF
SQMVRMYIY

SEQ ID NO: 62641 - protein, 10 aa, synthetic construct
  source 1..10: note = Seed: SSNFGAISSV
SQNFGAISSI

SEQ ID NO: 62642 - protein, 10 aa, synthetic construct
  source 1..10: note = Seed: SSNFGAISSV
SQNFGAISSV

SEQ ID NO: 62643 - protein, 9 aa, synthetic construct
  source 1..9: note = Seed: SANNCTFEY
SQNNCTFEF

SEQ ID NO: 62644 - protein, 9 aa, synthetic construct
  source 1..9: note = Seed: SANNCTFEY
SQNNCTFEI

SEQ ID NO: 62645 - protein, 9 aa, synthetic construct
  source 1..9: note = Seed: SANNCTFEY
SQNNCTFEK

SEQ ID NO: 62646 - protein, 9 aa, synthetic construct
  source 1..9: note = Seed: SANNCTFEY
SQNNCTFEL

SEQ ID NO: 62647 - protein, 9 aa, synthetic construct
  source 1..9: note = Seed: SANNCTFEY
SQNNCTFEM

SEQ ID NO: 62648 - protein, 9 aa, synthetic construct
  source 1..9: note = Seed: SANNCTFEY
SQNNCTFEY

SEQ ID NO: 62649 - protein, 10 aa, synthetic construct
  source 1..10: note = Seed: SANNCTFEYV
SQNNCTFEYL

SEQ ID NO: 62650 - protein, 10 aa, synthetic construct
  source 1..10: note = Seed: SANNCTFEYV
SQNNCTFEYV

SEQ ID NO: 62651 - protein, 9 aa, synthetic construct
  source 1..9: note = Seed: SSNVANYQK
SQNVANYQK

SEQ ID NO: 62652 - protein, 9 aa, synthetic construct
  source 1..9: note = Seed: SSNVANYQK
SQNVANYQR

SEQ ID NO: 62653 - protein, 9 aa, synthetic construct
  source 1..9: note = Seed: SLPGVFCGV
SQPGVFCGA

SEQ ID NO: 62654 - protein, 9 aa, synthetic construct
  source 1..9: note = Seed: SLPGVFCGV
SQPGVFCGI

SEQ ID NO: 62655 - protein, 9 aa, synthetic construct
  source 1..9: note = Seed: SLPGVFCGV
SQPGVFCGL

SEQ ID NO: 62656 - protein, 9 aa, synthetic construct
  source 1..9: note = Seed: SLPGVFCGV
SQPGVFCGV

SEQ ID NO: 62657 - protein, 9 aa, synthetic construct
  source 1..9: note = Seed: SSQAWQPGV
SQQAWQPGI

SEQ ID NO: 62658 - protein, 9 aa, synthetic construct
  source 1..9: note = Seed: SSQAWQPGV
SQQAWQPGL

SEQ ID NO: 62659 - protein, 9 aa, synthetic construct
  source 1..9: note = Seed: SSQAWQPGV
SQQAWQPGV

SEQ ID NO: 62660 - protein, 11 aa, synthetic construct
  source 1..11: note = Seed: SSQAWQPGVAM
SQQAWQPGVAF

SEQ ID NO: 62661 - protein, 11 aa, synthetic construct
  source 1..11: note = Seed: SSQAWQPGVAM
SQQAWQPGVAM

SEQ ID NO: 62662 - protein, 11 aa, synthetic construct
  source 1..11: note = Seed: SSQAWQPGVAM
SQQAWQPGVAY

SEQ ID NO: 62663 - protein, 10 aa, synthetic construct
  source 1..10: note = Seed: SRQRLTKYTM
SQQRLTKYTF

SEQ ID NO: 62664 - protein, 10 aa, synthetic construct
  source 1..10: note = Seed: SRQRLTKYTM
SQQRLTKYTY

SEQ ID NO: 62665 - protein, 9 aa, synthetic construct
  source 1..9: note = Seed: SFRLFARTR
SQRLFARTK

SEQ ID NO: 62666 - protein, 9 aa, synthetic construct
  source 1..9: note = Seed: SFRLFARTR
SQRLFARTR

SEQ ID NO: 62667 - protein, 10 aa, synthetic construct
  source 1..10: note = Seed: SFRLFARTRS
SQRLFARTRK

SEQ ID NO: 62668 - protein, 9 aa, synthetic construct
  source 1..9: note = Seed: SSRLSFKEL
SQRLSFKEK

SEQ ID NO: 62669 - protein, 9 aa, synthetic construct
  source 1..9: note = Seed: SLRPDTRYV
SQRPDTRYK

SEQ ID NO: 62670 - protein, 10 aa, synthetic construct
  source 1..10: note = Seed: SQRVAGDSGF
SQRVAGDSGM

SEQ ID NO: 62671 - protein, 10 aa, synthetic construct
  source 1..10: note = Seed: SQRVAGDSGF
SQRVAGDSGY

SEQ ID NO: 62672 - protein, 9 aa, synthetic construct
  source 1..9: note = Seed: SVRVLQKAA
SQRVLQKAK

SEQ ID NO: 62673 - protein, 10 aa, synthetic construct
  source 1..10: note = Seed: SPRWYFYYLG
SQRWYFYYLF

SEQ ID NO: 62674 - protein, 10 aa, synthetic construct
  source 1..10: note = Seed: SPRWYFYYLG
SQRWYFYYLK

SEQ ID NO: 62675 - protein, 10 aa, synthetic construct
  source 1..10: note = Seed: SPRWYFYYLG
SQRWYFYYLL

SEQ ID NO: 62676 - protein, 10 aa, synthetic construct
  source 1..10: note = Seed: SPRWYFYYLG
SQRWYFYYLM

SEQ ID NO: 62677 - protein, 9 aa, synthetic construct
  source 1..9: note = Seed: STSAFVETV
SQSAFVETA

SEQ ID NO: 62678 - protein, 9 aa, synthetic construct
  source 1..9: note = Seed: STSAFVETV
SQSAFVETI

SEQ ID NO: 62679 - protein, 9 aa, synthetic construct
  source 1..9: note = Seed: STSAFVETV
SQSAFVETL

SEQ ID NO: 62680 - protein, 9 aa, synthetic construct
  source 1..9: note = Seed: STSAFVETV
SQSAFVETM

SEQ ID NO: 62681 - protein, 9 aa, synthetic construct
  source 1..9: note = Seed: STSAFVETV
SQSAFVETV

SEQ ID NO: 62682 - protein, 10 aa, synthetic construct
  source 1..10: note = Seed: STSAFVETVK
SQSAFVETVK

SEQ ID NO: 62683 - protein, 10 aa, synthetic construct
  source 1..10: note = Seed: STSAFVETVK
SQSAFVETVR

SEQ ID NO: 62684 - protein, 9 aa, synthetic construct
  source 1..9: note = Seed: SSSDNIALL
SQSDNIALA

SEQ ID NO: 62685 - protein, 9 aa, synthetic construct
  source 1..9: note = Seed: SSSDNIALL
SQSDNIALI

SEQ ID NO: 62686 - protein, 9 aa, synthetic construct
  source 1..9: note = Seed: SSSDNIALL
SQSDNIALL

SEQ ID NO: 62687 - protein, 10 aa, synthetic construct
  source 1..10: note = Seed: SSSDNIALLV
SQSDNIALLV

SEQ ID NO: 62688 - protein, 10 aa, synthetic construct
  source 1..10: note = Seed: SSSDNIALLV
SQSDNIALLY

SEQ ID NO: 62689 - protein, 9 aa, synthetic construct
  source 1..9: note = Seed: SSSDNIALL
SQSDNIALM

SEQ ID NO: 62690 - protein, 9 aa, synthetic construct
  source 1..9: note = Seed: SSSDNIALL
SQSDNIALV

SEQ ID NO: 62691 - protein, 10 aa, synthetic construct
  source 1..10: note = Seed: SASFSTFKCY
SQSFSTFKCF

SEQ ID NO: 62692 - protein, 10 aa, synthetic construct
  source 1..10: note = Seed: SASFSTFKCY
SQSFSTFKCM

SEQ ID NO: 62693 - protein, 10 aa, synthetic construct
  source 1..10: note = Seed: SASFSTFKCY
SQSFSTFKCY

SEQ ID NO: 62694 - protein, 9 aa, synthetic construct
  source 1..9: note = Seed: SKSLTENKY
SQSLTENKF

SEQ ID NO: 62695 - protein, 9 aa, synthetic construct
  source 1..9: note = Seed: SKSLTENKY
SQSLTENKY

SEQ ID NO: 62696 - protein, 10 aa, synthetic construct
  source 1..10: note = Seed: SASVYYSQLM
SQSVYYSQLF

SEQ ID NO: 62697 - protein, 10 aa, synthetic construct
  source 1..10: note = Seed: SASVYYSQLM
SQSVYYSQLW

SEQ ID NO: 62698 - protein, 10 aa, synthetic construct
  source 1..10: note = Seed: SASVYYSQLM
SQSVYYSQLY

SEQ ID NO: 62699 - protein, 9 aa, synthetic construct
  source 1..9: note = Seed: SSTCMMCYK
SQTCMMCYK

SEQ ID NO: 62700 - protein, 10 aa, synthetic construct
  source 1..10: note = Seed: SSTCMMCYKR
SQTCMMCYKK

SEQ ID NO: 62701 - protein, 10 aa, synthetic construct
  source 1..10: note = Seed: SSTCMMCYKR
SQTCMMCYKR

SEQ ID NO: 62702 - protein, 9 aa, synthetic construct
  source 1..9: note = Seed: SSTCMMCYK
SQTCMMCYR

SEQ ID NO: 62703 - protein, 10 aa, synthetic construct
  source 1..10: note = Seed: SETKCTLKSF
SQTKCTLKSF

SEQ ID NO: 62704 - protein, 10 aa, synthetic construct
  source 1..10: note = Seed: SETKCTLKSF
SQTKCTLKSM

SEQ ID NO: 62705 - protein, 10 aa, synthetic construct
  source 1..10: note = Seed: SETKCTLKSF
SQTKCTLKSY

SEQ ID NO: 62706 - protein, 9 aa, synthetic construct
  source 1..9: note = Seed: SVTTEILPV
SQTTEILPI

SEQ ID NO: 62707 - protein, 9 aa, synthetic construct
  source 1..9: note = Seed: SVTTEILPV
SQTTEILPV

SEQ ID NO: 62708 - protein, 11 aa, synthetic construct
  source 1..11: note = Seed: SDTYACWHHSI
SQTYACWHHSF

SEQ ID NO: 62709 - protein, 11 aa, synthetic construct
  source 1..11: note = Seed: SDTYACWHHSI
SQTYACWHHSI

SEQ ID NO: 62710 - protein, 11 aa, synthetic construct
  source 1..11: note = Seed: SDTYACWHHSI
SQTYACWHHSL

SEQ ID NO: 62711 - protein, 11 aa, synthetic construct
  source 1..11: note = Seed: SDTYACWHHSI
SQTYACWHHSW

SEQ ID NO: 62712 - protein, 9 aa, synthetic construct
  source 1..9: note = Seed: SIVCRFDTR
SQVCRFDTR

SEQ ID NO: 62713 - protein, 9 aa, synthetic construct
  source 1..9: note = Seed: SKVGGNYNY
SQVGGNYNF

SEQ ID NO: 62714 - protein, 9 aa, synthetic construct
  source 1..9: note = Seed: SKVGGNYNY
SQVGGNYNM

SEQ ID NO: 62715 - protein, 9 aa, synthetic construct
  source 1..9: note = Seed: SKVGGNYNY
SQVGGNYNY

SEQ ID NO: 62716 - protein, 11 aa, synthetic construct
  source 1..11: note = Seed: SVVLLSVLQQL
SQVLLSVLQQI

SEQ ID NO: 62717 - protein, 11 aa, synthetic construct
  source 1..11: note = Seed: SVVLLSVLQQL
SQVLLSVLQQV

SEQ ID NO: 62718 - protein, 10 aa, synthetic construct
  source 1..10: note = Seed: SSVLNDILSR
SQVLNDILSK

SEQ ID NO: 62719 - protein, 11 aa, synthetic construct
  source 1..11: note = Seed: SSVLNDILSRL
SQVLNDILSRV

SEQ ID NO: 62720 - protein, 10 aa, synthetic construct
  source 1..10: note = Seed: SAVLQSGFRK
SQVLQSGFRK

SEQ ID NO: 62721 - protein, 10 aa, synthetic construct
  source 1..10: note = Seed: SWVMRIMTWL
SQVMRIMTWV

SEQ ID NO: 62722 - protein, 9 aa, synthetic construct
  source 1..9: note = Seed: SLVVRCSFY
SQVVRCSFF

SEQ ID NO: 62723 - protein, 9 aa, synthetic construct
  source 1..9: note = Seed: SLVVRCSFY
SQVVRCSFM

SEQ ID NO: 62724 - protein, 9 aa, synthetic construct
  source 1..9: note = Seed: SLVVRCSFY
SQVVRCSFY

SEQ ID NO: 62725 - protein, 11 aa, synthetic construct
  source 1..11: note = Seed: SLWVYKQFDTY
SQWVYKQFDTF

SEQ ID NO: 62726 - protein, 11 aa, synthetic construct
  source 1..11: note = Seed: SLWVYKQFDTY
SQWVYKQFDTY

SEQ ID NO: 62727 - protein, 10 aa, synthetic construct
  source 1..10: note = Seed: SDYDYYRYNL
SQYDYYRYNF

SEQ ID NO: 62728 - protein, 9 aa, synthetic construct
  source 1..9: note = Seed: SFYEDFLEY
SQYEDFLEA

SEQ ID NO: 62729 - protein, 9 aa, synthetic construct
  source 1..9: note = Seed: SFYEDFLEY
SQYEDFLEF

SEQ ID NO: 62730 - protein, 9 aa, synthetic construct
  source 1..9: note = Seed: SFYEDFLEY
SQYEDFLEH

SEQ ID NO: 62731 - protein, 9 aa, synthetic construct
  source 1..9: note = Seed: SFYEDFLEY
SQYEDFLEI

SEQ ID NO: 62732 - protein, 9 aa, synthetic construct
  source 1..9: note = Seed: SFYEDFLEY
SQYEDFLEL

SEQ ID NO: 62733 - protein, 9 aa, synthetic construct
  source 1..9: note = Seed: SFYEDFLEY
SQYEDFLEM

SEQ ID NO: 62734 - protein, 9 aa, synthetic construct
  source 1..9: note = Seed: SFYEDFLEY
SQYEDFLEV

SEQ ID NO: 62735 - protein, 9 aa, synthetic construct
  source 1..9: note = Seed: SFYEDFLEY
SQYEDFLEW

SEQ ID NO: 62736 - protein, 9 aa, synthetic construct
  source 1..9: note = Seed: SFYEDFLEY
SQYEDFLEY

SEQ ID NO: 62737 - protein, 9 aa, synthetic construct
  source 1..9: note = Seed: SAYENFNQH
SQYENFNQA

SEQ ID NO: 62738 - protein, 9 aa, synthetic construct
  source 1..9: note = Seed: SAYENFNQH
SQYENFNQF

SEQ ID NO: 62739 - protein, 9 aa, synthetic construct
  source 1..9: note = Seed: SAYENFNQH
SQYENFNQH

SEQ ID NO: 62740 - protein, 9 aa, synthetic construct
  source 1..9: note = Seed: SAYENFNQH
SQYENFNQI

SEQ ID NO: 62741 - protein, 9 aa, synthetic construct
  source 1..9: note = Seed: SAYENFNQH
SQYENFNQL

SEQ ID NO: 62742 - protein, 9 aa, synthetic construct
  source 1..9: note = Seed: SAYENFNQH
SQYENFNQM

SEQ ID NO: 62743 - protein, 9 aa, synthetic construct
  source 1..9: note = Seed: SAYENFNQH
SQYENFNQV

SEQ ID NO: 62744 - protein, 9 aa, synthetic construct
  source 1..9: note = Seed: SAYENFNQH
SQYENFNQW

SEQ ID NO: 62745 - protein, 9 aa, synthetic construct
  source 1..9: note = Seed: SAYENFNQH
SQYENFNQY

SEQ ID NO: 62746 - protein, 10 aa, synthetic construct
  source 1..10: note = Seed: SSYIVDSVTV
SQYIVDSVTF

SEQ ID NO: 62747 - protein, 10 aa, synthetic construct
  source 1..10: note = Seed: SSYIVDSVTV
SQYIVDSVTI

SEQ ID NO: 62748 - protein, 10 aa, synthetic construct
  source 1..10: note = Seed: SSYIVDSVTV
SQYIVDSVTL

SEQ ID NO: 62749 - protein, 10 aa, synthetic construct
  source 1..10: note = Seed: SSYIVDSVTV
SQYIVDSVTW

SEQ ID NO: 62750 - protein, 10 aa, synthetic construct
  source 1..10: note = Seed: SNYLKRRVVF
SQYLKRRVVF

SEQ ID NO: 62751 - protein, 10 aa, synthetic construct
  source 1..10: note = Seed: SNYLKRRVVF
SQYLKRRVVM

SEQ ID NO: 62752 - protein, 10 aa, synthetic construct
  source 1..10: note = Seed: SNYLKRRVVF
SQYLKRRVVY

SEQ ID NO: 62753 - protein, 10 aa, synthetic construct
  source 1..10: note = Seed: SRYRIGNYKL
SQYRIGNYKF

SEQ ID NO: 62754 - protein, 9 aa, synthetic construct
  source 1..9: note = Seed: SYYSLLMPI
SQYSLLMPA

SEQ ID NO: 62755 - protein, 9 aa, synthetic construct
  source 1..9: note = Seed: SYYSLLMPI
SQYSLLMPC

SEQ ID NO: 62756 - protein, 9 aa, synthetic construct
  source 1..9: note = Seed: SYYSLLMPI
SQYSLLMPF

SEQ ID NO: 62757 - protein, 9 aa, synthetic construct
  source 1..9: note = Seed: SYYSLLMPI
SQYSLLMPG

SEQ ID NO: 62758 - protein, 9 aa, synthetic construct
  source 1..9: note = Seed: SYYSLLMPI
SQYSLLMPH

SEQ ID NO: 62759 - protein, 9 aa, synthetic construct
  source 1..9: note = Seed: SYYSLLMPI
SQYSLLMPI

SEQ ID NO: 62760 - protein, 10 aa, synthetic construct
  source 1..10: note = Seed: SYYSLLMPIL
SQYSLLMPIF

SEQ ID NO: 62761 - protein, 9 aa, synthetic construct
  source 1..9: note = Seed: SYYSLLMPI
SQYSLLMPK

SEQ ID NO: 62762 - protein, 9 aa, synthetic construct
  source 1..9: note = Seed: SYYSLLMPI
SQYSLLMPL

SEQ ID NO: 62763 - protein, 9 aa, synthetic construct
  source 1..9: note = Seed: SYYSLLMPI
SQYSLLMPM

SEQ ID NO: 62764 - protein, 9 aa, synthetic construct
  source 1..9: note = Seed: SYYSLLMPI
SQYSLLMPS

SEQ ID NO: 62765 - protein, 9 aa, synthetic construct
  source 1..9: note = Seed: SYYSLLMPI
SQYSLLMPT

SEQ ID NO: 62766 - protein, 9 aa, synthetic construct
  source 1..9: note = Seed: SYYSLLMPI
SQYSLLMPV

SEQ ID NO: 62767 - protein, 9 aa, synthetic construct
  source 1..9: note = Seed: SYYSLLMPI
SQYSLLMPW

SEQ ID NO: 62768 - protein, 9 aa, synthetic construct
  source 1..9: note = Seed: SYYSLLMPI
SQYSLLMPY

SEQ ID NO: 62769 - protein, 9 aa, synthetic construct
  source 1..9: note = Seed: SLYVNKHAF
SQYVNKHAF

SEQ ID NO: 62770 - protein, 9 aa, synthetic construct
  source 1..9: note = Seed: SLYVNKHAF
SQYVNKHAH

SEQ ID NO: 62771 - protein, 9 aa, synthetic construct
  source 1..9: note = Seed: SLYVNKHAF
SQYVNKHAI

SEQ ID NO: 62772 - protein, 9 aa, synthetic construct
  source 1..9: note = Seed: SLYVNKHAF
SQYVNKHAL

SEQ ID NO: 62773 - protein, 9 aa, synthetic construct
  source 1..9: note = Seed: SLYVNKHAF
SQYVNKHAM

SEQ ID NO: 62774 - protein, 9 aa, synthetic construct
  source 1..9: note = Seed: SLYVNKHAF
SQYVNKHAW

SEQ ID NO: 62775 - protein, 9 aa, synthetic construct
  source 1..9: note = Seed: SLYVNKHAF
SQYVNKHAY

SEQ ID NO: 62776 - protein, 9 aa, synthetic construct
  source 1..9: note = Seed: SFYYVWKSY
SQYYVWKSA

SEQ ID NO: 62777 - protein, 9 aa, synthetic construct
  source 1..9: note = Seed: SFYYVWKSY
SQYYVWKSF

SEQ ID NO: 62778 - protein, 9 aa, synthetic construct
  source 1..9: note = Seed: SFYYVWKSY
SQYYVWKSH

SEQ ID NO: 62779 - protein, 9 aa, synthetic construct
  source 1..9: note = Seed: SFYYVWKSY
SQYYVWKSI

SEQ ID NO: 62780 - protein, 9 aa, synthetic construct
  source 1..9: note = Seed: SFYYVWKSY
SQYYVWKSL

SEQ ID NO: 62781 - protein, 9 aa, synthetic construct
  source 1..9: note = Seed: SFYYVWKSY
SQYYVWKSM

SEQ ID NO: 62782 - protein, 9 aa, synthetic construct
  source 1..9: note = Seed: SFYYVWKSY
SQYYVWKSV

SEQ ID NO: 62783 - protein, 9 aa, synthetic construct
  source 1..9: note = Seed: SFYYVWKSY
SQYYVWKSW

SEQ ID NO: 62784 - protein, 9 aa, synthetic construct
  source 1..9: note = Seed: SFYYVWKSY
SQYYVWKSY

SEQ ID NO: 62785 - protein, 10 aa, synthetic construct
  source 1..10: note = Seed: SFYYVWKSYV
SQYYVWKSYF

SEQ ID NO: 62786 - protein, 10 aa, synthetic construct
  source 1..10: note = Seed: SFYYVWKSYV
SQYYVWKSYW

SEQ ID NO: 62787 - protein, 11 aa, synthetic construct
  source 1..11: note = Seed: SVAIKITEHSW
SRAIKITEHSW

SEQ ID NO: 62788 - protein, 10 aa, synthetic construct
  source 1..10: note = Seed: SIAIPTNFTI
SRAIPTNFTF

SEQ ID NO: 62789 - protein, 10 aa, synthetic construct
  source 1..10: note = Seed: SIAIPTNFTI
SRAIPTNFTW

SEQ ID NO: 62790 - protein, 10 aa, synthetic construct
  source 1..10: note = Seed: SSANNCTFEY
SRANNCTFEK

SEQ ID NO: 62791 - protein, 10 aa, synthetic construct
  source 1..10: note = Seed: SSANNCTFEY
SRANNCTFEW

SEQ ID NO: 62792 - protein, 10 aa, synthetic construct
  source 1..10: note = Seed: SQAWQPGVAM
SRAWQPGVAF

SEQ ID NO: 62793 - protein, 10 aa, synthetic construct
  source 1..10: note = Seed: SQAWQPGVAM
SRAWQPGVAY

SEQ ID NO: 62794 - protein, 11 aa, synthetic construct
  source 1..11: note = Seed: SFCAFAVDAAK
SRCAFAVDAAR

SEQ ID NO: 62795 - protein, 10 aa, synthetic construct
  source 1..10: note = Seed: SYELQTPFEI
SRELQTPFEL

SEQ ID NO: 62796 - protein, 10 aa, synthetic construct
  source 1..10: note = Seed: SYELQTPFEI
SRELQTPFEW

SEQ ID NO: 62797 - protein, 9 aa, synthetic construct
  source 1..9: note = Seed: SGFAAYSRY
SRFAAYSRF

SEQ ID NO: 62798 - protein, 9 aa, synthetic construct
  source 1..9: note = Seed: SGFAAYSRY
SRFAAYSRY

SEQ ID NO: 62799 - protein, 10 aa, synthetic construct
  source 1..10: note = Seed: SYFIASFRLF
SRFIASFRLF

SEQ ID NO: 62800 - protein, 10 aa, synthetic construct
  source 1..10: note = Seed: SYFIASFRLF
SRFIASFRLY

SEQ ID NO: 62801 - protein, 11 aa, synthetic construct
  source 1..11: note = Seed: SKFPLKLRGTA
SRFPLKLRGTL

SEQ ID NO: 62802 - protein, 11 aa, synthetic construct
  source 1..11: note = Seed: SKFPLKLRGTA
SRFPLKLRGTM

SEQ ID NO: 62803 - protein, 10 aa, synthetic construct
  source 1..10: note = Seed: SYFTSDYYQL
SRFTSDYYQF

SEQ ID NO: 62804 - protein, 10 aa, synthetic construct
  source 1..10: note = Seed: SRILGAGCFV
SRILGAGCFL

SEQ ID NO: 62805 - protein, 9 aa, synthetic construct
  source 1..9: note = Seed: SRILGAGCF
SRILGAGCY

SEQ ID NO: 62806 - protein, 9 aa, synthetic construct
  source 1..9: note = Seed: SKIVQLSEI
SRIVQLSEF

SEQ ID NO: 62807 - protein, 11 aa, synthetic construct
  source 1..11: note = Seed: SKKPRQKRTAT
SRKPRQKRTAF

SEQ ID NO: 62808 - protein, 11 aa, synthetic construct
  source 1..11: note = Seed: SKKPRQKRTAT
SRKPRQKRTAI

SEQ ID NO: 62809 - protein, 11 aa, synthetic construct
  source 1..11: note = Seed: SKKPRQKRTAT
SRKPRQKRTAL

SEQ ID NO: 62810 - protein, 11 aa, synthetic construct
  source 1..11: note = Seed: SKKPRQKRTAT
SRKPRQKRTAM

SEQ ID NO: 62811 - protein, 11 aa, synthetic construct
  source 1..11: note = Seed: SKKPRQKRTAT
SRKPRQKRTAV

SEQ ID NO: 62812 - protein, 11 aa, synthetic construct
  source 1..11: note = Seed: SEKSYELQTPF
SRKSYELQTPW

SEQ ID NO: 62813 - protein, 10 aa, synthetic construct
  source 1..10: note = Seed: SFLAHIQWMV
SRLAHIQWMA

SEQ ID NO: 62814 - protein, 10 aa, synthetic construct
  source 1..10: note = Seed: SFLAHIQWMV
SRLAHIQWMI

SEQ ID NO: 62815 - protein, 10 aa, synthetic construct
  source 1..10: note = Seed: SFLAHIQWMV
SRLAHIQWML

SEQ ID NO: 62816 - protein, 10 aa, synthetic construct
  source 1..10: note = Seed: SFLAHIQWMV
SRLAHIQWMV

SEQ ID NO: 62817 - protein, 10 aa, synthetic construct
  source 1..10: note = Seed: SRLDKVEAEV
SRLDKVEAEL

SEQ ID NO: 62818 - protein, 10 aa, synthetic construct
  source 1..10: note = Seed: SFLGRYMSAL
SRLGRYMSAV

SEQ ID NO: 62819 - protein, 10 aa, synthetic construct
  source 1..10: note = Seed: SVLLFLAFVV
SRLLFLAFVI

SEQ ID NO: 62820 - protein, 10 aa, synthetic construct
  source 1..10: note = Seed: SVLLFLAFVV
SRLLFLAFVL

SEQ ID NO: 62821 - protein, 10 aa, synthetic construct
  source 1..10: note = Seed: SVLLFLAFVV
SRLLFLAFVV

SEQ ID NO: 62822 - protein, 9 aa, synthetic construct
  source 1..9: note = Seed: SQLMCQPIL
SRLMCQPIF

SEQ ID NO: 62823 - protein, 9 aa, synthetic construct
  source 1..9: note = Seed: SQLMCQPIL
SRLMCQPII

SEQ ID NO: 62824 - protein, 9 aa, synthetic construct
  source 1..9: note = Seed: SQLMCQPIL
SRLMCQPIL

SEQ ID NO: 62825 - protein, 10 aa, synthetic construct
  source 1..10: note = Seed: SQLMCQPILL
SRLMCQPILA

SEQ ID NO: 62826 - protein, 10 aa, synthetic construct
  source 1..10: note = Seed: SQLMCQPILL
SRLMCQPILF

SEQ ID NO: 62827 - protein, 10 aa, synthetic construct
  source 1..10: note = Seed: SQLMCQPILL
SRLMCQPILI

SEQ ID NO: 62828 - protein, 10 aa, synthetic construct
  source 1..10: note = Seed: SQLMCQPILL
SRLMCQPILL

SEQ ID NO: 62829 - protein, 11 aa, synthetic construct
  source 1..11: note = Seed: SQLMCQPILLL
SRLMCQPILLV

SEQ ID NO: 62830 - protein, 10 aa, synthetic construct
  source 1..10: note = Seed: SQLMCQPILL
SRLMCQPILM

SEQ ID NO: 62831 - protein, 10 aa, synthetic construct
  source 1..10: note = Seed: SQLMCQPILL
SRLMCQPILV

SEQ ID NO: 62832 - protein, 9 aa, synthetic construct
  source 1..9: note = Seed: SQLMCQPIL
SRLMCQPIM

SEQ ID NO: 62833 - protein, 9 aa, synthetic construct
  source 1..9: note = Seed: SQLMCQPIL
SRLMCQPIV

SEQ ID NO: 62834 - protein, 9 aa, synthetic construct
  source 1..9: note = Seed: SLLMPILTL
SRLMPILTF

SEQ ID NO: 62835 - protein, 9 aa, synthetic construct
  source 1..9: note = Seed: SLLMPILTL
SRLMPILTY

SEQ ID NO: 62836 - protein, 10 aa, synthetic construct
  source 1..10: note = Seed: SWLMWLIINL
SRLMWLIINA

SEQ ID NO: 62837 - protein, 10 aa, synthetic construct
  source 1..10: note = Seed: SWLMWLIINL
SRLMWLIINI

SEQ ID NO: 62838 - protein, 10 aa, synthetic construct
  source 1..10: note = Seed: SWLMWLIINL
SRLMWLIINL

SEQ ID NO: 62839 - protein, 11 aa, synthetic construct
  source 1..11: note = Seed: SWLMWLIINLV
SRLMWLIINLV

SEQ ID NO: 62840 - protein, 10 aa, synthetic construct
  source 1..10: note = Seed: SWLMWLIINL
SRLMWLIINM

SEQ ID NO: 62841 - protein, 10 aa, synthetic construct
  source 1..10: note = Seed: SWLMWLIINL
SRLMWLIINT

SEQ ID NO: 62842 - protein, 10 aa, synthetic construct
  source 1..10: note = Seed: SWLMWLIINL
SRLMWLIINV

SEQ ID NO: 62843 - protein, 10 aa, synthetic construct
  source 1..10: note = Seed: SDLNDFVSDA
SRLNDFVSDI

SEQ ID NO: 62844 - protein, 10 aa, synthetic construct
  source 1..10: note = Seed: SDLNDFVSDA
SRLNDFVSDL

SEQ ID NO: 62845 - protein, 10 aa, synthetic construct
  source 1..10: note = Seed: SDLNDFVSDA
SRLNDFVSDV

SEQ ID NO: 62846 - protein, 10 aa, synthetic construct
  source 1..10: note = Seed: SVLNDILSRL
SRLNDILSRA

SEQ ID NO: 62847 - protein, 10 aa, synthetic construct
  source 1..10: note = Seed: SVLNDILSRL
SRLNDILSRI

SEQ ID NO: 62848 - protein, 10 aa, synthetic construct
  source 1..10: note = Seed: SVLNDILSRL
SRLNDILSRL

SEQ ID NO: 62849 - protein, 10 aa, synthetic construct
  source 1..10: note = Seed: SVLNDILSRL
SRLNDILSRV

SEQ ID NO: 62850 - protein, 11 aa, synthetic construct
  source 1..11: note = Seed: SELVIGAVILR
SRLVIGAVILR

SEQ ID NO: 62851 - protein, 10 aa, synthetic construct
  source 1..10: note = Seed: SVLYYQNNVF
SRLYYQNNVF

SEQ ID NO: 62852 - protein, 11 aa, synthetic construct
  source 1..11: note = Seed: SVLYYQNNVFM
SRLYYQNNVFF

SEQ ID NO: 62853 - protein, 11 aa, synthetic construct
  source 1..11: note = Seed: SVLYYQNNVFM
SRLYYQNNVFW

SEQ ID NO: 62854 - protein, 10 aa, synthetic construct
  source 1..10: note = Seed: SVLYYQNNVF
SRLYYQNNVY

SEQ ID NO: 62855 - protein, 10 aa, synthetic construct
  source 1..10: note = Seed: SQMEIDFLEL
SRMEIDFLEA

SEQ ID NO: 62856 - protein, 10 aa, synthetic construct
  source 1..10: note = Seed: SQMEIDFLEL
SRMEIDFLEF

SEQ ID NO: 62857 - protein, 10 aa, synthetic construct
  source 1..10: note = Seed: SQMEIDFLEL
SRMEIDFLEI

SEQ ID NO: 62858 - protein, 10 aa, synthetic construct
  source 1..10: note = Seed: SQMEIDFLEL
SRMEIDFLEL

SEQ ID NO: 62859 - protein, 11 aa, synthetic construct
  source 1..11: note = Seed: SQMEIDFLELA
SRMEIDFLELV

SEQ ID NO: 62860 - protein, 10 aa, synthetic construct
  source 1..10: note = Seed: SQMEIDFLEL
SRMEIDFLEM

SEQ ID NO: 62861 - protein, 10 aa, synthetic construct
  source 1..10: note = Seed: SQMEIDFLEL
SRMEIDFLEV

SEQ ID NO: 62862 - protein, 10 aa, synthetic construct
  source 1..10: note = Seed: SQMEIDFLEL
SRMEIDFLEY

SEQ ID NO: 62863 - protein, 9 aa, synthetic construct
  source 1..9: note = Seed: SMMGFKMNY
SRMGFKMNF

SEQ ID NO: 62864 - protein, 9 aa, synthetic construct
  source 1..9: note = Seed: SMMGFKMNY
SRMGFKMNY

SEQ ID NO: 62865 - protein, 10 aa, synthetic construct
  source 1..10: note = Seed: SMMGFKMNYQ
SRMGFKMNYK

SEQ ID NO: 62866 - protein, 10 aa, synthetic construct
  source 1..10: note = Seed: SMMGFKMNYQ
SRMGFKMNYR

SEQ ID NO: 62867 - protein, 10 aa, synthetic construct
  source 1..10: note = Seed: SAMQTMLFTM
SRMQTMLFTA

SEQ ID NO: 62868 - protein, 10 aa, synthetic construct
  source 1..10: note = Seed: SAMQTMLFTM
SRMQTMLFTF

SEQ ID NO: 62869 - protein, 10 aa, synthetic construct
  source 1..10: note = Seed: SAMQTMLFTM
SRMQTMLFTI

SEQ ID NO: 62870 - protein, 10 aa, synthetic construct
  source 1..10: note = Seed: SAMQTMLFTM
SRMQTMLFTL

SEQ ID NO: 62871 - protein, 10 aa, synthetic construct
  source 1..10: note = Seed: SAMQTMLFTM
SRMQTMLFTV

SEQ ID NO: 62872 - protein, 10 aa, synthetic construct
  source 1..10: note = Seed: SAMQTMLFTM
SRMQTMLFTY

SEQ ID NO: 62873 - protein, 11 aa, synthetic construct
  source 1..11: note = Seed: STMTNRQFHQK
SRMTNRQFHQR

SEQ ID NO: 62874 - protein, 9 aa, synthetic construct
  source 1..9: note = Seed: SAMVRMYIF
SRMVRMYIF

SEQ ID NO: 62875 - protein, 9 aa, synthetic construct
  source 1..9: note = Seed: SAMVRMYIF
SRMVRMYIY

SEQ ID NO: 62876 - protein, 9 aa, synthetic construct
  source 1..9: note = Seed: SANNCTFEY
SRNNCTFEF

SEQ ID NO: 62877 - protein, 11 aa, synthetic construct
  source 1..11: note = Seed: SSQAWQPGVAM
SRQAWQPGVAF

SEQ ID NO: 62878 - protein, 11 aa, synthetic construct
  source 1..11: note = Seed: SSQAWQPGVAM
SRQAWQPGVAY

SEQ ID NO: 62879 - protein, 10 aa, synthetic construct
  source 1..10: note = Seed: SRQRLTKYTM
SRQRLTKYTF

SEQ ID NO: 62880 - protein, 10 aa, synthetic construct
  source 1..10: note = Seed: SRQRLTKYTM
SRQRLTKYTI

SEQ ID NO: 62881 - protein, 10 aa, synthetic construct
  source 1..10: note = Seed: SRQRLTKYTM
SRQRLTKYTL

SEQ ID NO: 62882 - protein, 10 aa, synthetic construct
  source 1..10: note = Seed: SRQRLTKYTM
SRQRLTKYTV

SEQ ID NO: 62883 - protein, 10 aa, synthetic construct
  source 1..10: note = Seed: SPRWYFYYLG
SRRWYFYYLF

SEQ ID NO: 62884 - protein, 10 aa, synthetic construct
  source 1..10: note = Seed: SPRWYFYYLG
SRRWYFYYLI

SEQ ID NO: 62885 - protein, 10 aa, synthetic construct
  source 1..10: note = Seed: SPRWYFYYLG
SRRWYFYYLK

SEQ ID NO: 62886 - protein, 10 aa, synthetic construct
  source 1..10: note = Seed: SPRWYFYYLG
SRRWYFYYLL

SEQ ID NO: 62887 - protein, 10 aa, synthetic construct
  source 1..10: note = Seed: SPRWYFYYLG
SRRWYFYYLM

SEQ ID NO: 62888 - protein, 10 aa, synthetic construct
  source 1..10: note = Seed: SPRWYFYYLG
SRRWYFYYLR

SEQ ID NO: 62889 - protein, 10 aa, synthetic construct
  source 1..10: note = Seed: SPRWYFYYLG
SRRWYFYYLY

SEQ ID NO: 62890 - protein, 10 aa, synthetic construct
  source 1..10: note = Seed: STSAFVETVK
SRSAFVETVR

SEQ ID NO: 62891 - protein, 10 aa, synthetic construct
  source 1..10: note = Seed: SSSDNIALLV
SRSDNIALLY

SEQ ID NO: 62892 - protein, 10 aa, synthetic construct
  source 1..10: note = Seed: SASVYYSQLM
SRSVYYSQLF

SEQ ID NO: 62893 - protein, 10 aa, synthetic construct
  source 1..10: note = Seed: SASVYYSQLM
SRSVYYSQLW

SEQ ID NO: 62894 - protein, 10 aa, synthetic construct
  source 1..10: note = Seed: SASVYYSQLM
SRSVYYSQLY

SEQ ID NO: 62895 - protein, 10 aa, synthetic construct
  source 1..10: note = Seed: SSTCMMCYKR
SRTCMMCYKR

SEQ ID NO: 62896 - protein, 11 aa, synthetic construct
  source 1..11: note = Seed: SDTYACWHHSI
SRTYACWHHSF

SEQ ID NO: 62897 - protein, 11 aa, synthetic construct
  source 1..11: note = Seed: SDTYACWHHSI
SRTYACWHHSI

SEQ ID NO: 62898 - protein, 11 aa, synthetic construct
  source 1..11: note = Seed: SDTYACWHHSI
SRTYACWHHSL

SEQ ID NO: 62899 - protein, 11 aa, synthetic construct
  source 1..11: note = Seed: SDTYACWHHSI
SRTYACWHHSW

SEQ ID NO: 62900 - protein, 11 aa, synthetic construct
  source 1..11: note = Seed: SVVLLSVLQQL
SRVLLSVLQQI

SEQ ID NO: 62901 - protein, 11 aa, synthetic construct
  source 1..11: note = Seed: SVVLLSVLQQL
SRVLLSVLQQV

SEQ ID NO: 62902 - protein, 10 aa, synthetic construct
  source 1..10: note = Seed: SSVLNDILSR
SRVLNDILSK

SEQ ID NO: 62903 - protein, 11 aa, synthetic construct
  source 1..11: note = Seed: SSVLNDILSRL
SRVLNDILSRV

SEQ ID NO: 62904 - protein, 10 aa, synthetic construct
  source 1..10: note = Seed: SAVLQSGFRK
SRVLQSGFRK

SEQ ID NO: 62905 - protein, 10 aa, synthetic construct
  source 1..10: note = Seed: SAVLQSGFRK
SRVLQSGFRR

SEQ ID NO: 62906 - protein, 10 aa, synthetic construct
  source 1..10: note = Seed: SWVMRIMTWL
SRVMRIMTWV

SEQ ID NO: 62907 - protein, 10 aa, synthetic construct
  source 1..10: note = Seed: SDYDYYRYNL
SRYDYYRYNF

SEQ ID NO: 62908 - protein, 9 aa, synthetic construct
  source 1..9: note = Seed: SFYEDFLEY
SRYEDFLEF

SEQ ID NO: 62909 - protein, 9 aa, synthetic construct
  source 1..9: note = Seed: SFYEDFLEY
SRYEDFLEL

SEQ ID NO: 62910 - protein, 9 aa, synthetic construct
  source 1..9: note = Seed: SFYEDFLEY
SRYEDFLEM

SEQ ID NO: 62911 - protein, 9 aa, synthetic construct
  source 1..9: note = Seed: SFYEDFLEY
SRYEDFLEY

SEQ ID NO: 62912 - protein, 9 aa, synthetic construct
  source 1..9: note = Seed: SAYENFNQH
SRYENFNQF

SEQ ID NO: 62913 - protein, 9 aa, synthetic construct
  source 1..9: note = Seed: SAYENFNQH
SRYENFNQY

SEQ ID NO: 62914 - protein, 10 aa, synthetic construct
  source 1..10: note = Seed: SSYIVDSVTV
SRYIVDSVTF

SEQ ID NO: 62915 - protein, 10 aa, synthetic construct
  source 1..10: note = Seed: SSYIVDSVTV
SRYIVDSVTI

SEQ ID NO: 62916 - protein, 10 aa, synthetic construct
  source 1..10: note = Seed: SSYIVDSVTV
SRYIVDSVTL

SEQ ID NO: 62917 - protein, 10 aa, synthetic construct
  source 1..10: note = Seed: SSYIVDSVTV
SRYIVDSVTW

SEQ ID NO: 62918 - protein, 11 aa, synthetic construct
  source 1..11: note = Seed: SYYKLGASQRV
SRYKLGASQRF

SEQ ID NO: 62919 - protein, 9 aa, synthetic construct
  source 1..9: note = Seed: SRYRIGNYK
SRYRIGNYF

SEQ ID NO: 62920 - protein, 10 aa, synthetic construct
  source 1..10: note = Seed: SRYRIGNYKL
SRYRIGNYKF

SEQ ID NO: 62921 - protein, 10 aa, synthetic construct
  source 1..10: note = Seed: SRYRIGNYKL
SRYRIGNYKI

SEQ ID NO: 62922 - protein, 10 aa, synthetic construct
  source 1..10: note = Seed: SRYRIGNYKL
SRYRIGNYKK

SEQ ID NO: 62923 - protein, 11 aa, synthetic construct
  source 1..11: note = Seed: SRYRIGNYKLN
SRYRIGNYKLL

SEQ ID NO: 62924 - protein, 10 aa, synthetic construct
  source 1..10: note = Seed: SRYRIGNYKL
SRYRIGNYKM

SEQ ID NO: 62925 - protein, 10 aa, synthetic construct
  source 1..10: note = Seed: SRYRIGNYKL
SRYRIGNYKR

SEQ ID NO: 62926 - protein, 10 aa, synthetic construct
  source 1..10: note = Seed: SRYRIGNYKL
SRYRIGNYKV

SEQ ID NO: 62927 - protein, 10 aa, synthetic construct
  source 1..10: note = Seed: SRYRIGNYKL
SRYRIGNYKY

SEQ ID NO: 62928 - protein, 9 aa, synthetic construct
  source 1..9: note = Seed: SRYRIGNYK
SRYRIGNYL

SEQ ID NO: 62929 - protein, 9 aa, synthetic construct
  source 1..9: note = Seed: SRYRIGNYK
SRYRIGNYM

SEQ ID NO: 62930 - protein, 9 aa, synthetic construct
  source 1..9: note = Seed: SRYRIGNYK
SRYRIGNYR

SEQ ID NO: 62931 - protein, 9 aa, synthetic construct
  source 1..9: note = Seed: SYYSLLMPI
SRYSLLMPF

SEQ ID NO: 62932 - protein, 10 aa, synthetic construct
  source 1..10: note = Seed: SYYSLLMPIL
SRYSLLMPIF

SEQ ID NO: 62933 - protein, 9 aa, synthetic construct
  source 1..9: note = Seed: SYYSLLMPI
SRYSLLMPL

SEQ ID NO: 62934 - protein, 9 aa, synthetic construct
  source 1..9: note = Seed: SYYSLLMPI
SRYSLLMPM

SEQ ID NO: 62935 - protein, 9 aa, synthetic construct
  source 1..9: note = Seed: SYYSLLMPI
SRYSLLMPY

SEQ ID NO: 62936 - protein, 9 aa, synthetic construct
  source 1..9: note = Seed: SLYVNKHAF
SRYVNKHAF

SEQ ID NO: 62937 - protein, 9 aa, synthetic construct
  source 1..9: note = Seed: SLYVNKHAF
SRYVNKHAY

SEQ ID NO: 62938 - protein, 9 aa, synthetic construct
  source 1..9: note = Seed: SFYYVWKSY
SRYYVWKSF

SEQ ID NO: 62939 - protein, 9 aa, synthetic construct
  source 1..9: note = Seed: SFYYVWKSY
SRYYVWKSY

SEQ ID NO: 62940 - protein, 10 aa, synthetic construct
  source 1..10: note = Seed: SFYYVWKSYV
SRYYVWKSYF

SEQ ID NO: 62941 - protein, 10 aa, synthetic construct
  source 1..10: note = Seed: SFYYVWKSYV
SRYYVWKSYW

SEQ ID NO: 62942 - protein, 10 aa, synthetic construct
  source 1..10: note = Seed: SEAFLIGCNY
SSAFLIGCNY

SEQ ID NO: 62943 - protein, 11 aa, synthetic construct
  source 1..11: note = Seed: SVAIKITEHSW
SSAIKITEHSW

SEQ ID NO: 62944 - protein, 10 aa, synthetic construct
  source 1..10: note = Seed: SIAIPTNFTI
SSAIPTNFTF

SEQ ID NO: 62945 - protein, 10 aa, synthetic construct
  source 1..10: note = Seed: SIAIPTNFTI
SSAIPTNFTV

SEQ ID NO: 62946 - protein, 10 aa, synthetic construct
  source 1..10: note = Seed: SIAIPTNFTI
SSAIPTNFTW

SEQ ID NO: 62947 - protein, 10 aa, synthetic construct
  source 1..10: note = Seed: SAAKKNNLPF
SSAKKNNLPF

SEQ ID NO: 62948 - protein, 10 aa, synthetic construct
  source 1..10: note = Seed: SAAKKNNLPF
SSAKKNNLPW

SEQ ID NO: 62949 - protein, 10 aa, synthetic construct
  source 1..10: note = Seed: SSANNCTFEY
SSANNCTFEK

SEQ ID NO: 62950 - protein, 10 aa, synthetic construct
  source 1..10: note = Seed: SSANNCTFEY
SSANNCTFEW

SEQ ID NO: 62951 - protein, 10 aa, synthetic construct
  source 1..10: note = Seed: STASDTYACW
SSASDTYACW

SEQ ID NO: 62952 - protein, 10 aa, synthetic construct
  source 1..10: note = Seed: SQAWQPGVAM
SSAWQPGVAF

SEQ ID NO: 62953 - protein, 10 aa, synthetic construct
  source 1..10: note = Seed: SQAWQPGVAM
SSAWQPGVAY

SEQ ID NO: 62954 - protein, 11 aa, synthetic construct
  source 1..11: note = Seed: SFCAFAVDAAK
SSCAFAVDAAR

SEQ ID NO: 62955 - protein, 9 aa, synthetic construct
  source 1..9: note = Seed: STCMMCYKR
SSCMMCYKK

SEQ ID NO: 62956 - protein, 9 aa, synthetic construct
  source 1..9: note = Seed: STCMMCYKR
SSCMMCYKR

SEQ ID NO: 62957 - protein, 11 aa, synthetic construct
  source 1..11: note = Seed: STCMMCYKRNR
SSCMMCYKRNR

SEQ ID NO: 62958 - protein, 10 aa, synthetic construct
  source 1..10: note = Seed: STCMMCYKRN
SSCMMCYKRR

SEQ ID NO: 62959 - protein, 9 aa, synthetic construct
  source 1..9: note = Seed: SICSTMTNR
SSCSTMTNK

SEQ ID NO: 62960 - protein, 9 aa, synthetic construct
  source 1..9: note = Seed: SICSTMTNR
SSCSTMTNR

SEQ ID NO: 62961 - protein, 10 aa, synthetic construct
  source 1..10: note = Seed: SIDAFKLNIK
SSDAFKLNIK

SEQ ID NO: 62962 - protein, 9 aa, synthetic construct
  source 1..9: note = Seed: SSDNIALLV
SSDNIALLF

SEQ ID NO: 62963 - protein, 9 aa, synthetic construct
  source 1..9: note = Seed: SSDNIALLV
SSDNIALLI

SEQ ID NO: 62964 - protein, 9 aa, synthetic construct
  source 1..9: note = Seed: SSDNIALLV
SSDNIALLL

SEQ ID NO: 62965 - protein, 9 aa, synthetic construct
  source 1..9: note = Seed: SSDNIALLV
SSDNIALLM

SEQ ID NO: 62966 - protein, 9 aa, synthetic construct
  source 1..9: note = Seed: SSDNIALLV
SSDNIALLY

SEQ ID NO: 62967 - protein, 10 aa, synthetic construct
  source 1..10: note = Seed: SMDNSPNLAW
SSDNSPNLAW

SEQ ID NO: 62968 - protein, 10 aa, synthetic construct
  source 1..10: note = Seed: SYELQTPFEI
SSELQTPFEL

SEQ ID NO: 62969 - protein, 10 aa, synthetic construct
  source 1..10: note = Seed: SYELQTPFEI
SSELQTPFEW

SEQ ID NO: 62970 - protein, 9 aa, synthetic construct
  source 1..9: note = Seed: SGFAAYSRY
SSFAAYSRF

SEQ ID NO: 62971 - protein, 9 aa, synthetic construct
  source 1..9: note = Seed: SGFAAYSRY
SSFAAYSRI

SEQ ID NO: 62972 - protein, 9 aa, synthetic construct
  source 1..9: note = Seed: SGFAAYSRY
SSFAAYSRL

SEQ ID NO: 62973 - protein, 9 aa, synthetic construct
  source 1..9: note = Seed: SGFAAYSRY
SSFAAYSRM

SEQ ID NO: 62974 - protein, 9 aa, synthetic construct
  source 1..9: note = Seed: SGFAAYSRY
SSFAAYSRW

SEQ ID NO: 62975 - protein, 9 aa, synthetic construct
  source 1..9: note = Seed: SGFAAYSRY
SSFAAYSRY

SEQ ID NO: 62976 - protein, 9 aa, synthetic construct
  source 1..9: note = Seed: SAFAMMFVK
SSFAMMFVK

SEQ ID NO: 62977 - protein, 11 aa, synthetic construct
  source 1..11: note = Seed: SAFAMMFVKHK
SSFAMMFVKHK

SEQ ID NO: 62978 - protein, 11 aa, synthetic construct
  source 1..11: note = Seed: SAFAMMFVKHK
SSFAMMFVKHR

SEQ ID NO: 62979 - protein, 10 aa, synthetic construct
  source 1..10: note = Seed: SAFAMMFVKH
SSFAMMFVKK

SEQ ID NO: 62980 - protein, 10 aa, synthetic construct
  source 1..10: note = Seed: SAFAMMFVKH
SSFAMMFVKR

SEQ ID NO: 62981 - protein, 10 aa, synthetic construct
  source 1..10: note = Seed: SAFAMMFVKH
SSFAMMFVKY

SEQ ID NO: 62982 - protein, 9 aa, synthetic construct
  source 1..9: note = Seed: SAFAMMFVK
SSFAMMFVR

SEQ ID NO: 62983 - protein, 9 aa, synthetic construct
  source 1..9: note = Seed: SAFAMMFVK
SSFAMMFVY

SEQ ID NO: 62984 - protein, 11 aa, synthetic construct
  source 1..11: note = Seed: STFEEAALCTF
SSFEEAALCTF

SEQ ID NO: 62985 - protein, 11 aa, synthetic construct
  source 1..11: note = Seed: STFEEAALCTF
SSFEEAALCTW

SEQ ID NO: 62986 - protein, 11 aa, synthetic construct
  source 1..11: note = Seed: STFEEAALCTF
SSFEEAALCTY

SEQ ID NO: 62987 - protein, 9 aa, synthetic construct
  source 1..9: note = Seed: SNFGAISSV
SSFGAISSF

SEQ ID NO: 62988 - protein, 9 aa, synthetic construct
  source 1..9: note = Seed: SNFGAISSV
SSFGAISSI

SEQ ID NO: 62989 - protein, 9 aa, synthetic construct
  source 1..9: note = Seed: SNFGAISSV
SSFGAISSL

SEQ ID NO: 62990 - protein, 9 aa, synthetic construct
  source 1..9: note = Seed: SNFGAISSV
SSFGAISSM

SEQ ID NO: 62991 - protein, 9 aa, synthetic construct
  source 1..9: note = Seed: SNFGAISSV
SSFGAISSV

SEQ ID NO: 62992 - protein, 9 aa, synthetic construct
  source 1..9: note = Seed: SNFGAISSV
SSFGAISSY

SEQ ID NO: 62993 - protein, 10 aa, synthetic construct
  source 1..10: note = Seed: SYFIASFRLF
SSFIASFRLF

SEQ ID NO: 62994 - protein, 11 aa, synthetic construct
  source 1..11: note = Seed: SYFIASFRLFA
SSFIASFRLFK

SEQ ID NO: 62995 - protein, 10 aa, synthetic construct
  source 1..10: note = Seed: SYFIASFRLF
SSFIASFRLY

SEQ ID NO: 62996 - protein, 9 aa, synthetic construct
  source 1..9: note = Seed: SYFIASFRL
SSFIASFRY

SEQ ID NO: 62997 - protein, 11 aa, synthetic construct
  source 1..11: note = Seed: STFISAARQGF
SSFISAARQGF

SEQ ID NO: 62998 - protein, 11 aa, synthetic construct
  source 1..11: note = Seed: STFISAARQGF
SSFISAARQGW

SEQ ID NO: 62999 - protein, 11 aa, synthetic construct
  source 1..11: note = Seed: STFISAARQGF
SSFISAARQGY

SEQ ID NO: 63000 - protein, 10 aa, synthetic construct
  source 1..10: note = Seed: STFISDEVAR
SSFISDEVAK

SEQ ID NO: 63001 - protein, 10 aa, synthetic construct
  source 1..10: note = Seed: STFISDEVAR
SSFISDEVAR

SEQ ID NO: 63002 - protein, 9 aa, synthetic construct
  source 1..9: note = Seed: STFKCYGVS
SSFKCYGVK

SEQ ID NO: 63003 - protein, 9 aa, synthetic construct
  source 1..9: note = Seed: SVFNICQAV
SSFNICQAF

SEQ ID NO: 63004 - protein, 9 aa, synthetic construct
  source 1..9: note = Seed: SVFNICQAV
SSFNICQAI

SEQ ID NO: 63005 - protein, 9 aa, synthetic construct
  source 1..9: note = Seed: SVFNICQAV
SSFNICQAL

SEQ ID NO: 63006 - protein, 9 aa, synthetic construct
  source 1..9: note = Seed: SVFNICQAV
SSFNICQAM

SEQ ID NO: 63007 - protein, 9 aa, synthetic construct
  source 1..9: note = Seed: SVFNICQAV
SSFNICQAV

SEQ ID NO: 63008 - protein, 9 aa, synthetic construct
  source 1..9: note = Seed: SVFNICQAV
SSFNICQAY

SEQ ID NO: 63009 - protein, 11 aa, synthetic construct
  source 1..11: note = Seed: SKFPLKLRGTA
SSFPLKLRGTL

SEQ ID NO: 63010 - protein, 11 aa, synthetic construct
  source 1..11: note = Seed: SKFPLKLRGTA
SSFPLKLRGTM

SEQ ID NO: 63011 - protein, 11 aa, synthetic construct
  source 1..11: note = Seed: SWFTALTQHGK
SSFTALTQHGK

SEQ ID NO: 63012 - protein, 10 aa, synthetic construct
  source 1..10: note = Seed: SYFTSDYYQL
SSFTSDYYQF

SEQ ID NO: 63013 - protein, 11 aa, synthetic construct
  source 1..11: note = Seed: SYFTSDYYQLY
SSFTSDYYQLF

SEQ ID NO: 63014 - protein, 11 aa, synthetic construct
  source 1..11: note = Seed: SYFTSDYYQLY
SSFTSDYYQLW

SEQ ID NO: 63015 - protein, 11 aa, synthetic construct
  source 1..11: note = Seed: SYFTSDYYQLY
SSFTSDYYQLY

SEQ ID NO: 63016 - protein, 10 aa, synthetic construct
  source 1..10: note = Seed: SYFTSDYYQL
SSFTSDYYQY

SEQ ID NO: 63017 - protein, 10 aa, synthetic construct
  source 1..10: note = Seed: SHFVNLDNLR
SSFVNLDNLR

SEQ ID NO: 63018 - protein, 9 aa, synthetic construct
  source 1..9: note = Seed: SAFVNLKQL
SSFVNLKQF

SEQ ID NO: 63019 - protein, 9 aa, synthetic construct
  source 1..9: note = Seed: SAFVNLKQL
SSFVNLKQM

SEQ ID NO: 63020 - protein, 9 aa, synthetic construct
  source 1..9: note = Seed: SAFVNLKQL
SSFVNLKQW

SEQ ID NO: 63021 - protein, 9 aa, synthetic construct
  source 1..9: note = Seed: SAFVNLKQL
SSFVNLKQY

SEQ ID NO: 63022 - protein, 9 aa, synthetic construct
  source 1..9: note = Seed: SSGDATTAY
SSGDATTAW

SEQ ID NO: 63023 - protein, 9 aa, synthetic construct
  source 1..9: note = Seed: SAGFPFNKW
SSGFPFNKF

SEQ ID NO: 63024 - protein, 9 aa, synthetic construct
  source 1..9: note = Seed: SAGFPFNKW
SSGFPFNKW

SEQ ID NO: 63025 - protein, 10 aa, synthetic construct
  source 1..10: note = Seed: STGSNVFQTR
SSGSNVFQTK

SEQ ID NO: 63026 - protein, 9 aa, synthetic construct
  source 1..9: note = Seed: STGYHFREL
SSGYHFREF

SEQ ID NO: 63027 - protein, 9 aa, synthetic construct
  source 1..9: note = Seed: STGYHFREL
SSGYHFREL

SEQ ID NO: 63028 - protein, 9 aa, synthetic construct
  source 1..9: note = Seed: STGYHFREL
SSGYHFREM

SEQ ID NO: 63029 - protein, 9 aa, synthetic construct
  source 1..9: note = Seed: STGYHFREL
SSGYHFREW

SEQ ID NO: 63030 - protein, 9 aa, synthetic construct
  source 1..9: note = Seed: STGYHFREL
SSGYHFREY

SEQ ID NO: 63031 - protein, 9 aa, synthetic construct
  source 1..9: note = Seed: SDIDITFLK
SSIDITFLK

SEQ ID NO: 63032 - protein, 10 aa, synthetic construct
  source 1..10: note = Seed: SDIDITFLKK
SSIDITFLKA

SEQ ID NO: 63033 - protein, 10 aa, synthetic construct
  source 1..10: note = Seed: SDIDITFLKK
SSIDITFLKC

SEQ ID NO: 63034 - protein, 10 aa, synthetic construct
  source 1..10: note = Seed: SDIDITFLKK
SSIDITFLKD

SEQ ID NO: 63035 - protein, 10 aa, synthetic construct
  source 1..10: note = Seed: SDIDITFLKK
SSIDITFLKE

SEQ ID NO: 63036 - protein, 10 aa, synthetic construct
  source 1..10: note = Seed: SDIDITFLKK
SSIDITFLKF

SEQ ID NO: 63037 - protein, 10 aa, synthetic construct
  source 1..10: note = Seed: SDIDITFLKK
SSIDITFLKG

SEQ ID NO: 63038 - protein, 10 aa, synthetic construct
  source 1..10: note = Seed: SDIDITFLKK
SSIDITFLKH

SEQ ID NO: 63039 - protein, 10 aa, synthetic construct
  source 1..10: note = Seed: SDIDITFLKK
SSIDITFLKI

SEQ ID NO: 63040 - protein, 10 aa, synthetic construct
  source 1..10: note = Seed: SDIDITFLKK
SSIDITFLKK

SEQ ID NO: 63041 - protein, 10 aa, synthetic construct
  source 1..10: note = Seed: SDIDITFLKK
SSIDITFLKL

SEQ ID NO: 63042 - protein, 10 aa, synthetic construct
  source 1..10: note = Seed: SDIDITFLKK
SSIDITFLKM

SEQ ID NO: 63043 - protein, 10 aa, synthetic construct
  source 1..10: note = Seed: SDIDITFLKK
SSIDITFLKN

SEQ ID NO: 63044 - protein, 10 aa, synthetic construct
  source 1..10: note = Seed: SDIDITFLKK
SSIDITFLKP

SEQ ID NO: 63045 - protein, 10 aa, synthetic construct
  source 1..10: note = Seed: SDIDITFLKK
SSIDITFLKQ

SEQ ID NO: 63046 - protein, 10 aa, synthetic construct
  source 1..10: note = Seed: SDIDITFLKK
SSIDITFLKR

SEQ ID NO: 63047 - protein, 10 aa, synthetic construct
  source 1..10: note = Seed: SDIDITFLKK
SSIDITFLKS

SEQ ID NO: 63048 - protein, 10 aa, synthetic construct
  source 1..10: note = Seed: SDIDITFLKK
SSIDITFLKT

SEQ ID NO: 63049 - protein, 10 aa, synthetic construct
  source 1..10: note = Seed: SDIDITFLKK
SSIDITFLKV

SEQ ID NO: 63050 - protein, 10 aa, synthetic construct
  source 1..10: note = Seed: SDIDITFLKK
SSIDITFLKW

SEQ ID NO: 63051 - protein, 10 aa, synthetic construct
  source 1..10: note = Seed: SDIDITFLKK
SSIDITFLKY

SEQ ID NO: 63052 - protein, 9 aa, synthetic construct
  source 1..9: note = Seed: SDIDITFLK
SSIDITFLR

SEQ ID NO: 63053 - protein, 9 aa, synthetic construct
  source 1..9: note = Seed: SDIDITFLK
SSIDITFLY

SEQ ID NO: 63054 - protein, 9 aa, synthetic construct
  source 1..9: note = Seed: STIGVCSMT
SSIGVCSMV

SEQ ID NO: 63055 - protein, 10 aa, synthetic construct
  source 1..10: note = Seed: SIIIGGAKLK
SSIIGGAKLK

SEQ ID NO: 63056 - protein, 10 aa, synthetic construct
  source 1..10: note = Seed: SIIIGGAKLK
SSIIGGAKLR

SEQ ID NO: 63057 - protein, 10 aa, synthetic construct
  source 1..10: note = Seed: SYIVDSVTVK
SSIVDSVTVK

SEQ ID NO: 63058 - protein, 9 aa, synthetic construct
  source 1..9: note = Seed: SKIVQLSEI
SSIVQLSEF

SEQ ID NO: 63059 - protein, 9 aa, synthetic construct
  source 1..9: note = Seed: SIKNFKSVL
SSKNFKSVA

SEQ ID NO: 63060 - protein, 9 aa, synthetic construct
  source 1..9: note = Seed: SIKNFKSVL
SSKNFKSVK

SEQ ID NO: 63061 - protein, 10 aa, synthetic construct
  source 1..10: note = Seed: SIKNFKSVLY
SSKNFKSVLK

SEQ ID NO: 63062 - protein, 10 aa, synthetic construct
  source 1..10: note = Seed: SIKNFKSVLY
SSKNFKSVLY

SEQ ID NO: 63063 - protein, 11 aa, synthetic construct
  source 1..11: note = Seed: SIKNFKSVLYY
SSKNFKSVLYK

SEQ ID NO: 63064 - protein, 9 aa, synthetic construct
  source 1..9: note = Seed: SIKNFKSVL
SSKNFKSVV

SEQ ID NO: 63065 - protein, 9 aa, synthetic construct
  source 1..9: note = Seed: SAKNRARTV
SSKNRARTA

SEQ ID NO: 63066 - protein, 9 aa, synthetic construct
  source 1..9: note = Seed: SAKNRARTV
SSKNRARTK

SEQ ID NO: 63067 - protein, 9 aa, synthetic construct
  source 1..9: note = Seed: SAKNRARTV
SSKNRARTM

SEQ ID NO: 63068 - protein, 10 aa, synthetic construct
  source 1..10: note = Seed: SAKNRARTVA
SSKNRARTVK

SEQ ID NO: 63069 - protein, 11 aa, synthetic construct
  source 1..11: note = Seed: SKKPRQKRTAT
SSKPRQKRTAF

SEQ ID NO: 63070 - protein, 11 aa, synthetic construct
  source 1..11: note = Seed: SKKPRQKRTAT
SSKPRQKRTAI

SEQ ID NO: 63071 - protein, 11 aa, synthetic construct
  source 1..11: note = Seed: SKKPRQKRTAT
SSKPRQKRTAL

SEQ ID NO: 63072 - protein, 11 aa, synthetic construct
  source 1..11: note = Seed: SKKPRQKRTAT
SSKPRQKRTAM

SEQ ID NO: 63073 - protein, 11 aa, synthetic construct
  source 1..11: note = Seed: SKKPRQKRTAT
SSKPRQKRTAV

SEQ ID NO: 63074 - protein, 11 aa, synthetic construct
  source 1..11: note = Seed: SEKSYELQTPF
SSKSYELQTPW

SEQ ID NO: 63075 - protein, 9 aa, synthetic construct
  source 1..9: note = Seed: SMKYFVKIG
SSKYFVKIA

SEQ ID NO: 63076 - protein, 9 aa, synthetic construct
  source 1..9: note = Seed: SMKYFVKIG
SSKYFVKIK

SEQ ID NO: 63077 - protein, 10 aa, synthetic construct
  source 1..10: note = Seed: SFLAHIQWMV
SSLAHIQWMA

SEQ ID NO: 63078 - protein, 10 aa, synthetic construct
  source 1..10: note = Seed: SFLAHIQWMV
SSLAHIQWMI

SEQ ID NO: 63079 - protein, 10 aa, synthetic construct
  source 1..10: note = Seed: SFLAHIQWMV
SSLAHIQWML

SEQ ID NO: 63080 - protein, 10 aa, synthetic construct
  source 1..10: note = Seed: SFLAHIQWMV
SSLAHIQWMV

SEQ ID NO: 63081 - protein, 9 aa, synthetic construct
  source 1..9: note = Seed: SFLGRYMSA
SSLGRYMSA

SEQ ID NO: 63082 - protein, 10 aa, synthetic construct
  source 1..10: note = Seed: SFLGRYMSAL
SSLGRYMSAV

SEQ ID NO: 63083 - protein, 9 aa, synthetic construct
  source 1..9: note = Seed: SFLGRYMSA
SSLGRYMSK

SEQ ID NO: 63084 - protein, 9 aa, synthetic construct
  source 1..9: note = Seed: SVLLFLAFV
SSLLFLAFV

SEQ ID NO: 63085 - protein, 10 aa, synthetic construct
  source 1..10: note = Seed: SVLLFLAFVV
SSLLFLAFVI

SEQ ID NO: 63086 - protein, 10 aa, synthetic construct
  source 1..10: note = Seed: SVLLFLAFVV
SSLLFLAFVL

SEQ ID NO: 63087 - protein, 10 aa, synthetic construct
  source 1..10: note = Seed: SVLLFLAFVV
SSLLFLAFVV

SEQ ID NO: 63088 - protein, 10 aa, synthetic construct
  source 1..10: note = Seed: SQLMCQPILL
SSLMCQPILA

SEQ ID NO: 63089 - protein, 10 aa, synthetic construct
  source 1..10: note = Seed: SQLMCQPILL
SSLMCQPILI

SEQ ID NO: 63090 - protein, 10 aa, synthetic construct
  source 1..10: note = Seed: SQLMCQPILL
SSLMCQPILL

SEQ ID NO: 63091 - protein, 11 aa, synthetic construct
  source 1..11: note = Seed: SQLMCQPILLL
SSLMCQPILLV

SEQ ID NO: 63092 - protein, 10 aa, synthetic construct
  source 1..10: note = Seed: SQLMCQPILL
SSLMCQPILV

SEQ ID NO: 63093 - protein, 9 aa, synthetic construct
  source 1..9: note = Seed: SLLMPILTL
SSLMPILTF

SEQ ID NO: 63094 - protein, 9 aa, synthetic construct
  source 1..9: note = Seed: SLLMPILTL
SSLMPILTM

SEQ ID NO: 63095 - protein, 9 aa, synthetic construct
  source 1..9: note = Seed: SLLMPILTL
SSLMPILTY

SEQ ID NO: 63096 - protein, 10 aa, synthetic construct
  source 1..10: note = Seed: SWLMWLIINL
SSLMWLIINA

SEQ ID NO: 63097 - protein, 10 aa, synthetic construct
  source 1..10: note = Seed: SWLMWLIINL
SSLMWLIINI

SEQ ID NO: 63098 - protein, 10 aa, synthetic construct
  source 1..10: note = Seed: SWLMWLIINL
SSLMWLIINL

SEQ ID NO: 63099 - protein, 11 aa, synthetic construct
  source 1..11: note = Seed: SWLMWLIINLV
SSLMWLIINLV

SEQ ID NO: 63100 - protein, 10 aa, synthetic construct
  source 1..10: note = Seed: SWLMWLIINL
SSLMWLIINM

SEQ ID NO: 63101 - protein, 10 aa, synthetic construct
  source 1..10: note = Seed: SWLMWLIINL
SSLMWLIINT

SEQ ID NO: 63102 - protein, 10 aa, synthetic construct
  source 1..10: note = Seed: SWLMWLIINL
SSLMWLIINV

SEQ ID NO: 63103 - protein, 10 aa, synthetic construct
  source 1..10: note = Seed: SDLNDFVSDA
SSLNDFVSDI

SEQ ID NO: 63104 - protein, 10 aa, synthetic construct
  source 1..10: note = Seed: SDLNDFVSDA
SSLNDFVSDL

SEQ ID NO: 63105 - protein, 10 aa, synthetic construct
  source 1..10: note = Seed: SDLNDFVSDA
SSLNDFVSDV

SEQ ID NO: 63106 - protein, 9 aa, synthetic construct
  source 1..9: note = Seed: SVLNDILSR
SSLNDILSK

SEQ ID NO: 63107 - protein, 10 aa, synthetic construct
  source 1..10: note = Seed: SVLNDILSRL
SSLNDILSRA

SEQ ID NO: 63108 - protein, 10 aa, synthetic construct
  source 1..10: note = Seed: SVLNDILSRL
SSLNDILSRI

SEQ ID NO: 63109 - protein, 10 aa, synthetic construct
  source 1..10: note = Seed: SVLNDILSRL
SSLNDILSRL

SEQ ID NO: 63110 - protein, 10 aa, synthetic construct
  source 1..10: note = Seed: SVLNDILSRL
SSLNDILSRV

SEQ ID NO: 63111 - protein, 9 aa, synthetic construct
  source 1..9: note = Seed: SFLPGVYSV
SSLPGVYSF

SEQ ID NO: 63112 - protein, 9 aa, synthetic construct
  source 1..9: note = Seed: SFLPGVYSV
SSLPGVYSV

SEQ ID NO: 63113 - protein, 11 aa, synthetic construct
  source 1..11: note = Seed: SELVIGAVILR
SSLVIGAVILR

SEQ ID NO: 63114 - protein, 10 aa, synthetic construct
  source 1..10: note = Seed: SVLYYQNNVF
SSLYYQNNVF

SEQ ID NO: 63115 - protein, 11 aa, synthetic construct
  source 1..11: note = Seed: SVLYYQNNVFM
SSLYYQNNVFF

SEQ ID NO: 63116 - protein, 11 aa, synthetic construct
  source 1..11: note = Seed: SVLYYQNNVFM
SSLYYQNNVFW

SEQ ID NO: 63117 - protein, 10 aa, synthetic construct
  source 1..10: note = Seed: SVLYYQNNVF
SSLYYQNNVW

SEQ ID NO: 63118 - protein, 10 aa, synthetic construct
  source 1..10: note = Seed: SVLYYQNNVF
SSLYYQNNVY

SEQ ID NO: 63119 - protein, 9 aa, synthetic construct
  source 1..9: note = Seed: SQMEIDFLE
SSMEIDFLA

SEQ ID NO: 63120 - protein, 10 aa, synthetic construct
  source 1..10: note = Seed: SQMEIDFLEL
SSMEIDFLEF

SEQ ID NO: 63121 - protein, 11 aa, synthetic construct
  source 1..11: note = Seed: SQMEIDFLELA
SSMEIDFLELV

SEQ ID NO: 63122 - protein, 10 aa, synthetic construct
  source 1..10: note = Seed: SQMEIDFLEL
SSMEIDFLEV

SEQ ID NO: 63123 - protein, 10 aa, synthetic construct
  source 1..10: note = Seed: SQMEIDFLEL
SSMEIDFLEY

SEQ ID NO: 63124 - protein, 9 aa, synthetic construct
  source 1..9: note = Seed: SQMEIDFLE
SSMEIDFLI

SEQ ID NO: 63125 - protein, 9 aa, synthetic construct
  source 1..9: note = Seed: SQMEIDFLE
SSMEIDFLL

SEQ ID NO: 63126 - protein, 9 aa, synthetic construct
  source 1..9: note = Seed: SQMEIDFLE
SSMEIDFLM

SEQ ID NO: 63127 - protein, 9 aa, synthetic construct
  source 1..9: note = Seed: SQMEIDFLE
SSMEIDFLV

SEQ ID NO: 63128 - protein, 9 aa, synthetic construct
  source 1..9: note = Seed: SMMGFKMNY
SSMGFKMNF

SEQ ID NO: 63129 - protein, 9 aa, synthetic construct
  source 1..9: note = Seed: SMMGFKMNY
SSMGFKMNI

SEQ ID NO: 63130 - protein, 9 aa, synthetic construct
  source 1..9: note = Seed: SMMGFKMNY
SSMGFKMNK

SEQ ID NO: 63131 - protein, 9 aa, synthetic construct
  source 1..9: note = Seed: SMMGFKMNY
SSMGFKMNL

SEQ ID NO: 63132 - protein, 9 aa, synthetic construct
  source 1..9: note = Seed: SMMGFKMNY
SSMGFKMNM

SEQ ID NO: 63133 - protein, 9 aa, synthetic construct
  source 1..9: note = Seed: SMMGFKMNY
SSMGFKMNR

SEQ ID NO: 63134 - protein, 9 aa, synthetic construct
  source 1..9: note = Seed: SMMGFKMNY
SSMGFKMNV

SEQ ID NO: 63135 - protein, 9 aa, synthetic construct
  source 1..9: note = Seed: SMMGFKMNY
SSMGFKMNW

SEQ ID NO: 63136 - protein, 9 aa, synthetic construct
  source 1..9: note = Seed: SMMGFKMNY
SSMGFKMNY

SEQ ID NO: 63137 - protein, 10 aa, synthetic construct
  source 1..10: note = Seed: SMMGFKMNYQ
SSMGFKMNYK

SEQ ID NO: 63138 - protein, 10 aa, synthetic construct
  source 1..10: note = Seed: SMMGFKMNYQ
SSMGFKMNYR

SEQ ID NO: 63139 - protein, 10 aa, synthetic construct
  source 1..10: note = Seed: SMMGFKMNYQ
SSMGFKMNYY

SEQ ID NO: 63140 - protein, 8 aa, synthetic construct
  source 1..8: note = Seed: SAMQTMLF
SSMQTMLF

SEQ ID NO: 63141 - protein, 10 aa, synthetic construct
  source 1..10: note = Seed: SAMQTMLFTM
SSMQTMLFTA

SEQ ID NO: 63142 - protein, 10 aa, synthetic construct
  source 1..10: note = Seed: SAMQTMLFTM
SSMQTMLFTF

SEQ ID NO: 63143 - protein, 10 aa, synthetic construct
  source 1..10: note = Seed: SAMQTMLFTM
SSMQTMLFTI

SEQ ID NO: 63144 - protein, 10 aa, synthetic construct
  source 1..10: note = Seed: SAMQTMLFTM
SSMQTMLFTL

SEQ ID NO: 63145 - protein, 10 aa, synthetic construct
  source 1..10: note = Seed: SAMQTMLFTM
SSMQTMLFTM

SEQ ID NO: 63146 - protein, 10 aa, synthetic construct
  source 1..10: note = Seed: SAMQTMLFTM
SSMQTMLFTV

SEQ ID NO: 63147 - protein, 10 aa, synthetic construct
  source 1..10: note = Seed: SAMQTMLFTM
SSMQTMLFTW

SEQ ID NO: 63148 - protein, 10 aa, synthetic construct
  source 1..10: note = Seed: SAMQTMLFTM
SSMQTMLFTY

SEQ ID NO: 63149 - protein, 9 aa, synthetic construct
  source 1..9: note = Seed: SAMQTMLFT
SSMQTMLFV

SEQ ID NO: 63150 - protein, 8 aa, synthetic construct
  source 1..8: note = Seed: SAMQTMLF
SSMQTMLW

SEQ ID NO: 63151 - protein, 8 aa, synthetic construct
  source 1..8: note = Seed: SAMQTMLF
SSMQTMLY

SEQ ID NO: 63152 - protein, 9 aa, synthetic construct
  source 1..9: note = Seed: STMTNRQFH
SSMTNRQFA

SEQ ID NO: 63153 - protein, 11 aa, synthetic construct
  source 1..11: note = Seed: STMTNRQFHQK
SSMTNRQFHQK

SEQ ID NO: 63154 - protein, 11 aa, synthetic construct
  source 1..11: note = Seed: STMTNRQFHQK
SSMTNRQFHQR

SEQ ID NO: 63155 - protein, 9 aa, synthetic construct
  source 1..9: note = Seed: STMTNRQFH
SSMTNRQFK

SEQ ID NO: 63156 - protein, 8 aa, synthetic construct
  source 1..8: note = Seed: SAMVRMYI
SSMVRMYF

SEQ ID NO: 63157 - protein, 9 aa, synthetic construct
  source 1..9: note = Seed: SAMVRMYIF
SSMVRMYIF

SEQ ID NO: 63158 - protein, 9 aa, synthetic construct
  source 1..9: note = Seed: SAMVRMYIF
SSMVRMYII

SEQ ID NO: 63159 - protein, 9 aa, synthetic construct
  source 1..9: note = Seed: SAMVRMYIF
SSMVRMYIL

SEQ ID NO: 63160 - protein, 9 aa, synthetic construct
  source 1..9: note = Seed: SAMVRMYIF
SSMVRMYIM

SEQ ID NO: 63161 - protein, 9 aa, synthetic construct
  source 1..9: note = Seed: SAMVRMYIF
SSMVRMYIV

SEQ ID NO: 63162 - protein, 9 aa, synthetic construct
  source 1..9: note = Seed: SAMVRMYIF
SSMVRMYIW

SEQ ID NO: 63163 - protein, 9 aa, synthetic construct
  source 1..9: note = Seed: SAMVRMYIF
SSMVRMYIY

SEQ ID NO: 63164 - protein, 8 aa, synthetic construct
  source 1..8: note = Seed: SAMVRMYI
SSMVRMYL

SEQ ID NO: 63165 - protein, 8 aa, synthetic construct
  source 1..8: note = Seed: SAMVRMYI
SSMVRMYM

SEQ ID NO: 63166 - protein, 8 aa, synthetic construct
  source 1..8: note = Seed: SAMVRMYI
SSMVRMYY

SEQ ID NO: 63167 - protein, 10 aa, synthetic construct
  source 1..10: note = Seed: SSNFGAISSV
SSNFGAISSF

SEQ ID NO: 63168 - protein, 10 aa, synthetic construct
  source 1..10: note = Seed: SSNFGAISSV
SSNFGAISSL

SEQ ID NO: 63169 - protein, 10 aa, synthetic construct
  source 1..10: note = Seed: SSNFGAISSV
SSNFGAISSM

SEQ ID NO: 63170 - protein, 10 aa, synthetic construct
  source 1..10: note = Seed: SSNFGAISSV
SSNFGAISSW

SEQ ID NO: 63171 - protein, 10 aa, synthetic construct
  source 1..10: note = Seed: SSNFGAISSV
SSNFGAISSY

SEQ ID NO: 63172 - protein, 9 aa, synthetic construct
  source 1..9: note = Seed: SANNCTFEY
SSNNCTFEF

SEQ ID NO: 63173 - protein, 9 aa, synthetic construct
  source 1..9: note = Seed: SANNCTFEY
SSNNCTFEK

SEQ ID NO: 63174 - protein, 9 aa, synthetic construct
  source 1..9: note = Seed: SANNCTFEY
SSNNCTFEL

SEQ ID NO: 63175 - protein, 9 aa, synthetic construct
  source 1..9: note = Seed: SANNCTFEY
SSNNCTFEM

SEQ ID NO: 63176 - protein, 9 aa, synthetic construct
  source 1..9: note = Seed: SANNCTFEY
SSNNCTFER

SEQ ID NO: 63177 - protein, 9 aa, synthetic construct
  source 1..9: note = Seed: SANNCTFEY
SSNNCTFEW

SEQ ID NO: 63178 - protein, 9 aa, synthetic construct
  source 1..9: note = Seed: SANNCTFEY
SSNNCTFEY

SEQ ID NO: 63179 - protein, 9 aa, synthetic construct
  source 1..9: note = Seed: SSNVANYQK
SSNVANYQR

SEQ ID NO: 63180 - protein, 9 aa, synthetic construct
  source 1..9: note = Seed: SLPGVFCGV
SSPGVFCGV

SEQ ID NO: 63181 - protein, 9 aa, synthetic construct
  source 1..9: note = Seed: SAPHGVVFL
SSPHGVVFL

SEQ ID NO: 63182 - protein, 11 aa, synthetic construct
  source 1..11: note = Seed: SSQAWQPGVAM
SSQAWQPGVAW

SEQ ID NO: 63183 - protein, 10 aa, synthetic construct
  source 1..10: note = Seed: SMQGAVDINK
SSQGAVDINK

SEQ ID NO: 63184 - protein, 9 aa, synthetic construct
  source 1..9: note = Seed: SFRLFARTR
SSRLFARTA

SEQ ID NO: 63185 - protein, 9 aa, synthetic construct
  source 1..9: note = Seed: SFRLFARTR
SSRLFARTI

SEQ ID NO: 63186 - protein, 9 aa, synthetic construct
  source 1..9: note = Seed: SFRLFARTR
SSRLFARTK

SEQ ID NO: 63187 - protein, 9 aa, synthetic construct
  source 1..9: note = Seed: SFRLFARTR
SSRLFARTL

SEQ ID NO: 63188 - protein, 9 aa, synthetic construct
  source 1..9: note = Seed: SFRLFARTR
SSRLFARTM

SEQ ID NO: 63189 - protein, 9 aa, synthetic construct
  source 1..9: note = Seed: SFRLFARTR
SSRLFARTR

SEQ ID NO: 63190 - protein, 10 aa, synthetic construct
  source 1..10: note = Seed: SFRLFARTRS
SSRLFARTRA

SEQ ID NO: 63191 - protein, 10 aa, synthetic construct
  source 1..10: note = Seed: SFRLFARTRS
SSRLFARTRK

SEQ ID NO: 63192 - protein, 9 aa, synthetic construct
  source 1..9: note = Seed: SFRLFARTR
SSRLFARTS

SEQ ID NO: 63193 - protein, 9 aa, synthetic construct
  source 1..9: note = Seed: SFRLFARTR
SSRLFARTV

SEQ ID NO: 63194 - protein, 9 aa, synthetic construct
  source 1..9: note = Seed: SSRLSFKEL
SSRLSFKEA

SEQ ID NO: 63195 - protein, 9 aa, synthetic construct
  source 1..9: note = Seed: SSRLSFKEL
SSRLSFKEF

SEQ ID NO: 63196 - protein, 9 aa, synthetic construct
  source 1..9: note = Seed: SSRLSFKEL
SSRLSFKEI

SEQ ID NO: 63197 - protein, 9 aa, synthetic construct
  source 1..9: note = Seed: SSRLSFKEL
SSRLSFKEK

SEQ ID NO: 63198 - protein, 9 aa, synthetic construct
  source 1..9: note = Seed: SSRLSFKEL
SSRLSFKEM

SEQ ID NO: 63199 - protein, 9 aa, synthetic construct
  source 1..9: note = Seed: SSRLSFKEL
SSRLSFKES

SEQ ID NO: 63200 - protein, 9 aa, synthetic construct
  source 1..9: note = Seed: SSRLSFKEL
SSRLSFKEV

SEQ ID NO: 63201 - protein, 9 aa, synthetic construct
  source 1..9: note = Seed: SSRLSFKEL
SSRLSFKEW

SEQ ID NO: 63202 - protein, 9 aa, synthetic construct
  source 1..9: note = Seed: SSRLSFKEL
SSRLSFKEY

SEQ ID NO: 63203 - protein, 9 aa, synthetic construct
  source 1..9: note = Seed: SLRPDTRYV
SSRPDTRYA

SEQ ID NO: 63204 - protein, 9 aa, synthetic construct
  source 1..9: note = Seed: SLRPDTRYV
SSRPDTRYI

SEQ ID NO: 63205 - protein, 9 aa, synthetic construct
  source 1..9: note = Seed: SLRPDTRYV
SSRPDTRYK

SEQ ID NO: 63206 - protein, 9 aa, synthetic construct
  source 1..9: note = Seed: SLRPDTRYV
SSRPDTRYL

SEQ ID NO: 63207 - protein, 9 aa, synthetic construct
  source 1..9: note = Seed: SLRPDTRYV
SSRPDTRYV

SEQ ID NO: 63208 - protein, 9 aa, synthetic construct
  source 1..9: note = Seed: SVRVLQKAA
SSRVLQKAA

SEQ ID NO: 63209 - protein, 10 aa, synthetic construct
  source 1..10: note = Seed: SVRVLQKAAI
SSRVLQKAAK

SEQ ID NO: 63210 - protein, 9 aa, synthetic construct
  source 1..9: note = Seed: SVRVLQKAA
SSRVLQKAK

SEQ ID NO: 63211 - protein, 10 aa, synthetic construct
  source 1..10: note = Seed: SPRWYFYYLG
SSRWYFYYLF

SEQ ID NO: 63212 - protein, 10 aa, synthetic construct
  source 1..10: note = Seed: SPRWYFYYLG
SSRWYFYYLK

SEQ ID NO: 63213 - protein, 10 aa, synthetic construct
  source 1..10: note = Seed: SPRWYFYYLG
SSRWYFYYLL

SEQ ID NO: 63214 - protein, 10 aa, synthetic construct
  source 1..10: note = Seed: SPRWYFYYLG
SSRWYFYYLM

SEQ ID NO: 63215 - protein, 9 aa, synthetic construct
  source 1..9: note = Seed: STSAFVETV
SSSAFVETF

SEQ ID NO: 63216 - protein, 9 aa, synthetic construct
  source 1..9: note = Seed: STSAFVETV
SSSAFVETL

SEQ ID NO: 63217 - protein, 9 aa, synthetic construct
  source 1..9: note = Seed: STSAFVETV
SSSAFVETM

SEQ ID NO: 63218 - protein, 9 aa, synthetic construct
  source 1..9: note = Seed: STSAFVETV
SSSAFVETV

SEQ ID NO: 63219 - protein, 10 aa, synthetic construct
  source 1..10: note = Seed: STSAFVETVK
SSSAFVETVK

SEQ ID NO: 63220 - protein, 10 aa, synthetic construct
  source 1..10: note = Seed: STSAFVETVK
SSSAFVETVR

SEQ ID NO: 63221 - protein, 9 aa, synthetic construct
  source 1..9: note = Seed: STSAFVETV
SSSAFVETY

SEQ ID NO: 63222 - protein, 9 aa, synthetic construct
  source 1..9: note = Seed: SSSDNIALL
SSSDNIALF

SEQ ID NO: 63223 - protein, 10 aa, synthetic construct
  source 1..10: note = Seed: SSSDNIALLV
SSSDNIALLY

SEQ ID NO: 63224 - protein, 9 aa, synthetic construct
  source 1..9: note = Seed: SSSDNIALL
SSSDNIALM

SEQ ID NO: 63225 - protein, 9 aa, synthetic construct
  source 1..9: note = Seed: SSSDNIALL
SSSDNIALV

SEQ ID NO: 63226 - protein, 9 aa, synthetic construct
  source 1..9: note = Seed: SSSDNIALL
SSSDNIALW

SEQ ID NO: 63227 - protein, 9 aa, synthetic construct
  source 1..9: note = Seed: SSSDNIALL
SSSDNIALY

SEQ ID NO: 63228 - protein, 10 aa, synthetic construct
  source 1..10: note = Seed: SASFSTFKCY
SSSFSTFKCF

SEQ ID NO: 63229 - protein, 10 aa, synthetic construct
  source 1..10: note = Seed: SASFSTFKCY
SSSFSTFKCW

SEQ ID NO: 63230 - protein, 10 aa, synthetic construct
  source 1..10: note = Seed: SASFSTFKCY
SSSFSTFKCY

SEQ ID NO: 63231 - protein, 10 aa, synthetic construct
  source 1..10: note = Seed: SSSKTPEEHF
SSSKTPEEHW

SEQ ID NO: 63232 - protein, 9 aa, synthetic construct
  source 1..9: note = Seed: SSSSDNIAL
SSSSDNIAF

SEQ ID NO: 63233 - protein, 9 aa, synthetic construct
  source 1..9: note = Seed: SSSSDNIAL
SSSSDNIAW

SEQ ID NO: 63234 - protein, 9 aa, synthetic construct
  source 1..9: note = Seed: SASVYYSQL
SSSVYYSQF

SEQ ID NO: 63235 - protein, 9 aa, synthetic construct
  source 1..9: note = Seed: SASVYYSQL
SSSVYYSQL

SEQ ID NO: 63236 - protein, 10 aa, synthetic construct
  source 1..10: note = Seed: SASVYYSQLM
SSSVYYSQLF

SEQ ID NO: 63237 - protein, 10 aa, synthetic construct
  source 1..10: note = Seed: SASVYYSQLM
SSSVYYSQLW

SEQ ID NO: 63238 - protein, 10 aa, synthetic construct
  source 1..10: note = Seed: SASVYYSQLM
SSSVYYSQLY

SEQ ID NO: 63239 - protein, 9 aa, synthetic construct
  source 1..9: note = Seed: SASVYYSQL
SSSVYYSQM

SEQ ID NO: 63240 - protein, 9 aa, synthetic construct
  source 1..9: note = Seed: SASVYYSQL
SSSVYYSQW

SEQ ID NO: 63241 - protein, 9 aa, synthetic construct
  source 1..9: note = Seed: SASVYYSQL
SSSVYYSQY

SEQ ID NO: 63242 - protein, 9 aa, synthetic construct
  source 1..9: note = Seed: SNSWLMWLI
SSSWLMWLA

SEQ ID NO: 63243 - protein, 9 aa, synthetic construct
  source 1..9: note = Seed: SNSWLMWLI
SSSWLMWLI

SEQ ID NO: 63244 - protein, 9 aa, synthetic construct
  source 1..9: note = Seed: SNSWLMWLI
SSSWLMWLV

SEQ ID NO: 63245 - protein, 10 aa, synthetic construct
  source 1..10: note = Seed: SSTCMMCYKR
SSTCMMCYKK

SEQ ID NO: 63246 - protein, 9 aa, synthetic construct
  source 1..9: note = Seed: SSTCMMCYK
SSTCMMCYR

SEQ ID NO: 63247 - protein, 9 aa, synthetic construct
  source 1..9: note = Seed: STTTNIVTR
SSTTNIVTK

SEQ ID NO: 63248 - protein, 9 aa, synthetic construct
  source 1..9: note = Seed: STTTNIVTR
SSTTNIVTR

SEQ ID NO: 63249 - protein, 11 aa, synthetic construct
  source 1..11: note = Seed: SDTYACWHHSI
SSTYACWHHSF

SEQ ID NO: 63250 - protein, 11 aa, synthetic construct
  source 1..11: note = Seed: SDTYACWHHSI
SSTYACWHHSI

SEQ ID NO: 63251 - protein, 11 aa, synthetic construct
  source 1..11: note = Seed: SDTYACWHHSI
SSTYACWHHSL

SEQ ID NO: 63252 - protein, 11 aa, synthetic construct
  source 1..11: note = Seed: SDTYACWHHSI
SSTYACWHHSW

SEQ ID NO: 63253 - protein, 9 aa, synthetic construct
  source 1..9: note = Seed: SIVCRFDTR
SSVCRFDTR

SEQ ID NO: 63254 - protein, 11 aa, synthetic construct
  source 1..11: note = Seed: SVVLLSVLQQL
SSVLLSVLQQI

SEQ ID NO: 63255 - protein, 11 aa, synthetic construct
  source 1..11: note = Seed: SVVLLSVLQQL
SSVLLSVLQQV

SEQ ID NO: 63256 - protein, 10 aa, synthetic construct
  source 1..10: note = Seed: SSVLNDILSR
SSVLNDILSK

SEQ ID NO: 63257 - protein, 11 aa, synthetic construct
  source 1..11: note = Seed: SSVLNDILSRL
SSVLNDILSRV

SEQ ID NO: 63258 - protein, 9 aa, synthetic construct
  source 1..9: note = Seed: SAVLQSGFR
SSVLQSGFR

SEQ ID NO: 63259 - protein, 10 aa, synthetic construct
  source 1..10: note = Seed: SAVLQSGFRK
SSVLQSGFRK

SEQ ID NO: 63260 - protein, 10 aa, synthetic construct
  source 1..10: note = Seed: SAVLQSGFRK
SSVLQSGFRR

SEQ ID NO: 63261 - protein, 10 aa, synthetic construct
  source 1..10: note = Seed: SWVMRIMTWL
SSVMRIMTWV

SEQ ID NO: 63262 - protein, 9 aa, synthetic construct
  source 1..9: note = Seed: SLVVRCSFY
SSVVRCSFY

SEQ ID NO: 63263 - protein, 9 aa, synthetic construct
  source 1..9: note = Seed: SGVYQCAMR
SSVYQCAMK

SEQ ID NO: 63264 - protein, 9 aa, synthetic construct
  source 1..9: note = Seed: SGVYQCAMR
SSVYQCAMR

SEQ ID NO: 63265 - protein, 10 aa, synthetic construct
  source 1..10: note = Seed: SDYDYYRYNL
SSYDYYRYNF

SEQ ID NO: 63266 - protein, 9 aa, synthetic construct
  source 1..9: note = Seed: SFYEDFLEY
SSYEDFLEF

SEQ ID NO: 63267 - protein, 9 aa, synthetic construct
  source 1..9: note = Seed: SFYEDFLEY
SSYEDFLEI

SEQ ID NO: 63268 - protein, 9 aa, synthetic construct
  source 1..9: note = Seed: SFYEDFLEY
SSYEDFLEL

SEQ ID NO: 63269 - protein, 9 aa, synthetic construct
  source 1..9: note = Seed: SFYEDFLEY
SSYEDFLEM

SEQ ID NO: 63270 - protein, 9 aa, synthetic construct
  source 1..9: note = Seed: SFYEDFLEY
SSYEDFLEV

SEQ ID NO: 63271 - protein, 9 aa, synthetic construct
  source 1..9: note = Seed: SFYEDFLEY
SSYEDFLEY

SEQ ID NO: 63272 - protein, 9 aa, synthetic construct
  source 1..9: note = Seed: SAYENFNQH
SSYENFNQF

SEQ ID NO: 63273 - protein, 9 aa, synthetic construct
  source 1..9: note = Seed: SAYENFNQH
SSYENFNQI

SEQ ID NO: 63274 - protein, 9 aa, synthetic construct
  source 1..9: note = Seed: SAYENFNQH
SSYENFNQL

SEQ ID NO: 63275 - protein, 9 aa, synthetic construct
  source 1..9: note = Seed: SAYENFNQH
SSYENFNQM

SEQ ID NO: 63276 - protein, 9 aa, synthetic construct
  source 1..9: note = Seed: SAYENFNQH
SSYENFNQV

SEQ ID NO: 63277 - protein, 9 aa, synthetic construct
  source 1..9: note = Seed: SAYENFNQH
SSYENFNQY

SEQ ID NO: 63278 - protein, 10 aa, synthetic construct
  source 1..10: note = Seed: SSYIVDSVTV
SSYIVDSVTF

SEQ ID NO: 63279 - protein, 10 aa, synthetic construct
  source 1..10: note = Seed: SSYIVDSVTV
SSYIVDSVTI

SEQ ID NO: 63280 - protein, 10 aa, synthetic construct
  source 1..10: note = Seed: SSYIVDSVTV
SSYIVDSVTL

SEQ ID NO: 63281 - protein, 10 aa, synthetic construct
  source 1..10: note = Seed: SSYIVDSVTV
SSYIVDSVTW

SEQ ID NO: 63282 - protein, 10 aa, synthetic construct
  source 1..10: note = Seed: SYYKLGASQR
SSYKLGASQR

SEQ ID NO: 63283 - protein, 9 aa, synthetic construct
  source 1..9: note = Seed: SPYNSQNAV
SSYNSQNAY

SEQ ID NO: 63284 - protein, 10 aa, synthetic construct
  source 1..10: note = Seed: SRYRIGNYKL
SSYRIGNYKF

SEQ ID NO: 63285 - protein, 9 aa, synthetic construct
  source 1..9: note = Seed: SYYSLLMPI
SSYSLLMPA

SEQ ID NO: 63286 - protein, 9 aa, synthetic construct
  source 1..9: note = Seed: SYYSLLMPI
SSYSLLMPF

SEQ ID NO: 63287 - protein, 9 aa, synthetic construct
  source 1..9: note = Seed: SYYSLLMPI
SSYSLLMPI

SEQ ID NO: 63288 - protein, 10 aa, synthetic construct
  source 1..10: note = Seed: SYYSLLMPIL
SSYSLLMPIF

SEQ ID NO: 63289 - protein, 9 aa, synthetic construct
  source 1..9: note = Seed: SYYSLLMPI
SSYSLLMPK

SEQ ID NO: 63290 - protein, 9 aa, synthetic construct
  source 1..9: note = Seed: SYYSLLMPI
SSYSLLMPL

SEQ ID NO: 63291 - protein, 9 aa, synthetic construct
  source 1..9: note = Seed: SYYSLLMPI
SSYSLLMPM

SEQ ID NO: 63292 - protein, 9 aa, synthetic construct
  source 1..9: note = Seed: SYYSLLMPI
SSYSLLMPV

SEQ ID NO: 63293 - protein, 9 aa, synthetic construct
  source 1..9: note = Seed: SYYSLLMPI
SSYSLLMPW

SEQ ID NO: 63294 - protein, 9 aa, synthetic construct
  source 1..9: note = Seed: SYYSLLMPI
SSYSLLMPY

SEQ ID NO: 63295 - protein, 9 aa, synthetic construct
  source 1..9: note = Seed: SLYVNKHAF
SSYVNKHAF

SEQ ID NO: 63296 - protein, 9 aa, synthetic construct
  source 1..9: note = Seed: SLYVNKHAF
SSYVNKHAI

SEQ ID NO: 63297 - protein, 9 aa, synthetic construct
  source 1..9: note = Seed: SLYVNKHAF
SSYVNKHAL

SEQ ID NO: 63298 - protein, 9 aa, synthetic construct
  source 1..9: note = Seed: SLYVNKHAF
SSYVNKHAM

SEQ ID NO: 63299 - protein, 9 aa, synthetic construct
  source 1..9: note = Seed: SLYVNKHAF
SSYVNKHAV

SEQ ID NO: 63300 - protein, 9 aa, synthetic construct
  source 1..9: note = Seed: SLYVNKHAF
SSYVNKHAY

SEQ ID NO: 63301 - protein, 10 aa, synthetic construct
  source 1..10: note = Seed: SFYVYANGGK
SSYVYANGGR

SEQ ID NO: 63302 - protein, 9 aa, synthetic construct
  source 1..9: note = Seed: SFYYVWKSY
SSYYVWKSF

SEQ ID NO: 63303 - protein, 9 aa, synthetic construct
  source 1..9: note = Seed: SFYYVWKSY
SSYYVWKSY

SEQ ID NO: 63304 - protein, 10 aa, synthetic construct
  source 1..10: note = Seed: SFYYVWKSYV
SSYYVWKSYF

SEQ ID NO: 63305 - protein, 10 aa, synthetic construct
  source 1..10: note = Seed: SFYYVWKSYV
SSYYVWKSYW

SEQ ID NO: 63306 - protein, 10 aa, synthetic construct
  source 1..10: note = Seed: SEAFLIGCNY
STAFLIGCNY

SEQ ID NO: 63307 - protein, 11 aa, synthetic construct
  source 1..11: note = Seed: SVAIKITEHSW
STAIKITEHSW

SEQ ID NO: 63308 - protein, 10 aa, synthetic construct
  source 1..10: note = Seed: SIAIPTNFTI
STAIPTNFTF

SEQ ID NO: 63309 - protein, 10 aa, synthetic construct
  source 1..10: note = Seed: SIAIPTNFTI
STAIPTNFTI

SEQ ID NO: 63310 - protein, 10 aa, synthetic construct
  source 1..10: note = Seed: SIAIPTNFTI
STAIPTNFTV

SEQ ID NO: 63311 - protein, 10 aa, synthetic construct
  source 1..10: note = Seed: SIAIPTNFTI
STAIPTNFTW

SEQ ID NO: 63312 - protein, 10 aa, synthetic construct
  source 1..10: note = Seed: SAAKKNNLPF
STAKKNNLPF

SEQ ID NO: 63313 - protein, 11 aa, synthetic construct
  source 1..11: note = Seed: SAAKKNNLPFK
STAKKNNLPFK

SEQ ID NO: 63314 - protein, 10 aa, synthetic construct
  source 1..10: note = Seed: SAAKKNNLPF
STAKKNNLPW

SEQ ID NO: 63315 - protein, 10 aa, synthetic construct
  source 1..10: note = Seed: SSANNCTFEY
STANNCTFEK

SEQ ID NO: 63316 - protein, 10 aa, synthetic construct
  source 1..10: note = Seed: SSANNCTFEY
STANNCTFEW

SEQ ID NO: 63317 - protein, 10 aa, synthetic construct
  source 1..10: note = Seed: SSANNCTFEY
STANNCTFEY

SEQ ID NO: 63318 - protein, 11 aa, synthetic construct
  source 1..11: note = Seed: SSANNCTFEYV
STANNCTFEYV

SEQ ID NO: 63319 - protein, 10 aa, synthetic construct
  source 1..10: note = Seed: SQAWQPGVAM
STAWQPGVAF

SEQ ID NO: 63320 - protein, 10 aa, synthetic construct
  source 1..10: note = Seed: SQAWQPGVAM
STAWQPGVAY

SEQ ID NO: 63321 - protein, 11 aa, synthetic construct
  source 1..11: note = Seed: SFCAFAVDAAK
STCAFAVDAAK

SEQ ID NO: 63322 - protein, 11 aa, synthetic construct
  source 1..11: note = Seed: SFCAFAVDAAK
STCAFAVDAAR

SEQ ID NO: 63323 - protein, 9 aa, synthetic construct
  source 1..9: note = Seed: STCMMCYKR
STCMMCYKK

SEQ ID NO: 63324 - protein, 10 aa, synthetic construct
  source 1..10: note = Seed: STCMMCYKRN
STCMMCYKRR

SEQ ID NO: 63325 - protein, 8 aa, synthetic construct
  source 1..8: note = Seed: STCMMCYK
STCMMCYR

SEQ ID NO: 63326 - protein, 9 aa, synthetic construct
  source 1..9: note = Seed: SICSTMTNR
STCSTMTNK

SEQ ID NO: 63327 - protein, 9 aa, synthetic construct
  source 1..9: note = Seed: SICSTMTNR
STCSTMTNR

SEQ ID NO: 63328 - protein, 10 aa, synthetic construct
  source 1..10: note = Seed: SIDAFKLNIK
STDAFKLNIK

SEQ ID NO: 63329 - protein, 9 aa, synthetic construct
  source 1..9: note = Seed: SSDNIALLV
STDNIALLF

SEQ ID NO: 63330 - protein, 9 aa, synthetic construct
  source 1..9: note = Seed: SSDNIALLV
STDNIALLI

SEQ ID NO: 63331 - protein, 9 aa, synthetic construct
  source 1..9: note = Seed: SSDNIALLV
STDNIALLL

SEQ ID NO: 63332 - protein, 9 aa, synthetic construct
  source 1..9: note = Seed: SSDNIALLV
STDNIALLM

SEQ ID NO: 63333 - protein, 9 aa, synthetic construct
  source 1..9: note = Seed: SSDNIALLV
STDNIALLV

SEQ ID NO: 63334 - protein, 9 aa, synthetic construct
  source 1..9: note = Seed: SSDNIALLV
STDNIALLY

SEQ ID NO: 63335 - protein, 10 aa, synthetic construct
  source 1..10: note = Seed: SMDNSPNLAW
STDNSPNLAW

SEQ ID NO: 63336 - protein, 10 aa, synthetic construct
  source 1..10: note = Seed: SYELQTPFEI
STELQTPFEL

SEQ ID NO: 63337 - protein, 10 aa, synthetic construct
  source 1..10: note = Seed: SYELQTPFEI
STELQTPFEW

SEQ ID NO: 63338 - protein, 9 aa, synthetic construct
  source 1..9: note = Seed: SGFAAYSRY
STFAAYSRF

SEQ ID NO: 63339 - protein, 9 aa, synthetic construct
  source 1..9: note = Seed: SGFAAYSRY
STFAAYSRI

SEQ ID NO: 63340 - protein, 9 aa, synthetic construct
  source 1..9: note = Seed: SGFAAYSRY
STFAAYSRL

SEQ ID NO: 63341 - protein, 9 aa, synthetic construct
  source 1..9: note = Seed: SGFAAYSRY
STFAAYSRM

SEQ ID NO: 63342 - protein, 9 aa, synthetic construct
  source 1..9: note = Seed: SGFAAYSRY
STFAAYSRW

SEQ ID NO: 63343 - protein, 9 aa, synthetic construct
  source 1..9: note = Seed: SGFAAYSRY
STFAAYSRY

SEQ ID NO: 63344 - protein, 9 aa, synthetic construct
  source 1..9: note = Seed: SAFAMMFVK
STFAMMFVK

SEQ ID NO: 63345 - protein, 10 aa, synthetic construct
  source 1..10: note = Seed: SAFAMMFVKH
STFAMMFVKA

SEQ ID NO: 63346 - protein, 10 aa, synthetic construct
  source 1..10: note = Seed: SAFAMMFVKH
STFAMMFVKC

SEQ ID NO: 63347 - protein, 10 aa, synthetic construct
  source 1..10: note = Seed: SAFAMMFVKH
STFAMMFVKD

SEQ ID NO: 63348 - protein, 10 aa, synthetic construct
  source 1..10: note = Seed: SAFAMMFVKH
STFAMMFVKE

SEQ ID NO: 63349 - protein, 10 aa, synthetic construct
  source 1..10: note = Seed: SAFAMMFVKH
STFAMMFVKF

SEQ ID NO: 63350 - protein, 10 aa, synthetic construct
  source 1..10: note = Seed: SAFAMMFVKH
STFAMMFVKG

SEQ ID NO: 63351 - protein, 10 aa, synthetic construct
  source 1..10: note = Seed: SAFAMMFVKH
STFAMMFVKH

SEQ ID NO: 63352 - protein, 11 aa, synthetic construct
  source 1..11: note = Seed: SAFAMMFVKHK
STFAMMFVKHK

SEQ ID NO: 63353 - protein, 11 aa, synthetic construct
  source 1..11: note = Seed: SAFAMMFVKHK
STFAMMFVKHR

SEQ ID NO: 63354 - protein, 10 aa, synthetic construct
  source 1..10: note = Seed: SAFAMMFVKH
STFAMMFVKI

SEQ ID NO: 63355 - protein, 10 aa, synthetic construct
  source 1..10: note = Seed: SAFAMMFVKH
STFAMMFVKK

SEQ ID NO: 63356 - protein, 10 aa, synthetic construct
  source 1..10: note = Seed: SAFAMMFVKH
STFAMMFVKL

SEQ ID NO: 63357 - protein, 10 aa, synthetic construct
  source 1..10: note = Seed: SAFAMMFVKH
STFAMMFVKM

SEQ ID NO: 63358 - protein, 10 aa, synthetic construct
  source 1..10: note = Seed: SAFAMMFVKH
STFAMMFVKN

SEQ ID NO: 63359 - protein, 10 aa, synthetic construct
  source 1..10: note = Seed: SAFAMMFVKH
STFAMMFVKP

SEQ ID NO: 63360 - protein, 10 aa, synthetic construct
  source 1..10: note = Seed: SAFAMMFVKH
STFAMMFVKQ

SEQ ID NO: 63361 - protein, 10 aa, synthetic construct
  source 1..10: note = Seed: SAFAMMFVKH
STFAMMFVKR

SEQ ID NO: 63362 - protein, 10 aa, synthetic construct
  source 1..10: note = Seed: SAFAMMFVKH
STFAMMFVKS

SEQ ID NO: 63363 - protein, 10 aa, synthetic construct
  source 1..10: note = Seed: SAFAMMFVKH
STFAMMFVKT

SEQ ID NO: 63364 - protein, 10 aa, synthetic construct
  source 1..10: note = Seed: SAFAMMFVKH
STFAMMFVKV

SEQ ID NO: 63365 - protein, 10 aa, synthetic construct
  source 1..10: note = Seed: SAFAMMFVKH
STFAMMFVKW

SEQ ID NO: 63366 - protein, 10 aa, synthetic construct
  source 1..10: note = Seed: SAFAMMFVKH
STFAMMFVKY

SEQ ID NO: 63367 - protein, 9 aa, synthetic construct
  source 1..9: note = Seed: SAFAMMFVK
STFAMMFVR

SEQ ID NO: 63368 - protein, 9 aa, synthetic construct
  source 1..9: note = Seed: SAFAMMFVK
STFAMMFVY

SEQ ID NO: 63369 - protein, 11 aa, synthetic construct
  source 1..11: note = Seed: STFEEAALCTF
STFEEAALCTW

SEQ ID NO: 63370 - protein, 11 aa, synthetic construct
  source 1..11: note = Seed: STFEEAALCTF
STFEEAALCTY

SEQ ID NO: 63371 - protein, 9 aa, synthetic construct
  source 1..9: note = Seed: SNFGAISSV
STFGAISSA

SEQ ID NO: 63372 - protein, 9 aa, synthetic construct
  source 1..9: note = Seed: SNFGAISSV
STFGAISSF

SEQ ID NO: 63373 - protein, 9 aa, synthetic construct
  source 1..9: note = Seed: SNFGAISSV
STFGAISSI

SEQ ID NO: 63374 - protein, 9 aa, synthetic construct
  source 1..9: note = Seed: SNFGAISSV
STFGAISSL

SEQ ID NO: 63375 - protein, 9 aa, synthetic construct
  source 1..9: note = Seed: SNFGAISSV
STFGAISSM

SEQ ID NO: 63376 - protein, 9 aa, synthetic construct
  source 1..9: note = Seed: SNFGAISSV
STFGAISST

SEQ ID NO: 63377 - protein, 9 aa, synthetic construct
  source 1..9: note = Seed: SNFGAISSV
STFGAISSV

SEQ ID NO: 63378 - protein, 9 aa, synthetic construct
  source 1..9: note = Seed: SNFGAISSV
STFGAISSY

SEQ ID NO: 63379 - protein, 8 aa, synthetic construct
  source 1..8: note = Seed: SYFIASFR
STFIASFR

SEQ ID NO: 63380 - protein, 10 aa, synthetic construct
  source 1..10: note = Seed: SYFIASFRLF
STFIASFRLF

SEQ ID NO: 63381 - protein, 11 aa, synthetic construct
  source 1..11: note = Seed: SYFIASFRLFA
STFIASFRLFK

SEQ ID NO: 63382 - protein, 10 aa, synthetic construct
  source 1..10: note = Seed: SYFIASFRLF
STFIASFRLY

SEQ ID NO: 63383 - protein, 9 aa, synthetic construct
  source 1..9: note = Seed: SYFIASFRL
STFIASFRY

SEQ ID NO: 63384 - protein, 11 aa, synthetic construct
  source 1..11: note = Seed: STFISAARQGF
STFISAARQGW

SEQ ID NO: 63385 - protein, 10 aa, synthetic construct
  source 1..10: note = Seed: STFISDEVAR
STFISDEVAK

SEQ ID NO: 63386 - protein, 9 aa, synthetic construct
  source 1..9: note = Seed: STFKCYGVS
STFKCYGVK

SEQ ID NO: 63387 - protein, 9 aa, synthetic construct
  source 1..9: note = Seed: SVFNICQAV
STFNICQAA

SEQ ID NO: 63388 - protein, 9 aa, synthetic construct
  source 1..9: note = Seed: SVFNICQAV
STFNICQAF

SEQ ID NO: 63389 - protein, 9 aa, synthetic construct
  source 1..9: note = Seed: SVFNICQAV
STFNICQAI

SEQ ID NO: 63390 - protein, 9 aa, synthetic construct
  source 1..9: note = Seed: SVFNICQAV
STFNICQAL

SEQ ID NO: 63391 - protein, 9 aa, synthetic construct
  source 1..9: note = Seed: SVFNICQAV
STFNICQAM

SEQ ID NO: 63392 - protein, 9 aa, synthetic construct
  source 1..9: note = Seed: SVFNICQAV
STFNICQAV

SEQ ID NO: 63393 - protein, 9 aa, synthetic construct
  source 1..9: note = Seed: SVFNICQAV
STFNICQAY

SEQ ID NO: 63394 - protein, 11 aa, synthetic construct
  source 1..11: note = Seed: SKFPLKLRGTA
STFPLKLRGTL

SEQ ID NO: 63395 - protein, 11 aa, synthetic construct
  source 1..11: note = Seed: SKFPLKLRGTA
STFPLKLRGTM

SEQ ID NO: 63396 - protein, 11 aa, synthetic construct
  source 1..11: note = Seed: SWFTALTQHGK
STFTALTQHGK

SEQ ID NO: 63397 - protein, 11 aa, synthetic construct
  source 1..11: note = Seed: SWFTALTQHGK
STFTALTQHGR

SEQ ID NO: 63398 - protein, 10 aa, synthetic construct
  source 1..10: note = Seed: SYFTSDYYQL
STFTSDYYQF

SEQ ID NO: 63399 - protein, 11 aa, synthetic construct
  source 1..11: note = Seed: SYFTSDYYQLY
STFTSDYYQLF

SEQ ID NO: 63400 - protein, 11 aa, synthetic construct
  source 1..11: note = Seed: SYFTSDYYQLY
STFTSDYYQLW

SEQ ID NO: 63401 - protein, 11 aa, synthetic construct
  source 1..11: note = Seed: SYFTSDYYQLY
STFTSDYYQLY

SEQ ID NO: 63402 - protein, 10 aa, synthetic construct
  source 1..10: note = Seed: SYFTSDYYQL
STFTSDYYQY

SEQ ID NO: 63403 - protein, 10 aa, synthetic construct
  source 1..10: note = Seed: SHFVNLDNLR
STFVNLDNLR

SEQ ID NO: 63404 - protein, 9 aa, synthetic construct
  source 1..9: note = Seed: SAFVNLKQL
STFVNLKQF

SEQ ID NO: 63405 - protein, 9 aa, synthetic construct
  source 1..9: note = Seed: SAFVNLKQL
STFVNLKQM

SEQ ID NO: 63406 - protein, 9 aa, synthetic construct
  source 1..9: note = Seed: SAFVNLKQL
STFVNLKQW

SEQ ID NO: 63407 - protein, 9 aa, synthetic construct
  source 1..9: note = Seed: SAFVNLKQL
STFVNLKQY

SEQ ID NO: 63408 - protein, 9 aa, synthetic construct
  source 1..9: note = Seed: SSGDATTAY
STGDATTAW

SEQ ID NO: 63409 - protein, 9 aa, synthetic construct
  source 1..9: note = Seed: SAGFPFNKW
STGFPFNKW

SEQ ID NO: 63410 - protein, 10 aa, synthetic construct
  source 1..10: note = Seed: STGSNVFQTR
STGSNVFQTK

SEQ ID NO: 63411 - protein, 9 aa, synthetic construct
  source 1..9: note = Seed: STGYHFREL
STGYHFREF

SEQ ID NO: 63412 - protein, 9 aa, synthetic construct
  source 1..9: note = Seed: STGYHFREL
STGYHFREM

SEQ ID NO: 63413 - protein, 9 aa, synthetic construct
  source 1..9: note = Seed: STGYHFREL
STGYHFREW

SEQ ID NO: 63414 - protein, 9 aa, synthetic construct
  source 1..9: note = Seed: STGYHFREL
STGYHFREY

SEQ ID NO: 63415 - protein, 9 aa, synthetic construct
  source 1..9: note = Seed: SDIDITFLK
STIDITFLH

SEQ ID NO: 63416 - protein, 9 aa, synthetic construct
  source 1..9: note = Seed: SDIDITFLK
STIDITFLK

SEQ ID NO: 63417 - protein, 10 aa, synthetic construct
  source 1..10: note = Seed: SDIDITFLKK
STIDITFLKA

SEQ ID NO: 63418 - protein, 10 aa, synthetic construct
  source 1..10: note = Seed: SDIDITFLKK
STIDITFLKC

SEQ ID NO: 63419 - protein, 10 aa, synthetic construct
  source 1..10: note = Seed: SDIDITFLKK
STIDITFLKD

SEQ ID NO: 63420 - protein, 10 aa, synthetic construct
  source 1..10: note = Seed: SDIDITFLKK
STIDITFLKE

SEQ ID NO: 63421 - protein, 10 aa, synthetic construct
  source 1..10: note = Seed: SDIDITFLKK
STIDITFLKF

SEQ ID NO: 63422 - protein, 10 aa, synthetic construct
  source 1..10: note = Seed: SDIDITFLKK
STIDITFLKG

SEQ ID NO: 63423 - protein, 10 aa, synthetic construct
  source 1..10: note = Seed: SDIDITFLKK
STIDITFLKH

SEQ ID NO: 63424 - protein, 10 aa, synthetic construct
  source 1..10: note = Seed: SDIDITFLKK
STIDITFLKI

SEQ ID NO: 63425 - protein, 10 aa, synthetic construct
  source 1..10: note = Seed: SDIDITFLKK
STIDITFLKK

SEQ ID NO: 63426 - protein, 10 aa, synthetic construct
  source 1..10: note = Seed: SDIDITFLKK
STIDITFLKL

SEQ ID NO: 63427 - protein, 10 aa, synthetic construct
  source 1..10: note = Seed: SDIDITFLKK
STIDITFLKM

SEQ ID NO: 63428 - protein, 10 aa, synthetic construct
  source 1..10: note = Seed: SDIDITFLKK
STIDITFLKN

SEQ ID NO: 63429 - protein, 10 aa, synthetic construct
  source 1..10: note = Seed: SDIDITFLKK
STIDITFLKP

SEQ ID NO: 63430 - protein, 10 aa, synthetic construct
  source 1..10: note = Seed: SDIDITFLKK
STIDITFLKQ

SEQ ID NO: 63431 - protein, 10 aa, synthetic construct
  source 1..10: note = Seed: SDIDITFLKK
STIDITFLKR

SEQ ID NO: 63432 - protein, 10 aa, synthetic construct
  source 1..10: note = Seed: SDIDITFLKK
STIDITFLKS

SEQ ID NO: 63433 - protein, 10 aa, synthetic construct
  source 1..10: note = Seed: SDIDITFLKK
STIDITFLKT

SEQ ID NO: 63434 - protein, 10 aa, synthetic construct
  source 1..10: note = Seed: SDIDITFLKK
STIDITFLKV

SEQ ID NO: 63435 - protein, 10 aa, synthetic construct
  source 1..10: note = Seed: SDIDITFLKK
STIDITFLKW

SEQ ID NO: 63436 - protein, 10 aa, synthetic construct
  source 1..10: note = Seed: SDIDITFLKK
STIDITFLKY

SEQ ID NO: 63437 - protein, 9 aa, synthetic construct
  source 1..9: note = Seed: SDIDITFLK
STIDITFLM

SEQ ID NO: 63438 - protein, 9 aa, synthetic construct
  source 1..9: note = Seed: SDIDITFLK
STIDITFLQ

SEQ ID NO: 63439 - protein, 9 aa, synthetic construct
  source 1..9: note = Seed: SDIDITFLK
STIDITFLR

SEQ ID NO: 63440 - protein, 9 aa, synthetic construct
  source 1..9: note = Seed: SDIDITFLK
STIDITFLY

SEQ ID NO: 63441 - protein, 9 aa, synthetic construct
  source 1..9: note = Seed: STIGVCSMT
STIGVCSMA

SEQ ID NO: 63442 - protein, 9 aa, synthetic construct
  source 1..9: note = Seed: STIGVCSMT
STIGVCSMI

SEQ ID NO: 63443 - protein, 9 aa, synthetic construct
  source 1..9: note = Seed: STIGVCSMT
STIGVCSML

SEQ ID NO: 63444 - protein, 9 aa, synthetic construct
  source 1..9: note = Seed: STIGVCSMT
STIGVCSMM

SEQ ID NO: 63445 - protein, 9 aa, synthetic construct
  source 1..9: note = Seed: STIGVCSMT
STIGVCSMV

SEQ ID NO: 63446 - protein, 10 aa, synthetic construct
  source 1..10: note = Seed: SIIIGGAKLK
STIIGGAKLK

SEQ ID NO: 63447 - protein, 10 aa, synthetic construct
  source 1..10: note = Seed: SIIIGGAKLK
STIIGGAKLR

SEQ ID NO: 63448 - protein, 10 aa, synthetic construct
  source 1..10: note = Seed: SRIIPARARV
STIIPARARV

SEQ ID NO: 63449 - protein, 10 aa, synthetic construct
  source 1..10: note = Seed: SAINRPQIGV
STINRPQIGV

SEQ ID NO: 63450 - protein, 9 aa, synthetic construct
  source 1..9: note = Seed: SLINTLNDL
STINTLNDV

SEQ ID NO: 63451 - protein, 10 aa, synthetic construct
  source 1..10: note = Seed: SYIVDSVTVK
STIVDSVTVK

SEQ ID NO: 63452 - protein, 10 aa, synthetic construct
  source 1..10: note = Seed: SYIVDSVTVK
STIVDSVTVR

SEQ ID NO: 63453 - protein, 9 aa, synthetic construct
  source 1..9: note = Seed: SIKNFKSVL
STKNFKSVA

SEQ ID NO: 63454 - protein, 9 aa, synthetic construct
  source 1..9: note = Seed: SIKNFKSVL
STKNFKSVI

SEQ ID NO: 63455 - protein, 9 aa, synthetic construct
  source 1..9: note = Seed: SIKNFKSVL
STKNFKSVK

SEQ ID NO: 63456 - protein, 10 aa, synthetic construct
  source 1..10: note = Seed: SIKNFKSVLY
STKNFKSVLK

SEQ ID NO: 63457 - protein, 10 aa, synthetic construct
  source 1..10: note = Seed: SIKNFKSVLY
STKNFKSVLY

SEQ ID NO: 63458 - protein, 11 aa, synthetic construct
  source 1..11: note = Seed: SIKNFKSVLYY
STKNFKSVLYK

SEQ ID NO: 63459 - protein, 11 aa, synthetic construct
  source 1..11: note = Seed: SIKNFKSVLYY
STKNFKSVLYR

SEQ ID NO: 63460 - protein, 9 aa, synthetic construct
  source 1..9: note = Seed: SIKNFKSVL
STKNFKSVV

SEQ ID NO: 63461 - protein, 9 aa, synthetic construct
  source 1..9: note = Seed: SAKNRARTV
STKNRARTA

SEQ ID NO: 63462 - protein, 9 aa, synthetic construct
  source 1..9: note = Seed: SAKNRARTV
STKNRARTK

SEQ ID NO: 63463 - protein, 9 aa, synthetic construct
  source 1..9: note = Seed: SAKNRARTV
STKNRARTV

SEQ ID NO: 63464 - protein, 10 aa, synthetic construct
  source 1..10: note = Seed: SAKNRARTVA
STKNRARTVK

SEQ ID NO: 63465 - protein, 11 aa, synthetic construct
  source 1..11: note = Seed: SKKPRQKRTAT
STKPRQKRTAF

SEQ ID NO: 63466 - protein, 11 aa, synthetic construct
  source 1..11: note = Seed: SKKPRQKRTAT
STKPRQKRTAI

SEQ ID NO: 63467 - protein, 11 aa, synthetic construct
  source 1..11: note = Seed: SKKPRQKRTAT
STKPRQKRTAL

SEQ ID NO: 63468 - protein, 11 aa, synthetic construct
  source 1..11: note = Seed: SKKPRQKRTAT
STKPRQKRTAM

SEQ ID NO: 63469 - protein, 11 aa, synthetic construct
  source 1..11: note = Seed: SKKPRQKRTAT
STKPRQKRTAV

SEQ ID NO: 63470 - protein, 11 aa, synthetic construct
  source 1..11: note = Seed: SEKSYELQTPF
STKSYELQTPF

SEQ ID NO: 63471 - protein, 11 aa, synthetic construct
  source 1..11: note = Seed: SEKSYELQTPF
STKSYELQTPW

SEQ ID NO: 63472 - protein, 11 aa, synthetic construct
  source 1..11: note = Seed: SEKSYELQTPF
STKSYELQTPY

SEQ ID NO: 63473 - protein, 9 aa, synthetic construct
  source 1..9: note = Seed: SMKYFVKIG
STKYFVKIA

SEQ ID NO: 63474 - protein, 9 aa, synthetic construct
  source 1..9: note = Seed: SMKYFVKIG
STKYFVKIK

SEQ ID NO: 63475 - protein, 9 aa, synthetic construct
  source 1..9: note = Seed: SMKYFVKIG
STKYFVKIV

SEQ ID NO: 63476 - protein, 10 aa, synthetic construct
  source 1..10: note = Seed: SFLAHIQWMV
STLAHIQWMA

SEQ ID NO: 63477 - protein, 10 aa, synthetic construct
  source 1..10: note = Seed: SFLAHIQWMV
STLAHIQWMI

SEQ ID NO: 63478 - protein, 10 aa, synthetic construct
  source 1..10: note = Seed: SFLAHIQWMV
STLAHIQWML

SEQ ID NO: 63479 - protein, 10 aa, synthetic construct
  source 1..10: note = Seed: SFLAHIQWMV
STLAHIQWMV

SEQ ID NO: 63480 - protein, 10 aa, synthetic construct
  source 1..10: note = Seed: SRLDKVEAEV
STLDKVEAEV

SEQ ID NO: 63481 - protein, 9 aa, synthetic construct
  source 1..9: note = Seed: SFLGRYMSA
STLGRYMSA

SEQ ID NO: 63482 - protein, 10 aa, synthetic construct
  source 1..10: note = Seed: SFLGRYMSAL
STLGRYMSAV

SEQ ID NO: 63483 - protein, 9 aa, synthetic construct
  source 1..9: note = Seed: SFLGRYMSA
STLGRYMSK

SEQ ID NO: 63484 - protein, 9 aa, synthetic construct
  source 1..9: note = Seed: SFLGRYMSA
STLGRYMSV

SEQ ID NO: 63485 - protein, 9 aa, synthetic construct
  source 1..9: note = Seed: SVLLFLAFV
STLLFLAFA

SEQ ID NO: 63486 - protein, 9 aa, synthetic construct
  source 1..9: note = Seed: SVLLFLAFV
STLLFLAFI

SEQ ID NO: 63487 - protein, 9 aa, synthetic construct
  source 1..9: note = Seed: SVLLFLAFV
STLLFLAFL

SEQ ID NO: 63488 - protein, 9 aa, synthetic construct
  source 1..9: note = Seed: SVLLFLAFV
STLLFLAFV

SEQ ID NO: 63489 - protein, 10 aa, synthetic construct
  source 1..10: note = Seed: SVLLFLAFVV
STLLFLAFVI

SEQ ID NO: 63490 - protein, 10 aa, synthetic construct
  source 1..10: note = Seed: SVLLFLAFVV
STLLFLAFVL

SEQ ID NO: 63491 - protein, 10 aa, synthetic construct
  source 1..10: note = Seed: SVLLFLAFVV
STLLFLAFVV

SEQ ID NO: 63492 - protein, 10 aa, synthetic construct
  source 1..10: note = Seed: SQLMCQPILL
STLMCQPILA

SEQ ID NO: 63493 - protein, 10 aa, synthetic construct
  source 1..10: note = Seed: SQLMCQPILL
STLMCQPILI

SEQ ID NO: 63494 - protein, 10 aa, synthetic construct
  source 1..10: note = Seed: SQLMCQPILL
STLMCQPILL

SEQ ID NO: 63495 - protein, 10 aa, synthetic construct
  source 1..10: note = Seed: SQLMCQPILL
STLMCQPILV

SEQ ID NO: 63496 - protein, 9 aa, synthetic construct
  source 1..9: note = Seed: SLLMPILTL
STLMPILTF

SEQ ID NO: 63497 - protein, 9 aa, synthetic construct
  source 1..9: note = Seed: SLLMPILTL
STLMPILTI

SEQ ID NO: 63498 - protein, 9 aa, synthetic construct
  source 1..9: note = Seed: SLLMPILTL
STLMPILTV

SEQ ID NO: 63499 - protein, 9 aa, synthetic construct
  source 1..9: note = Seed: SLLMPILTL
STLMPILTW

SEQ ID NO: 63500 - protein, 9 aa, synthetic construct
  source 1..9: note = Seed: SLLMPILTL
STLMPILTY

SEQ ID NO: 63501 - protein, 10 aa, synthetic construct
  source 1..10: note = Seed: SWLMWLIINL
STLMWLIINA

SEQ ID NO: 63502 - protein, 10 aa, synthetic construct
  source 1..10: note = Seed: SWLMWLIINL
STLMWLIINI

SEQ ID NO: 63503 - protein, 10 aa, synthetic construct
  source 1..10: note = Seed: SWLMWLIINL
STLMWLIINL

SEQ ID NO: 63504 - protein, 10 aa, synthetic construct
  source 1..10: note = Seed: SWLMWLIINL
STLMWLIINM

SEQ ID NO: 63505 - protein, 10 aa, synthetic construct
  source 1..10: note = Seed: SWLMWLIINL
STLMWLIINT

SEQ ID NO: 63506 - protein, 10 aa, synthetic construct
  source 1..10: note = Seed: SWLMWLIINL
STLMWLIINV

SEQ ID NO: 63507 - protein, 10 aa, synthetic construct
  source 1..10: note = Seed: SDLNDFVSDA
STLNDFVSDI

SEQ ID NO: 63508 - protein, 10 aa, synthetic construct
  source 1..10: note = Seed: SDLNDFVSDA
STLNDFVSDL

SEQ ID NO: 63509 - protein, 10 aa, synthetic construct
  source 1..10: note = Seed: SDLNDFVSDA
STLNDFVSDV

SEQ ID NO: 63510 - protein, 9 aa, synthetic construct
  source 1..9: note = Seed: SVLNDILSR
STLNDILSK

SEQ ID NO: 63511 - protein, 9 aa, synthetic construct
  source 1..9: note = Seed: SVLNDILSR
STLNDILSR

SEQ ID NO: 63512 - protein, 10 aa, synthetic construct
  source 1..10: note = Seed: SVLNDILSRL
STLNDILSRA

SEQ ID NO: 63513 - protein, 10 aa, synthetic construct
  source 1..10: note = Seed: SVLNDILSRL
STLNDILSRI

SEQ ID NO: 63514 - protein, 10 aa, synthetic construct
  source 1..10: note = Seed: SVLNDILSRL
STLNDILSRL

SEQ ID NO: 63515 - protein, 10 aa, synthetic construct
  source 1..10: note = Seed: SVLNDILSRL
STLNDILSRV

SEQ ID NO: 63516 - protein, 9 aa, synthetic construct
  source 1..9: note = Seed: SVLNDILSR
STLNDILSY

SEQ ID NO: 63517 - protein, 9 aa, synthetic construct
  source 1..9: note = Seed: SFLPGVYSV
STLPGVYSA

SEQ ID NO: 63518 - protein, 9 aa, synthetic construct
  source 1..9: note = Seed: SFLPGVYSV
STLPGVYSF

SEQ ID NO: 63519 - protein, 9 aa, synthetic construct
  source 1..9: note = Seed: SFLPGVYSV
STLPGVYSI

SEQ ID NO: 63520 - protein, 9 aa, synthetic construct
  source 1..9: note = Seed: SFLPGVYSV
STLPGVYSL

SEQ ID NO: 63521 - protein, 9 aa, synthetic construct
  source 1..9: note = Seed: SFLPGVYSV
STLPGVYSV

SEQ ID NO: 63522 - protein, 11 aa, synthetic construct
  source 1..11: note = Seed: SELVIGAVILR
STLVIGAVILR

SEQ ID NO: 63523 - protein, 9 aa, synthetic construct
  source 1..9: note = Seed: SVLYYQNNV
STLYYQNNV

SEQ ID NO: 63524 - protein, 10 aa, synthetic construct
  source 1..10: note = Seed: SVLYYQNNVF
STLYYQNNVF

SEQ ID NO: 63525 - protein, 11 aa, synthetic construct
  source 1..11: note = Seed: SVLYYQNNVFM
STLYYQNNVFF

SEQ ID NO: 63526 - protein, 11 aa, synthetic construct
  source 1..11: note = Seed: SVLYYQNNVFM
STLYYQNNVFW

SEQ ID NO: 63527 - protein, 10 aa, synthetic construct
  source 1..10: note = Seed: SVLYYQNNVF
STLYYQNNVW

SEQ ID NO: 63528 - protein, 10 aa, synthetic construct
  source 1..10: note = Seed: SVLYYQNNVF
STLYYQNNVY

SEQ ID NO: 63529 - protein, 9 aa, synthetic construct
  source 1..9: note = Seed: SQMEIDFLE
STMEIDFLA

SEQ ID NO: 63530 - protein, 10 aa, synthetic construct
  source 1..10: note = Seed: SQMEIDFLEL
STMEIDFLEA

SEQ ID NO: 63531 - protein, 10 aa, synthetic construct
  source 1..10: note = Seed: SQMEIDFLEL
STMEIDFLEF

SEQ ID NO: 63532 - protein, 10 aa, synthetic construct
  source 1..10: note = Seed: SQMEIDFLEL
STMEIDFLEI

SEQ ID NO: 63533 - protein, 10 aa, synthetic construct
  source 1..10: note = Seed: SQMEIDFLEL
STMEIDFLEL

SEQ ID NO: 63534 - protein, 11 aa, synthetic construct
  source 1..11: note = Seed: SQMEIDFLELA
STMEIDFLELV

SEQ ID NO: 63535 - protein, 10 aa, synthetic construct
  source 1..10: note = Seed: SQMEIDFLEL
STMEIDFLEV

SEQ ID NO: 63536 - protein, 10 aa, synthetic construct
  source 1..10: note = Seed: SQMEIDFLEL
STMEIDFLEY

SEQ ID NO: 63537 - protein, 9 aa, synthetic construct
  source 1..9: note = Seed: SQMEIDFLE
STMEIDFLF

SEQ ID NO: 63538 - protein, 9 aa, synthetic construct
  source 1..9: note = Seed: SQMEIDFLE
STMEIDFLI

SEQ ID NO: 63539 - protein, 9 aa, synthetic construct
  source 1..9: note = Seed: SQMEIDFLE
STMEIDFLL

SEQ ID NO: 63540 - protein, 9 aa, synthetic construct
  source 1..9: note = Seed: SQMEIDFLE
STMEIDFLM

SEQ ID NO: 63541 - protein, 9 aa, synthetic construct
  source 1..9: note = Seed: SQMEIDFLE
STMEIDFLV

SEQ ID NO: 63542 - protein, 9 aa, synthetic construct
  source 1..9: note = Seed: SMMGFKMNY
STMGFKMNA

SEQ ID NO: 63543 - protein, 9 aa, synthetic construct
  source 1..9: note = Seed: SMMGFKMNY
STMGFKMNF

SEQ ID NO: 63544 - protein, 9 aa, synthetic construct
  source 1..9: note = Seed: SMMGFKMNY
STMGFKMNI

SEQ ID NO: 63545 - protein, 9 aa, synthetic construct
  source 1..9: note = Seed: SMMGFKMNY
STMGFKMNK

SEQ ID NO: 63546 - protein, 9 aa, synthetic construct
  source 1..9: note = Seed: SMMGFKMNY
STMGFKMNL

SEQ ID NO: 63547 - protein, 9 aa, synthetic construct
  source 1..9: note = Seed: SMMGFKMNY
STMGFKMNM

SEQ ID NO: 63548 - protein, 9 aa, synthetic construct
  source 1..9: note = Seed: SMMGFKMNY
STMGFKMNR

SEQ ID NO: 63549 - protein, 9 aa, synthetic construct
  source 1..9: note = Seed: SMMGFKMNY
STMGFKMNV

SEQ ID NO: 63550 - protein, 9 aa, synthetic construct
  source 1..9: note = Seed: SMMGFKMNY
STMGFKMNW

SEQ ID NO: 63551 - protein, 9 aa, synthetic construct
  source 1..9: note = Seed: SMMGFKMNY
STMGFKMNY

SEQ ID NO: 63552 - protein, 10 aa, synthetic construct
  source 1..10: note = Seed: SMMGFKMNYQ
STMGFKMNYK

SEQ ID NO: 63553 - protein, 11 aa, synthetic construct
  source 1..11: note = Seed: SMMGFKMNYQV
STMGFKMNYQV

SEQ ID NO: 63554 - protein, 10 aa, synthetic construct
  source 1..10: note = Seed: SMMGFKMNYQ
STMGFKMNYR

SEQ ID NO: 63555 - protein, 10 aa, synthetic construct
  source 1..10: note = Seed: SMMGFKMNYQ
STMGFKMNYY

SEQ ID NO: 63556 - protein, 8 aa, synthetic construct
  source 1..8: note = Seed: SAMQTMLF
STMQTMLF

SEQ ID NO: 63557 - protein, 9 aa, synthetic construct
  source 1..9: note = Seed: SAMQTMLFT
STMQTMLFA

SEQ ID NO: 63558 - protein, 9 aa, synthetic construct
  source 1..9: note = Seed: SAMQTMLFT
STMQTMLFI

SEQ ID NO: 63559 - protein, 9 aa, synthetic construct
  source 1..9: note = Seed: SAMQTMLFT
STMQTMLFL

SEQ ID NO: 63560 - protein, 10 aa, synthetic construct
  source 1..10: note = Seed: SAMQTMLFTM
STMQTMLFTA

SEQ ID NO: 63561 - protein, 10 aa, synthetic construct
  source 1..10: note = Seed: SAMQTMLFTM
STMQTMLFTF

SEQ ID NO: 63562 - protein, 10 aa, synthetic construct
  source 1..10: note = Seed: SAMQTMLFTM
STMQTMLFTI

SEQ ID NO: 63563 - protein, 10 aa, synthetic construct
  source 1..10: note = Seed: SAMQTMLFTM
STMQTMLFTL

SEQ ID NO: 63564 - protein, 10 aa, synthetic construct
  source 1..10: note = Seed: SAMQTMLFTM
STMQTMLFTM

SEQ ID NO: 63565 - protein, 10 aa, synthetic construct
  source 1..10: note = Seed: SAMQTMLFTM
STMQTMLFTV

SEQ ID NO: 63566 - protein, 10 aa, synthetic construct
  source 1..10: note = Seed: SAMQTMLFTM
STMQTMLFTW

SEQ ID NO: 63567 - protein, 10 aa, synthetic construct
  source 1..10: note = Seed: SAMQTMLFTM
STMQTMLFTY

SEQ ID NO: 63568 - protein, 9 aa, synthetic construct
  source 1..9: note = Seed: SAMQTMLFT
STMQTMLFV

SEQ ID NO: 63569 - protein, 8 aa, synthetic construct
  source 1..8: note = Seed: SAMQTMLF
STMQTMLW

SEQ ID NO: 63570 - protein, 9 aa, synthetic construct
  source 1..9: note = Seed: STMTNRQFH
STMTNRQFA

SEQ ID NO: 63571 - protein, 11 aa, synthetic construct
  source 1..11: note = Seed: STMTNRQFHQK
STMTNRQFHQR

SEQ ID NO: 63572 - protein, 9 aa, synthetic construct
  source 1..9: note = Seed: STMTNRQFH
STMTNRQFK

SEQ ID NO: 63573 - protein, 9 aa, synthetic construct
  source 1..9: note = Seed: SAMVRMYIF
STMVRMYIF

SEQ ID NO: 63574 - protein, 9 aa, synthetic construct
  source 1..9: note = Seed: SAMVRMYIF
STMVRMYIL

SEQ ID NO: 63575 - protein, 9 aa, synthetic construct
  source 1..9: note = Seed: SAMVRMYIF
STMVRMYIM

SEQ ID NO: 63576 - protein, 9 aa, synthetic construct
  source 1..9: note = Seed: SAMVRMYIF
STMVRMYIW

SEQ ID NO: 63577 - protein, 9 aa, synthetic construct
  source 1..9: note = Seed: SAMVRMYIF
STMVRMYIY

SEQ ID NO: 63578 - protein, 10 aa, synthetic construct
  source 1..10: note = Seed: SSNFGAISSV
STNFGAISSA

SEQ ID NO: 63579 - protein, 10 aa, synthetic construct
  source 1..10: note = Seed: SSNFGAISSV
STNFGAISSF

SEQ ID NO: 63580 - protein, 10 aa, synthetic construct
  source 1..10: note = Seed: SSNFGAISSV
STNFGAISSI

SEQ ID NO: 63581 - protein, 10 aa, synthetic construct
  source 1..10: note = Seed: SSNFGAISSV
STNFGAISSM

SEQ ID NO: 63582 - protein, 10 aa, synthetic construct
  source 1..10: note = Seed: SSNFGAISSV
STNFGAISSV

SEQ ID NO: 63583 - protein, 10 aa, synthetic construct
  source 1..10: note = Seed: SSNFGAISSV
STNFGAISSW

SEQ ID NO: 63584 - protein, 10 aa, synthetic construct
  source 1..10: note = Seed: SSNFGAISSV
STNFGAISSY

SEQ ID NO: 63585 - protein, 9 aa, synthetic construct
  source 1..9: note = Seed: SANNCTFEY
STNNCTFEF

SEQ ID NO: 63586 - protein, 9 aa, synthetic construct
  source 1..9: note = Seed: SANNCTFEY
STNNCTFEK

SEQ ID NO: 63587 - protein, 9 aa, synthetic construct
  source 1..9: note = Seed: SANNCTFEY
STNNCTFEM

SEQ ID NO: 63588 - protein, 9 aa, synthetic construct
  source 1..9: note = Seed: SANNCTFEY
STNNCTFER

SEQ ID NO: 63589 - protein, 9 aa, synthetic construct
  source 1..9: note = Seed: SANNCTFEY
STNNCTFEW

SEQ ID NO: 63590 - protein, 9 aa, synthetic construct
  source 1..9: note = Seed: SANNCTFEY
STNNCTFEY

SEQ ID NO: 63591 - protein, 10 aa, synthetic construct
  source 1..10: note = Seed: SANNCTFEYV
STNNCTFEYV

SEQ ID NO: 63592 - protein, 9 aa, synthetic construct
  source 1..9: note = Seed: SSNVANYQK
STNVANYQK

SEQ ID NO: 63593 - protein, 9 aa, synthetic construct
  source 1..9: note = Seed: SSNVANYQK
STNVANYQR

SEQ ID NO: 63594 - protein, 9 aa, synthetic construct
  source 1..9: note = Seed: SLPGVFCGV
STPGVFCGA

SEQ ID NO: 63595 - protein, 9 aa, synthetic construct
  source 1..9: note = Seed: SLPGVFCGV
STPGVFCGI

SEQ ID NO: 63596 - protein, 9 aa, synthetic construct
  source 1..9: note = Seed: SLPGVFCGV
STPGVFCGL

SEQ ID NO: 63597 - protein, 9 aa, synthetic construct
  source 1..9: note = Seed: SLPGVFCGV
STPGVFCGV

SEQ ID NO: 63598 - protein, 9 aa, synthetic construct
  source 1..9: note = Seed: SAPHGVVFL
STPHGVVFL

SEQ ID NO: 63599 - protein, 9 aa, synthetic construct
  source 1..9: note = Seed: SSQAWQPGV
STQAWQPGV

SEQ ID NO: 63600 - protein, 11 aa, synthetic construct
  source 1..11: note = Seed: SSQAWQPGVAM
STQAWQPGVAW

SEQ ID NO: 63601 - protein, 10 aa, synthetic construct
  source 1..10: note = Seed: SMQGAVDINK
STQGAVDINK

SEQ ID NO: 63602 - protein, 9 aa, synthetic construct
  source 1..9: note = Seed: SFRLFARTR
STRLFARTA

SEQ ID NO: 63603 - protein, 9 aa, synthetic construct
  source 1..9: note = Seed: SFRLFARTR
STRLFARTG

SEQ ID NO: 63604 - protein, 9 aa, synthetic construct
  source 1..9: note = Seed: SFRLFARTR
STRLFARTI

SEQ ID NO: 63605 - protein, 9 aa, synthetic construct
  source 1..9: note = Seed: SFRLFARTR
STRLFARTK

SEQ ID NO: 63606 - protein, 9 aa, synthetic construct
  source 1..9: note = Seed: SFRLFARTR
STRLFARTL

SEQ ID NO: 63607 - protein, 9 aa, synthetic construct
  source 1..9: note = Seed: SFRLFARTR
STRLFARTM

SEQ ID NO: 63608 - protein, 9 aa, synthetic construct
  source 1..9: note = Seed: SFRLFARTR
STRLFARTR

SEQ ID NO: 63609 - protein, 10 aa, synthetic construct
  source 1..10: note = Seed: SFRLFARTRS
STRLFARTRA

SEQ ID NO: 63610 - protein, 10 aa, synthetic construct
  source 1..10: note = Seed: SFRLFARTRS
STRLFARTRK

SEQ ID NO: 63611 - protein, 10 aa, synthetic construct
  source 1..10: note = Seed: SFRLFARTRS
STRLFARTRV

SEQ ID NO: 63612 - protein, 9 aa, synthetic construct
  source 1..9: note = Seed: SFRLFARTR
STRLFARTS

SEQ ID NO: 63613 - protein, 9 aa, synthetic construct
  source 1..9: note = Seed: SFRLFARTR
STRLFARTT

SEQ ID NO: 63614 - protein, 9 aa, synthetic construct
  source 1..9: note = Seed: SFRLFARTR
STRLFARTV

SEQ ID NO: 63615 - protein, 9 aa, synthetic construct
  source 1..9: note = Seed: SFRLFARTR
STRLFARTY

SEQ ID NO: 63616 - protein, 9 aa, synthetic construct
  source 1..9: note = Seed: SSRLSFKEL
STRLSFKEA

SEQ ID NO: 63617 - protein, 9 aa, synthetic construct
  source 1..9: note = Seed: SSRLSFKEL
STRLSFKEF

SEQ ID NO: 63618 - protein, 9 aa, synthetic construct
  source 1..9: note = Seed: SSRLSFKEL
STRLSFKEG

SEQ ID NO: 63619 - protein, 9 aa, synthetic construct
  source 1..9: note = Seed: SSRLSFKEL
STRLSFKEI

SEQ ID NO: 63620 - protein, 9 aa, synthetic construct
  source 1..9: note = Seed: SSRLSFKEL
STRLSFKEK

SEQ ID NO: 63621 - protein, 9 aa, synthetic construct
  source 1..9: note = Seed: SSRLSFKEL
STRLSFKEL

SEQ ID NO: 63622 - protein, 9 aa, synthetic construct
  source 1..9: note = Seed: SSRLSFKEL
STRLSFKEM

SEQ ID NO: 63623 - protein, 9 aa, synthetic construct
  source 1..9: note = Seed: SSRLSFKEL
STRLSFKES

SEQ ID NO: 63624 - protein, 9 aa, synthetic construct
  source 1..9: note = Seed: SSRLSFKEL
STRLSFKET

SEQ ID NO: 63625 - protein, 9 aa, synthetic construct
  source 1..9: note = Seed: SSRLSFKEL
STRLSFKEV

SEQ ID NO: 63626 - protein, 9 aa, synthetic construct
  source 1..9: note = Seed: SSRLSFKEL
STRLSFKEW

SEQ ID NO: 63627 - protein, 9 aa, synthetic construct
  source 1..9: note = Seed: SSRLSFKEL
STRLSFKEY

SEQ ID NO: 63628 - protein, 9 aa, synthetic construct
  source 1..9: note = Seed: SLRPDTRYV
STRPDTRYA

SEQ ID NO: 63629 - protein, 9 aa, synthetic construct
  source 1..9: note = Seed: SLRPDTRYV
STRPDTRYI

SEQ ID NO: 63630 - protein, 9 aa, synthetic construct
  source 1..9: note = Seed: SLRPDTRYV
STRPDTRYK

SEQ ID NO: 63631 - protein, 9 aa, synthetic construct
  source 1..9: note = Seed: SLRPDTRYV
STRPDTRYL

SEQ ID NO: 63632 - protein, 9 aa, synthetic construct
  source 1..9: note = Seed: SLRPDTRYV
STRPDTRYM

SEQ ID NO: 63633 - protein, 9 aa, synthetic construct
  source 1..9: note = Seed: SLRPDTRYV
STRPDTRYS

SEQ ID NO: 63634 - protein, 9 aa, synthetic construct
  source 1..9: note = Seed: SLRPDTRYV
STRPDTRYV

SEQ ID NO: 63635 - protein, 9 aa, synthetic construct
  source 1..9: note = Seed: SVRVLQKAA
STRVLQKAA

SEQ ID NO: 63636 - protein, 10 aa, synthetic construct
  source 1..10: note = Seed: SVRVLQKAAI
STRVLQKAAK

SEQ ID NO: 63637 - protein, 9 aa, synthetic construct
  source 1..9: note = Seed: SVRVLQKAA
STRVLQKAK

SEQ ID NO: 63638 - protein, 9 aa, synthetic construct
  source 1..9: note = Seed: SVRVLQKAA
STRVLQKAV

SEQ ID NO: 63639 - protein, 10 aa, synthetic construct
  source 1..10: note = Seed: SPRWYFYYLG
STRWYFYYLF

SEQ ID NO: 63640 - protein, 10 aa, synthetic construct
  source 1..10: note = Seed: SPRWYFYYLG
STRWYFYYLK

SEQ ID NO: 63641 - protein, 10 aa, synthetic construct
  source 1..10: note = Seed: SPRWYFYYLG
STRWYFYYLL

SEQ ID NO: 63642 - protein, 10 aa, synthetic construct
  source 1..10: note = Seed: SPRWYFYYLG
STRWYFYYLM

SEQ ID NO: 63643 - protein, 9 aa, synthetic construct
  source 1..9: note = Seed: STSAFVETV
STSAFVETA

SEQ ID NO: 63644 - protein, 9 aa, synthetic construct
  source 1..9: note = Seed: STSAFVETV
STSAFVETI

SEQ ID NO: 63645 - protein, 9 aa, synthetic construct
  source 1..9: note = Seed: STSAFVETV
STSAFVETL

SEQ ID NO: 63646 - protein, 9 aa, synthetic construct
  source 1..9: note = Seed: STSAFVETV
STSAFVETM

SEQ ID NO: 63647 - protein, 10 aa, synthetic construct
  source 1..10: note = Seed: STSAFVETVK
STSAFVETVR

SEQ ID NO: 63648 - protein, 10 aa, synthetic construct
  source 1..10: note = Seed: STSAFVETVK
STSAFVETVV

SEQ ID NO: 63649 - protein, 9 aa, synthetic construct
  source 1..9: note = Seed: STSAFVETV
STSAFVETY

SEQ ID NO: 63650 - protein, 9 aa, synthetic construct
  source 1..9: note = Seed: SSSDNIALL
STSDNIALA

SEQ ID NO: 63651 - protein, 9 aa, synthetic construct
  source 1..9: note = Seed: SSSDNIALL
STSDNIALF

SEQ ID NO: 63652 - protein, 9 aa, synthetic construct
  source 1..9: note = Seed: SSSDNIALL
STSDNIALI

SEQ ID NO: 63653 - protein, 9 aa, synthetic construct
  source 1..9: note = Seed: SSSDNIALL
STSDNIALL

SEQ ID NO: 63654 - protein, 10 aa, synthetic construct
  source 1..10: note = Seed: SSSDNIALLV
STSDNIALLV

SEQ ID NO: 63655 - protein, 10 aa, synthetic construct
  source 1..10: note = Seed: SSSDNIALLV
STSDNIALLY

SEQ ID NO: 63656 - protein, 9 aa, synthetic construct
  source 1..9: note = Seed: SSSDNIALL
STSDNIALM

SEQ ID NO: 63657 - protein, 9 aa, synthetic construct
  source 1..9: note = Seed: SSSDNIALL
STSDNIALV

SEQ ID NO: 63658 - protein, 9 aa, synthetic construct
  source 1..9: note = Seed: SSSDNIALL
STSDNIALW

SEQ ID NO: 63659 - protein, 9 aa, synthetic construct
  source 1..9: note = Seed: SSSDNIALL
STSDNIALY

SEQ ID NO: 63660 - protein, 10 aa, synthetic construct
  source 1..10: note = Seed: SASFSTFKCY
STSFSTFKCF

SEQ ID NO: 63661 - protein, 10 aa, synthetic construct
  source 1..10: note = Seed: SASFSTFKCY
STSFSTFKCW

SEQ ID NO: 63662 - protein, 9 aa, synthetic construct
  source 1..9: note = Seed: SASIVAGGI
STSIVAGGI

SEQ ID NO: 63663 - protein, 9 aa, synthetic construct
  source 1..9: note = Seed: SASIVAGGI
STSIVAGGV

SEQ ID NO: 63664 - protein, 10 aa, synthetic construct
  source 1..10: note = Seed: SSSKTPEEHF
STSKTPEEHW

SEQ ID NO: 63665 - protein, 9 aa, synthetic construct
  source 1..9: note = Seed: SSSSDNIAL
STSSDNIAF

SEQ ID NO: 63666 - protein, 9 aa, synthetic construct
  source 1..9: note = Seed: SSSSDNIAL
STSSDNIAW

SEQ ID NO: 63667 - protein, 9 aa, synthetic construct
  source 1..9: note = Seed: SASVYYSQL
STSVYYSQF

SEQ ID NO: 63668 - protein, 10 aa, synthetic construct
  source 1..10: note = Seed: SASVYYSQLM
STSVYYSQLF

SEQ ID NO: 63669 - protein, 10 aa, synthetic construct
  source 1..10: note = Seed: SASVYYSQLM
STSVYYSQLW

SEQ ID NO: 63670 - protein, 10 aa, synthetic construct
  source 1..10: note = Seed: SASVYYSQLM
STSVYYSQLY

SEQ ID NO: 63671 - protein, 9 aa, synthetic construct
  source 1..9: note = Seed: SASVYYSQL
STSVYYSQM

SEQ ID NO: 63672 - protein, 9 aa, synthetic construct
  source 1..9: note = Seed: SASVYYSQL
STSVYYSQW

SEQ ID NO: 63673 - protein, 9 aa, synthetic construct
  source 1..9: note = Seed: SASVYYSQL
STSVYYSQY

SEQ ID NO: 63674 - protein, 9 aa, synthetic construct
  source 1..9: note = Seed: SNSWLMWLI
STSWLMWLA

SEQ ID NO: 63675 - protein, 9 aa, synthetic construct
  source 1..9: note = Seed: SNSWLMWLI
STSWLMWLI

SEQ ID NO: 63676 - protein, 9 aa, synthetic construct
  source 1..9: note = Seed: SNSWLMWLI
STSWLMWLL

SEQ ID NO: 63677 - protein, 9 aa, synthetic construct
  source 1..9: note = Seed: SNSWLMWLI
STSWLMWLM

SEQ ID NO: 63678 - protein, 9 aa, synthetic construct
  source 1..9: note = Seed: SNSWLMWLI
STSWLMWLT

SEQ ID NO: 63679 - protein, 9 aa, synthetic construct
  source 1..9: note = Seed: SNSWLMWLI
STSWLMWLV

SEQ ID NO: 63680 - protein, 9 aa, synthetic construct
  source 1..9: note = Seed: SSTCMMCYK
STTCMMCYK

SEQ ID NO: 63681 - protein, 10 aa, synthetic construct
  source 1..10: note = Seed: SSTCMMCYKR
STTCMMCYKK

SEQ ID NO: 63682 - protein, 10 aa, synthetic construct
  source 1..10: note = Seed: SSTCMMCYKR
STTCMMCYKR

SEQ ID NO: 63683 - protein, 9 aa, synthetic construct
  source 1..9: note = Seed: SSTCMMCYK
STTCMMCYR

SEQ ID NO: 63684 - protein, 9 aa, synthetic construct
  source 1..9: note = Seed: SVTSNYSGV
STTSNYSGI

SEQ ID NO: 63685 - protein, 9 aa, synthetic construct
  source 1..9: note = Seed: SVTSNYSGV
STTSNYSGV

SEQ ID NO: 63686 - protein, 9 aa, synthetic construct
  source 1..9: note = Seed: SVTTEILPV
STTTEILPV

SEQ ID NO: 63687 - protein, 9 aa, synthetic construct
  source 1..9: note = Seed: STTTNIVTR
STTTNIVTK

SEQ ID NO: 63688 - protein, 11 aa, synthetic construct
  source 1..11: note = Seed: SDTYACWHHSI
STTYACWHHSF

SEQ ID NO: 63689 - protein, 11 aa, synthetic construct
  source 1..11: note = Seed: SDTYACWHHSI
STTYACWHHSI

SEQ ID NO: 63690 - protein, 11 aa, synthetic construct
  source 1..11: note = Seed: SDTYACWHHSI
STTYACWHHSL

SEQ ID NO: 63691 - protein, 11 aa, synthetic construct
  source 1..11: note = Seed: SDTYACWHHSI
STTYACWHHSW

SEQ ID NO: 63692 - protein, 9 aa, synthetic construct
  source 1..9: note = Seed: SIVCRFDTR
STVCRFDTK

SEQ ID NO: 63693 - protein, 9 aa, synthetic construct
  source 1..9: note = Seed: SIVCRFDTR
STVCRFDTR

SEQ ID NO: 63694 - protein, 11 aa, synthetic construct
  source 1..11: note = Seed: SVVLLSVLQQL
STVLLSVLQQI

SEQ ID NO: 63695 - protein, 11 aa, synthetic construct
  source 1..11: note = Seed: SVVLLSVLQQL
STVLLSVLQQV

SEQ ID NO: 63696 - protein, 10 aa, synthetic construct
  source 1..10: note = Seed: SSVLNDILSR
STVLNDILSK

SEQ ID NO: 63697 - protein, 10 aa, synthetic construct
  source 1..10: note = Seed: SSVLNDILSR
STVLNDILSR

SEQ ID NO: 63698 - protein, 11 aa, synthetic construct
  source 1..11: note = Seed: SSVLNDILSRL
STVLNDILSRV

SEQ ID NO: 63699 - protein, 9 aa, synthetic construct
  source 1..9: note = Seed: SAVLQSGFR
STVLQSGFK

SEQ ID NO: 63700 - protein, 9 aa, synthetic construct
  source 1..9: note = Seed: SAVLQSGFR
STVLQSGFR

SEQ ID NO: 63701 - protein, 10 aa, synthetic construct
  source 1..10: note = Seed: SAVLQSGFRK
STVLQSGFRK

SEQ ID NO: 63702 - protein, 10 aa, synthetic construct
  source 1..10: note = Seed: SAVLQSGFRK
STVLQSGFRR

SEQ ID NO: 63703 - protein, 10 aa, synthetic construct
  source 1..10: note = Seed: SWVMRIMTWL
STVMRIMTWV

SEQ ID NO: 63704 - protein, 9 aa, synthetic construct
  source 1..9: note = Seed: SLVVRCSFY
STVVRCSFY

SEQ ID NO: 63705 - protein, 9 aa, synthetic construct
  source 1..9: note = Seed: SGVYQCAMR
STVYQCAMK

SEQ ID NO: 63706 - protein, 9 aa, synthetic construct
  source 1..9: note = Seed: SGVYQCAMR
STVYQCAMR

SEQ ID NO: 63707 - protein, 10 aa, synthetic construct
  source 1..10: note = Seed: SDYDYYRYNL
STYDYYRYNF

SEQ ID NO: 63708 - protein, 9 aa, synthetic construct
  source 1..9: note = Seed: SFYEDFLEY
STYEDFLEF

SEQ ID NO: 63709 - protein, 9 aa, synthetic construct
  source 1..9: note = Seed: SFYEDFLEY
STYEDFLEI

SEQ ID NO: 63710 - protein, 9 aa, synthetic construct
  source 1..9: note = Seed: SFYEDFLEY
STYEDFLEL

SEQ ID NO: 63711 - protein, 9 aa, synthetic construct
  source 1..9: note = Seed: SFYEDFLEY
STYEDFLEM

SEQ ID NO: 63712 - protein, 9 aa, synthetic construct
  source 1..9: note = Seed: SFYEDFLEY
STYEDFLEV

SEQ ID NO: 63713 - protein, 9 aa, synthetic construct
  source 1..9: note = Seed: SFYEDFLEY
STYEDFLEY

SEQ ID NO: 63714 - protein, 9 aa, synthetic construct
  source 1..9: note = Seed: SAYENFNQH
STYENFNQF

SEQ ID NO: 63715 - protein, 9 aa, synthetic construct
  source 1..9: note = Seed: SAYENFNQH
STYENFNQI

SEQ ID NO: 63716 - protein, 9 aa, synthetic construct
  source 1..9: note = Seed: SAYENFNQH
STYENFNQL

SEQ ID NO: 63717 - protein, 9 aa, synthetic construct
  source 1..9: note = Seed: SAYENFNQH
STYENFNQM

SEQ ID NO: 63718 - protein, 9 aa, synthetic construct
  source 1..9: note = Seed: SAYENFNQH
STYENFNQV

SEQ ID NO: 63719 - protein, 9 aa, synthetic construct
  source 1..9: note = Seed: SAYENFNQH
STYENFNQY

SEQ ID NO: 63720 - protein, 10 aa, synthetic construct
  source 1..10: note = Seed: SSYIVDSVTV
STYIVDSVTF

SEQ ID NO: 63721 - protein, 10 aa, synthetic construct
  source 1..10: note = Seed: SSYIVDSVTV
STYIVDSVTI

SEQ ID NO: 63722 - protein, 10 aa, synthetic construct
  source 1..10: note = Seed: SSYIVDSVTV
STYIVDSVTL

SEQ ID NO: 63723 - protein, 10 aa, synthetic construct
  source 1..10: note = Seed: SSYIVDSVTV
STYIVDSVTV

SEQ ID NO: 63724 - protein, 11 aa, synthetic construct
  source 1..11: note = Seed: SSYIVDSVTVK
STYIVDSVTVK

SEQ ID NO: 63725 - protein, 10 aa, synthetic construct
  source 1..10: note = Seed: SSYIVDSVTV
STYIVDSVTW

SEQ ID NO: 63726 - protein, 10 aa, synthetic construct
  source 1..10: note = Seed: SYYKLGASQR
STYKLGASQR

SEQ ID NO: 63727 - protein, 9 aa, synthetic construct
  source 1..9: note = Seed: SPYNSQNAV
STYNSQNAY

SEQ ID NO: 63728 - protein, 10 aa, synthetic construct
  source 1..10: note = Seed: SRYRIGNYKL
STYRIGNYKF

SEQ ID NO: 63729 - protein, 9 aa, synthetic construct
  source 1..9: note = Seed: SYYSLLMPI
STYSLLMPA

SEQ ID NO: 63730 - protein, 9 aa, synthetic construct
  source 1..9: note = Seed: SYYSLLMPI
STYSLLMPF

SEQ ID NO: 63731 - protein, 9 aa, synthetic construct
  source 1..9: note = Seed: SYYSLLMPI
STYSLLMPI

SEQ ID NO: 63732 - protein, 10 aa, synthetic construct
  source 1..10: note = Seed: SYYSLLMPIL
STYSLLMPIF

SEQ ID NO: 63733 - protein, 9 aa, synthetic construct
  source 1..9: note = Seed: SYYSLLMPI
STYSLLMPK

SEQ ID NO: 63734 - protein, 9 aa, synthetic construct
  source 1..9: note = Seed: SYYSLLMPI
STYSLLMPL

SEQ ID NO: 63735 - protein, 9 aa, synthetic construct
  source 1..9: note = Seed: SYYSLLMPI
STYSLLMPM

SEQ ID NO: 63736 - protein, 9 aa, synthetic construct
  source 1..9: note = Seed: SYYSLLMPI
STYSLLMPV

SEQ ID NO: 63737 - protein, 9 aa, synthetic construct
  source 1..9: note = Seed: SYYSLLMPI
STYSLLMPW

SEQ ID NO: 63738 - protein, 9 aa, synthetic construct
  source 1..9: note = Seed: SYYSLLMPI
STYSLLMPY

SEQ ID NO: 63739 - protein, 9 aa, synthetic construct
  source 1..9: note = Seed: SLYVNKHAF
STYVNKHAF

SEQ ID NO: 63740 - protein, 9 aa, synthetic construct
  source 1..9: note = Seed: SLYVNKHAF
STYVNKHAL

SEQ ID NO: 63741 - protein, 9 aa, synthetic construct
  source 1..9: note = Seed: SLYVNKHAF
STYVNKHAM

SEQ ID NO: 63742 - protein, 9 aa, synthetic construct
  source 1..9: note = Seed: SLYVNKHAF
STYVNKHAY

SEQ ID NO: 63743 - protein, 10 aa, synthetic construct
  source 1..10: note = Seed: SFYVYANGGK
STYVYANGGR

SEQ ID NO: 63744 - protein, 9 aa, synthetic construct
  source 1..9: note = Seed: SFYYVWKSY
STYYVWKSF

SEQ ID NO: 63745 - protein, 9 aa, synthetic construct
  source 1..9: note = Seed: SFYYVWKSY
STYYVWKSY

SEQ ID NO: 63746 - protein, 10 aa, synthetic construct
  source 1..10: note = Seed: SFYYVWKSYV
STYYVWKSYF

SEQ ID NO: 63747 - protein, 10 aa, synthetic construct
  source 1..10: note = Seed: SFYYVWKSYV
STYYVWKSYW

SEQ ID NO: 63748 - protein, 10 aa, synthetic construct
  source 1..10: note = Seed: SEAFLIGCNY
SVAFLIGCNY

SEQ ID NO: 63749 - protein, 10 aa, synthetic construct
  source 1..10: note = Seed: SIAIPTNFTI
SVAIPTNFTF

SEQ ID NO: 63750 - protein, 10 aa, synthetic construct
  source 1..10: note = Seed: SIAIPTNFTI
SVAIPTNFTI

SEQ ID NO: 63751 - protein, 10 aa, synthetic construct
  source 1..10: note = Seed: SIAIPTNFTI
SVAIPTNFTV

SEQ ID NO: 63752 - protein, 10 aa, synthetic construct
  source 1..10: note = Seed: SIAIPTNFTI
SVAIPTNFTW

SEQ ID NO: 63753 - protein, 11 aa, synthetic construct
  source 1..11: note = Seed: SAAKKNNLPFK
SVAKKNNLPFK

SEQ ID NO: 63754 - protein, 10 aa, synthetic construct
  source 1..10: note = Seed: SSANNCTFEY
SVANNCTFEK

SEQ ID NO: 63755 - protein, 10 aa, synthetic construct
  source 1..10: note = Seed: SSANNCTFEY
SVANNCTFEW

SEQ ID NO: 63756 - protein, 10 aa, synthetic construct
  source 1..10: note = Seed: SSANNCTFEY
SVANNCTFEY

SEQ ID NO: 63757 - protein, 10 aa, synthetic construct
  source 1..10: note = Seed: STASDTYACW
SVASDTYACW

SEQ ID NO: 63758 - protein, 10 aa, synthetic construct
  source 1..10: note = Seed: SQAWQPGVAM
SVAWQPGVAF

SEQ ID NO: 63759 - protein, 10 aa, synthetic construct
  source 1..10: note = Seed: SQAWQPGVAM
SVAWQPGVAY

SEQ ID NO: 63760 - protein, 11 aa, synthetic construct
  source 1..11: note = Seed: SFCAFAVDAAK
SVCAFAVDAAR

SEQ ID NO: 63761 - protein, 10 aa, synthetic construct
  source 1..10: note = Seed: SVCLSGLDSL
SVCLSGLDSV

SEQ ID NO: 63762 - protein, 9 aa, synthetic construct
  source 1..9: note = Seed: STCMMCYKR
SVCMMCYKK

SEQ ID NO: 63763 - protein, 9 aa, synthetic construct
  source 1..9: note = Seed: STCMMCYKR
SVCMMCYKR

SEQ ID NO: 63764 - protein, 11 aa, synthetic construct
  source 1..11: note = Seed: STCMMCYKRNR
SVCMMCYKRNR

SEQ ID NO: 63765 - protein, 10 aa, synthetic construct
  source 1..10: note = Seed: STCMMCYKRN
SVCMMCYKRR

SEQ ID NO: 63766 - protein, 8 aa, synthetic construct
  source 1..8: note = Seed: STCMMCYK
SVCMMCYR

SEQ ID NO: 63767 - protein, 9 aa, synthetic construct
  source 1..9: note = Seed: SICSTMTNR
SVCSTMTNK

SEQ ID NO: 63768 - protein, 9 aa, synthetic construct
  source 1..9: note = Seed: SICSTMTNR
SVCSTMTNR

SEQ ID NO: 63769 - protein, 10 aa, synthetic construct
  source 1..10: note = Seed: SIDAFKLNIK
SVDAFKLNIK

SEQ ID NO: 63770 - protein, 9 aa, synthetic construct
  source 1..9: note = Seed: SIDAFKLNI
SVDAFKLNV

SEQ ID NO: 63771 - protein, 9 aa, synthetic construct
  source 1..9: note = Seed: SSDNIALLV
SVDNIALLF

SEQ ID NO: 63772 - protein, 9 aa, synthetic construct
  source 1..9: note = Seed: SSDNIALLV
SVDNIALLL

SEQ ID NO: 63773 - protein, 9 aa, synthetic construct
  source 1..9: note = Seed: SSDNIALLV
SVDNIALLM

SEQ ID NO: 63774 - protein, 9 aa, synthetic construct
  source 1..9: note = Seed: SSDNIALLV
SVDNIALLV

SEQ ID NO: 63775 - protein, 9 aa, synthetic construct
  source 1..9: note = Seed: SSDNIALLV
SVDNIALLY

SEQ ID NO: 63776 - protein, 10 aa, synthetic construct
  source 1..10: note = Seed: SYELQTPFEI
SVELQTPFEL

SEQ ID NO: 63777 - protein, 10 aa, synthetic construct
  source 1..10: note = Seed: SYELQTPFEI
SVELQTPFEW

SEQ ID NO: 63778 - protein, 9 aa, synthetic construct
  source 1..9: note = Seed: SGFAAYSRY
SVFAAYSRF

SEQ ID NO: 63779 - protein, 9 aa, synthetic construct
  source 1..9: note = Seed: SGFAAYSRY
SVFAAYSRM

SEQ ID NO: 63780 - protein, 9 aa, synthetic construct
  source 1..9: note = Seed: SGFAAYSRY
SVFAAYSRW

SEQ ID NO: 63781 - protein, 9 aa, synthetic construct
  source 1..9: note = Seed: SGFAAYSRY
SVFAAYSRY

SEQ ID NO: 63782 - protein, 9 aa, synthetic construct
  source 1..9: note = Seed: SAFAMMFVK
SVFAMMFVK

SEQ ID NO: 63783 - protein, 11 aa, synthetic construct
  source 1..11: note = Seed: SAFAMMFVKHK
SVFAMMFVKHK

SEQ ID NO: 63784 - protein, 11 aa, synthetic construct
  source 1..11: note = Seed: SAFAMMFVKHK
SVFAMMFVKHR

SEQ ID NO: 63785 - protein, 10 aa, synthetic construct
  source 1..10: note = Seed: SAFAMMFVKH
SVFAMMFVKK

SEQ ID NO: 63786 - protein, 10 aa, synthetic construct
  source 1..10: note = Seed: SAFAMMFVKH
SVFAMMFVKR

SEQ ID NO: 63787 - protein, 9 aa, synthetic construct
  source 1..9: note = Seed: SAFAMMFVK
SVFAMMFVR

SEQ ID NO: 63788 - protein, 9 aa, synthetic construct
  source 1..9: note = Seed: SAFAMMFVK
SVFAMMFVY

SEQ ID NO: 63789 - protein, 9 aa, synthetic construct
  source 1..9: note = Seed: SNFGAISSV
SVFGAISSA

SEQ ID NO: 63790 - protein, 9 aa, synthetic construct
  source 1..9: note = Seed: SNFGAISSV
SVFGAISSF

SEQ ID NO: 63791 - protein, 9 aa, synthetic construct
  source 1..9: note = Seed: SNFGAISSV
SVFGAISSI

SEQ ID NO: 63792 - protein, 9 aa, synthetic construct
  source 1..9: note = Seed: SNFGAISSV
SVFGAISSL

SEQ ID NO: 63793 - protein, 9 aa, synthetic construct
  source 1..9: note = Seed: SNFGAISSV
SVFGAISSM

SEQ ID NO: 63794 - protein, 9 aa, synthetic construct
  source 1..9: note = Seed: SNFGAISSV
SVFGAISSV

SEQ ID NO: 63795 - protein, 9 aa, synthetic construct
  source 1..9: note = Seed: SNFGAISSV
SVFGAISSY

SEQ ID NO: 63796 - protein, 8 aa, synthetic construct
  source 1..8: note = Seed: SYFIASFR
SVFIASFR

SEQ ID NO: 63797 - protein, 10 aa, synthetic construct
  source 1..10: note = Seed: SYFIASFRLF
SVFIASFRLF

SEQ ID NO: 63798 - protein, 10 aa, synthetic construct
  source 1..10: note = Seed: SYFIASFRLF
SVFIASFRLY

SEQ ID NO: 63799 - protein, 9 aa, synthetic construct
  source 1..9: note = Seed: SYFIASFRL
SVFIASFRY

SEQ ID NO: 63800 - protein, 10 aa, synthetic construct
  source 1..10: note = Seed: STFISDEVAR
SVFISDEVAK

SEQ ID NO: 63801 - protein, 10 aa, synthetic construct
  source 1..10: note = Seed: STFISDEVAR
SVFISDEVAR

SEQ ID NO: 63802 - protein, 9 aa, synthetic construct
  source 1..9: note = Seed: STFKCYGVS
SVFKCYGVK

SEQ ID NO: 63803 - protein, 9 aa, synthetic construct
  source 1..9: note = Seed: SVFNICQAV
SVFNICQAF

SEQ ID NO: 63804 - protein, 9 aa, synthetic construct
  source 1..9: note = Seed: SVFNICQAV
SVFNICQAI

SEQ ID NO: 63805 - protein, 9 aa, synthetic construct
  source 1..9: note = Seed: SVFNICQAV
SVFNICQAM

SEQ ID NO: 63806 - protein, 10 aa, synthetic construct
  source 1..10: note = Seed: SVFNICQAVT
SVFNICQAVV

SEQ ID NO: 63807 - protein, 9 aa, synthetic construct
  source 1..9: note = Seed: SVFNICQAV
SVFNICQAY

SEQ ID NO: 63808 - protein, 11 aa, synthetic construct
  source 1..11: note = Seed: SKFPLKLRGTA
SVFPLKLRGTL

SEQ ID NO: 63809 - protein, 11 aa, synthetic construct
  source 1..11: note = Seed: SKFPLKLRGTA
SVFPLKLRGTM

SEQ ID NO: 63810 - protein, 11 aa, synthetic construct
  source 1..11: note = Seed: SWFTALTQHGK
SVFTALTQHGK

SEQ ID NO: 63811 - protein, 10 aa, synthetic construct
  source 1..10: note = Seed: SYFTSDYYQL
SVFTSDYYQF

SEQ ID NO: 63812 - protein, 11 aa, synthetic construct
  source 1..11: note = Seed: SYFTSDYYQLY
SVFTSDYYQLY

SEQ ID NO: 63813 - protein, 10 aa, synthetic construct
  source 1..10: note = Seed: SHFVNLDNLR
SVFVNLDNLR

SEQ ID NO: 63814 - protein, 9 aa, synthetic construct
  source 1..9: note = Seed: SAFVNLKQL
SVFVNLKQW

SEQ ID NO: 63815 - protein, 9 aa, synthetic construct
  source 1..9: note = Seed: SSGDATTAY
SVGDATTAF

SEQ ID NO: 63816 - protein, 9 aa, synthetic construct
  source 1..9: note = Seed: SSGDATTAY
SVGDATTAY

SEQ ID NO: 63817 - protein, 10 aa, synthetic construct
  source 1..10: note = Seed: STGSNVFQTR
SVGSNVFQTK

SEQ ID NO: 63818 - protein, 10 aa, synthetic construct
  source 1..10: note = Seed: STGSNVFQTR
SVGSNVFQTR

SEQ ID NO: 63819 - protein, 9 aa, synthetic construct
  source 1..9: note = Seed: SDIDITFLK
SVIDITFLK

SEQ ID NO: 63820 - protein, 10 aa, synthetic construct
  source 1..10: note = Seed: SDIDITFLKK
SVIDITFLKA

SEQ ID NO: 63821 - protein, 10 aa, synthetic construct
  source 1..10: note = Seed: SDIDITFLKK
SVIDITFLKC

SEQ ID NO: 63822 - protein, 10 aa, synthetic construct
  source 1..10: note = Seed: SDIDITFLKK
SVIDITFLKD

SEQ ID NO: 63823 - protein, 10 aa, synthetic construct
  source 1..10: note = Seed: SDIDITFLKK
SVIDITFLKE

SEQ ID NO: 63824 - protein, 10 aa, synthetic construct
  source 1..10: note = Seed: SDIDITFLKK
SVIDITFLKF

SEQ ID NO: 63825 - protein, 10 aa, synthetic construct
  source 1..10: note = Seed: SDIDITFLKK
SVIDITFLKG

SEQ ID NO: 63826 - protein, 10 aa, synthetic construct
  source 1..10: note = Seed: SDIDITFLKK
SVIDITFLKH

SEQ ID NO: 63827 - protein, 10 aa, synthetic construct
  source 1..10: note = Seed: SDIDITFLKK
SVIDITFLKI

SEQ ID NO: 63828 - protein, 10 aa, synthetic construct
  source 1..10: note = Seed: SDIDITFLKK
SVIDITFLKK

SEQ ID NO: 63829 - protein, 10 aa, synthetic construct
  source 1..10: note = Seed: SDIDITFLKK
SVIDITFLKL

SEQ ID NO: 63830 - protein, 10 aa, synthetic construct
  source 1..10: note = Seed: SDIDITFLKK
SVIDITFLKM

SEQ ID NO: 63831 - protein, 10 aa, synthetic construct
  source 1..10: note = Seed: SDIDITFLKK
SVIDITFLKN

SEQ ID NO: 63832 - protein, 10 aa, synthetic construct
  source 1..10: note = Seed: SDIDITFLKK
SVIDITFLKP

SEQ ID NO: 63833 - protein, 10 aa, synthetic construct
  source 1..10: note = Seed: SDIDITFLKK
SVIDITFLKQ

SEQ ID NO: 63834 - protein, 10 aa, synthetic construct
  source 1..10: note = Seed: SDIDITFLKK
SVIDITFLKR

SEQ ID NO: 63835 - protein, 10 aa, synthetic construct
  source 1..10: note = Seed: SDIDITFLKK
SVIDITFLKS

SEQ ID NO: 63836 - protein, 10 aa, synthetic construct
  source 1..10: note = Seed: SDIDITFLKK
SVIDITFLKT

SEQ ID NO: 63837 - protein, 10 aa, synthetic construct
  source 1..10: note = Seed: SDIDITFLKK
SVIDITFLKV

SEQ ID NO: 63838 - protein, 10 aa, synthetic construct
  source 1..10: note = Seed: SDIDITFLKK
SVIDITFLKW

SEQ ID NO: 63839 - protein, 10 aa, synthetic construct
  source 1..10: note = Seed: SDIDITFLKK
SVIDITFLKY

SEQ ID NO: 63840 - protein, 9 aa, synthetic construct
  source 1..9: note = Seed: SDIDITFLK
SVIDITFLR

SEQ ID NO: 63841 - protein, 9 aa, synthetic construct
  source 1..9: note = Seed: SDIDITFLK
SVIDITFLY

SEQ ID NO: 63842 - protein, 9 aa, synthetic construct
  source 1..9: note = Seed: STIGVCSMT
SVIGVCSMA

SEQ ID NO: 63843 - protein, 9 aa, synthetic construct
  source 1..9: note = Seed: STIGVCSMT
SVIGVCSMI

SEQ ID NO: 63844 - protein, 9 aa, synthetic construct
  source 1..9: note = Seed: STIGVCSMT
SVIGVCSMV

SEQ ID NO: 63845 - protein, 10 aa, synthetic construct
  source 1..10: note = Seed: SIIIGGAKLK
SVIIGGAKLK

SEQ ID NO: 63846 - protein, 10 aa, synthetic construct
  source 1..10: note = Seed: SIIIGGAKLK
SVIIGGAKLR

SEQ ID NO: 63847 - protein, 10 aa, synthetic construct
  source 1..10: note = Seed: SRILGAGCFV
SVILGAGCFV

SEQ ID NO: 63848 - protein, 10 aa, synthetic construct
  source 1..10: note = Seed: SLINTLNDLN
SVINTLNDLV

SEQ ID NO: 63849 - protein, 9 aa, synthetic construct
  source 1..9: note = Seed: SLINTLNDL
SVINTLNDV

SEQ ID NO: 63850 - protein, 10 aa, synthetic construct
  source 1..10: note = Seed: SYIVDSVTVK
SVIVDSVTVK

SEQ ID NO: 63851 - protein, 10 aa, synthetic construct
  source 1..10: note = Seed: SYIVDSVTVK
SVIVDSVTVR

SEQ ID NO: 63852 - protein, 9 aa, synthetic construct
  source 1..9: note = Seed: SIKNFKSVL
SVKNFKSVA

SEQ ID NO: 63853 - protein, 9 aa, synthetic construct
  source 1..9: note = Seed: SIKNFKSVL
SVKNFKSVK

SEQ ID NO: 63854 - protein, 10 aa, synthetic construct
  source 1..10: note = Seed: SIKNFKSVLY
SVKNFKSVLK

SEQ ID NO: 63855 - protein, 11 aa, synthetic construct
  source 1..11: note = Seed: SIKNFKSVLYY
SVKNFKSVLYK

SEQ ID NO: 63856 - protein, 9 aa, synthetic construct
  source 1..9: note = Seed: SAKNRARTV
SVKNRARTK

SEQ ID NO: 63857 - protein, 9 aa, synthetic construct
  source 1..9: note = Seed: SAKNRARTV
SVKNRARTL

SEQ ID NO: 63858 - protein, 10 aa, synthetic construct
  source 1..10: note = Seed: SAKNRARTVA
SVKNRARTVK

SEQ ID NO: 63859 - protein, 11 aa, synthetic construct
  source 1..11: note = Seed: SKKPRQKRTAT
SVKPRQKRTAF

SEQ ID NO: 63860 - protein, 11 aa, synthetic construct
  source 1..11: note = Seed: SKKPRQKRTAT
SVKPRQKRTAI

SEQ ID NO: 63861 - protein, 11 aa, synthetic construct
  source 1..11: note = Seed: SKKPRQKRTAT
SVKPRQKRTAL

SEQ ID NO: 63862 - protein, 11 aa, synthetic construct
  source 1..11: note = Seed: SKKPRQKRTAT
SVKPRQKRTAM

SEQ ID NO: 63863 - protein, 11 aa, synthetic construct
  source 1..11: note = Seed: SKKPRQKRTAT
SVKPRQKRTAV

SEQ ID NO: 63864 - protein, 11 aa, synthetic construct
  source 1..11: note = Seed: SEKSYELQTPF
SVKSYELQTPW

SEQ ID NO: 63865 - protein, 9 aa, synthetic construct
  source 1..9: note = Seed: SMKYFVKIG
SVKYFVKIK

SEQ ID NO: 63866 - protein, 10 aa, synthetic construct
  source 1..10: note = Seed: SFLAHIQWMV
SVLAHIQWMA

SEQ ID NO: 63867 - protein, 10 aa, synthetic construct
  source 1..10: note = Seed: SFLAHIQWMV
SVLAHIQWMI

SEQ ID NO: 63868 - protein, 10 aa, synthetic construct
  source 1..10: note = Seed: SFLAHIQWMV
SVLAHIQWML

SEQ ID NO: 63869 - protein, 10 aa, synthetic construct
  source 1..10: note = Seed: SFLAHIQWMV
SVLAHIQWMV

SEQ ID NO: 63870 - protein, 10 aa, synthetic construct
  source 1..10: note = Seed: SRLDKVEAEV
SVLDKVEAEV

SEQ ID NO: 63871 - protein, 11 aa, synthetic construct
  source 1..11: note = Seed: STLEQYVFCTV
SVLEQYVFCTV

SEQ ID NO: 63872 - protein, 10 aa, synthetic construct
  source 1..10: note = Seed: SFLGRYMSAL
SVLGRYMSAA

SEQ ID NO: 63873 - protein, 10 aa, synthetic construct
  source 1..10: note = Seed: SFLGRYMSAL
SVLGRYMSAI

SEQ ID NO: 63874 - protein, 10 aa, synthetic construct
  source 1..10: note = Seed: SFLGRYMSAL
SVLGRYMSAV

SEQ ID NO: 63875 - protein, 9 aa, synthetic construct
  source 1..9: note = Seed: SFLGRYMSA
SVLGRYMSK

SEQ ID NO: 63876 - protein, 9 aa, synthetic construct
  source 1..9: note = Seed: SVLLFLAFV
SVLLFLAFA

SEQ ID NO: 63877 - protein, 9 aa, synthetic construct
  source 1..9: note = Seed: SVLLFLAFV
SVLLFLAFI

SEQ ID NO: 63878 - protein, 9 aa, synthetic construct
  source 1..9: note = Seed: SVLLFLAFV
SVLLFLAFL

SEQ ID NO: 63879 - protein, 10 aa, synthetic construct
  source 1..10: note = Seed: SVLLFLAFVV
SVLLFLAFVI

SEQ ID NO: 63880 - protein, 10 aa, synthetic construct
  source 1..10: note = Seed: SVLLFLAFVV
SVLLFLAFVL

SEQ ID NO: 63881 - protein, 10 aa, synthetic construct
  source 1..10: note = Seed: SQLMCQPILL
SVLMCQPILA

SEQ ID NO: 63882 - protein, 10 aa, synthetic construct
  source 1..10: note = Seed: SQLMCQPILL
SVLMCQPILI

SEQ ID NO: 63883 - protein, 10 aa, synthetic construct
  source 1..10: note = Seed: SQLMCQPILL
SVLMCQPILL

SEQ ID NO: 63884 - protein, 10 aa, synthetic construct
  source 1..10: note = Seed: SQLMCQPILL
SVLMCQPILV

SEQ ID NO: 63885 - protein, 9 aa, synthetic construct
  source 1..9: note = Seed: SLLMPILTL
SVLMPILTF

SEQ ID NO: 63886 - protein, 9 aa, synthetic construct
  source 1..9: note = Seed: SLLMPILTL
SVLMPILTV

SEQ ID NO: 63887 - protein, 9 aa, synthetic construct
  source 1..9: note = Seed: SLLMPILTL
SVLMPILTY

SEQ ID NO: 63888 - protein, 10 aa, synthetic construct
  source 1..10: note = Seed: SWLMWLIINL
SVLMWLIINA

SEQ ID NO: 63889 - protein, 10 aa, synthetic construct
  source 1..10: note = Seed: SWLMWLIINL
SVLMWLIINI

SEQ ID NO: 63890 - protein, 10 aa, synthetic construct
  source 1..10: note = Seed: SWLMWLIINL
SVLMWLIINL

SEQ ID NO: 63891 - protein, 10 aa, synthetic construct
  source 1..10: note = Seed: SWLMWLIINL
SVLMWLIINM

SEQ ID NO: 63892 - protein, 10 aa, synthetic construct
  source 1..10: note = Seed: SWLMWLIINL
SVLMWLIINT

SEQ ID NO: 63893 - protein, 10 aa, synthetic construct
  source 1..10: note = Seed: SWLMWLIINL
SVLMWLIINV

SEQ ID NO: 63894 - protein, 10 aa, synthetic construct
  source 1..10: note = Seed: SDLNDFVSDA
SVLNDFVSDI

SEQ ID NO: 63895 - protein, 10 aa, synthetic construct
  source 1..10: note = Seed: SDLNDFVSDA
SVLNDFVSDL

SEQ ID NO: 63896 - protein, 10 aa, synthetic construct
  source 1..10: note = Seed: SDLNDFVSDA
SVLNDFVSDV

SEQ ID NO: 63897 - protein, 9 aa, synthetic construct
  source 1..9: note = Seed: SVLNDILSR
SVLNDILSK

SEQ ID NO: 63898 - protein, 10 aa, synthetic construct
  source 1..10: note = Seed: SVLNDILSRL
SVLNDILSRA

SEQ ID NO: 63899 - protein, 10 aa, synthetic construct
  source 1..10: note = Seed: SVLNDILSRL
SVLNDILSRI

SEQ ID NO: 63900 - protein, 10 aa, synthetic construct
  source 1..10: note = Seed: SVLNDILSRL
SVLNDILSRV

SEQ ID NO: 63901 - protein, 9 aa, synthetic construct
  source 1..9: note = Seed: SFLPGVYSV
SVLPGVYSA

SEQ ID NO: 63902 - protein, 9 aa, synthetic construct
  source 1..9: note = Seed: SFLPGVYSV
SVLPGVYSF

SEQ ID NO: 63903 - protein, 9 aa, synthetic construct
  source 1..9: note = Seed: SFLPGVYSV
SVLPGVYSI

SEQ ID NO: 63904 - protein, 9 aa, synthetic construct
  source 1..9: note = Seed: SFLPGVYSV
SVLPGVYSL

SEQ ID NO: 63905 - protein, 9 aa, synthetic construct
  source 1..9: note = Seed: SFLPGVYSV
SVLPGVYSM

SEQ ID NO: 63906 - protein, 9 aa, synthetic construct
  source 1..9: note = Seed: SFLPGVYSV
SVLPGVYSV

SEQ ID NO: 63907 - protein, 11 aa, synthetic construct
  source 1..11: note = Seed: SELVIGAVILR
SVLVIGAVILR

SEQ ID NO: 63908 - protein, 9 aa, synthetic construct
  source 1..9: note = Seed: SLLVLVQST
SVLVLVQSV

SEQ ID NO: 63909 - protein, 11 aa, synthetic construct
  source 1..11: note = Seed: SVLYYQNNVFM
SVLYYQNNVFF

SEQ ID NO: 63910 - protein, 11 aa, synthetic construct
  source 1..11: note = Seed: SVLYYQNNVFM
SVLYYQNNVFW

SEQ ID NO: 63911 - protein, 10 aa, synthetic construct
  source 1..10: note = Seed: SVLYYQNNVF
SVLYYQNNVY

SEQ ID NO: 63912 - protein, 9 aa, synthetic construct
  source 1..9: note = Seed: SQMEIDFLE
SVMEIDFLA

SEQ ID NO: 63913 - protein, 10 aa, synthetic construct
  source 1..10: note = Seed: SQMEIDFLEL
SVMEIDFLEA

SEQ ID NO: 63914 - protein, 10 aa, synthetic construct
  source 1..10: note = Seed: SQMEIDFLEL
SVMEIDFLEF

SEQ ID NO: 63915 - protein, 10 aa, synthetic construct
  source 1..10: note = Seed: SQMEIDFLEL
SVMEIDFLEI

SEQ ID NO: 63916 - protein, 10 aa, synthetic construct
  source 1..10: note = Seed: SQMEIDFLEL
SVMEIDFLEL

SEQ ID NO: 63917 - protein, 11 aa, synthetic construct
  source 1..11: note = Seed: SQMEIDFLELA
SVMEIDFLELA

SEQ ID NO: 63918 - protein, 11 aa, synthetic construct
  source 1..11: note = Seed: SQMEIDFLELA
SVMEIDFLELI

SEQ ID NO: 63919 - protein, 11 aa, synthetic construct
  source 1..11: note = Seed: SQMEIDFLELA
SVMEIDFLELL

SEQ ID NO: 63920 - protein, 11 aa, synthetic construct
  source 1..11: note = Seed: SQMEIDFLELA
SVMEIDFLELV

SEQ ID NO: 63921 - protein, 10 aa, synthetic construct
  source 1..10: note = Seed: SQMEIDFLEL
SVMEIDFLEM

SEQ ID NO: 63922 - protein, 10 aa, synthetic construct
  source 1..10: note = Seed: SQMEIDFLEL
SVMEIDFLEV

SEQ ID NO: 63923 - protein, 10 aa, synthetic construct
  source 1..10: note = Seed: SQMEIDFLEL
SVMEIDFLEY

SEQ ID NO: 63924 - protein, 9 aa, synthetic construct
  source 1..9: note = Seed: SQMEIDFLE
SVMEIDFLF

SEQ ID NO: 63925 - protein, 9 aa, synthetic construct
  source 1..9: note = Seed: SQMEIDFLE
SVMEIDFLI

SEQ ID NO: 63926 - protein, 9 aa, synthetic construct
  source 1..9: note = Seed: SQMEIDFLE
SVMEIDFLL

SEQ ID NO: 63927 - protein, 9 aa, synthetic construct
  source 1..9: note = Seed: SQMEIDFLE
SVMEIDFLM

SEQ ID NO: 63928 - protein, 9 aa, synthetic construct
  source 1..9: note = Seed: SQMEIDFLE
SVMEIDFLT

SEQ ID NO: 63929 - protein, 9 aa, synthetic construct
  source 1..9: note = Seed: SQMEIDFLE
SVMEIDFLV

SEQ ID NO: 63930 - protein, 9 aa, synthetic construct
  source 1..9: note = Seed: SMMGFKMNY
SVMGFKMNF

SEQ ID NO: 63931 - protein, 9 aa, synthetic construct
  source 1..9: note = Seed: SMMGFKMNY
SVMGFKMNI

SEQ ID NO: 63932 - protein, 9 aa, synthetic construct
  source 1..9: note = Seed: SMMGFKMNY
SVMGFKMNK

SEQ ID NO: 63933 - protein, 9 aa, synthetic construct
  source 1..9: note = Seed: SMMGFKMNY
SVMGFKMNR

SEQ ID NO: 63934 - protein, 9 aa, synthetic construct
  source 1..9: note = Seed: SMMGFKMNY
SVMGFKMNW

SEQ ID NO: 63935 - protein, 9 aa, synthetic construct
  source 1..9: note = Seed: SMMGFKMNY
SVMGFKMNY

SEQ ID NO: 63936 - protein, 10 aa, synthetic construct
  source 1..10: note = Seed: SMMGFKMNYQ
SVMGFKMNYK

SEQ ID NO: 63937 - protein, 11 aa, synthetic construct
  source 1..11: note = Seed: SMMGFKMNYQV
SVMGFKMNYQV

SEQ ID NO: 63938 - protein, 10 aa, synthetic construct
  source 1..10: note = Seed: SMMGFKMNYQ
SVMGFKMNYR

SEQ ID NO: 63939 - protein, 10 aa, synthetic construct
  source 1..10: note = Seed: SMMGFKMNYQ
SVMGFKMNYY

SEQ ID NO: 63940 - protein, 9 aa, synthetic construct
  source 1..9: note = Seed: SAMQTMLFT
SVMQTMLFA

SEQ ID NO: 63941 - protein, 9 aa, synthetic construct
  source 1..9: note = Seed: SAMQTMLFT
SVMQTMLFI

SEQ ID NO: 63942 - protein, 9 aa, synthetic construct
  source 1..9: note = Seed: SAMQTMLFT
SVMQTMLFL

SEQ ID NO: 63943 - protein, 10 aa, synthetic construct
  source 1..10: note = Seed: SAMQTMLFTM
SVMQTMLFTA

SEQ ID NO: 63944 - protein, 10 aa, synthetic construct
  source 1..10: note = Seed: SAMQTMLFTM
SVMQTMLFTF

SEQ ID NO: 63945 - protein, 10 aa, synthetic construct
  source 1..10: note = Seed: SAMQTMLFTM
SVMQTMLFTI

SEQ ID NO: 63946 - protein, 10 aa, synthetic construct
  source 1..10: note = Seed: SAMQTMLFTM
SVMQTMLFTL

SEQ ID NO: 63947 - protein, 10 aa, synthetic construct
  source 1..10: note = Seed: SAMQTMLFTM
SVMQTMLFTV

SEQ ID NO: 63948 - protein, 10 aa, synthetic construct
  source 1..10: note = Seed: SAMQTMLFTM
SVMQTMLFTW

SEQ ID NO: 63949 - protein, 10 aa, synthetic construct
  source 1..10: note = Seed: SAMQTMLFTM
SVMQTMLFTY

SEQ ID NO: 63950 - protein, 9 aa, synthetic construct
  source 1..9: note = Seed: SAMQTMLFT
SVMQTMLFV

SEQ ID NO: 63951 - protein, 11 aa, synthetic construct
  source 1..11: note = Seed: STMTNRQFHQK
SVMTNRQFHQK

SEQ ID NO: 63952 - protein, 11 aa, synthetic construct
  source 1..11: note = Seed: STMTNRQFHQK
SVMTNRQFHQR

SEQ ID NO: 63953 - protein, 9 aa, synthetic construct
  source 1..9: note = Seed: STMTNRQFH
SVMTNRQFK

SEQ ID NO: 63954 - protein, 9 aa, synthetic construct
  source 1..9: note = Seed: SAMVRMYIF
SVMVRMYII

SEQ ID NO: 63955 - protein, 9 aa, synthetic construct
  source 1..9: note = Seed: SAMVRMYIF
SVMVRMYIL

SEQ ID NO: 63956 - protein, 9 aa, synthetic construct
  source 1..9: note = Seed: SAMVRMYIF
SVMVRMYIM

SEQ ID NO: 63957 - protein, 9 aa, synthetic construct
  source 1..9: note = Seed: SAMVRMYIF
SVMVRMYIV

SEQ ID NO: 63958 - protein, 9 aa, synthetic construct
  source 1..9: note = Seed: SAMVRMYIF
SVMVRMYIW

SEQ ID NO: 63959 - protein, 10 aa, synthetic construct
  source 1..10: note = Seed: SSNFGAISSV
SVNFGAISSF

SEQ ID NO: 63960 - protein, 10 aa, synthetic construct
  source 1..10: note = Seed: SSNFGAISSV
SVNFGAISSI

SEQ ID NO: 63961 - protein, 10 aa, synthetic construct
  source 1..10: note = Seed: SSNFGAISSV
SVNFGAISSV

SEQ ID NO: 63962 - protein, 10 aa, synthetic construct
  source 1..10: note = Seed: SSNFGAISSV
SVNFGAISSW

SEQ ID NO: 63963 - protein, 9 aa, synthetic construct
  source 1..9: note = Seed: SANNCTFEY
SVNNCTFEF

SEQ ID NO: 63964 - protein, 9 aa, synthetic construct
  source 1..9: note = Seed: SANNCTFEY
SVNNCTFEK

SEQ ID NO: 63965 - protein, 9 aa, synthetic construct
  source 1..9: note = Seed: SANNCTFEY
SVNNCTFER

SEQ ID NO: 63966 - protein, 9 aa, synthetic construct
  source 1..9: note = Seed: SANNCTFEY
SVNNCTFEW

SEQ ID NO: 63967 - protein, 9 aa, synthetic construct
  source 1..9: note = Seed: SANNCTFEY
SVNNCTFEY

SEQ ID NO: 63968 - protein, 10 aa, synthetic construct
  source 1..10: note = Seed: SANNCTFEYV
SVNNCTFEYV

SEQ ID NO: 63969 - protein, 9 aa, synthetic construct
  source 1..9: note = Seed: SSNVANYQK
SVNVANYQK

SEQ ID NO: 63970 - protein, 9 aa, synthetic construct
  source 1..9: note = Seed: SSNVANYQK
SVNVANYQR

SEQ ID NO: 63971 - protein, 9 aa, synthetic construct
  source 1..9: note = Seed: SLPGVFCGV
SVPGVFCGA

SEQ ID NO: 63972 - protein, 9 aa, synthetic construct
  source 1..9: note = Seed: SLPGVFCGV
SVPGVFCGI

SEQ ID NO: 63973 - protein, 9 aa, synthetic construct
  source 1..9: note = Seed: SLPGVFCGV
SVPGVFCGL

SEQ ID NO: 63974 - protein, 9 aa, synthetic construct
  source 1..9: note = Seed: SLPGVFCGV
SVPGVFCGV

SEQ ID NO: 63975 - protein, 9 aa, synthetic construct
  source 1..9: note = Seed: SAPHGVVFL
SVPHGVVFL

SEQ ID NO: 63976 - protein, 9 aa, synthetic construct
  source 1..9: note = Seed: SSQAWQPGV
SVQAWQPGV

SEQ ID NO: 63977 - protein, 10 aa, synthetic construct
  source 1..10: note = Seed: SMQGAVDINK
SVQGAVDINK

SEQ ID NO: 63978 - protein, 9 aa, synthetic construct
  source 1..9: note = Seed: SFRLFARTR
SVRLFARTA

SEQ ID NO: 63979 - protein, 9 aa, synthetic construct
  source 1..9: note = Seed: SFRLFARTR
SVRLFARTG

SEQ ID NO: 63980 - protein, 9 aa, synthetic construct
  source 1..9: note = Seed: SFRLFARTR
SVRLFARTI

SEQ ID NO: 63981 - protein, 9 aa, synthetic construct
  source 1..9: note = Seed: SFRLFARTR
SVRLFARTK

SEQ ID NO: 63982 - protein, 9 aa, synthetic construct
  source 1..9: note = Seed: SFRLFARTR
SVRLFARTL

SEQ ID NO: 63983 - protein, 9 aa, synthetic construct
  source 1..9: note = Seed: SFRLFARTR
SVRLFARTM

SEQ ID NO: 63984 - protein, 9 aa, synthetic construct
  source 1..9: note = Seed: SFRLFARTR
SVRLFARTR

SEQ ID NO: 63985 - protein, 10 aa, synthetic construct
  source 1..10: note = Seed: SFRLFARTRS
SVRLFARTRK

SEQ ID NO: 63986 - protein, 9 aa, synthetic construct
  source 1..9: note = Seed: SFRLFARTR
SVRLFARTS

SEQ ID NO: 63987 - protein, 9 aa, synthetic construct
  source 1..9: note = Seed: SFRLFARTR
SVRLFARTV

SEQ ID NO: 63988 - protein, 9 aa, synthetic construct
  source 1..9: note = Seed: SSRLSFKEL
SVRLSFKEA

SEQ ID NO: 63989 - protein, 9 aa, synthetic construct
  source 1..9: note = Seed: SSRLSFKEL
SVRLSFKEG

SEQ ID NO: 63990 - protein, 9 aa, synthetic construct
  source 1..9: note = Seed: SSRLSFKEL
SVRLSFKEI

SEQ ID NO: 63991 - protein, 9 aa, synthetic construct
  source 1..9: note = Seed: SSRLSFKEL
SVRLSFKEK

SEQ ID NO: 63992 - protein, 9 aa, synthetic construct
  source 1..9: note = Seed: SSRLSFKEL
SVRLSFKEL

SEQ ID NO: 63993 - protein, 9 aa, synthetic construct
  source 1..9: note = Seed: SSRLSFKEL
SVRLSFKEM

SEQ ID NO: 63994 - protein, 9 aa, synthetic construct
  source 1..9: note = Seed: SSRLSFKEL
SVRLSFKES

SEQ ID NO: 63995 - protein, 9 aa, synthetic construct
  source 1..9: note = Seed: SSRLSFKEL
SVRLSFKEV

SEQ ID NO: 63996 - protein, 9 aa, synthetic construct
  source 1..9: note = Seed: SLRPDTRYV
SVRPDTRYA

SEQ ID NO: 63997 - protein, 9 aa, synthetic construct
  source 1..9: note = Seed: SLRPDTRYV
SVRPDTRYI

SEQ ID NO: 63998 - protein, 9 aa, synthetic construct
  source 1..9: note = Seed: SLRPDTRYV
SVRPDTRYK

SEQ ID NO: 63999 - protein, 9 aa, synthetic construct
  source 1..9: note = Seed: SLRPDTRYV
SVRPDTRYL

SEQ ID NO: 64000 - protein, 9 aa, synthetic construct
  source 1..9: note = Seed: SLRPDTRYV
SVRPDTRYM

SEQ ID NO: 64001 - protein, 9 aa, synthetic construct
  source 1..9: note = Seed: SLRPDTRYV
SVRPDTRYV

SEQ ID NO: 64002 - protein, 9 aa, synthetic construct
  source 1..9: note = Seed: SVRVLQKAA
SVRVLQKAK

SEQ ID NO: 64003 - protein, 10 aa, synthetic construct
  source 1..10: note = Seed: SPRWYFYYLG
SVRWYFYYLF

SEQ ID NO: 64004 - protein, 10 aa, synthetic construct
  source 1..10: note = Seed: SPRWYFYYLG
SVRWYFYYLK

SEQ ID NO: 64005 - protein, 10 aa, synthetic construct
  source 1..10: note = Seed: SPRWYFYYLG
SVRWYFYYLL

SEQ ID NO: 64006 - protein, 10 aa, synthetic construct
  source 1..10: note = Seed: SPRWYFYYLG
SVRWYFYYLM

SEQ ID NO: 64007 - protein, 9 aa, synthetic construct
  source 1..9: note = Seed: STSAFVETV
SVSAFVETI

SEQ ID NO: 64008 - protein, 9 aa, synthetic construct
  source 1..9: note = Seed: STSAFVETV
SVSAFVETL

SEQ ID NO: 64009 - protein, 9 aa, synthetic construct
  source 1..9: note = Seed: STSAFVETV
SVSAFVETV

SEQ ID NO: 64010 - protein, 10 aa, synthetic construct
  source 1..10: note = Seed: STSAFVETVK
SVSAFVETVK

SEQ ID NO: 64011 - protein, 10 aa, synthetic construct
  source 1..10: note = Seed: STSAFVETVK
SVSAFVETVR

SEQ ID NO: 64012 - protein, 10 aa, synthetic construct
  source 1..10: note = Seed: STSAFVETVK
SVSAFVETVV

SEQ ID NO: 64013 - protein, 9 aa, synthetic construct
  source 1..9: note = Seed: SSSDNIALL
SVSDNIALA

SEQ ID NO: 64014 - protein, 9 aa, synthetic construct
  source 1..9: note = Seed: SSSDNIALL
SVSDNIALI

SEQ ID NO: 64015 - protein, 9 aa, synthetic construct
  source 1..9: note = Seed: SSSDNIALL
SVSDNIALL

SEQ ID NO: 64016 - protein, 10 aa, synthetic construct
  source 1..10: note = Seed: SSSDNIALLV
SVSDNIALLV

SEQ ID NO: 64017 - protein, 10 aa, synthetic construct
  source 1..10: note = Seed: SSSDNIALLV
SVSDNIALLY

SEQ ID NO: 64018 - protein, 9 aa, synthetic construct
  source 1..9: note = Seed: SSSDNIALL
SVSDNIALV

SEQ ID NO: 64019 - protein, 9 aa, synthetic construct
  source 1..9: note = Seed: SSSDNIALL
SVSDNIALW

SEQ ID NO: 64020 - protein, 10 aa, synthetic construct
  source 1..10: note = Seed: SASFSTFKCY
SVSFSTFKCW

SEQ ID NO: 64021 - protein, 10 aa, synthetic construct
  source 1..10: note = Seed: SASFSTFKCY
SVSFSTFKCY

SEQ ID NO: 64022 - protein, 9 aa, synthetic construct
  source 1..9: note = Seed: SASIVAGGI
SVSIVAGGV

SEQ ID NO: 64023 - protein, 10 aa, synthetic construct
  source 1..10: note = Seed: SASVYYSQLM
SVSVYYSQLF

SEQ ID NO: 64024 - protein, 10 aa, synthetic construct
  source 1..10: note = Seed: SASVYYSQLM
SVSVYYSQLW

SEQ ID NO: 64025 - protein, 10 aa, synthetic construct
  source 1..10: note = Seed: SASVYYSQLM
SVSVYYSQLY

SEQ ID NO: 64026 - protein, 9 aa, synthetic construct
  source 1..9: note = Seed: SASVYYSQL
SVSVYYSQW

SEQ ID NO: 64027 - protein, 9 aa, synthetic construct
  source 1..9: note = Seed: SNSWLMWLI
SVSWLMWLA

SEQ ID NO: 64028 - protein, 9 aa, synthetic construct
  source 1..9: note = Seed: SNSWLMWLI
SVSWLMWLI

SEQ ID NO: 64029 - protein, 9 aa, synthetic construct
  source 1..9: note = Seed: SNSWLMWLI
SVSWLMWLL

SEQ ID NO: 64030 - protein, 9 aa, synthetic construct
  source 1..9: note = Seed: SNSWLMWLI
SVSWLMWLV

SEQ ID NO: 64031 - protein, 9 aa, synthetic construct
  source 1..9: note = Seed: SSTCMMCYK
SVTCMMCYK

SEQ ID NO: 64032 - protein, 10 aa, synthetic construct
  source 1..10: note = Seed: SSTCMMCYKR
SVTCMMCYKK

SEQ ID NO: 64033 - protein, 10 aa, synthetic construct
  source 1..10: note = Seed: SSTCMMCYKR
SVTCMMCYKR

SEQ ID NO: 64034 - protein, 9 aa, synthetic construct
  source 1..9: note = Seed: SSTCMMCYK
SVTCMMCYR

SEQ ID NO: 64035 - protein, 9 aa, synthetic construct
  source 1..9: note = Seed: STTTNIVTR
SVTTNIVTK

SEQ ID NO: 64036 - protein, 9 aa, synthetic construct
  source 1..9: note = Seed: STTTNIVTR
SVTTNIVTR

SEQ ID NO: 64037 - protein, 11 aa, synthetic construct
  source 1..11: note = Seed: SDTYACWHHSI
SVTYACWHHSF

SEQ ID NO: 64038 - protein, 11 aa, synthetic construct
  source 1..11: note = Seed: SDTYACWHHSI
SVTYACWHHSI

SEQ ID NO: 64039 - protein, 11 aa, synthetic construct
  source 1..11: note = Seed: SDTYACWHHSI
SVTYACWHHSL

SEQ ID NO: 64040 - protein, 11 aa, synthetic construct
  source 1..11: note = Seed: SDTYACWHHSI
SVTYACWHHSW

SEQ ID NO: 64041 - protein, 9 aa, synthetic construct
  source 1..9: note = Seed: SIVCRFDTR
SVVCRFDTR

SEQ ID NO: 64042 - protein, 11 aa, synthetic construct
  source 1..11: note = Seed: SVVLLSVLQQL
SVVLLSVLQQI

SEQ ID NO: 64043 - protein, 11 aa, synthetic construct
  source 1..11: note = Seed: SVVLLSVLQQL
SVVLLSVLQQV

SEQ ID NO: 64044 - protein, 10 aa, synthetic construct
  source 1..10: note = Seed: SSVLNDILSR
SVVLNDILSK

SEQ ID NO: 64045 - protein, 10 aa, synthetic construct
  source 1..10: note = Seed: SSVLNDILSR
SVVLNDILSR

SEQ ID NO: 64046 - protein, 11 aa, synthetic construct
  source 1..11: note = Seed: SSVLNDILSRL
SVVLNDILSRV

SEQ ID NO: 64047 - protein, 9 aa, synthetic construct
  source 1..9: note = Seed: SAVLQSGFR
SVVLQSGFK

SEQ ID NO: 64048 - protein, 9 aa, synthetic construct
  source 1..9: note = Seed: SAVLQSGFR
SVVLQSGFR

SEQ ID NO: 64049 - protein, 10 aa, synthetic construct
  source 1..10: note = Seed: SAVLQSGFRK
SVVLQSGFRK

SEQ ID NO: 64050 - protein, 10 aa, synthetic construct
  source 1..10: note = Seed: SAVLQSGFRK
SVVLQSGFRR

SEQ ID NO: 64051 - protein, 10 aa, synthetic construct
  source 1..10: note = Seed: SWVMRIMTWL
SVVMRIMTWV

SEQ ID NO: 64052 - protein, 9 aa, synthetic construct
  source 1..9: note = Seed: SGVYQCAMR
SVVYQCAMK

SEQ ID NO: 64053 - protein, 9 aa, synthetic construct
  source 1..9: note = Seed: SGVYQCAMR
SVVYQCAMR

SEQ ID NO: 64054 - protein, 10 aa, synthetic construct
  source 1..10: note = Seed: SDYDYYRYNL
SVYDYYRYNF

SEQ ID NO: 64055 - protein, 9 aa, synthetic construct
  source 1..9: note = Seed: SFYEDFLEY
SVYEDFLEF

SEQ ID NO: 64056 - protein, 9 aa, synthetic construct
  source 1..9: note = Seed: SFYEDFLEY
SVYEDFLEI

SEQ ID NO: 64057 - protein, 9 aa, synthetic construct
  source 1..9: note = Seed: SFYEDFLEY
SVYEDFLEL

SEQ ID NO: 64058 - protein, 9 aa, synthetic construct
  source 1..9: note = Seed: SFYEDFLEY
SVYEDFLEM

SEQ ID NO: 64059 - protein, 9 aa, synthetic construct
  source 1..9: note = Seed: SFYEDFLEY
SVYEDFLEV

SEQ ID NO: 64060 - protein, 9 aa, synthetic construct
  source 1..9: note = Seed: SFYEDFLEY
SVYEDFLEY

SEQ ID NO: 64061 - protein, 9 aa, synthetic construct
  source 1..9: note = Seed: SAYENFNQH
SVYENFNQF

SEQ ID NO: 64062 - protein, 9 aa, synthetic construct
  source 1..9: note = Seed: SAYENFNQH
SVYENFNQI

SEQ ID NO: 64063 - protein, 9 aa, synthetic construct
  source 1..9: note = Seed: SAYENFNQH
SVYENFNQL

SEQ ID NO: 64064 - protein, 9 aa, synthetic construct
  source 1..9: note = Seed: SAYENFNQH
SVYENFNQM

SEQ ID NO: 64065 - protein, 9 aa, synthetic construct
  source 1..9: note = Seed: SAYENFNQH
SVYENFNQV

SEQ ID NO: 64066 - protein, 9 aa, synthetic construct
  source 1..9: note = Seed: SAYENFNQH
SVYENFNQY

SEQ ID NO: 64067 - protein, 10 aa, synthetic construct
  source 1..10: note = Seed: SSYIVDSVTV
SVYIVDSVTF

SEQ ID NO: 64068 - protein, 10 aa, synthetic construct
  source 1..10: note = Seed: SSYIVDSVTV
SVYIVDSVTI

SEQ ID NO: 64069 - protein, 10 aa, synthetic construct
  source 1..10: note = Seed: SSYIVDSVTV
SVYIVDSVTL

SEQ ID NO: 64070 - protein, 11 aa, synthetic construct
  source 1..11: note = Seed: SSYIVDSVTVK
SVYIVDSVTVK

SEQ ID NO: 64071 - protein, 10 aa, synthetic construct
  source 1..10: note = Seed: SSYIVDSVTV
SVYIVDSVTW

SEQ ID NO: 64072 - protein, 10 aa, synthetic construct
  source 1..10: note = Seed: SYYKLGASQR
SVYKLGASQR

SEQ ID NO: 64073 - protein, 9 aa, synthetic construct
  source 1..9: note = Seed: SNYLKRRVV
SVYLKRRVL

SEQ ID NO: 64074 - protein, 9 aa, synthetic construct
  source 1..9: note = Seed: SPYNSQNAV
SVYNSQNAF

SEQ ID NO: 64075 - protein, 9 aa, synthetic construct
  source 1..9: note = Seed: SPYNSQNAV
SVYNSQNAY

SEQ ID NO: 64076 - protein, 10 aa, synthetic construct
  source 1..10: note = Seed: SRYRIGNYKL
SVYRIGNYKF

SEQ ID NO: 64077 - protein, 9 aa, synthetic construct
  source 1..9: note = Seed: SYYSLLMPI
SVYSLLMPA

SEQ ID NO: 64078 - protein, 9 aa, synthetic construct
  source 1..9: note = Seed: SYYSLLMPI
SVYSLLMPF

SEQ ID NO: 64079 - protein, 9 aa, synthetic construct
  source 1..9: note = Seed: SYYSLLMPI
SVYSLLMPI

SEQ ID NO: 64080 - protein, 10 aa, synthetic construct
  source 1..10: note = Seed: SYYSLLMPIL
SVYSLLMPIF

SEQ ID NO: 64081 - protein, 9 aa, synthetic construct
  source 1..9: note = Seed: SYYSLLMPI
SVYSLLMPK

SEQ ID NO: 64082 - protein, 9 aa, synthetic construct
  source 1..9: note = Seed: SYYSLLMPI
SVYSLLMPL

SEQ ID NO: 64083 - protein, 9 aa, synthetic construct
  source 1..9: note = Seed: SYYSLLMPI
SVYSLLMPM

SEQ ID NO: 64084 - protein, 9 aa, synthetic construct
  source 1..9: note = Seed: SYYSLLMPI
SVYSLLMPT

SEQ ID NO: 64085 - protein, 9 aa, synthetic construct
  source 1..9: note = Seed: SYYSLLMPI
SVYSLLMPV

SEQ ID NO: 64086 - protein, 9 aa, synthetic construct
  source 1..9: note = Seed: SYYSLLMPI
SVYSLLMPW

SEQ ID NO: 64087 - protein, 9 aa, synthetic construct
  source 1..9: note = Seed: SYYSLLMPI
SVYSLLMPY

SEQ ID NO: 64088 - protein, 9 aa, synthetic construct
  source 1..9: note = Seed: SLYVKPGGT
SVYVKPGGV

SEQ ID NO: 64089 - protein, 9 aa, synthetic construct
  source 1..9: note = Seed: SLYVNKHAF
SVYVNKHAF

SEQ ID NO: 64090 - protein, 9 aa, synthetic construct
  source 1..9: note = Seed: SLYVNKHAF
SVYVNKHAM

SEQ ID NO: 64091 - protein, 9 aa, synthetic construct
  source 1..9: note = Seed: SLYVNKHAF
SVYVNKHAY

SEQ ID NO: 64092 - protein, 10 aa, synthetic construct
  source 1..10: note = Seed: SFYVYANGGK
SVYVYANGGR

SEQ ID NO: 64093 - protein, 9 aa, synthetic construct
  source 1..9: note = Seed: SFYYVWKSY
SVYYVWKSF

SEQ ID NO: 64094 - protein, 9 aa, synthetic construct
  source 1..9: note = Seed: SFYYVWKSY
SVYYVWKSY

SEQ ID NO: 64095 - protein, 10 aa, synthetic construct
  source 1..10: note = Seed: SFYYVWKSYV
SVYYVWKSYF

SEQ ID NO: 64096 - protein, 10 aa, synthetic construct
  source 1..10: note = Seed: SFYYVWKSYV
SVYYVWKSYW

SEQ ID NO: 64097 - protein, 10 aa, synthetic construct
  source 1..10: note = Seed: SEAFLIGCNY
SWAFLIGCNY

SEQ ID NO: 64098 - protein, 10 aa, synthetic construct
  source 1..10: note = Seed: SIAIPTNFTI
SWAIPTNFTF

SEQ ID NO: 64099 - protein, 10 aa, synthetic construct
  source 1..10: note = Seed: SIAIPTNFTI
SWAIPTNFTW

SEQ ID NO: 64100 - protein, 10 aa, synthetic construct
  source 1..10: note = Seed: SSANNCTFEY
SWANNCTFEK

SEQ ID NO: 64101 - protein, 10 aa, synthetic construct
  source 1..10: note = Seed: SSANNCTFEY
SWANNCTFEW

SEQ ID NO: 64102 - protein, 10 aa, synthetic construct
  source 1..10: note = Seed: SSANNCTFEY
SWANNCTFEY

SEQ ID NO: 64103 - protein, 10 aa, synthetic construct
  source 1..10: note = Seed: SQAWQPGVAM
SWAWQPGVAY

SEQ ID NO: 64104 - protein, 11 aa, synthetic construct
  source 1..11: note = Seed: SFCAFAVDAAK
SWCAFAVDAAR

SEQ ID NO: 64105 - protein, 10 aa, synthetic construct
  source 1..10: note = Seed: SFCYMHHMEL
SWCYMHHMEF

SEQ ID NO: 64106 - protein, 10 aa, synthetic construct
  source 1..10: note = Seed: SFCYMHHMEL
SWCYMHHMEW

SEQ ID NO: 64107 - protein, 10 aa, synthetic construct
  source 1..10: note = Seed: SYELQTPFEI
SWELQTPFEF

SEQ ID NO: 64108 - protein, 10 aa, synthetic construct
  source 1..10: note = Seed: SYELQTPFEI
SWELQTPFEL

SEQ ID NO: 64109 - protein, 10 aa, synthetic construct
  source 1..10: note = Seed: SYELQTPFEI
SWELQTPFEW

SEQ ID NO: 64110 - protein, 9 aa, synthetic construct
  source 1..9: note = Seed: SGFAAYSRY
SWFAAYSRF

SEQ ID NO: 64111 - protein, 9 aa, synthetic construct
  source 1..9: note = Seed: SGFAAYSRY
SWFAAYSRY

SEQ ID NO: 64112 - protein, 9 aa, synthetic construct
  source 1..9: note = Seed: SAFAMMFVK
SWFAMMFVK

SEQ ID NO: 64113 - protein, 11 aa, synthetic construct
  source 1..11: note = Seed: SAFAMMFVKHK
SWFAMMFVKHR

SEQ ID NO: 64114 - protein, 9 aa, synthetic construct
  source 1..9: note = Seed: SAFAMMFVK
SWFAMMFVR

SEQ ID NO: 64115 - protein, 8 aa, synthetic construct
  source 1..8: note = Seed: SYFAVHFI
SWFAVHFF

SEQ ID NO: 64116 - protein, 9 aa, synthetic construct
  source 1..9: note = Seed: SYFIASFRL
SWFIASFRF

SEQ ID NO: 64117 - protein, 9 aa, synthetic construct
  source 1..9: note = Seed: SYFIASFRL
SWFIASFRI

SEQ ID NO: 64118 - protein, 9 aa, synthetic construct
  source 1..9: note = Seed: SYFIASFRL
SWFIASFRL

SEQ ID NO: 64119 - protein, 10 aa, synthetic construct
  source 1..10: note = Seed: SYFIASFRLF
SWFIASFRLF

SEQ ID NO: 64120 - protein, 11 aa, synthetic construct
  source 1..11: note = Seed: SYFIASFRLFA
SWFIASFRLFF

SEQ ID NO: 64121 - protein, 11 aa, synthetic construct
  source 1..11: note = Seed: SYFIASFRLFA
SWFIASFRLFW

SEQ ID NO: 64122 - protein, 10 aa, synthetic construct
  source 1..10: note = Seed: SYFIASFRLF
SWFIASFRLI

SEQ ID NO: 64123 - protein, 10 aa, synthetic construct
  source 1..10: note = Seed: SYFIASFRLF
SWFIASFRLL

SEQ ID NO: 64124 - protein, 10 aa, synthetic construct
  source 1..10: note = Seed: SYFIASFRLF
SWFIASFRLM

SEQ ID NO: 64125 - protein, 10 aa, synthetic construct
  source 1..10: note = Seed: SYFIASFRLF
SWFIASFRLW

SEQ ID NO: 64126 - protein, 10 aa, synthetic construct
  source 1..10: note = Seed: SYFIASFRLF
SWFIASFRLY

SEQ ID NO: 64127 - protein, 9 aa, synthetic construct
  source 1..9: note = Seed: SYFIASFRL
SWFIASFRM

SEQ ID NO: 64128 - protein, 9 aa, synthetic construct
  source 1..9: note = Seed: SYFIASFRL
SWFIASFRW

SEQ ID NO: 64129 - protein, 9 aa, synthetic construct
  source 1..9: note = Seed: SYFIASFRL
SWFIASFRY

SEQ ID NO: 64130 - protein, 11 aa, synthetic construct
  source 1..11: note = Seed: SKFPLKLRGTA
SWFPLKLRGTL

SEQ ID NO: 64131 - protein, 11 aa, synthetic construct
  source 1..11: note = Seed: SKFPLKLRGTA
SWFPLKLRGTM

SEQ ID NO: 64132 - protein, 10 aa, synthetic construct
  source 1..10: note = Seed: SYFTEQPIDL
SWFTEQPIDF

SEQ ID NO: 64133 - protein, 11 aa, synthetic construct
  source 1..11: note = Seed: SYFTEQPIDLV
SWFTEQPIDLF

SEQ ID NO: 64134 - protein, 10 aa, synthetic construct
  source 1..10: note = Seed: SYFTSDYYQL
SWFTSDYYQF

SEQ ID NO: 64135 - protein, 10 aa, synthetic construct
  source 1..10: note = Seed: SYFTSDYYQL
SWFTSDYYQI

SEQ ID NO: 64136 - protein, 10 aa, synthetic construct
  source 1..10: note = Seed: SYFTSDYYQL
SWFTSDYYQL

SEQ ID NO: 64137 - protein, 11 aa, synthetic construct
  source 1..11: note = Seed: SYFTSDYYQLY
SWFTSDYYQLF

SEQ ID NO: 64138 - protein, 11 aa, synthetic construct
  source 1..11: note = Seed: SYFTSDYYQLY
SWFTSDYYQLI

SEQ ID NO: 64139 - protein, 11 aa, synthetic construct
  source 1..11: note = Seed: SYFTSDYYQLY
SWFTSDYYQLL

SEQ ID NO: 64140 - protein, 11 aa, synthetic construct
  source 1..11: note = Seed: SYFTSDYYQLY
SWFTSDYYQLW

SEQ ID NO: 64141 - protein, 11 aa, synthetic construct
  source 1..11: note = Seed: SYFTSDYYQLY
SWFTSDYYQLY

SEQ ID NO: 64142 - protein, 10 aa, synthetic construct
  source 1..10: note = Seed: SYFTSDYYQL
SWFTSDYYQM

SEQ ID NO: 64143 - protein, 10 aa, synthetic construct
  source 1..10: note = Seed: SYFTSDYYQL
SWFTSDYYQW

SEQ ID NO: 64144 - protein, 10 aa, synthetic construct
  source 1..10: note = Seed: SHFVNLDNLR
SWFVNLDNLR

SEQ ID NO: 64145 - protein, 10 aa, synthetic construct
  source 1..10: note = Seed: SYFVVKRHTF
SWFVVKRHTF

SEQ ID NO: 64146 - protein, 11 aa, synthetic construct
  source 1..11: note = Seed: SYFVVKRHTFS
SWFVVKRHTFF

SEQ ID NO: 64147 - protein, 10 aa, synthetic construct
  source 1..10: note = Seed: SYFVVKRHTF
SWFVVKRHTW

SEQ ID NO: 64148 - protein, 9 aa, synthetic construct
  source 1..9: note = Seed: SYIVDSVTV
SWIVDSVTF

SEQ ID NO: 64149 - protein, 9 aa, synthetic construct
  source 1..9: note = Seed: SYIVDSVTV
SWIVDSVTI

SEQ ID NO: 64150 - protein, 9 aa, synthetic construct
  source 1..9: note = Seed: SYIVDSVTV
SWIVDSVTL

SEQ ID NO: 64151 - protein, 9 aa, synthetic construct
  source 1..9: note = Seed: SYIVDSVTV
SWIVDSVTM

SEQ ID NO: 64152 - protein, 9 aa, synthetic construct
  source 1..9: note = Seed: SYIVDSVTV
SWIVDSVTW

SEQ ID NO: 64153 - protein, 11 aa, synthetic construct
  source 1..11: note = Seed: SKKPRQKRTAT
SWKPRQKRTAF

SEQ ID NO: 64154 - protein, 11 aa, synthetic construct
  source 1..11: note = Seed: SKKPRQKRTAT
SWKPRQKRTAI

SEQ ID NO: 64155 - protein, 11 aa, synthetic construct
  source 1..11: note = Seed: SKKPRQKRTAT
SWKPRQKRTAL

SEQ ID NO: 64156 - protein, 11 aa, synthetic construct
  source 1..11: note = Seed: SKKPRQKRTAT
SWKPRQKRTAM

SEQ ID NO: 64157 - protein, 11 aa, synthetic construct
  source 1..11: note = Seed: SKKPRQKRTAT
SWKPRQKRTAV

SEQ ID NO: 64158 - protein, 11 aa, synthetic construct
  source 1..11: note = Seed: SEKSYELQTPF
SWKSYELQTPW

SEQ ID NO: 64159 - protein, 9 aa, synthetic construct
  source 1..9: note = Seed: SFLAHIQWM
SWLAHIQWF

SEQ ID NO: 64160 - protein, 9 aa, synthetic construct
  source 1..9: note = Seed: SFLAHIQWM
SWLAHIQWI

SEQ ID NO: 64161 - protein, 9 aa, synthetic construct
  source 1..9: note = Seed: SFLAHIQWM
SWLAHIQWL

SEQ ID NO: 64162 - protein, 9 aa, synthetic construct
  source 1..9: note = Seed: SFLAHIQWM
SWLAHIQWM

SEQ ID NO: 64163 - protein, 10 aa, synthetic construct
  source 1..10: note = Seed: SFLAHIQWMV
SWLAHIQWMA

SEQ ID NO: 64164 - protein, 10 aa, synthetic construct
  source 1..10: note = Seed: SFLAHIQWMV
SWLAHIQWMI

SEQ ID NO: 64165 - protein, 10 aa, synthetic construct
  source 1..10: note = Seed: SFLAHIQWMV
SWLAHIQWML

SEQ ID NO: 64166 - protein, 10 aa, synthetic construct
  source 1..10: note = Seed: SFLAHIQWMV
SWLAHIQWMV

SEQ ID NO: 64167 - protein, 9 aa, synthetic construct
  source 1..9: note = Seed: SFLAHIQWM
SWLAHIQWW

SEQ ID NO: 64168 - protein, 10 aa, synthetic construct
  source 1..10: note = Seed: SFLGRYMSAL
SWLGRYMSAV

SEQ ID NO: 64169 - protein, 9 aa, synthetic construct
  source 1..9: note = Seed: SFLGRYMSA
SWLGRYMSF

SEQ ID NO: 64170 - protein, 9 aa, synthetic construct
  source 1..9: note = Seed: SFLGRYMSA
SWLGRYMSL

SEQ ID NO: 64171 - protein, 9 aa, synthetic construct
  source 1..9: note = Seed: SFLGRYMSA
SWLGRYMSM

SEQ ID NO: 64172 - protein, 9 aa, synthetic construct
  source 1..9: note = Seed: SFLGRYMSA
SWLGRYMSY

SEQ ID NO: 64173 - protein, 10 aa, synthetic construct
  source 1..10: note = Seed: SVLLFLAFVV
SWLLFLAFVI

SEQ ID NO: 64174 - protein, 10 aa, synthetic construct
  source 1..10: note = Seed: SVLLFLAFVV
SWLLFLAFVL

SEQ ID NO: 64175 - protein, 10 aa, synthetic construct
  source 1..10: note = Seed: SVLLFLAFVV
SWLLFLAFVV

SEQ ID NO: 64176 - protein, 10 aa, synthetic construct
  source 1..10: note = Seed: SQLMCQPILL
SWLMCQPILA

SEQ ID NO: 64177 - protein, 10 aa, synthetic construct
  source 1..10: note = Seed: SQLMCQPILL
SWLMCQPILI

SEQ ID NO: 64178 - protein, 10 aa, synthetic construct
  source 1..10: note = Seed: SQLMCQPILL
SWLMCQPILL

SEQ ID NO: 64179 - protein, 10 aa, synthetic construct
  source 1..10: note = Seed: SQLMCQPILL
SWLMCQPILV

SEQ ID NO: 64180 - protein, 10 aa, synthetic construct
  source 1..10: note = Seed: SWLMWLIINL
SWLMWLIINA

SEQ ID NO: 64181 - protein, 10 aa, synthetic construct
  source 1..10: note = Seed: SWLMWLIINL
SWLMWLIINI

SEQ ID NO: 64182 - protein, 10 aa, synthetic construct
  source 1..10: note = Seed: SWLMWLIINL
SWLMWLIINM

SEQ ID NO: 64183 - protein, 10 aa, synthetic construct
  source 1..10: note = Seed: SWLMWLIINL
SWLMWLIINT

SEQ ID NO: 64184 - protein, 10 aa, synthetic construct
  source 1..10: note = Seed: SWLMWLIINL
SWLMWLIINV

SEQ ID NO: 64185 - protein, 10 aa, synthetic construct
  source 1..10: note = Seed: SDLNDFVSDA
SWLNDFVSDI

SEQ ID NO: 64186 - protein, 10 aa, synthetic construct
  source 1..10: note = Seed: SDLNDFVSDA
SWLNDFVSDL

SEQ ID NO: 64187 - protein, 10 aa, synthetic construct
  source 1..10: note = Seed: SDLNDFVSDA
SWLNDFVSDV

SEQ ID NO: 64188 - protein, 10 aa, synthetic construct
  source 1..10: note = Seed: SVLNDILSRL
SWLNDILSRA

SEQ ID NO: 64189 - protein, 10 aa, synthetic construct
  source 1..10: note = Seed: SVLNDILSRL
SWLNDILSRI

SEQ ID NO: 64190 - protein, 10 aa, synthetic construct
  source 1..10: note = Seed: SVLNDILSRL
SWLNDILSRL

SEQ ID NO: 64191 - protein, 10 aa, synthetic construct
  source 1..10: note = Seed: SVLNDILSRL
SWLNDILSRV

SEQ ID NO: 64192 - protein, 9 aa, synthetic construct
  source 1..9: note = Seed: SFLPGVYSV
SWLPGVYSF

SEQ ID NO: 64193 - protein, 9 aa, synthetic construct
  source 1..9: note = Seed: SFLPGVYSV
SWLPGVYSI

SEQ ID NO: 64194 - protein, 9 aa, synthetic construct
  source 1..9: note = Seed: SFLPGVYSV
SWLPGVYSL

SEQ ID NO: 64195 - protein, 9 aa, synthetic construct
  source 1..9: note = Seed: SFLPGVYSV
SWLPGVYSM

SEQ ID NO: 64196 - protein, 9 aa, synthetic construct
  source 1..9: note = Seed: SFLPGVYSV
SWLPGVYSV

SEQ ID NO: 64197 - protein, 9 aa, synthetic construct
  source 1..9: note = Seed: SFLPGVYSV
SWLPGVYSW

SEQ ID NO: 64198 - protein, 9 aa, synthetic construct
  source 1..9: note = Seed: SFLPGVYSV
SWLPGVYSY

SEQ ID NO: 64199 - protein, 11 aa, synthetic construct
  source 1..11: note = Seed: SELVIGAVILR
SWLVIGAVILR

SEQ ID NO: 64200 - protein, 10 aa, synthetic construct
  source 1..10: note = Seed: SVLYYQNNVF
SWLYYQNNVF

SEQ ID NO: 64201 - protein, 11 aa, synthetic construct
  source 1..11: note = Seed: SVLYYQNNVFM
SWLYYQNNVFF

SEQ ID NO: 64202 - protein, 11 aa, synthetic construct
  source 1..11: note = Seed: SVLYYQNNVFM
SWLYYQNNVFW

SEQ ID NO: 64203 - protein, 10 aa, synthetic construct
  source 1..10: note = Seed: SVLYYQNNVF
SWLYYQNNVY

SEQ ID NO: 64204 - protein, 9 aa, synthetic construct
  source 1..9: note = Seed: SMMGFKMNY
SWMGFKMNF

SEQ ID NO: 64205 - protein, 9 aa, synthetic construct
  source 1..9: note = Seed: SMMGFKMNY
SWMGFKMNK

SEQ ID NO: 64206 - protein, 9 aa, synthetic construct
  source 1..9: note = Seed: SMMGFKMNY
SWMGFKMNL

SEQ ID NO: 64207 - protein, 9 aa, synthetic construct
  source 1..9: note = Seed: SMMGFKMNY
SWMGFKMNM

SEQ ID NO: 64208 - protein, 9 aa, synthetic construct
  source 1..9: note = Seed: SMMGFKMNY
SWMGFKMNR

SEQ ID NO: 64209 - protein, 9 aa, synthetic construct
  source 1..9: note = Seed: SMMGFKMNY
SWMGFKMNY

SEQ ID NO: 64210 - protein, 10 aa, synthetic construct
  source 1..10: note = Seed: SMMGFKMNYQ
SWMGFKMNYK

SEQ ID NO: 64211 - protein, 10 aa, synthetic construct
  source 1..10: note = Seed: SMMGFKMNYQ
SWMGFKMNYR

SEQ ID NO: 64212 - protein, 10 aa, synthetic construct
  source 1..10: note = Seed: SMMGFKMNYQ
SWMGFKMNYY

SEQ ID NO: 64213 - protein, 10 aa, synthetic construct
  source 1..10: note = Seed: SAMQTMLFTM
SWMQTMLFTA

SEQ ID NO: 64214 - protein, 10 aa, synthetic construct
  source 1..10: note = Seed: SAMQTMLFTM
SWMQTMLFTI

SEQ ID NO: 64215 - protein, 10 aa, synthetic construct
  source 1..10: note = Seed: SAMQTMLFTM
SWMQTMLFTL

SEQ ID NO: 64216 - protein, 10 aa, synthetic construct
  source 1..10: note = Seed: SAMQTMLFTM
SWMQTMLFTV

SEQ ID NO: 64217 - protein, 10 aa, synthetic construct
  source 1..10: note = Seed: SAMQTMLFTM
SWMQTMLFTY

SEQ ID NO: 64218 - protein, 9 aa, synthetic construct
  source 1..9: note = Seed: SAMVRMYIF
SWMVRMYIF

SEQ ID NO: 64219 - protein, 9 aa, synthetic construct
  source 1..9: note = Seed: SAMVRMYIF
SWMVRMYII

SEQ ID NO: 64220 - protein, 9 aa, synthetic construct
  source 1..9: note = Seed: SAMVRMYIF
SWMVRMYIL

SEQ ID NO: 64221 - protein, 9 aa, synthetic construct
  source 1..9: note = Seed: SAMVRMYIF
SWMVRMYIM

SEQ ID NO: 64222 - protein, 9 aa, synthetic construct
  source 1..9: note = Seed: SAMVRMYIF
SWMVRMYIW

SEQ ID NO: 64223 - protein, 9 aa, synthetic construct
  source 1..9: note = Seed: SANNCTFEY
SWNNCTFEF

SEQ ID NO: 64224 - protein, 9 aa, synthetic construct
  source 1..9: note = Seed: SANNCTFEY
SWNNCTFEL

SEQ ID NO: 64225 - protein, 9 aa, synthetic construct
  source 1..9: note = Seed: SANNCTFEY
SWNNCTFEM

SEQ ID NO: 64226 - protein, 9 aa, synthetic construct
  source 1..9: note = Seed: SANNCTFEY
SWNNCTFEY

SEQ ID NO: 64227 - protein, 9 aa, synthetic construct
  source 1..9: note = Seed: SFNPETNIL
SWNPETNIF

SEQ ID NO: 64228 - protein, 9 aa, synthetic construct
  source 1..9: note = Seed: SFNPETNIL
SWNPETNII

SEQ ID NO: 64229 - protein, 10 aa, synthetic construct
  source 1..10: note = Seed: SFNPETNILL
SWNPETNILF

SEQ ID NO: 64230 - protein, 10 aa, synthetic construct
  source 1..10: note = Seed: SFNPETNILL
SWNPETNILW

SEQ ID NO: 64231 - protein, 9 aa, synthetic construct
  source 1..9: note = Seed: SFNPETNIL
SWNPETNIM

SEQ ID NO: 64232 - protein, 9 aa, synthetic construct
  source 1..9: note = Seed: SFNPETNIL
SWNPETNIW

SEQ ID NO: 64233 - protein, 9 aa, synthetic construct
  source 1..9: note = Seed: SSNVANYQK
SWNVANYQR

SEQ ID NO: 64234 - protein, 10 aa, synthetic construct
  source 1..10: note = Seed: SFNYLKSPNF
SWNYLKSPNF

SEQ ID NO: 64235 - protein, 9 aa, synthetic construct
  source 1..9: note = Seed: SAPHGVVFL
SWPHGVVFM

SEQ ID NO: 64236 - protein, 9 aa, synthetic construct
  source 1..9: note = Seed: SFRLFARTR
SWRLFARTK

SEQ ID NO: 64237 - protein, 9 aa, synthetic construct
  source 1..9: note = Seed: SFRLFARTR
SWRLFARTR

SEQ ID NO: 64238 - protein, 9 aa, synthetic construct
  source 1..9: note = Seed: SSRLSFKEL
SWRLSFKEK

SEQ ID NO: 64239 - protein, 10 aa, synthetic construct
  source 1..10: note = Seed: SPRWYFYYLG
SWRWYFYYLF

SEQ ID NO: 64240 - protein, 10 aa, synthetic construct
  source 1..10: note = Seed: SPRWYFYYLG
SWRWYFYYLK

SEQ ID NO: 64241 - protein, 10 aa, synthetic construct
  source 1..10: note = Seed: SPRWYFYYLG
SWRWYFYYLL

SEQ ID NO: 64242 - protein, 10 aa, synthetic construct
  source 1..10: note = Seed: SPRWYFYYLG
SWRWYFYYLM

SEQ ID NO: 64243 - protein, 10 aa, synthetic construct
  source 1..10: note = Seed: STSAFVETVK
SWSAFVETVR

SEQ ID NO: 64244 - protein, 10 aa, synthetic construct
  source 1..10: note = Seed: SSSDNIALLV
SWSDNIALLY

SEQ ID NO: 64245 - protein, 10 aa, synthetic construct
  source 1..10: note = Seed: SASFSTFKCY
SWSFSTFKCY

SEQ ID NO: 64246 - protein, 10 aa, synthetic construct
  source 1..10: note = Seed: SASVYYSQLM
SWSVYYSQLF

SEQ ID NO: 64247 - protein, 10 aa, synthetic construct
  source 1..10: note = Seed: SASVYYSQLM
SWSVYYSQLW

SEQ ID NO: 64248 - protein, 10 aa, synthetic construct
  source 1..10: note = Seed: SASVYYSQLM
SWSVYYSQLY

SEQ ID NO: 64249 - protein, 9 aa, synthetic construct
  source 1..9: note = Seed: SSTCMMCYK
SWTCMMCYK

SEQ ID NO: 64250 - protein, 10 aa, synthetic construct
  source 1..10: note = Seed: SSTCMMCYKR
SWTCMMCYKR

SEQ ID NO: 64251 - protein, 9 aa, synthetic construct
  source 1..9: note = Seed: SSTCMMCYK
SWTCMMCYR

SEQ ID NO: 64252 - protein, 11 aa, synthetic construct
  source 1..11: note = Seed: SYTNDKACPLI
SWTNDKACPLF

SEQ ID NO: 64253 - protein, 9 aa, synthetic construct
  source 1..9: note = Seed: SYTTTIKPV
SWTTTIKPF

SEQ ID NO: 64254 - protein, 9 aa, synthetic construct
  source 1..9: note = Seed: SYTTTIKPV
SWTTTIKPL

SEQ ID NO: 64255 - protein, 9 aa, synthetic construct
  source 1..9: note = Seed: SYTTTIKPV
SWTTTIKPM

SEQ ID NO: 64256 - protein, 11 aa, synthetic construct
  source 1..11: note = Seed: SDTYACWHHSI
SWTYACWHHSF

SEQ ID NO: 64257 - protein, 11 aa, synthetic construct
  source 1..11: note = Seed: SDTYACWHHSI
SWTYACWHHSI

SEQ ID NO: 64258 - protein, 11 aa, synthetic construct
  source 1..11: note = Seed: SDTYACWHHSI
SWTYACWHHSL

SEQ ID NO: 64259 - protein, 11 aa, synthetic construct
  source 1..11: note = Seed: SDTYACWHHSI
SWTYACWHHSW

SEQ ID NO: 64260 - protein, 11 aa, synthetic construct
  source 1..11: note = Seed: SVVLLSVLQQL
SWVLLSVLQQI

SEQ ID NO: 64261 - protein, 11 aa, synthetic construct
  source 1..11: note = Seed: SVVLLSVLQQL
SWVLLSVLQQV

SEQ ID NO: 64262 - protein, 10 aa, synthetic construct
  source 1..10: note = Seed: SSVLNDILSR
SWVLNDILSK

SEQ ID NO: 64263 - protein, 11 aa, synthetic construct
  source 1..11: note = Seed: SSVLNDILSRL
SWVLNDILSRL

SEQ ID NO: 64264 - protein, 11 aa, synthetic construct
  source 1..11: note = Seed: SSVLNDILSRL
SWVLNDILSRV

SEQ ID NO: 64265 - protein, 10 aa, synthetic construct
  source 1..10: note = Seed: SAVLQSGFRK
SWVLQSGFRK

SEQ ID NO: 64266 - protein, 10 aa, synthetic construct
  source 1..10: note = Seed: SAVLQSGFRK
SWVLQSGFRR

SEQ ID NO: 64267 - protein, 9 aa, synthetic construct
  source 1..9: note = Seed: SWVMRIMTW
SWVMRIMTF

SEQ ID NO: 64268 - protein, 9 aa, synthetic construct
  source 1..9: note = Seed: SWVMRIMTW
SWVMRIMTI

SEQ ID NO: 64269 - protein, 9 aa, synthetic construct
  source 1..9: note = Seed: SWVMRIMTW
SWVMRIMTL

SEQ ID NO: 64270 - protein, 9 aa, synthetic construct
  source 1..9: note = Seed: SWVMRIMTW
SWVMRIMTM

SEQ ID NO: 64271 - protein, 10 aa, synthetic construct
  source 1..10: note = Seed: SWVMRIMTWL
SWVMRIMTWF

SEQ ID NO: 64272 - protein, 10 aa, synthetic construct
  source 1..10: note = Seed: SWVMRIMTWL
SWVMRIMTWV

SEQ ID NO: 64273 - protein, 9 aa, synthetic construct
  source 1..9: note = Seed: SWVMRIMTW
SWVMRIMTY

SEQ ID NO: 64274 - protein, 10 aa, synthetic construct
  source 1..10: note = Seed: SDYDYYRYNL
SWYDYYRYNF

SEQ ID NO: 64275 - protein, 10 aa, synthetic construct
  source 1..10: note = Seed: SDYDYYRYNL
SWYDYYRYNI

SEQ ID NO: 64276 - protein, 10 aa, synthetic construct
  source 1..10: note = Seed: SDYDYYRYNL
SWYDYYRYNL

SEQ ID NO: 64277 - protein, 10 aa, synthetic construct
  source 1..10: note = Seed: SDYDYYRYNL
SWYDYYRYNW

SEQ ID NO: 64278 - protein, 9 aa, synthetic construct
  source 1..9: note = Seed: SFYEDFLEY
SWYEDFLEF

SEQ ID NO: 64279 - protein, 9 aa, synthetic construct
  source 1..9: note = Seed: SFYEDFLEY
SWYEDFLEI

SEQ ID NO: 64280 - protein, 9 aa, synthetic construct
  source 1..9: note = Seed: SFYEDFLEY
SWYEDFLEL

SEQ ID NO: 64281 - protein, 9 aa, synthetic construct
  source 1..9: note = Seed: SFYEDFLEY
SWYEDFLEM

SEQ ID NO: 64282 - protein, 9 aa, synthetic construct
  source 1..9: note = Seed: SFYEDFLEY
SWYEDFLEW

SEQ ID NO: 64283 - protein, 9 aa, synthetic construct
  source 1..9: note = Seed: SFYEDFLEY
SWYEDFLEY

SEQ ID NO: 64284 - protein, 10 aa, synthetic construct
  source 1..10: note = Seed: SSYIVDSVTV
SWYIVDSVTF

SEQ ID NO: 64285 - protein, 10 aa, synthetic construct
  source 1..10: note = Seed: SSYIVDSVTV
SWYIVDSVTI

SEQ ID NO: 64286 - protein, 10 aa, synthetic construct
  source 1..10: note = Seed: SSYIVDSVTV
SWYIVDSVTL

SEQ ID NO: 64287 - protein, 10 aa, synthetic construct
  source 1..10: note = Seed: SSYIVDSVTV
SWYIVDSVTW

SEQ ID NO: 64288 - protein, 9 aa, synthetic construct
  source 1..9: note = Seed: SYYKLGASQ
SWYKLGASF

SEQ ID NO: 64289 - protein, 9 aa, synthetic construct
  source 1..9: note = Seed: SYYKLGASQ
SWYKLGASL

SEQ ID NO: 64290 - protein, 9 aa, synthetic construct
  source 1..9: note = Seed: SYYKLGASQ
SWYKLGASM

SEQ ID NO: 64291 - protein, 11 aa, synthetic construct
  source 1..11: note = Seed: SYYKLGASQRV
SWYKLGASQRF

SEQ ID NO: 64292 - protein, 9 aa, synthetic construct
  source 1..9: note = Seed: SYYKLGASQ
SWYKLGASY

SEQ ID NO: 64293 - protein, 10 aa, synthetic construct
  source 1..10: note = Seed: SNYLKRRVVF
SWYLKRRVVF

SEQ ID NO: 64294 - protein, 10 aa, synthetic construct
  source 1..10: note = Seed: SRYRIGNYKL
SWYRIGNYKF

SEQ ID NO: 64295 - protein, 10 aa, synthetic construct
  source 1..10: note = Seed: SRYRIGNYKL
SWYRIGNYKI

SEQ ID NO: 64296 - protein, 10 aa, synthetic construct
  source 1..10: note = Seed: SRYRIGNYKL
SWYRIGNYKL

SEQ ID NO: 64297 - protein, 10 aa, synthetic construct
  source 1..10: note = Seed: SRYRIGNYKL
SWYRIGNYKW

SEQ ID NO: 64298 - protein, 9 aa, synthetic construct
  source 1..9: note = Seed: SYYSLLMPI
SWYSLLMPF

SEQ ID NO: 64299 - protein, 9 aa, synthetic construct
  source 1..9: note = Seed: SYYSLLMPI
SWYSLLMPI

SEQ ID NO: 64300 - protein, 10 aa, synthetic construct
  source 1..10: note = Seed: SYYSLLMPIL
SWYSLLMPIF

SEQ ID NO: 64301 - protein, 10 aa, synthetic construct
  source 1..10: note = Seed: SYYSLLMPIL
SWYSLLMPIW

SEQ ID NO: 64302 - protein, 9 aa, synthetic construct
  source 1..9: note = Seed: SYYSLLMPI
SWYSLLMPL

SEQ ID NO: 64303 - protein, 9 aa, synthetic construct
  source 1..9: note = Seed: SYYSLLMPI
SWYSLLMPM

SEQ ID NO: 64304 - protein, 9 aa, synthetic construct
  source 1..9: note = Seed: SYYSLLMPI
SWYSLLMPW

SEQ ID NO: 64305 - protein, 9 aa, synthetic construct
  source 1..9: note = Seed: SYYSLLMPI
SWYSLLMPY

SEQ ID NO: 64306 - protein, 9 aa, synthetic construct
  source 1..9: note = Seed: SLYVNKHAF
SWYVNKHAF

SEQ ID NO: 64307 - protein, 9 aa, synthetic construct
  source 1..9: note = Seed: SLYVNKHAF
SWYVNKHAI

SEQ ID NO: 64308 - protein, 9 aa, synthetic construct
  source 1..9: note = Seed: SLYVNKHAF
SWYVNKHAL

SEQ ID NO: 64309 - protein, 9 aa, synthetic construct
  source 1..9: note = Seed: SLYVNKHAF
SWYVNKHAM

SEQ ID NO: 64310 - protein, 9 aa, synthetic construct
  source 1..9: note = Seed: SLYVNKHAF
SWYVNKHAW

SEQ ID NO: 64311 - protein, 9 aa, synthetic construct
  source 1..9: note = Seed: SLYVNKHAF
SWYVNKHAY

SEQ ID NO: 64312 - protein, 9 aa, synthetic construct
  source 1..9: note = Seed: SFYYVWKSY
SWYYVWKSF

SEQ ID NO: 64313 - protein, 9 aa, synthetic construct
  source 1..9: note = Seed: SFYYVWKSY
SWYYVWKSL

SEQ ID NO: 64314 - protein, 9 aa, synthetic construct
  source 1..9: note = Seed: SFYYVWKSY
SWYYVWKSM

SEQ ID NO: 64315 - protein, 9 aa, synthetic construct
  source 1..9: note = Seed: SFYYVWKSY
SWYYVWKSY

SEQ ID NO: 64316 - protein, 10 aa, synthetic construct
  source 1..10: note = Seed: SFYYVWKSYV
SWYYVWKSYF

SEQ ID NO: 64317 - protein, 10 aa, synthetic construct
  source 1..10: note = Seed: SFYYVWKSYV
SWYYVWKSYI

SEQ ID NO: 64318 - protein, 10 aa, synthetic construct
  source 1..10: note = Seed: SFYYVWKSYV
SWYYVWKSYL

SEQ ID NO: 64319 - protein, 10 aa, synthetic construct
  source 1..10: note = Seed: SFYYVWKSYV
SWYYVWKSYM

SEQ ID NO: 64320 - protein, 10 aa, synthetic construct
  source 1..10: note = Seed: SFYYVWKSYV
SWYYVWKSYW

SEQ ID NO: 64321 - protein, 10 aa, synthetic construct
  source 1..10: note = Seed: SEAFLIGCNY
SYAFLIGCNY

SEQ ID NO: 64322 - protein, 10 aa, synthetic construct
  source 1..10: note = Seed: SIAIPTNFTI
SYAIPTNFTF

SEQ ID NO: 64323 - protein, 10 aa, synthetic construct
  source 1..10: note = Seed: SIAIPTNFTI
SYAIPTNFTW

SEQ ID NO: 64324 - protein, 10 aa, synthetic construct
  source 1..10: note = Seed: SSANNCTFEY
SYANNCTFEK

SEQ ID NO: 64325 - protein, 10 aa, synthetic construct
  source 1..10: note = Seed: SSANNCTFEY
SYANNCTFEW

SEQ ID NO: 64326 - protein, 10 aa, synthetic construct
  source 1..10: note = Seed: SSANNCTFEY
SYANNCTFEY

SEQ ID NO: 64327 - protein, 10 aa, synthetic construct
  source 1..10: note = Seed: SQAWQPGVAM
SYAWQPGVAF

SEQ ID NO: 64328 - protein, 10 aa, synthetic construct
  source 1..10: note = Seed: SQAWQPGVAM
SYAWQPGVAL

SEQ ID NO: 64329 - protein, 10 aa, synthetic construct
  source 1..10: note = Seed: SQAWQPGVAM
SYAWQPGVAM

SEQ ID NO: 64330 - protein, 10 aa, synthetic construct
  source 1..10: note = Seed: SQAWQPGVAM
SYAWQPGVAY

SEQ ID NO: 64331 - protein, 11 aa, synthetic construct
  source 1..11: note = Seed: SFCAFAVDAAK
SYCAFAVDAAR

SEQ ID NO: 64332 - protein, 9 aa, synthetic construct
  source 1..9: note = Seed: STCMMCYKR
SYCMMCYKK

SEQ ID NO: 64333 - protein, 9 aa, synthetic construct
  source 1..9: note = Seed: STCMMCYKR
SYCMMCYKR

SEQ ID NO: 64334 - protein, 11 aa, synthetic construct
  source 1..11: note = Seed: STCMMCYKRNR
SYCMMCYKRNR

SEQ ID NO: 64335 - protein, 10 aa, synthetic construct
  source 1..10: note = Seed: STCMMCYKRN
SYCMMCYKRR

SEQ ID NO: 64336 - protein, 8 aa, synthetic construct
  source 1..8: note = Seed: STCMMCYK
SYCMMCYR

SEQ ID NO: 64337 - protein, 9 aa, synthetic construct
  source 1..9: note = Seed: SICSTMTNR
SYCSTMTNR

SEQ ID NO: 64338 - protein, 10 aa, synthetic construct
  source 1..10: note = Seed: SFCYMHHMEL
SYCYMHHMEF

SEQ ID NO: 64339 - protein, 10 aa, synthetic construct
  source 1..10: note = Seed: SFCYMHHMEL
SYCYMHHMEI

SEQ ID NO: 64340 - protein, 10 aa, synthetic construct
  source 1..10: note = Seed: SFCYMHHMEL
SYCYMHHMEL

SEQ ID NO: 64341 - protein, 10 aa, synthetic construct
  source 1..10: note = Seed: SFCYMHHMEL
SYCYMHHMEM

SEQ ID NO: 64342 - protein, 10 aa, synthetic construct
  source 1..10: note = Seed: SFCYMHHMEL
SYCYMHHMEW

SEQ ID NO: 64343 - protein, 10 aa, synthetic construct
  source 1..10: note = Seed: SFCYMHHMEL
SYCYMHHMEY

SEQ ID NO: 64344 - protein, 10 aa, synthetic construct
  source 1..10: note = Seed: SYELQTPFEI
SYELQTPFEF

SEQ ID NO: 64345 - protein, 10 aa, synthetic construct
  source 1..10: note = Seed: SYELQTPFEI
SYELQTPFEL

SEQ ID NO: 64346 - protein, 10 aa, synthetic construct
  source 1..10: note = Seed: SYELQTPFEI
SYELQTPFEM

SEQ ID NO: 64347 - protein, 10 aa, synthetic construct
  source 1..10: note = Seed: SYELQTPFEI
SYELQTPFEW

SEQ ID NO: 64348 - protein, 11 aa, synthetic construct
  source 1..11: note = Seed: SYEQFKKGVQI
SYEQFKKGVQF

SEQ ID NO: 64349 - protein, 9 aa, synthetic construct
  source 1..9: note = Seed: SGFAAYSRY
SYFAAYSRY

SEQ ID NO: 64350 - protein, 9 aa, synthetic construct
  source 1..9: note = Seed: SAFAMMFVK
SYFAMMFVK

SEQ ID NO: 64351 - protein, 11 aa, synthetic construct
  source 1..11: note = Seed: SAFAMMFVKHK
SYFAMMFVKHR

SEQ ID NO: 64352 - protein, 9 aa, synthetic construct
  source 1..9: note = Seed: SAFAMMFVK
SYFAMMFVR

SEQ ID NO: 64353 - protein, 8 aa, synthetic construct
  source 1..8: note = Seed: SYFAVHFI
SYFAVHFF

SEQ ID NO: 64354 - protein, 8 aa, synthetic construct
  source 1..8: note = Seed: SYFAVHFI
SYFAVHFL

SEQ ID NO: 64355 - protein, 8 aa, synthetic construct
  source 1..8: note = Seed: SYFAVHFI
SYFAVHFM

SEQ ID NO: 64356 - protein, 8 aa, synthetic construct
  source 1..8: note = Seed: SYFAVHFI
SYFAVHFW

SEQ ID NO: 64357 - protein, 9 aa, synthetic construct
  source 1..9: note = Seed: SYFIASFRL
SYFIASFRF

SEQ ID NO: 64358 - protein, 9 aa, synthetic construct
  source 1..9: note = Seed: SYFIASFRL
SYFIASFRI

SEQ ID NO: 64359 - protein, 11 aa, synthetic construct
  source 1..11: note = Seed: SYFIASFRLFA
SYFIASFRLFC

SEQ ID NO: 64360 - protein, 11 aa, synthetic construct
  source 1..11: note = Seed: SYFIASFRLFA
SYFIASFRLFD

SEQ ID NO: 64361 - protein, 11 aa, synthetic construct
  source 1..11: note = Seed: SYFIASFRLFA
SYFIASFRLFE

SEQ ID NO: 64362 - protein, 11 aa, synthetic construct
  source 1..11: note = Seed: SYFIASFRLFA
SYFIASFRLFF

SEQ ID NO: 64363 - protein, 11 aa, synthetic construct
  source 1..11: note = Seed: SYFIASFRLFA
SYFIASFRLFG

SEQ ID NO: 64364 - protein, 11 aa, synthetic construct
  source 1..11: note = Seed: SYFIASFRLFA
SYFIASFRLFH

SEQ ID NO: 64365 - protein, 11 aa, synthetic construct
  source 1..11: note = Seed: SYFIASFRLFA
SYFIASFRLFI

SEQ ID NO: 64366 - protein, 11 aa, synthetic construct
  source 1..11: note = Seed: SYFIASFRLFA
SYFIASFRLFK

SEQ ID NO: 64367 - protein, 11 aa, synthetic construct
  source 1..11: note = Seed: SYFIASFRLFA
SYFIASFRLFL

SEQ ID NO: 64368 - protein, 11 aa, synthetic construct
  source 1..11: note = Seed: SYFIASFRLFA
SYFIASFRLFM

SEQ ID NO: 64369 - protein, 11 aa, synthetic construct
  source 1..11: note = Seed: SYFIASFRLFA
SYFIASFRLFN

SEQ ID NO: 64370 - protein, 11 aa, synthetic construct
  source 1..11: note = Seed: SYFIASFRLFA
SYFIASFRLFP

SEQ ID NO: 64371 - protein, 11 aa, synthetic construct
  source 1..11: note = Seed: SYFIASFRLFA
SYFIASFRLFQ

SEQ ID NO: 64372 - protein, 11 aa, synthetic construct
  source 1..11: note = Seed: SYFIASFRLFA
SYFIASFRLFR

SEQ ID NO: 64373 - protein, 11 aa, synthetic construct
  source 1..11: note = Seed: SYFIASFRLFA
SYFIASFRLFS

SEQ ID NO: 64374 - protein, 11 aa, synthetic construct
  source 1..11: note = Seed: SYFIASFRLFA
SYFIASFRLFT

SEQ ID NO: 64375 - protein, 11 aa, synthetic construct
  source 1..11: note = Seed: SYFIASFRLFA
SYFIASFRLFV

SEQ ID NO: 64376 - protein, 11 aa, synthetic construct
  source 1..11: note = Seed: SYFIASFRLFA
SYFIASFRLFW

SEQ ID NO: 64377 - protein, 11 aa, synthetic construct
  source 1..11: note = Seed: SYFIASFRLFA
SYFIASFRLFY

SEQ ID NO: 64378 - protein, 10 aa, synthetic construct
  source 1..10: note = Seed: SYFIASFRLF
SYFIASFRLI

SEQ ID NO: 64379 - protein, 10 aa, synthetic construct
  source 1..10: note = Seed: SYFIASFRLF
SYFIASFRLL

SEQ ID NO: 64380 - protein, 10 aa, synthetic construct
  source 1..10: note = Seed: SYFIASFRLF
SYFIASFRLM

SEQ ID NO: 64381 - protein, 10 aa, synthetic construct
  source 1..10: note = Seed: SYFIASFRLF
SYFIASFRLV

SEQ ID NO: 64382 - protein, 10 aa, synthetic construct
  source 1..10: note = Seed: SYFIASFRLF
SYFIASFRLW

SEQ ID NO: 64383 - protein, 10 aa, synthetic construct
  source 1..10: note = Seed: SYFIASFRLF
SYFIASFRLY

SEQ ID NO: 64384 - protein, 9 aa, synthetic construct
  source 1..9: note = Seed: SYFIASFRL
SYFIASFRM

SEQ ID NO: 64385 - protein, 9 aa, synthetic construct
  source 1..9: note = Seed: SYFIASFRL
SYFIASFRV

SEQ ID NO: 64386 - protein, 9 aa, synthetic construct
  source 1..9: note = Seed: SYFIASFRL
SYFIASFRW

SEQ ID NO: 64387 - protein, 9 aa, synthetic construct
  source 1..9: note = Seed: SYFIASFRL
SYFIASFRY

SEQ ID NO: 64388 - protein, 10 aa, synthetic construct
  source 1..10: note = Seed: STFISDEVAR
SYFISDEVAR

SEQ ID NO: 64389 - protein, 11 aa, synthetic construct
  source 1..11: note = Seed: SKFPLKLRGTA
SYFPLKLRGTL

SEQ ID NO: 64390 - protein, 11 aa, synthetic construct
  source 1..11: note = Seed: SKFPLKLRGTA
SYFPLKLRGTM

SEQ ID NO: 64391 - protein, 11 aa, synthetic construct
  source 1..11: note = Seed: SWFTALTQHGK
SYFTALTQHGR

SEQ ID NO: 64392 - protein, 8 aa, synthetic construct
  source 1..8: note = Seed: SYFTEQPI
SYFTEQPF

SEQ ID NO: 64393 - protein, 10 aa, synthetic construct
  source 1..10: note = Seed: SYFTEQPIDL
SYFTEQPIDF

SEQ ID NO: 64394 - protein, 11 aa, synthetic construct
  source 1..11: note = Seed: SYFTEQPIDLV
SYFTEQPIDLF

SEQ ID NO: 64395 - protein, 11 aa, synthetic construct
  source 1..11: note = Seed: SYFTEQPIDLV
SYFTEQPIDLI

SEQ ID NO: 64396 - protein, 11 aa, synthetic construct
  source 1..11: note = Seed: SYFTEQPIDLV
SYFTEQPIDLL

SEQ ID NO: 64397 - protein, 11 aa, synthetic construct
  source 1..11: note = Seed: SYFTEQPIDLV
SYFTEQPIDLW

SEQ ID NO: 64398 - protein, 10 aa, synthetic construct
  source 1..10: note = Seed: SYFTEQPIDL
SYFTEQPIDW

SEQ ID NO: 64399 - protein, 8 aa, synthetic construct
  source 1..8: note = Seed: SYFTEQPI
SYFTEQPL

SEQ ID NO: 64400 - protein, 8 aa, synthetic construct
  source 1..8: note = Seed: SYFTEQPI
SYFTEQPM

SEQ ID NO: 64401 - protein, 8 aa, synthetic construct
  source 1..8: note = Seed: SYFTSDYY
SYFTSDYM

SEQ ID NO: 64402 - protein, 10 aa, synthetic construct
  source 1..10: note = Seed: SYFTSDYYQL
SYFTSDYYQF

SEQ ID NO: 64403 - protein, 10 aa, synthetic construct
  source 1..10: note = Seed: SYFTSDYYQL
SYFTSDYYQI

SEQ ID NO: 64404 - protein, 11 aa, synthetic construct
  source 1..11: note = Seed: SYFTSDYYQLY
SYFTSDYYQLF

SEQ ID NO: 64405 - protein, 11 aa, synthetic construct
  source 1..11: note = Seed: SYFTSDYYQLY
SYFTSDYYQLI

SEQ ID NO: 64406 - protein, 11 aa, synthetic construct
  source 1..11: note = Seed: SYFTSDYYQLY
SYFTSDYYQLL

SEQ ID NO: 64407 - protein, 11 aa, synthetic construct
  source 1..11: note = Seed: SYFTSDYYQLY
SYFTSDYYQLM

SEQ ID NO: 64408 - protein, 11 aa, synthetic construct
  source 1..11: note = Seed: SYFTSDYYQLY
SYFTSDYYQLW

SEQ ID NO: 64409 - protein, 10 aa, synthetic construct
  source 1..10: note = Seed: SYFTSDYYQL
SYFTSDYYQM

SEQ ID NO: 64410 - protein, 10 aa, synthetic construct
  source 1..10: note = Seed: SYFTSDYYQL
SYFTSDYYQV

SEQ ID NO: 64411 - protein, 10 aa, synthetic construct
  source 1..10: note = Seed: SYFTSDYYQL
SYFTSDYYQW

SEQ ID NO: 64412 - protein, 10 aa, synthetic construct
  source 1..10: note = Seed: SYFTSDYYQL
SYFTSDYYQY

SEQ ID NO: 64413 - protein, 10 aa, synthetic construct
  source 1..10: note = Seed: SHFVNLDNLR
SYFVNLDNLR

SEQ ID NO: 64414 - protein, 11 aa, synthetic construct
  source 1..11: note = Seed: SYFVVKRHTFS
SYFVVKRHTFF

SEQ ID NO: 64415 - protein, 11 aa, synthetic construct
  source 1..11: note = Seed: SYFVVKRHTFS
SYFVVKRHTFW

SEQ ID NO: 64416 - protein, 10 aa, synthetic construct
  source 1..10: note = Seed: SYFVVKRHTF
SYFVVKRHTI

SEQ ID NO: 64417 - protein, 10 aa, synthetic construct
  source 1..10: note = Seed: SYFVVKRHTF
SYFVVKRHTL

SEQ ID NO: 64418 - protein, 10 aa, synthetic construct
  source 1..10: note = Seed: SYFVVKRHTF
SYFVVKRHTM

SEQ ID NO: 64419 - protein, 10 aa, synthetic construct
  source 1..10: note = Seed: SYFVVKRHTF
SYFVVKRHTW

SEQ ID NO: 64420 - protein, 10 aa, synthetic construct
  source 1..10: note = Seed: SYFVVKRHTF
SYFVVKRHTY

SEQ ID NO: 64421 - protein, 9 aa, synthetic construct
  source 1..9: note = Seed: SFGGASCCL
SYGGASCCF

SEQ ID NO: 64422 - protein, 9 aa, synthetic construct
  source 1..9: note = Seed: SFGGASCCL
SYGGASCCL

SEQ ID NO: 64423 - protein, 9 aa, synthetic construct
  source 1..9: note = Seed: SFGGASCCL
SYGGASCCM

SEQ ID NO: 64424 - protein, 10 aa, synthetic construct
  source 1..10: note = Seed: STGSNVFQTR
SYGSNVFQTR

SEQ ID NO: 64425 - protein, 9 aa, synthetic construct
  source 1..9: note = Seed: SDIDITFLK
SYIDITFLK

SEQ ID NO: 64426 - protein, 9 aa, synthetic construct
  source 1..9: note = Seed: SDIDITFLK
SYIDITFLR

SEQ ID NO: 64427 - protein, 10 aa, synthetic construct
  source 1..10: note = Seed: SRILGAGCFV
SYILGAGCFV

SEQ ID NO: 64428 - protein, 9 aa, synthetic construct
  source 1..9: note = Seed: SYIVDSVTV
SYIVDSVTF

SEQ ID NO: 64429 - protein, 9 aa, synthetic construct
  source 1..9: note = Seed: SYIVDSVTV
SYIVDSVTI

SEQ ID NO: 64430 - protein, 9 aa, synthetic construct
  source 1..9: note = Seed: SYIVDSVTV
SYIVDSVTL

SEQ ID NO: 64431 - protein, 9 aa, synthetic construct
  source 1..9: note = Seed: SYIVDSVTV
SYIVDSVTM

SEQ ID NO: 64432 - protein, 9 aa, synthetic construct
  source 1..9: note = Seed: SYIVDSVTV
SYIVDSVTW

SEQ ID NO: 64433 - protein, 9 aa, synthetic construct
  source 1..9: note = Seed: SYIVDSVTV
SYIVDSVTY

SEQ ID NO: 64434 - protein, 10 aa, synthetic construct
  source 1..10: note = Seed: SFKEELDKYF
SYKEELDKYF

SEQ ID NO: 64435 - protein, 9 aa, synthetic construct
  source 1..9: note = Seed: SIKNFKSVL
SYKNFKSVK

SEQ ID NO: 64436 - protein, 9 aa, synthetic construct
  source 1..9: note = Seed: SAKNRARTV
SYKNRARTK

SEQ ID NO: 64437 - protein, 11 aa, synthetic construct
  source 1..11: note = Seed: SKKPRQKRTAT
SYKPRQKRTAF

SEQ ID NO: 64438 - protein, 11 aa, synthetic construct
  source 1..11: note = Seed: SKKPRQKRTAT
SYKPRQKRTAI

SEQ ID NO: 64439 - protein, 11 aa, synthetic construct
  source 1..11: note = Seed: SKKPRQKRTAT
SYKPRQKRTAL

SEQ ID NO: 64440 - protein, 11 aa, synthetic construct
  source 1..11: note = Seed: SKKPRQKRTAT
SYKPRQKRTAM

SEQ ID NO: 64441 - protein, 11 aa, synthetic construct
  source 1..11: note = Seed: SKKPRQKRTAT
SYKPRQKRTAV

SEQ ID NO: 64442 - protein, 11 aa, synthetic construct
  source 1..11: note = Seed: SEKSYELQTPF
SYKSYELQTPW

SEQ ID NO: 64443 - protein, 9 aa, synthetic construct
  source 1..9: note = Seed: SMKYFVKIG
SYKYFVKIK

SEQ ID NO: 64444 - protein, 9 aa, synthetic construct
  source 1..9: note = Seed: SFLAHIQWM
SYLAHIQWF

SEQ ID NO: 64445 - protein, 9 aa, synthetic construct
  source 1..9: note = Seed: SFLAHIQWM
SYLAHIQWI

SEQ ID NO: 64446 - protein, 9 aa, synthetic construct
  source 1..9: note = Seed: SFLAHIQWM
SYLAHIQWL

SEQ ID NO: 64447 - protein, 9 aa, synthetic construct
  source 1..9: note = Seed: SFLAHIQWM
SYLAHIQWM

SEQ ID NO: 64448 - protein, 10 aa, synthetic construct
  source 1..10: note = Seed: SFLAHIQWMV
SYLAHIQWMA

SEQ ID NO: 64449 - protein, 10 aa, synthetic construct
  source 1..10: note = Seed: SFLAHIQWMV
SYLAHIQWMI

SEQ ID NO: 64450 - protein, 10 aa, synthetic construct
  source 1..10: note = Seed: SFLAHIQWMV
SYLAHIQWML

SEQ ID NO: 64451 - protein, 10 aa, synthetic construct
  source 1..10: note = Seed: SFLAHIQWMV
SYLAHIQWMM

SEQ ID NO: 64452 - protein, 10 aa, synthetic construct
  source 1..10: note = Seed: SFLAHIQWMV
SYLAHIQWMV

SEQ ID NO: 64453 - protein, 9 aa, synthetic construct
  source 1..9: note = Seed: SFLAHIQWM
SYLAHIQWV

SEQ ID NO: 64454 - protein, 9 aa, synthetic construct
  source 1..9: note = Seed: SFLAHIQWM
SYLAHIQWW

SEQ ID NO: 64455 - protein, 9 aa, synthetic construct
  source 1..9: note = Seed: SFLAHIQWM
SYLAHIQWY

SEQ ID NO: 64456 - protein, 10 aa, synthetic construct
  source 1..10: note = Seed: SDLATNNLVV
SYLATNNLVV

SEQ ID NO: 64457 - protein, 10 aa, synthetic construct
  source 1..10: note = Seed: SRLDKVEAEV
SYLDKVEAEV

SEQ ID NO: 64458 - protein, 10 aa, synthetic construct
  source 1..10: note = Seed: SFLGRYMSAL
SYLGRYMSAF

SEQ ID NO: 64459 - protein, 10 aa, synthetic construct
  source 1..10: note = Seed: SFLGRYMSAL
SYLGRYMSAL

SEQ ID NO: 64460 - protein, 10 aa, synthetic construct
  source 1..10: note = Seed: SFLGRYMSAL
SYLGRYMSAM

SEQ ID NO: 64461 - protein, 10 aa, synthetic construct
  source 1..10: note = Seed: SFLGRYMSAL
SYLGRYMSAV

SEQ ID NO: 64462 - protein, 10 aa, synthetic construct
  source 1..10: note = Seed: SFLGRYMSAL
SYLGRYMSAY

SEQ ID NO: 64463 - protein, 9 aa, synthetic construct
  source 1..9: note = Seed: SFLGRYMSA
SYLGRYMSF

SEQ ID NO: 64464 - protein, 9 aa, synthetic construct
  source 1..9: note = Seed: SFLGRYMSA
SYLGRYMSI

SEQ ID NO: 64465 - protein, 9 aa, synthetic construct
  source 1..9: note = Seed: SFLGRYMSA
SYLGRYMSK

SEQ ID NO: 64466 - protein, 9 aa, synthetic construct
  source 1..9: note = Seed: SFLGRYMSA
SYLGRYMSL

SEQ ID NO: 64467 - protein, 9 aa, synthetic construct
  source 1..9: note = Seed: SFLGRYMSA
SYLGRYMSM

SEQ ID NO: 64468 - protein, 9 aa, synthetic construct
  source 1..9: note = Seed: SFLGRYMSA
SYLGRYMSV

SEQ ID NO: 64469 - protein, 9 aa, synthetic construct
  source 1..9: note = Seed: SFLGRYMSA
SYLGRYMSW

SEQ ID NO: 64470 - protein, 9 aa, synthetic construct
  source 1..9: note = Seed: SFLGRYMSA
SYLGRYMSY

SEQ ID NO: 64471 - protein, 10 aa, synthetic construct
  source 1..10: note = Seed: SVLLFLAFVV
SYLLFLAFVI

SEQ ID NO: 64472 - protein, 10 aa, synthetic construct
  source 1..10: note = Seed: SVLLFLAFVV
SYLLFLAFVL

SEQ ID NO: 64473 - protein, 10 aa, synthetic construct
  source 1..10: note = Seed: SVLLFLAFVV
SYLLFLAFVV

SEQ ID NO: 64474 - protein, 10 aa, synthetic construct
  source 1..10: note = Seed: SQLMCQPILL
SYLMCQPILA

SEQ ID NO: 64475 - protein, 10 aa, synthetic construct
  source 1..10: note = Seed: SQLMCQPILL
SYLMCQPILI

SEQ ID NO: 64476 - protein, 10 aa, synthetic construct
  source 1..10: note = Seed: SQLMCQPILL
SYLMCQPILL

SEQ ID NO: 64477 - protein, 11 aa, synthetic construct
  source 1..11: note = Seed: SQLMCQPILLL
SYLMCQPILLI

SEQ ID NO: 64478 - protein, 11 aa, synthetic construct
  source 1..11: note = Seed: SQLMCQPILLL
SYLMCQPILLL

SEQ ID NO: 64479 - protein, 11 aa, synthetic construct
  source 1..11: note = Seed: SQLMCQPILLL
SYLMCQPILLV

SEQ ID NO: 64480 - protein, 10 aa, synthetic construct
  source 1..10: note = Seed: SQLMCQPILL
SYLMCQPILM

SEQ ID NO: 64481 - protein, 10 aa, synthetic construct
  source 1..10: note = Seed: SQLMCQPILL
SYLMCQPILV

SEQ ID NO: 64482 - protein, 10 aa, synthetic construct
  source 1..10: note = Seed: SWLMWLIINL
SYLMWLIINA

SEQ ID NO: 64483 - protein, 10 aa, synthetic construct
  source 1..10: note = Seed: SWLMWLIINL
SYLMWLIINF

SEQ ID NO: 64484 - protein, 10 aa, synthetic construct
  source 1..10: note = Seed: SWLMWLIINL
SYLMWLIINI

SEQ ID NO: 64485 - protein, 10 aa, synthetic construct
  source 1..10: note = Seed: SWLMWLIINL
SYLMWLIINL

SEQ ID NO: 64486 - protein, 11 aa, synthetic construct
  source 1..11: note = Seed: SWLMWLIINLV
SYLMWLIINLV

SEQ ID NO: 64487 - protein, 10 aa, synthetic construct
  source 1..10: note = Seed: SWLMWLIINL
SYLMWLIINM

SEQ ID NO: 64488 - protein, 10 aa, synthetic construct
  source 1..10: note = Seed: SWLMWLIINL
SYLMWLIINT

SEQ ID NO: 64489 - protein, 10 aa, synthetic construct
  source 1..10: note = Seed: SWLMWLIINL
SYLMWLIINV

SEQ ID NO: 64490 - protein, 10 aa, synthetic construct
  source 1..10: note = Seed: SWLMWLIINL
SYLMWLIINW

SEQ ID NO: 64491 - protein, 10 aa, synthetic construct
  source 1..10: note = Seed: SDLNDFVSDA
SYLNDFVSDA

SEQ ID NO: 64492 - protein, 10 aa, synthetic construct
  source 1..10: note = Seed: SDLNDFVSDA
SYLNDFVSDI

SEQ ID NO: 64493 - protein, 10 aa, synthetic construct
  source 1..10: note = Seed: SDLNDFVSDA
SYLNDFVSDL

SEQ ID NO: 64494 - protein, 10 aa, synthetic construct
  source 1..10: note = Seed: SDLNDFVSDA
SYLNDFVSDV

SEQ ID NO: 64495 - protein, 10 aa, synthetic construct
  source 1..10: note = Seed: SVLNDILSRL
SYLNDILSRA

SEQ ID NO: 64496 - protein, 10 aa, synthetic construct
  source 1..10: note = Seed: SVLNDILSRL
SYLNDILSRI

SEQ ID NO: 64497 - protein, 10 aa, synthetic construct
  source 1..10: note = Seed: SVLNDILSRL
SYLNDILSRL

SEQ ID NO: 64498 - protein, 10 aa, synthetic construct
  source 1..10: note = Seed: SVLNDILSRL
SYLNDILSRM

SEQ ID NO: 64499 - protein, 10 aa, synthetic construct
  source 1..10: note = Seed: SVLNDILSRL
SYLNDILSRV

SEQ ID NO: 64500 - protein, 9 aa, synthetic construct
  source 1..9: note = Seed: SFLPGVYSV
SYLPGVYSF

SEQ ID NO: 64501 - protein, 9 aa, synthetic construct
  source 1..9: note = Seed: SFLPGVYSV
SYLPGVYSI

SEQ ID NO: 64502 - protein, 9 aa, synthetic construct
  source 1..9: note = Seed: SFLPGVYSV
SYLPGVYSL

SEQ ID NO: 64503 - protein, 9 aa, synthetic construct
  source 1..9: note = Seed: SFLPGVYSV
SYLPGVYSM

SEQ ID NO: 64504 - protein, 9 aa, synthetic construct
  source 1..9: note = Seed: SFLPGVYSV
SYLPGVYSV

SEQ ID NO: 64505 - protein, 9 aa, synthetic construct
  source 1..9: note = Seed: SFLPGVYSV
SYLPGVYSW

SEQ ID NO: 64506 - protein, 9 aa, synthetic construct
  source 1..9: note = Seed: SFLPGVYSV
SYLPGVYSY

SEQ ID NO: 64507 - protein, 11 aa, synthetic construct
  source 1..11: note = Seed: SELVIGAVILR
SYLVIGAVILR

SEQ ID NO: 64508 - protein, 10 aa, synthetic construct
  source 1..10: note = Seed: SVLYYQNNVF
SYLYYQNNVF

SEQ ID NO: 64509 - protein, 11 aa, synthetic construct
  source 1..11: note = Seed: SVLYYQNNVFM
SYLYYQNNVFF

SEQ ID NO: 64510 - protein, 11 aa, synthetic construct
  source 1..11: note = Seed: SVLYYQNNVFM
SYLYYQNNVFI

SEQ ID NO: 64511 - protein, 11 aa, synthetic construct
  source 1..11: note = Seed: SVLYYQNNVFM
SYLYYQNNVFL

SEQ ID NO: 64512 - protein, 11 aa, synthetic construct
  source 1..11: note = Seed: SVLYYQNNVFM
SYLYYQNNVFW

SEQ ID NO: 64513 - protein, 10 aa, synthetic construct
  source 1..10: note = Seed: SVLYYQNNVF
SYLYYQNNVY

SEQ ID NO: 64514 - protein, 11 aa, synthetic construct
  source 1..11: note = Seed: SQMEIDFLELA
SYMEIDFLELL

SEQ ID NO: 64515 - protein, 11 aa, synthetic construct
  source 1..11: note = Seed: SQMEIDFLELA
SYMEIDFLELV

SEQ ID NO: 64516 - protein, 9 aa, synthetic construct
  source 1..9: note = Seed: SMMGFKMNY
SYMGFKMNF

SEQ ID NO: 64517 - protein, 9 aa, synthetic construct
  source 1..9: note = Seed: SMMGFKMNY
SYMGFKMNI

SEQ ID NO: 64518 - protein, 9 aa, synthetic construct
  source 1..9: note = Seed: SMMGFKMNY
SYMGFKMNK

SEQ ID NO: 64519 - protein, 9 aa, synthetic construct
  source 1..9: note = Seed: SMMGFKMNY
SYMGFKMNL

SEQ ID NO: 64520 - protein, 9 aa, synthetic construct
  source 1..9: note = Seed: SMMGFKMNY
SYMGFKMNM

SEQ ID NO: 64521 - protein, 9 aa, synthetic construct
  source 1..9: note = Seed: SMMGFKMNY
SYMGFKMNR

SEQ ID NO: 64522 - protein, 9 aa, synthetic construct
  source 1..9: note = Seed: SMMGFKMNY
SYMGFKMNV

SEQ ID NO: 64523 - protein, 9 aa, synthetic construct
  source 1..9: note = Seed: SMMGFKMNY
SYMGFKMNY

SEQ ID NO: 64524 - protein, 10 aa, synthetic construct
  source 1..10: note = Seed: SMMGFKMNYQ
SYMGFKMNYK

SEQ ID NO: 64525 - protein, 11 aa, synthetic construct
  source 1..11: note = Seed: SMMGFKMNYQV
SYMGFKMNYQV

SEQ ID NO: 64526 - protein, 10 aa, synthetic construct
  source 1..10: note = Seed: SMMGFKMNYQ
SYMGFKMNYR

SEQ ID NO: 64527 - protein, 10 aa, synthetic construct
  source 1..10: note = Seed: SMMGFKMNYQ
SYMGFKMNYY

SEQ ID NO: 64528 - protein, 10 aa, synthetic construct
  source 1..10: note = Seed: SAMQTMLFTM
SYMQTMLFTA

SEQ ID NO: 64529 - protein, 10 aa, synthetic construct
  source 1..10: note = Seed: SAMQTMLFTM
SYMQTMLFTI

SEQ ID NO: 64530 - protein, 10 aa, synthetic construct
  source 1..10: note = Seed: SAMQTMLFTM
SYMQTMLFTL

SEQ ID NO: 64531 - protein, 10 aa, synthetic construct
  source 1..10: note = Seed: SAMQTMLFTM
SYMQTMLFTV

SEQ ID NO: 64532 - protein, 10 aa, synthetic construct
  source 1..10: note = Seed: SAMQTMLFTM
SYMQTMLFTY

SEQ ID NO: 64533 - protein, 11 aa, synthetic construct
  source 1..11: note = Seed: SKMSDVKCTSV
SYMSDVKCTSL

SEQ ID NO: 64534 - protein, 11 aa, synthetic construct
  source 1..11: note = Seed: SKMSDVKCTSV
SYMSDVKCTSV

SEQ ID NO: 64535 - protein, 11 aa, synthetic construct
  source 1..11: note = Seed: STMTNRQFHQK
SYMTNRQFHQR

SEQ ID NO: 64536 - protein, 9 aa, synthetic construct
  source 1..9: note = Seed: STMTNRQFH
SYMTNRQFK

SEQ ID NO: 64537 - protein, 9 aa, synthetic construct
  source 1..9: note = Seed: SAMVRMYIF
SYMVRMYIF

SEQ ID NO: 64538 - protein, 9 aa, synthetic construct
  source 1..9: note = Seed: SAMVRMYIF
SYMVRMYII

SEQ ID NO: 64539 - protein, 9 aa, synthetic construct
  source 1..9: note = Seed: SAMVRMYIF
SYMVRMYIL

SEQ ID NO: 64540 - protein, 9 aa, synthetic construct
  source 1..9: note = Seed: SAMVRMYIF
SYMVRMYIM

SEQ ID NO: 64541 - protein, 9 aa, synthetic construct
  source 1..9: note = Seed: SAMVRMYIF
SYMVRMYIV

SEQ ID NO: 64542 - protein, 9 aa, synthetic construct
  source 1..9: note = Seed: SAMVRMYIF
SYMVRMYIW

SEQ ID NO: 64543 - protein, 9 aa, synthetic construct
  source 1..9: note = Seed: SAMVRMYIF
SYMVRMYIY

SEQ ID NO: 64544 - protein, 9 aa, synthetic construct
  source 1..9: note = Seed: SANNCTFEY
SYNNCTFEF

SEQ ID NO: 64545 - protein, 9 aa, synthetic construct
  source 1..9: note = Seed: SANNCTFEY
SYNNCTFEI

SEQ ID NO: 64546 - protein, 9 aa, synthetic construct
  source 1..9: note = Seed: SANNCTFEY
SYNNCTFEL

SEQ ID NO: 64547 - protein, 9 aa, synthetic construct
  source 1..9: note = Seed: SANNCTFEY
SYNNCTFEM

SEQ ID NO: 64548 - protein, 9 aa, synthetic construct
  source 1..9: note = Seed: SANNCTFEY
SYNNCTFEV

SEQ ID NO: 64549 - protein, 9 aa, synthetic construct
  source 1..9: note = Seed: SANNCTFEY
SYNNCTFEY

SEQ ID NO: 64550 - protein, 9 aa, synthetic construct
  source 1..9: note = Seed: SFNPETNIL
SYNPETNIF

SEQ ID NO: 64551 - protein, 9 aa, synthetic construct
  source 1..9: note = Seed: SFNPETNIL
SYNPETNII

SEQ ID NO: 64552 - protein, 9 aa, synthetic construct
  source 1..9: note = Seed: SFNPETNIL
SYNPETNIL

SEQ ID NO: 64553 - protein, 10 aa, synthetic construct
  source 1..10: note = Seed: SFNPETNILL
SYNPETNILF

SEQ ID NO: 64554 - protein, 10 aa, synthetic construct
  source 1..10: note = Seed: SFNPETNILL
SYNPETNILI

SEQ ID NO: 64555 - protein, 10 aa, synthetic construct
  source 1..10: note = Seed: SFNPETNILL
SYNPETNILL

SEQ ID NO: 64556 - protein, 10 aa, synthetic construct
  source 1..10: note = Seed: SFNPETNILL
SYNPETNILM

SEQ ID NO: 64557 - protein, 10 aa, synthetic construct
  source 1..10: note = Seed: SFNPETNILL
SYNPETNILW

SEQ ID NO: 64558 - protein, 9 aa, synthetic construct
  source 1..9: note = Seed: SFNPETNIL
SYNPETNIM

SEQ ID NO: 64559 - protein, 9 aa, synthetic construct
  source 1..9: note = Seed: SFNPETNIL
SYNPETNIW

SEQ ID NO: 64560 - protein, 9 aa, synthetic construct
  source 1..9: note = Seed: SFNPETNIL
SYNPETNIY

SEQ ID NO: 64561 - protein, 9 aa, synthetic construct
  source 1..9: note = Seed: SSNVANYQK
SYNVANYQK

SEQ ID NO: 64562 - protein, 9 aa, synthetic construct
  source 1..9: note = Seed: SSNVANYQK
SYNVANYQR

SEQ ID NO: 64563 - protein, 10 aa, synthetic construct
  source 1..10: note = Seed: SFNYLKSPNF
SYNYLKSPNF

SEQ ID NO: 64564 - protein, 10 aa, synthetic construct
  source 1..10: note = Seed: SFNYLKSPNF
SYNYLKSPNM

SEQ ID NO: 64565 - protein, 10 aa, synthetic construct
  source 1..10: note = Seed: SFNYLKSPNF
SYNYLKSPNW

SEQ ID NO: 64566 - protein, 9 aa, synthetic construct
  source 1..9: note = Seed: SAPHGVVFL
SYPHGVVFF

SEQ ID NO: 64567 - protein, 9 aa, synthetic construct
  source 1..9: note = Seed: SAPHGVVFL
SYPHGVVFI

SEQ ID NO: 64568 - protein, 9 aa, synthetic construct
  source 1..9: note = Seed: SAPHGVVFL
SYPHGVVFL

SEQ ID NO: 64569 - protein, 9 aa, synthetic construct
  source 1..9: note = Seed: SAPHGVVFL
SYPHGVVFM

SEQ ID NO: 64570 - protein, 9 aa, synthetic construct
  source 1..9: note = Seed: SAPHGVVFL
SYPHGVVFV

SEQ ID NO: 64571 - protein, 9 aa, synthetic construct
  source 1..9: note = Seed: SAPHGVVFL
SYPHGVVFY

SEQ ID NO: 64572 - protein, 11 aa, synthetic construct
  source 1..11: note = Seed: SFPLCANGQVF
SYPLCANGQVF

SEQ ID NO: 64573 - protein, 11 aa, synthetic construct
  source 1..11: note = Seed: SFPLCANGQVF
SYPLCANGQVW

SEQ ID NO: 64574 - protein, 11 aa, synthetic construct
  source 1..11: note = Seed: SSQAWQPGVAM
SYQAWQPGVAY

SEQ ID NO: 64575 - protein, 10 aa, synthetic construct
  source 1..10: note = Seed: SMQGAVDINK
SYQGAVDINR

SEQ ID NO: 64576 - protein, 9 aa, synthetic construct
  source 1..9: note = Seed: SFRLFARTR
SYRLFARTA

SEQ ID NO: 64577 - protein, 9 aa, synthetic construct
  source 1..9: note = Seed: SFRLFARTR
SYRLFARTK

SEQ ID NO: 64578 - protein, 9 aa, synthetic construct
  source 1..9: note = Seed: SFRLFARTR
SYRLFARTR

SEQ ID NO: 64579 - protein, 10 aa, synthetic construct
  source 1..10: note = Seed: SFRLFARTRS
SYRLFARTRK

SEQ ID NO: 64580 - protein, 9 aa, synthetic construct
  source 1..9: note = Seed: SSRLSFKEL
SYRLSFKEA

SEQ ID NO: 64581 - protein, 9 aa, synthetic construct
  source 1..9: note = Seed: SSRLSFKEL
SYRLSFKEK

SEQ ID NO: 64582 - protein, 9 aa, synthetic construct
  source 1..9: note = Seed: SLRPDTRYV
SYRPDTRYK

SEQ ID NO: 64583 - protein, 9 aa, synthetic construct
  source 1..9: note = Seed: SVRVLQKAA
SYRVLQKAK

SEQ ID NO: 64584 - protein, 10 aa, synthetic construct
  source 1..10: note = Seed: SPRWYFYYLG
SYRWYFYYLF

SEQ ID NO: 64585 - protein, 10 aa, synthetic construct
  source 1..10: note = Seed: SPRWYFYYLG
SYRWYFYYLK

SEQ ID NO: 64586 - protein, 10 aa, synthetic construct
  source 1..10: note = Seed: SPRWYFYYLG
SYRWYFYYLL

SEQ ID NO: 64587 - protein, 10 aa, synthetic construct
  source 1..10: note = Seed: SPRWYFYYLG
SYRWYFYYLM

SEQ ID NO: 64588 - protein, 10 aa, synthetic construct
  source 1..10: note = Seed: STSAFVETVK
SYSAFVETVR

SEQ ID NO: 64589 - protein, 10 aa, synthetic construct
  source 1..10: note = Seed: SSSDNIALLV
SYSDNIALLY

SEQ ID NO: 64590 - protein, 10 aa, synthetic construct
  source 1..10: note = Seed: SASFSTFKCY
SYSFSTFKCY

SEQ ID NO: 64591 - protein, 10 aa, synthetic construct
  source 1..10: note = Seed: SASVYYSQLM
SYSVYYSQLF

SEQ ID NO: 64592 - protein, 10 aa, synthetic construct
  source 1..10: note = Seed: SASVYYSQLM
SYSVYYSQLW

SEQ ID NO: 64593 - protein, 10 aa, synthetic construct
  source 1..10: note = Seed: SASVYYSQLM
SYSVYYSQLY

SEQ ID NO: 64594 - protein, 9 aa, synthetic construct
  source 1..9: note = Seed: SSTCMMCYK
SYTCMMCYK

SEQ ID NO: 64595 - protein, 10 aa, synthetic construct
  source 1..10: note = Seed: SSTCMMCYKR
SYTCMMCYKK

SEQ ID NO: 64596 - protein, 10 aa, synthetic construct
  source 1..10: note = Seed: SSTCMMCYKR
SYTCMMCYKR

SEQ ID NO: 64597 - protein, 9 aa, synthetic construct
  source 1..9: note = Seed: SSTCMMCYK
SYTCMMCYR

SEQ ID NO: 64598 - protein, 11 aa, synthetic construct
  source 1..11: note = Seed: SYTNDKACPLI
SYTNDKACPLF

SEQ ID NO: 64599 - protein, 10 aa, synthetic construct
  source 1..10: note = Seed: SYTNDKACPL
SYTNDKACPM

SEQ ID NO: 64600 - protein, 8 aa, synthetic construct
  source 1..8: note = Seed: SFTRGVYY
SYTRGVYF

SEQ ID NO: 64601 - protein, 8 aa, synthetic construct
  source 1..8: note = Seed: SFTRGVYY
SYTRGVYM

SEQ ID NO: 64602 - protein, 9 aa, synthetic construct
  source 1..9: note = Seed: SYTTTIKPV
SYTTTIKPF

SEQ ID NO: 64603 - protein, 9 aa, synthetic construct
  source 1..9: note = Seed: SYTTTIKPV
SYTTTIKPI

SEQ ID NO: 64604 - protein, 9 aa, synthetic construct
  source 1..9: note = Seed: SYTTTIKPV
SYTTTIKPL

SEQ ID NO: 64605 - protein, 9 aa, synthetic construct
  source 1..9: note = Seed: SYTTTIKPV
SYTTTIKPM

SEQ ID NO: 64606 - protein, 9 aa, synthetic construct
  source 1..9: note = Seed: SYTTTIKPV
SYTTTIKPW

SEQ ID NO: 64607 - protein, 9 aa, synthetic construct
  source 1..9: note = Seed: SYTTTIKPV
SYTTTIKPY

SEQ ID NO: 64608 - protein, 11 aa, synthetic construct
  source 1..11: note = Seed: SDTYACWHHSI
SYTYACWHHSF

SEQ ID NO: 64609 - protein, 11 aa, synthetic construct
  source 1..11: note = Seed: SDTYACWHHSI
SYTYACWHHSI

SEQ ID NO: 64610 - protein, 11 aa, synthetic construct
  source 1..11: note = Seed: SDTYACWHHSI
SYTYACWHHSL

SEQ ID NO: 64611 - protein, 11 aa, synthetic construct
  source 1..11: note = Seed: SDTYACWHHSI
SYTYACWHHSW

SEQ ID NO: 64612 - protein, 9 aa, synthetic construct
  source 1..9: note = Seed: SIVCRFDTR
SYVCRFDTR

SEQ ID NO: 64613 - protein, 9 aa, synthetic construct
  source 1..9: note = Seed: SFVIRGDEV
SYVIRGDEF

SEQ ID NO: 64614 - protein, 9 aa, synthetic construct
  source 1..9: note = Seed: SFVIRGDEV
SYVIRGDEL

SEQ ID NO: 64615 - protein, 9 aa, synthetic construct
  source 1..9: note = Seed: SFVIRGDEV
SYVIRGDEM

SEQ ID NO: 64616 - protein, 9 aa, synthetic construct
  source 1..9: note = Seed: SFVIRGDEV
SYVIRGDEY

SEQ ID NO: 64617 - protein, 11 aa, synthetic construct
  source 1..11: note = Seed: SVVLLSVLQQL
SYVLLSVLQQI

SEQ ID NO: 64618 - protein, 11 aa, synthetic construct
  source 1..11: note = Seed: SVVLLSVLQQL
SYVLLSVLQQL

SEQ ID NO: 64619 - protein, 11 aa, synthetic construct
  source 1..11: note = Seed: SVVLLSVLQQL
SYVLLSVLQQV

SEQ ID NO: 64620 - protein, 10 aa, synthetic construct
  source 1..10: note = Seed: SSVLNDILSR
SYVLNDILSK

SEQ ID NO: 64621 - protein, 11 aa, synthetic construct
  source 1..11: note = Seed: SSVLNDILSRL
SYVLNDILSRL

SEQ ID NO: 64622 - protein, 11 aa, synthetic construct
  source 1..11: note = Seed: SSVLNDILSRL
SYVLNDILSRV

SEQ ID NO: 64623 - protein, 9 aa, synthetic construct
  source 1..9: note = Seed: SAVLQSGFR
SYVLQSGFR

SEQ ID NO: 64624 - protein, 10 aa, synthetic construct
  source 1..10: note = Seed: SAVLQSGFRK
SYVLQSGFRK

SEQ ID NO: 64625 - protein, 10 aa, synthetic construct
  source 1..10: note = Seed: SAVLQSGFRK
SYVLQSGFRR

SEQ ID NO: 64626 - protein, 9 aa, synthetic construct
  source 1..9: note = Seed: SWVMRIMTW
SYVMRIMTF

SEQ ID NO: 64627 - protein, 9 aa, synthetic construct
  source 1..9: note = Seed: SWVMRIMTW
SYVMRIMTI

SEQ ID NO: 64628 - protein, 9 aa, synthetic construct
  source 1..9: note = Seed: SWVMRIMTW
SYVMRIMTL

SEQ ID NO: 64629 - protein, 9 aa, synthetic construct
  source 1..9: note = Seed: SWVMRIMTW
SYVMRIMTM

SEQ ID NO: 64630 - protein, 9 aa, synthetic construct
  source 1..9: note = Seed: SWVMRIMTW
SYVMRIMTV

SEQ ID NO: 64631 - protein, 9 aa, synthetic construct
  source 1..9: note = Seed: SWVMRIMTW
SYVMRIMTW

SEQ ID NO: 64632 - protein, 10 aa, synthetic construct
  source 1..10: note = Seed: SWVMRIMTWL
SYVMRIMTWF

SEQ ID NO: 64633 - protein, 10 aa, synthetic construct
  source 1..10: note = Seed: SWVMRIMTWL
SYVMRIMTWI

SEQ ID NO: 64634 - protein, 10 aa, synthetic construct
  source 1..10: note = Seed: SWVMRIMTWL
SYVMRIMTWL

SEQ ID NO: 64635 - protein, 10 aa, synthetic construct
  source 1..10: note = Seed: SWVMRIMTWL
SYVMRIMTWM

SEQ ID NO: 64636 - protein, 10 aa, synthetic construct
  source 1..10: note = Seed: SWVMRIMTWL
SYVMRIMTWV

SEQ ID NO: 64637 - protein, 10 aa, synthetic construct
  source 1..10: note = Seed: SWVMRIMTWL
SYVMRIMTWW

SEQ ID NO: 64638 - protein, 9 aa, synthetic construct
  source 1..9: note = Seed: SWVMRIMTW
SYVMRIMTY

SEQ ID NO: 64639 - protein, 9 aa, synthetic construct
  source 1..9: note = Seed: SGVYQCAMR
SYVYQCAMR

SEQ ID NO: 64640 - protein, 10 aa, synthetic construct
  source 1..10: note = Seed: SDYDYYRYNL
SYYDYYRYNF

SEQ ID NO: 64641 - protein, 10 aa, synthetic construct
  source 1..10: note = Seed: SDYDYYRYNL
SYYDYYRYNI

SEQ ID NO: 64642 - protein, 10 aa, synthetic construct
  source 1..10: note = Seed: SDYDYYRYNL
SYYDYYRYNL

SEQ ID NO: 64643 - protein, 10 aa, synthetic construct
  source 1..10: note = Seed: SDYDYYRYNL
SYYDYYRYNM

SEQ ID NO: 64644 - protein, 10 aa, synthetic construct
  source 1..10: note = Seed: SDYDYYRYNL
SYYDYYRYNW

SEQ ID NO: 64645 - protein, 9 aa, synthetic construct
  source 1..9: note = Seed: SFYEDFLEY
SYYEDFLEF

SEQ ID NO: 64646 - protein, 9 aa, synthetic construct
  source 1..9: note = Seed: SFYEDFLEY
SYYEDFLEI

SEQ ID NO: 64647 - protein, 9 aa, synthetic construct
  source 1..9: note = Seed: SFYEDFLEY
SYYEDFLEL

SEQ ID NO: 64648 - protein, 9 aa, synthetic construct
  source 1..9: note = Seed: SFYEDFLEY
SYYEDFLEM

SEQ ID NO: 64649 - protein, 9 aa, synthetic construct
  source 1..9: note = Seed: SFYEDFLEY
SYYEDFLEV

SEQ ID NO: 64650 - protein, 9 aa, synthetic construct
  source 1..9: note = Seed: SFYEDFLEY
SYYEDFLEW

SEQ ID NO: 64651 - protein, 9 aa, synthetic construct
  source 1..9: note = Seed: SFYEDFLEY
SYYEDFLEY

SEQ ID NO: 64652 - protein, 10 aa, synthetic construct
  source 1..10: note = Seed: SSYIVDSVTV
SYYIVDSVTF

SEQ ID NO: 64653 - protein, 10 aa, synthetic construct
  source 1..10: note = Seed: SSYIVDSVTV
SYYIVDSVTI

SEQ ID NO: 64654 - protein, 10 aa, synthetic construct
  source 1..10: note = Seed: SSYIVDSVTV
SYYIVDSVTL

SEQ ID NO: 64655 - protein, 10 aa, synthetic construct
  source 1..10: note = Seed: SSYIVDSVTV
SYYIVDSVTM

SEQ ID NO: 64656 - protein, 10 aa, synthetic construct
  source 1..10: note = Seed: SSYIVDSVTV
SYYIVDSVTW

SEQ ID NO: 64657 - protein, 9 aa, synthetic construct
  source 1..9: note = Seed: SYYKLGASQ
SYYKLGASA

SEQ ID NO: 64658 - protein, 9 aa, synthetic construct
  source 1..9: note = Seed: SYYKLGASQ
SYYKLGASF

SEQ ID NO: 64659 - protein, 9 aa, synthetic construct
  source 1..9: note = Seed: SYYKLGASQ
SYYKLGASI

SEQ ID NO: 64660 - protein, 9 aa, synthetic construct
  source 1..9: note = Seed: SYYKLGASQ
SYYKLGASL

SEQ ID NO: 64661 - protein, 9 aa, synthetic construct
  source 1..9: note = Seed: SYYKLGASQ
SYYKLGASM

SEQ ID NO: 64662 - protein, 11 aa, synthetic construct
  source 1..11: note = Seed: SYYKLGASQRV
SYYKLGASQRF

SEQ ID NO: 64663 - protein, 11 aa, synthetic construct
  source 1..11: note = Seed: SYYKLGASQRV
SYYKLGASQRI

SEQ ID NO: 64664 - protein, 11 aa, synthetic construct
  source 1..11: note = Seed: SYYKLGASQRV
SYYKLGASQRL

SEQ ID NO: 64665 - protein, 11 aa, synthetic construct
  source 1..11: note = Seed: SYYKLGASQRV
SYYKLGASQRW

SEQ ID NO: 64666 - protein, 9 aa, synthetic construct
  source 1..9: note = Seed: SYYKLGASQ
SYYKLGASV

SEQ ID NO: 64667 - protein, 9 aa, synthetic construct
  source 1..9: note = Seed: SYYKLGASQ
SYYKLGASW

SEQ ID NO: 64668 - protein, 9 aa, synthetic construct
  source 1..9: note = Seed: SYYKLGASQ
SYYKLGASY

SEQ ID NO: 64669 - protein, 10 aa, synthetic construct
  source 1..10: note = Seed: SNYLKRRVVF
SYYLKRRVVF

SEQ ID NO: 64670 - protein, 10 aa, synthetic construct
  source 1..10: note = Seed: SNYLKRRVVF
SYYLKRRVVL

SEQ ID NO: 64671 - protein, 10 aa, synthetic construct
  source 1..10: note = Seed: SNYLKRRVVF
SYYLKRRVVM

SEQ ID NO: 64672 - protein, 10 aa, synthetic construct
  source 1..10: note = Seed: SNYLKRRVVF
SYYLKRRVVY

SEQ ID NO: 64673 - protein, 10 aa, synthetic construct
  source 1..10: note = Seed: SRYRIGNYKL
SYYRIGNYKF

SEQ ID NO: 64674 - protein, 10 aa, synthetic construct
  source 1..10: note = Seed: SRYRIGNYKL
SYYRIGNYKI

SEQ ID NO: 64675 - protein, 10 aa, synthetic construct
  source 1..10: note = Seed: SRYRIGNYKL
SYYRIGNYKL

SEQ ID NO: 64676 - protein, 10 aa, synthetic construct
  source 1..10: note = Seed: SRYRIGNYKL
SYYRIGNYKM

SEQ ID NO: 64677 - protein, 10 aa, synthetic construct
  source 1..10: note = Seed: SRYRIGNYKL
SYYRIGNYKW

SEQ ID NO: 64678 - protein, 9 aa, synthetic construct
  source 1..9: note = Seed: SYYSLLMPI
SYYSLLMPA

SEQ ID NO: 64679 - protein, 9 aa, synthetic construct
  source 1..9: note = Seed: SYYSLLMPI
SYYSLLMPF

SEQ ID NO: 64680 - protein, 9 aa, synthetic construct
  source 1..9: note = Seed: SYYSLLMPI
SYYSLLMPH

SEQ ID NO: 64681 - protein, 10 aa, synthetic construct
  source 1..10: note = Seed: SYYSLLMPIL
SYYSLLMPIF

SEQ ID NO: 64682 - protein, 10 aa, synthetic construct
  source 1..10: note = Seed: SYYSLLMPIL
SYYSLLMPII

SEQ ID NO: 64683 - protein, 10 aa, synthetic construct
  source 1..10: note = Seed: SYYSLLMPIL
SYYSLLMPIM

SEQ ID NO: 64684 - protein, 10 aa, synthetic construct
  source 1..10: note = Seed: SYYSLLMPIL
SYYSLLMPIW

SEQ ID NO: 64685 - protein, 10 aa, synthetic construct
  source 1..10: note = Seed: SYYSLLMPIL
SYYSLLMPIY

SEQ ID NO: 64686 - protein, 9 aa, synthetic construct
  source 1..9: note = Seed: SYYSLLMPI
SYYSLLMPK

SEQ ID NO: 64687 - protein, 9 aa, synthetic construct
  source 1..9: note = Seed: SYYSLLMPI
SYYSLLMPL

SEQ ID NO: 64688 - protein, 9 aa, synthetic construct
  source 1..9: note = Seed: SYYSLLMPI
SYYSLLMPM

SEQ ID NO: 64689 - protein, 9 aa, synthetic construct
  source 1..9: note = Seed: SYYSLLMPI
SYYSLLMPV

SEQ ID NO: 64690 - protein, 9 aa, synthetic construct
  source 1..9: note = Seed: SYYSLLMPI
SYYSLLMPW

SEQ ID NO: 64691 - protein, 9 aa, synthetic construct
  source 1..9: note = Seed: SYYSLLMPI
SYYSLLMPY

SEQ ID NO: 64692 - protein, 9 aa, synthetic construct
  source 1..9: note = Seed: SLYVNKHAF
SYYVNKHAF

SEQ ID NO: 64693 - protein, 9 aa, synthetic construct
  source 1..9: note = Seed: SLYVNKHAF
SYYVNKHAI

SEQ ID NO: 64694 - protein, 9 aa, synthetic construct
  source 1..9: note = Seed: SLYVNKHAF
SYYVNKHAL

SEQ ID NO: 64695 - protein, 9 aa, synthetic construct
  source 1..9: note = Seed: SLYVNKHAF
SYYVNKHAM

SEQ ID NO: 64696 - protein, 9 aa, synthetic construct
  source 1..9: note = Seed: SLYVNKHAF
SYYVNKHAV

SEQ ID NO: 64697 - protein, 9 aa, synthetic construct
  source 1..9: note = Seed: SLYVNKHAF
SYYVNKHAW

SEQ ID NO: 64698 - protein, 9 aa, synthetic construct
  source 1..9: note = Seed: SLYVNKHAF
SYYVNKHAY

SEQ ID NO: 64699 - protein, 10 aa, synthetic construct
  source 1..10: note = Seed: SFYVYANGGK
SYYVYANGGR

SEQ ID NO: 64700 - protein, 9 aa, synthetic construct
  source 1..9: note = Seed: SFYYVWKSY
SYYYVWKSF

SEQ ID NO: 64701 - protein, 9 aa, synthetic construct
  source 1..9: note = Seed: SFYYVWKSY
SYYYVWKSI

SEQ ID NO: 64702 - protein, 9 aa, synthetic construct
  source 1..9: note = Seed: SFYYVWKSY
SYYYVWKSL

SEQ ID NO: 64703 - protein, 9 aa, synthetic construct
  source 1..9: note = Seed: SFYYVWKSY
SYYYVWKSM

SEQ ID NO: 64704 - protein, 9 aa, synthetic construct
  source 1..9: note = Seed: SFYYVWKSY
SYYYVWKSV

SEQ ID NO: 64705 - protein, 9 aa, synthetic construct
  source 1..9: note = Seed: SFYYVWKSY
SYYYVWKSY

SEQ ID NO: 64706 - protein, 10 aa, synthetic construct
  source 1..10: note = Seed: SFYYVWKSYV
SYYYVWKSYF

SEQ ID NO: 64707 - protein, 10 aa, synthetic construct
  source 1..10: note = Seed: SFYYVWKSYV
SYYYVWKSYI

SEQ ID NO: 64708 - protein, 10 aa, synthetic construct
  source 1..10: note = Seed: SFYYVWKSYV
SYYYVWKSYL

SEQ ID NO: 64709 - protein, 10 aa, synthetic construct
  source 1..10: note = Seed: SFYYVWKSYV
SYYYVWKSYM

SEQ ID NO: 64710 - protein, 10 aa, synthetic construct
  source 1..10: note = Seed: SFYYVWKSYV
SYYYVWKSYW

SEQ ID NO: 64711 - protein, 10 aa, synthetic construct
  source 1..10: note = Seed: SFYYVWKSYV
SYYYVWKSYY

SEQ ID NO: 64712 - protein, 9 aa, synthetic construct
  source 1..9: note = Seed: TMADLVYAL
TAADLVYAA

SEQ ID NO: 64713 - protein, 9 aa, synthetic construct
  source 1..9: note = Seed: TMADLVYAL
TAADLVYAF

SEQ ID NO: 64714 - protein, 9 aa, synthetic construct
  source 1..9: note = Seed: TMADLVYAL
TAADLVYAH

SEQ ID NO: 64715 - protein, 9 aa, synthetic construct
  source 1..9: note = Seed: TMADLVYAL
TAADLVYAI

SEQ ID NO: 64716 - protein, 9 aa, synthetic construct
  source 1..9: note = Seed: TMADLVYAL
TAADLVYAL

SEQ ID NO: 64717 - protein, 10 aa, synthetic construct
  source 1..10: note = Seed: TMADLVYALR
TAADLVYALK

SEQ ID NO: 64718 - protein, 10 aa, synthetic construct
  source 1..10: note = Seed: TMADLVYALR
TAADLVYALR

SEQ ID NO: 64719 - protein, 10 aa, synthetic construct
  source 1..10: note = Seed: TMADLVYALR
TAADLVYALV

SEQ ID NO: 64720 - protein, 9 aa, synthetic construct
  source 1..9: note = Seed: TMADLVYAL
TAADLVYAM

SEQ ID NO: 64721 - protein, 9 aa, synthetic construct
  source 1..9: note = Seed: TMADLVYAL
TAADLVYAV

SEQ ID NO: 64722 - protein, 9 aa, synthetic construct
  source 1..9: note = Seed: TMADLVYAL
TAADLVYAY

SEQ ID NO: 64723 - protein, 9 aa, synthetic construct
  source 1..9: note = Seed: TIAEILLII
TAAEILLIV

SEQ ID NO: 64724 - protein, 9 aa, synthetic construct
  source 1..9: note = Seed: TSAFVETVK
TAAFVETVK

SEQ ID NO: 64725 - protein, 9 aa, synthetic construct
  source 1..9: note = Seed: TSAFVETVK
TAAFVETVR

SEQ ID NO: 64726 - protein, 10 aa, synthetic construct
  source 1..10: note = Seed: TVAGVSICST
TAAGVSICSV

SEQ ID NO: 64727 - protein, 9 aa, synthetic construct
  source 1..9: note = Seed: TSAMQTMLF
TAAMQTMLF

SEQ ID NO: 64728 - protein, 9 aa, synthetic construct
  source 1..9: note = Seed: TSAMQTMLF
TAAMQTMLL

SEQ ID NO: 64729 - protein, 9 aa, synthetic construct
  source 1..9: note = Seed: TSAMQTMLF
TAAMQTMLM

SEQ ID NO: 64730 - protein, 9 aa, synthetic construct
  source 1..9: note = Seed: TSAMQTMLF
TAAMQTMLV

SEQ ID NO: 64731 - protein, 9 aa, synthetic construct
  source 1..9: note = Seed: TSAMQTMLF
TAAMQTMLW

SEQ ID NO: 64732 - protein, 9 aa, synthetic construct
  source 1..9: note = Seed: TSAMQTMLF
TAAMQTMLY

SEQ ID NO: 64733 - protein, 9 aa, synthetic construct
  source 1..9: note = Seed: TVASLINTL
TAASLINTF

SEQ ID NO: 64734 - protein, 9 aa, synthetic construct
  source 1..9: note = Seed: TVASLINTL
TAASLINTI

SEQ ID NO: 64735 - protein, 9 aa, synthetic construct
  source 1..9: note = Seed: TVASLINTL
TAASLINTL

SEQ ID NO: 64736 - protein, 9 aa, synthetic construct
  source 1..9: note = Seed: TVASLINTL
TAASLINTM

SEQ ID NO: 64737 - protein, 9 aa, synthetic construct
  source 1..9: note = Seed: TVASLINTL
TAASLINTV

SEQ ID NO: 64738 - protein, 9 aa, synthetic construct
  source 1..9: note = Seed: TVASLINTL
TAASLINTY

SEQ ID NO: 64739 - protein, 10 aa, synthetic construct
  source 1..10: note = Seed: TSAVLQSGFR
TAAVLQSGFK

SEQ ID NO: 64740 - protein, 10 aa, synthetic construct
  source 1..10: note = Seed: TSAVLQSGFR
TAAVLQSGFR

SEQ ID NO: 64741 - protein, 9 aa, synthetic construct
  source 1..9: note = Seed: TSAVLQSGF
TAAVLQSGW

SEQ ID NO: 64742 - protein, 9 aa, synthetic construct
  source 1..9: note = Seed: TLAVPYNMR
TAAVPYNMK

SEQ ID NO: 64743 - protein, 9 aa, synthetic construct
  source 1..9: note = Seed: TLAVPYNMR
TAAVPYNMR

SEQ ID NO: 64744 - protein, 9 aa, synthetic construct
  source 1..9: note = Seed: TTAYANSVF
TAAYANSVF

SEQ ID NO: 64745 - protein, 11 aa, synthetic construct
  source 1..11: note = Seed: TTAYANSVFNI
TAAYANSVFNF

SEQ ID NO: 64746 - protein, 11 aa, synthetic construct
  source 1..11: note = Seed: TTAYANSVFNI
TAAYANSVFNW

SEQ ID NO: 64747 - protein, 9 aa, synthetic construct
  source 1..9: note = Seed: TTAYANSVF
TAAYANSVI

SEQ ID NO: 64748 - protein, 9 aa, synthetic construct
  source 1..9: note = Seed: TTAYANSVF
TAAYANSVL

SEQ ID NO: 64749 - protein, 9 aa, synthetic construct
  source 1..9: note = Seed: TTAYANSVF
TAAYANSVM

SEQ ID NO: 64750 - protein, 9 aa, synthetic construct
  source 1..9: note = Seed: TTAYANSVF
TAAYANSVW

SEQ ID NO: 64751 - protein, 9 aa, synthetic construct
  source 1..9: note = Seed: TTAYANSVF
TAAYANSVY

SEQ ID NO: 64752 - protein, 9 aa, synthetic construct
  source 1..9: note = Seed: TVAYFNMVY
TAAYFNMVF

SEQ ID NO: 64753 - protein, 9 aa, synthetic construct
  source 1..9: note = Seed: TVAYFNMVY
TAAYFNMVI

SEQ ID NO: 64754 - protein, 9 aa, synthetic construct
  source 1..9: note = Seed: TVAYFNMVY
TAAYFNMVK

SEQ ID NO: 64755 - protein, 9 aa, synthetic construct
  source 1..9: note = Seed: TVAYFNMVY
TAAYFNMVL

SEQ ID NO: 64756 - protein, 9 aa, synthetic construct
  source 1..9: note = Seed: TVAYFNMVY
TAAYFNMVM

SEQ ID NO: 64757 - protein, 9 aa, synthetic construct
  source 1..9: note = Seed: TVAYFNMVY
TAAYFNMVR

SEQ ID NO: 64758 - protein, 9 aa, synthetic construct
  source 1..9: note = Seed: TVAYFNMVY
TAAYFNMVV

SEQ ID NO: 64759 - protein, 9 aa, synthetic construct
  source 1..9: note = Seed: TVAYFNMVY
TAAYFNMVW

SEQ ID NO: 64760 - protein, 9 aa, synthetic construct
  source 1..9: note = Seed: TVAYFNMVY
TAAYFNMVY

SEQ ID NO: 64761 - protein, 10 aa, synthetic construct
  source 1..10: note = Seed: TVAYFNMVYM
TAAYFNMVYA

SEQ ID NO: 64762 - protein, 10 aa, synthetic construct
  source 1..10: note = Seed: TVAYFNMVYM
TAAYFNMVYI

SEQ ID NO: 64763 - protein, 10 aa, synthetic construct
  source 1..10: note = Seed: TVAYFNMVYM
TAAYFNMVYK

SEQ ID NO: 64764 - protein, 10 aa, synthetic construct
  source 1..10: note = Seed: TVAYFNMVYM
TAAYFNMVYL

SEQ ID NO: 64765 - protein, 10 aa, synthetic construct
  source 1..10: note = Seed: TVAYFNMVYM
TAAYFNMVYR

SEQ ID NO: 64766 - protein, 10 aa, synthetic construct
  source 1..10: note = Seed: TVAYFNMVYM
TAAYFNMVYV

SEQ ID NO: 64767 - protein, 10 aa, synthetic construct
  source 1..10: note = Seed: TVAYFNMVYM
TAAYFNMVYY

SEQ ID NO: 64768 - protein, 9 aa, synthetic construct
  source 1..9: note = Seed: TVCTVCGMW
TACTVCGMW

SEQ ID NO: 64769 - protein, 9 aa, synthetic construct
  source 1..9: note = Seed: TSDLATNNL
TADLATNNF

SEQ ID NO: 64770 - protein, 9 aa, synthetic construct
  source 1..9: note = Seed: TSDLATNNL
TADLATNNL

SEQ ID NO: 64771 - protein, 9 aa, synthetic construct
  source 1..9: note = Seed: TSDLATNNL
TADLATNNM

SEQ ID NO: 64772 - protein, 9 aa, synthetic construct
  source 1..9: note = Seed: TLDSKTQSL
TADSKTQSF

SEQ ID NO: 64773 - protein, 9 aa, synthetic construct
  source 1..9: note = Seed: TLDSKTQSL
TADSKTQSL

SEQ ID NO: 64774 - protein, 9 aa, synthetic construct
  source 1..9: note = Seed: TLDSKTQSL
TADSKTQSM

SEQ ID NO: 64775 - protein, 9 aa, synthetic construct
  source 1..9: note = Seed: TIDYTEISF
TADYTEISF

SEQ ID NO: 64776 - protein, 11 aa, synthetic construct
  source 1..11: note = Seed: TIDYTEISFML
TADYTEISFMF

SEQ ID NO: 64777 - protein, 9 aa, synthetic construct
  source 1..9: note = Seed: TIDYTEISF
TADYTEISL

SEQ ID NO: 64778 - protein, 9 aa, synthetic construct
  source 1..9: note = Seed: TIDYTEISF
TADYTEISM

SEQ ID NO: 64779 - protein, 9 aa, synthetic construct
  source 1..9: note = Seed: TIDYTEISF
TADYTEISY

SEQ ID NO: 64780 - protein, 9 aa, synthetic construct
  source 1..9: note = Seed: TSDYYQLYS
TADYYQLYY

SEQ ID NO: 64781 - protein, 10 aa, synthetic construct
  source 1..10: note = Seed: TIEVNSFSGY
TAEVNSFSGW

SEQ ID NO: 64782 - protein, 9 aa, synthetic construct
  source 1..9: note = Seed: TFEYVSQPF
TAEYVSQPF

SEQ ID NO: 64783 - protein, 9 aa, synthetic construct
  source 1..9: note = Seed: TFEYVSQPF
TAEYVSQPM

SEQ ID NO: 64784 - protein, 9 aa, synthetic construct
  source 1..9: note = Seed: TFEYVSQPF
TAEYVSQPY

SEQ ID NO: 64785 - protein, 9 aa, synthetic construct
  source 1..9: note = Seed: TRFASVYAW
TAFASVYAF

SEQ ID NO: 64786 - protein, 9 aa, synthetic construct
  source 1..9: note = Seed: TRFASVYAW
TAFASVYAL

SEQ ID NO: 64787 - protein, 9 aa, synthetic construct
  source 1..9: note = Seed: TRFASVYAW
TAFASVYAM

SEQ ID NO: 64788 - protein, 9 aa, synthetic construct
  source 1..9: note = Seed: TRFASVYAW
TAFASVYAY

SEQ ID NO: 64789 - protein, 9 aa, synthetic construct
  source 1..9: note = Seed: TPFEIKLAK
TAFEIKLAK

SEQ ID NO: 64790 - protein, 10 aa, synthetic construct
  source 1..10: note = Seed: TPFEIKLAKK
TAFEIKLAKK

SEQ ID NO: 64791 - protein, 10 aa, synthetic construct
  source 1..10: note = Seed: TPFEIKLAKK
TAFEIKLAKR

SEQ ID NO: 64792 - protein, 9 aa, synthetic construct
  source 1..9: note = Seed: TPFEIKLAK
TAFEIKLAR

SEQ ID NO: 64793 - protein, 9 aa, synthetic construct
  source 1..9: note = Seed: TRFFYVLGL
TAFFYVLGF

SEQ ID NO: 64794 - protein, 9 aa, synthetic construct
  source 1..9: note = Seed: TRFFYVLGL
TAFFYVLGY

SEQ ID NO: 64795 - protein, 9 aa, synthetic construct
  source 1..9: note = Seed: TIFKDASGK
TAFKDASGK

SEQ ID NO: 64796 - protein, 9 aa, synthetic construct
  source 1..9: note = Seed: TIFKDASGK
TAFKDASGR

SEQ ID NO: 64797 - protein, 9 aa, synthetic construct
  source 1..9: note = Seed: TQFNYYKKV
TAFNYYKKY

SEQ ID NO: 64798 - protein, 9 aa, synthetic construct
  source 1..9: note = Seed: TCFSTQFAF
TAFSTQFAF

SEQ ID NO: 64799 - protein, 9 aa, synthetic construct
  source 1..9: note = Seed: TCFSTQFAF
TAFSTQFAH

SEQ ID NO: 64800 - protein, 9 aa, synthetic construct
  source 1..9: note = Seed: TCFSTQFAF
TAFSTQFAL

SEQ ID NO: 64801 - protein, 9 aa, synthetic construct
  source 1..9: note = Seed: TCFSTQFAF
TAFSTQFAM

SEQ ID NO: 64802 - protein, 9 aa, synthetic construct
  source 1..9: note = Seed: TCFSTQFAF
TAFSTQFAW

SEQ ID NO: 64803 - protein, 9 aa, synthetic construct
  source 1..9: note = Seed: TCFSTQFAF
TAFSTQFAY

SEQ ID NO: 64804 - protein, 9 aa, synthetic construct
  source 1..9: note = Seed: TAFVTNVNA
TAFVTNVNV

SEQ ID NO: 64805 - protein, 11 aa, synthetic construct
  source 1..11: note = Seed: TCGTTTLNGLW
TAGTTTLNGLW

SEQ ID NO: 64806 - protein, 10 aa, synthetic construct
  source 1..10: note = Seed: TNGVGYQPYR
TAGVGYQPYR

SEQ ID NO: 64807 - protein, 11 aa, synthetic construct
  source 1..11: note = Seed: TLGVYDYLVST
TAGVYDYLVSV

SEQ ID NO: 64808 - protein, 9 aa, synthetic construct
  source 1..9: note = Seed: TPHTVLQAV
TAHTVLQAF

SEQ ID NO: 64809 - protein, 9 aa, synthetic construct
  source 1..9: note = Seed: TPHTVLQAV
TAHTVLQAM

SEQ ID NO: 64810 - protein, 9 aa, synthetic construct
  source 1..9: note = Seed: TPHTVLQAV
TAHTVLQAY

SEQ ID NO: 64811 - protein, 9 aa, synthetic construct
  source 1..9: note = Seed: TTIKPVTYK
TAIKPVTYK

SEQ ID NO: 64812 - protein, 10 aa, synthetic construct
  source 1..10: note = Seed: TTIKPVTYKL
TAIKPVTYKK

SEQ ID NO: 64813 - protein, 10 aa, synthetic construct
  source 1..10: note = Seed: TTIKPVTYKL
TAIKPVTYKR

SEQ ID NO: 64814 - protein, 10 aa, synthetic construct
  source 1..10: note = Seed: TTIKPVTYKL
TAIKPVTYKV

SEQ ID NO: 64815 - protein, 9 aa, synthetic construct
  source 1..9: note = Seed: TTIKPVTYK
TAIKPVTYR

SEQ ID NO: 64816 - protein, 9 aa, synthetic construct
  source 1..9: note = Seed: TFISDEVAR
TAISDEVAR

SEQ ID NO: 64817 - protein, 10 aa, synthetic construct
  source 1..10: note = Seed: TNIVTRCLNR
TAIVTRCLNR

SEQ ID NO: 64818 - protein, 9 aa, synthetic construct
  source 1..9: note = Seed: TVKPGNFNK
TAKPGNFNR

SEQ ID NO: 64819 - protein, 10 aa, synthetic construct
  source 1..10: note = Seed: TFLLNKEMYL
TALLNKEMYI

SEQ ID NO: 64820 - protein, 10 aa, synthetic construct
  source 1..10: note = Seed: TFLLNKEMYL
TALLNKEMYL

SEQ ID NO: 64821 - protein, 10 aa, synthetic construct
  source 1..10: note = Seed: TFLLNKEMYL
TALLNKEMYV

SEQ ID NO: 64822 - protein, 10 aa, synthetic construct
  source 1..10: note = Seed: TLLLQLCTFT
TALLQLCTFV

SEQ ID NO: 64823 - protein, 9 aa, synthetic construct
  source 1..9: note = Seed: TTLPVNVAF
TALPVNVAF

SEQ ID NO: 64824 - protein, 9 aa, synthetic construct
  source 1..9: note = Seed: TTLPVNVAF
TALPVNVAL

SEQ ID NO: 64825 - protein, 9 aa, synthetic construct
  source 1..9: note = Seed: TTLPVNVAF
TALPVNVAM

SEQ ID NO: 64826 - protein, 9 aa, synthetic construct
  source 1..9: note = Seed: TTLPVNVAF
TALPVNVAV

SEQ ID NO: 64827 - protein, 9 aa, synthetic construct
  source 1..9: note = Seed: TTLPVNVAF
TALPVNVAW

SEQ ID NO: 64828 - protein, 9 aa, synthetic construct
  source 1..9: note = Seed: TTLPVNVAF
TALPVNVAY

SEQ ID NO: 64829 - protein, 10 aa, synthetic construct
  source 1..10: note = Seed: TILTSLLVLV
TALTSLLVLI

SEQ ID NO: 64830 - protein, 10 aa, synthetic construct
  source 1..10: note = Seed: TILTSLLVLV
TALTSLLVLL

SEQ ID NO: 64831 - protein, 10 aa, synthetic construct
  source 1..10: note = Seed: TILTSLLVLV
TALTSLLVLV

SEQ ID NO: 64832 - protein, 10 aa, synthetic construct
  source 1..10: note = Seed: TPLVPFWITI
TALVPFWITV

SEQ ID NO: 64833 - protein, 10 aa, synthetic construct
  source 1..10: note = Seed: TQLYLGGMSY
TALYLGGMSF

SEQ ID NO: 64834 - protein, 10 aa, synthetic construct
  source 1..10: note = Seed: TQLYLGGMSY
TALYLGGMSK

SEQ ID NO: 64835 - protein, 10 aa, synthetic construct
  source 1..10: note = Seed: TQLYLGGMSY
TALYLGGMSM

SEQ ID NO: 64836 - protein, 10 aa, synthetic construct
  source 1..10: note = Seed: TQLYLGGMSY
TALYLGGMSY

SEQ ID NO: 64837 - protein, 10 aa, synthetic construct
  source 1..10: note = Seed: TLMIERFVSL
TAMIERFVSA

SEQ ID NO: 64838 - protein, 10 aa, synthetic construct
  source 1..10: note = Seed: TLMIERFVSL
TAMIERFVSF

SEQ ID NO: 64839 - protein, 10 aa, synthetic construct
  source 1..10: note = Seed: TLMIERFVSL
TAMIERFVSI

SEQ ID NO: 64840 - protein, 10 aa, synthetic construct
  source 1..10: note = Seed: TLMIERFVSL
TAMIERFVSL

SEQ ID NO: 64841 - protein, 11 aa, synthetic construct
  source 1..11: note = Seed: TLMIERFVSLA
TAMIERFVSLV

SEQ ID NO: 64842 - protein, 10 aa, synthetic construct
  source 1..10: note = Seed: TLMIERFVSL
TAMIERFVSM

SEQ ID NO: 64843 - protein, 10 aa, synthetic construct
  source 1..10: note = Seed: TLMIERFVSL
TAMIERFVSV

SEQ ID NO: 64844 - protein, 10 aa, synthetic construct
  source 1..10: note = Seed: TLMIERFVSL
TAMIERFVSY

SEQ ID NO: 64845 - protein, 9 aa, synthetic construct
  source 1..9: note = Seed: TSMKYFVKI
TAMKYFVKF

SEQ ID NO: 64846 - protein, 9 aa, synthetic construct
  source 1..9: note = Seed: TSMKYFVKI
TAMKYFVKL

SEQ ID NO: 64847 - protein, 9 aa, synthetic construct
  source 1..9: note = Seed: TSMKYFVKI
TAMKYFVKM

SEQ ID NO: 64848 - protein, 9 aa, synthetic construct
  source 1..9: note = Seed: TSMKYFVKI
TAMKYFVKV

SEQ ID NO: 64849 - protein, 9 aa, synthetic construct
  source 1..9: note = Seed: TSMKYFVKI
TAMKYFVKW

SEQ ID NO: 64850 - protein, 9 aa, synthetic construct
  source 1..9: note = Seed: TSMKYFVKI
TAMKYFVKY

SEQ ID NO: 64851 - protein, 10 aa, synthetic construct
  source 1..10: note = Seed: TCMMCYKRNR
TAMMCYKRNR

SEQ ID NO: 64852 - protein, 9 aa, synthetic construct
  source 1..9: note = Seed: TQMNLKYAI
TAMNLKYAF

SEQ ID NO: 64853 - protein, 9 aa, synthetic construct
  source 1..9: note = Seed: TQMNLKYAI
TAMNLKYAY

SEQ ID NO: 64854 - protein, 9 aa, synthetic construct
  source 1..9: note = Seed: TTNGDFLHF
TANGDFLHF

SEQ ID NO: 64855 - protein, 10 aa, synthetic construct
  source 1..10: note = Seed: TTNGDFLHFL
TANGDFLHFV

SEQ ID NO: 64856 - protein, 9 aa, synthetic construct
  source 1..9: note = Seed: TTNGDFLHF
TANGDFLHM

SEQ ID NO: 64857 - protein, 9 aa, synthetic construct
  source 1..9: note = Seed: TTNGDFLHF
TANGDFLHW

SEQ ID NO: 64858 - protein, 9 aa, synthetic construct
  source 1..9: note = Seed: TTNGDFLHF
TANGDFLHY

SEQ ID NO: 64859 - protein, 9 aa, synthetic construct
  source 1..9: note = Seed: TTNIVTRCL
TANIVTRCF

SEQ ID NO: 64860 - protein, 9 aa, synthetic construct
  source 1..9: note = Seed: TTNIVTRCL
TANIVTRCL

SEQ ID NO: 64861 - protein, 9 aa, synthetic construct
  source 1..9: note = Seed: TTNIVTRCL
TANIVTRCM

SEQ ID NO: 64862 - protein, 9 aa, synthetic construct
  source 1..9: note = Seed: TTNIVTRCL
TANIVTRCY

SEQ ID NO: 64863 - protein, 9 aa, synthetic construct
  source 1..9: note = Seed: TANKWDLII
TANKWDLIF

SEQ ID NO: 64864 - protein, 9 aa, synthetic construct
  source 1..9: note = Seed: TANKWDLII
TANKWDLIL

SEQ ID NO: 64865 - protein, 9 aa, synthetic construct
  source 1..9: note = Seed: TANKWDLII
TANKWDLIM

SEQ ID NO: 64866 - protein, 9 aa, synthetic construct
  source 1..9: note = Seed: TANKWDLII
TANKWDLIW

SEQ ID NO: 64867 - protein, 9 aa, synthetic construct
  source 1..9: note = Seed: TANKWDLII
TANKWDLIY

SEQ ID NO: 64868 - protein, 9 aa, synthetic construct
  source 1..9: note = Seed: TSNPTTFHL
TANPTTFHF

SEQ ID NO: 64869 - protein, 9 aa, synthetic construct
  source 1..9: note = Seed: TSNPTTFHL
TANPTTFHI

SEQ ID NO: 64870 - protein, 9 aa, synthetic construct
  source 1..9: note = Seed: TSNPTTFHL
TANPTTFHL

SEQ ID NO: 64871 - protein, 9 aa, synthetic construct
  source 1..9: note = Seed: TSNPTTFHL
TANPTTFHM

SEQ ID NO: 64872 - protein, 9 aa, synthetic construct
  source 1..9: note = Seed: TSNPTTFHL
TANPTTFHV

SEQ ID NO: 64873 - protein, 9 aa, synthetic construct
  source 1..9: note = Seed: TSNPTTFHL
TANPTTFHW

SEQ ID NO: 64874 - protein, 9 aa, synthetic construct
  source 1..9: note = Seed: TSNPTTFHL
TANPTTFHY

SEQ ID NO: 64875 - protein, 9 aa, synthetic construct
  source 1..9: note = Seed: TVNVLAWLY
TANVLAWLK

SEQ ID NO: 64876 - protein, 9 aa, synthetic construct
  source 1..9: note = Seed: TVNVLAWLY
TANVLAWLR

SEQ ID NO: 64877 - protein, 9 aa, synthetic construct
  source 1..9: note = Seed: TVNVLAWLY
TANVLAWLY

SEQ ID NO: 64878 - protein, 10 aa, synthetic construct
  source 1..10: note = Seed: TGNYQCGHYK
TANYQCGHYK

SEQ ID NO: 64879 - protein, 10 aa, synthetic construct
  source 1..10: note = Seed: TGNYQCGHYK
TANYQCGHYR

SEQ ID NO: 64880 - protein, 10 aa, synthetic construct
  source 1..10: note = Seed: TLPVNVAFEL
TAPVNVAFEF

SEQ ID NO: 64881 - protein, 10 aa, synthetic construct
  source 1..10: note = Seed: TLPVNVAFEL
TAPVNVAFEW

SEQ ID NO: 64882 - protein, 10 aa, synthetic construct
  source 1..10: note = Seed: TLPVNVAFEL
TAPVNVAFEY

SEQ ID NO: 64883 - protein, 10 aa, synthetic construct
  source 1..10: note = Seed: TLQAENVTGL
TAQAENVTGV

SEQ ID NO: 64884 - protein, 9 aa, synthetic construct
  source 1..9: note = Seed: TIQITISSF
TAQITISSF

SEQ ID NO: 64885 - protein, 10 aa, synthetic construct
  source 1..10: note = Seed: TIQITISSFK
TAQITISSFK

SEQ ID NO: 64886 - protein, 10 aa, synthetic construct
  source 1..10: note = Seed: TIQITISSFK
TAQITISSFR

SEQ ID NO: 64887 - protein, 9 aa, synthetic construct
  source 1..9: note = Seed: TIQITISSF
TAQITISSM

SEQ ID NO: 64888 - protein, 9 aa, synthetic construct
  source 1..9: note = Seed: TIQITISSF
TAQITISSY

SEQ ID NO: 64889 - protein, 9 aa, synthetic construct
  source 1..9: note = Seed: TAQNSVRVL
TAQNSVRVF

SEQ ID NO: 64890 - protein, 9 aa, synthetic construct
  source 1..9: note = Seed: TAQNSVRVL
TAQNSVRVM

SEQ ID NO: 64891 - protein, 9 aa, synthetic construct
  source 1..9: note = Seed: TAQNSVRVL
TAQNSVRVV

SEQ ID NO: 64892 - protein, 9 aa, synthetic construct
  source 1..9: note = Seed: TAQNSVRVL
TAQNSVRVY

SEQ ID NO: 64893 - protein, 11 aa, synthetic construct
  source 1..11: note = Seed: TRQVVNVVTTK
TAQVVNVVTTR

SEQ ID NO: 64894 - protein, 9 aa, synthetic construct
  source 1..9: note = Seed: TTRQVVNVV
TARQVVNVF

SEQ ID NO: 64895 - protein, 9 aa, synthetic construct
  source 1..9: note = Seed: TTRQVVNVV
TARQVVNVI

SEQ ID NO: 64896 - protein, 9 aa, synthetic construct
  source 1..9: note = Seed: TTRQVVNVV
TARQVVNVK

SEQ ID NO: 64897 - protein, 9 aa, synthetic construct
  source 1..9: note = Seed: TTRQVVNVV
TARQVVNVL

SEQ ID NO: 64898 - protein, 9 aa, synthetic construct
  source 1..9: note = Seed: TTRQVVNVV
TARQVVNVM

SEQ ID NO: 64899 - protein, 9 aa, synthetic construct
  source 1..9: note = Seed: TTRQVVNVV
TARQVVNVV

SEQ ID NO: 64900 - protein, 9 aa, synthetic construct
  source 1..9: note = Seed: TTRQVVNVV
TARQVVNVY

SEQ ID NO: 64901 - protein, 9 aa, synthetic construct
  source 1..9: note = Seed: TYRRLISMM
TARRLISMK

SEQ ID NO: 64902 - protein, 9 aa, synthetic construct
  source 1..9: note = Seed: TISLAGSYK
TASLAGSYK

SEQ ID NO: 64903 - protein, 9 aa, synthetic construct
  source 1..9: note = Seed: TISLAGSYK
TASLAGSYR

SEQ ID NO: 64904 - protein, 9 aa, synthetic construct
  source 1..9: note = Seed: TGSNVFQTR
TASNVFQTK

SEQ ID NO: 64905 - protein, 9 aa, synthetic construct
  source 1..9: note = Seed: TGSNVFQTR
TASNVFQTR

SEQ ID NO: 64906 - protein, 9 aa, synthetic construct
  source 1..9: note = Seed: TASWFTALT
TASWFTALA

SEQ ID NO: 64907 - protein, 9 aa, synthetic construct
  source 1..9: note = Seed: TASWFTALT
TASWFTALI

SEQ ID NO: 64908 - protein, 9 aa, synthetic construct
  source 1..9: note = Seed: TASWFTALT
TASWFTALL

SEQ ID NO: 64909 - protein, 9 aa, synthetic construct
  source 1..9: note = Seed: TASWFTALT
TASWFTALM

SEQ ID NO: 64910 - protein, 9 aa, synthetic construct
  source 1..9: note = Seed: TASWFTALT
TASWFTALV

SEQ ID NO: 64911 - protein, 8 aa, synthetic construct
  source 1..8: note = Seed: TASWFTAL
TASWFTAM

SEQ ID NO: 64912 - protein, 9 aa, synthetic construct
  source 1..9: note = Seed: TLSYEQFKK
TASYEQFKK

SEQ ID NO: 64913 - protein, 9 aa, synthetic construct
  source 1..9: note = Seed: TLSYEQFKK
TASYEQFKR

SEQ ID NO: 64914 - protein, 9 aa, synthetic construct
  source 1..9: note = Seed: TTTIKPVTY
TATIKPVTF

SEQ ID NO: 64915 - protein, 9 aa, synthetic construct
  source 1..9: note = Seed: TTTIKPVTY
TATIKPVTL

SEQ ID NO: 64916 - protein, 9 aa, synthetic construct
  source 1..9: note = Seed: TTTIKPVTY
TATIKPVTM

SEQ ID NO: 64917 - protein, 9 aa, synthetic construct
  source 1..9: note = Seed: TTTIKPVTY
TATIKPVTV

SEQ ID NO: 64918 - protein, 9 aa, synthetic construct
  source 1..9: note = Seed: TTTIKPVTY
TATIKPVTY

SEQ ID NO: 64919 - protein, 10 aa, synthetic construct
  source 1..10: note = Seed: TTTIKPVTYK
TATIKPVTYK

SEQ ID NO: 64920 - protein, 10 aa, synthetic construct
  source 1..10: note = Seed: TTTIKPVTYK
TATIKPVTYR

SEQ ID NO: 64921 - protein, 9 aa, synthetic construct
  source 1..9: note = Seed: TITQMNLKY
TATQMNLKY

SEQ ID NO: 64922 - protein, 9 aa, synthetic construct
  source 1..9: note = Seed: TITVNVLAW
TATVNVLAW

SEQ ID NO: 64923 - protein, 10 aa, synthetic construct
  source 1..10: note = Seed: TITVNVLAWL
TATVNVLAWA

SEQ ID NO: 64924 - protein, 10 aa, synthetic construct
  source 1..10: note = Seed: TITVNVLAWL
TATVNVLAWI

SEQ ID NO: 64925 - protein, 10 aa, synthetic construct
  source 1..10: note = Seed: TITVNVLAWL
TATVNVLAWV

SEQ ID NO: 64926 - protein, 9 aa, synthetic construct
  source 1..9: note = Seed: TPVCINGLM
TAVCINGLW

SEQ ID NO: 64927 - protein, 9 aa, synthetic construct
  source 1..9: note = Seed: TPVCINGLM
TAVCINGLY

SEQ ID NO: 64928 - protein, 9 aa, synthetic construct
  source 1..9: note = Seed: TTVDNINLH
TAVDNINLK

SEQ ID NO: 64929 - protein, 9 aa, synthetic construct
  source 1..9: note = Seed: TTVDNINLH
TAVDNINLR

SEQ ID NO: 64930 - protein, 10 aa, synthetic construct
  source 1..10: note = Seed: TNVLEGSVAY
TAVLEGSVAF

SEQ ID NO: 64931 - protein, 10 aa, synthetic construct
  source 1..10: note = Seed: TNVLEGSVAY
TAVLEGSVAY

SEQ ID NO: 64932 - protein, 10 aa, synthetic construct
  source 1..10: note = Seed: TEVVGDIILK
TAVVGDIILK

SEQ ID NO: 64933 - protein, 10 aa, synthetic construct
  source 1..10: note = Seed: TEVVGDIILK
TAVVGDIILR

SEQ ID NO: 64934 - protein, 9 aa, synthetic construct
  source 1..9: note = Seed: TSVVLLSVL
TAVVLLSVF

SEQ ID NO: 64935 - protein, 9 aa, synthetic construct
  source 1..9: note = Seed: TSVVLLSVL
TAVVLLSVL

SEQ ID NO: 64936 - protein, 9 aa, synthetic construct
  source 1..9: note = Seed: TSVVLLSVL
TAVVLLSVM

SEQ ID NO: 64937 - protein, 9 aa, synthetic construct
  source 1..9: note = Seed: TSVVLLSVL
TAVVLLSVW

SEQ ID NO: 64938 - protein, 9 aa, synthetic construct
  source 1..9: note = Seed: TSVVLLSVL
TAVVLLSVY

SEQ ID NO: 64939 - protein, 9 aa, synthetic construct
  source 1..9: note = Seed: TPVVQTIEV
TAVVQTIEF

SEQ ID NO: 64940 - protein, 9 aa, synthetic construct
  source 1..9: note = Seed: TPVVQTIEV
TAVVQTIEM

SEQ ID NO: 64941 - protein, 9 aa, synthetic construct
  source 1..9: note = Seed: TPVVQTIEV
TAVVQTIEY

SEQ ID NO: 64942 - protein, 9 aa, synthetic construct
  source 1..9: note = Seed: TNVYADSFV
TAVYADSFV

SEQ ID NO: 64943 - protein, 11 aa, synthetic construct
  source 1..11: note = Seed: TNVYADSFVIR
TAVYADSFVIR

SEQ ID NO: 64944 - protein, 10 aa, synthetic construct
  source 1..10: note = Seed: TNVYADSFVI
TAVYADSFVV

SEQ ID NO: 64945 - protein, 9 aa, synthetic construct
  source 1..9: note = Seed: TPVYSFLPG
TAVYSFLPA

SEQ ID NO: 64946 - protein, 9 aa, synthetic construct
  source 1..9: note = Seed: TPVYSFLPG
TAVYSFLPF

SEQ ID NO: 64947 - protein, 10 aa, synthetic construct
  source 1..10: note = Seed: TPVYSFLPGV
TAVYSFLPGV

SEQ ID NO: 64948 - protein, 9 aa, synthetic construct
  source 1..9: note = Seed: TPVYSFLPG
TAVYSFLPL

SEQ ID NO: 64949 - protein, 9 aa, synthetic construct
  source 1..9: note = Seed: TPVYSFLPG
TAVYSFLPM

SEQ ID NO: 64950 - protein, 9 aa, synthetic construct
  source 1..9: note = Seed: TPVYSFLPG
TAVYSFLPY

SEQ ID NO: 64951 - protein, 10 aa, synthetic construct
  source 1..10: note = Seed: TAYANSVFNI
TAYANSVFNF

SEQ ID NO: 64952 - protein, 10 aa, synthetic construct
  source 1..10: note = Seed: TAYANSVFNI
TAYANSVFNL

SEQ ID NO: 64953 - protein, 10 aa, synthetic construct
  source 1..10: note = Seed: TAYANSVFNI
TAYANSVFNV

SEQ ID NO: 64954 - protein, 10 aa, synthetic construct
  source 1..10: note = Seed: TAYANSVFNI
TAYANSVFNW

SEQ ID NO: 64955 - protein, 8 aa, synthetic construct
  source 1..8: note = Seed: TAYANSVF
TAYANSVY

SEQ ID NO: 64956 - protein, 9 aa, synthetic construct
  source 1..9: note = Seed: TLYCIDGAL
TAYCIDGAF

SEQ ID NO: 64957 - protein, 9 aa, synthetic construct
  source 1..9: note = Seed: TLYCIDGAL
TAYCIDGAY

SEQ ID NO: 64958 - protein, 11 aa, synthetic construct
  source 1..11: note = Seed: TNYDLSVVNAR
TAYDLSVVNAR

SEQ ID NO: 64959 - protein, 9 aa, synthetic construct
  source 1..9: note = Seed: TVYEKLKPV
TAYEKLKPF

SEQ ID NO: 64960 - protein, 9 aa, synthetic construct
  source 1..9: note = Seed: TVYEKLKPV
TAYEKLKPI

SEQ ID NO: 64961 - protein, 9 aa, synthetic construct
  source 1..9: note = Seed: TVYEKLKPV
TAYEKLKPL

SEQ ID NO: 64962 - protein, 9 aa, synthetic construct
  source 1..9: note = Seed: TVYEKLKPV
TAYEKLKPM

SEQ ID NO: 64963 - protein, 9 aa, synthetic construct
  source 1..9: note = Seed: TVYEKLKPV
TAYEKLKPV

SEQ ID NO: 64964 - protein, 9 aa, synthetic construct
  source 1..9: note = Seed: TVYEKLKPV
TAYEKLKPY

SEQ ID NO: 64965 - protein, 10 aa, synthetic construct
  source 1..10: note = Seed: TFYLTNDVSF
TAYLTNDVSF

SEQ ID NO: 64966 - protein, 10 aa, synthetic construct
  source 1..10: note = Seed: TFYLTNDVSF
TAYLTNDVSY

SEQ ID NO: 64967 - protein, 9 aa, synthetic construct
  source 1..9: note = Seed: TAYNGYLTS
TAYNGYLTA

SEQ ID NO: 64968 - protein, 9 aa, synthetic construct
  source 1..9: note = Seed: TAYNGYLTS
TAYNGYLTF

SEQ ID NO: 64969 - protein, 9 aa, synthetic construct
  source 1..9: note = Seed: TAYNGYLTS
TAYNGYLTI

SEQ ID NO: 64970 - protein, 9 aa, synthetic construct
  source 1..9: note = Seed: TAYNGYLTS
TAYNGYLTL

SEQ ID NO: 64971 - protein, 9 aa, synthetic construct
  source 1..9: note = Seed: TAYNGYLTS
TAYNGYLTM

SEQ ID NO: 64972 - protein, 9 aa, synthetic construct
  source 1..9: note = Seed: TAYNGYLTS
TAYNGYLTV

SEQ ID NO: 64973 - protein, 9 aa, synthetic construct
  source 1..9: note = Seed: TAYNGYLTS
TAYNGYLTY

SEQ ID NO: 64974 - protein, 10 aa, synthetic construct
  source 1..10: note = Seed: TKYTMADLVY
TAYTMADLVF

SEQ ID NO: 64975 - protein, 10 aa, synthetic construct
  source 1..10: note = Seed: TKYTMADLVY
TAYTMADLVY

SEQ ID NO: 64976 - protein, 11 aa, synthetic construct
  source 1..11: note = Seed: TKYTMADLVYA
TAYTMADLVYV

SEQ ID NO: 64977 - protein, 9 aa, synthetic construct
  source 1..9: note = Seed: TMADLVYAL
TCADLVYAV

SEQ ID NO: 64978 - protein, 9 aa, synthetic construct
  source 1..9: note = Seed: TMADLVYAL
TCADLVYAY

SEQ ID NO: 64979 - protein, 9 aa, synthetic construct
  source 1..9: note = Seed: TSAMQTMLF
TCAMQTMLW

SEQ ID NO: 64980 - protein, 10 aa, synthetic construct
  source 1..10: note = Seed: TSAVLQSGFR
TCAVLQSGFR

SEQ ID NO: 64981 - protein, 11 aa, synthetic construct
  source 1..11: note = Seed: TTAYANSVFNI
TCAYANSVFNF

SEQ ID NO: 64982 - protein, 11 aa, synthetic construct
  source 1..11: note = Seed: TTAYANSVFNI
TCAYANSVFNW

SEQ ID NO: 64983 - protein, 10 aa, synthetic construct
  source 1..10: note = Seed: TVAYFNMVYM
TCAYFNMVYK

SEQ ID NO: 64984 - protein, 10 aa, synthetic construct
  source 1..10: note = Seed: TVAYFNMVYM
TCAYFNMVYR

SEQ ID NO: 64985 - protein, 10 aa, synthetic construct
  source 1..10: note = Seed: TVAYFNMVYM
TCAYFNMVYV

SEQ ID NO: 64986 - protein, 11 aa, synthetic construct
  source 1..11: note = Seed: TIDYTEISFML
TCDYTEISFMF

SEQ ID NO: 64987 - protein, 9 aa, synthetic construct
  source 1..9: note = Seed: TSDYYQLYS
TCDYYQLYY

SEQ ID NO: 64988 - protein, 10 aa, synthetic construct
  source 1..10: note = Seed: TIEVNSFSGY
TCEVNSFSGW

SEQ ID NO: 64989 - protein, 9 aa, synthetic construct
  source 1..9: note = Seed: TCFSTQFAF
TCFSTQFAY

SEQ ID NO: 64990 - protein, 11 aa, synthetic construct
  source 1..11: note = Seed: TLGVYDYLVST
TCGVYDYLVSV

SEQ ID NO: 64991 - protein, 10 aa, synthetic construct
  source 1..10: note = Seed: TFLLNKEMYL
TCLLNKEMYI

SEQ ID NO: 64992 - protein, 10 aa, synthetic construct
  source 1..10: note = Seed: TFLLNKEMYL
TCLLNKEMYL

SEQ ID NO: 64993 - protein, 10 aa, synthetic construct
  source 1..10: note = Seed: TFLLNKEMYL
TCLLNKEMYV

SEQ ID NO: 64994 - protein, 10 aa, synthetic construct
  source 1..10: note = Seed: TLLLQLCTFT
TCLLQLCTFV

SEQ ID NO: 64995 - protein, 9 aa, synthetic construct
  source 1..9: note = Seed: TTLPVNVAF
TCLPVNVAW

SEQ ID NO: 64996 - protein, 9 aa, synthetic construct
  source 1..9: note = Seed: TTLPVNVAF
TCLPVNVAY

SEQ ID NO: 64997 - protein, 10 aa, synthetic construct
  source 1..10: note = Seed: TILTSLLVLV
TCLTSLLVLI

SEQ ID NO: 64998 - protein, 10 aa, synthetic construct
  source 1..10: note = Seed: TILTSLLVLV
TCLTSLLVLL

SEQ ID NO: 64999 - protein, 10 aa, synthetic construct
  source 1..10: note = Seed: TILTSLLVLV
TCLTSLLVLV

SEQ ID NO: 65000 - protein, 10 aa, synthetic construct
  source 1..10: note = Seed: TPLVPFWITI
TCLVPFWITV

SEQ ID NO: 65001 - protein, 10 aa, synthetic construct
  source 1..10: note = Seed: TQLYLGGMSY
TCLYLGGMSF

SEQ ID NO: 65002 - protein, 10 aa, synthetic construct
  source 1..10: note = Seed: TQLYLGGMSY
TCLYLGGMSK

SEQ ID NO: 65003 - protein, 10 aa, synthetic construct
  source 1..10: note = Seed: TQLYLGGMSY
TCLYLGGMSY

SEQ ID NO: 65004 - protein, 10 aa, synthetic construct
  source 1..10: note = Seed: TLMIERFVSL
TCMIERFVSA

SEQ ID NO: 65005 - protein, 10 aa, synthetic construct
  source 1..10: note = Seed: TLMIERFVSL
TCMIERFVSF

SEQ ID NO: 65006 - protein, 10 aa, synthetic construct
  source 1..10: note = Seed: TLMIERFVSL
TCMIERFVSI

SEQ ID NO: 65007 - protein, 10 aa, synthetic construct
  source 1..10: note = Seed: TLMIERFVSL
TCMIERFVSL

SEQ ID NO: 65008 - protein, 10 aa, synthetic construct
  source 1..10: note = Seed: TLMIERFVSL
TCMIERFVSV

SEQ ID NO: 65009 - protein, 10 aa, synthetic construct
  source 1..10: note = Seed: TLMIERFVSL
TCMIERFVSY

SEQ ID NO: 65010 - protein, 9 aa, synthetic construct
  source 1..9: note = Seed: TSNPTTFHL
TCNPTTFHW

SEQ ID NO: 65011 - protein, 10 aa, synthetic construct
  source 1..10: note = Seed: TLPVNVAFEL
TCPVNVAFEF

SEQ ID NO: 65012 - protein, 10 aa, synthetic construct
  source 1..10: note = Seed: TLPVNVAFEL
TCPVNVAFEW

SEQ ID NO: 65013 - protein, 10 aa, synthetic construct
  source 1..10: note = Seed: TLPVNVAFEL
TCPVNVAFEY

SEQ ID NO: 65014 - protein, 10 aa, synthetic construct
  source 1..10: note = Seed: TIQITISSFK
TCQITISSFK

SEQ ID NO: 65015 - protein, 10 aa, synthetic construct
  source 1..10: note = Seed: TIQITISSFK
TCQITISSFR

SEQ ID NO: 65016 - protein, 11 aa, synthetic construct
  source 1..11: note = Seed: TRQVVNVVTTK
TCQVVNVVTTR

SEQ ID NO: 65017 - protein, 10 aa, synthetic construct
  source 1..10: note = Seed: TTTIKPVTYK
TCTIKPVTYK

SEQ ID NO: 65018 - protein, 10 aa, synthetic construct
  source 1..10: note = Seed: TTTIKPVTYK
TCTIKPVTYR

SEQ ID NO: 65019 - protein, 10 aa, synthetic construct
  source 1..10: note = Seed: TITVNVLAWL
TCTVNVLAWA

SEQ ID NO: 65020 - protein, 10 aa, synthetic construct
  source 1..10: note = Seed: TITVNVLAWL
TCTVNVLAWI

SEQ ID NO: 65021 - protein, 10 aa, synthetic construct
  source 1..10: note = Seed: TITVNVLAWL
TCTVNVLAWV

SEQ ID NO: 65022 - protein, 10 aa, synthetic construct
  source 1..10: note = Seed: TNVLEGSVAY
TCVLEGSVAY

SEQ ID NO: 65023 - protein, 10 aa, synthetic construct
  source 1..10: note = Seed: TEVVGDIILK
TCVVGDIILK

SEQ ID NO: 65024 - protein, 10 aa, synthetic construct
  source 1..10: note = Seed: TEVVGDIILK
TCVVGDIILR

SEQ ID NO: 65025 - protein, 10 aa, synthetic construct
  source 1..10: note = Seed: TPVYSFLPGV
TCVYSFLPGV

SEQ ID NO: 65026 - protein, 10 aa, synthetic construct
  source 1..10: note = Seed: TAYANSVFNI
TCYANSVFNF

SEQ ID NO: 65027 - protein, 10 aa, synthetic construct
  source 1..10: note = Seed: TAYANSVFNI
TCYANSVFNI

SEQ ID NO: 65028 - protein, 10 aa, synthetic construct
  source 1..10: note = Seed: TAYANSVFNI
TCYANSVFNL

SEQ ID NO: 65029 - protein, 10 aa, synthetic construct
  source 1..10: note = Seed: TAYANSVFNI
TCYANSVFNW

SEQ ID NO: 65030 - protein, 10 aa, synthetic construct
  source 1..10: note = Seed: TFYLTNDVSF
TCYLTNDVSF

SEQ ID NO: 65031 - protein, 11 aa, synthetic construct
  source 1..11: note = Seed: TKYTMADLVYA
TCYTMADLVYV

SEQ ID NO: 65032 - protein, 10 aa, synthetic construct
  source 1..10: note = Seed: TSAVLQSGFR
TDAVLQSGFR

SEQ ID NO: 65033 - protein, 11 aa, synthetic construct
  source 1..11: note = Seed: TTAYANSVFNI
TDAYANSVFNF

SEQ ID NO: 65034 - protein, 11 aa, synthetic construct
  source 1..11: note = Seed: TTAYANSVFNI
TDAYANSVFNW

SEQ ID NO: 65035 - protein, 10 aa, synthetic construct
  source 1..10: note = Seed: TVAYFNMVYM
TDAYFNMVYK

SEQ ID NO: 65036 - protein, 10 aa, synthetic construct
  source 1..10: note = Seed: TVAYFNMVYM
TDAYFNMVYR

SEQ ID NO: 65037 - protein, 10 aa, synthetic construct
  source 1..10: note = Seed: TVAYFNMVYM
TDAYFNMVYV

SEQ ID NO: 65038 - protein, 11 aa, synthetic construct
  source 1..11: note = Seed: TIDYTEISFML
TDDYTEISFMF

SEQ ID NO: 65039 - protein, 10 aa, synthetic construct
  source 1..10: note = Seed: TIEVNSFSGY
TDEVNSFSGW

SEQ ID NO: 65040 - protein, 11 aa, synthetic construct
  source 1..11: note = Seed: TLGVYDYLVST
TDGVYDYLVSV

SEQ ID NO: 65041 - protein, 10 aa, synthetic construct
  source 1..10: note = Seed: TFLLNKEMYL
TDLLNKEMYI

SEQ ID NO: 65042 - protein, 10 aa, synthetic construct
  source 1..10: note = Seed: TFLLNKEMYL
TDLLNKEMYL

SEQ ID NO: 65043 - protein, 10 aa, synthetic construct
  source 1..10: note = Seed: TFLLNKEMYL
TDLLNKEMYV

SEQ ID NO: 65044 - protein, 10 aa, synthetic construct
  source 1..10: note = Seed: TLLLQLCTFT
TDLLQLCTFV

SEQ ID NO: 65045 - protein, 10 aa, synthetic construct
  source 1..10: note = Seed: TILTSLLVLV
TDLTSLLVLI

SEQ ID NO: 65046 - protein, 10 aa, synthetic construct
  source 1..10: note = Seed: TILTSLLVLV
TDLTSLLVLL

SEQ ID NO: 65047 - protein, 10 aa, synthetic construct
  source 1..10: note = Seed: TILTSLLVLV
TDLTSLLVLV

SEQ ID NO: 65048 - protein, 10 aa, synthetic construct
  source 1..10: note = Seed: TPLVPFWITI
TDLVPFWITV

SEQ ID NO: 65049 - protein, 10 aa, synthetic construct
  source 1..10: note = Seed: TQLYLGGMSY
TDLYLGGMSF

SEQ ID NO: 65050 - protein, 10 aa, synthetic construct
  source 1..10: note = Seed: TQLYLGGMSY
TDLYLGGMSK

SEQ ID NO: 65051 - protein, 10 aa, synthetic construct
  source 1..10: note = Seed: TQLYLGGMSY
TDLYLGGMSY

SEQ ID NO: 65052 - protein, 10 aa, synthetic construct
  source 1..10: note = Seed: TLMIERFVSL
TDMIERFVSA

SEQ ID NO: 65053 - protein, 10 aa, synthetic construct
  source 1..10: note = Seed: TLMIERFVSL
TDMIERFVSF

SEQ ID NO: 65054 - protein, 10 aa, synthetic construct
  source 1..10: note = Seed: TLMIERFVSL
TDMIERFVSI

SEQ ID NO: 65055 - protein, 10 aa, synthetic construct
  source 1..10: note = Seed: TLMIERFVSL
TDMIERFVSL

SEQ ID NO: 65056 - protein, 10 aa, synthetic construct
  source 1..10: note = Seed: TLMIERFVSL
TDMIERFVSV

SEQ ID NO: 65057 - protein, 10 aa, synthetic construct
  source 1..10: note = Seed: TLMIERFVSL
TDMIERFVSY

SEQ ID NO: 65058 - protein, 10 aa, synthetic construct
  source 1..10: note = Seed: TCMMCYKRNR
TDMMCYKRNR

SEQ ID NO: 65059 - protein, 10 aa, synthetic construct
  source 1..10: note = Seed: TLPVNVAFEL
TDPVNVAFEF

SEQ ID NO: 65060 - protein, 10 aa, synthetic construct
  source 1..10: note = Seed: TLPVNVAFEL
TDPVNVAFEW

SEQ ID NO: 65061 - protein, 10 aa, synthetic construct
  source 1..10: note = Seed: TLPVNVAFEL
TDPVNVAFEY

SEQ ID NO: 65062 - protein, 10 aa, synthetic construct
  source 1..10: note = Seed: TIQITISSFK
TDQITISSFK

SEQ ID NO: 65063 - protein, 11 aa, synthetic construct
  source 1..11: note = Seed: TRQVVNVVTTK
TDQVVNVVTTR

SEQ ID NO: 65064 - protein, 10 aa, synthetic construct
  source 1..10: note = Seed: TTTIKPVTYK
TDTIKPVTYK

SEQ ID NO: 65065 - protein, 10 aa, synthetic construct
  source 1..10: note = Seed: TTTIKPVTYK
TDTIKPVTYR

SEQ ID NO: 65066 - protein, 10 aa, synthetic construct
  source 1..10: note = Seed: TITVNVLAWL
TDTVNVLAWA

SEQ ID NO: 65067 - protein, 10 aa, synthetic construct
  source 1..10: note = Seed: TITVNVLAWL
TDTVNVLAWI

SEQ ID NO: 65068 - protein, 10 aa, synthetic construct
  source 1..10: note = Seed: TITVNVLAWL
TDTVNVLAWV

SEQ ID NO: 65069 - protein, 10 aa, synthetic construct
  source 1..10: note = Seed: TEVVGDIILK
TDVVGDIILK

SEQ ID NO: 65070 - protein, 10 aa, synthetic construct
  source 1..10: note = Seed: TEVVGDIILK
TDVVGDIILR

SEQ ID NO: 65071 - protein, 10 aa, synthetic construct
  source 1..10: note = Seed: TPVYSFLPGV
TDVYSFLPGV

SEQ ID NO: 65072 - protein, 10 aa, synthetic construct
  source 1..10: note = Seed: TAYANSVFNI
TDYANSVFNF

SEQ ID NO: 65073 - protein, 10 aa, synthetic construct
  source 1..10: note = Seed: TAYANSVFNI
TDYANSVFNI

SEQ ID NO: 65074 - protein, 10 aa, synthetic construct
  source 1..10: note = Seed: TAYANSVFNI
TDYANSVFNL

SEQ ID NO: 65075 - protein, 10 aa, synthetic construct
  source 1..10: note = Seed: TAYANSVFNI
TDYANSVFNW

SEQ ID NO: 65076 - protein, 10 aa, synthetic construct
  source 1..10: note = Seed: TFYLTNDVSF
TDYLTNDVSF

SEQ ID NO: 65077 - protein, 11 aa, synthetic construct
  source 1..11: note = Seed: TKYTMADLVYA
TDYTMADLVYV

SEQ ID NO: 65078 - protein, 10 aa, synthetic construct
  source 1..10: note = Seed: TSAVLQSGFR
TEAVLQSGFR

SEQ ID NO: 65079 - protein, 9 aa, synthetic construct
  source 1..9: note = Seed: TTAYANSVF
TEAYANSVF

SEQ ID NO: 65080 - protein, 11 aa, synthetic construct
  source 1..11: note = Seed: TTAYANSVFNI
TEAYANSVFNF

SEQ ID NO: 65081 - protein, 11 aa, synthetic construct
  source 1..11: note = Seed: TTAYANSVFNI
TEAYANSVFNW

SEQ ID NO: 65082 - protein, 9 aa, synthetic construct
  source 1..9: note = Seed: TTAYANSVF
TEAYANSVY

SEQ ID NO: 65083 - protein, 9 aa, synthetic construct
  source 1..9: note = Seed: TVAYFNMVY
TEAYFNMVF

SEQ ID NO: 65084 - protein, 9 aa, synthetic construct
  source 1..9: note = Seed: TVAYFNMVY
TEAYFNMVM

SEQ ID NO: 65085 - protein, 9 aa, synthetic construct
  source 1..9: note = Seed: TVAYFNMVY
TEAYFNMVY

SEQ ID NO: 65086 - protein, 10 aa, synthetic construct
  source 1..10: note = Seed: TVAYFNMVYM
TEAYFNMVYK

SEQ ID NO: 65087 - protein, 10 aa, synthetic construct
  source 1..10: note = Seed: TVAYFNMVYM
TEAYFNMVYR

SEQ ID NO: 65088 - protein, 10 aa, synthetic construct
  source 1..10: note = Seed: TVAYFNMVYM
TEAYFNMVYV

SEQ ID NO: 65089 - protein, 11 aa, synthetic construct
  source 1..11: note = Seed: TIDYTEISFML
TEDYTEISFMF

SEQ ID NO: 65090 - protein, 10 aa, synthetic construct
  source 1..10: note = Seed: TIEVNSFSGY
TEEVNSFSGW

SEQ ID NO: 65091 - protein, 9 aa, synthetic construct
  source 1..9: note = Seed: TRFASVYAW
TEFASVYAF

SEQ ID NO: 65092 - protein, 9 aa, synthetic construct
  source 1..9: note = Seed: TRFASVYAW
TEFASVYAM

SEQ ID NO: 65093 - protein, 9 aa, synthetic construct
  source 1..9: note = Seed: TRFASVYAW
TEFASVYAY

SEQ ID NO: 65094 - protein, 9 aa, synthetic construct
  source 1..9: note = Seed: TRFFYVLGL
TEFFYVLGF

SEQ ID NO: 65095 - protein, 9 aa, synthetic construct
  source 1..9: note = Seed: TRFFYVLGL
TEFFYVLGY

SEQ ID NO: 65096 - protein, 9 aa, synthetic construct
  source 1..9: note = Seed: TCFSTQFAF
TEFSTQFAF

SEQ ID NO: 65097 - protein, 9 aa, synthetic construct
  source 1..9: note = Seed: TCFSTQFAF
TEFSTQFAM

SEQ ID NO: 65098 - protein, 9 aa, synthetic construct
  source 1..9: note = Seed: TCFSTQFAF
TEFSTQFAY

SEQ ID NO: 65099 - protein, 11 aa, synthetic construct
  source 1..11: note = Seed: TLGVYDYLVST
TEGVYDYLVSV

SEQ ID NO: 65100 - protein, 10 aa, synthetic construct
  source 1..10: note = Seed: TEHSWNADLY
TEHSWNADLW

SEQ ID NO: 65101 - protein, 10 aa, synthetic construct
  source 1..10: note = Seed: TEIDPKLDNY
TEIDPKLDNW

SEQ ID NO: 65102 - protein, 10 aa, synthetic construct
  source 1..10: note = Seed: TFLLNKEMYL
TELLNKEMYI

SEQ ID NO: 65103 - protein, 10 aa, synthetic construct
  source 1..10: note = Seed: TFLLNKEMYL
TELLNKEMYL

SEQ ID NO: 65104 - protein, 10 aa, synthetic construct
  source 1..10: note = Seed: TFLLNKEMYL
TELLNKEMYV

SEQ ID NO: 65105 - protein, 10 aa, synthetic construct
  source 1..10: note = Seed: TLLLQLCTFT
TELLQLCTFV

SEQ ID NO: 65106 - protein, 10 aa, synthetic construct
  source 1..10: note = Seed: TILTSLLVLV
TELTSLLVLI

SEQ ID NO: 65107 - protein, 10 aa, synthetic construct
  source 1..10: note = Seed: TILTSLLVLV
TELTSLLVLL

SEQ ID NO: 65108 - protein, 10 aa, synthetic construct
  source 1..10: note = Seed: TILTSLLVLV
TELTSLLVLV

SEQ ID NO: 65109 - protein, 10 aa, synthetic construct
  source 1..10: note = Seed: TPLVPFWITI
TELVPFWITV

SEQ ID NO: 65110 - protein, 10 aa, synthetic construct
  source 1..10: note = Seed: TQLYLGGMSY
TELYLGGMSF

SEQ ID NO: 65111 - protein, 10 aa, synthetic construct
  source 1..10: note = Seed: TQLYLGGMSY
TELYLGGMSK

SEQ ID NO: 65112 - protein, 10 aa, synthetic construct
  source 1..10: note = Seed: TQLYLGGMSY
TELYLGGMSY

SEQ ID NO: 65113 - protein, 10 aa, synthetic construct
  source 1..10: note = Seed: TLMIERFVSL
TEMIERFVSA

SEQ ID NO: 65114 - protein, 10 aa, synthetic construct
  source 1..10: note = Seed: TLMIERFVSL
TEMIERFVSF

SEQ ID NO: 65115 - protein, 10 aa, synthetic construct
  source 1..10: note = Seed: TLMIERFVSL
TEMIERFVSI

SEQ ID NO: 65116 - protein, 10 aa, synthetic construct
  source 1..10: note = Seed: TLMIERFVSL
TEMIERFVSL

SEQ ID NO: 65117 - protein, 10 aa, synthetic construct
  source 1..10: note = Seed: TLMIERFVSL
TEMIERFVSV

SEQ ID NO: 65118 - protein, 10 aa, synthetic construct
  source 1..10: note = Seed: TLMIERFVSL
TEMIERFVSY

SEQ ID NO: 65119 - protein, 10 aa, synthetic construct
  source 1..10: note = Seed: TCMMCYKRNR
TEMMCYKRNR

SEQ ID NO: 65120 - protein, 9 aa, synthetic construct
  source 1..9: note = Seed: TQMNLKYAI
TEMNLKYAA

SEQ ID NO: 65121 - protein, 9 aa, synthetic construct
  source 1..9: note = Seed: TQMNLKYAI
TEMNLKYAF

SEQ ID NO: 65122 - protein, 9 aa, synthetic construct
  source 1..9: note = Seed: TQMNLKYAI
TEMNLKYAI

SEQ ID NO: 65123 - protein, 9 aa, synthetic construct
  source 1..9: note = Seed: TQMNLKYAI
TEMNLKYAL

SEQ ID NO: 65124 - protein, 9 aa, synthetic construct
  source 1..9: note = Seed: TQMNLKYAI
TEMNLKYAM

SEQ ID NO: 65125 - protein, 9 aa, synthetic construct
  source 1..9: note = Seed: TQMNLKYAI
TEMNLKYAV

SEQ ID NO: 65126 - protein, 10 aa, synthetic construct
  source 1..10: note = Seed: TENLLLYIDI
TENLLLYIDW

SEQ ID NO: 65127 - protein, 10 aa, synthetic construct
  source 1..10: note = Seed: TLPVNVAFEL
TEPVNVAFEF

SEQ ID NO: 65128 - protein, 10 aa, synthetic construct
  source 1..10: note = Seed: TLPVNVAFEL
TEPVNVAFEW

SEQ ID NO: 65129 - protein, 10 aa, synthetic construct
  source 1..10: note = Seed: TLPVNVAFEL
TEPVNVAFEY

SEQ ID NO: 65130 - protein, 10 aa, synthetic construct
  source 1..10: note = Seed: TIQITISSFK
TEQITISSFK

SEQ ID NO: 65131 - protein, 9 aa, synthetic construct
  source 1..9: note = Seed: TEQPIDLVP
TEQPIDLVA

SEQ ID NO: 65132 - protein, 11 aa, synthetic construct
  source 1..11: note = Seed: TRQVVNVVTTK
TEQVVNVVTTR

SEQ ID NO: 65133 - protein, 10 aa, synthetic construct
  source 1..10: note = Seed: TTTIKPVTYK
TETIKPVTYK

SEQ ID NO: 65134 - protein, 10 aa, synthetic construct
  source 1..10: note = Seed: TTTIKPVTYK
TETIKPVTYR

SEQ ID NO: 65135 - protein, 10 aa, synthetic construct
  source 1..10: note = Seed: TITVNVLAWL
TETVNVLAWA

SEQ ID NO: 65136 - protein, 10 aa, synthetic construct
  source 1..10: note = Seed: TITVNVLAWL
TETVNVLAWI

SEQ ID NO: 65137 - protein, 10 aa, synthetic construct
  source 1..10: note = Seed: TITVNVLAWL
TETVNVLAWL

SEQ ID NO: 65138 - protein, 10 aa, synthetic construct
  source 1..10: note = Seed: TITVNVLAWL
TETVNVLAWV

SEQ ID NO: 65139 - protein, 9 aa, synthetic construct
  source 1..9: note = Seed: TEVNEFACV
TEVNEFACA

SEQ ID NO: 65140 - protein, 9 aa, synthetic construct
  source 1..9: note = Seed: TEVNEFACV
TEVNEFACL

SEQ ID NO: 65141 - protein, 10 aa, synthetic construct
  source 1..10: note = Seed: TEVNEFACVV
TEVNEFACVA

SEQ ID NO: 65142 - protein, 10 aa, synthetic construct
  source 1..10: note = Seed: TEVNEFACVV
TEVNEFACVL

SEQ ID NO: 65143 - protein, 10 aa, synthetic construct
  source 1..10: note = Seed: TEVNEFACVV
TEVNEFACVM

SEQ ID NO: 65144 - protein, 10 aa, synthetic construct
  source 1..10: note = Seed: TEVVGDIILK
TEVVGDIILR

SEQ ID NO: 65145 - protein, 9 aa, synthetic construct
  source 1..9: note = Seed: TEVVGDIIL
TEVVGDIIM

SEQ ID NO: 65146 - protein, 10 aa, synthetic construct
  source 1..10: note = Seed: TPVYSFLPGV
TEVYSFLPGV

SEQ ID NO: 65147 - protein, 10 aa, synthetic construct
  source 1..10: note = Seed: TAYANSVFNI
TEYANSVFNF

SEQ ID NO: 65148 - protein, 10 aa, synthetic construct
  source 1..10: note = Seed: TAYANSVFNI
TEYANSVFNI

SEQ ID NO: 65149 - protein, 10 aa, synthetic construct
  source 1..10: note = Seed: TAYANSVFNI
TEYANSVFNL

SEQ ID NO: 65150 - protein, 10 aa, synthetic construct
  source 1..10: note = Seed: TAYANSVFNI
TEYANSVFNW

SEQ ID NO: 65151 - protein, 9 aa, synthetic construct
  source 1..9: note = Seed: TLYCIDGAL
TEYCIDGAF

SEQ ID NO: 65152 - protein, 9 aa, synthetic construct
  source 1..9: note = Seed: TLYCIDGAL
TEYCIDGAY

SEQ ID NO: 65153 - protein, 10 aa, synthetic construct
  source 1..10: note = Seed: TFYLTNDVSF
TEYLTNDVSF

SEQ ID NO: 65154 - protein, 10 aa, synthetic construct
  source 1..10: note = Seed: TKYTMADLVY
TEYTMADLVF

SEQ ID NO: 65155 - protein, 10 aa, synthetic construct
  source 1..10: note = Seed: TKYTMADLVY
TEYTMADLVY

SEQ ID NO: 65156 - protein, 11 aa, synthetic construct
  source 1..11: note = Seed: TKYTMADLVYA
TEYTMADLVYV

SEQ ID NO: 65157 - protein, 9 aa, synthetic construct
  source 1..9: note = Seed: TYACWHHSI
TFACWHHSF

SEQ ID NO: 65158 - protein, 9 aa, synthetic construct
  source 1..9: note = Seed: TYACWHHSI
TFACWHHSI

SEQ ID NO: 65159 - protein, 9 aa, synthetic construct
  source 1..9: note = Seed: TYACWHHSI
TFACWHHSL

SEQ ID NO: 65160 - protein, 9 aa, synthetic construct
  source 1..9: note = Seed: TYACWHHSI
TFACWHHSM

SEQ ID NO: 65161 - protein, 9 aa, synthetic construct
  source 1..9: note = Seed: TYACWHHSI
TFACWHHSV

SEQ ID NO: 65162 - protein, 9 aa, synthetic construct
  source 1..9: note = Seed: TYACWHHSI
TFACWHHSW

SEQ ID NO: 65163 - protein, 9 aa, synthetic construct
  source 1..9: note = Seed: TYACWHHSI
TFACWHHSY

SEQ ID NO: 65164 - protein, 9 aa, synthetic construct
  source 1..9: note = Seed: TMADLVYAL
TFADLVYAF

SEQ ID NO: 65165 - protein, 9 aa, synthetic construct
  source 1..9: note = Seed: TMADLVYAL
TFADLVYAI

SEQ ID NO: 65166 - protein, 9 aa, synthetic construct
  source 1..9: note = Seed: TMADLVYAL
TFADLVYAL

SEQ ID NO: 65167 - protein, 10 aa, synthetic construct
  source 1..10: note = Seed: TMADLVYALR
TFADLVYALK

SEQ ID NO: 65168 - protein, 10 aa, synthetic construct
  source 1..10: note = Seed: TMADLVYALR
TFADLVYALR

SEQ ID NO: 65169 - protein, 9 aa, synthetic construct
  source 1..9: note = Seed: TMADLVYAL
TFADLVYAM

SEQ ID NO: 65170 - protein, 9 aa, synthetic construct
  source 1..9: note = Seed: TMADLVYAL
TFADLVYAV

SEQ ID NO: 65171 - protein, 9 aa, synthetic construct
  source 1..9: note = Seed: TMADLVYAL
TFADLVYAY

SEQ ID NO: 65172 - protein, 10 aa, synthetic construct
  source 1..10: note = Seed: TEAFEKMVSL
TFAFEKMVSY

SEQ ID NO: 65173 - protein, 9 aa, synthetic construct
  source 1..9: note = Seed: TSAFVETVK
TFAFVETVR

SEQ ID NO: 65174 - protein, 10 aa, synthetic construct
  source 1..10: note = Seed: TSAVLQSGFR
TFAVLQSGFR

SEQ ID NO: 65175 - protein, 9 aa, synthetic construct
  source 1..9: note = Seed: TLAVPYNMR
TFAVPYNMR

SEQ ID NO: 65176 - protein, 9 aa, synthetic construct
  source 1..9: note = Seed: TTAYANSVF
TFAYANSVF

SEQ ID NO: 65177 - protein, 11 aa, synthetic construct
  source 1..11: note = Seed: TTAYANSVFNI
TFAYANSVFNF

SEQ ID NO: 65178 - protein, 11 aa, synthetic construct
  source 1..11: note = Seed: TTAYANSVFNI
TFAYANSVFNW

SEQ ID NO: 65179 - protein, 9 aa, synthetic construct
  source 1..9: note = Seed: TTAYANSVF
TFAYANSVI

SEQ ID NO: 65180 - protein, 9 aa, synthetic construct
  source 1..9: note = Seed: TTAYANSVF
TFAYANSVL

SEQ ID NO: 65181 - protein, 9 aa, synthetic construct
  source 1..9: note = Seed: TTAYANSVF
TFAYANSVM

SEQ ID NO: 65182 - protein, 9 aa, synthetic construct
  source 1..9: note = Seed: TTAYANSVF
TFAYANSVV

SEQ ID NO: 65183 - protein, 9 aa, synthetic construct
  source 1..9: note = Seed: TTAYANSVF
TFAYANSVY

SEQ ID NO: 65184 - protein, 9 aa, synthetic construct
  source 1..9: note = Seed: TVAYFNMVY
TFAYFNMVF

SEQ ID NO: 65185 - protein, 9 aa, synthetic construct
  source 1..9: note = Seed: TVAYFNMVY
TFAYFNMVK

SEQ ID NO: 65186 - protein, 9 aa, synthetic construct
  source 1..9: note = Seed: TVAYFNMVY
TFAYFNMVL

SEQ ID NO: 65187 - protein, 9 aa, synthetic construct
  source 1..9: note = Seed: TVAYFNMVY
TFAYFNMVM

SEQ ID NO: 65188 - protein, 9 aa, synthetic construct
  source 1..9: note = Seed: TVAYFNMVY
TFAYFNMVR

SEQ ID NO: 65189 - protein, 9 aa, synthetic construct
  source 1..9: note = Seed: TVAYFNMVY
TFAYFNMVY

SEQ ID NO: 65190 - protein, 10 aa, synthetic construct
  source 1..10: note = Seed: TVAYFNMVYM
TFAYFNMVYK

SEQ ID NO: 65191 - protein, 10 aa, synthetic construct
  source 1..10: note = Seed: TVAYFNMVYM
TFAYFNMVYR

SEQ ID NO: 65192 - protein, 10 aa, synthetic construct
  source 1..10: note = Seed: TVAYFNMVYM
TFAYFNMVYV

SEQ ID NO: 65193 - protein, 11 aa, synthetic construct
  source 1..11: note = Seed: TIDYTEISFML
TFDYTEISFMF

SEQ ID NO: 65194 - protein, 10 aa, synthetic construct
  source 1..10: note = Seed: TIEVNSFSGY
TFEVNSFSGW

SEQ ID NO: 65195 - protein, 10 aa, synthetic construct
  source 1..10: note = Seed: TIEVNSFSGY
TFEVNSFSGY

SEQ ID NO: 65196 - protein, 9 aa, synthetic construct
  source 1..9: note = Seed: TFEYVSQPF
TFEYVSQPL

SEQ ID NO: 65197 - protein, 9 aa, synthetic construct
  source 1..9: note = Seed: TFEYVSQPF
TFEYVSQPM

SEQ ID NO: 65198 - protein, 9 aa, synthetic construct
  source 1..9: note = Seed: TFEYVSQPF
TFEYVSQPY

SEQ ID NO: 65199 - protein, 9 aa, synthetic construct
  source 1..9: note = Seed: TRFASVYAW
TFFASVYAF

SEQ ID NO: 65200 - protein, 9 aa, synthetic construct
  source 1..9: note = Seed: TPFEIKLAK
TFFEIKLAR

SEQ ID NO: 65201 - protein, 9 aa, synthetic construct
  source 1..9: note = Seed: TFFIYNKIV
TFFIYNKIL

SEQ ID NO: 65202 - protein, 9 aa, synthetic construct
  source 1..9: note = Seed: TFFIYNKIV
TFFIYNKIM

SEQ ID NO: 65203 - protein, 10 aa, synthetic construct
  source 1..10: note = Seed: TWFSQRGGSY
TFFSQRGGSY

SEQ ID NO: 65204 - protein, 9 aa, synthetic construct
  source 1..9: note = Seed: TCFSTQFAF
TFFSTQFAF

SEQ ID NO: 65205 - protein, 9 aa, synthetic construct
  source 1..9: note = Seed: TCFSTQFAF
TFFSTQFAY

SEQ ID NO: 65206 - protein, 9 aa, synthetic construct
  source 1..9: note = Seed: TYFTQSRNL
TFFTQSRNF

SEQ ID NO: 65207 - protein, 9 aa, synthetic construct
  source 1..9: note = Seed: TYFTQSRNL
TFFTQSRNL

SEQ ID NO: 65208 - protein, 9 aa, synthetic construct
  source 1..9: note = Seed: TYFTQSRNL
TFFTQSRNM

SEQ ID NO: 65209 - protein, 9 aa, synthetic construct
  source 1..9: note = Seed: TYFTQSRNL
TFFTQSRNY

SEQ ID NO: 65210 - protein, 10 aa, synthetic construct
  source 1..10: note = Seed: TNGVGYQPYR
TFGVGYQPYR

SEQ ID NO: 65211 - protein, 11 aa, synthetic construct
  source 1..11: note = Seed: TLGVYDYLVST
TFGVYDYLVSV

SEQ ID NO: 65212 - protein, 9 aa, synthetic construct
  source 1..9: note = Seed: TAHSCNVNR
TFHSCNVNR

SEQ ID NO: 65213 - protein, 10 aa, synthetic construct
  source 1..10: note = Seed: TWICLLQFAY
TFICLLQFAY

SEQ ID NO: 65214 - protein, 10 aa, synthetic construct
  source 1..10: note = Seed: TTIKPVTYKL
TFIKPVTYKR

SEQ ID NO: 65215 - protein, 9 aa, synthetic construct
  source 1..9: note = Seed: TTIKPVTYK
TFIKPVTYR

SEQ ID NO: 65216 - protein, 10 aa, synthetic construct
  source 1..10: note = Seed: TNIVTRCLNR
TFIVTRCLNR

SEQ ID NO: 65217 - protein, 9 aa, synthetic construct
  source 1..9: note = Seed: TVKPGNFNK
TFKPGNFNK

SEQ ID NO: 65218 - protein, 9 aa, synthetic construct
  source 1..9: note = Seed: TVKPGNFNK
TFKPGNFNR

SEQ ID NO: 65219 - protein, 9 aa, synthetic construct
  source 1..9: note = Seed: TFKVSIWNL
TFKVSIWNF

SEQ ID NO: 65220 - protein, 10 aa, synthetic construct
  source 1..10: note = Seed: TGLFKDCSKV
TFLFKDCSKV

SEQ ID NO: 65221 - protein, 10 aa, synthetic construct
  source 1..10: note = Seed: TFLLNKEMYL
TFLLNKEMYA

SEQ ID NO: 65222 - protein, 10 aa, synthetic construct
  source 1..10: note = Seed: TFLLNKEMYL
TFLLNKEMYI

SEQ ID NO: 65223 - protein, 10 aa, synthetic construct
  source 1..10: note = Seed: TFLLNKEMYL
TFLLNKEMYM

SEQ ID NO: 65224 - protein, 10 aa, synthetic construct
  source 1..10: note = Seed: TFLLNKEMYL
TFLLNKEMYV

SEQ ID NO: 65225 - protein, 10 aa, synthetic construct
  source 1..10: note = Seed: TLLLQLCTFT
TFLLQLCTFV

SEQ ID NO: 65226 - protein, 9 aa, synthetic construct
  source 1..9: note = Seed: TSLSGFKLK
TFLSGFKLR

SEQ ID NO: 65227 - protein, 10 aa, synthetic construct
  source 1..10: note = Seed: TILTSLLVLV
TFLTSLLVLA

SEQ ID NO: 65228 - protein, 10 aa, synthetic construct
  source 1..10: note = Seed: TILTSLLVLV
TFLTSLLVLI

SEQ ID NO: 65229 - protein, 10 aa, synthetic construct
  source 1..10: note = Seed: TILTSLLVLV
TFLTSLLVLL

SEQ ID NO: 65230 - protein, 10 aa, synthetic construct
  source 1..10: note = Seed: TILTSLLVLV
TFLTSLLVLM

SEQ ID NO: 65231 - protein, 10 aa, synthetic construct
  source 1..10: note = Seed: TILTSLLVLV
TFLTSLLVLV

SEQ ID NO: 65232 - protein, 10 aa, synthetic construct
  source 1..10: note = Seed: TPLVPFWITI
TFLVPFWITV

SEQ ID NO: 65233 - protein, 10 aa, synthetic construct
  source 1..10: note = Seed: TQLYLGGMSY
TFLYLGGMSF

SEQ ID NO: 65234 - protein, 10 aa, synthetic construct
  source 1..10: note = Seed: TQLYLGGMSY
TFLYLGGMSK

SEQ ID NO: 65235 - protein, 10 aa, synthetic construct
  source 1..10: note = Seed: TQLYLGGMSY
TFLYLGGMSY

SEQ ID NO: 65236 - protein, 11 aa, synthetic construct
  source 1..11: note = Seed: TQLYLGGMSYY
TFLYLGGMSYY

SEQ ID NO: 65237 - protein, 10 aa, synthetic construct
  source 1..10: note = Seed: TLMIERFVSL
TFMIERFVSA

SEQ ID NO: 65238 - protein, 10 aa, synthetic construct
  source 1..10: note = Seed: TLMIERFVSL
TFMIERFVSF

SEQ ID NO: 65239 - protein, 10 aa, synthetic construct
  source 1..10: note = Seed: TLMIERFVSL
TFMIERFVSI

SEQ ID NO: 65240 - protein, 10 aa, synthetic construct
  source 1..10: note = Seed: TLMIERFVSL
TFMIERFVSL

SEQ ID NO: 65241 - protein, 11 aa, synthetic construct
  source 1..11: note = Seed: TLMIERFVSLA
TFMIERFVSLA

SEQ ID NO: 65242 - protein, 11 aa, synthetic construct
  source 1..11: note = Seed: TLMIERFVSLA
TFMIERFVSLL

SEQ ID NO: 65243 - protein, 11 aa, synthetic construct
  source 1..11: note = Seed: TLMIERFVSLA
TFMIERFVSLV

SEQ ID NO: 65244 - protein, 10 aa, synthetic construct
  source 1..10: note = Seed: TLMIERFVSL
TFMIERFVSM

SEQ ID NO: 65245 - protein, 10 aa, synthetic construct
  source 1..10: note = Seed: TLMIERFVSL
TFMIERFVST

SEQ ID NO: 65246 - protein, 10 aa, synthetic construct
  source 1..10: note = Seed: TLMIERFVSL
TFMIERFVSV

SEQ ID NO: 65247 - protein, 10 aa, synthetic construct
  source 1..10: note = Seed: TLMIERFVSL
TFMIERFVSY

SEQ ID NO: 65248 - protein, 10 aa, synthetic construct
  source 1..10: note = Seed: TCMMCYKRNR
TFMMCYKRNR

SEQ ID NO: 65249 - protein, 9 aa, synthetic construct
  source 1..9: note = Seed: TTNGDFLHF
TFNGDFLHF

SEQ ID NO: 65250 - protein, 9 aa, synthetic construct
  source 1..9: note = Seed: TVNVLAWLY
TFNVLAWLY

SEQ ID NO: 65251 - protein, 10 aa, synthetic construct
  source 1..10: note = Seed: TGNYQCGHYK
TFNYQCGHYK

SEQ ID NO: 65252 - protein, 10 aa, synthetic construct
  source 1..10: note = Seed: TGNYQCGHYK
TFNYQCGHYR

SEQ ID NO: 65253 - protein, 10 aa, synthetic construct
  source 1..10: note = Seed: TLPVNVAFEL
TFPVNVAFEF

SEQ ID NO: 65254 - protein, 11 aa, synthetic construct
  source 1..11: note = Seed: TLPVNVAFELW
TFPVNVAFELW

SEQ ID NO: 65255 - protein, 10 aa, synthetic construct
  source 1..10: note = Seed: TLPVNVAFEL
TFPVNVAFEM

SEQ ID NO: 65256 - protein, 10 aa, synthetic construct
  source 1..10: note = Seed: TLPVNVAFEL
TFPVNVAFEW

SEQ ID NO: 65257 - protein, 10 aa, synthetic construct
  source 1..10: note = Seed: TLPVNVAFEL
TFPVNVAFEY

SEQ ID NO: 65258 - protein, 10 aa, synthetic construct
  source 1..10: note = Seed: TLQAENVTGL
TFQAENVTGI

SEQ ID NO: 65259 - protein, 10 aa, synthetic construct
  source 1..10: note = Seed: TLQAENVTGL
TFQAENVTGL

SEQ ID NO: 65260 - protein, 10 aa, synthetic construct
  source 1..10: note = Seed: TLQAENVTGL
TFQAENVTGV

SEQ ID NO: 65261 - protein, 10 aa, synthetic construct
  source 1..10: note = Seed: TIQITISSFK
TFQITISSFK

SEQ ID NO: 65262 - protein, 10 aa, synthetic construct
  source 1..10: note = Seed: TIQITISSFK
TFQITISSFR

SEQ ID NO: 65263 - protein, 11 aa, synthetic construct
  source 1..11: note = Seed: TRQVVNVVTTK
TFQVVNVVTTR

SEQ ID NO: 65264 - protein, 9 aa, synthetic construct
  source 1..9: note = Seed: TVREVLSDR
TFREVLSDR

SEQ ID NO: 65265 - protein, 11 aa, synthetic construct
  source 1..11: note = Seed: TGRLQSLQTYV
TFRLQSLQTYV

SEQ ID NO: 65266 - protein, 9 aa, synthetic construct
  source 1..9: note = Seed: TTRQVVNVV
TFRQVVNVK

SEQ ID NO: 65267 - protein, 9 aa, synthetic construct
  source 1..9: note = Seed: TYRRLISMM
TFRRLISMK

SEQ ID NO: 65268 - protein, 9 aa, synthetic construct
  source 1..9: note = Seed: TISLAGSYK
TFSLAGSYR

SEQ ID NO: 65269 - protein, 9 aa, synthetic construct
  source 1..9: note = Seed: TGSNVFQTR
TFSNVFQTR

SEQ ID NO: 65270 - protein, 10 aa, synthetic construct
  source 1..10: note = Seed: TQSRNLQEFK
TFSRNLQEFR

SEQ ID NO: 65271 - protein, 10 aa, synthetic construct
  source 1..10: note = Seed: TTTIKPVTYK
TFTIKPVTYK

SEQ ID NO: 65272 - protein, 10 aa, synthetic construct
  source 1..10: note = Seed: TTTIKPVTYK
TFTIKPVTYR

SEQ ID NO: 65273 - protein, 10 aa, synthetic construct
  source 1..10: note = Seed: TMTNRQFHQK
TFTNRQFHQR

SEQ ID NO: 65274 - protein, 9 aa, synthetic construct
  source 1..9: note = Seed: TITQMNLKY
TFTQMNLKY

SEQ ID NO: 65275 - protein, 10 aa, synthetic construct
  source 1..10: note = Seed: TITVNVLAWL
TFTVNVLAWA

SEQ ID NO: 65276 - protein, 10 aa, synthetic construct
  source 1..10: note = Seed: TITVNVLAWL
TFTVNVLAWI

SEQ ID NO: 65277 - protein, 10 aa, synthetic construct
  source 1..10: note = Seed: TITVNVLAWL
TFTVNVLAWV

SEQ ID NO: 65278 - protein, 10 aa, synthetic construct
  source 1..10: note = Seed: TNVLEGSVAY
TFVLEGSVAY

SEQ ID NO: 65279 - protein, 10 aa, synthetic construct
  source 1..10: note = Seed: TLVSDIDITF
TFVSDIDITL

SEQ ID NO: 65280 - protein, 10 aa, synthetic construct
  source 1..10: note = Seed: TLVSDIDITF
TFVSDIDITV

SEQ ID NO: 65281 - protein, 10 aa, synthetic construct
  source 1..10: note = Seed: TEVVGDIILK
TFVVGDIILK

SEQ ID NO: 65282 - protein, 10 aa, synthetic construct
  source 1..10: note = Seed: TEVVGDIILK
TFVVGDIILR

SEQ ID NO: 65283 - protein, 10 aa, synthetic construct
  source 1..10: note = Seed: TPVYSFLPGV
TFVYSFLPGI

SEQ ID NO: 65284 - protein, 10 aa, synthetic construct
  source 1..10: note = Seed: TPVYSFLPGV
TFVYSFLPGL

SEQ ID NO: 65285 - protein, 10 aa, synthetic construct
  source 1..10: note = Seed: TPVYSFLPGV
TFVYSFLPGV

SEQ ID NO: 65286 - protein, 10 aa, synthetic construct
  source 1..10: note = Seed: TAYANSVFNI
TFYANSVFNF

SEQ ID NO: 65287 - protein, 10 aa, synthetic construct
  source 1..10: note = Seed: TAYANSVFNI
TFYANSVFNI

SEQ ID NO: 65288 - protein, 10 aa, synthetic construct
  source 1..10: note = Seed: TAYANSVFNI
TFYANSVFNL

SEQ ID NO: 65289 - protein, 10 aa, synthetic construct
  source 1..10: note = Seed: TAYANSVFNI
TFYANSVFNW

SEQ ID NO: 65290 - protein, 10 aa, synthetic construct
  source 1..10: note = Seed: TLYCIDGALL
TFYCIDGALF

SEQ ID NO: 65291 - protein, 11 aa, synthetic construct
  source 1..11: note = Seed: TFYLTNDVSFL
TFYLTNDVSFF

SEQ ID NO: 65292 - protein, 10 aa, synthetic construct
  source 1..10: note = Seed: TFYLTNDVSF
TFYLTNDVSM

SEQ ID NO: 65293 - protein, 10 aa, synthetic construct
  source 1..10: note = Seed: TFYLTNDVSF
TFYLTNDVSW

SEQ ID NO: 65294 - protein, 11 aa, synthetic construct
  source 1..11: note = Seed: TTYPGQGLNGY
TFYPGQGLNGY

SEQ ID NO: 65295 - protein, 10 aa, synthetic construct
  source 1..10: note = Seed: TKYTMADLVY
TFYTMADLVM

SEQ ID NO: 65296 - protein, 10 aa, synthetic construct
  source 1..10: note = Seed: TKYTMADLVY
TFYTMADLVY

SEQ ID NO: 65297 - protein, 11 aa, synthetic construct
  source 1..11: note = Seed: TKYTMADLVYA
TFYTMADLVYV

SEQ ID NO: 65298 - protein, 10 aa, synthetic construct
  source 1..10: note = Seed: TMADLVYALR
TGADLVYALR

SEQ ID NO: 65299 - protein, 9 aa, synthetic construct
  source 1..9: note = Seed: TMADLVYAL
TGADLVYAV

SEQ ID NO: 65300 - protein, 9 aa, synthetic construct
  source 1..9: note = Seed: TMADLVYAL
TGADLVYAY

SEQ ID NO: 65301 - protein, 9 aa, synthetic construct
  source 1..9: note = Seed: TSAMQTMLF
TGAMQTMLW

SEQ ID NO: 65302 - protein, 10 aa, synthetic construct
  source 1..10: note = Seed: TSAVLQSGFR
TGAVLQSGFR

SEQ ID NO: 65303 - protein, 11 aa, synthetic construct
  source 1..11: note = Seed: TTAYANSVFNI
TGAYANSVFNF

SEQ ID NO: 65304 - protein, 11 aa, synthetic construct
  source 1..11: note = Seed: TTAYANSVFNI
TGAYANSVFNW

SEQ ID NO: 65305 - protein, 9 aa, synthetic construct
  source 1..9: note = Seed: TVAYFNMVY
TGAYFNMVF

SEQ ID NO: 65306 - protein, 9 aa, synthetic construct
  source 1..9: note = Seed: TVAYFNMVY
TGAYFNMVR

SEQ ID NO: 65307 - protein, 9 aa, synthetic construct
  source 1..9: note = Seed: TVAYFNMVY
TGAYFNMVY

SEQ ID NO: 65308 - protein, 10 aa, synthetic construct
  source 1..10: note = Seed: TVAYFNMVYM
TGAYFNMVYK

SEQ ID NO: 65309 - protein, 10 aa, synthetic construct
  source 1..10: note = Seed: TVAYFNMVYM
TGAYFNMVYR

SEQ ID NO: 65310 - protein, 10 aa, synthetic construct
  source 1..10: note = Seed: TVAYFNMVYM
TGAYFNMVYV

SEQ ID NO: 65311 - protein, 11 aa, synthetic construct
  source 1..11: note = Seed: TIDYTEISFML
TGDYTEISFMF

SEQ ID NO: 65312 - protein, 9 aa, synthetic construct
  source 1..9: note = Seed: TSDYYQLYS
TGDYYQLYY

SEQ ID NO: 65313 - protein, 10 aa, synthetic construct
  source 1..10: note = Seed: TIEVNSFSGY
TGEVNSFSGW

SEQ ID NO: 65314 - protein, 9 aa, synthetic construct
  source 1..9: note = Seed: TRFASVYAW
TGFASVYAF

SEQ ID NO: 65315 - protein, 9 aa, synthetic construct
  source 1..9: note = Seed: TRFASVYAW
TGFASVYAY

SEQ ID NO: 65316 - protein, 9 aa, synthetic construct
  source 1..9: note = Seed: TCFSTQFAF
TGFSTQFAF

SEQ ID NO: 65317 - protein, 9 aa, synthetic construct
  source 1..9: note = Seed: TCFSTQFAF
TGFSTQFAW

SEQ ID NO: 65318 - protein, 9 aa, synthetic construct
  source 1..9: note = Seed: TCFSTQFAF
TGFSTQFAY

SEQ ID NO: 65319 - protein, 11 aa, synthetic construct
  source 1..11: note = Seed: TLGVYDYLVST
TGGVYDYLVSV

SEQ ID NO: 65320 - protein, 10 aa, synthetic construct
  source 1..10: note = Seed: TTIKPVTYKL
TGIKPVTYKR

SEQ ID NO: 65321 - protein, 10 aa, synthetic construct
  source 1..10: note = Seed: TFLLNKEMYL
TGLLNKEMYI

SEQ ID NO: 65322 - protein, 10 aa, synthetic construct
  source 1..10: note = Seed: TFLLNKEMYL
TGLLNKEMYL

SEQ ID NO: 65323 - protein, 10 aa, synthetic construct
  source 1..10: note = Seed: TFLLNKEMYL
TGLLNKEMYV

SEQ ID NO: 65324 - protein, 10 aa, synthetic construct
  source 1..10: note = Seed: TLLLQLCTFT
TGLLQLCTFV

SEQ ID NO: 65325 - protein, 9 aa, synthetic construct
  source 1..9: note = Seed: TTLPVNVAF
TGLPVNVAW

SEQ ID NO: 65326 - protein, 9 aa, synthetic construct
  source 1..9: note = Seed: TTLPVNVAF
TGLPVNVAY

SEQ ID NO: 65327 - protein, 10 aa, synthetic construct
  source 1..10: note = Seed: TILTSLLVLV
TGLTSLLVLI

SEQ ID NO: 65328 - protein, 10 aa, synthetic construct
  source 1..10: note = Seed: TILTSLLVLV
TGLTSLLVLL

SEQ ID NO: 65329 - protein, 10 aa, synthetic construct
  source 1..10: note = Seed: TILTSLLVLV
TGLTSLLVLV

SEQ ID NO: 65330 - protein, 10 aa, synthetic construct
  source 1..10: note = Seed: TPLVPFWITI
TGLVPFWITV

SEQ ID NO: 65331 - protein, 10 aa, synthetic construct
  source 1..10: note = Seed: TQLYLGGMSY
TGLYLGGMSF

SEQ ID NO: 65332 - protein, 10 aa, synthetic construct
  source 1..10: note = Seed: TQLYLGGMSY
TGLYLGGMSK

SEQ ID NO: 65333 - protein, 10 aa, synthetic construct
  source 1..10: note = Seed: TQLYLGGMSY
TGLYLGGMSY

SEQ ID NO: 65334 - protein, 10 aa, synthetic construct
  source 1..10: note = Seed: TLMIERFVSL
TGMIERFVSA

SEQ ID NO: 65335 - protein, 10 aa, synthetic construct
  source 1..10: note = Seed: TLMIERFVSL
TGMIERFVSF

SEQ ID NO: 65336 - protein, 10 aa, synthetic construct
  source 1..10: note = Seed: TLMIERFVSL
TGMIERFVSI

SEQ ID NO: 65337 - protein, 10 aa, synthetic construct
  source 1..10: note = Seed: TLMIERFVSL
TGMIERFVSL

SEQ ID NO: 65338 - protein, 10 aa, synthetic construct
  source 1..10: note = Seed: TLMIERFVSL
TGMIERFVSM

SEQ ID NO: 65339 - protein, 10 aa, synthetic construct
  source 1..10: note = Seed: TLMIERFVSL
TGMIERFVSV

SEQ ID NO: 65340 - protein, 10 aa, synthetic construct
  source 1..10: note = Seed: TLMIERFVSL
TGMIERFVSY

SEQ ID NO: 65341 - protein, 10 aa, synthetic construct
  source 1..10: note = Seed: TCMMCYKRNR
TGMMCYKRNR

SEQ ID NO: 65342 - protein, 9 aa, synthetic construct
  source 1..9: note = Seed: TSNPTTFHL
TGNPTTFHW

SEQ ID NO: 65343 - protein, 10 aa, synthetic construct
  source 1..10: note = Seed: TGNYQCGHYK
TGNYQCGHYR

SEQ ID NO: 65344 - protein, 10 aa, synthetic construct
  source 1..10: note = Seed: TLPVNVAFEL
TGPVNVAFEF

SEQ ID NO: 65345 - protein, 10 aa, synthetic construct
  source 1..10: note = Seed: TLPVNVAFEL
TGPVNVAFEW

SEQ ID NO: 65346 - protein, 10 aa, synthetic construct
  source 1..10: note = Seed: TLPVNVAFEL
TGPVNVAFEY

SEQ ID NO: 65347 - protein, 10 aa, synthetic construct
  source 1..10: note = Seed: TIQITISSFK
TGQITISSFK

SEQ ID NO: 65348 - protein, 10 aa, synthetic construct
  source 1..10: note = Seed: TIQITISSFK
TGQITISSFR

SEQ ID NO: 65349 - protein, 11 aa, synthetic construct
  source 1..11: note = Seed: TRQVVNVVTTK
TGQVVNVVTTR

SEQ ID NO: 65350 - protein, 9 aa, synthetic construct
  source 1..9: note = Seed: TYRRLISMM
TGRRLISMK

SEQ ID NO: 65351 - protein, 9 aa, synthetic construct
  source 1..9: note = Seed: TASWFTALT
TGSWFTALV

SEQ ID NO: 65352 - protein, 10 aa, synthetic construct
  source 1..10: note = Seed: TTTIKPVTYK
TGTIKPVTYK

SEQ ID NO: 65353 - protein, 10 aa, synthetic construct
  source 1..10: note = Seed: TTTIKPVTYK
TGTIKPVTYR

SEQ ID NO: 65354 - protein, 10 aa, synthetic construct
  source 1..10: note = Seed: TITVNVLAWL
TGTVNVLAWA

SEQ ID NO: 65355 - protein, 10 aa, synthetic construct
  source 1..10: note = Seed: TITVNVLAWL
TGTVNVLAWI

SEQ ID NO: 65356 - protein, 10 aa, synthetic construct
  source 1..10: note = Seed: TITVNVLAWL
TGTVNVLAWV

SEQ ID NO: 65357 - protein, 10 aa, synthetic construct
  source 1..10: note = Seed: TEVVGDIILK
TGVVGDIILK

SEQ ID NO: 65358 - protein, 10 aa, synthetic construct
  source 1..10: note = Seed: TEVVGDIILK
TGVVGDIILR

SEQ ID NO: 65359 - protein, 10 aa, synthetic construct
  source 1..10: note = Seed: TPVYSFLPGV
TGVYSFLPGV

SEQ ID NO: 65360 - protein, 10 aa, synthetic construct
  source 1..10: note = Seed: TAYANSVFNI
TGYANSVFNF

SEQ ID NO: 65361 - protein, 10 aa, synthetic construct
  source 1..10: note = Seed: TAYANSVFNI
TGYANSVFNI

SEQ ID NO: 65362 - protein, 10 aa, synthetic construct
  source 1..10: note = Seed: TAYANSVFNI
TGYANSVFNL

SEQ ID NO: 65363 - protein, 10 aa, synthetic construct
  source 1..10: note = Seed: TAYANSVFNI
TGYANSVFNW

SEQ ID NO: 65364 - protein, 10 aa, synthetic construct
  source 1..10: note = Seed: TFYLTNDVSF
TGYLTNDVSF

SEQ ID NO: 65365 - protein, 11 aa, synthetic construct
  source 1..11: note = Seed: TKYTMADLVYA
TGYTMADLVYV

SEQ ID NO: 65366 - protein, 9 aa, synthetic construct
  source 1..9: note = Seed: TMADLVYAL
THADLVYAA

SEQ ID NO: 65367 - protein, 9 aa, synthetic construct
  source 1..9: note = Seed: TMADLVYAL
THADLVYAF

SEQ ID NO: 65368 - protein, 9 aa, synthetic construct
  source 1..9: note = Seed: TMADLVYAL
THADLVYAI

SEQ ID NO: 65369 - protein, 9 aa, synthetic construct
  source 1..9: note = Seed: TMADLVYAL
THADLVYAL

SEQ ID NO: 65370 - protein, 9 aa, synthetic construct
  source 1..9: note = Seed: TMADLVYAL
THADLVYAM

SEQ ID NO: 65371 - protein, 9 aa, synthetic construct
  source 1..9: note = Seed: TMADLVYAL
THADLVYAV

SEQ ID NO: 65372 - protein, 9 aa, synthetic construct
  source 1..9: note = Seed: TSAMQTMLF
THAMQTMLF

SEQ ID NO: 65373 - protein, 9 aa, synthetic construct
  source 1..9: note = Seed: TSAMQTMLF
THAMQTMLY

SEQ ID NO: 65374 - protein, 10 aa, synthetic construct
  source 1..10: note = Seed: TSAVLQSGFR
THAVLQSGFR

SEQ ID NO: 65375 - protein, 9 aa, synthetic construct
  source 1..9: note = Seed: TTAYANSVF
THAYANSVF

SEQ ID NO: 65376 - protein, 11 aa, synthetic construct
  source 1..11: note = Seed: TTAYANSVFNI
THAYANSVFNF

SEQ ID NO: 65377 - protein, 11 aa, synthetic construct
  source 1..11: note = Seed: TTAYANSVFNI
THAYANSVFNW

SEQ ID NO: 65378 - protein, 9 aa, synthetic construct
  source 1..9: note = Seed: TTAYANSVF
THAYANSVM

SEQ ID NO: 65379 - protein, 9 aa, synthetic construct
  source 1..9: note = Seed: TTAYANSVF
THAYANSVY

SEQ ID NO: 65380 - protein, 9 aa, synthetic construct
  source 1..9: note = Seed: TVAYFNMVY
THAYFNMVF

SEQ ID NO: 65381 - protein, 9 aa, synthetic construct
  source 1..9: note = Seed: TVAYFNMVY
THAYFNMVM

SEQ ID NO: 65382 - protein, 9 aa, synthetic construct
  source 1..9: note = Seed: TVAYFNMVY
THAYFNMVY

SEQ ID NO: 65383 - protein, 10 aa, synthetic construct
  source 1..10: note = Seed: TVAYFNMVYM
THAYFNMVYK

SEQ ID NO: 65384 - protein, 10 aa, synthetic construct
  source 1..10: note = Seed: TVAYFNMVYM
THAYFNMVYR

SEQ ID NO: 65385 - protein, 10 aa, synthetic construct
  source 1..10: note = Seed: TVAYFNMVYM
THAYFNMVYV

SEQ ID NO: 65386 - protein, 11 aa, synthetic construct
  source 1..11: note = Seed: TIDYTEISFML
THDYTEISFMF

SEQ ID NO: 65387 - protein, 10 aa, synthetic construct
  source 1..10: note = Seed: TIEVNSFSGY
THEVNSFSGW

SEQ ID NO: 65388 - protein, 9 aa, synthetic construct
  source 1..9: note = Seed: TRFASVYAW
THFASVYAF

SEQ ID NO: 65389 - protein, 9 aa, synthetic construct
  source 1..9: note = Seed: TRFASVYAW
THFASVYAL

SEQ ID NO: 65390 - protein, 9 aa, synthetic construct
  source 1..9: note = Seed: TRFASVYAW
THFASVYAM

SEQ ID NO: 65391 - protein, 9 aa, synthetic construct
  source 1..9: note = Seed: TRFASVYAW
THFASVYAY

SEQ ID NO: 65392 - protein, 9 aa, synthetic construct
  source 1..9: note = Seed: TRFFYVLGL
THFFYVLGA

SEQ ID NO: 65393 - protein, 9 aa, synthetic construct
  source 1..9: note = Seed: TRFFYVLGL
THFFYVLGF

SEQ ID NO: 65394 - protein, 9 aa, synthetic construct
  source 1..9: note = Seed: TRFFYVLGL
THFFYVLGL

SEQ ID NO: 65395 - protein, 9 aa, synthetic construct
  source 1..9: note = Seed: TRFFYVLGL
THFFYVLGY

SEQ ID NO: 65396 - protein, 9 aa, synthetic construct
  source 1..9: note = Seed: TCFSTQFAF
THFSTQFAF

SEQ ID NO: 65397 - protein, 9 aa, synthetic construct
  source 1..9: note = Seed: TCFSTQFAF
THFSTQFAM

SEQ ID NO: 65398 - protein, 9 aa, synthetic construct
  source 1..9: note = Seed: TCFSTQFAF
THFSTQFAY

SEQ ID NO: 65399 - protein, 11 aa, synthetic construct
  source 1..11: note = Seed: TLGVYDYLVST
THGVYDYLVSV

SEQ ID NO: 65400 - protein, 10 aa, synthetic construct
  source 1..10: note = Seed: TGHMLDMYSV
THHMLDMYSL

SEQ ID NO: 65401 - protein, 9 aa, synthetic construct
  source 1..9: note = Seed: THHWLLLTI
THHWLLLTA

SEQ ID NO: 65402 - protein, 9 aa, synthetic construct
  source 1..9: note = Seed: THHWLLLTI
THHWLLLTL

SEQ ID NO: 65403 - protein, 9 aa, synthetic construct
  source 1..9: note = Seed: THHWLLLTI
THHWLLLTM

SEQ ID NO: 65404 - protein, 9 aa, synthetic construct
  source 1..9: note = Seed: TNILLNVPL
THILLNVPI

SEQ ID NO: 65405 - protein, 9 aa, synthetic construct
  source 1..9: note = Seed: TNILLNVPL
THILLNVPL

SEQ ID NO: 65406 - protein, 9 aa, synthetic construct
  source 1..9: note = Seed: TNILLNVPL
THILLNVPM

SEQ ID NO: 65407 - protein, 9 aa, synthetic construct
  source 1..9: note = Seed: TNILLNVPL
THILLNVPV

SEQ ID NO: 65408 - protein, 10 aa, synthetic construct
  source 1..10: note = Seed: TFLLNKEMYL
THLLNKEMYI

SEQ ID NO: 65409 - protein, 10 aa, synthetic construct
  source 1..10: note = Seed: TFLLNKEMYL
THLLNKEMYL

SEQ ID NO: 65410 - protein, 10 aa, synthetic construct
  source 1..10: note = Seed: TFLLNKEMYL
THLLNKEMYV

SEQ ID NO: 65411 - protein, 10 aa, synthetic construct
  source 1..10: note = Seed: TLLLQLCTFT
THLLQLCTFV

SEQ ID NO: 65412 - protein, 9 aa, synthetic construct
  source 1..9: note = Seed: TTLPVNVAF
THLPVNVAY

SEQ ID NO: 65413 - protein, 10 aa, synthetic construct
  source 1..10: note = Seed: TILTSLLVLV
THLTSLLVLI

SEQ ID NO: 65414 - protein, 10 aa, synthetic construct
  source 1..10: note = Seed: TILTSLLVLV
THLTSLLVLL

SEQ ID NO: 65415 - protein, 10 aa, synthetic construct
  source 1..10: note = Seed: TILTSLLVLV
THLTSLLVLV

SEQ ID NO: 65416 - protein, 10 aa, synthetic construct
  source 1..10: note = Seed: TPLVPFWITI
THLVPFWITV

SEQ ID NO: 65417 - protein, 10 aa, synthetic construct
  source 1..10: note = Seed: TQLYLGGMSY
THLYLGGMSF

SEQ ID NO: 65418 - protein, 10 aa, synthetic construct
  source 1..10: note = Seed: TQLYLGGMSY
THLYLGGMSK

SEQ ID NO: 65419 - protein, 10 aa, synthetic construct
  source 1..10: note = Seed: TQLYLGGMSY
THLYLGGMSM

SEQ ID NO: 65420 - protein, 10 aa, synthetic construct
  source 1..10: note = Seed: TQLYLGGMSY
THLYLGGMSY

SEQ ID NO: 65421 - protein, 10 aa, synthetic construct
  source 1..10: note = Seed: TLMIERFVSL
THMIERFVSA

SEQ ID NO: 65422 - protein, 10 aa, synthetic construct
  source 1..10: note = Seed: TLMIERFVSL
THMIERFVSF

SEQ ID NO: 65423 - protein, 10 aa, synthetic construct
  source 1..10: note = Seed: TLMIERFVSL
THMIERFVSI

SEQ ID NO: 65424 - protein, 10 aa, synthetic construct
  source 1..10: note = Seed: TLMIERFVSL
THMIERFVSL

SEQ ID NO: 65425 - protein, 10 aa, synthetic construct
  source 1..10: note = Seed: TLMIERFVSL
THMIERFVSV

SEQ ID NO: 65426 - protein, 10 aa, synthetic construct
  source 1..10: note = Seed: TLMIERFVSL
THMIERFVSY

SEQ ID NO: 65427 - protein, 10 aa, synthetic construct
  source 1..10: note = Seed: TCMMCYKRNR
THMMCYKRNR

SEQ ID NO: 65428 - protein, 9 aa, synthetic construct
  source 1..9: note = Seed: TQMNLKYAI
THMNLKYAA

SEQ ID NO: 65429 - protein, 9 aa, synthetic construct
  source 1..9: note = Seed: TQMNLKYAI
THMNLKYAF

SEQ ID NO: 65430 - protein, 9 aa, synthetic construct
  source 1..9: note = Seed: TQMNLKYAI
THMNLKYAI

SEQ ID NO: 65431 - protein, 9 aa, synthetic construct
  source 1..9: note = Seed: TQMNLKYAI
THMNLKYAL

SEQ ID NO: 65432 - protein, 9 aa, synthetic construct
  source 1..9: note = Seed: TQMNLKYAI
THMNLKYAM

SEQ ID NO: 65433 - protein, 9 aa, synthetic construct
  source 1..9: note = Seed: TQMNLKYAI
THMNLKYAV

SEQ ID NO: 65434 - protein, 9 aa, synthetic construct
  source 1..9: note = Seed: TQMNLKYAI
THMNLKYAY

SEQ ID NO: 65435 - protein, 10 aa, synthetic construct
  source 1..10: note = Seed: TLPVNVAFEL
THPVNVAFEF

SEQ ID NO: 65436 - protein, 10 aa, synthetic construct
  source 1..10: note = Seed: TLPVNVAFEL
THPVNVAFEM

SEQ ID NO: 65437 - protein, 10 aa, synthetic construct
  source 1..10: note = Seed: TLPVNVAFEL
THPVNVAFEW

SEQ ID NO: 65438 - protein, 10 aa, synthetic construct
  source 1..10: note = Seed: TLPVNVAFEL
THPVNVAFEY

SEQ ID NO: 65439 - protein, 9 aa, synthetic construct
  source 1..9: note = Seed: TIQITISSF
THQITISSF

SEQ ID NO: 65440 - protein, 10 aa, synthetic construct
  source 1..10: note = Seed: TIQITISSFK
THQITISSFK

SEQ ID NO: 65441 - protein, 10 aa, synthetic construct
  source 1..10: note = Seed: TIQITISSFK
THQITISSFR

SEQ ID NO: 65442 - protein, 9 aa, synthetic construct
  source 1..9: note = Seed: TIQITISSF
THQITISSY

SEQ ID NO: 65443 - protein, 11 aa, synthetic construct
  source 1..11: note = Seed: TRQVVNVVTTK
THQVVNVVTTR

SEQ ID NO: 65444 - protein, 10 aa, synthetic construct
  source 1..10: note = Seed: TTTIKPVTYK
THTIKPVTYK

SEQ ID NO: 65445 - protein, 10 aa, synthetic construct
  source 1..10: note = Seed: TTTIKPVTYK
THTIKPVTYR

SEQ ID NO: 65446 - protein, 10 aa, synthetic construct
  source 1..10: note = Seed: TITVNVLAWL
THTVNVLAWA

SEQ ID NO: 65447 - protein, 10 aa, synthetic construct
  source 1..10: note = Seed: TITVNVLAWL
THTVNVLAWI

SEQ ID NO: 65448 - protein, 10 aa, synthetic construct
  source 1..10: note = Seed: TITVNVLAWL
THTVNVLAWV

SEQ ID NO: 65449 - protein, 10 aa, synthetic construct
  source 1..10: note = Seed: TEVVGDIILK
THVVGDIILK

SEQ ID NO: 65450 - protein, 10 aa, synthetic construct
  source 1..10: note = Seed: TEVVGDIILK
THVVGDIILR

SEQ ID NO: 65451 - protein, 10 aa, synthetic construct
  source 1..10: note = Seed: TPVYSFLPGV
THVYSFLPGV

SEQ ID NO: 65452 - protein, 10 aa, synthetic construct
  source 1..10: note = Seed: TAYANSVFNI
THYANSVFNF

SEQ ID NO: 65453 - protein, 10 aa, synthetic construct
  source 1..10: note = Seed: TAYANSVFNI
THYANSVFNI

SEQ ID NO: 65454 - protein, 10 aa, synthetic construct
  source 1..10: note = Seed: TAYANSVFNI
THYANSVFNL

SEQ ID NO: 65455 - protein, 10 aa, synthetic construct
  source 1..10: note = Seed: TAYANSVFNI
THYANSVFNW

SEQ ID NO: 65456 - protein, 9 aa, synthetic construct
  source 1..9: note = Seed: TLYCIDGAL
THYCIDGAF

SEQ ID NO: 65457 - protein, 9 aa, synthetic construct
  source 1..9: note = Seed: TLYCIDGAL
THYCIDGAY

SEQ ID NO: 65458 - protein, 10 aa, synthetic construct
  source 1..10: note = Seed: TFYLTNDVSF
THYLTNDVSF

SEQ ID NO: 65459 - protein, 10 aa, synthetic construct
  source 1..10: note = Seed: TFYLTNDVSF
THYLTNDVSY

SEQ ID NO: 65460 - protein, 10 aa, synthetic construct
  source 1..10: note = Seed: TKYTMADLVY
THYTMADLVF

SEQ ID NO: 65461 - protein, 10 aa, synthetic construct
  source 1..10: note = Seed: TKYTMADLVY
THYTMADLVY

SEQ ID NO: 65462 - protein, 11 aa, synthetic construct
  source 1..11: note = Seed: TKYTMADLVYA
THYTMADLVYV

SEQ ID NO: 65463 - protein, 9 aa, synthetic construct
  source 1..9: note = Seed: TMADLVYAL
TIADLVYAA

SEQ ID NO: 65464 - protein, 9 aa, synthetic construct
  source 1..9: note = Seed: TMADLVYAL
TIADLVYAF

SEQ ID NO: 65465 - protein, 9 aa, synthetic construct
  source 1..9: note = Seed: TMADLVYAL
TIADLVYAI

SEQ ID NO: 65466 - protein, 9 aa, synthetic construct
  source 1..9: note = Seed: TMADLVYAL
TIADLVYAL

SEQ ID NO: 65467 - protein, 10 aa, synthetic construct
  source 1..10: note = Seed: TMADLVYALR
TIADLVYALI

SEQ ID NO: 65468 - protein, 10 aa, synthetic construct
  source 1..10: note = Seed: TMADLVYALR
TIADLVYALK

SEQ ID NO: 65469 - protein, 10 aa, synthetic construct
  source 1..10: note = Seed: TMADLVYALR
TIADLVYALL

SEQ ID NO: 65470 - protein, 10 aa, synthetic construct
  source 1..10: note = Seed: TMADLVYALR
TIADLVYALR

SEQ ID NO: 65471 - protein, 10 aa, synthetic construct
  source 1..10: note = Seed: TMADLVYALR
TIADLVYALV

SEQ ID NO: 65472 - protein, 9 aa, synthetic construct
  source 1..9: note = Seed: TMADLVYAL
TIADLVYAM

SEQ ID NO: 65473 - protein, 9 aa, synthetic construct
  source 1..9: note = Seed: TMADLVYAL
TIADLVYAV

SEQ ID NO: 65474 - protein, 9 aa, synthetic construct
  source 1..9: note = Seed: TMADLVYAL
TIADLVYAY

SEQ ID NO: 65475 - protein, 9 aa, synthetic construct
  source 1..9: note = Seed: TIAEILLII
TIAEILLIL

SEQ ID NO: 65476 - protein, 9 aa, synthetic construct
  source 1..9: note = Seed: TIAEILLII
TIAEILLIV

SEQ ID NO: 65477 - protein, 9 aa, synthetic construct
  source 1..9: note = Seed: TSAFVETVK
TIAFVETVK

SEQ ID NO: 65478 - protein, 9 aa, synthetic construct
  source 1..9: note = Seed: TSAFVETVK
TIAFVETVR

SEQ ID NO: 65479 - protein, 10 aa, synthetic construct
  source 1..10: note = Seed: TVAGVSICST
TIAGVSICSI

SEQ ID NO: 65480 - protein, 10 aa, synthetic construct
  source 1..10: note = Seed: TVAGVSICST
TIAGVSICSV

SEQ ID NO: 65481 - protein, 9 aa, synthetic construct
  source 1..9: note = Seed: TSAMQTMLF
TIAMQTMLW

SEQ ID NO: 65482 - protein, 9 aa, synthetic construct
  source 1..9: note = Seed: TVASLINTL
TIASLINTA

SEQ ID NO: 65483 - protein, 9 aa, synthetic construct
  source 1..9: note = Seed: TVASLINTL
TIASLINTI

SEQ ID NO: 65484 - protein, 9 aa, synthetic construct
  source 1..9: note = Seed: TVASLINTL
TIASLINTL

SEQ ID NO: 65485 - protein, 9 aa, synthetic construct
  source 1..9: note = Seed: TVASLINTL
TIASLINTV

SEQ ID NO: 65486 - protein, 10 aa, synthetic construct
  source 1..10: note = Seed: TSAVLQSGFR
TIAVLQSGFK

SEQ ID NO: 65487 - protein, 10 aa, synthetic construct
  source 1..10: note = Seed: TSAVLQSGFR
TIAVLQSGFR

SEQ ID NO: 65488 - protein, 9 aa, synthetic construct
  source 1..9: note = Seed: TLAVPYNMR
TIAVPYNMK

SEQ ID NO: 65489 - protein, 9 aa, synthetic construct
  source 1..9: note = Seed: TLAVPYNMR
TIAVPYNMR

SEQ ID NO: 65490 - protein, 9 aa, synthetic construct
  source 1..9: note = Seed: TTAYANSVF
TIAYANSVF

SEQ ID NO: 65491 - protein, 11 aa, synthetic construct
  source 1..11: note = Seed: TTAYANSVFNI
TIAYANSVFNF

SEQ ID NO: 65492 - protein, 11 aa, synthetic construct
  source 1..11: note = Seed: TTAYANSVFNI
TIAYANSVFNW

SEQ ID NO: 65493 - protein, 9 aa, synthetic construct
  source 1..9: note = Seed: TTAYANSVF
TIAYANSVW

SEQ ID NO: 65494 - protein, 9 aa, synthetic construct
  source 1..9: note = Seed: TTAYANSVF
TIAYANSVY

SEQ ID NO: 65495 - protein, 9 aa, synthetic construct
  source 1..9: note = Seed: TVAYFNMVY
TIAYFNMVF

SEQ ID NO: 65496 - protein, 9 aa, synthetic construct
  source 1..9: note = Seed: TVAYFNMVY
TIAYFNMVK

SEQ ID NO: 65497 - protein, 9 aa, synthetic construct
  source 1..9: note = Seed: TVAYFNMVY
TIAYFNMVR

SEQ ID NO: 65498 - protein, 9 aa, synthetic construct
  source 1..9: note = Seed: TVAYFNMVY
TIAYFNMVY

SEQ ID NO: 65499 - protein, 10 aa, synthetic construct
  source 1..10: note = Seed: TVAYFNMVYM
TIAYFNMVYA

SEQ ID NO: 65500 - protein, 10 aa, synthetic construct
  source 1..10: note = Seed: TVAYFNMVYM
TIAYFNMVYI

SEQ ID NO: 65501 - protein, 10 aa, synthetic construct
  source 1..10: note = Seed: TVAYFNMVYM
TIAYFNMVYK

SEQ ID NO: 65502 - protein, 10 aa, synthetic construct
  source 1..10: note = Seed: TVAYFNMVYM
TIAYFNMVYL

SEQ ID NO: 65503 - protein, 10 aa, synthetic construct
  source 1..10: note = Seed: TVAYFNMVYM
TIAYFNMVYR

SEQ ID NO: 65504 - protein, 10 aa, synthetic construct
  source 1..10: note = Seed: TVAYFNMVYM
TIAYFNMVYV

SEQ ID NO: 65505 - protein, 10 aa, synthetic construct
  source 1..10: note = Seed: TVAYFNMVYM
TIAYFNMVYY

SEQ ID NO: 65506 - protein, 11 aa, synthetic construct
  source 1..11: note = Seed: TIDYTEISFML
TIDYTEISFMF

SEQ ID NO: 65507 - protein, 9 aa, synthetic construct
  source 1..9: note = Seed: TSDYYQLYS
TIDYYQLYY

SEQ ID NO: 65508 - protein, 9 aa, synthetic construct
  source 1..9: note = Seed: TLEQYVFCT
TIEQYVFCV

SEQ ID NO: 65509 - protein, 10 aa, synthetic construct
  source 1..10: note = Seed: TIEVNSFSGY
TIEVNSFSGK

SEQ ID NO: 65510 - protein, 10 aa, synthetic construct
  source 1..10: note = Seed: TIEVNSFSGY
TIEVNSFSGW

SEQ ID NO: 65511 - protein, 9 aa, synthetic construct
  source 1..9: note = Seed: TRFASVYAW
TIFASVYAF

SEQ ID NO: 65512 - protein, 9 aa, synthetic construct
  source 1..9: note = Seed: TRFASVYAW
TIFASVYAM

SEQ ID NO: 65513 - protein, 9 aa, synthetic construct
  source 1..9: note = Seed: TRFASVYAW
TIFASVYAY

SEQ ID NO: 65514 - protein, 9 aa, synthetic construct
  source 1..9: note = Seed: TPFEIKLAK
TIFEIKLAK

SEQ ID NO: 65515 - protein, 10 aa, synthetic construct
  source 1..10: note = Seed: TPFEIKLAKK
TIFEIKLAKK

SEQ ID NO: 65516 - protein, 10 aa, synthetic construct
  source 1..10: note = Seed: TPFEIKLAKK
TIFEIKLAKR

SEQ ID NO: 65517 - protein, 9 aa, synthetic construct
  source 1..9: note = Seed: TPFEIKLAK
TIFEIKLAR

SEQ ID NO: 65518 - protein, 9 aa, synthetic construct
  source 1..9: note = Seed: TIFKDASGK
TIFKDASGR

SEQ ID NO: 65519 - protein, 9 aa, synthetic construct
  source 1..9: note = Seed: TQFNYYKKV
TIFNYYKKV

SEQ ID NO: 65520 - protein, 9 aa, synthetic construct
  source 1..9: note = Seed: TCFSTQFAF
TIFSTQFAF

SEQ ID NO: 65521 - protein, 9 aa, synthetic construct
  source 1..9: note = Seed: TCFSTQFAF
TIFSTQFAM

SEQ ID NO: 65522 - protein, 9 aa, synthetic construct
  source 1..9: note = Seed: TCFSTQFAF
TIFSTQFAW

SEQ ID NO: 65523 - protein, 9 aa, synthetic construct
  source 1..9: note = Seed: TCFSTQFAF
TIFSTQFAY

SEQ ID NO: 65524 - protein, 9 aa, synthetic construct
  source 1..9: note = Seed: TAFVTNVNA
TIFVTNVNV

SEQ ID NO: 65525 - protein, 10 aa, synthetic construct
  source 1..10: note = Seed: TNGVGYQPYR
TIGVGYQPYR

SEQ ID NO: 65526 - protein, 9 aa, synthetic construct
  source 1..9: note = Seed: TLGVYDYLV
TIGVYDYLV

SEQ ID NO: 65527 - protein, 11 aa, synthetic construct
  source 1..11: note = Seed: TLGVYDYLVST
TIGVYDYLVSV

SEQ ID NO: 65528 - protein, 9 aa, synthetic construct
  source 1..9: note = Seed: TAHSCNVNR
TIHSCNVNK

SEQ ID NO: 65529 - protein, 9 aa, synthetic construct
  source 1..9: note = Seed: TAHSCNVNR
TIHSCNVNR

SEQ ID NO: 65530 - protein, 9 aa, synthetic construct
  source 1..9: note = Seed: TPHTVLQAV
TIHTVLQAY

SEQ ID NO: 65531 - protein, 10 aa, synthetic construct
  source 1..10: note = Seed: TWICLLQFAY
TIICLLQFAY

SEQ ID NO: 65532 - protein, 9 aa, synthetic construct
  source 1..9: note = Seed: TTIKPVTYK
TIIKPVTYK

SEQ ID NO: 65533 - protein, 10 aa, synthetic construct
  source 1..10: note = Seed: TTIKPVTYKL
TIIKPVTYKK

SEQ ID NO: 65534 - protein, 10 aa, synthetic construct
  source 1..10: note = Seed: TTIKPVTYKL
TIIKPVTYKR

SEQ ID NO: 65535 - protein, 10 aa, synthetic construct
  source 1..10: note = Seed: TTIKPVTYKL
TIIKPVTYKV

SEQ ID NO: 65536 - protein, 9 aa, synthetic construct
  source 1..9: note = Seed: TTIKPVTYK
TIIKPVTYR

SEQ ID NO: 65537 - protein, 9 aa, synthetic construct
  source 1..9: note = Seed: TFISDEVAR
TIISDEVAR

SEQ ID NO: 65538 - protein, 10 aa, synthetic construct
  source 1..10: note = Seed: TNIVTRCLNR
TIIVTRCLNR

SEQ ID NO: 65539 - protein, 9 aa, synthetic construct
  source 1..9: note = Seed: TVKPGNFNK
TIKPGNFNK

SEQ ID NO: 65540 - protein, 9 aa, synthetic construct
  source 1..9: note = Seed: TVKPGNFNK
TIKPGNFNR

SEQ ID NO: 65541 - protein, 9 aa, synthetic construct
  source 1..9: note = Seed: TIKPVTYKL
TIKPVTYKV

SEQ ID NO: 65542 - protein, 10 aa, synthetic construct
  source 1..10: note = Seed: TFLLNKEMYL
TILLNKEMYI

SEQ ID NO: 65543 - protein, 10 aa, synthetic construct
  source 1..10: note = Seed: TFLLNKEMYL
TILLNKEMYL

SEQ ID NO: 65544 - protein, 10 aa, synthetic construct
  source 1..10: note = Seed: TFLLNKEMYL
TILLNKEMYV

SEQ ID NO: 65545 - protein, 10 aa, synthetic construct
  source 1..10: note = Seed: TLLLQLCTFT
TILLQLCTFV

SEQ ID NO: 65546 - protein, 9 aa, synthetic construct
  source 1..9: note = Seed: TTLPVNVAF
TILPVNVAF

SEQ ID NO: 65547 - protein, 9 aa, synthetic construct
  source 1..9: note = Seed: TTLPVNVAF
TILPVNVAW

SEQ ID NO: 65548 - protein, 9 aa, synthetic construct
  source 1..9: note = Seed: TTLPVNVAF
TILPVNVAY

SEQ ID NO: 65549 - protein, 9 aa, synthetic construct
  source 1..9: note = Seed: TSLSGFKLK
TILSGFKLK

SEQ ID NO: 65550 - protein, 9 aa, synthetic construct
  source 1..9: note = Seed: TSLSGFKLK
TILSGFKLR

SEQ ID NO: 65551 - protein, 10 aa, synthetic construct
  source 1..10: note = Seed: TILTSLLVLV
TILTSLLVLI

SEQ ID NO: 65552 - protein, 10 aa, synthetic construct
  source 1..10: note = Seed: TILTSLLVLV
TILTSLLVLL

SEQ ID NO: 65553 - protein, 9 aa, synthetic construct
  source 1..9: note = Seed: TILTSLLVL
TILTSLLVV

SEQ ID NO: 65554 - protein, 10 aa, synthetic construct
  source 1..10: note = Seed: TPLVPFWITI
TILVPFWITV

SEQ ID NO: 65555 - protein, 10 aa, synthetic construct
  source 1..10: note = Seed: TQLYLGGMSY
TILYLGGMSF

SEQ ID NO: 65556 - protein, 10 aa, synthetic construct
  source 1..10: note = Seed: TQLYLGGMSY
TILYLGGMSK

SEQ ID NO: 65557 - protein, 10 aa, synthetic construct
  source 1..10: note = Seed: TQLYLGGMSY
TILYLGGMSR

SEQ ID NO: 65558 - protein, 10 aa, synthetic construct
  source 1..10: note = Seed: TQLYLGGMSY
TILYLGGMSY

SEQ ID NO: 65559 - protein, 10 aa, synthetic construct
  source 1..10: note = Seed: TLMIERFVSL
TIMIERFVSA

SEQ ID NO: 65560 - protein, 10 aa, synthetic construct
  source 1..10: note = Seed: TLMIERFVSL
TIMIERFVSF

SEQ ID NO: 65561 - protein, 10 aa, synthetic construct
  source 1..10: note = Seed: TLMIERFVSL
TIMIERFVSI

SEQ ID NO: 65562 - protein, 10 aa, synthetic construct
  source 1..10: note = Seed: TLMIERFVSL
TIMIERFVSL

SEQ ID NO: 65563 - protein, 10 aa, synthetic construct
  source 1..10: note = Seed: TLMIERFVSL
TIMIERFVSM

SEQ ID NO: 65564 - protein, 10 aa, synthetic construct
  source 1..10: note = Seed: TLMIERFVSL
TIMIERFVSV

SEQ ID NO: 65565 - protein, 10 aa, synthetic construct
  source 1..10: note = Seed: TLMIERFVSL
TIMIERFVSY

SEQ ID NO: 65566 - protein, 9 aa, synthetic construct
  source 1..9: note = Seed: TSMKYFVKI
TIMKYFVKA

SEQ ID NO: 65567 - protein, 9 aa, synthetic construct
  source 1..9: note = Seed: TSMKYFVKI
TIMKYFVKI

SEQ ID NO: 65568 - protein, 9 aa, synthetic construct
  source 1..9: note = Seed: TSMKYFVKI
TIMKYFVKL

SEQ ID NO: 65569 - protein, 9 aa, synthetic construct
  source 1..9: note = Seed: TSMKYFVKI
TIMKYFVKV

SEQ ID NO: 65570 - protein, 10 aa, synthetic construct
  source 1..10: note = Seed: TCMMCYKRNR
TIMMCYKRNR

SEQ ID NO: 65571 - protein, 9 aa, synthetic construct
  source 1..9: note = Seed: TQMNLKYAI
TIMNLKYAF

SEQ ID NO: 65572 - protein, 9 aa, synthetic construct
  source 1..9: note = Seed: TQMNLKYAI
TIMNLKYAI

SEQ ID NO: 65573 - protein, 9 aa, synthetic construct
  source 1..9: note = Seed: TQMNLKYAI
TIMNLKYAL

SEQ ID NO: 65574 - protein, 9 aa, synthetic construct
  source 1..9: note = Seed: TQMNLKYAI
TIMNLKYAV

SEQ ID NO: 65575 - protein, 9 aa, synthetic construct
  source 1..9: note = Seed: TQMNLKYAI
TIMNLKYAW

SEQ ID NO: 65576 - protein, 9 aa, synthetic construct
  source 1..9: note = Seed: TQMNLKYAI
TIMNLKYAY

SEQ ID NO: 65577 - protein, 10 aa, synthetic construct
  source 1..10: note = Seed: TLNDFNLVAM
TINDFNLVAV

SEQ ID NO: 65578 - protein, 9 aa, synthetic construct
  source 1..9: note = Seed: TLNDFNLVA
TINDFNLVV

SEQ ID NO: 65579 - protein, 9 aa, synthetic construct
  source 1..9: note = Seed: TLNDLNETL
TINDLNETL

SEQ ID NO: 65580 - protein, 9 aa, synthetic construct
  source 1..9: note = Seed: TLNDLNETL
TINDLNETV

SEQ ID NO: 65581 - protein, 10 aa, synthetic construct
  source 1..10: note = Seed: TTNGDFLHFL
TINGDFLHFI

SEQ ID NO: 65582 - protein, 10 aa, synthetic construct
  source 1..10: note = Seed: TTNGDFLHFL
TINGDFLHFL

SEQ ID NO: 65583 - protein, 10 aa, synthetic construct
  source 1..10: note = Seed: TTNGDFLHFL
TINGDFLHFV

SEQ ID NO: 65584 - protein, 9 aa, synthetic construct
  source 1..9: note = Seed: TTNGDFLHF
TINGDFLHY

SEQ ID NO: 65585 - protein, 9 aa, synthetic construct
  source 1..9: note = Seed: TSNPTTFHL
TINPTTFHV

SEQ ID NO: 65586 - protein, 9 aa, synthetic construct
  source 1..9: note = Seed: TSNPTTFHL
TINPTTFHW

SEQ ID NO: 65587 - protein, 9 aa, synthetic construct
  source 1..9: note = Seed: TVNVLAWLY
TINVLAWLK

SEQ ID NO: 65588 - protein, 9 aa, synthetic construct
  source 1..9: note = Seed: TVNVLAWLY
TINVLAWLR

SEQ ID NO: 65589 - protein, 9 aa, synthetic construct
  source 1..9: note = Seed: TVNVLAWLY
TINVLAWLY

SEQ ID NO: 65590 - protein, 10 aa, synthetic construct
  source 1..10: note = Seed: TGNYQCGHYK
TINYQCGHYK

SEQ ID NO: 65591 - protein, 10 aa, synthetic construct
  source 1..10: note = Seed: TGNYQCGHYK
TINYQCGHYR

SEQ ID NO: 65592 - protein, 10 aa, synthetic construct
  source 1..10: note = Seed: TLPVNVAFEL
TIPVNVAFEF

SEQ ID NO: 65593 - protein, 10 aa, synthetic construct
  source 1..10: note = Seed: TLPVNVAFEL
TIPVNVAFEW

SEQ ID NO: 65594 - protein, 10 aa, synthetic construct
  source 1..10: note = Seed: TLPVNVAFEL
TIPVNVAFEY

SEQ ID NO: 65595 - protein, 10 aa, synthetic construct
  source 1..10: note = Seed: TLQAENVTGL
TIQAENVTGV

SEQ ID NO: 65596 - protein, 10 aa, synthetic construct
  source 1..10: note = Seed: TIQITISSFK
TIQITISSFR

SEQ ID NO: 65597 - protein, 9 aa, synthetic construct
  source 1..9: note = Seed: TIQITISSF
TIQITISSY

SEQ ID NO: 65598 - protein, 11 aa, synthetic construct
  source 1..11: note = Seed: TRQVVNVVTTK
TIQVVNVVTTR

SEQ ID NO: 65599 - protein, 9 aa, synthetic construct
  source 1..9: note = Seed: TVREVLSDR
TIREVLSDR

SEQ ID NO: 65600 - protein, 9 aa, synthetic construct
  source 1..9: note = Seed: TTRQVVNVV
TIRQVVNVK

SEQ ID NO: 65601 - protein, 9 aa, synthetic construct
  source 1..9: note = Seed: TYRRLISMM
TIRRLISMK

SEQ ID NO: 65602 - protein, 9 aa, synthetic construct
  source 1..9: note = Seed: TISLAGSYK
TISLAGSYR

SEQ ID NO: 65603 - protein, 9 aa, synthetic construct
  source 1..9: note = Seed: TGSNVFQTR
TISNVFQTK

SEQ ID NO: 65604 - protein, 9 aa, synthetic construct
  source 1..9: note = Seed: TGSNVFQTR
TISNVFQTR

SEQ ID NO: 65605 - protein, 10 aa, synthetic construct
  source 1..10: note = Seed: TQSRNLQEFK
TISRNLQEFK

SEQ ID NO: 65606 - protein, 10 aa, synthetic construct
  source 1..10: note = Seed: TQSRNLQEFK
TISRNLQEFR

SEQ ID NO: 65607 - protein, 9 aa, synthetic construct
  source 1..9: note = Seed: TASWFTALT
TISWFTALA

SEQ ID NO: 65608 - protein, 9 aa, synthetic construct
  source 1..9: note = Seed: TASWFTALT
TISWFTALI

SEQ ID NO: 65609 - protein, 9 aa, synthetic construct
  source 1..9: note = Seed: TASWFTALT
TISWFTALL

SEQ ID NO: 65610 - protein, 9 aa, synthetic construct
  source 1..9: note = Seed: TASWFTALT
TISWFTALM

SEQ ID NO: 65611 - protein, 9 aa, synthetic construct
  source 1..9: note = Seed: TASWFTALT
TISWFTALT

SEQ ID NO: 65612 - protein, 9 aa, synthetic construct
  source 1..9: note = Seed: TASWFTALT
TISWFTALV

SEQ ID NO: 65613 - protein, 9 aa, synthetic construct
  source 1..9: note = Seed: TLSYEQFKK
TISYEQFKK

SEQ ID NO: 65614 - protein, 9 aa, synthetic construct
  source 1..9: note = Seed: TLSYEQFKK
TISYEQFKR

SEQ ID NO: 65615 - protein, 10 aa, synthetic construct
  source 1..10: note = Seed: TTTIKPVTYK
TITIKPVTYK

SEQ ID NO: 65616 - protein, 10 aa, synthetic construct
  source 1..10: note = Seed: TTTIKPVTYK
TITIKPVTYR

SEQ ID NO: 65617 - protein, 10 aa, synthetic construct
  source 1..10: note = Seed: TITVNVLAWL
TITVNVLAWA

SEQ ID NO: 65618 - protein, 10 aa, synthetic construct
  source 1..10: note = Seed: TITVNVLAWL
TITVNVLAWI

SEQ ID NO: 65619 - protein, 10 aa, synthetic construct
  source 1..10: note = Seed: TITVNVLAWL
TITVNVLAWV

SEQ ID NO: 65620 - protein, 9 aa, synthetic construct
  source 1..9: note = Seed: TTVDNINLH
TIVDNINLF

SEQ ID NO: 65621 - protein, 9 aa, synthetic construct
  source 1..9: note = Seed: TTVDNINLH
TIVDNINLK

SEQ ID NO: 65622 - protein, 9 aa, synthetic construct
  source 1..9: note = Seed: TTVDNINLH
TIVDNINLM

SEQ ID NO: 65623 - protein, 9 aa, synthetic construct
  source 1..9: note = Seed: TTVDNINLH
TIVDNINLR

SEQ ID NO: 65624 - protein, 9 aa, synthetic construct
  source 1..9: note = Seed: TTVDNINLH
TIVDNINLY

SEQ ID NO: 65625 - protein, 10 aa, synthetic construct
  source 1..10: note = Seed: TNVLEGSVAY
TIVLEGSVAY

SEQ ID NO: 65626 - protein, 10 aa, synthetic construct
  source 1..10: note = Seed: TEVVGDIILK
TIVVGDIILK

SEQ ID NO: 65627 - protein, 10 aa, synthetic construct
  source 1..10: note = Seed: TEVVGDIILK
TIVVGDIILR

SEQ ID NO: 65628 - protein, 9 aa, synthetic construct
  source 1..9: note = Seed: TPVVQTIEV
TIVVQTIEY

SEQ ID NO: 65629 - protein, 9 aa, synthetic construct
  source 1..9: note = Seed: TNVYADSFV
TIVYADSFI

SEQ ID NO: 65630 - protein, 9 aa, synthetic construct
  source 1..9: note = Seed: TNVYADSFV
TIVYADSFV

SEQ ID NO: 65631 - protein, 11 aa, synthetic construct
  source 1..11: note = Seed: TNVYADSFVIR
TIVYADSFVIR

SEQ ID NO: 65632 - protein, 10 aa, synthetic construct
  source 1..10: note = Seed: TNVYADSFVI
TIVYADSFVV

SEQ ID NO: 65633 - protein, 9 aa, synthetic construct
  source 1..9: note = Seed: TPVYSFLPG
TIVYSFLPF

SEQ ID NO: 65634 - protein, 10 aa, synthetic construct
  source 1..10: note = Seed: TPVYSFLPGV
TIVYSFLPGI

SEQ ID NO: 65635 - protein, 10 aa, synthetic construct
  source 1..10: note = Seed: TPVYSFLPGV
TIVYSFLPGV

SEQ ID NO: 65636 - protein, 9 aa, synthetic construct
  source 1..9: note = Seed: TPVYSFLPG
TIVYSFLPY

SEQ ID NO: 65637 - protein, 10 aa, synthetic construct
  source 1..10: note = Seed: TAYANSVFNI
TIYANSVFNF

SEQ ID NO: 65638 - protein, 10 aa, synthetic construct
  source 1..10: note = Seed: TAYANSVFNI
TIYANSVFNI

SEQ ID NO: 65639 - protein, 10 aa, synthetic construct
  source 1..10: note = Seed: TAYANSVFNI
TIYANSVFNL

SEQ ID NO: 65640 - protein, 10 aa, synthetic construct
  source 1..10: note = Seed: TAYANSVFNI
TIYANSVFNV

SEQ ID NO: 65641 - protein, 10 aa, synthetic construct
  source 1..10: note = Seed: TAYANSVFNI
TIYANSVFNW

SEQ ID NO: 65642 - protein, 9 aa, synthetic construct
  source 1..9: note = Seed: TLYCIDGAL
TIYCIDGAF

SEQ ID NO: 65643 - protein, 9 aa, synthetic construct
  source 1..9: note = Seed: TLYCIDGAL
TIYCIDGAY

SEQ ID NO: 65644 - protein, 11 aa, synthetic construct
  source 1..11: note = Seed: TNYDLSVVNAR
TIYDLSVVNAR

SEQ ID NO: 65645 - protein, 9 aa, synthetic construct
  source 1..9: note = Seed: TVYEKLKPV
TIYEKLKPA

SEQ ID NO: 65646 - protein, 9 aa, synthetic construct
  source 1..9: note = Seed: TVYEKLKPV
TIYEKLKPI

SEQ ID NO: 65647 - protein, 9 aa, synthetic construct
  source 1..9: note = Seed: TVYEKLKPV
TIYEKLKPL

SEQ ID NO: 65648 - protein, 9 aa, synthetic construct
  source 1..9: note = Seed: TVYEKLKPV
TIYEKLKPV

SEQ ID NO: 65649 - protein, 10 aa, synthetic construct
  source 1..10: note = Seed: TVYEKLKPVL
TIYEKLKPVV

SEQ ID NO: 65650 - protein, 10 aa, synthetic construct
  source 1..10: note = Seed: TFYLTNDVSF
TIYLTNDVSF

SEQ ID NO: 65651 - protein, 10 aa, synthetic construct
  source 1..10: note = Seed: TFYLTNDVSF
TIYLTNDVSY

SEQ ID NO: 65652 - protein, 10 aa, synthetic construct
  source 1..10: note = Seed: TKYTMADLVY
TIYTMADLVF

SEQ ID NO: 65653 - protein, 10 aa, synthetic construct
  source 1..10: note = Seed: TKYTMADLVY
TIYTMADLVY

SEQ ID NO: 65654 - protein, 11 aa, synthetic construct
  source 1..11: note = Seed: TKYTMADLVYA
TIYTMADLVYV

SEQ ID NO: 65655 - protein, 9 aa, synthetic construct
  source 1..9: note = Seed: TMADLVYAL
TKADLVYAF

SEQ ID NO: 65656 - protein, 9 aa, synthetic construct
  source 1..9: note = Seed: TMADLVYAL
TKADLVYAL

SEQ ID NO: 65657 - protein, 9 aa, synthetic construct
  source 1..9: note = Seed: TMADLVYAL
TKADLVYAM

SEQ ID NO: 65658 - protein, 9 aa, synthetic construct
  source 1..9: note = Seed: TMADLVYAL
TKADLVYAY

SEQ ID NO: 65659 - protein, 9 aa, synthetic construct
  source 1..9: note = Seed: TSAMQTMLF
TKAMQTMLF

SEQ ID NO: 65660 - protein, 9 aa, synthetic construct
  source 1..9: note = Seed: TSAMQTMLF
TKAMQTMLM

SEQ ID NO: 65661 - protein, 9 aa, synthetic construct
  source 1..9: note = Seed: TSAMQTMLF
TKAMQTMLY

SEQ ID NO: 65662 - protein, 9 aa, synthetic construct
  source 1..9: note = Seed: TSAVLQSGF
TKAVLQSGF

SEQ ID NO: 65663 - protein, 10 aa, synthetic construct
  source 1..10: note = Seed: TSAVLQSGFR
TKAVLQSGFR

SEQ ID NO: 65664 - protein, 9 aa, synthetic construct
  source 1..9: note = Seed: TSAVLQSGF
TKAVLQSGY

SEQ ID NO: 65665 - protein, 9 aa, synthetic construct
  source 1..9: note = Seed: TTAYANSVF
TKAYANSVF

SEQ ID NO: 65666 - protein, 11 aa, synthetic construct
  source 1..11: note = Seed: TTAYANSVFNI
TKAYANSVFNF

SEQ ID NO: 65667 - protein, 11 aa, synthetic construct
  source 1..11: note = Seed: TTAYANSVFNI
TKAYANSVFNW

SEQ ID NO: 65668 - protein, 9 aa, synthetic construct
  source 1..9: note = Seed: TTAYANSVF
TKAYANSVL

SEQ ID NO: 65669 - protein, 9 aa, synthetic construct
  source 1..9: note = Seed: TTAYANSVF
TKAYANSVM

SEQ ID NO: 65670 - protein, 9 aa, synthetic construct
  source 1..9: note = Seed: TTAYANSVF
TKAYANSVY

SEQ ID NO: 65671 - protein, 9 aa, synthetic construct
  source 1..9: note = Seed: TVAYFNMVY
TKAYFNMVF

SEQ ID NO: 65672 - protein, 9 aa, synthetic construct
  source 1..9: note = Seed: TVAYFNMVY
TKAYFNMVI

SEQ ID NO: 65673 - protein, 9 aa, synthetic construct
  source 1..9: note = Seed: TVAYFNMVY
TKAYFNMVL

SEQ ID NO: 65674 - protein, 9 aa, synthetic construct
  source 1..9: note = Seed: TVAYFNMVY
TKAYFNMVM

SEQ ID NO: 65675 - protein, 9 aa, synthetic construct
  source 1..9: note = Seed: TVAYFNMVY
TKAYFNMVY

SEQ ID NO: 65676 - protein, 10 aa, synthetic construct
  source 1..10: note = Seed: TVAYFNMVYM
TKAYFNMVYK

SEQ ID NO: 65677 - protein, 10 aa, synthetic construct
  source 1..10: note = Seed: TVAYFNMVYM
TKAYFNMVYR

SEQ ID NO: 65678 - protein, 10 aa, synthetic construct
  source 1..10: note = Seed: TVAYFNMVYM
TKAYFNMVYV

SEQ ID NO: 65679 - protein, 11 aa, synthetic construct
  source 1..11: note = Seed: TIDYTEISFML
TKDYTEISFMF

SEQ ID NO: 65680 - protein, 10 aa, synthetic construct
  source 1..10: note = Seed: TIEVNSFSGY
TKEVNSFSGW

SEQ ID NO: 65681 - protein, 9 aa, synthetic construct
  source 1..9: note = Seed: TFEYVSQPF
TKEYVSQPF

SEQ ID NO: 65682 - protein, 9 aa, synthetic construct
  source 1..9: note = Seed: TFEYVSQPF
TKEYVSQPY

SEQ ID NO: 65683 - protein, 9 aa, synthetic construct
  source 1..9: note = Seed: TRFASVYAW
TKFASVYAF

SEQ ID NO: 65684 - protein, 9 aa, synthetic construct
  source 1..9: note = Seed: TRFASVYAW
TKFASVYAI

SEQ ID NO: 65685 - protein, 9 aa, synthetic construct
  source 1..9: note = Seed: TRFASVYAW
TKFASVYAL

SEQ ID NO: 65686 - protein, 9 aa, synthetic construct
  source 1..9: note = Seed: TRFASVYAW
TKFASVYAM

SEQ ID NO: 65687 - protein, 9 aa, synthetic construct
  source 1..9: note = Seed: TRFASVYAW
TKFASVYAY

SEQ ID NO: 65688 - protein, 9 aa, synthetic construct
  source 1..9: note = Seed: TRFFYVLGL
TKFFYVLGF

SEQ ID NO: 65689 - protein, 9 aa, synthetic construct
  source 1..9: note = Seed: TRFFYVLGL
TKFFYVLGL

SEQ ID NO: 65690 - protein, 9 aa, synthetic construct
  source 1..9: note = Seed: TRFFYVLGL
TKFFYVLGM

SEQ ID NO: 65691 - protein, 9 aa, synthetic construct
  source 1..9: note = Seed: TRFFYVLGL
TKFFYVLGY

SEQ ID NO: 65692 - protein, 9 aa, synthetic construct
  source 1..9: note = Seed: TQFNYYKKV
TKFNYYKKF

SEQ ID NO: 65693 - protein, 9 aa, synthetic construct
  source 1..9: note = Seed: TQFNYYKKV
TKFNYYKKY

SEQ ID NO: 65694 - protein, 9 aa, synthetic construct
  source 1..9: note = Seed: TCFSTQFAF
TKFSTQFAF

SEQ ID NO: 65695 - protein, 9 aa, synthetic construct
  source 1..9: note = Seed: TCFSTQFAF
TKFSTQFAI

SEQ ID NO: 65696 - protein, 9 aa, synthetic construct
  source 1..9: note = Seed: TCFSTQFAF
TKFSTQFAL

SEQ ID NO: 65697 - protein, 9 aa, synthetic construct
  source 1..9: note = Seed: TCFSTQFAF
TKFSTQFAM

SEQ ID NO: 65698 - protein, 9 aa, synthetic construct
  source 1..9: note = Seed: TCFSTQFAF
TKFSTQFAY

SEQ ID NO: 65699 - protein, 11 aa, synthetic construct
  source 1..11: note = Seed: TLGVYDYLVST
TKGVYDYLVSV

SEQ ID NO: 65700 - protein, 9 aa, synthetic construct
  source 1..9: note = Seed: TNILLNVPL
TKILLNVPL

SEQ ID NO: 65701 - protein, 10 aa, synthetic construct
  source 1..10: note = Seed: TLIVNSVLLF
TKIVNSVLLF

SEQ ID NO: 65702 - protein, 10 aa, synthetic construct
  source 1..10: note = Seed: TLIVNSVLLF
TKIVNSVLLY

SEQ ID NO: 65703 - protein, 10 aa, synthetic construct
  source 1..10: note = Seed: TNLCPFGEVF
TKLCPFGEVF

SEQ ID NO: 65704 - protein, 10 aa, synthetic construct
  source 1..10: note = Seed: TNLCPFGEVF
TKLCPFGEVY

SEQ ID NO: 65705 - protein, 10 aa, synthetic construct
  source 1..10: note = Seed: TFLLNKEMYL
TKLLNKEMYI

SEQ ID NO: 65706 - protein, 10 aa, synthetic construct
  source 1..10: note = Seed: TFLLNKEMYL
TKLLNKEMYL

SEQ ID NO: 65707 - protein, 10 aa, synthetic construct
  source 1..10: note = Seed: TFLLNKEMYL
TKLLNKEMYV

SEQ ID NO: 65708 - protein, 9 aa, synthetic construct
  source 1..9: note = Seed: TLLLQLCTF
TKLLQLCTF

SEQ ID NO: 65709 - protein, 10 aa, synthetic construct
  source 1..10: note = Seed: TLLLQLCTFT
TKLLQLCTFV

SEQ ID NO: 65710 - protein, 9 aa, synthetic construct
  source 1..9: note = Seed: TLLLQLCTF
TKLLQLCTM

SEQ ID NO: 65711 - protein, 9 aa, synthetic construct
  source 1..9: note = Seed: TLLLQLCTF
TKLLQLCTY

SEQ ID NO: 65712 - protein, 9 aa, synthetic construct
  source 1..9: note = Seed: TTLPVNVAF
TKLPVNVAF

SEQ ID NO: 65713 - protein, 9 aa, synthetic construct
  source 1..9: note = Seed: TTLPVNVAF
TKLPVNVAM

SEQ ID NO: 65714 - protein, 9 aa, synthetic construct
  source 1..9: note = Seed: TTLPVNVAF
TKLPVNVAY

SEQ ID NO: 65715 - protein, 10 aa, synthetic construct
  source 1..10: note = Seed: TILTSLLVLV
TKLTSLLVLI

SEQ ID NO: 65716 - protein, 10 aa, synthetic construct
  source 1..10: note = Seed: TILTSLLVLV
TKLTSLLVLL

SEQ ID NO: 65717 - protein, 10 aa, synthetic construct
  source 1..10: note = Seed: TILTSLLVLV
TKLTSLLVLV

SEQ ID NO: 65718 - protein, 10 aa, synthetic construct
  source 1..10: note = Seed: TPLVPFWITI
TKLVPFWITV

SEQ ID NO: 65719 - protein, 10 aa, synthetic construct
  source 1..10: note = Seed: TQLYLGGMSY
TKLYLGGMSF

SEQ ID NO: 65720 - protein, 10 aa, synthetic construct
  source 1..10: note = Seed: TQLYLGGMSY
TKLYLGGMSK

SEQ ID NO: 65721 - protein, 10 aa, synthetic construct
  source 1..10: note = Seed: TQLYLGGMSY
TKLYLGGMSM

SEQ ID NO: 65722 - protein, 10 aa, synthetic construct
  source 1..10: note = Seed: TQLYLGGMSY
TKLYLGGMSY

SEQ ID NO: 65723 - protein, 10 aa, synthetic construct
  source 1..10: note = Seed: TLMIERFVSL
TKMIERFVSA

SEQ ID NO: 65724 - protein, 10 aa, synthetic construct
  source 1..10: note = Seed: TLMIERFVSL
TKMIERFVSF

SEQ ID NO: 65725 - protein, 10 aa, synthetic construct
  source 1..10: note = Seed: TLMIERFVSL
TKMIERFVSI

SEQ ID NO: 65726 - protein, 10 aa, synthetic construct
  source 1..10: note = Seed: TLMIERFVSL
TKMIERFVSL

SEQ ID NO: 65727 - protein, 11 aa, synthetic construct
  source 1..11: note = Seed: TLMIERFVSLA
TKMIERFVSLV

SEQ ID NO: 65728 - protein, 10 aa, synthetic construct
  source 1..10: note = Seed: TLMIERFVSL
TKMIERFVSM

SEQ ID NO: 65729 - protein, 10 aa, synthetic construct
  source 1..10: note = Seed: TLMIERFVSL
TKMIERFVSV

SEQ ID NO: 65730 - protein, 10 aa, synthetic construct
  source 1..10: note = Seed: TLMIERFVSL
TKMIERFVSY

SEQ ID NO: 65731 - protein, 10 aa, synthetic construct
  source 1..10: note = Seed: TCMMCYKRNR
TKMMCYKRNR

SEQ ID NO: 65732 - protein, 9 aa, synthetic construct
  source 1..9: note = Seed: TQMNLKYAI
TKMNLKYAF

SEQ ID NO: 65733 - protein, 9 aa, synthetic construct
  source 1..9: note = Seed: TQMNLKYAI
TKMNLKYAL

SEQ ID NO: 65734 - protein, 9 aa, synthetic construct
  source 1..9: note = Seed: TQMNLKYAI
TKMNLKYAM

SEQ ID NO: 65735 - protein, 9 aa, synthetic construct
  source 1..9: note = Seed: TQMNLKYAI
TKMNLKYAY

SEQ ID NO: 65736 - protein, 9 aa, synthetic construct
  source 1..9: note = Seed: TTNGDFLHF
TKNGDFLHF

SEQ ID NO: 65737 - protein, 9 aa, synthetic construct
  source 1..9: note = Seed: TTNGDFLHF
TKNGDFLHM

SEQ ID NO: 65738 - protein, 9 aa, synthetic construct
  source 1..9: note = Seed: TTNGDFLHF
TKNGDFLHY

SEQ ID NO: 65739 - protein, 10 aa, synthetic construct
  source 1..10: note = Seed: TLPVNVAFEL
TKPVNVAFEF

SEQ ID NO: 65740 - protein, 10 aa, synthetic construct
  source 1..10: note = Seed: TLPVNVAFEL
TKPVNVAFEW

SEQ ID NO: 65741 - protein, 10 aa, synthetic construct
  source 1..10: note = Seed: TLPVNVAFEL
TKPVNVAFEY

SEQ ID NO: 65742 - protein, 10 aa, synthetic construct
  source 1..10: note = Seed: TLQAENVTGL
TKQAENVTGV

SEQ ID NO: 65743 - protein, 9 aa, synthetic construct
  source 1..9: note = Seed: TLQAIASEF
TKQAIASEF

SEQ ID NO: 65744 - protein, 9 aa, synthetic construct
  source 1..9: note = Seed: TLQAIASEF
TKQAIASEM

SEQ ID NO: 65745 - protein, 9 aa, synthetic construct
  source 1..9: note = Seed: TLQAIASEF
TKQAIASEY

SEQ ID NO: 65746 - protein, 9 aa, synthetic construct
  source 1..9: note = Seed: TIQITISSF
TKQITISSF

SEQ ID NO: 65747 - protein, 10 aa, synthetic construct
  source 1..10: note = Seed: TIQITISSFK
TKQITISSFK

SEQ ID NO: 65748 - protein, 10 aa, synthetic construct
  source 1..10: note = Seed: TIQITISSFK
TKQITISSFR

SEQ ID NO: 65749 - protein, 9 aa, synthetic construct
  source 1..9: note = Seed: TIQITISSF
TKQITISSM

SEQ ID NO: 65750 - protein, 9 aa, synthetic construct
  source 1..9: note = Seed: TIQITISSF
TKQITISSY

SEQ ID NO: 65751 - protein, 11 aa, synthetic construct
  source 1..11: note = Seed: TRQVVNVVTTK
TKQVVNVVTTR

SEQ ID NO: 65752 - protein, 10 aa, synthetic construct
  source 1..10: note = Seed: TGRLQSLQTY
TKRLQSLQTF

SEQ ID NO: 65753 - protein, 9 aa, synthetic construct
  source 1..9: note = Seed: TQSRNLQEF
TKSRNLQEF

SEQ ID NO: 65754 - protein, 9 aa, synthetic construct
  source 1..9: note = Seed: TQSRNLQEF
TKSRNLQEY

SEQ ID NO: 65755 - protein, 10 aa, synthetic construct
  source 1..10: note = Seed: TTTIKPVTYK
TKTIKPVTYK

SEQ ID NO: 65756 - protein, 10 aa, synthetic construct
  source 1..10: note = Seed: TTTIKPVTYK
TKTIKPVTYR

SEQ ID NO: 65757 - protein, 10 aa, synthetic construct
  source 1..10: note = Seed: TITVNVLAWL
TKTVNVLAWA

SEQ ID NO: 65758 - protein, 10 aa, synthetic construct
  source 1..10: note = Seed: TITVNVLAWL
TKTVNVLAWI

SEQ ID NO: 65759 - protein, 10 aa, synthetic construct
  source 1..10: note = Seed: TITVNVLAWL
TKTVNVLAWV

SEQ ID NO: 65760 - protein, 10 aa, synthetic construct
  source 1..10: note = Seed: TNVLEGSVAY
TKVLEGSVAF

SEQ ID NO: 65761 - protein, 10 aa, synthetic construct
  source 1..10: note = Seed: TNVLEGSVAY
TKVLEGSVAY

SEQ ID NO: 65762 - protein, 10 aa, synthetic construct
  source 1..10: note = Seed: TEVVGDIILK
TKVVGDIILK

SEQ ID NO: 65763 - protein, 10 aa, synthetic construct
  source 1..10: note = Seed: TEVVGDIILK
TKVVGDIILR

SEQ ID NO: 65764 - protein, 10 aa, synthetic construct
  source 1..10: note = Seed: TPVYSFLPGV
TKVYSFLPGV

SEQ ID NO: 65765 - protein, 8 aa, synthetic construct
  source 1..8: note = Seed: TAYANSVF
TKYANSVF

SEQ ID NO: 65766 - protein, 10 aa, synthetic construct
  source 1..10: note = Seed: TAYANSVFNI
TKYANSVFNF

SEQ ID NO: 65767 - protein, 10 aa, synthetic construct
  source 1..10: note = Seed: TAYANSVFNI
TKYANSVFNI

SEQ ID NO: 65768 - protein, 10 aa, synthetic construct
  source 1..10: note = Seed: TAYANSVFNI
TKYANSVFNL

SEQ ID NO: 65769 - protein, 10 aa, synthetic construct
  source 1..10: note = Seed: TAYANSVFNI
TKYANSVFNW

SEQ ID NO: 65770 - protein, 8 aa, synthetic construct
  source 1..8: note = Seed: TAYANSVF
TKYANSVY

SEQ ID NO: 65771 - protein, 9 aa, synthetic construct
  source 1..9: note = Seed: TLYCIDGAL
TKYCIDGAF

SEQ ID NO: 65772 - protein, 9 aa, synthetic construct
  source 1..9: note = Seed: TLYCIDGAL
TKYCIDGAM

SEQ ID NO: 65773 - protein, 9 aa, synthetic construct
  source 1..9: note = Seed: TLYCIDGAL
TKYCIDGAY

SEQ ID NO: 65774 - protein, 10 aa, synthetic construct
  source 1..10: note = Seed: TFYLTNDVSF
TKYLTNDVSF

SEQ ID NO: 65775 - protein, 10 aa, synthetic construct
  source 1..10: note = Seed: TFYLTNDVSF
TKYLTNDVSM

SEQ ID NO: 65776 - protein, 10 aa, synthetic construct
  source 1..10: note = Seed: TFYLTNDVSF
TKYLTNDVSY

SEQ ID NO: 65777 - protein, 10 aa, synthetic construct
  source 1..10: note = Seed: TKYTMADLVY
TKYTMADLVF

SEQ ID NO: 65778 - protein, 10 aa, synthetic construct
  source 1..10: note = Seed: TKYTMADLVY
TKYTMADLVM

SEQ ID NO: 65779 - protein, 11 aa, synthetic construct
  source 1..11: note = Seed: TKYTMADLVYA
TKYTMADLVYV

SEQ ID NO: 65780 - protein, 9 aa, synthetic construct
  source 1..9: note = Seed: TMADLVYAL
TLADLVYAA

SEQ ID NO: 65781 - protein, 9 aa, synthetic construct
  source 1..9: note = Seed: TMADLVYAL
TLADLVYAC

SEQ ID NO: 65782 - protein, 9 aa, synthetic construct
  source 1..9: note = Seed: TMADLVYAL
TLADLVYAF

SEQ ID NO: 65783 - protein, 9 aa, synthetic construct
  source 1..9: note = Seed: TMADLVYAL
TLADLVYAG

SEQ ID NO: 65784 - protein, 9 aa, synthetic construct
  source 1..9: note = Seed: TMADLVYAL
TLADLVYAI

SEQ ID NO: 65785 - protein, 9 aa, synthetic construct
  source 1..9: note = Seed: TMADLVYAL
TLADLVYAL

SEQ ID NO: 65786 - protein, 10 aa, synthetic construct
  source 1..10: note = Seed: TMADLVYALR
TLADLVYALA

SEQ ID NO: 65787 - protein, 10 aa, synthetic construct
  source 1..10: note = Seed: TMADLVYALR
TLADLVYALC

SEQ ID NO: 65788 - protein, 10 aa, synthetic construct
  source 1..10: note = Seed: TMADLVYALR
TLADLVYALD

SEQ ID NO: 65789 - protein, 10 aa, synthetic construct
  source 1..10: note = Seed: TMADLVYALR
TLADLVYALE

SEQ ID NO: 65790 - protein, 10 aa, synthetic construct
  source 1..10: note = Seed: TMADLVYALR
TLADLVYALF

SEQ ID NO: 65791 - protein, 10 aa, synthetic construct
  source 1..10: note = Seed: TMADLVYALR
TLADLVYALG

SEQ ID NO: 65792 - protein, 10 aa, synthetic construct
  source 1..10: note = Seed: TMADLVYALR
TLADLVYALH

SEQ ID NO: 65793 - protein, 10 aa, synthetic construct
  source 1..10: note = Seed: TMADLVYALR
TLADLVYALI

SEQ ID NO: 65794 - protein, 10 aa, synthetic construct
  source 1..10: note = Seed: TMADLVYALR
TLADLVYALK

SEQ ID NO: 65795 - protein, 10 aa, synthetic construct
  source 1..10: note = Seed: TMADLVYALR
TLADLVYALL

SEQ ID NO: 65796 - protein, 10 aa, synthetic construct
  source 1..10: note = Seed: TMADLVYALR
TLADLVYALM

SEQ ID NO: 65797 - protein, 10 aa, synthetic construct
  source 1..10: note = Seed: TMADLVYALR
TLADLVYALN

SEQ ID NO: 65798 - protein, 10 aa, synthetic construct
  source 1..10: note = Seed: TMADLVYALR
TLADLVYALP

SEQ ID NO: 65799 - protein, 10 aa, synthetic construct
  source 1..10: note = Seed: TMADLVYALR
TLADLVYALQ

SEQ ID NO: 65800 - protein, 10 aa, synthetic construct
  source 1..10: note = Seed: TMADLVYALR
TLADLVYALR

SEQ ID NO: 65801 - protein, 11 aa, synthetic construct
  source 1..11: note = Seed: TMADLVYALRH
TLADLVYALRI

SEQ ID NO: 65802 - protein, 11 aa, synthetic construct
  source 1..11: note = Seed: TMADLVYALRH
TLADLVYALRL

SEQ ID NO: 65803 - protein, 11 aa, synthetic construct
  source 1..11: note = Seed: TMADLVYALRH
TLADLVYALRV

SEQ ID NO: 65804 - protein, 10 aa, synthetic construct
  source 1..10: note = Seed: TMADLVYALR
TLADLVYALS

SEQ ID NO: 65805 - protein, 10 aa, synthetic construct
  source 1..10: note = Seed: TMADLVYALR
TLADLVYALT

SEQ ID NO: 65806 - protein, 10 aa, synthetic construct
  source 1..10: note = Seed: TMADLVYALR
TLADLVYALV

SEQ ID NO: 65807 - protein, 10 aa, synthetic construct
  source 1..10: note = Seed: TMADLVYALR
TLADLVYALW

SEQ ID NO: 65808 - protein, 10 aa, synthetic construct
  source 1..10: note = Seed: TMADLVYALR
TLADLVYALY

SEQ ID NO: 65809 - protein, 9 aa, synthetic construct
  source 1..9: note = Seed: TMADLVYAL
TLADLVYAM

SEQ ID NO: 65810 - protein, 9 aa, synthetic construct
  source 1..9: note = Seed: TMADLVYAL
TLADLVYAS

SEQ ID NO: 65811 - protein, 9 aa, synthetic construct
  source 1..9: note = Seed: TMADLVYAL
TLADLVYAT

SEQ ID NO: 65812 - protein, 9 aa, synthetic construct
  source 1..9: note = Seed: TMADLVYAL
TLADLVYAV

SEQ ID NO: 65813 - protein, 9 aa, synthetic construct
  source 1..9: note = Seed: TMADLVYAL
TLADLVYAY

SEQ ID NO: 65814 - protein, 8 aa, synthetic construct
  source 1..8: note = Seed: TMADLVYA
TLADLVYI

SEQ ID NO: 65815 - protein, 8 aa, synthetic construct
  source 1..8: note = Seed: TMADLVYA
TLADLVYL

SEQ ID NO: 65816 - protein, 8 aa, synthetic construct
  source 1..8: note = Seed: TMADLVYA
TLADLVYV

SEQ ID NO: 65817 - protein, 9 aa, synthetic construct
  source 1..9: note = Seed: TIAEILLII
TLAEILLIA

SEQ ID NO: 65818 - protein, 9 aa, synthetic construct
  source 1..9: note = Seed: TIAEILLII
TLAEILLII

SEQ ID NO: 65819 - protein, 9 aa, synthetic construct
  source 1..9: note = Seed: TIAEILLII
TLAEILLIL

SEQ ID NO: 65820 - protein, 9 aa, synthetic construct
  source 1..9: note = Seed: TIAEILLII
TLAEILLIM

SEQ ID NO: 65821 - protein, 9 aa, synthetic construct
  source 1..9: note = Seed: TIAEILLII
TLAEILLIT

SEQ ID NO: 65822 - protein, 9 aa, synthetic construct
  source 1..9: note = Seed: TIAEILLII
TLAEILLIV

SEQ ID NO: 65823 - protein, 9 aa, synthetic construct
  source 1..9: note = Seed: TSAFVETVK
TLAFVETVK

SEQ ID NO: 65824 - protein, 9 aa, synthetic construct
  source 1..9: note = Seed: TSAFVETVK
TLAFVETVR

SEQ ID NO: 65825 - protein, 9 aa, synthetic construct
  source 1..9: note = Seed: TSAMQTMLF
TLAMQTMLF

SEQ ID NO: 65826 - protein, 9 aa, synthetic construct
  source 1..9: note = Seed: TSAMQTMLF
TLAMQTMLY

SEQ ID NO: 65827 - protein, 9 aa, synthetic construct
  source 1..9: note = Seed: TVASLINTL
TLASLINTA

SEQ ID NO: 65828 - protein, 9 aa, synthetic construct
  source 1..9: note = Seed: TVASLINTL
TLASLINTI

SEQ ID NO: 65829 - protein, 9 aa, synthetic construct
  source 1..9: note = Seed: TVASLINTL
TLASLINTL

SEQ ID NO: 65830 - protein, 9 aa, synthetic construct
  source 1..9: note = Seed: TVASLINTL
TLASLINTM

SEQ ID NO: 65831 - protein, 9 aa, synthetic construct
  source 1..9: note = Seed: TVASLINTL
TLASLINTT

SEQ ID NO: 65832 - protein, 9 aa, synthetic construct
  source 1..9: note = Seed: TVASLINTL
TLASLINTV

SEQ ID NO: 65833 - protein, 10 aa, synthetic construct
  source 1..10: note = Seed: TSAVLQSGFR
TLAVLQSGFR

SEQ ID NO: 65834 - protein, 10 aa, synthetic construct
  source 1..10: note = Seed: TLAVPYNMRV
TLAVPYNMRI

SEQ ID NO: 65835 - protein, 10 aa, synthetic construct
  source 1..10: note = Seed: TLAVPYNMRV
TLAVPYNMRL

SEQ ID NO: 65836 - protein, 9 aa, synthetic construct
  source 1..9: note = Seed: TTAYANSVF
TLAYANSVF

SEQ ID NO: 65837 - protein, 11 aa, synthetic construct
  source 1..11: note = Seed: TTAYANSVFNI
TLAYANSVFNF

SEQ ID NO: 65838 - protein, 11 aa, synthetic construct
  source 1..11: note = Seed: TTAYANSVFNI
TLAYANSVFNW

SEQ ID NO: 65839 - protein, 9 aa, synthetic construct
  source 1..9: note = Seed: TTAYANSVF
TLAYANSVM

SEQ ID NO: 65840 - protein, 9 aa, synthetic construct
  source 1..9: note = Seed: TTAYANSVF
TLAYANSVY

SEQ ID NO: 65841 - protein, 9 aa, synthetic construct
  source 1..9: note = Seed: TVAYFNMVY
TLAYFNMVF

SEQ ID NO: 65842 - protein, 9 aa, synthetic construct
  source 1..9: note = Seed: TVAYFNMVY
TLAYFNMVK

SEQ ID NO: 65843 - protein, 9 aa, synthetic construct
  source 1..9: note = Seed: TVAYFNMVY
TLAYFNMVM

SEQ ID NO: 65844 - protein, 9 aa, synthetic construct
  source 1..9: note = Seed: TVAYFNMVY
TLAYFNMVR

SEQ ID NO: 65845 - protein, 9 aa, synthetic construct
  source 1..9: note = Seed: TVAYFNMVY
TLAYFNMVY

SEQ ID NO: 65846 - protein, 10 aa, synthetic construct
  source 1..10: note = Seed: TVAYFNMVYM
TLAYFNMVYA

SEQ ID NO: 65847 - protein, 10 aa, synthetic construct
  source 1..10: note = Seed: TVAYFNMVYM
TLAYFNMVYI

SEQ ID NO: 65848 - protein, 10 aa, synthetic construct
  source 1..10: note = Seed: TVAYFNMVYM
TLAYFNMVYK

SEQ ID NO: 65849 - protein, 10 aa, synthetic construct
  source 1..10: note = Seed: TVAYFNMVYM
TLAYFNMVYL

SEQ ID NO: 65850 - protein, 10 aa, synthetic construct
  source 1..10: note = Seed: TVAYFNMVYM
TLAYFNMVYM

SEQ ID NO: 65851 - protein, 10 aa, synthetic construct
  source 1..10: note = Seed: TVAYFNMVYM
TLAYFNMVYR

SEQ ID NO: 65852 - protein, 10 aa, synthetic construct
  source 1..10: note = Seed: TVAYFNMVYM
TLAYFNMVYV

SEQ ID NO: 65853 - protein, 10 aa, synthetic construct
  source 1..10: note = Seed: TVAYFNMVYM
TLAYFNMVYY

SEQ ID NO: 65854 - protein, 9 aa, synthetic construct
  source 1..9: note = Seed: TLDSKTQSL
TLDSKTQSI

SEQ ID NO: 65855 - protein, 9 aa, synthetic construct
  source 1..9: note = Seed: TLDSKTQSL
TLDSKTQSV

SEQ ID NO: 65856 - protein, 11 aa, synthetic construct
  source 1..11: note = Seed: TIDYTEISFML
TLDYTEISFMF

SEQ ID NO: 65857 - protein, 11 aa, synthetic construct
  source 1..11: note = Seed: TIDYTEISFML
TLDYTEISFMI

SEQ ID NO: 65858 - protein, 11 aa, synthetic construct
  source 1..11: note = Seed: TIDYTEISFML
TLDYTEISFML

SEQ ID NO: 65859 - protein, 11 aa, synthetic construct
  source 1..11: note = Seed: TIDYTEISFML
TLDYTEISFMV

SEQ ID NO: 65860 - protein, 9 aa, synthetic construct
  source 1..9: note = Seed: TSDYYQLYS
TLDYYQLYY

SEQ ID NO: 65861 - protein, 9 aa, synthetic construct
  source 1..9: note = Seed: TLEQYVFCT
TLEQYVFCI

SEQ ID NO: 65862 - protein, 9 aa, synthetic construct
  source 1..9: note = Seed: TLEQYVFCT
TLEQYVFCL

SEQ ID NO: 65863 - protein, 9 aa, synthetic construct
  source 1..9: note = Seed: TLEQYVFCT
TLEQYVFCV

SEQ ID NO: 65864 - protein, 10 aa, synthetic construct
  source 1..10: note = Seed: TIEVNSFSGY
TLEVNSFSGW

SEQ ID NO: 65865 - protein, 9 aa, synthetic construct
  source 1..9: note = Seed: TFEYVSQPF
TLEYVSQPY

SEQ ID NO: 65866 - protein, 9 aa, synthetic construct
  source 1..9: note = Seed: TRFASVYAW
TLFASVYAF

SEQ ID NO: 65867 - protein, 9 aa, synthetic construct
  source 1..9: note = Seed: TRFASVYAW
TLFASVYAM

SEQ ID NO: 65868 - protein, 9 aa, synthetic construct
  source 1..9: note = Seed: TRFASVYAW
TLFASVYAY

SEQ ID NO: 65869 - protein, 9 aa, synthetic construct
  source 1..9: note = Seed: TPFEIKLAK
TLFEIKLAK

SEQ ID NO: 65870 - protein, 10 aa, synthetic construct
  source 1..10: note = Seed: TPFEIKLAKK
TLFEIKLAKR

SEQ ID NO: 65871 - protein, 9 aa, synthetic construct
  source 1..9: note = Seed: TPFEIKLAK
TLFEIKLAR

SEQ ID NO: 65872 - protein, 9 aa, synthetic construct
  source 1..9: note = Seed: TIFKDASGK
TLFKDASGR

SEQ ID NO: 65873 - protein, 9 aa, synthetic construct
  source 1..9: note = Seed: TQFNYYKKV
TLFNYYKKA

SEQ ID NO: 65874 - protein, 9 aa, synthetic construct
  source 1..9: note = Seed: TQFNYYKKV
TLFNYYKKF

SEQ ID NO: 65875 - protein, 9 aa, synthetic construct
  source 1..9: note = Seed: TQFNYYKKV
TLFNYYKKI

SEQ ID NO: 65876 - protein, 9 aa, synthetic construct
  source 1..9: note = Seed: TQFNYYKKV
TLFNYYKKL

SEQ ID NO: 65877 - protein, 9 aa, synthetic construct
  source 1..9: note = Seed: TQFNYYKKV
TLFNYYKKV

SEQ ID NO: 65878 - protein, 9 aa, synthetic construct
  source 1..9: note = Seed: TQFNYYKKV
TLFNYYKKY

SEQ ID NO: 65879 - protein, 9 aa, synthetic construct
  source 1..9: note = Seed: TCFSTQFAF
TLFSTQFAF

SEQ ID NO: 65880 - protein, 9 aa, synthetic construct
  source 1..9: note = Seed: TCFSTQFAF
TLFSTQFAM

SEQ ID NO: 65881 - protein, 9 aa, synthetic construct
  source 1..9: note = Seed: TCFSTQFAF
TLFSTQFAY

SEQ ID NO: 65882 - protein, 9 aa, synthetic construct
  source 1..9: note = Seed: TLGVYDYLV
TLGVYDYLI

SEQ ID NO: 65883 - protein, 9 aa, synthetic construct
  source 1..9: note = Seed: TLGVYDYLV
TLGVYDYLL

SEQ ID NO: 65884 - protein, 11 aa, synthetic construct
  source 1..11: note = Seed: TLGVYDYLVST
TLGVYDYLVSA

SEQ ID NO: 65885 - protein, 11 aa, synthetic construct
  source 1..11: note = Seed: TLGVYDYLVST
TLGVYDYLVSI

SEQ ID NO: 65886 - protein, 11 aa, synthetic construct
  source 1..11: note = Seed: TLGVYDYLVST
TLGVYDYLVSL

SEQ ID NO: 65887 - protein, 11 aa, synthetic construct
  source 1..11: note = Seed: TLGVYDYLVST
TLGVYDYLVSM

SEQ ID NO: 65888 - protein, 11 aa, synthetic construct
  source 1..11: note = Seed: TLGVYDYLVST
TLGVYDYLVSV

SEQ ID NO: 65889 - protein, 9 aa, synthetic construct
  source 1..9: note = Seed: TAHSCNVNR
TLHSCNVNR

SEQ ID NO: 65890 - protein, 10 aa, synthetic construct
  source 1..10: note = Seed: TWICLLQFAY
TLICLLQFAY

SEQ ID NO: 65891 - protein, 9 aa, synthetic construct
  source 1..9: note = Seed: TTIKPVTYK
TLIKPVTYK

SEQ ID NO: 65892 - protein, 10 aa, synthetic construct
  source 1..10: note = Seed: TTIKPVTYKL
TLIKPVTYKK

SEQ ID NO: 65893 - protein, 10 aa, synthetic construct
  source 1..10: note = Seed: TTIKPVTYKL
TLIKPVTYKR

SEQ ID NO: 65894 - protein, 9 aa, synthetic construct
  source 1..9: note = Seed: TTIKPVTYK
TLIKPVTYR

SEQ ID NO: 65895 - protein, 9 aa, synthetic construct
  source 1..9: note = Seed: TLIVNSVLL
TLIVNSVLI

SEQ ID NO: 65896 - protein, 11 aa, synthetic construct
  source 1..11: note = Seed: TLIVNSVLLFL
TLIVNSVLLFV

SEQ ID NO: 65897 - protein, 9 aa, synthetic construct
  source 1..9: note = Seed: TLIVNSVLL
TLIVNSVLV

SEQ ID NO: 65898 - protein, 10 aa, synthetic construct
  source 1..10: note = Seed: TNIVTRCLNR
TLIVTRCLNR

SEQ ID NO: 65899 - protein, 9 aa, synthetic construct
  source 1..9: note = Seed: TVKPGNFNK
TLKPGNFNK

SEQ ID NO: 65900 - protein, 9 aa, synthetic construct
  source 1..9: note = Seed: TVKPGNFNK
TLKPGNFNR

SEQ ID NO: 65901 - protein, 9 aa, synthetic construct
  source 1..9: note = Seed: TIKPVTYKL
TLKPVTYKL

SEQ ID NO: 65902 - protein, 9 aa, synthetic construct
  source 1..9: note = Seed: TIKPVTYKL
TLKPVTYKV

SEQ ID NO: 65903 - protein, 10 aa, synthetic construct
  source 1..10: note = Seed: TNLCPFGEVF
TLLCPFGEVY

SEQ ID NO: 65904 - protein, 10 aa, synthetic construct
  source 1..10: note = Seed: TGLFKDCSKV
TLLFKDCSKV

SEQ ID NO: 65905 - protein, 10 aa, synthetic construct
  source 1..10: note = Seed: TFLLNKEMYL
TLLLNKEMYI

SEQ ID NO: 65906 - protein, 10 aa, synthetic construct
  source 1..10: note = Seed: TFLLNKEMYL
TLLLNKEMYL

SEQ ID NO: 65907 - protein, 10 aa, synthetic construct
  source 1..10: note = Seed: TFLLNKEMYL
TLLLNKEMYV

SEQ ID NO: 65908 - protein, 10 aa, synthetic construct
  source 1..10: note = Seed: TLLLQLCTFT
TLLLQLCTFI

SEQ ID NO: 65909 - protein, 10 aa, synthetic construct
  source 1..10: note = Seed: TLLLQLCTFT
TLLLQLCTFL

SEQ ID NO: 65910 - protein, 10 aa, synthetic construct
  source 1..10: note = Seed: TLLLQLCTFT
TLLLQLCTFV

SEQ ID NO: 65911 - protein, 9 aa, synthetic construct
  source 1..9: note = Seed: TLLLQLCTF
TLLLQLCTY

SEQ ID NO: 65912 - protein, 9 aa, synthetic construct
  source 1..9: note = Seed: TTLPVNVAF
TLLPVNVAF

SEQ ID NO: 65913 - protein, 9 aa, synthetic construct
  source 1..9: note = Seed: TTLPVNVAF
TLLPVNVAY

SEQ ID NO: 65914 - protein, 9 aa, synthetic construct
  source 1..9: note = Seed: TSLSGFKLK
TLLSGFKLK

SEQ ID NO: 65915 - protein, 9 aa, synthetic construct
  source 1..9: note = Seed: TSLSGFKLK
TLLSGFKLR

SEQ ID NO: 65916 - protein, 9 aa, synthetic construct
  source 1..9: note = Seed: TILTSLLVL
TLLTSLLVA

SEQ ID NO: 65917 - protein, 9 aa, synthetic construct
  source 1..9: note = Seed: TILTSLLVL
TLLTSLLVI

SEQ ID NO: 65918 - protein, 9 aa, synthetic construct
  source 1..9: note = Seed: TILTSLLVL
TLLTSLLVL

SEQ ID NO: 65919 - protein, 10 aa, synthetic construct
  source 1..10: note = Seed: TILTSLLVLV
TLLTSLLVLI

SEQ ID NO: 65920 - protein, 10 aa, synthetic construct
  source 1..10: note = Seed: TILTSLLVLV
TLLTSLLVLL

SEQ ID NO: 65921 - protein, 10 aa, synthetic construct
  source 1..10: note = Seed: TILTSLLVLV
TLLTSLLVLV

SEQ ID NO: 65922 - protein, 9 aa, synthetic construct
  source 1..9: note = Seed: TILTSLLVL
TLLTSLLVV

SEQ ID NO: 65923 - protein, 10 aa, synthetic construct
  source 1..10: note = Seed: TPLVPFWITI
TLLVPFWITA

SEQ ID NO: 65924 - protein, 10 aa, synthetic construct
  source 1..10: note = Seed: TPLVPFWITI
TLLVPFWITI

SEQ ID NO: 65925 - protein, 10 aa, synthetic construct
  source 1..10: note = Seed: TPLVPFWITI
TLLVPFWITL

SEQ ID NO: 65926 - protein, 10 aa, synthetic construct
  source 1..10: note = Seed: TPLVPFWITI
TLLVPFWITV

SEQ ID NO: 65927 - protein, 10 aa, synthetic construct
  source 1..10: note = Seed: TQLYLGGMSY
TLLYLGGMSF

SEQ ID NO: 65928 - protein, 10 aa, synthetic construct
  source 1..10: note = Seed: TQLYLGGMSY
TLLYLGGMSK

SEQ ID NO: 65929 - protein, 10 aa, synthetic construct
  source 1..10: note = Seed: TQLYLGGMSY
TLLYLGGMSM

SEQ ID NO: 65930 - protein, 10 aa, synthetic construct
  source 1..10: note = Seed: TQLYLGGMSY
TLLYLGGMSY

SEQ ID NO: 65931 - protein, 10 aa, synthetic construct
  source 1..10: note = Seed: TLMIERFVSL
TLMIERFVSA

SEQ ID NO: 65932 - protein, 10 aa, synthetic construct
  source 1..10: note = Seed: TLMIERFVSL
TLMIERFVSF

SEQ ID NO: 65933 - protein, 10 aa, synthetic construct
  source 1..10: note = Seed: TLMIERFVSL
TLMIERFVSI

SEQ ID NO: 65934 - protein, 11 aa, synthetic construct
  source 1..11: note = Seed: TLMIERFVSLA
TLMIERFVSLV

SEQ ID NO: 65935 - protein, 10 aa, synthetic construct
  source 1..10: note = Seed: TLMIERFVSL
TLMIERFVSM

SEQ ID NO: 65936 - protein, 10 aa, synthetic construct
  source 1..10: note = Seed: TLMIERFVSL
TLMIERFVSV

SEQ ID NO: 65937 - protein, 10 aa, synthetic construct
  source 1..10: note = Seed: TLMIERFVSL
TLMIERFVSY

SEQ ID NO: 65938 - protein, 9 aa, synthetic construct
  source 1..9: note = Seed: TSMKYFVKI
TLMKYFVKA

SEQ ID NO: 65939 - protein, 9 aa, synthetic construct
  source 1..9: note = Seed: TSMKYFVKI
TLMKYFVKC

SEQ ID NO: 65940 - protein, 9 aa, synthetic construct
  source 1..9: note = Seed: TSMKYFVKI
TLMKYFVKI

SEQ ID NO: 65941 - protein, 9 aa, synthetic construct
  source 1..9: note = Seed: TSMKYFVKI
TLMKYFVKL

SEQ ID NO: 65942 - protein, 9 aa, synthetic construct
  source 1..9: note = Seed: TSMKYFVKI
TLMKYFVKM

SEQ ID NO: 65943 - protein, 9 aa, synthetic construct
  source 1..9: note = Seed: TSMKYFVKI
TLMKYFVKS

SEQ ID NO: 65944 - protein, 9 aa, synthetic construct
  source 1..9: note = Seed: TSMKYFVKI
TLMKYFVKT

SEQ ID NO: 65945 - protein, 9 aa, synthetic construct
  source 1..9: note = Seed: TSMKYFVKI
TLMKYFVKV

SEQ ID NO: 65946 - protein, 9 aa, synthetic construct
  source 1..9: note = Seed: TSMKYFVKI
TLMKYFVKW

SEQ ID NO: 65947 - protein, 10 aa, synthetic construct
  source 1..10: note = Seed: TCMMCYKRNR
TLMMCYKRNR

SEQ ID NO: 65948 - protein, 9 aa, synthetic construct
  source 1..9: note = Seed: TQMNLKYAI
TLMNLKYAA

SEQ ID NO: 65949 - protein, 9 aa, synthetic construct
  source 1..9: note = Seed: TQMNLKYAI
TLMNLKYAF

SEQ ID NO: 65950 - protein, 9 aa, synthetic construct
  source 1..9: note = Seed: TQMNLKYAI
TLMNLKYAI

SEQ ID NO: 65951 - protein, 9 aa, synthetic construct
  source 1..9: note = Seed: TQMNLKYAI
TLMNLKYAL

SEQ ID NO: 65952 - protein, 9 aa, synthetic construct
  source 1..9: note = Seed: TQMNLKYAI
TLMNLKYAM

SEQ ID NO: 65953 - protein, 9 aa, synthetic construct
  source 1..9: note = Seed: TQMNLKYAI
TLMNLKYAV

SEQ ID NO: 65954 - protein, 9 aa, synthetic construct
  source 1..9: note = Seed: TQMNLKYAI
TLMNLKYAW

SEQ ID NO: 65955 - protein, 9 aa, synthetic construct
  source 1..9: note = Seed: TQMNLKYAI
TLMNLKYAY

SEQ ID NO: 65956 - protein, 10 aa, synthetic construct
  source 1..10: note = Seed: TLNDFNLVAM
TLNDFNLVAA

SEQ ID NO: 65957 - protein, 10 aa, synthetic construct
  source 1..10: note = Seed: TLNDFNLVAM
TLNDFNLVAF

SEQ ID NO: 65958 - protein, 10 aa, synthetic construct
  source 1..10: note = Seed: TLNDFNLVAM
TLNDFNLVAI

SEQ ID NO: 65959 - protein, 10 aa, synthetic construct
  source 1..10: note = Seed: TLNDFNLVAM
TLNDFNLVAL

SEQ ID NO: 65960 - protein, 10 aa, synthetic construct
  source 1..10: note = Seed: TLNDFNLVAM
TLNDFNLVAV

SEQ ID NO: 65961 - protein, 10 aa, synthetic construct
  source 1..10: note = Seed: TLNDFNLVAM
TLNDFNLVAY

SEQ ID NO: 65962 - protein, 9 aa, synthetic construct
  source 1..9: note = Seed: TLNDFNLVA
TLNDFNLVI

SEQ ID NO: 65963 - protein, 9 aa, synthetic construct
  source 1..9: note = Seed: TLNDFNLVA
TLNDFNLVL

SEQ ID NO: 65964 - protein, 9 aa, synthetic construct
  source 1..9: note = Seed: TLNDFNLVA
TLNDFNLVM

SEQ ID NO: 65965 - protein, 9 aa, synthetic construct
  source 1..9: note = Seed: TLNDFNLVA
TLNDFNLVV

SEQ ID NO: 65966 - protein, 9 aa, synthetic construct
  source 1..9: note = Seed: TLNDLNETL
TLNDLNETA

SEQ ID NO: 65967 - protein, 9 aa, synthetic construct
  source 1..9: note = Seed: TLNDLNETL
TLNDLNETI

SEQ ID NO: 65968 - protein, 10 aa, synthetic construct
  source 1..10: note = Seed: TLNDLNETLV
TLNDLNETLI

SEQ ID NO: 65969 - protein, 10 aa, synthetic construct
  source 1..10: note = Seed: TLNDLNETLV
TLNDLNETLL

SEQ ID NO: 65970 - protein, 10 aa, synthetic construct
  source 1..10: note = Seed: TLNDLNETLV
TLNDLNETLM

SEQ ID NO: 65971 - protein, 9 aa, synthetic construct
  source 1..9: note = Seed: TLNDLNETL
TLNDLNETM

SEQ ID NO: 65972 - protein, 9 aa, synthetic construct
  source 1..9: note = Seed: TLNDLNETL
TLNDLNETV

SEQ ID NO: 65973 - protein, 9 aa, synthetic construct
  source 1..9: note = Seed: TTNGDFLHF
TLNGDFLHF

SEQ ID NO: 65974 - protein, 10 aa, synthetic construct
  source 1..10: note = Seed: TTNGDFLHFL
TLNGDFLHFA

SEQ ID NO: 65975 - protein, 10 aa, synthetic construct
  source 1..10: note = Seed: TTNGDFLHFL
TLNGDFLHFI

SEQ ID NO: 65976 - protein, 10 aa, synthetic construct
  source 1..10: note = Seed: TTNGDFLHFL
TLNGDFLHFL

SEQ ID NO: 65977 - protein, 10 aa, synthetic construct
  source 1..10: note = Seed: TTNGDFLHFL
TLNGDFLHFM

SEQ ID NO: 65978 - protein, 10 aa, synthetic construct
  source 1..10: note = Seed: TTNGDFLHFL
TLNGDFLHFV

SEQ ID NO: 65979 - protein, 9 aa, synthetic construct
  source 1..9: note = Seed: TTNGDFLHF
TLNGDFLHY

SEQ ID NO: 65980 - protein, 9 aa, synthetic construct
  source 1..9: note = Seed: TSNPTTFHL
TLNPTTFHW

SEQ ID NO: 65981 - protein, 9 aa, synthetic construct
  source 1..9: note = Seed: TVNVLAWLY
TLNVLAWLK

SEQ ID NO: 65982 - protein, 9 aa, synthetic construct
  source 1..9: note = Seed: TVNVLAWLY
TLNVLAWLR

SEQ ID NO: 65983 - protein, 9 aa, synthetic construct
  source 1..9: note = Seed: TVNVLAWLY
TLNVLAWLY

SEQ ID NO: 65984 - protein, 10 aa, synthetic construct
  source 1..10: note = Seed: TGNYQCGHYK
TLNYQCGHYK

SEQ ID NO: 65985 - protein, 10 aa, synthetic construct
  source 1..10: note = Seed: TGNYQCGHYK
TLNYQCGHYR

SEQ ID NO: 65986 - protein, 10 aa, synthetic construct
  source 1..10: note = Seed: TLPVNVAFEL
TLPVNVAFEF

SEQ ID NO: 65987 - protein, 10 aa, synthetic construct
  source 1..10: note = Seed: TLPVNVAFEL
TLPVNVAFEI

SEQ ID NO: 65988 - protein, 10 aa, synthetic construct
  source 1..10: note = Seed: TLPVNVAFEL
TLPVNVAFEM

SEQ ID NO: 65989 - protein, 10 aa, synthetic construct
  source 1..10: note = Seed: TLPVNVAFEL
TLPVNVAFEV

SEQ ID NO: 65990 - protein, 10 aa, synthetic construct
  source 1..10: note = Seed: TLPVNVAFEL
TLPVNVAFEW

SEQ ID NO: 65991 - protein, 10 aa, synthetic construct
  source 1..10: note = Seed: TLPVNVAFEL
TLPVNVAFEY

SEQ ID NO: 65992 - protein, 10 aa, synthetic construct
  source 1..10: note = Seed: TLQAENVTGL
TLQAENVTGA

SEQ ID NO: 65993 - protein, 10 aa, synthetic construct
  source 1..10: note = Seed: TLQAENVTGL
TLQAENVTGI

SEQ ID NO: 65994 - protein, 10 aa, synthetic construct
  source 1..10: note = Seed: TLQAENVTGL
TLQAENVTGV

SEQ ID NO: 65995 - protein, 9 aa, synthetic construct
  source 1..9: note = Seed: TLQAIASEF
TLQAIASEY

SEQ ID NO: 65996 - protein, 9 aa, synthetic construct
  source 1..9: note = Seed: TIQITISSF
TLQITISSF

SEQ ID NO: 65997 - protein, 10 aa, synthetic construct
  source 1..10: note = Seed: TIQITISSFK
TLQITISSFK

SEQ ID NO: 65998 - protein, 10 aa, synthetic construct
  source 1..10: note = Seed: TIQITISSFK
TLQITISSFR

SEQ ID NO: 65999 - protein, 9 aa, synthetic construct
  source 1..9: note = Seed: TIQITISSF
TLQITISSY

SEQ ID NO: 66000 - protein, 11 aa, synthetic construct
  source 1..11: note = Seed: TRQVVNVVTTK
TLQVVNVVTTR

SEQ ID NO: 66001 - protein, 9 aa, synthetic construct
  source 1..9: note = Seed: TTRQVVNVV
TLRQVVNVK

SEQ ID NO: 66002 - protein, 9 aa, synthetic construct
  source 1..9: note = Seed: TYRRLISMM
TLRRLISMK

SEQ ID NO: 66003 - protein, 9 aa, synthetic construct
  source 1..9: note = Seed: TISLAGSYK
TLSLAGSYK

SEQ ID NO: 66004 - protein, 9 aa, synthetic construct
  source 1..9: note = Seed: TISLAGSYK
TLSLAGSYR

SEQ ID NO: 66005 - protein, 9 aa, synthetic construct
  source 1..9: note = Seed: TGSNVFQTR
TLSNVFQTR

SEQ ID NO: 66006 - protein, 10 aa, synthetic construct
  source 1..10: note = Seed: TQSRNLQEFK
TLSRNLQEFR

SEQ ID NO: 66007 - protein, 9 aa, synthetic construct
  source 1..9: note = Seed: TISSFKWDL
TLSSFKWDL

SEQ ID NO: 66008 - protein, 9 aa, synthetic construct
  source 1..9: note = Seed: TISSFKWDL
TLSSFKWDV

SEQ ID NO: 66009 - protein, 9 aa, synthetic construct
  source 1..9: note = Seed: TASWFTALT
TLSWFTALA

SEQ ID NO: 66010 - protein, 9 aa, synthetic construct
  source 1..9: note = Seed: TASWFTALT
TLSWFTALI

SEQ ID NO: 66011 - protein, 9 aa, synthetic construct
  source 1..9: note = Seed: TASWFTALT
TLSWFTALL

SEQ ID NO: 66012 - protein, 9 aa, synthetic construct
  source 1..9: note = Seed: TASWFTALT
TLSWFTALV

SEQ ID NO: 66013 - protein, 9 aa, synthetic construct
  source 1..9: note = Seed: TLSYEQFKK
TLSYEQFKR

SEQ ID NO: 66014 - protein, 10 aa, synthetic construct
  source 1..10: note = Seed: TITDAVDCAL
TLTDAVDCAL

SEQ ID NO: 66015 - protein, 10 aa, synthetic construct
  source 1..10: note = Seed: TITDAVDCAL
TLTDAVDCAV

SEQ ID NO: 66016 - protein, 10 aa, synthetic construct
  source 1..10: note = Seed: TTTIKPVTYK
TLTIKPVTYK

SEQ ID NO: 66017 - protein, 10 aa, synthetic construct
  source 1..10: note = Seed: TTTIKPVTYK
TLTIKPVTYR

SEQ ID NO: 66018 - protein, 10 aa, synthetic construct
  source 1..10: note = Seed: TMTNRQFHQK
TLTNRQFHQR

SEQ ID NO: 66019 - protein, 9 aa, synthetic construct
  source 1..9: note = Seed: TITQMNLKY
TLTQMNLKY

SEQ ID NO: 66020 - protein, 10 aa, synthetic construct
  source 1..10: note = Seed: TITVNVLAWL
TLTVNVLAWA

SEQ ID NO: 66021 - protein, 10 aa, synthetic construct
  source 1..10: note = Seed: TITVNVLAWL
TLTVNVLAWI

SEQ ID NO: 66022 - protein, 10 aa, synthetic construct
  source 1..10: note = Seed: TITVNVLAWL
TLTVNVLAWL

SEQ ID NO: 66023 - protein, 10 aa, synthetic construct
  source 1..10: note = Seed: TITVNVLAWL
TLTVNVLAWV

SEQ ID NO: 66024 - protein, 9 aa, synthetic construct
  source 1..9: note = Seed: TTVDNINLH
TLVDNINLR

SEQ ID NO: 66025 - protein, 10 aa, synthetic construct
  source 1..10: note = Seed: TNVLEGSVAY
TLVLEGSVAF

SEQ ID NO: 66026 - protein, 10 aa, synthetic construct
  source 1..10: note = Seed: TNVLEGSVAY
TLVLEGSVAY

SEQ ID NO: 66027 - protein, 10 aa, synthetic construct
  source 1..10: note = Seed: TEVNEFACVV
TLVNEFACVV

SEQ ID NO: 66028 - protein, 10 aa, synthetic construct
  source 1..10: note = Seed: TLVSDIDITF
TLVSDIDITI

SEQ ID NO: 66029 - protein, 10 aa, synthetic construct
  source 1..10: note = Seed: TLVSDIDITF
TLVSDIDITL

SEQ ID NO: 66030 - protein, 10 aa, synthetic construct
  source 1..10: note = Seed: TLVSDIDITF
TLVSDIDITM

SEQ ID NO: 66031 - protein, 10 aa, synthetic construct
  source 1..10: note = Seed: TLVSDIDITF
TLVSDIDITV

SEQ ID NO: 66032 - protein, 10 aa, synthetic construct
  source 1..10: note = Seed: TEVVGDIILK
TLVVGDIILK

SEQ ID NO: 66033 - protein, 10 aa, synthetic construct
  source 1..10: note = Seed: TEVVGDIILK
TLVVGDIILR

SEQ ID NO: 66034 - protein, 9 aa, synthetic construct
  source 1..9: note = Seed: TVVVNAANV
TLVVNAANV

SEQ ID NO: 66035 - protein, 10 aa, synthetic construct
  source 1..10: note = Seed: TPVYSFLPGV
TLVYSFLPGA

SEQ ID NO: 66036 - protein, 10 aa, synthetic construct
  source 1..10: note = Seed: TPVYSFLPGV
TLVYSFLPGI

SEQ ID NO: 66037 - protein, 10 aa, synthetic construct
  source 1..10: note = Seed: TPVYSFLPGV
TLVYSFLPGL

SEQ ID NO: 66038 - protein, 10 aa, synthetic construct
  source 1..10: note = Seed: TPVYSFLPGV
TLVYSFLPGM

SEQ ID NO: 66039 - protein, 10 aa, synthetic construct
  source 1..10: note = Seed: TPVYSFLPGV
TLVYSFLPGV

SEQ ID NO: 66040 - protein, 9 aa, synthetic construct
  source 1..9: note = Seed: TPVYSFLPG
TLVYSFLPY

SEQ ID NO: 66041 - protein, 10 aa, synthetic construct
  source 1..10: note = Seed: TAYANSVFNI
TLYANSVFNF

SEQ ID NO: 66042 - protein, 10 aa, synthetic construct
  source 1..10: note = Seed: TAYANSVFNI
TLYANSVFNI

SEQ ID NO: 66043 - protein, 10 aa, synthetic construct
  source 1..10: note = Seed: TAYANSVFNI
TLYANSVFNL

SEQ ID NO: 66044 - protein, 10 aa, synthetic construct
  source 1..10: note = Seed: TAYANSVFNI
TLYANSVFNW

SEQ ID NO: 66045 - protein, 9 aa, synthetic construct
  source 1..9: note = Seed: TLYCIDGAL
TLYCIDGAF

SEQ ID NO: 66046 - protein, 10 aa, synthetic construct
  source 1..10: note = Seed: TLYCIDGALL
TLYCIDGALV

SEQ ID NO: 66047 - protein, 9 aa, synthetic construct
  source 1..9: note = Seed: TLYCIDGAL
TLYCIDGAV

SEQ ID NO: 66048 - protein, 9 aa, synthetic construct
  source 1..9: note = Seed: TLYCIDGAL
TLYCIDGAY

SEQ ID NO: 66049 - protein, 9 aa, synthetic construct
  source 1..9: note = Seed: TVYEKLKPV
TLYEKLKPA

SEQ ID NO: 66050 - protein, 9 aa, synthetic construct
  source 1..9: note = Seed: TVYEKLKPV
TLYEKLKPC

SEQ ID NO: 66051 - protein, 9 aa, synthetic construct
  source 1..9: note = Seed: TVYEKLKPV
TLYEKLKPI

SEQ ID NO: 66052 - protein, 9 aa, synthetic construct
  source 1..9: note = Seed: TVYEKLKPV
TLYEKLKPL

SEQ ID NO: 66053 - protein, 9 aa, synthetic construct
  source 1..9: note = Seed: TVYEKLKPV
TLYEKLKPM

SEQ ID NO: 66054 - protein, 9 aa, synthetic construct
  source 1..9: note = Seed: TVYEKLKPV
TLYEKLKPS

SEQ ID NO: 66055 - protein, 9 aa, synthetic construct
  source 1..9: note = Seed: TVYEKLKPV
TLYEKLKPT

SEQ ID NO: 66056 - protein, 9 aa, synthetic construct
  source 1..9: note = Seed: TVYEKLKPV
TLYEKLKPV

SEQ ID NO: 66057 - protein, 10 aa, synthetic construct
  source 1..10: note = Seed: TVYEKLKPVL
TLYEKLKPVA

SEQ ID NO: 66058 - protein, 10 aa, synthetic construct
  source 1..10: note = Seed: TVYEKLKPVL
TLYEKLKPVC

SEQ ID NO: 66059 - protein, 10 aa, synthetic construct
  source 1..10: note = Seed: TVYEKLKPVL
TLYEKLKPVD

SEQ ID NO: 66060 - protein, 10 aa, synthetic construct
  source 1..10: note = Seed: TVYEKLKPVL
TLYEKLKPVE

SEQ ID NO: 66061 - protein, 10 aa, synthetic construct
  source 1..10: note = Seed: TVYEKLKPVL
TLYEKLKPVF

SEQ ID NO: 66062 - protein, 10 aa, synthetic construct
  source 1..10: note = Seed: TVYEKLKPVL
TLYEKLKPVG

SEQ ID NO: 66063 - protein, 10 aa, synthetic construct
  source 1..10: note = Seed: TVYEKLKPVL
TLYEKLKPVH

SEQ ID NO: 66064 - protein, 10 aa, synthetic construct
  source 1..10: note = Seed: TVYEKLKPVL
TLYEKLKPVI

SEQ ID NO: 66065 - protein, 10 aa, synthetic construct
  source 1..10: note = Seed: TVYEKLKPVL
TLYEKLKPVK

SEQ ID NO: 66066 - protein, 10 aa, synthetic construct
  source 1..10: note = Seed: TVYEKLKPVL
TLYEKLKPVL

SEQ ID NO: 66067 - protein, 10 aa, synthetic construct
  source 1..10: note = Seed: TVYEKLKPVL
TLYEKLKPVM

SEQ ID NO: 66068 - protein, 10 aa, synthetic construct
  source 1..10: note = Seed: TVYEKLKPVL
TLYEKLKPVN

SEQ ID NO: 66069 - protein, 10 aa, synthetic construct
  source 1..10: note = Seed: TVYEKLKPVL
TLYEKLKPVP

SEQ ID NO: 66070 - protein, 10 aa, synthetic construct
  source 1..10: note = Seed: TVYEKLKPVL
TLYEKLKPVQ

SEQ ID NO: 66071 - protein, 10 aa, synthetic construct
  source 1..10: note = Seed: TVYEKLKPVL
TLYEKLKPVR

SEQ ID NO: 66072 - protein, 10 aa, synthetic construct
  source 1..10: note = Seed: TVYEKLKPVL
TLYEKLKPVS

SEQ ID NO: 66073 - protein, 10 aa, synthetic construct
  source 1..10: note = Seed: TVYEKLKPVL
TLYEKLKPVT

SEQ ID NO: 66074 - protein, 10 aa, synthetic construct
  source 1..10: note = Seed: TVYEKLKPVL
TLYEKLKPVV

SEQ ID NO: 66075 - protein, 10 aa, synthetic construct
  source 1..10: note = Seed: TVYEKLKPVL
TLYEKLKPVW

SEQ ID NO: 66076 - protein, 10 aa, synthetic construct
  source 1..10: note = Seed: TVYEKLKPVL
TLYEKLKPVY

SEQ ID NO: 66077 - protein, 10 aa, synthetic construct
  source 1..10: note = Seed: TFYLTNDVSF
TLYLTNDVSF

SEQ ID NO: 66078 - protein, 10 aa, synthetic construct
  source 1..10: note = Seed: TFYLTNDVSF
TLYLTNDVSY

SEQ ID NO: 66079 - protein, 10 aa, synthetic construct
  source 1..10: note = Seed: TKYTMADLVY
TLYTMADLVF

SEQ ID NO: 66080 - protein, 10 aa, synthetic construct
  source 1..10: note = Seed: TKYTMADLVY
TLYTMADLVM

SEQ ID NO: 66081 - protein, 10 aa, synthetic construct
  source 1..10: note = Seed: TKYTMADLVY
TLYTMADLVY

SEQ ID NO: 66082 - protein, 11 aa, synthetic construct
  source 1..11: note = Seed: TKYTMADLVYA
TLYTMADLVYI

SEQ ID NO: 66083 - protein, 11 aa, synthetic construct
  source 1..11: note = Seed: TKYTMADLVYA
TLYTMADLVYL

SEQ ID NO: 66084 - protein, 11 aa, synthetic construct
  source 1..11: note = Seed: TKYTMADLVYA
TLYTMADLVYV

SEQ ID NO: 66085 - protein, 9 aa, synthetic construct
  source 1..9: note = Seed: TYACWHHSI
TMACWHHSF

SEQ ID NO: 66086 - protein, 9 aa, synthetic construct
  source 1..9: note = Seed: TYACWHHSI
TMACWHHSM

SEQ ID NO: 66087 - protein, 9 aa, synthetic construct
  source 1..9: note = Seed: TYACWHHSI
TMACWHHSY

SEQ ID NO: 66088 - protein, 9 aa, synthetic construct
  source 1..9: note = Seed: TMADLVYAL
TMADLVYAA

SEQ ID NO: 66089 - protein, 9 aa, synthetic construct
  source 1..9: note = Seed: TMADLVYAL
TMADLVYAC

SEQ ID NO: 66090 - protein, 9 aa, synthetic construct
  source 1..9: note = Seed: TMADLVYAL
TMADLVYAF

SEQ ID NO: 66091 - protein, 9 aa, synthetic construct
  source 1..9: note = Seed: TMADLVYAL
TMADLVYAG

SEQ ID NO: 66092 - protein, 9 aa, synthetic construct
  source 1..9: note = Seed: TMADLVYAL
TMADLVYAI

SEQ ID NO: 66093 - protein, 10 aa, synthetic construct
  source 1..10: note = Seed: TMADLVYALR
TMADLVYALA

SEQ ID NO: 66094 - protein, 10 aa, synthetic construct
  source 1..10: note = Seed: TMADLVYALR
TMADLVYALC

SEQ ID NO: 66095 - protein, 10 aa, synthetic construct
  source 1..10: note = Seed: TMADLVYALR
TMADLVYALD

SEQ ID NO: 66096 - protein, 10 aa, synthetic construct
  source 1..10: note = Seed: TMADLVYALR
TMADLVYALE

SEQ ID NO: 66097 - protein, 10 aa, synthetic construct
  source 1..10: note = Seed: TMADLVYALR
TMADLVYALF

SEQ ID NO: 66098 - protein, 10 aa, synthetic construct
  source 1..10: note = Seed: TMADLVYALR
TMADLVYALG

SEQ ID NO: 66099 - protein, 10 aa, synthetic construct
  source 1..10: note = Seed: TMADLVYALR
TMADLVYALH

SEQ ID NO: 66100 - protein, 10 aa, synthetic construct
  source 1..10: note = Seed: TMADLVYALR
TMADLVYALI

SEQ ID NO: 66101 - protein, 10 aa, synthetic construct
  source 1..10: note = Seed: TMADLVYALR
TMADLVYALK

SEQ ID NO: 66102 - protein, 10 aa, synthetic construct
  source 1..10: note = Seed: TMADLVYALR
TMADLVYALL

SEQ ID NO: 66103 - protein, 10 aa, synthetic construct
  source 1..10: note = Seed: TMADLVYALR
TMADLVYALM

SEQ ID NO: 66104 - protein, 10 aa, synthetic construct
  source 1..10: note = Seed: TMADLVYALR
TMADLVYALN

SEQ ID NO: 66105 - protein, 10 aa, synthetic construct
  source 1..10: note = Seed: TMADLVYALR
TMADLVYALP

SEQ ID NO: 66106 - protein, 10 aa, synthetic construct
  source 1..10: note = Seed: TMADLVYALR
TMADLVYALQ

SEQ ID NO: 66107 - protein, 11 aa, synthetic construct
  source 1..11: note = Seed: TMADLVYALRH
TMADLVYALRI

SEQ ID NO: 66108 - protein, 11 aa, synthetic construct
  source 1..11: note = Seed: TMADLVYALRH
TMADLVYALRL

SEQ ID NO: 66109 - protein, 11 aa, synthetic construct
  source 1..11: note = Seed: TMADLVYALRH
TMADLVYALRV

SEQ ID NO: 66110 - protein, 10 aa, synthetic construct
  source 1..10: note = Seed: TMADLVYALR
TMADLVYALS

SEQ ID NO: 66111 - protein, 10 aa, synthetic construct
  source 1..10: note = Seed: TMADLVYALR
TMADLVYALT

SEQ ID NO: 66112 - protein, 10 aa, synthetic construct
  source 1..10: note = Seed: TMADLVYALR
TMADLVYALV

SEQ ID NO: 66113 - protein, 10 aa, synthetic construct
  source 1..10: note = Seed: TMADLVYALR
TMADLVYALW

SEQ ID NO: 66114 - protein, 10 aa, synthetic construct
  source 1..10: note = Seed: TMADLVYALR
TMADLVYALY

SEQ ID NO: 66115 - protein, 9 aa, synthetic construct
  source 1..9: note = Seed: TMADLVYAL
TMADLVYAM

SEQ ID NO: 66116 - protein, 9 aa, synthetic construct
  source 1..9: note = Seed: TMADLVYAL
TMADLVYAS

SEQ ID NO: 66117 - protein, 9 aa, synthetic construct
  source 1..9: note = Seed: TMADLVYAL
TMADLVYAT

SEQ ID NO: 66118 - protein, 9 aa, synthetic construct
  source 1..9: note = Seed: TMADLVYAL
TMADLVYAV

SEQ ID NO: 66119 - protein, 9 aa, synthetic construct
  source 1..9: note = Seed: TMADLVYAL
TMADLVYAW

SEQ ID NO: 66120 - protein, 9 aa, synthetic construct
  source 1..9: note = Seed: TMADLVYAL
TMADLVYAY

SEQ ID NO: 66121 - protein, 8 aa, synthetic construct
  source 1..8: note = Seed: TMADLVYA
TMADLVYL

SEQ ID NO: 66122 - protein, 8 aa, synthetic construct
  source 1..8: note = Seed: TMADLVYA
TMADLVYV

SEQ ID NO: 66123 - protein, 9 aa, synthetic construct
  source 1..9: note = Seed: TIAEILLII
TMAEILLIA

SEQ ID NO: 66124 - protein, 9 aa, synthetic construct
  source 1..9: note = Seed: TIAEILLII
TMAEILLII

SEQ ID NO: 66125 - protein, 9 aa, synthetic construct
  source 1..9: note = Seed: TIAEILLII
TMAEILLIL

SEQ ID NO: 66126 - protein, 9 aa, synthetic construct
  source 1..9: note = Seed: TIAEILLII
TMAEILLIM

SEQ ID NO: 66127 - protein, 9 aa, synthetic construct
  source 1..9: note = Seed: TIAEILLII
TMAEILLIT

SEQ ID NO: 66128 - protein, 9 aa, synthetic construct
  source 1..9: note = Seed: TIAEILLII
TMAEILLIV

SEQ ID NO: 66129 - protein, 9 aa, synthetic construct
  source 1..9: note = Seed: TSAFVETVK
TMAFVETVK

SEQ ID NO: 66130 - protein, 9 aa, synthetic construct
  source 1..9: note = Seed: TSAFVETVK
TMAFVETVR

SEQ ID NO: 66131 - protein, 9 aa, synthetic construct
  source 1..9: note = Seed: TSAMQTMLF
TMAMQTMLF

SEQ ID NO: 66132 - protein, 9 aa, synthetic construct
  source 1..9: note = Seed: TSAMQTMLF
TMAMQTMLM

SEQ ID NO: 66133 - protein, 9 aa, synthetic construct
  source 1..9: note = Seed: TSAMQTMLF
TMAMQTMLW

SEQ ID NO: 66134 - protein, 9 aa, synthetic construct
  source 1..9: note = Seed: TSAMQTMLF
TMAMQTMLY

SEQ ID NO: 66135 - protein, 9 aa, synthetic construct
  source 1..9: note = Seed: TVASLINTL
TMASLINTA

SEQ ID NO: 66136 - protein, 9 aa, synthetic construct
  source 1..9: note = Seed: TVASLINTL
TMASLINTI

SEQ ID NO: 66137 - protein, 9 aa, synthetic construct
  source 1..9: note = Seed: TVASLINTL
TMASLINTL

SEQ ID NO: 66138 - protein, 9 aa, synthetic construct
  source 1..9: note = Seed: TVASLINTL
TMASLINTM

SEQ ID NO: 66139 - protein, 9 aa, synthetic construct
  source 1..9: note = Seed: TVASLINTL
TMASLINTT

SEQ ID NO: 66140 - protein, 9 aa, synthetic construct
  source 1..9: note = Seed: TVASLINTL
TMASLINTV

SEQ ID NO: 66141 - protein, 9 aa, synthetic construct
  source 1..9: note = Seed: TSAVLQSGF
TMAVLQSGF

SEQ ID NO: 66142 - protein, 10 aa, synthetic construct
  source 1..10: note = Seed: TSAVLQSGFR
TMAVLQSGFK

SEQ ID NO: 66143 - protein, 10 aa, synthetic construct
  source 1..10: note = Seed: TSAVLQSGFR
TMAVLQSGFR

SEQ ID NO: 66144 - protein, 9 aa, synthetic construct
  source 1..9: note = Seed: TSAVLQSGF
TMAVLQSGY

SEQ ID NO: 66145 - protein, 9 aa, synthetic construct
  source 1..9: note = Seed: TLAVPYNMR
TMAVPYNMR

SEQ ID NO: 66146 - protein, 10 aa, synthetic construct
  source 1..10: note = Seed: TLAVPYNMRV
TMAVPYNMRI

SEQ ID NO: 66147 - protein, 10 aa, synthetic construct
  source 1..10: note = Seed: TLAVPYNMRV
TMAVPYNMRL

SEQ ID NO: 66148 - protein, 10 aa, synthetic construct
  source 1..10: note = Seed: TLAVPYNMRV
TMAVPYNMRV

SEQ ID NO: 66149 - protein, 9 aa, synthetic construct
  source 1..9: note = Seed: TTAYANSVF
TMAYANSVF

SEQ ID NO: 66150 - protein, 11 aa, synthetic construct
  source 1..11: note = Seed: TTAYANSVFNI
TMAYANSVFNF

SEQ ID NO: 66151 - protein, 11 aa, synthetic construct
  source 1..11: note = Seed: TTAYANSVFNI
TMAYANSVFNW

SEQ ID NO: 66152 - protein, 9 aa, synthetic construct
  source 1..9: note = Seed: TTAYANSVF
TMAYANSVL

SEQ ID NO: 66153 - protein, 9 aa, synthetic construct
  source 1..9: note = Seed: TTAYANSVF
TMAYANSVM

SEQ ID NO: 66154 - protein, 9 aa, synthetic construct
  source 1..9: note = Seed: TTAYANSVF
TMAYANSVW

SEQ ID NO: 66155 - protein, 9 aa, synthetic construct
  source 1..9: note = Seed: TTAYANSVF
TMAYANSVY

SEQ ID NO: 66156 - protein, 9 aa, synthetic construct
  source 1..9: note = Seed: TVAYFNMVY
TMAYFNMVF

SEQ ID NO: 66157 - protein, 9 aa, synthetic construct
  source 1..9: note = Seed: TVAYFNMVY
TMAYFNMVH

SEQ ID NO: 66158 - protein, 9 aa, synthetic construct
  source 1..9: note = Seed: TVAYFNMVY
TMAYFNMVI

SEQ ID NO: 66159 - protein, 9 aa, synthetic construct
  source 1..9: note = Seed: TVAYFNMVY
TMAYFNMVK

SEQ ID NO: 66160 - protein, 9 aa, synthetic construct
  source 1..9: note = Seed: TVAYFNMVY
TMAYFNMVL

SEQ ID NO: 66161 - protein, 9 aa, synthetic construct
  source 1..9: note = Seed: TVAYFNMVY
TMAYFNMVM

SEQ ID NO: 66162 - protein, 9 aa, synthetic construct
  source 1..9: note = Seed: TVAYFNMVY
TMAYFNMVR

SEQ ID NO: 66163 - protein, 9 aa, synthetic construct
  source 1..9: note = Seed: TVAYFNMVY
TMAYFNMVW

SEQ ID NO: 66164 - protein, 9 aa, synthetic construct
  source 1..9: note = Seed: TVAYFNMVY
TMAYFNMVY

SEQ ID NO: 66165 - protein, 10 aa, synthetic construct
  source 1..10: note = Seed: TVAYFNMVYM
TMAYFNMVYA

SEQ ID NO: 66166 - protein, 10 aa, synthetic construct
  source 1..10: note = Seed: TVAYFNMVYM
TMAYFNMVYF

SEQ ID NO: 66167 - protein, 10 aa, synthetic construct
  source 1..10: note = Seed: TVAYFNMVYM
TMAYFNMVYI

SEQ ID NO: 66168 - protein, 10 aa, synthetic construct
  source 1..10: note = Seed: TVAYFNMVYM
TMAYFNMVYK

SEQ ID NO: 66169 - protein, 10 aa, synthetic construct
  source 1..10: note = Seed: TVAYFNMVYM
TMAYFNMVYL

SEQ ID NO: 66170 - protein, 10 aa, synthetic construct
  source 1..10: note = Seed: TVAYFNMVYM
TMAYFNMVYM

SEQ ID NO: 66171 - protein, 10 aa, synthetic construct
  source 1..10: note = Seed: TVAYFNMVYM
TMAYFNMVYR

SEQ ID NO: 66172 - protein, 10 aa, synthetic construct
  source 1..10: note = Seed: TVAYFNMVYM
TMAYFNMVYT

SEQ ID NO: 66173 - protein, 10 aa, synthetic construct
  source 1..10: note = Seed: TVAYFNMVYM
TMAYFNMVYV

SEQ ID NO: 66174 - protein, 10 aa, synthetic construct
  source 1..10: note = Seed: TVAYFNMVYM
TMAYFNMVYY

SEQ ID NO: 66175 - protein, 9 aa, synthetic construct
  source 1..9: note = Seed: TLDSKTQSL
TMDSKTQSI

SEQ ID NO: 66176 - protein, 9 aa, synthetic construct
  source 1..9: note = Seed: TLDSKTQSL
TMDSKTQSL

SEQ ID NO: 66177 - protein, 9 aa, synthetic construct
  source 1..9: note = Seed: TLDSKTQSL
TMDSKTQSV

SEQ ID NO: 66178 - protein, 11 aa, synthetic construct
  source 1..11: note = Seed: TIDYTEISFML
TMDYTEISFMF

SEQ ID NO: 66179 - protein, 11 aa, synthetic construct
  source 1..11: note = Seed: TIDYTEISFML
TMDYTEISFMI

SEQ ID NO: 66180 - protein, 11 aa, synthetic construct
  source 1..11: note = Seed: TIDYTEISFML
TMDYTEISFML

SEQ ID NO: 66181 - protein, 11 aa, synthetic construct
  source 1..11: note = Seed: TIDYTEISFML
TMDYTEISFMV

SEQ ID NO: 66182 - protein, 9 aa, synthetic construct
  source 1..9: note = Seed: TSDYYQLYS
TMDYYQLYY

SEQ ID NO: 66183 - protein, 9 aa, synthetic construct
  source 1..9: note = Seed: TLEQYVFCT
TMEQYVFCA

SEQ ID NO: 66184 - protein, 9 aa, synthetic construct
  source 1..9: note = Seed: TLEQYVFCT
TMEQYVFCI

SEQ ID NO: 66185 - protein, 9 aa, synthetic construct
  source 1..9: note = Seed: TLEQYVFCT
TMEQYVFCL

SEQ ID NO: 66186 - protein, 10 aa, synthetic construct
  source 1..10: note = Seed: TLEQYVFCTV
TMEQYVFCTV

SEQ ID NO: 66187 - protein, 9 aa, synthetic construct
  source 1..9: note = Seed: TLEQYVFCT
TMEQYVFCV

SEQ ID NO: 66188 - protein, 10 aa, synthetic construct
  source 1..10: note = Seed: TIEVNSFSGY
TMEVNSFSGF

SEQ ID NO: 66189 - protein, 10 aa, synthetic construct
  source 1..10: note = Seed: TIEVNSFSGY
TMEVNSFSGW

SEQ ID NO: 66190 - protein, 10 aa, synthetic construct
  source 1..10: note = Seed: TIEVNSFSGY
TMEVNSFSGY

SEQ ID NO: 66191 - protein, 9 aa, synthetic construct
  source 1..9: note = Seed: TFEYVSQPF
TMEYVSQPF

SEQ ID NO: 66192 - protein, 9 aa, synthetic construct
  source 1..9: note = Seed: TFEYVSQPF
TMEYVSQPM

SEQ ID NO: 66193 - protein, 9 aa, synthetic construct
  source 1..9: note = Seed: TFEYVSQPF
TMEYVSQPY

SEQ ID NO: 66194 - protein, 9 aa, synthetic construct
  source 1..9: note = Seed: TRFASVYAW
TMFASVYAF

SEQ ID NO: 66195 - protein, 9 aa, synthetic construct
  source 1..9: note = Seed: TRFASVYAW
TMFASVYAH

SEQ ID NO: 66196 - protein, 9 aa, synthetic construct
  source 1..9: note = Seed: TRFASVYAW
TMFASVYAI

SEQ ID NO: 66197 - protein, 9 aa, synthetic construct
  source 1..9: note = Seed: TRFASVYAW
TMFASVYAL

SEQ ID NO: 66198 - protein, 9 aa, synthetic construct
  source 1..9: note = Seed: TRFASVYAW
TMFASVYAM

SEQ ID NO: 66199 - protein, 9 aa, synthetic construct
  source 1..9: note = Seed: TRFASVYAW
TMFASVYAV

SEQ ID NO: 66200 - protein, 9 aa, synthetic construct
  source 1..9: note = Seed: TRFASVYAW
TMFASVYAW

SEQ ID NO: 66201 - protein, 9 aa, synthetic construct
  source 1..9: note = Seed: TRFASVYAW
TMFASVYAY

SEQ ID NO: 66202 - protein, 9 aa, synthetic construct
  source 1..9: note = Seed: TPFEIKLAK
TMFEIKLAK

SEQ ID NO: 66203 - protein, 10 aa, synthetic construct
  source 1..10: note = Seed: TPFEIKLAKK
TMFEIKLAKR

SEQ ID NO: 66204 - protein, 9 aa, synthetic construct
  source 1..9: note = Seed: TPFEIKLAK
TMFEIKLAR

SEQ ID NO: 66205 - protein, 9 aa, synthetic construct
  source 1..9: note = Seed: TRFFYVLGL
TMFFYVLGF

SEQ ID NO: 66206 - protein, 9 aa, synthetic construct
  source 1..9: note = Seed: TRFFYVLGL
TMFFYVLGM

SEQ ID NO: 66207 - protein, 9 aa, synthetic construct
  source 1..9: note = Seed: TRFFYVLGL
TMFFYVLGY

SEQ ID NO: 66208 - protein, 9 aa, synthetic construct
  source 1..9: note = Seed: TIFKDASGK
TMFKDASGK

SEQ ID NO: 66209 - protein, 9 aa, synthetic construct
  source 1..9: note = Seed: TIFKDASGK
TMFKDASGR

SEQ ID NO: 66210 - protein, 9 aa, synthetic construct
  source 1..9: note = Seed: TQFNYYKKV
TMFNYYKKA

SEQ ID NO: 66211 - protein, 9 aa, synthetic construct
  source 1..9: note = Seed: TQFNYYKKV
TMFNYYKKF

SEQ ID NO: 66212 - protein, 9 aa, synthetic construct
  source 1..9: note = Seed: TQFNYYKKV
TMFNYYKKI

SEQ ID NO: 66213 - protein, 9 aa, synthetic construct
  source 1..9: note = Seed: TQFNYYKKV
TMFNYYKKL

SEQ ID NO: 66214 - protein, 9 aa, synthetic construct
  source 1..9: note = Seed: TQFNYYKKV
TMFNYYKKM

SEQ ID NO: 66215 - protein, 9 aa, synthetic construct
  source 1..9: note = Seed: TQFNYYKKV
TMFNYYKKV

SEQ ID NO: 66216 - protein, 9 aa, synthetic construct
  source 1..9: note = Seed: TQFNYYKKV
TMFNYYKKY

SEQ ID NO: 66217 - protein, 10 aa, synthetic construct
  source 1..10: note = Seed: TWFSQRGGSY
TMFSQRGGSY

SEQ ID NO: 66218 - protein, 9 aa, synthetic construct
  source 1..9: note = Seed: TCFSTQFAF
TMFSTQFAF

SEQ ID NO: 66219 - protein, 9 aa, synthetic construct
  source 1..9: note = Seed: TCFSTQFAF
TMFSTQFAI

SEQ ID NO: 66220 - protein, 9 aa, synthetic construct
  source 1..9: note = Seed: TCFSTQFAF
TMFSTQFAL

SEQ ID NO: 66221 - protein, 9 aa, synthetic construct
  source 1..9: note = Seed: TCFSTQFAF
TMFSTQFAM

SEQ ID NO: 66222 - protein, 9 aa, synthetic construct
  source 1..9: note = Seed: TCFSTQFAF
TMFSTQFAW

SEQ ID NO: 66223 - protein, 9 aa, synthetic construct
  source 1..9: note = Seed: TCFSTQFAF
TMFSTQFAY

SEQ ID NO: 66224 - protein, 11 aa, synthetic construct
  source 1..11: note = Seed: TNGDFLHFLPR
TMGDFLHFLPR

SEQ ID NO: 66225 - protein, 10 aa, synthetic construct
  source 1..10: note = Seed: TNGVGYQPYR
TMGVGYQPYR

SEQ ID NO: 66226 - protein, 9 aa, synthetic construct
  source 1..9: note = Seed: TLGVYDYLV
TMGVYDYLI

SEQ ID NO: 66227 - protein, 9 aa, synthetic construct
  source 1..9: note = Seed: TLGVYDYLV
TMGVYDYLL

SEQ ID NO: 66228 - protein, 9 aa, synthetic construct
  source 1..9: note = Seed: TLGVYDYLV
TMGVYDYLV

SEQ ID NO: 66229 - protein, 11 aa, synthetic construct
  source 1..11: note = Seed: TLGVYDYLVST
TMGVYDYLVSA

SEQ ID NO: 66230 - protein, 11 aa, synthetic construct
  source 1..11: note = Seed: TLGVYDYLVST
TMGVYDYLVSI

SEQ ID NO: 66231 - protein, 11 aa, synthetic construct
  source 1..11: note = Seed: TLGVYDYLVST
TMGVYDYLVSL

SEQ ID NO: 66232 - protein, 11 aa, synthetic construct
  source 1..11: note = Seed: TLGVYDYLVST
TMGVYDYLVSV

SEQ ID NO: 66233 - protein, 11 aa, synthetic construct
  source 1..11: note = Seed: TKHFYWFFSNY
TMHFYWFFSNY

SEQ ID NO: 66234 - protein, 9 aa, synthetic construct
  source 1..9: note = Seed: TAHSCNVNR
TMHSCNVNK

SEQ ID NO: 66235 - protein, 9 aa, synthetic construct
  source 1..9: note = Seed: TAHSCNVNR
TMHSCNVNR

SEQ ID NO: 66236 - protein, 9 aa, synthetic construct
  source 1..9: note = Seed: TPHTVLQAV
TMHTVLQAY

SEQ ID NO: 66237 - protein, 10 aa, synthetic construct
  source 1..10: note = Seed: TWICLLQFAY
TMICLLQFAY

SEQ ID NO: 66238 - protein, 9 aa, synthetic construct
  source 1..9: note = Seed: TTIKPVTYK
TMIKPVTYK

SEQ ID NO: 66239 - protein, 10 aa, synthetic construct
  source 1..10: note = Seed: TTIKPVTYKL
TMIKPVTYKK

SEQ ID NO: 66240 - protein, 10 aa, synthetic construct
  source 1..10: note = Seed: TTIKPVTYKL
TMIKPVTYKR

SEQ ID NO: 66241 - protein, 9 aa, synthetic construct
  source 1..9: note = Seed: TTIKPVTYK
TMIKPVTYR

SEQ ID NO: 66242 - protein, 9 aa, synthetic construct
  source 1..9: note = Seed: TLIVNSVLL
TMIVNSVLI

SEQ ID NO: 66243 - protein, 9 aa, synthetic construct
  source 1..9: note = Seed: TLIVNSVLL
TMIVNSVLL

SEQ ID NO: 66244 - protein, 10 aa, synthetic construct
  source 1..10: note = Seed: TLIVNSVLLF
TMIVNSVLLF

SEQ ID NO: 66245 - protein, 11 aa, synthetic construct
  source 1..11: note = Seed: TLIVNSVLLFL
TMIVNSVLLFV

SEQ ID NO: 66246 - protein, 10 aa, synthetic construct
  source 1..10: note = Seed: TLIVNSVLLF
TMIVNSVLLY

SEQ ID NO: 66247 - protein, 9 aa, synthetic construct
  source 1..9: note = Seed: TLIVNSVLL
TMIVNSVLV

SEQ ID NO: 66248 - protein, 10 aa, synthetic construct
  source 1..10: note = Seed: TNIVTRCLNR
TMIVTRCLNR

SEQ ID NO: 66249 - protein, 9 aa, synthetic construct
  source 1..9: note = Seed: TGKIADYNY
TMKIADYNY

SEQ ID NO: 66250 - protein, 9 aa, synthetic construct
  source 1..9: note = Seed: TVKPGNFNK
TMKPGNFNK

SEQ ID NO: 66251 - protein, 9 aa, synthetic construct
  source 1..9: note = Seed: TVKPGNFNK
TMKPGNFNR

SEQ ID NO: 66252 - protein, 9 aa, synthetic construct
  source 1..9: note = Seed: TIKPVTYKL
TMKPVTYKL

SEQ ID NO: 66253 - protein, 9 aa, synthetic construct
  source 1..9: note = Seed: TIKPVTYKL
TMKPVTYKV

SEQ ID NO: 66254 - protein, 10 aa, synthetic construct
  source 1..10: note = Seed: TNLCPFGEVF
TMLCPFGEVF

SEQ ID NO: 66255 - protein, 10 aa, synthetic construct
  source 1..10: note = Seed: TNLCPFGEVF
TMLCPFGEVY

SEQ ID NO: 66256 - protein, 10 aa, synthetic construct
  source 1..10: note = Seed: TGLFKDCSKV
TMLFKDCSKV

SEQ ID NO: 66257 - protein, 10 aa, synthetic construct
  source 1..10: note = Seed: TFLLNKEMYL
TMLLNKEMYI

SEQ ID NO: 66258 - protein, 10 aa, synthetic construct
  source 1..10: note = Seed: TFLLNKEMYL
TMLLNKEMYL

SEQ ID NO: 66259 - protein, 10 aa, synthetic construct
  source 1..10: note = Seed: TFLLNKEMYL
TMLLNKEMYV

SEQ ID NO: 66260 - protein, 9 aa, synthetic construct
  source 1..9: note = Seed: TLLLQLCTF
TMLLQLCTF

SEQ ID NO: 66261 - protein, 10 aa, synthetic construct
  source 1..10: note = Seed: TLLLQLCTFT
TMLLQLCTFI

SEQ ID NO: 66262 - protein, 10 aa, synthetic construct
  source 1..10: note = Seed: TLLLQLCTFT
TMLLQLCTFL

SEQ ID NO: 66263 - protein, 10 aa, synthetic construct
  source 1..10: note = Seed: TLLLQLCTFT
TMLLQLCTFV

SEQ ID NO: 66264 - protein, 9 aa, synthetic construct
  source 1..9: note = Seed: TLLLQLCTF
TMLLQLCTM

SEQ ID NO: 66265 - protein, 9 aa, synthetic construct
  source 1..9: note = Seed: TLLLQLCTF
TMLLQLCTY

SEQ ID NO: 66266 - protein, 9 aa, synthetic construct
  source 1..9: note = Seed: TTLPVNVAF
TMLPVNVAF

SEQ ID NO: 66267 - protein, 9 aa, synthetic construct
  source 1..9: note = Seed: TTLPVNVAF
TMLPVNVAM

SEQ ID NO: 66268 - protein, 9 aa, synthetic construct
  source 1..9: note = Seed: TTLPVNVAF
TMLPVNVAW

SEQ ID NO: 66269 - protein, 9 aa, synthetic construct
  source 1..9: note = Seed: TTLPVNVAF
TMLPVNVAY

SEQ ID NO: 66270 - protein, 9 aa, synthetic construct
  source 1..9: note = Seed: TSLSGFKLK
TMLSGFKLK

SEQ ID NO: 66271 - protein, 9 aa, synthetic construct
  source 1..9: note = Seed: TSLSGFKLK
TMLSGFKLR

SEQ ID NO: 66272 - protein, 9 aa, synthetic construct
  source 1..9: note = Seed: TILTSLLVL
TMLTSLLVA

SEQ ID NO: 66273 - protein, 9 aa, synthetic construct
  source 1..9: note = Seed: TILTSLLVL
TMLTSLLVI

SEQ ID NO: 66274 - protein, 9 aa, synthetic construct
  source 1..9: note = Seed: TILTSLLVL
TMLTSLLVL

SEQ ID NO: 66275 - protein, 10 aa, synthetic construct
  source 1..10: note = Seed: TILTSLLVLV
TMLTSLLVLA

SEQ ID NO: 66276 - protein, 10 aa, synthetic construct
  source 1..10: note = Seed: TILTSLLVLV
TMLTSLLVLI

SEQ ID NO: 66277 - protein, 10 aa, synthetic construct
  source 1..10: note = Seed: TILTSLLVLV
TMLTSLLVLL

SEQ ID NO: 66278 - protein, 10 aa, synthetic construct
  source 1..10: note = Seed: TILTSLLVLV
TMLTSLLVLV

SEQ ID NO: 66279 - protein, 9 aa, synthetic construct
  source 1..9: note = Seed: TILTSLLVL
TMLTSLLVV

SEQ ID NO: 66280 - protein, 10 aa, synthetic construct
  source 1..10: note = Seed: TPLVPFWITI
TMLVPFWITA

SEQ ID NO: 66281 - protein, 10 aa, synthetic construct
  source 1..10: note = Seed: TPLVPFWITI
TMLVPFWITI

SEQ ID NO: 66282 - protein, 10 aa, synthetic construct
  source 1..10: note = Seed: TPLVPFWITI
TMLVPFWITL

SEQ ID NO: 66283 - protein, 10 aa, synthetic construct
  source 1..10: note = Seed: TPLVPFWITI
TMLVPFWITV

SEQ ID NO: 66284 - protein, 10 aa, synthetic construct
  source 1..10: note = Seed: TQLYLGGMSY
TMLYLGGMSF

SEQ ID NO: 66285 - protein, 10 aa, synthetic construct
  source 1..10: note = Seed: TQLYLGGMSY
TMLYLGGMSK

SEQ ID NO: 66286 - protein, 10 aa, synthetic construct
  source 1..10: note = Seed: TQLYLGGMSY
TMLYLGGMSM

SEQ ID NO: 66287 - protein, 10 aa, synthetic construct
  source 1..10: note = Seed: TQLYLGGMSY
TMLYLGGMSY

SEQ ID NO: 66288 - protein, 11 aa, synthetic construct
  source 1..11: note = Seed: TQLYLGGMSYY
TMLYLGGMSYY

SEQ ID NO: 66289 - protein, 10 aa, synthetic construct
  source 1..10: note = Seed: TLMIERFVSL
TMMIERFVSA

SEQ ID NO: 66290 - protein, 10 aa, synthetic construct
  source 1..10: note = Seed: TLMIERFVSL
TMMIERFVSF

SEQ ID NO: 66291 - protein, 10 aa, synthetic construct
  source 1..10: note = Seed: TLMIERFVSL
TMMIERFVSI

SEQ ID NO: 66292 - protein, 10 aa, synthetic construct
  source 1..10: note = Seed: TLMIERFVSL
TMMIERFVSL

SEQ ID NO: 66293 - protein, 11 aa, synthetic construct
  source 1..11: note = Seed: TLMIERFVSLA
TMMIERFVSLV

SEQ ID NO: 66294 - protein, 10 aa, synthetic construct
  source 1..10: note = Seed: TLMIERFVSL
TMMIERFVSM

SEQ ID NO: 66295 - protein, 10 aa, synthetic construct
  source 1..10: note = Seed: TLMIERFVSL
TMMIERFVSV

SEQ ID NO: 66296 - protein, 10 aa, synthetic construct
  source 1..10: note = Seed: TLMIERFVSL
TMMIERFVSY

SEQ ID NO: 66297 - protein, 9 aa, synthetic construct
  source 1..9: note = Seed: TSMKYFVKI
TMMKYFVKA

SEQ ID NO: 66298 - protein, 9 aa, synthetic construct
  source 1..9: note = Seed: TSMKYFVKI
TMMKYFVKC

SEQ ID NO: 66299 - protein, 9 aa, synthetic construct
  source 1..9: note = Seed: TSMKYFVKI
TMMKYFVKF

SEQ ID NO: 66300 - protein, 9 aa, synthetic construct
  source 1..9: note = Seed: TSMKYFVKI
TMMKYFVKI

SEQ ID NO: 66301 - protein, 9 aa, synthetic construct
  source 1..9: note = Seed: TSMKYFVKI
TMMKYFVKL

SEQ ID NO: 66302 - protein, 9 aa, synthetic construct
  source 1..9: note = Seed: TSMKYFVKI
TMMKYFVKM

SEQ ID NO: 66303 - protein, 9 aa, synthetic construct
  source 1..9: note = Seed: TSMKYFVKI
TMMKYFVKT

SEQ ID NO: 66304 - protein, 9 aa, synthetic construct
  source 1..9: note = Seed: TSMKYFVKI
TMMKYFVKV

SEQ ID NO: 66305 - protein, 9 aa, synthetic construct
  source 1..9: note = Seed: TSMKYFVKI
TMMKYFVKW

SEQ ID NO: 66306 - protein, 10 aa, synthetic construct
  source 1..10: note = Seed: TCMMCYKRNR
TMMMCYKRNR

SEQ ID NO: 66307 - protein, 9 aa, synthetic construct
  source 1..9: note = Seed: TQMNLKYAI
TMMNLKYAA

SEQ ID NO: 66308 - protein, 9 aa, synthetic construct
  source 1..9: note = Seed: TQMNLKYAI
TMMNLKYAF

SEQ ID NO: 66309 - protein, 9 aa, synthetic construct
  source 1..9: note = Seed: TQMNLKYAI
TMMNLKYAI

SEQ ID NO: 66310 - protein, 9 aa, synthetic construct
  source 1..9: note = Seed: TQMNLKYAI
TMMNLKYAL

SEQ ID NO: 66311 - protein, 9 aa, synthetic construct
  source 1..9: note = Seed: TQMNLKYAI
TMMNLKYAM

SEQ ID NO: 66312 - protein, 9 aa, synthetic construct
  source 1..9: note = Seed: TQMNLKYAI
TMMNLKYAV

SEQ ID NO: 66313 - protein, 9 aa, synthetic construct
  source 1..9: note = Seed: TQMNLKYAI
TMMNLKYAW

SEQ ID NO: 66314 - protein, 9 aa, synthetic construct
  source 1..9: note = Seed: TQMNLKYAI
TMMNLKYAY

SEQ ID NO: 66315 - protein, 9 aa, synthetic construct
  source 1..9: note = Seed: TLNDFNLVA
TMNDFNLVA

SEQ ID NO: 66316 - protein, 10 aa, synthetic construct
  source 1..10: note = Seed: TLNDFNLVAM
TMNDFNLVAA

SEQ ID NO: 66317 - protein, 10 aa, synthetic construct
  source 1..10: note = Seed: TLNDFNLVAM
TMNDFNLVAF

SEQ ID NO: 66318 - protein, 10 aa, synthetic construct
  source 1..10: note = Seed: TLNDFNLVAM
TMNDFNLVAI

SEQ ID NO: 66319 - protein, 10 aa, synthetic construct
  source 1..10: note = Seed: TLNDFNLVAM
TMNDFNLVAL

SEQ ID NO: 66320 - protein, 10 aa, synthetic construct
  source 1..10: note = Seed: TLNDFNLVAM
TMNDFNLVAM

SEQ ID NO: 66321 - protein, 10 aa, synthetic construct
  source 1..10: note = Seed: TLNDFNLVAM
TMNDFNLVAV

SEQ ID NO: 66322 - protein, 10 aa, synthetic construct
  source 1..10: note = Seed: TLNDFNLVAM
TMNDFNLVAY

SEQ ID NO: 66323 - protein, 9 aa, synthetic construct
  source 1..9: note = Seed: TLNDFNLVA
TMNDFNLVI

SEQ ID NO: 66324 - protein, 9 aa, synthetic construct
  source 1..9: note = Seed: TLNDFNLVA
TMNDFNLVL

SEQ ID NO: 66325 - protein, 9 aa, synthetic construct
  source 1..9: note = Seed: TLNDFNLVA
TMNDFNLVM

SEQ ID NO: 66326 - protein, 9 aa, synthetic construct
  source 1..9: note = Seed: TLNDFNLVA
TMNDFNLVV

SEQ ID NO: 66327 - protein, 9 aa, synthetic construct
  source 1..9: note = Seed: TLNDLNETL
TMNDLNETA

SEQ ID NO: 66328 - protein, 9 aa, synthetic construct
  source 1..9: note = Seed: TLNDLNETL
TMNDLNETI

SEQ ID NO: 66329 - protein, 9 aa, synthetic construct
  source 1..9: note = Seed: TLNDLNETL
TMNDLNETL

SEQ ID NO: 66330 - protein, 10 aa, synthetic construct
  source 1..10: note = Seed: TLNDLNETLV
TMNDLNETLI

SEQ ID NO: 66331 - protein, 10 aa, synthetic construct
  source 1..10: note = Seed: TLNDLNETLV
TMNDLNETLL

SEQ ID NO: 66332 - protein, 10 aa, synthetic construct
  source 1..10: note = Seed: TLNDLNETLV
TMNDLNETLM

SEQ ID NO: 66333 - protein, 10 aa, synthetic construct
  source 1..10: note = Seed: TLNDLNETLV
TMNDLNETLV

SEQ ID NO: 66334 - protein, 9 aa, synthetic construct
  source 1..9: note = Seed: TLNDLNETL
TMNDLNETM

SEQ ID NO: 66335 - protein, 9 aa, synthetic construct
  source 1..9: note = Seed: TLNDLNETL
TMNDLNETV

SEQ ID NO: 66336 - protein, 9 aa, synthetic construct
  source 1..9: note = Seed: TTNGDFLHF
TMNGDFLHF

SEQ ID NO: 66337 - protein, 10 aa, synthetic construct
  source 1..10: note = Seed: TTNGDFLHFL
TMNGDFLHFA

SEQ ID NO: 66338 - protein, 10 aa, synthetic construct
  source 1..10: note = Seed: TTNGDFLHFL
TMNGDFLHFI

SEQ ID NO: 66339 - protein, 10 aa, synthetic construct
  source 1..10: note = Seed: TTNGDFLHFL
TMNGDFLHFL

SEQ ID NO: 66340 - protein, 10 aa, synthetic construct
  source 1..10: note = Seed: TTNGDFLHFL
TMNGDFLHFM

SEQ ID NO: 66341 - protein, 10 aa, synthetic construct
  source 1..10: note = Seed: TTNGDFLHFL
TMNGDFLHFV

SEQ ID NO: 66342 - protein, 9 aa, synthetic construct
  source 1..9: note = Seed: TTNGDFLHF
TMNGDFLHM

SEQ ID NO: 66343 - protein, 9 aa, synthetic construct
  source 1..9: note = Seed: TTNGDFLHF
TMNGDFLHW

SEQ ID NO: 66344 - protein, 9 aa, synthetic construct
  source 1..9: note = Seed: TTNGDFLHF
TMNGDFLHY

SEQ ID NO: 66345 - protein, 9 aa, synthetic construct
  source 1..9: note = Seed: TSNPTTFHL
TMNPTTFHW

SEQ ID NO: 66346 - protein, 9 aa, synthetic construct
  source 1..9: note = Seed: TVNVLAWLY
TMNVLAWLK

SEQ ID NO: 66347 - protein, 9 aa, synthetic construct
  source 1..9: note = Seed: TVNVLAWLY
TMNVLAWLR

SEQ ID NO: 66348 - protein, 9 aa, synthetic construct
  source 1..9: note = Seed: TVNVLAWLY
TMNVLAWLY

SEQ ID NO: 66349 - protein, 11 aa, synthetic construct
  source 1..11: note = Seed: TVNVLAWLYAA
TMNVLAWLYAV

SEQ ID NO: 66350 - protein, 9 aa, synthetic construct
  source 1..9: note = Seed: TGNYQCGHY
TMNYQCGHY

SEQ ID NO: 66351 - protein, 10 aa, synthetic construct
  source 1..10: note = Seed: TGNYQCGHYK
TMNYQCGHYK

SEQ ID NO: 66352 - protein, 10 aa, synthetic construct
  source 1..10: note = Seed: TGNYQCGHYK
TMNYQCGHYR

SEQ ID NO: 66353 - protein, 10 aa, synthetic construct
  source 1..10: note = Seed: TLPVNVAFEL
TMPVNVAFEF

SEQ ID NO: 66354 - protein, 10 aa, synthetic construct
  source 1..10: note = Seed: TLPVNVAFEL
TMPVNVAFEI

SEQ ID NO: 66355 - protein, 10 aa, synthetic construct
  source 1..10: note = Seed: TLPVNVAFEL
TMPVNVAFEL

SEQ ID NO: 66356 - protein, 11 aa, synthetic construct
  source 1..11: note = Seed: TLPVNVAFELW
TMPVNVAFELW

SEQ ID NO: 66357 - protein, 10 aa, synthetic construct
  source 1..10: note = Seed: TLPVNVAFEL
TMPVNVAFEM

SEQ ID NO: 66358 - protein, 10 aa, synthetic construct
  source 1..10: note = Seed: TLPVNVAFEL
TMPVNVAFEV

SEQ ID NO: 66359 - protein, 10 aa, synthetic construct
  source 1..10: note = Seed: TLPVNVAFEL
TMPVNVAFEW

SEQ ID NO: 66360 - protein, 10 aa, synthetic construct
  source 1..10: note = Seed: TLPVNVAFEL
TMPVNVAFEY

SEQ ID NO: 66361 - protein, 10 aa, synthetic construct
  source 1..10: note = Seed: TLQAENVTGL
TMQAENVTGA

SEQ ID NO: 66362 - protein, 10 aa, synthetic construct
  source 1..10: note = Seed: TLQAENVTGL
TMQAENVTGI

SEQ ID NO: 66363 - protein, 10 aa, synthetic construct
  source 1..10: note = Seed: TLQAENVTGL
TMQAENVTGL

SEQ ID NO: 66364 - protein, 10 aa, synthetic construct
  source 1..10: note = Seed: TLQAENVTGL
TMQAENVTGV

SEQ ID NO: 66365 - protein, 9 aa, synthetic construct
  source 1..9: note = Seed: TLQAIASEF
TMQAIASEF

SEQ ID NO: 66366 - protein, 9 aa, synthetic construct
  source 1..9: note = Seed: TLQAIASEF
TMQAIASEM

SEQ ID NO: 66367 - protein, 9 aa, synthetic construct
  source 1..9: note = Seed: TLQAIASEF
TMQAIASEY

SEQ ID NO: 66368 - protein, 9 aa, synthetic construct
  source 1..9: note = Seed: TIQITISSF
TMQITISSF

SEQ ID NO: 66369 - protein, 10 aa, synthetic construct
  source 1..10: note = Seed: TIQITISSFK
TMQITISSFK

SEQ ID NO: 66370 - protein, 10 aa, synthetic construct
  source 1..10: note = Seed: TIQITISSFK
TMQITISSFR

SEQ ID NO: 66371 - protein, 9 aa, synthetic construct
  source 1..9: note = Seed: TIQITISSF
TMQITISSM

SEQ ID NO: 66372 - protein, 9 aa, synthetic construct
  source 1..9: note = Seed: TIQITISSF
TMQITISSY

SEQ ID NO: 66373 - protein, 11 aa, synthetic construct
  source 1..11: note = Seed: TRQVVNVVTTK
TMQVVNVVTTR

SEQ ID NO: 66374 - protein, 9 aa, synthetic construct
  source 1..9: note = Seed: TVREVLSDR
TMREVLSDR

SEQ ID NO: 66375 - protein, 10 aa, synthetic construct
  source 1..10: note = Seed: TGRLQSLQTY
TMRLQSLQTF

SEQ ID NO: 66376 - protein, 10 aa, synthetic construct
  source 1..10: note = Seed: TGRLQSLQTY
TMRLQSLQTY

SEQ ID NO: 66377 - protein, 9 aa, synthetic construct
  source 1..9: note = Seed: TTRQVVNVV
TMRQVVNVK

SEQ ID NO: 66378 - protein, 9 aa, synthetic construct
  source 1..9: note = Seed: TYRRLISMM
TMRRLISMK

SEQ ID NO: 66379 - protein, 10 aa, synthetic construct
  source 1..10: note = Seed: TSSGDATTAY
TMSGDATTAF

SEQ ID NO: 66380 - protein, 10 aa, synthetic construct
  source 1..10: note = Seed: TSSGDATTAY
TMSGDATTAY

SEQ ID NO: 66381 - protein, 9 aa, synthetic construct
  source 1..9: note = Seed: TISLAGSYK
TMSLAGSYK

SEQ ID NO: 66382 - protein, 11 aa, synthetic construct
  source 1..11: note = Seed: TISLAGSYKDW
TMSLAGSYKDW

SEQ ID NO: 66383 - protein, 9 aa, synthetic construct
  source 1..9: note = Seed: TISLAGSYK
TMSLAGSYR

SEQ ID NO: 66384 - protein, 9 aa, synthetic construct
  source 1..9: note = Seed: TGSNVFQTR
TMSNVFQTR

SEQ ID NO: 66385 - protein, 9 aa, synthetic construct
  source 1..9: note = Seed: TQSRNLQEF
TMSRNLQEF

SEQ ID NO: 66386 - protein, 10 aa, synthetic construct
  source 1..10: note = Seed: TQSRNLQEFK
TMSRNLQEFR

SEQ ID NO: 66387 - protein, 9 aa, synthetic construct
  source 1..9: note = Seed: TQSRNLQEF
TMSRNLQEY

SEQ ID NO: 66388 - protein, 9 aa, synthetic construct
  source 1..9: note = Seed: TISSFKWDL
TMSSFKWDI

SEQ ID NO: 66389 - protein, 9 aa, synthetic construct
  source 1..9: note = Seed: TISSFKWDL
TMSSFKWDL

SEQ ID NO: 66390 - protein, 9 aa, synthetic construct
  source 1..9: note = Seed: TISSFKWDL
TMSSFKWDV

SEQ ID NO: 66391 - protein, 9 aa, synthetic construct
  source 1..9: note = Seed: TASWFTALT
TMSWFTALA

SEQ ID NO: 66392 - protein, 9 aa, synthetic construct
  source 1..9: note = Seed: TASWFTALT
TMSWFTALI

SEQ ID NO: 66393 - protein, 9 aa, synthetic construct
  source 1..9: note = Seed: TASWFTALT
TMSWFTALL

SEQ ID NO: 66394 - protein, 9 aa, synthetic construct
  source 1..9: note = Seed: TASWFTALT
TMSWFTALV

SEQ ID NO: 66395 - protein, 9 aa, synthetic construct
  source 1..9: note = Seed: TLSYEQFKK
TMSYEQFKK

SEQ ID NO: 66396 - protein, 9 aa, synthetic construct
  source 1..9: note = Seed: TLSYEQFKK
TMSYEQFKR

SEQ ID NO: 66397 - protein, 10 aa, synthetic construct
  source 1..10: note = Seed: TITDAVDCAL
TMTDAVDCAL

SEQ ID NO: 66398 - protein, 10 aa, synthetic construct
  source 1..10: note = Seed: TITDAVDCAL
TMTDAVDCAV

SEQ ID NO: 66399 - protein, 10 aa, synthetic construct
  source 1..10: note = Seed: TTTIKPVTYK
TMTIKPVTYK

SEQ ID NO: 66400 - protein, 10 aa, synthetic construct
  source 1..10: note = Seed: TTTIKPVTYK
TMTIKPVTYR

SEQ ID NO: 66401 - protein, 10 aa, synthetic construct
  source 1..10: note = Seed: TMTNRQFHQK
TMTNRQFHQR

SEQ ID NO: 66402 - protein, 9 aa, synthetic construct
  source 1..9: note = Seed: TITQMNLKY
TMTQMNLKY

SEQ ID NO: 66403 - protein, 10 aa, synthetic construct
  source 1..10: note = Seed: TITVNVLAWL
TMTVNVLAWA

SEQ ID NO: 66404 - protein, 10 aa, synthetic construct
  source 1..10: note = Seed: TITVNVLAWL
TMTVNVLAWI

SEQ ID NO: 66405 - protein, 10 aa, synthetic construct
  source 1..10: note = Seed: TITVNVLAWL
TMTVNVLAWL

SEQ ID NO: 66406 - protein, 10 aa, synthetic construct
  source 1..10: note = Seed: TITVNVLAWL
TMTVNVLAWV

SEQ ID NO: 66407 - protein, 9 aa, synthetic construct
  source 1..9: note = Seed: TTVDNINLH
TMVDNINLK

SEQ ID NO: 66408 - protein, 9 aa, synthetic construct
  source 1..9: note = Seed: TTVDNINLH
TMVDNINLR

SEQ ID NO: 66409 - protein, 10 aa, synthetic construct
  source 1..10: note = Seed: TNVLEGSVAY
TMVLEGSVAF

SEQ ID NO: 66410 - protein, 10 aa, synthetic construct
  source 1..10: note = Seed: TNVLEGSVAY
TMVLEGSVAM

SEQ ID NO: 66411 - protein, 10 aa, synthetic construct
  source 1..10: note = Seed: TNVLEGSVAY
TMVLEGSVAY

SEQ ID NO: 66412 - protein, 10 aa, synthetic construct
  source 1..10: note = Seed: TEVNEFACVV
TMVNEFACVV

SEQ ID NO: 66413 - protein, 10 aa, synthetic construct
  source 1..10: note = Seed: TLVSDIDITF
TMVSDIDITF

SEQ ID NO: 66414 - protein, 11 aa, synthetic construct
  source 1..11: note = Seed: TLVSDIDITFL
TMVSDIDITFV

SEQ ID NO: 66415 - protein, 10 aa, synthetic construct
  source 1..10: note = Seed: TLVSDIDITF
TMVSDIDITI

SEQ ID NO: 66416 - protein, 10 aa, synthetic construct
  source 1..10: note = Seed: TLVSDIDITF
TMVSDIDITL

SEQ ID NO: 66417 - protein, 10 aa, synthetic construct
  source 1..10: note = Seed: TLVSDIDITF
TMVSDIDITM

SEQ ID NO: 66418 - protein, 10 aa, synthetic construct
  source 1..10: note = Seed: TLVSDIDITF
TMVSDIDITV

SEQ ID NO: 66419 - protein, 10 aa, synthetic construct
  source 1..10: note = Seed: TLVSDIDITF
TMVSDIDITY

SEQ ID NO: 66420 - protein, 10 aa, synthetic construct
  source 1..10: note = Seed: TEVVGDIILK
TMVVGDIILK

SEQ ID NO: 66421 - protein, 10 aa, synthetic construct
  source 1..10: note = Seed: TEVVGDIILK
TMVVGDIILR

SEQ ID NO: 66422 - protein, 9 aa, synthetic construct
  source 1..9: note = Seed: TVVVNAANV
TMVVNAANV

SEQ ID NO: 66423 - protein, 9 aa, synthetic construct
  source 1..9: note = Seed: TPVVQTIEV
TMVVQTIEY

SEQ ID NO: 66424 - protein, 9 aa, synthetic construct
  source 1..9: note = Seed: TNVYADSFV
TMVYADSFV

SEQ ID NO: 66425 - protein, 9 aa, synthetic construct
  source 1..9: note = Seed: TPVYSFLPG
TMVYSFLPF

SEQ ID NO: 66426 - protein, 10 aa, synthetic construct
  source 1..10: note = Seed: TPVYSFLPGV
TMVYSFLPGA

SEQ ID NO: 66427 - protein, 10 aa, synthetic construct
  source 1..10: note = Seed: TPVYSFLPGV
TMVYSFLPGI

SEQ ID NO: 66428 - protein, 10 aa, synthetic construct
  source 1..10: note = Seed: TPVYSFLPGV
TMVYSFLPGL

SEQ ID NO: 66429 - protein, 10 aa, synthetic construct
  source 1..10: note = Seed: TPVYSFLPGV
TMVYSFLPGM

SEQ ID NO: 66430 - protein, 10 aa, synthetic construct
  source 1..10: note = Seed: TPVYSFLPGV
TMVYSFLPGV

SEQ ID NO: 66431 - protein, 9 aa, synthetic construct
  source 1..9: note = Seed: TPVYSFLPG
TMVYSFLPY

SEQ ID NO: 66432 - protein, 8 aa, synthetic construct
  source 1..8: note = Seed: TAYANSVF
TMYANSVF

SEQ ID NO: 66433 - protein, 10 aa, synthetic construct
  source 1..10: note = Seed: TAYANSVFNI
TMYANSVFNF

SEQ ID NO: 66434 - protein, 10 aa, synthetic construct
  source 1..10: note = Seed: TAYANSVFNI
TMYANSVFNI

SEQ ID NO: 66435 - protein, 10 aa, synthetic construct
  source 1..10: note = Seed: TAYANSVFNI
TMYANSVFNL

SEQ ID NO: 66436 - protein, 10 aa, synthetic construct
  source 1..10: note = Seed: TAYANSVFNI
TMYANSVFNW

SEQ ID NO: 66437 - protein, 8 aa, synthetic construct
  source 1..8: note = Seed: TAYANSVF
TMYANSVM

SEQ ID NO: 66438 - protein, 8 aa, synthetic construct
  source 1..8: note = Seed: TAYANSVF
TMYANSVY

SEQ ID NO: 66439 - protein, 9 aa, synthetic construct
  source 1..9: note = Seed: TLYCIDGAL
TMYCIDGAF

SEQ ID NO: 66440 - protein, 9 aa, synthetic construct
  source 1..9: note = Seed: TLYCIDGAL
TMYCIDGAL

SEQ ID NO: 66441 - protein, 10 aa, synthetic construct
  source 1..10: note = Seed: TLYCIDGALL
TMYCIDGALL

SEQ ID NO: 66442 - protein, 10 aa, synthetic construct
  source 1..10: note = Seed: TLYCIDGALL
TMYCIDGALV

SEQ ID NO: 66443 - protein, 9 aa, synthetic construct
  source 1..9: note = Seed: TLYCIDGAL
TMYCIDGAM

SEQ ID NO: 66444 - protein, 9 aa, synthetic construct
  source 1..9: note = Seed: TLYCIDGAL
TMYCIDGAV

SEQ ID NO: 66445 - protein, 9 aa, synthetic construct
  source 1..9: note = Seed: TLYCIDGAL
TMYCIDGAY

SEQ ID NO: 66446 - protein, 9 aa, synthetic construct
  source 1..9: note = Seed: TVYEKLKPV
TMYEKLKPA

SEQ ID NO: 66447 - protein, 9 aa, synthetic construct
  source 1..9: note = Seed: TVYEKLKPV
TMYEKLKPC

SEQ ID NO: 66448 - protein, 9 aa, synthetic construct
  source 1..9: note = Seed: TVYEKLKPV
TMYEKLKPI

SEQ ID NO: 66449 - protein, 9 aa, synthetic construct
  source 1..9: note = Seed: TVYEKLKPV
TMYEKLKPL

SEQ ID NO: 66450 - protein, 9 aa, synthetic construct
  source 1..9: note = Seed: TVYEKLKPV
TMYEKLKPM

SEQ ID NO: 66451 - protein, 9 aa, synthetic construct
  source 1..9: note = Seed: TVYEKLKPV
TMYEKLKPS

SEQ ID NO: 66452 - protein, 9 aa, synthetic construct
  source 1..9: note = Seed: TVYEKLKPV
TMYEKLKPT

SEQ ID NO: 66453 - protein, 9 aa, synthetic construct
  source 1..9: note = Seed: TVYEKLKPV
TMYEKLKPV

SEQ ID NO: 66454 - protein, 10 aa, synthetic construct
  source 1..10: note = Seed: TVYEKLKPVL
TMYEKLKPVA

SEQ ID NO: 66455 - protein, 10 aa, synthetic construct
  source 1..10: note = Seed: TVYEKLKPVL
TMYEKLKPVC

SEQ ID NO: 66456 - protein, 10 aa, synthetic construct
  source 1..10: note = Seed: TVYEKLKPVL
TMYEKLKPVD

SEQ ID NO: 66457 - protein, 10 aa, synthetic construct
  source 1..10: note = Seed: TVYEKLKPVL
TMYEKLKPVE

SEQ ID NO: 66458 - protein, 10 aa, synthetic construct
  source 1..10: note = Seed: TVYEKLKPVL
TMYEKLKPVF

SEQ ID NO: 66459 - protein, 10 aa, synthetic construct
  source 1..10: note = Seed: TVYEKLKPVL
TMYEKLKPVG

SEQ ID NO: 66460 - protein, 10 aa, synthetic construct
  source 1..10: note = Seed: TVYEKLKPVL
TMYEKLKPVH

SEQ ID NO: 66461 - protein, 10 aa, synthetic construct
  source 1..10: note = Seed: TVYEKLKPVL
TMYEKLKPVI

SEQ ID NO: 66462 - protein, 10 aa, synthetic construct
  source 1..10: note = Seed: TVYEKLKPVL
TMYEKLKPVK

SEQ ID NO: 66463 - protein, 10 aa, synthetic construct
  source 1..10: note = Seed: TVYEKLKPVL
TMYEKLKPVL

SEQ ID NO: 66464 - protein, 10 aa, synthetic construct
  source 1..10: note = Seed: TVYEKLKPVL
TMYEKLKPVM

SEQ ID NO: 66465 - protein, 10 aa, synthetic construct
  source 1..10: note = Seed: TVYEKLKPVL
TMYEKLKPVN

SEQ ID NO: 66466 - protein, 10 aa, synthetic construct
  source 1..10: note = Seed: TVYEKLKPVL
TMYEKLKPVP

SEQ ID NO: 66467 - protein, 10 aa, synthetic construct
  source 1..10: note = Seed: TVYEKLKPVL
TMYEKLKPVQ

SEQ ID NO: 66468 - protein, 10 aa, synthetic construct
  source 1..10: note = Seed: TVYEKLKPVL
TMYEKLKPVR

SEQ ID NO: 66469 - protein, 10 aa, synthetic construct
  source 1..10: note = Seed: TVYEKLKPVL
TMYEKLKPVS

SEQ ID NO: 66470 - protein, 10 aa, synthetic construct
  source 1..10: note = Seed: TVYEKLKPVL
TMYEKLKPVT

SEQ ID NO: 66471 - protein, 10 aa, synthetic construct
  source 1..10: note = Seed: TVYEKLKPVL
TMYEKLKPVV

SEQ ID NO: 66472 - protein, 10 aa, synthetic construct
  source 1..10: note = Seed: TVYEKLKPVL
TMYEKLKPVW

SEQ ID NO: 66473 - protein, 10 aa, synthetic construct
  source 1..10: note = Seed: TVYEKLKPVL
TMYEKLKPVY

SEQ ID NO: 66474 - protein, 10 aa, synthetic construct
  source 1..10: note = Seed: TFYLTNDVSF
TMYLTNDVSF

SEQ ID NO: 66475 - protein, 11 aa, synthetic construct
  source 1..11: note = Seed: TFYLTNDVSFL
TMYLTNDVSFF

SEQ ID NO: 66476 - protein, 10 aa, synthetic construct
  source 1..10: note = Seed: TFYLTNDVSF
TMYLTNDVSM

SEQ ID NO: 66477 - protein, 10 aa, synthetic construct
  source 1..10: note = Seed: TFYLTNDVSF
TMYLTNDVSW

SEQ ID NO: 66478 - protein, 10 aa, synthetic construct
  source 1..10: note = Seed: TFYLTNDVSF
TMYLTNDVSY

SEQ ID NO: 66479 - protein, 9 aa, synthetic construct
  source 1..9: note = Seed: TAYNGYLTS
TMYNGYLTM

SEQ ID NO: 66480 - protein, 9 aa, synthetic construct
  source 1..9: note = Seed: TAYNGYLTS
TMYNGYLTV

SEQ ID NO: 66481 - protein, 11 aa, synthetic construct
  source 1..11: note = Seed: TTYPGQGLNGY
TMYPGQGLNGY

SEQ ID NO: 66482 - protein, 10 aa, synthetic construct
  source 1..10: note = Seed: TKYTMADLVY
TMYTMADLVF

SEQ ID NO: 66483 - protein, 10 aa, synthetic construct
  source 1..10: note = Seed: TKYTMADLVY
TMYTMADLVM

SEQ ID NO: 66484 - protein, 10 aa, synthetic construct
  source 1..10: note = Seed: TKYTMADLVY
TMYTMADLVY

SEQ ID NO: 66485 - protein, 11 aa, synthetic construct
  source 1..11: note = Seed: TKYTMADLVYA
TMYTMADLVYI

SEQ ID NO: 66486 - protein, 11 aa, synthetic construct
  source 1..11: note = Seed: TKYTMADLVYA
TMYTMADLVYL

SEQ ID NO: 66487 - protein, 11 aa, synthetic construct
  source 1..11: note = Seed: TKYTMADLVYA
TMYTMADLVYV

SEQ ID NO: 66488 - protein, 10 aa, synthetic construct
  source 1..10: note = Seed: TMADLVYALR
TNADLVYALR

SEQ ID NO: 66489 - protein, 9 aa, synthetic construct
  source 1..9: note = Seed: TMADLVYAL
TNADLVYAV

SEQ ID NO: 66490 - protein, 9 aa, synthetic construct
  source 1..9: note = Seed: TSAFVETVK
TNAFVETVR

SEQ ID NO: 66491 - protein, 10 aa, synthetic construct
  source 1..10: note = Seed: TSAVLQSGFR
TNAVLQSGFR

SEQ ID NO: 66492 - protein, 11 aa, synthetic construct
  source 1..11: note = Seed: TTAYANSVFNI
TNAYANSVFNF

SEQ ID NO: 66493 - protein, 11 aa, synthetic construct
  source 1..11: note = Seed: TTAYANSVFNI
TNAYANSVFNW

SEQ ID NO: 66494 - protein, 9 aa, synthetic construct
  source 1..9: note = Seed: TVAYFNMVY
TNAYFNMVF

SEQ ID NO: 66495 - protein, 9 aa, synthetic construct
  source 1..9: note = Seed: TVAYFNMVY
TNAYFNMVK

SEQ ID NO: 66496 - protein, 9 aa, synthetic construct
  source 1..9: note = Seed: TVAYFNMVY
TNAYFNMVR

SEQ ID NO: 66497 - protein, 9 aa, synthetic construct
  source 1..9: note = Seed: TVAYFNMVY
TNAYFNMVY

SEQ ID NO: 66498 - protein, 10 aa, synthetic construct
  source 1..10: note = Seed: TVAYFNMVYM
TNAYFNMVYK

SEQ ID NO: 66499 - protein, 10 aa, synthetic construct
  source 1..10: note = Seed: TVAYFNMVYM
TNAYFNMVYR

SEQ ID NO: 66500 - protein, 10 aa, synthetic construct
  source 1..10: note = Seed: TVAYFNMVYM
TNAYFNMVYV

SEQ ID NO: 66501 - protein, 11 aa, synthetic construct
  source 1..11: note = Seed: TIDYTEISFML
TNDYTEISFMF

SEQ ID NO: 66502 - protein, 9 aa, synthetic construct
  source 1..9: note = Seed: TSDYYQLYS
TNDYYQLYY

SEQ ID NO: 66503 - protein, 10 aa, synthetic construct
  source 1..10: note = Seed: TIEVNSFSGY
TNEVNSFSGW

SEQ ID NO: 66504 - protein, 9 aa, synthetic construct
  source 1..9: note = Seed: TRFASVYAW
TNFASVYAF

SEQ ID NO: 66505 - protein, 9 aa, synthetic construct
  source 1..9: note = Seed: TRFASVYAW
TNFASVYAM

SEQ ID NO: 66506 - protein, 9 aa, synthetic construct
  source 1..9: note = Seed: TRFASVYAW
TNFASVYAY

SEQ ID NO: 66507 - protein, 9 aa, synthetic construct
  source 1..9: note = Seed: TPFEIKLAK
TNFEIKLAR

SEQ ID NO: 66508 - protein, 9 aa, synthetic construct
  source 1..9: note = Seed: TCFSTQFAF
TNFSTQFAF

SEQ ID NO: 66509 - protein, 9 aa, synthetic construct
  source 1..9: note = Seed: TCFSTQFAF
TNFSTQFAY

SEQ ID NO: 66510 - protein, 11 aa, synthetic construct
  source 1..11: note = Seed: TLGVYDYLVST
TNGVYDYLVSV

SEQ ID NO: 66511 - protein, 10 aa, synthetic construct
  source 1..10: note = Seed: TTIKPVTYKL
TNIKPVTYKR

SEQ ID NO: 66512 - protein, 9 aa, synthetic construct
  source 1..9: note = Seed: TTIKPVTYK
TNIKPVTYR

SEQ ID NO: 66513 - protein, 10 aa, synthetic construct
  source 1..10: note = Seed: TFLLNKEMYL
TNLLNKEMYI

SEQ ID NO: 66514 - protein, 10 aa, synthetic construct
  source 1..10: note = Seed: TFLLNKEMYL
TNLLNKEMYL

SEQ ID NO: 66515 - protein, 10 aa, synthetic construct
  source 1..10: note = Seed: TFLLNKEMYL
TNLLNKEMYV

SEQ ID NO: 66516 - protein, 10 aa, synthetic construct
  source 1..10: note = Seed: TLLLQLCTFT
TNLLQLCTFV

SEQ ID NO: 66517 - protein, 10 aa, synthetic construct
  source 1..10: note = Seed: TILTSLLVLV
TNLTSLLVLI

SEQ ID NO: 66518 - protein, 10 aa, synthetic construct
  source 1..10: note = Seed: TILTSLLVLV
TNLTSLLVLL

SEQ ID NO: 66519 - protein, 10 aa, synthetic construct
  source 1..10: note = Seed: TILTSLLVLV
TNLTSLLVLV

SEQ ID NO: 66520 - protein, 10 aa, synthetic construct
  source 1..10: note = Seed: TPLVPFWITI
TNLVPFWITV

SEQ ID NO: 66521 - protein, 10 aa, synthetic construct
  source 1..10: note = Seed: TQLYLGGMSY
TNLYLGGMSF

SEQ ID NO: 66522 - protein, 10 aa, synthetic construct
  source 1..10: note = Seed: TQLYLGGMSY
TNLYLGGMSK

SEQ ID NO: 66523 - protein, 10 aa, synthetic construct
  source 1..10: note = Seed: TQLYLGGMSY
TNLYLGGMSY

SEQ ID NO: 66524 - protein, 10 aa, synthetic construct
  source 1..10: note = Seed: TLMIERFVSL
TNMIERFVSA

SEQ ID NO: 66525 - protein, 10 aa, synthetic construct
  source 1..10: note = Seed: TLMIERFVSL
TNMIERFVSF

SEQ ID NO: 66526 - protein, 10 aa, synthetic construct
  source 1..10: note = Seed: TLMIERFVSL
TNMIERFVSI

SEQ ID NO: 66527 - protein, 10 aa, synthetic construct
  source 1..10: note = Seed: TLMIERFVSL
TNMIERFVSL

SEQ ID NO: 66528 - protein, 10 aa, synthetic construct
  source 1..10: note = Seed: TLMIERFVSL
TNMIERFVSM

SEQ ID NO: 66529 - protein, 10 aa, synthetic construct
  source 1..10: note = Seed: TLMIERFVSL
TNMIERFVSV

SEQ ID NO: 66530 - protein, 10 aa, synthetic construct
  source 1..10: note = Seed: TLMIERFVSL
TNMIERFVSY

SEQ ID NO: 66531 - protein, 10 aa, synthetic construct
  source 1..10: note = Seed: TCMMCYKRNR
TNMMCYKRNR

SEQ ID NO: 66532 - protein, 9 aa, synthetic construct
  source 1..9: note = Seed: TVNVLAWLY
TNNVLAWLY

SEQ ID NO: 66533 - protein, 10 aa, synthetic construct
  source 1..10: note = Seed: TLPVNVAFEL
TNPVNVAFEF

SEQ ID NO: 66534 - protein, 10 aa, synthetic construct
  source 1..10: note = Seed: TLPVNVAFEL
TNPVNVAFEW

SEQ ID NO: 66535 - protein, 10 aa, synthetic construct
  source 1..10: note = Seed: TLPVNVAFEL
TNPVNVAFEY

SEQ ID NO: 66536 - protein, 10 aa, synthetic construct
  source 1..10: note = Seed: TIQITISSFK
TNQITISSFK

SEQ ID NO: 66537 - protein, 10 aa, synthetic construct
  source 1..10: note = Seed: TIQITISSFK
TNQITISSFR

SEQ ID NO: 66538 - protein, 11 aa, synthetic construct
  source 1..11: note = Seed: TRQVVNVVTTK
TNQVVNVVTTR

SEQ ID NO: 66539 - protein, 9 aa, synthetic construct
  source 1..9: note = Seed: TASWFTALT
TNSWFTALV

SEQ ID NO: 66540 - protein, 10 aa, synthetic construct
  source 1..10: note = Seed: TTTIKPVTYK
TNTIKPVTYK

SEQ ID NO: 66541 - protein, 10 aa, synthetic construct
  source 1..10: note = Seed: TTTIKPVTYK
TNTIKPVTYR

SEQ ID NO: 66542 - protein, 10 aa, synthetic construct
  source 1..10: note = Seed: TITVNVLAWL
TNTVNVLAWA

SEQ ID NO: 66543 - protein, 10 aa, synthetic construct
  source 1..10: note = Seed: TITVNVLAWL
TNTVNVLAWI

SEQ ID NO: 66544 - protein, 10 aa, synthetic construct
  source 1..10: note = Seed: TITVNVLAWL
TNTVNVLAWV

SEQ ID NO: 66545 - protein, 9 aa, synthetic construct
  source 1..9: note = Seed: TTVDNINLH
TNVDNINLR

SEQ ID NO: 66546 - protein, 10 aa, synthetic construct
  source 1..10: note = Seed: TEVVGDIILK
TNVVGDIILK

SEQ ID NO: 66547 - protein, 10 aa, synthetic construct
  source 1..10: note = Seed: TEVVGDIILK
TNVVGDIILR

SEQ ID NO: 66548 - protein, 10 aa, synthetic construct
  source 1..10: note = Seed: TPVYSFLPGV
TNVYSFLPGV

SEQ ID NO: 66549 - protein, 10 aa, synthetic construct
  source 1..10: note = Seed: TAYANSVFNI
TNYANSVFNF

SEQ ID NO: 66550 - protein, 10 aa, synthetic construct
  source 1..10: note = Seed: TAYANSVFNI
TNYANSVFNI

SEQ ID NO: 66551 - protein, 10 aa, synthetic construct
  source 1..10: note = Seed: TAYANSVFNI
TNYANSVFNL

SEQ ID NO: 66552 - protein, 10 aa, synthetic construct
  source 1..10: note = Seed: TAYANSVFNI
TNYANSVFNW

SEQ ID NO: 66553 - protein, 10 aa, synthetic construct
  source 1..10: note = Seed: TFYLTNDVSF
TNYLTNDVSF

SEQ ID NO: 66554 - protein, 11 aa, synthetic construct
  source 1..11: note = Seed: TKYTMADLVYA
TNYTMADLVYV

SEQ ID NO: 66555 - protein, 9 aa, synthetic construct
  source 1..9: note = Seed: TMADLVYAL
TPADLVYAA

SEQ ID NO: 66556 - protein, 9 aa, synthetic construct
  source 1..9: note = Seed: TMADLVYAL
TPADLVYAF

SEQ ID NO: 66557 - protein, 9 aa, synthetic construct
  source 1..9: note = Seed: TMADLVYAL
TPADLVYAH

SEQ ID NO: 66558 - protein, 9 aa, synthetic construct
  source 1..9: note = Seed: TMADLVYAL
TPADLVYAI

SEQ ID NO: 66559 - protein, 9 aa, synthetic construct
  source 1..9: note = Seed: TMADLVYAL
TPADLVYAL

SEQ ID NO: 66560 - protein, 10 aa, synthetic construct
  source 1..10: note = Seed: TMADLVYALR
TPADLVYALR

SEQ ID NO: 66561 - protein, 9 aa, synthetic construct
  source 1..9: note = Seed: TMADLVYAL
TPADLVYAM

SEQ ID NO: 66562 - protein, 9 aa, synthetic construct
  source 1..9: note = Seed: TMADLVYAL
TPADLVYAV

SEQ ID NO: 66563 - protein, 9 aa, synthetic construct
  source 1..9: note = Seed: TMADLVYAL
TPADLVYAW

SEQ ID NO: 66564 - protein, 9 aa, synthetic construct
  source 1..9: note = Seed: TMADLVYAL
TPADLVYAY

SEQ ID NO: 66565 - protein, 9 aa, synthetic construct
  source 1..9: note = Seed: TSAMQTMLF
TPAMQTMLF

SEQ ID NO: 66566 - protein, 9 aa, synthetic construct
  source 1..9: note = Seed: TSAMQTMLF
TPAMQTMLM

SEQ ID NO: 66567 - protein, 9 aa, synthetic construct
  source 1..9: note = Seed: TSAMQTMLF
TPAMQTMLY

SEQ ID NO: 66568 - protein, 10 aa, synthetic construct
  source 1..10: note = Seed: TSAVLQSGFR
TPAVLQSGFR

SEQ ID NO: 66569 - protein, 9 aa, synthetic construct
  source 1..9: note = Seed: TTAYANSVF
TPAYANSVF

SEQ ID NO: 66570 - protein, 11 aa, synthetic construct
  source 1..11: note = Seed: TTAYANSVFNI
TPAYANSVFNF

SEQ ID NO: 66571 - protein, 11 aa, synthetic construct
  source 1..11: note = Seed: TTAYANSVFNI
TPAYANSVFNW

SEQ ID NO: 66572 - protein, 9 aa, synthetic construct
  source 1..9: note = Seed: TTAYANSVF
TPAYANSVL

SEQ ID NO: 66573 - protein, 9 aa, synthetic construct
  source 1..9: note = Seed: TTAYANSVF
TPAYANSVM

SEQ ID NO: 66574 - protein, 9 aa, synthetic construct
  source 1..9: note = Seed: TTAYANSVF
TPAYANSVY

SEQ ID NO: 66575 - protein, 9 aa, synthetic construct
  source 1..9: note = Seed: TVAYFNMVY
TPAYFNMVF

SEQ ID NO: 66576 - protein, 9 aa, synthetic construct
  source 1..9: note = Seed: TVAYFNMVY
TPAYFNMVH

SEQ ID NO: 66577 - protein, 9 aa, synthetic construct
  source 1..9: note = Seed: TVAYFNMVY
TPAYFNMVL

SEQ ID NO: 66578 - protein, 9 aa, synthetic construct
  source 1..9: note = Seed: TVAYFNMVY
TPAYFNMVM

SEQ ID NO: 66579 - protein, 9 aa, synthetic construct
  source 1..9: note = Seed: TVAYFNMVY
TPAYFNMVR

SEQ ID NO: 66580 - protein, 9 aa, synthetic construct
  source 1..9: note = Seed: TVAYFNMVY
TPAYFNMVW

SEQ ID NO: 66581 - protein, 9 aa, synthetic construct
  source 1..9: note = Seed: TVAYFNMVY
TPAYFNMVY

SEQ ID NO: 66582 - protein, 10 aa, synthetic construct
  source 1..10: note = Seed: TVAYFNMVYM
TPAYFNMVYK

SEQ ID NO: 66583 - protein, 10 aa, synthetic construct
  source 1..10: note = Seed: TVAYFNMVYM
TPAYFNMVYR

SEQ ID NO: 66584 - protein, 10 aa, synthetic construct
  source 1..10: note = Seed: TVAYFNMVYM
TPAYFNMVYV

SEQ ID NO: 66585 - protein, 10 aa, synthetic construct
  source 1..10: note = Seed: TPCSFGGVSV
TPCSFGGVSL

SEQ ID NO: 66586 - protein, 10 aa, synthetic construct
  source 1..10: note = Seed: TPCSFGGVSV
TPCSFGGVSM

SEQ ID NO: 66587 - protein, 9 aa, synthetic construct
  source 1..9: note = Seed: TIDYTEISF
TPDYTEISF

SEQ ID NO: 66588 - protein, 11 aa, synthetic construct
  source 1..11: note = Seed: TIDYTEISFML
TPDYTEISFMF

SEQ ID NO: 66589 - protein, 9 aa, synthetic construct
  source 1..9: note = Seed: TIDYTEISF
TPDYTEISM

SEQ ID NO: 66590 - protein, 9 aa, synthetic construct
  source 1..9: note = Seed: TIDYTEISF
TPDYTEISY

SEQ ID NO: 66591 - protein, 9 aa, synthetic construct
  source 1..9: note = Seed: TPEEHFIET
TPEEHFIEF

SEQ ID NO: 66592 - protein, 9 aa, synthetic construct
  source 1..9: note = Seed: TPEEHFIET
TPEEHFIEI

SEQ ID NO: 66593 - protein, 9 aa, synthetic construct
  source 1..9: note = Seed: TPEEHFIET
TPEEHFIEL

SEQ ID NO: 66594 - protein, 9 aa, synthetic construct
  source 1..9: note = Seed: TPEEHFIET
TPEEHFIEM

SEQ ID NO: 66595 - protein, 9 aa, synthetic construct
  source 1..9: note = Seed: TPEEHFIET
TPEEHFIEV

SEQ ID NO: 66596 - protein, 10 aa, synthetic construct
  source 1..10: note = Seed: TIEVNSFSGY
TPEVNSFSGW

SEQ ID NO: 66597 - protein, 9 aa, synthetic construct
  source 1..9: note = Seed: TFEYVSQPF
TPEYVSQPF

SEQ ID NO: 66598 - protein, 9 aa, synthetic construct
  source 1..9: note = Seed: TFEYVSQPF
TPEYVSQPM

SEQ ID NO: 66599 - protein, 9 aa, synthetic construct
  source 1..9: note = Seed: TFEYVSQPF
TPEYVSQPY

SEQ ID NO: 66600 - protein, 9 aa, synthetic construct
  source 1..9: note = Seed: TPFDVVRQC
TPFDVVRQA

SEQ ID NO: 66601 - protein, 9 aa, synthetic construct
  source 1..9: note = Seed: TCFSTQFAF
TPFSTQFAA

SEQ ID NO: 66602 - protein, 9 aa, synthetic construct
  source 1..9: note = Seed: TCFSTQFAF
TPFSTQFAF

SEQ ID NO: 66603 - protein, 9 aa, synthetic construct
  source 1..9: note = Seed: TCFSTQFAF
TPFSTQFAH

SEQ ID NO: 66604 - protein, 9 aa, synthetic construct
  source 1..9: note = Seed: TCFSTQFAF
TPFSTQFAI

SEQ ID NO: 66605 - protein, 9 aa, synthetic construct
  source 1..9: note = Seed: TCFSTQFAF
TPFSTQFAL

SEQ ID NO: 66606 - protein, 9 aa, synthetic construct
  source 1..9: note = Seed: TCFSTQFAF
TPFSTQFAM

SEQ ID NO: 66607 - protein, 9 aa, synthetic construct
  source 1..9: note = Seed: TCFSTQFAF
TPFSTQFAV

SEQ ID NO: 66608 - protein, 9 aa, synthetic construct
  source 1..9: note = Seed: TCFSTQFAF
TPFSTQFAW

SEQ ID NO: 66609 - protein, 9 aa, synthetic construct
  source 1..9: note = Seed: TCFSTQFAF
TPFSTQFAY

SEQ ID NO: 66610 - protein, 9 aa, synthetic construct
  source 1..9: note = Seed: TAFVTNVNA
TPFVTNVNA

SEQ ID NO: 66611 - protein, 11 aa, synthetic construct
  source 1..11: note = Seed: TLGVYDYLVST
TPGVYDYLVSV

SEQ ID NO: 66612 - protein, 9 aa, synthetic construct
  source 1..9: note = Seed: TPHTVLQAV
TPHTVLQAA

SEQ ID NO: 66613 - protein, 9 aa, synthetic construct
  source 1..9: note = Seed: TPHTVLQAV
TPHTVLQAF

SEQ ID NO: 66614 - protein, 9 aa, synthetic construct
  source 1..9: note = Seed: TPHTVLQAV
TPHTVLQAI

SEQ ID NO: 66615 - protein, 9 aa, synthetic construct
  source 1..9: note = Seed: TPHTVLQAV
TPHTVLQAL

SEQ ID NO: 66616 - protein, 9 aa, synthetic construct
  source 1..9: note = Seed: TPHTVLQAV
TPHTVLQAM

SEQ ID NO: 66617 - protein, 9 aa, synthetic construct
  source 1..9: note = Seed: TPHTVLQAV
TPHTVLQAY

SEQ ID NO: 66618 - protein, 10 aa, synthetic construct
  source 1..10: note = Seed: TFLLNKEMYL
TPLLNKEMYI

SEQ ID NO: 66619 - protein, 10 aa, synthetic construct
  source 1..10: note = Seed: TFLLNKEMYL
TPLLNKEMYL

SEQ ID NO: 66620 - protein, 10 aa, synthetic construct
  source 1..10: note = Seed: TFLLNKEMYL
TPLLNKEMYV

SEQ ID NO: 66621 - protein, 10 aa, synthetic construct
  source 1..10: note = Seed: TLLLQLCTFT
TPLLQLCTFV

SEQ ID NO: 66622 - protein, 9 aa, synthetic construct
  source 1..9: note = Seed: TTLPVNVAF
TPLPVNVAF

SEQ ID NO: 66623 - protein, 9 aa, synthetic construct
  source 1..9: note = Seed: TTLPVNVAF
TPLPVNVAL

SEQ ID NO: 66624 - protein, 9 aa, synthetic construct
  source 1..9: note = Seed: TTLPVNVAF
TPLPVNVAM

SEQ ID NO: 66625 - protein, 9 aa, synthetic construct
  source 1..9: note = Seed: TTLPVNVAF
TPLPVNVAY

SEQ ID NO: 66626 - protein, 10 aa, synthetic construct
  source 1..10: note = Seed: TILTSLLVLV
TPLTSLLVLI

SEQ ID NO: 66627 - protein, 10 aa, synthetic construct
  source 1..10: note = Seed: TILTSLLVLV
TPLTSLLVLL

SEQ ID NO: 66628 - protein, 10 aa, synthetic construct
  source 1..10: note = Seed: TILTSLLVLV
TPLTSLLVLV

SEQ ID NO: 66629 - protein, 9 aa, synthetic construct
  source 1..9: note = Seed: TPLVPFWIT
TPLVPFWIA

SEQ ID NO: 66630 - protein, 10 aa, synthetic construct
  source 1..10: note = Seed: TPLVPFWITI
TPLVPFWITL

SEQ ID NO: 66631 - protein, 10 aa, synthetic construct
  source 1..10: note = Seed: TPLVPFWITI
TPLVPFWITV

SEQ ID NO: 66632 - protein, 10 aa, synthetic construct
  source 1..10: note = Seed: TQLYLGGMSY
TPLYLGGMSF

SEQ ID NO: 66633 - protein, 10 aa, synthetic construct
  source 1..10: note = Seed: TQLYLGGMSY
TPLYLGGMSK

SEQ ID NO: 66634 - protein, 10 aa, synthetic construct
  source 1..10: note = Seed: TQLYLGGMSY
TPLYLGGMSY

SEQ ID NO: 66635 - protein, 10 aa, synthetic construct
  source 1..10: note = Seed: TLMIERFVSL
TPMIERFVSA

SEQ ID NO: 66636 - protein, 10 aa, synthetic construct
  source 1..10: note = Seed: TLMIERFVSL
TPMIERFVSF

SEQ ID NO: 66637 - protein, 10 aa, synthetic construct
  source 1..10: note = Seed: TLMIERFVSL
TPMIERFVSI

SEQ ID NO: 66638 - protein, 10 aa, synthetic construct
  source 1..10: note = Seed: TLMIERFVSL
TPMIERFVSL

SEQ ID NO: 66639 - protein, 10 aa, synthetic construct
  source 1..10: note = Seed: TLMIERFVSL
TPMIERFVSM

SEQ ID NO: 66640 - protein, 10 aa, synthetic construct
  source 1..10: note = Seed: TLMIERFVSL
TPMIERFVSV

SEQ ID NO: 66641 - protein, 10 aa, synthetic construct
  source 1..10: note = Seed: TLMIERFVSL
TPMIERFVSY

SEQ ID NO: 66642 - protein, 10 aa, synthetic construct
  source 1..10: note = Seed: TCMMCYKRNR
TPMMCYKRNR

SEQ ID NO: 66643 - protein, 9 aa, synthetic construct
  source 1..9: note = Seed: TTNGDFLHF
TPNGDFLHF

SEQ ID NO: 66644 - protein, 9 aa, synthetic construct
  source 1..9: note = Seed: TTNGDFLHF
TPNGDFLHM

SEQ ID NO: 66645 - protein, 9 aa, synthetic construct
  source 1..9: note = Seed: TTNGDFLHF
TPNGDFLHY

SEQ ID NO: 66646 - protein, 9 aa, synthetic construct
  source 1..9: note = Seed: TVNVLAWLY
TPNVLAWLF

SEQ ID NO: 66647 - protein, 9 aa, synthetic construct
  source 1..9: note = Seed: TVNVLAWLY
TPNVLAWLM

SEQ ID NO: 66648 - protein, 9 aa, synthetic construct
  source 1..9: note = Seed: TVNVLAWLY
TPNVLAWLY

SEQ ID NO: 66649 - protein, 10 aa, synthetic construct
  source 1..10: note = Seed: TLPVNVAFEL
TPPVNVAFEF

SEQ ID NO: 66650 - protein, 10 aa, synthetic construct
  source 1..10: note = Seed: TLPVNVAFEL
TPPVNVAFEW

SEQ ID NO: 66651 - protein, 10 aa, synthetic construct
  source 1..10: note = Seed: TLPVNVAFEL
TPPVNVAFEY

SEQ ID NO: 66652 - protein, 10 aa, synthetic construct
  source 1..10: note = Seed: TIQITISSFK
TPQITISSFK

SEQ ID NO: 66653 - protein, 10 aa, synthetic construct
  source 1..10: note = Seed: TIQITISSFK
TPQITISSFR

SEQ ID NO: 66654 - protein, 11 aa, synthetic construct
  source 1..11: note = Seed: TRQVVNVVTTK
TPQVVNVVTTR

SEQ ID NO: 66655 - protein, 9 aa, synthetic construct
  source 1..9: note = Seed: TASDTYACW
TPSDTYACW

SEQ ID NO: 66656 - protein, 9 aa, synthetic construct
  source 1..9: note = Seed: TASWFTALT
TPSWFTALV

SEQ ID NO: 66657 - protein, 10 aa, synthetic construct
  source 1..10: note = Seed: TTTIKPVTYK
TPTIKPVTYK

SEQ ID NO: 66658 - protein, 10 aa, synthetic construct
  source 1..10: note = Seed: TTTIKPVTYK
TPTIKPVTYR

SEQ ID NO: 66659 - protein, 9 aa, synthetic construct
  source 1..9: note = Seed: TITQMNLKY
TPTQMNLKF

SEQ ID NO: 66660 - protein, 9 aa, synthetic construct
  source 1..9: note = Seed: TITQMNLKY
TPTQMNLKM

SEQ ID NO: 66661 - protein, 9 aa, synthetic construct
  source 1..9: note = Seed: TITQMNLKY
TPTQMNLKY

SEQ ID NO: 66662 - protein, 9 aa, synthetic construct
  source 1..9: note = Seed: TITVNVLAW
TPTVNVLAF

SEQ ID NO: 66663 - protein, 9 aa, synthetic construct
  source 1..9: note = Seed: TITVNVLAW
TPTVNVLAW

SEQ ID NO: 66664 - protein, 10 aa, synthetic construct
  source 1..10: note = Seed: TITVNVLAWL
TPTVNVLAWA

SEQ ID NO: 66665 - protein, 10 aa, synthetic construct
  source 1..10: note = Seed: TITVNVLAWL
TPTVNVLAWI

SEQ ID NO: 66666 - protein, 10 aa, synthetic construct
  source 1..10: note = Seed: TITVNVLAWL
TPTVNVLAWV

SEQ ID NO: 66667 - protein, 9 aa, synthetic construct
  source 1..9: note = Seed: TPTWRVYST
TPTWRVYSA

SEQ ID NO: 66668 - protein, 9 aa, synthetic construct
  source 1..9: note = Seed: TPTWRVYST
TPTWRVYSF

SEQ ID NO: 66669 - protein, 9 aa, synthetic construct
  source 1..9: note = Seed: TPTWRVYST
TPTWRVYSI

SEQ ID NO: 66670 - protein, 9 aa, synthetic construct
  source 1..9: note = Seed: TPTWRVYST
TPTWRVYSL

SEQ ID NO: 66671 - protein, 9 aa, synthetic construct
  source 1..9: note = Seed: TPTWRVYST
TPTWRVYSM

SEQ ID NO: 66672 - protein, 9 aa, synthetic construct
  source 1..9: note = Seed: TPTWRVYST
TPTWRVYSV

SEQ ID NO: 66673 - protein, 9 aa, synthetic construct
  source 1..9: note = Seed: TPVCINGLM
TPVCINGLF

SEQ ID NO: 66674 - protein, 9 aa, synthetic construct
  source 1..9: note = Seed: TPVCINGLM
TPVCINGLL

SEQ ID NO: 66675 - protein, 9 aa, synthetic construct
  source 1..9: note = Seed: TPVCINGLM
TPVCINGLW

SEQ ID NO: 66676 - protein, 9 aa, synthetic construct
  source 1..9: note = Seed: TPVCINGLM
TPVCINGLY

SEQ ID NO: 66677 - protein, 10 aa, synthetic construct
  source 1..10: note = Seed: TNVLEGSVAY
TPVLEGSVAF

SEQ ID NO: 66678 - protein, 10 aa, synthetic construct
  source 1..10: note = Seed: TNVLEGSVAY
TPVLEGSVAM

SEQ ID NO: 66679 - protein, 10 aa, synthetic construct
  source 1..10: note = Seed: TNVLEGSVAY
TPVLEGSVAY

SEQ ID NO: 66680 - protein, 10 aa, synthetic construct
  source 1..10: note = Seed: TEVVGDIILK
TPVVGDIILK

SEQ ID NO: 66681 - protein, 10 aa, synthetic construct
  source 1..10: note = Seed: TEVVGDIILK
TPVVGDIILR

SEQ ID NO: 66682 - protein, 9 aa, synthetic construct
  source 1..9: note = Seed: TPVVQTIEV
TPVVQTIEA

SEQ ID NO: 66683 - protein, 9 aa, synthetic construct
  source 1..9: note = Seed: TPVVQTIEV
TPVVQTIEF

SEQ ID NO: 66684 - protein, 9 aa, synthetic construct
  source 1..9: note = Seed: TPVVQTIEV
TPVVQTIEI

SEQ ID NO: 66685 - protein, 9 aa, synthetic construct
  source 1..9: note = Seed: TPVVQTIEV
TPVVQTIEL

SEQ ID NO: 66686 - protein, 9 aa, synthetic construct
  source 1..9: note = Seed: TPVVQTIEV
TPVVQTIEM

SEQ ID NO: 66687 - protein, 9 aa, synthetic construct
  source 1..9: note = Seed: TPVVQTIEV
TPVVQTIEY

SEQ ID NO: 66688 - protein, 9 aa, synthetic construct
  source 1..9: note = Seed: TPVYSFLPG
TPVYSFLPA

SEQ ID NO: 66689 - protein, 9 aa, synthetic construct
  source 1..9: note = Seed: TPVYSFLPG
TPVYSFLPF

SEQ ID NO: 66690 - protein, 10 aa, synthetic construct
  source 1..10: note = Seed: TPVYSFLPGV
TPVYSFLPGA

SEQ ID NO: 66691 - protein, 10 aa, synthetic construct
  source 1..10: note = Seed: TPVYSFLPGV
TPVYSFLPGL

SEQ ID NO: 66692 - protein, 10 aa, synthetic construct
  source 1..10: note = Seed: TPVYSFLPGV
TPVYSFLPGM

SEQ ID NO: 66693 - protein, 9 aa, synthetic construct
  source 1..9: note = Seed: TPVYSFLPG
TPVYSFLPH

SEQ ID NO: 66694 - protein, 9 aa, synthetic construct
  source 1..9: note = Seed: TPVYSFLPG
TPVYSFLPI

SEQ ID NO: 66695 - protein, 9 aa, synthetic construct
  source 1..9: note = Seed: TPVYSFLPG
TPVYSFLPL

SEQ ID NO: 66696 - protein, 9 aa, synthetic construct
  source 1..9: note = Seed: TPVYSFLPG
TPVYSFLPM

SEQ ID NO: 66697 - protein, 9 aa, synthetic construct
  source 1..9: note = Seed: TPVYSFLPG
TPVYSFLPS

SEQ ID NO: 66698 - protein, 9 aa, synthetic construct
  source 1..9: note = Seed: TPVYSFLPG
TPVYSFLPT

SEQ ID NO: 66699 - protein, 9 aa, synthetic construct
  source 1..9: note = Seed: TPVYSFLPG
TPVYSFLPV

SEQ ID NO: 66700 - protein, 9 aa, synthetic construct
  source 1..9: note = Seed: TPVYSFLPG
TPVYSFLPW

SEQ ID NO: 66701 - protein, 9 aa, synthetic construct
  source 1..9: note = Seed: TPVYSFLPG
TPVYSFLPY

SEQ ID NO: 66702 - protein, 10 aa, synthetic construct
  source 1..10: note = Seed: TAYANSVFNI
TPYANSVFNF

SEQ ID NO: 66703 - protein, 10 aa, synthetic construct
  source 1..10: note = Seed: TAYANSVFNI
TPYANSVFNI

SEQ ID NO: 66704 - protein, 10 aa, synthetic construct
  source 1..10: note = Seed: TAYANSVFNI
TPYANSVFNL

SEQ ID NO: 66705 - protein, 10 aa, synthetic construct
  source 1..10: note = Seed: TAYANSVFNI
TPYANSVFNW

SEQ ID NO: 66706 - protein, 10 aa, synthetic construct
  source 1..10: note = Seed: TFYLTNDVSF
TPYLTNDVSF

SEQ ID NO: 66707 - protein, 11 aa, synthetic construct
  source 1..11: note = Seed: TKYTMADLVYA
TPYTMADLVYV

SEQ ID NO: 66708 - protein, 9 aa, synthetic construct
  source 1..9: note = Seed: TYACWHHSI
TQACWHHSY

SEQ ID NO: 66709 - protein, 9 aa, synthetic construct
  source 1..9: note = Seed: TMADLVYAL
TQADLVYAA

SEQ ID NO: 66710 - protein, 9 aa, synthetic construct
  source 1..9: note = Seed: TMADLVYAL
TQADLVYAF

SEQ ID NO: 66711 - protein, 9 aa, synthetic construct
  source 1..9: note = Seed: TMADLVYAL
TQADLVYAI

SEQ ID NO: 66712 - protein, 9 aa, synthetic construct
  source 1..9: note = Seed: TMADLVYAL
TQADLVYAL

SEQ ID NO: 66713 - protein, 10 aa, synthetic construct
  source 1..10: note = Seed: TMADLVYALR
TQADLVYALA

SEQ ID NO: 66714 - protein, 10 aa, synthetic construct
  source 1..10: note = Seed: TMADLVYALR
TQADLVYALI

SEQ ID NO: 66715 - protein, 10 aa, synthetic construct
  source 1..10: note = Seed: TMADLVYALR
TQADLVYALL

SEQ ID NO: 66716 - protein, 10 aa, synthetic construct
  source 1..10: note = Seed: TMADLVYALR
TQADLVYALM

SEQ ID NO: 66717 - protein, 10 aa, synthetic construct
  source 1..10: note = Seed: TMADLVYALR
TQADLVYALR

SEQ ID NO: 66718 - protein, 10 aa, synthetic construct
  source 1..10: note = Seed: TMADLVYALR
TQADLVYALV

SEQ ID NO: 66719 - protein, 9 aa, synthetic construct
  source 1..9: note = Seed: TMADLVYAL
TQADLVYAM

SEQ ID NO: 66720 - protein, 9 aa, synthetic construct
  source 1..9: note = Seed: TMADLVYAL
TQADLVYAV

SEQ ID NO: 66721 - protein, 9 aa, synthetic construct
  source 1..9: note = Seed: TMADLVYAL
TQADLVYAY

SEQ ID NO: 66722 - protein, 9 aa, synthetic construct
  source 1..9: note = Seed: TIAEILLII
TQAEILLIA

SEQ ID NO: 66723 - protein, 9 aa, synthetic construct
  source 1..9: note = Seed: TIAEILLII
TQAEILLII

SEQ ID NO: 66724 - protein, 9 aa, synthetic construct
  source 1..9: note = Seed: TIAEILLII
TQAEILLIL

SEQ ID NO: 66725 - protein, 9 aa, synthetic construct
  source 1..9: note = Seed: TIAEILLII
TQAEILLIV

SEQ ID NO: 66726 - protein, 9 aa, synthetic construct
  source 1..9: note = Seed: TSAMQTMLF
TQAMQTMLF

SEQ ID NO: 66727 - protein, 9 aa, synthetic construct
  source 1..9: note = Seed: TSAMQTMLF
TQAMQTMLL

SEQ ID NO: 66728 - protein, 9 aa, synthetic construct
  source 1..9: note = Seed: TSAMQTMLF
TQAMQTMLM

SEQ ID NO: 66729 - protein, 9 aa, synthetic construct
  source 1..9: note = Seed: TSAMQTMLF
TQAMQTMLY

SEQ ID NO: 66730 - protein, 9 aa, synthetic construct
  source 1..9: note = Seed: TVASLINTL
TQASLINTA

SEQ ID NO: 66731 - protein, 9 aa, synthetic construct
  source 1..9: note = Seed: TVASLINTL
TQASLINTI

SEQ ID NO: 66732 - protein, 9 aa, synthetic construct
  source 1..9: note = Seed: TVASLINTL
TQASLINTL

SEQ ID NO: 66733 - protein, 9 aa, synthetic construct
  source 1..9: note = Seed: TVASLINTL
TQASLINTV

SEQ ID NO: 66734 - protein, 9 aa, synthetic construct
  source 1..9: note = Seed: TSAVLQSGF
TQAVLQSGF

SEQ ID NO: 66735 - protein, 10 aa, synthetic construct
  source 1..10: note = Seed: TSAVLQSGFR
TQAVLQSGFR

SEQ ID NO: 66736 - protein, 9 aa, synthetic construct
  source 1..9: note = Seed: TSAVLQSGF
TQAVLQSGM

SEQ ID NO: 66737 - protein, 9 aa, synthetic construct
  source 1..9: note = Seed: TSAVLQSGF
TQAVLQSGY

SEQ ID NO: 66738 - protein, 9 aa, synthetic construct
  source 1..9: note = Seed: TTAYANSVF
TQAYANSVF

SEQ ID NO: 66739 - protein, 11 aa, synthetic construct
  source 1..11: note = Seed: TTAYANSVFNI
TQAYANSVFNF

SEQ ID NO: 66740 - protein, 11 aa, synthetic construct
  source 1..11: note = Seed: TTAYANSVFNI
TQAYANSVFNW

SEQ ID NO: 66741 - protein, 9 aa, synthetic construct
  source 1..9: note = Seed: TTAYANSVF
TQAYANSVH

SEQ ID NO: 66742 - protein, 9 aa, synthetic construct
  source 1..9: note = Seed: TTAYANSVF
TQAYANSVI

SEQ ID NO: 66743 - protein, 9 aa, synthetic construct
  source 1..9: note = Seed: TTAYANSVF
TQAYANSVL

SEQ ID NO: 66744 - protein, 9 aa, synthetic construct
  source 1..9: note = Seed: TTAYANSVF
TQAYANSVM

SEQ ID NO: 66745 - protein, 9 aa, synthetic construct
  source 1..9: note = Seed: TTAYANSVF
TQAYANSVW

SEQ ID NO: 66746 - protein, 9 aa, synthetic construct
  source 1..9: note = Seed: TTAYANSVF
TQAYANSVY

SEQ ID NO: 66747 - protein, 9 aa, synthetic construct
  source 1..9: note = Seed: TVAYFNMVY
TQAYFNMVA

SEQ ID NO: 66748 - protein, 9 aa, synthetic construct
  source 1..9: note = Seed: TVAYFNMVY
TQAYFNMVF

SEQ ID NO: 66749 - protein, 9 aa, synthetic construct
  source 1..9: note = Seed: TVAYFNMVY
TQAYFNMVH

SEQ ID NO: 66750 - protein, 9 aa, synthetic construct
  source 1..9: note = Seed: TVAYFNMVY
TQAYFNMVI

SEQ ID NO: 66751 - protein, 9 aa, synthetic construct
  source 1..9: note = Seed: TVAYFNMVY
TQAYFNMVK

SEQ ID NO: 66752 - protein, 9 aa, synthetic construct
  source 1..9: note = Seed: TVAYFNMVY
TQAYFNMVL

SEQ ID NO: 66753 - protein, 9 aa, synthetic construct
  source 1..9: note = Seed: TVAYFNMVY
TQAYFNMVM

SEQ ID NO: 66754 - protein, 9 aa, synthetic construct
  source 1..9: note = Seed: TVAYFNMVY
TQAYFNMVR

SEQ ID NO: 66755 - protein, 9 aa, synthetic construct
  source 1..9: note = Seed: TVAYFNMVY
TQAYFNMVV

SEQ ID NO: 66756 - protein, 9 aa, synthetic construct
  source 1..9: note = Seed: TVAYFNMVY
TQAYFNMVW

SEQ ID NO: 66757 - protein, 9 aa, synthetic construct
  source 1..9: note = Seed: TVAYFNMVY
TQAYFNMVY

SEQ ID NO: 66758 - protein, 10 aa, synthetic construct
  source 1..10: note = Seed: TVAYFNMVYM
TQAYFNMVYF

SEQ ID NO: 66759 - protein, 10 aa, synthetic construct
  source 1..10: note = Seed: TVAYFNMVYM
TQAYFNMVYI

SEQ ID NO: 66760 - protein, 10 aa, synthetic construct
  source 1..10: note = Seed: TVAYFNMVYM
TQAYFNMVYK

SEQ ID NO: 66761 - protein, 10 aa, synthetic construct
  source 1..10: note = Seed: TVAYFNMVYM
TQAYFNMVYL

SEQ ID NO: 66762 - protein, 10 aa, synthetic construct
  source 1..10: note = Seed: TVAYFNMVYM
TQAYFNMVYM

SEQ ID NO: 66763 - protein, 10 aa, synthetic construct
  source 1..10: note = Seed: TVAYFNMVYM
TQAYFNMVYR

SEQ ID NO: 66764 - protein, 10 aa, synthetic construct
  source 1..10: note = Seed: TVAYFNMVYM
TQAYFNMVYV

SEQ ID NO: 66765 - protein, 10 aa, synthetic construct
  source 1..10: note = Seed: TVAYFNMVYM
TQAYFNMVYY

SEQ ID NO: 66766 - protein, 11 aa, synthetic construct
  source 1..11: note = Seed: TIDYTEISFML
TQDYTEISFMF

SEQ ID NO: 66767 - protein, 9 aa, synthetic construct
  source 1..9: note = Seed: TSDYYQLYS
TQDYYQLYY

SEQ ID NO: 66768 - protein, 10 aa, synthetic construct
  source 1..10: note = Seed: TIEVNSFSGY
TQEVNSFSGF

SEQ ID NO: 66769 - protein, 10 aa, synthetic construct
  source 1..10: note = Seed: TIEVNSFSGY
TQEVNSFSGW

SEQ ID NO: 66770 - protein, 10 aa, synthetic construct
  source 1..10: note = Seed: TIEVNSFSGY
TQEVNSFSGY

SEQ ID NO: 66771 - protein, 9 aa, synthetic construct
  source 1..9: note = Seed: TFEYVSQPF
TQEYVSQPF

SEQ ID NO: 66772 - protein, 9 aa, synthetic construct
  source 1..9: note = Seed: TFEYVSQPF
TQEYVSQPM

SEQ ID NO: 66773 - protein, 9 aa, synthetic construct
  source 1..9: note = Seed: TFEYVSQPF
TQEYVSQPY

SEQ ID NO: 66774 - protein, 9 aa, synthetic construct
  source 1..9: note = Seed: TRFASVYAW
TQFASVYAA

SEQ ID NO: 66775 - protein, 9 aa, synthetic construct
  source 1..9: note = Seed: TRFASVYAW
TQFASVYAF

SEQ ID NO: 66776 - protein, 9 aa, synthetic construct
  source 1..9: note = Seed: TRFASVYAW
TQFASVYAH

SEQ ID NO: 66777 - protein, 9 aa, synthetic construct
  source 1..9: note = Seed: TRFASVYAW
TQFASVYAI

SEQ ID NO: 66778 - protein, 9 aa, synthetic construct
  source 1..9: note = Seed: TRFASVYAW
TQFASVYAL

SEQ ID NO: 66779 - protein, 9 aa, synthetic construct
  source 1..9: note = Seed: TRFASVYAW
TQFASVYAM

SEQ ID NO: 66780 - protein, 9 aa, synthetic construct
  source 1..9: note = Seed: TRFASVYAW
TQFASVYAV

SEQ ID NO: 66781 - protein, 9 aa, synthetic construct
  source 1..9: note = Seed: TRFASVYAW
TQFASVYAW

SEQ ID NO: 66782 - protein, 9 aa, synthetic construct
  source 1..9: note = Seed: TRFASVYAW
TQFASVYAY

SEQ ID NO: 66783 - protein, 9 aa, synthetic construct
  source 1..9: note = Seed: TRFFYVLGL
TQFFYVLGF

SEQ ID NO: 66784 - protein, 9 aa, synthetic construct
  source 1..9: note = Seed: TRFFYVLGL
TQFFYVLGI

SEQ ID NO: 66785 - protein, 9 aa, synthetic construct
  source 1..9: note = Seed: TRFFYVLGL
TQFFYVLGL

SEQ ID NO: 66786 - protein, 9 aa, synthetic construct
  source 1..9: note = Seed: TRFFYVLGL
TQFFYVLGM

SEQ ID NO: 66787 - protein, 9 aa, synthetic construct
  source 1..9: note = Seed: TRFFYVLGL
TQFFYVLGY

SEQ ID NO: 66788 - protein, 9 aa, synthetic construct
  source 1..9: note = Seed: TQFNYYKKV
TQFNYYKKF

SEQ ID NO: 66789 - protein, 9 aa, synthetic construct
  source 1..9: note = Seed: TQFNYYKKV
TQFNYYKKL

SEQ ID NO: 66790 - protein, 9 aa, synthetic construct
  source 1..9: note = Seed: TQFNYYKKV
TQFNYYKKM

SEQ ID NO: 66791 - protein, 9 aa, synthetic construct
  source 1..9: note = Seed: TQFNYYKKV
TQFNYYKKY

SEQ ID NO: 66792 - protein, 9 aa, synthetic construct
  source 1..9: note = Seed: TCFSTQFAF
TQFSTQFAF

SEQ ID NO: 66793 - protein, 9 aa, synthetic construct
  source 1..9: note = Seed: TCFSTQFAF
TQFSTQFAH

SEQ ID NO: 66794 - protein, 9 aa, synthetic construct
  source 1..9: note = Seed: TCFSTQFAF
TQFSTQFAI

SEQ ID NO: 66795 - protein, 9 aa, synthetic construct
  source 1..9: note = Seed: TCFSTQFAF
TQFSTQFAL

SEQ ID NO: 66796 - protein, 9 aa, synthetic construct
  source 1..9: note = Seed: TCFSTQFAF
TQFSTQFAM

SEQ ID NO: 66797 - protein, 9 aa, synthetic construct
  source 1..9: note = Seed: TCFSTQFAF
TQFSTQFAV

SEQ ID NO: 66798 - protein, 9 aa, synthetic construct
  source 1..9: note = Seed: TCFSTQFAF
TQFSTQFAW

SEQ ID NO: 66799 - protein, 9 aa, synthetic construct
  source 1..9: note = Seed: TCFSTQFAF
TQFSTQFAY

SEQ ID NO: 66800 - protein, 11 aa, synthetic construct
  source 1..11: note = Seed: TLGVYDYLVST
TQGVYDYLVSV

SEQ ID NO: 66801 - protein, 11 aa, synthetic construct
  source 1..11: note = Seed: TKHFYWFFSNY
TQHFYWFFSNF

SEQ ID NO: 66802 - protein, 11 aa, synthetic construct
  source 1..11: note = Seed: TKHFYWFFSNY
TQHFYWFFSNY

SEQ ID NO: 66803 - protein, 9 aa, synthetic construct
  source 1..9: note = Seed: TAHSCNVNR
TQHSCNVNR

SEQ ID NO: 66804 - protein, 10 aa, synthetic construct
  source 1..10: note = Seed: TEHSWNADLY
TQHSWNADLF

SEQ ID NO: 66805 - protein, 10 aa, synthetic construct
  source 1..10: note = Seed: TEHSWNADLY
TQHSWNADLY

SEQ ID NO: 66806 - protein, 9 aa, synthetic construct
  source 1..9: note = Seed: THHWLLLTI
TQHWLLLTL

SEQ ID NO: 66807 - protein, 9 aa, synthetic construct
  source 1..9: note = Seed: TTIKPVTYK
TQIKPVTYK

SEQ ID NO: 66808 - protein, 9 aa, synthetic construct
  source 1..9: note = Seed: TTIKPVTYK
TQIKPVTYR

SEQ ID NO: 66809 - protein, 9 aa, synthetic construct
  source 1..9: note = Seed: TNILLNVPL
TQILLNVPL

SEQ ID NO: 66810 - protein, 10 aa, synthetic construct
  source 1..10: note = Seed: TLIVNSVLLF
TQIVNSVLLF

SEQ ID NO: 66811 - protein, 10 aa, synthetic construct
  source 1..10: note = Seed: TLIVNSVLLF
TQIVNSVLLM

SEQ ID NO: 66812 - protein, 10 aa, synthetic construct
  source 1..10: note = Seed: TLIVNSVLLF
TQIVNSVLLY

SEQ ID NO: 66813 - protein, 9 aa, synthetic construct
  source 1..9: note = Seed: TLIVNSVLL
TQIVNSVLV

SEQ ID NO: 66814 - protein, 9 aa, synthetic construct
  source 1..9: note = Seed: TVKPGNFNK
TQKPGNFNR

SEQ ID NO: 66815 - protein, 10 aa, synthetic construct
  source 1..10: note = Seed: TNLCPFGEVF
TQLCPFGEVF

SEQ ID NO: 66816 - protein, 10 aa, synthetic construct
  source 1..10: note = Seed: TNLCPFGEVF
TQLCPFGEVM

SEQ ID NO: 66817 - protein, 10 aa, synthetic construct
  source 1..10: note = Seed: TNLCPFGEVF
TQLCPFGEVY

SEQ ID NO: 66818 - protein, 10 aa, synthetic construct
  source 1..10: note = Seed: TFLLNKEMYL
TQLLNKEMYI

SEQ ID NO: 66819 - protein, 10 aa, synthetic construct
  source 1..10: note = Seed: TFLLNKEMYL
TQLLNKEMYL

SEQ ID NO: 66820 - protein, 10 aa, synthetic construct
  source 1..10: note = Seed: TFLLNKEMYL
TQLLNKEMYV

SEQ ID NO: 66821 - protein, 9 aa, synthetic construct
  source 1..9: note = Seed: TLLLQLCTF
TQLLQLCTF

SEQ ID NO: 66822 - protein, 10 aa, synthetic construct
  source 1..10: note = Seed: TLLLQLCTFT
TQLLQLCTFV

SEQ ID NO: 66823 - protein, 9 aa, synthetic construct
  source 1..9: note = Seed: TLLLQLCTF
TQLLQLCTM

SEQ ID NO: 66824 - protein, 9 aa, synthetic construct
  source 1..9: note = Seed: TLLLQLCTF
TQLLQLCTY

SEQ ID NO: 66825 - protein, 9 aa, synthetic construct
  source 1..9: note = Seed: TTLPVNVAF
TQLPVNVAF

SEQ ID NO: 66826 - protein, 9 aa, synthetic construct
  source 1..9: note = Seed: TTLPVNVAF
TQLPVNVAL

SEQ ID NO: 66827 - protein, 9 aa, synthetic construct
  source 1..9: note = Seed: TTLPVNVAF
TQLPVNVAM

SEQ ID NO: 66828 - protein, 9 aa, synthetic construct
  source 1..9: note = Seed: TTLPVNVAF
TQLPVNVAY

SEQ ID NO: 66829 - protein, 9 aa, synthetic construct
  source 1..9: note = Seed: TILTSLLVL
TQLTSLLVI

SEQ ID NO: 66830 - protein, 10 aa, synthetic construct
  source 1..10: note = Seed: TILTSLLVLV
TQLTSLLVLI

SEQ ID NO: 66831 - protein, 10 aa, synthetic construct
  source 1..10: note = Seed: TILTSLLVLV
TQLTSLLVLL

SEQ ID NO: 66832 - protein, 10 aa, synthetic construct
  source 1..10: note = Seed: TILTSLLVLV
TQLTSLLVLV

SEQ ID NO: 66833 - protein, 9 aa, synthetic construct
  source 1..9: note = Seed: TILTSLLVL
TQLTSLLVV

SEQ ID NO: 66834 - protein, 10 aa, synthetic construct
  source 1..10: note = Seed: TPLVPFWITI
TQLVPFWITV

SEQ ID NO: 66835 - protein, 10 aa, synthetic construct
  source 1..10: note = Seed: TQLYLGGMSY
TQLYLGGMSF

SEQ ID NO: 66836 - protein, 10 aa, synthetic construct
  source 1..10: note = Seed: TQLYLGGMSY
TQLYLGGMSK

SEQ ID NO: 66837 - protein, 10 aa, synthetic construct
  source 1..10: note = Seed: TQLYLGGMSY
TQLYLGGMSL

SEQ ID NO: 66838 - protein, 10 aa, synthetic construct
  source 1..10: note = Seed: TQLYLGGMSY
TQLYLGGMSM

SEQ ID NO: 66839 - protein, 11 aa, synthetic construct
  source 1..11: note = Seed: TQLYLGGMSYY
TQLYLGGMSYF

SEQ ID NO: 66840 - protein, 10 aa, synthetic construct
  source 1..10: note = Seed: TLMIERFVSL
TQMIERFVSA

SEQ ID NO: 66841 - protein, 10 aa, synthetic construct
  source 1..10: note = Seed: TLMIERFVSL
TQMIERFVSF

SEQ ID NO: 66842 - protein, 10 aa, synthetic construct
  source 1..10: note = Seed: TLMIERFVSL
TQMIERFVSI

SEQ ID NO: 66843 - protein, 10 aa, synthetic construct
  source 1..10: note = Seed: TLMIERFVSL
TQMIERFVSL

SEQ ID NO: 66844 - protein, 10 aa, synthetic construct
  source 1..10: note = Seed: TLMIERFVSL
TQMIERFVSM

SEQ ID NO: 66845 - protein, 10 aa, synthetic construct
  source 1..10: note = Seed: TLMIERFVSL
TQMIERFVSV

SEQ ID NO: 66846 - protein, 10 aa, synthetic construct
  source 1..10: note = Seed: TLMIERFVSL
TQMIERFVSY

SEQ ID NO: 66847 - protein, 9 aa, synthetic construct
  source 1..9: note = Seed: TSMKYFVKI
TQMKYFVKA

SEQ ID NO: 66848 - protein, 9 aa, synthetic construct
  source 1..9: note = Seed: TSMKYFVKI
TQMKYFVKI

SEQ ID NO: 66849 - protein, 9 aa, synthetic construct
  source 1..9: note = Seed: TSMKYFVKI
TQMKYFVKL

SEQ ID NO: 66850 - protein, 9 aa, synthetic construct
  source 1..9: note = Seed: TSMKYFVKI
TQMKYFVKM

SEQ ID NO: 66851 - protein, 9 aa, synthetic construct
  source 1..9: note = Seed: TSMKYFVKI
TQMKYFVKT

SEQ ID NO: 66852 - protein, 9 aa, synthetic construct
  source 1..9: note = Seed: TSMKYFVKI
TQMKYFVKV

SEQ ID NO: 66853 - protein, 10 aa, synthetic construct
  source 1..10: note = Seed: TCMMCYKRNR
TQMMCYKRNR

SEQ ID NO: 66854 - protein, 9 aa, synthetic construct
  source 1..9: note = Seed: TQMNLKYAI
TQMNLKYAA

SEQ ID NO: 66855 - protein, 9 aa, synthetic construct
  source 1..9: note = Seed: TQMNLKYAI
TQMNLKYAF

SEQ ID NO: 66856 - protein, 9 aa, synthetic construct
  source 1..9: note = Seed: TQMNLKYAI
TQMNLKYAL

SEQ ID NO: 66857 - protein, 9 aa, synthetic construct
  source 1..9: note = Seed: TQMNLKYAI
TQMNLKYAM

SEQ ID NO: 66858 - protein, 9 aa, synthetic construct
  source 1..9: note = Seed: TQMNLKYAI
TQMNLKYAV

SEQ ID NO: 66859 - protein, 9 aa, synthetic construct
  source 1..9: note = Seed: TQMNLKYAI
TQMNLKYAY

SEQ ID NO: 66860 - protein, 10 aa, synthetic construct
  source 1..10: note = Seed: TLNDFNLVAM
TQNDFNLVAF

SEQ ID NO: 66861 - protein, 10 aa, synthetic construct
  source 1..10: note = Seed: TLNDFNLVAM
TQNDFNLVAV

SEQ ID NO: 66862 - protein, 10 aa, synthetic construct
  source 1..10: note = Seed: TLNDFNLVAM
TQNDFNLVAY

SEQ ID NO: 66863 - protein, 9 aa, synthetic construct
  source 1..9: note = Seed: TLNDFNLVA
TQNDFNLVV

SEQ ID NO: 66864 - protein, 9 aa, synthetic construct
  source 1..9: note = Seed: TLNDLNETL
TQNDLNETV

SEQ ID NO: 66865 - protein, 9 aa, synthetic construct
  source 1..9: note = Seed: TTNGDFLHF
TQNGDFLHF

SEQ ID NO: 66866 - protein, 10 aa, synthetic construct
  source 1..10: note = Seed: TTNGDFLHFL
TQNGDFLHFI

SEQ ID NO: 66867 - protein, 10 aa, synthetic construct
  source 1..10: note = Seed: TTNGDFLHFL
TQNGDFLHFL

SEQ ID NO: 66868 - protein, 10 aa, synthetic construct
  source 1..10: note = Seed: TTNGDFLHFL
TQNGDFLHFV

SEQ ID NO: 66869 - protein, 9 aa, synthetic construct
  source 1..9: note = Seed: TTNGDFLHF
TQNGDFLHL

SEQ ID NO: 66870 - protein, 9 aa, synthetic construct
  source 1..9: note = Seed: TTNGDFLHF
TQNGDFLHM

SEQ ID NO: 66871 - protein, 9 aa, synthetic construct
  source 1..9: note = Seed: TTNGDFLHF
TQNGDFLHY

SEQ ID NO: 66872 - protein, 9 aa, synthetic construct
  source 1..9: note = Seed: TVNVLAWLY
TQNVLAWLK

SEQ ID NO: 66873 - protein, 9 aa, synthetic construct
  source 1..9: note = Seed: TVNVLAWLY
TQNVLAWLY

SEQ ID NO: 66874 - protein, 11 aa, synthetic construct
  source 1..11: note = Seed: TVNVLAWLYAA
TQNVLAWLYAV

SEQ ID NO: 66875 - protein, 9 aa, synthetic construct
  source 1..9: note = Seed: TGNYQCGHY
TQNYQCGHY

SEQ ID NO: 66876 - protein, 10 aa, synthetic construct
  source 1..10: note = Seed: TGNYQCGHYK
TQNYQCGHYK

SEQ ID NO: 66877 - protein, 10 aa, synthetic construct
  source 1..10: note = Seed: TGNYQCGHYK
TQNYQCGHYR

SEQ ID NO: 66878 - protein, 10 aa, synthetic construct
  source 1..10: note = Seed: TLPVNVAFEL
TQPVNVAFEF

SEQ ID NO: 66879 - protein, 10 aa, synthetic construct
  source 1..10: note = Seed: TLPVNVAFEL
TQPVNVAFEW

SEQ ID NO: 66880 - protein, 10 aa, synthetic construct
  source 1..10: note = Seed: TLPVNVAFEL
TQPVNVAFEY

SEQ ID NO: 66881 - protein, 9 aa, synthetic construct
  source 1..9: note = Seed: TLQAIASEF
TQQAIASEF

SEQ ID NO: 66882 - protein, 9 aa, synthetic construct
  source 1..9: note = Seed: TLQAIASEF
TQQAIASEM

SEQ ID NO: 66883 - protein, 9 aa, synthetic construct
  source 1..9: note = Seed: TLQAIASEF
TQQAIASEY

SEQ ID NO: 66884 - protein, 9 aa, synthetic construct
  source 1..9: note = Seed: TIQITISSF
TQQITISSF

SEQ ID NO: 66885 - protein, 10 aa, synthetic construct
  source 1..10: note = Seed: TIQITISSFK
TQQITISSFK

SEQ ID NO: 66886 - protein, 10 aa, synthetic construct
  source 1..10: note = Seed: TIQITISSFK
TQQITISSFR

SEQ ID NO: 66887 - protein, 9 aa, synthetic construct
  source 1..9: note = Seed: TIQITISSF
TQQITISSL

SEQ ID NO: 66888 - protein, 9 aa, synthetic construct
  source 1..9: note = Seed: TIQITISSF
TQQITISSM

SEQ ID NO: 66889 - protein, 9 aa, synthetic construct
  source 1..9: note = Seed: TIQITISSF
TQQITISSY

SEQ ID NO: 66890 - protein, 11 aa, synthetic construct
  source 1..11: note = Seed: TRQVVNVVTTK
TQQVVNVVTTR

SEQ ID NO: 66891 - protein, 10 aa, synthetic construct
  source 1..10: note = Seed: TGRLQSLQTY
TQRLQSLQTF

SEQ ID NO: 66892 - protein, 10 aa, synthetic construct
  source 1..10: note = Seed: TGRLQSLQTY
TQRLQSLQTM

SEQ ID NO: 66893 - protein, 10 aa, synthetic construct
  source 1..10: note = Seed: TGRLQSLQTY
TQRLQSLQTY

SEQ ID NO: 66894 - protein, 9 aa, synthetic construct
  source 1..9: note = Seed: TTRQVVNVV
TQRQVVNVK

SEQ ID NO: 66895 - protein, 9 aa, synthetic construct
  source 1..9: note = Seed: TYRRLISMM
TQRRLISMK

SEQ ID NO: 66896 - protein, 10 aa, synthetic construct
  source 1..10: note = Seed: TSSGDATTAY
TQSGDATTAF

SEQ ID NO: 66897 - protein, 10 aa, synthetic construct
  source 1..10: note = Seed: TSSGDATTAY
TQSGDATTAY

SEQ ID NO: 66898 - protein, 9 aa, synthetic construct
  source 1..9: note = Seed: TQSRNLQEF
TQSRNLQEM

SEQ ID NO: 66899 - protein, 9 aa, synthetic construct
  source 1..9: note = Seed: TQSRNLQEF
TQSRNLQEY

SEQ ID NO: 66900 - protein, 9 aa, synthetic construct
  source 1..9: note = Seed: TASWFTALT
TQSWFTALV

SEQ ID NO: 66901 - protein, 10 aa, synthetic construct
  source 1..10: note = Seed: TTTIKPVTYK
TQTIKPVTYK

SEQ ID NO: 66902 - protein, 10 aa, synthetic construct
  source 1..10: note = Seed: TTTIKPVTYK
TQTIKPVTYR

SEQ ID NO: 66903 - protein, 10 aa, synthetic construct
  source 1..10: note = Seed: TITVNVLAWL
TQTVNVLAWA

SEQ ID NO: 66904 - protein, 10 aa, synthetic construct
  source 1..10: note = Seed: TITVNVLAWL
TQTVNVLAWI

SEQ ID NO: 66905 - protein, 10 aa, synthetic construct
  source 1..10: note = Seed: TITVNVLAWL
TQTVNVLAWV

SEQ ID NO: 66906 - protein, 10 aa, synthetic construct
  source 1..10: note = Seed: TNVLEGSVAY
TQVLEGSVAF

SEQ ID NO: 66907 - protein, 10 aa, synthetic construct
  source 1..10: note = Seed: TNVLEGSVAY
TQVLEGSVAM

SEQ ID NO: 66908 - protein, 10 aa, synthetic construct
  source 1..10: note = Seed: TNVLEGSVAY
TQVLEGSVAY

SEQ ID NO: 66909 - protein, 10 aa, synthetic construct
  source 1..10: note = Seed: TLVSDIDITF
TQVSDIDITY

SEQ ID NO: 66910 - protein, 10 aa, synthetic construct
  source 1..10: note = Seed: TEVVGDIILK
TQVVGDIILK

SEQ ID NO: 66911 - protein, 10 aa, synthetic construct
  source 1..10: note = Seed: TEVVGDIILK
TQVVGDIILR

SEQ ID NO: 66912 - protein, 10 aa, synthetic construct
  source 1..10: note = Seed: TPVYSFLPGV
TQVYSFLPGA

SEQ ID NO: 66913 - protein, 10 aa, synthetic construct
  source 1..10: note = Seed: TPVYSFLPGV
TQVYSFLPGI

SEQ ID NO: 66914 - protein, 10 aa, synthetic construct
  source 1..10: note = Seed: TPVYSFLPGV
TQVYSFLPGL

SEQ ID NO: 66915 - protein, 10 aa, synthetic construct
  source 1..10: note = Seed: TPVYSFLPGV
TQVYSFLPGV

SEQ ID NO: 66916 - protein, 8 aa, synthetic construct
  source 1..8: note = Seed: TAYANSVF
TQYANSVF

SEQ ID NO: 66917 - protein, 10 aa, synthetic construct
  source 1..10: note = Seed: TAYANSVFNI
TQYANSVFNF

SEQ ID NO: 66918 - protein, 10 aa, synthetic construct
  source 1..10: note = Seed: TAYANSVFNI
TQYANSVFNI

SEQ ID NO: 66919 - protein, 10 aa, synthetic construct
  source 1..10: note = Seed: TAYANSVFNI
TQYANSVFNL

SEQ ID NO: 66920 - protein, 10 aa, synthetic construct
  source 1..10: note = Seed: TAYANSVFNI
TQYANSVFNW

SEQ ID NO: 66921 - protein, 8 aa, synthetic construct
  source 1..8: note = Seed: TAYANSVF
TQYANSVL

SEQ ID NO: 66922 - protein, 8 aa, synthetic construct
  source 1..8: note = Seed: TAYANSVF
TQYANSVM

SEQ ID NO: 66923 - protein, 8 aa, synthetic construct
  source 1..8: note = Seed: TAYANSVF
TQYANSVY

SEQ ID NO: 66924 - protein, 9 aa, synthetic construct
  source 1..9: note = Seed: TLYCIDGAL
TQYCIDGAF

SEQ ID NO: 66925 - protein, 9 aa, synthetic construct
  source 1..9: note = Seed: TLYCIDGAL
TQYCIDGAL

SEQ ID NO: 66926 - protein, 9 aa, synthetic construct
  source 1..9: note = Seed: TLYCIDGAL
TQYCIDGAM

SEQ ID NO: 66927 - protein, 9 aa, synthetic construct
  source 1..9: note = Seed: TLYCIDGAL
TQYCIDGAW

SEQ ID NO: 66928 - protein, 9 aa, synthetic construct
  source 1..9: note = Seed: TLYCIDGAL
TQYCIDGAY

SEQ ID NO: 66929 - protein, 9 aa, synthetic construct
  source 1..9: note = Seed: TVYEKLKPV
TQYEKLKPA

SEQ ID NO: 66930 - protein, 9 aa, synthetic construct
  source 1..9: note = Seed: TVYEKLKPV
TQYEKLKPI

SEQ ID NO: 66931 - protein, 9 aa, synthetic construct
  source 1..9: note = Seed: TVYEKLKPV
TQYEKLKPL

SEQ ID NO: 66932 - protein, 9 aa, synthetic construct
  source 1..9: note = Seed: TVYEKLKPV
TQYEKLKPV

SEQ ID NO: 66933 - protein, 10 aa, synthetic construct
  source 1..10: note = Seed: TFYLTNDVSF
TQYLTNDVSF

SEQ ID NO: 66934 - protein, 10 aa, synthetic construct
  source 1..10: note = Seed: TFYLTNDVSF
TQYLTNDVSM

SEQ ID NO: 66935 - protein, 10 aa, synthetic construct
  source 1..10: note = Seed: TFYLTNDVSF
TQYLTNDVSY

SEQ ID NO: 66936 - protein, 11 aa, synthetic construct
  source 1..11: note = Seed: TTYPGQGLNGY
TQYPGQGLNGY

SEQ ID NO: 66937 - protein, 10 aa, synthetic construct
  source 1..10: note = Seed: TKYTMADLVY
TQYTMADLVF

SEQ ID NO: 66938 - protein, 10 aa, synthetic construct
  source 1..10: note = Seed: TKYTMADLVY
TQYTMADLVL

SEQ ID NO: 66939 - protein, 10 aa, synthetic construct
  source 1..10: note = Seed: TKYTMADLVY
TQYTMADLVM

SEQ ID NO: 66940 - protein, 10 aa, synthetic construct
  source 1..10: note = Seed: TKYTMADLVY
TQYTMADLVY

SEQ ID NO: 66941 - protein, 11 aa, synthetic construct
  source 1..11: note = Seed: TKYTMADLVYA
TQYTMADLVYI

SEQ ID NO: 66942 - protein, 11 aa, synthetic construct
  source 1..11: note = Seed: TKYTMADLVYA
TQYTMADLVYL

SEQ ID NO: 66943 - protein, 11 aa, synthetic construct
  source 1..11: note = Seed: TKYTMADLVYA
TQYTMADLVYV

SEQ ID NO: 66944 - protein, 9 aa, synthetic construct
  source 1..9: note = Seed: TYACWHHSI
TRACWHHSF

SEQ ID NO: 66945 - protein, 9 aa, synthetic construct
  source 1..9: note = Seed: TYACWHHSI
TRACWHHSL

SEQ ID NO: 66946 - protein, 9 aa, synthetic construct
  source 1..9: note = Seed: TYACWHHSI
TRACWHHSM

SEQ ID NO: 66947 - protein, 9 aa, synthetic construct
  source 1..9: note = Seed: TMADLVYAL
TRADLVYAI

SEQ ID NO: 66948 - protein, 9 aa, synthetic construct
  source 1..9: note = Seed: TMADLVYAL
TRADLVYAL

SEQ ID NO: 66949 - protein, 9 aa, synthetic construct
  source 1..9: note = Seed: TMADLVYAL
TRADLVYAM

SEQ ID NO: 66950 - protein, 9 aa, synthetic construct
  source 1..9: note = Seed: TMADLVYAL
TRADLVYAV

SEQ ID NO: 66951 - protein, 10 aa, synthetic construct
  source 1..10: note = Seed: TSAVLQSGFR
TRAVLQSGFR

SEQ ID NO: 66952 - protein, 9 aa, synthetic construct
  source 1..9: note = Seed: TTAYANSVF
TRAYANSVF

SEQ ID NO: 66953 - protein, 11 aa, synthetic construct
  source 1..11: note = Seed: TTAYANSVFNI
TRAYANSVFNF

SEQ ID NO: 66954 - protein, 11 aa, synthetic construct
  source 1..11: note = Seed: TTAYANSVFNI
TRAYANSVFNW

SEQ ID NO: 66955 - protein, 9 aa, synthetic construct
  source 1..9: note = Seed: TTAYANSVF
TRAYANSVM

SEQ ID NO: 66956 - protein, 9 aa, synthetic construct
  source 1..9: note = Seed: TTAYANSVF
TRAYANSVY

SEQ ID NO: 66957 - protein, 9 aa, synthetic construct
  source 1..9: note = Seed: TVAYFNMVY
TRAYFNMVF

SEQ ID NO: 66958 - protein, 9 aa, synthetic construct
  source 1..9: note = Seed: TVAYFNMVY
TRAYFNMVM

SEQ ID NO: 66959 - protein, 9 aa, synthetic construct
  source 1..9: note = Seed: TVAYFNMVY
TRAYFNMVY

SEQ ID NO: 66960 - protein, 10 aa, synthetic construct
  source 1..10: note = Seed: TVAYFNMVYM
TRAYFNMVYK

SEQ ID NO: 66961 - protein, 10 aa, synthetic construct
  source 1..10: note = Seed: TVAYFNMVYM
TRAYFNMVYR

SEQ ID NO: 66962 - protein, 10 aa, synthetic construct
  source 1..10: note = Seed: TVAYFNMVYM
TRAYFNMVYV

SEQ ID NO: 66963 - protein, 11 aa, synthetic construct
  source 1..11: note = Seed: TIDYTEISFML
TRDYTEISFMF

SEQ ID NO: 66964 - protein, 10 aa, synthetic construct
  source 1..10: note = Seed: TLEQYVFCTV
TREQYVFCTL

SEQ ID NO: 66965 - protein, 10 aa, synthetic construct
  source 1..10: note = Seed: TIEVNSFSGY
TREVNSFSGW

SEQ ID NO: 66966 - protein, 9 aa, synthetic construct
  source 1..9: note = Seed: TRFASVYAW
TRFASVYAA

SEQ ID NO: 66967 - protein, 9 aa, synthetic construct
  source 1..9: note = Seed: TRFASVYAW
TRFASVYAF

SEQ ID NO: 66968 - protein, 9 aa, synthetic construct
  source 1..9: note = Seed: TRFASVYAW
TRFASVYAI

SEQ ID NO: 66969 - protein, 9 aa, synthetic construct
  source 1..9: note = Seed: TRFASVYAW
TRFASVYAK

SEQ ID NO: 66970 - protein, 9 aa, synthetic construct
  source 1..9: note = Seed: TRFASVYAW
TRFASVYAL

SEQ ID NO: 66971 - protein, 9 aa, synthetic construct
  source 1..9: note = Seed: TRFASVYAW
TRFASVYAM

SEQ ID NO: 66972 - protein, 9 aa, synthetic construct
  source 1..9: note = Seed: TRFASVYAW
TRFASVYAV

SEQ ID NO: 66973 - protein, 9 aa, synthetic construct
  source 1..9: note = Seed: TRFASVYAW
TRFASVYAY

SEQ ID NO: 66974 - protein, 9 aa, synthetic construct
  source 1..9: note = Seed: TRFFYVLGL
TRFFYVLGF

SEQ ID NO: 66975 - protein, 9 aa, synthetic construct
  source 1..9: note = Seed: TRFFYVLGL
TRFFYVLGI

SEQ ID NO: 66976 - protein, 9 aa, synthetic construct
  source 1..9: note = Seed: TRFFYVLGL
TRFFYVLGK

SEQ ID NO: 66977 - protein, 10 aa, synthetic construct
  source 1..10: note = Seed: TRFFYVLGLA
TRFFYVLGLF

SEQ ID NO: 66978 - protein, 10 aa, synthetic construct
  source 1..10: note = Seed: TRFFYVLGLA
TRFFYVLGLI

SEQ ID NO: 66979 - protein, 10 aa, synthetic construct
  source 1..10: note = Seed: TRFFYVLGLA
TRFFYVLGLK

SEQ ID NO: 66980 - protein, 10 aa, synthetic construct
  source 1..10: note = Seed: TRFFYVLGLA
TRFFYVLGLL

SEQ ID NO: 66981 - protein, 10 aa, synthetic construct
  source 1..10: note = Seed: TRFFYVLGLA
TRFFYVLGLM

SEQ ID NO: 66982 - protein, 10 aa, synthetic construct
  source 1..10: note = Seed: TRFFYVLGLA
TRFFYVLGLR

SEQ ID NO: 66983 - protein, 9 aa, synthetic construct
  source 1..9: note = Seed: TRFFYVLGL
TRFFYVLGM

SEQ ID NO: 66984 - protein, 9 aa, synthetic construct
  source 1..9: note = Seed: TRFFYVLGL
TRFFYVLGR

SEQ ID NO: 66985 - protein, 9 aa, synthetic construct
  source 1..9: note = Seed: TRFFYVLGL
TRFFYVLGV

SEQ ID NO: 66986 - protein, 9 aa, synthetic construct
  source 1..9: note = Seed: TRFFYVLGL
TRFFYVLGY

SEQ ID NO: 66987 - protein, 9 aa, synthetic construct
  source 1..9: note = Seed: TCFSTQFAF
TRFSTQFAF

SEQ ID NO: 66988 - protein, 9 aa, synthetic construct
  source 1..9: note = Seed: TCFSTQFAF
TRFSTQFAM

SEQ ID NO: 66989 - protein, 9 aa, synthetic construct
  source 1..9: note = Seed: TCFSTQFAF
TRFSTQFAY

SEQ ID NO: 66990 - protein, 9 aa, synthetic construct
  source 1..9: note = Seed: TYFTQSRNL
TRFTQSRNI

SEQ ID NO: 66991 - protein, 9 aa, synthetic construct
  source 1..9: note = Seed: TYFTQSRNL
TRFTQSRNL

SEQ ID NO: 66992 - protein, 9 aa, synthetic construct
  source 1..9: note = Seed: TYFTQSRNL
TRFTQSRNV

SEQ ID NO: 66993 - protein, 11 aa, synthetic construct
  source 1..11: note = Seed: TLGVYDYLVST
TRGVYDYLVSV

SEQ ID NO: 66994 - protein, 10 aa, synthetic construct
  source 1..10: note = Seed: TGHMLDMYSV
TRHMLDMYSL

SEQ ID NO: 66995 - protein, 9 aa, synthetic construct
  source 1..9: note = Seed: THHWLLLTI
TRHWLLLTA

SEQ ID NO: 66996 - protein, 9 aa, synthetic construct
  source 1..9: note = Seed: THHWLLLTI
TRHWLLLTL

SEQ ID NO: 66997 - protein, 9 aa, synthetic construct
  source 1..9: note = Seed: TNILLNVPL
TRILLNVPI

SEQ ID NO: 66998 - protein, 9 aa, synthetic construct
  source 1..9: note = Seed: TNILLNVPL
TRILLNVPL

SEQ ID NO: 66999 - protein, 9 aa, synthetic construct
  source 1..9: note = Seed: TNILLNVPL
TRILLNVPM

SEQ ID NO: 67000 - protein, 9 aa, synthetic construct
  source 1..9: note = Seed: TNILLNVPL
TRILLNVPV

SEQ ID NO: 67001 - protein, 10 aa, synthetic construct
  source 1..10: note = Seed: TFLLNKEMYL
TRLLNKEMYI

SEQ ID NO: 67002 - protein, 10 aa, synthetic construct
  source 1..10: note = Seed: TFLLNKEMYL
TRLLNKEMYL

SEQ ID NO: 67003 - protein, 11 aa, synthetic construct
  source 1..11: note = Seed: TFLLNKEMYLK
TRLLNKEMYLR

SEQ ID NO: 67004 - protein, 10 aa, synthetic construct
  source 1..10: note = Seed: TFLLNKEMYL
TRLLNKEMYV

SEQ ID NO: 67005 - protein, 10 aa, synthetic construct
  source 1..10: note = Seed: TLLLQLCTFT
TRLLQLCTFV

SEQ ID NO: 67006 - protein, 9 aa, synthetic construct
  source 1..9: note = Seed: TTLPVNVAF
TRLPVNVAY

SEQ ID NO: 67007 - protein, 10 aa, synthetic construct
  source 1..10: note = Seed: TILTSLLVLV
TRLTSLLVLI

SEQ ID NO: 67008 - protein, 10 aa, synthetic construct
  source 1..10: note = Seed: TILTSLLVLV
TRLTSLLVLL

SEQ ID NO: 67009 - protein, 10 aa, synthetic construct
  source 1..10: note = Seed: TILTSLLVLV
TRLTSLLVLV

SEQ ID NO: 67010 - protein, 10 aa, synthetic construct
  source 1..10: note = Seed: TPLVPFWITI
TRLVPFWITV

SEQ ID NO: 67011 - protein, 10 aa, synthetic construct
  source 1..10: note = Seed: TQLYLGGMSY
TRLYLGGMSF

SEQ ID NO: 67012 - protein, 10 aa, synthetic construct
  source 1..10: note = Seed: TQLYLGGMSY
TRLYLGGMSK

SEQ ID NO: 67013 - protein, 10 aa, synthetic construct
  source 1..10: note = Seed: TQLYLGGMSY
TRLYLGGMSM

SEQ ID NO: 67014 - protein, 10 aa, synthetic construct
  source 1..10: note = Seed: TQLYLGGMSY
TRLYLGGMSY

SEQ ID NO: 67015 - protein, 10 aa, synthetic construct
  source 1..10: note = Seed: TLMIERFVSL
TRMIERFVSA

SEQ ID NO: 67016 - protein, 10 aa, synthetic construct
  source 1..10: note = Seed: TLMIERFVSL
TRMIERFVSF

SEQ ID NO: 67017 - protein, 10 aa, synthetic construct
  source 1..10: note = Seed: TLMIERFVSL
TRMIERFVSI

SEQ ID NO: 67018 - protein, 10 aa, synthetic construct
  source 1..10: note = Seed: TLMIERFVSL
TRMIERFVSL

SEQ ID NO: 67019 - protein, 11 aa, synthetic construct
  source 1..11: note = Seed: TLMIERFVSLA
TRMIERFVSLV

SEQ ID NO: 67020 - protein, 10 aa, synthetic construct
  source 1..10: note = Seed: TLMIERFVSL
TRMIERFVSM

SEQ ID NO: 67021 - protein, 10 aa, synthetic construct
  source 1..10: note = Seed: TLMIERFVSL
TRMIERFVSV

SEQ ID NO: 67022 - protein, 10 aa, synthetic construct
  source 1..10: note = Seed: TLMIERFVSL
TRMIERFVSY

SEQ ID NO: 67023 - protein, 10 aa, synthetic construct
  source 1..10: note = Seed: TCMMCYKRNR
TRMMCYKRNR

SEQ ID NO: 67024 - protein, 9 aa, synthetic construct
  source 1..9: note = Seed: TQMNLKYAI
TRMNLKYAA

SEQ ID NO: 67025 - protein, 9 aa, synthetic construct
  source 1..9: note = Seed: TQMNLKYAI
TRMNLKYAF

SEQ ID NO: 67026 - protein, 9 aa, synthetic construct
  source 1..9: note = Seed: TQMNLKYAI
TRMNLKYAI

SEQ ID NO: 67027 - protein, 9 aa, synthetic construct
  source 1..9: note = Seed: TQMNLKYAI
TRMNLKYAL

SEQ ID NO: 67028 - protein, 9 aa, synthetic construct
  source 1..9: note = Seed: TQMNLKYAI
TRMNLKYAM

SEQ ID NO: 67029 - protein, 9 aa, synthetic construct
  source 1..9: note = Seed: TQMNLKYAI
TRMNLKYAV

SEQ ID NO: 67030 - protein, 9 aa, synthetic construct
  source 1..9: note = Seed: TQMNLKYAI
TRMNLKYAY

SEQ ID NO: 67031 - protein, 10 aa, synthetic construct
  source 1..10: note = Seed: TLPVNVAFEL
TRPVNVAFEF

SEQ ID NO: 67032 - protein, 10 aa, synthetic construct
  source 1..10: note = Seed: TLPVNVAFEL
TRPVNVAFEW

SEQ ID NO: 67033 - protein, 10 aa, synthetic construct
  source 1..10: note = Seed: TLPVNVAFEL
TRPVNVAFEY

SEQ ID NO: 67034 - protein, 10 aa, synthetic construct
  source 1..10: note = Seed: TLQAENVTGL
TRQAENVTGV

SEQ ID NO: 67035 - protein, 10 aa, synthetic construct
  source 1..10: note = Seed: TIQITISSFK
TRQITISSFK

SEQ ID NO: 67036 - protein, 10 aa, synthetic construct
  source 1..10: note = Seed: TIQITISSFK
TRQITISSFR

SEQ ID NO: 67037 - protein, 11 aa, synthetic construct
  source 1..11: note = Seed: TRQVVNVVTTK
TRQVVNVVTTR

SEQ ID NO: 67038 - protein, 10 aa, synthetic construct
  source 1..10: note = Seed: TTTIKPVTYK
TRTIKPVTYK

SEQ ID NO: 67039 - protein, 10 aa, synthetic construct
  source 1..10: note = Seed: TTTIKPVTYK
TRTIKPVTYR

SEQ ID NO: 67040 - protein, 10 aa, synthetic construct
  source 1..10: note = Seed: TMTNRQFHQK
TRTNRQFHQR

SEQ ID NO: 67041 - protein, 10 aa, synthetic construct
  source 1..10: note = Seed: TITVNVLAWL
TRTVNVLAWA

SEQ ID NO: 67042 - protein, 10 aa, synthetic construct
  source 1..10: note = Seed: TITVNVLAWL
TRTVNVLAWI

SEQ ID NO: 67043 - protein, 10 aa, synthetic construct
  source 1..10: note = Seed: TITVNVLAWL
TRTVNVLAWV

SEQ ID NO: 67044 - protein, 10 aa, synthetic construct
  source 1..10: note = Seed: TNVLEGSVAY
TRVLEGSVAY

SEQ ID NO: 67045 - protein, 10 aa, synthetic construct
  source 1..10: note = Seed: TEVVGDIILK
TRVVGDIILK

SEQ ID NO: 67046 - protein, 10 aa, synthetic construct
  source 1..10: note = Seed: TEVVGDIILK
TRVVGDIILR

SEQ ID NO: 67047 - protein, 10 aa, synthetic construct
  source 1..10: note = Seed: TPVYSFLPGV
TRVYSFLPGV

SEQ ID NO: 67048 - protein, 10 aa, synthetic construct
  source 1..10: note = Seed: TAYANSVFNI
TRYANSVFNF

SEQ ID NO: 67049 - protein, 10 aa, synthetic construct
  source 1..10: note = Seed: TAYANSVFNI
TRYANSVFNI

SEQ ID NO: 67050 - protein, 10 aa, synthetic construct
  source 1..10: note = Seed: TAYANSVFNI
TRYANSVFNL

SEQ ID NO: 67051 - protein, 10 aa, synthetic construct
  source 1..10: note = Seed: TAYANSVFNI
TRYANSVFNW

SEQ ID NO: 67052 - protein, 9 aa, synthetic construct
  source 1..9: note = Seed: TLYCIDGAL
TRYCIDGAF

SEQ ID NO: 67053 - protein, 9 aa, synthetic construct
  source 1..9: note = Seed: TLYCIDGAL
TRYCIDGAY

SEQ ID NO: 67054 - protein, 10 aa, synthetic construct
  source 1..10: note = Seed: TFYLTNDVSF
TRYLTNDVSF

SEQ ID NO: 67055 - protein, 11 aa, synthetic construct
  source 1..11: note = Seed: TFYLTNDVSFL
TRYLTNDVSFF

SEQ ID NO: 67056 - protein, 10 aa, synthetic construct
  source 1..10: note = Seed: TFYLTNDVSF
TRYLTNDVSW

SEQ ID NO: 67057 - protein, 10 aa, synthetic construct
  source 1..10: note = Seed: TKYTMADLVY
TRYTMADLVF

SEQ ID NO: 67058 - protein, 10 aa, synthetic construct
  source 1..10: note = Seed: TKYTMADLVY
TRYTMADLVY

SEQ ID NO: 67059 - protein, 11 aa, synthetic construct
  source 1..11: note = Seed: TKYTMADLVYA
TRYTMADLVYV

SEQ ID NO: 67060 - protein, 9 aa, synthetic construct
  source 1..9: note = Seed: TMADLVYAL
TSADLVYAA

SEQ ID NO: 67061 - protein, 9 aa, synthetic construct
  source 1..9: note = Seed: TMADLVYAL
TSADLVYAF

SEQ ID NO: 67062 - protein, 9 aa, synthetic construct
  source 1..9: note = Seed: TMADLVYAL
TSADLVYAI

SEQ ID NO: 67063 - protein, 9 aa, synthetic construct
  source 1..9: note = Seed: TMADLVYAL
TSADLVYAL

SEQ ID NO: 67064 - protein, 10 aa, synthetic construct
  source 1..10: note = Seed: TMADLVYALR
TSADLVYALK

SEQ ID NO: 67065 - protein, 10 aa, synthetic construct
  source 1..10: note = Seed: TMADLVYALR
TSADLVYALR

SEQ ID NO: 67066 - protein, 9 aa, synthetic construct
  source 1..9: note = Seed: TMADLVYAL
TSADLVYAM

SEQ ID NO: 67067 - protein, 9 aa, synthetic construct
  source 1..9: note = Seed: TMADLVYAL
TSADLVYAV

SEQ ID NO: 67068 - protein, 9 aa, synthetic construct
  source 1..9: note = Seed: TMADLVYAL
TSADLVYAY

SEQ ID NO: 67069 - protein, 9 aa, synthetic construct
  source 1..9: note = Seed: TIAEILLII
TSAEILLIV

SEQ ID NO: 67070 - protein, 9 aa, synthetic construct
  source 1..9: note = Seed: TSAFVETVK
TSAFVETVR

SEQ ID NO: 67071 - protein, 10 aa, synthetic construct
  source 1..10: note = Seed: TVAGVSICST
TSAGVSICSI

SEQ ID NO: 67072 - protein, 10 aa, synthetic construct
  source 1..10: note = Seed: TVAGVSICST
TSAGVSICSV

SEQ ID NO: 67073 - protein, 11 aa, synthetic construct
  source 1..11: note = Seed: TSAMQTMLFTM
TSAMQTMLFTW

SEQ ID NO: 67074 - protein, 9 aa, synthetic construct
  source 1..9: note = Seed: TSAMQTMLF
TSAMQTMLI

SEQ ID NO: 67075 - protein, 9 aa, synthetic construct
  source 1..9: note = Seed: TSAMQTMLF
TSAMQTMLL

SEQ ID NO: 67076 - protein, 9 aa, synthetic construct
  source 1..9: note = Seed: TSAMQTMLF
TSAMQTMLM

SEQ ID NO: 67077 - protein, 9 aa, synthetic construct
  source 1..9: note = Seed: TSAMQTMLF
TSAMQTMLW

SEQ ID NO: 67078 - protein, 9 aa, synthetic construct
  source 1..9: note = Seed: TSAMQTMLF
TSAMQTMLY

SEQ ID NO: 67079 - protein, 9 aa, synthetic construct
  source 1..9: note = Seed: TVASLINTL
TSASLINTI

SEQ ID NO: 67080 - protein, 9 aa, synthetic construct
  source 1..9: note = Seed: TVASLINTL
TSASLINTM

SEQ ID NO: 67081 - protein, 9 aa, synthetic construct
  source 1..9: note = Seed: TVASLINTL
TSASLINTV

SEQ ID NO: 67082 - protein, 9 aa, synthetic construct
  source 1..9: note = Seed: TVASLINTL
TSASLINTY

SEQ ID NO: 67083 - protein, 10 aa, synthetic construct
  source 1..10: note = Seed: TSAVLQSGFR
TSAVLQSGFK

SEQ ID NO: 67084 - protein, 9 aa, synthetic construct
  source 1..9: note = Seed: TSAVLQSGF
TSAVLQSGW

SEQ ID NO: 67085 - protein, 9 aa, synthetic construct
  source 1..9: note = Seed: TSAVLQSGF
TSAVLQSGY

SEQ ID NO: 67086 - protein, 9 aa, synthetic construct
  source 1..9: note = Seed: TLAVPYNMR
TSAVPYNMK

SEQ ID NO: 67087 - protein, 9 aa, synthetic construct
  source 1..9: note = Seed: TLAVPYNMR
TSAVPYNMR

SEQ ID NO: 67088 - protein, 9 aa, synthetic construct
  source 1..9: note = Seed: TTAYANSVF
TSAYANSVF

SEQ ID NO: 67089 - protein, 11 aa, synthetic construct
  source 1..11: note = Seed: TTAYANSVFNI
TSAYANSVFNF

SEQ ID NO: 67090 - protein, 11 aa, synthetic construct
  source 1..11: note = Seed: TTAYANSVFNI
TSAYANSVFNW

SEQ ID NO: 67091 - protein, 9 aa, synthetic construct
  source 1..9: note = Seed: TTAYANSVF
TSAYANSVL

SEQ ID NO: 67092 - protein, 9 aa, synthetic construct
  source 1..9: note = Seed: TTAYANSVF
TSAYANSVM

SEQ ID NO: 67093 - protein, 9 aa, synthetic construct
  source 1..9: note = Seed: TTAYANSVF
TSAYANSVW

SEQ ID NO: 67094 - protein, 9 aa, synthetic construct
  source 1..9: note = Seed: TTAYANSVF
TSAYANSVY

SEQ ID NO: 67095 - protein, 9 aa, synthetic construct
  source 1..9: note = Seed: TVAYFNMVY
TSAYFNMVF

SEQ ID NO: 67096 - protein, 9 aa, synthetic construct
  source 1..9: note = Seed: TVAYFNMVY
TSAYFNMVI

SEQ ID NO: 67097 - protein, 9 aa, synthetic construct
  source 1..9: note = Seed: TVAYFNMVY
TSAYFNMVK

SEQ ID NO: 67098 - protein, 9 aa, synthetic construct
  source 1..9: note = Seed: TVAYFNMVY
TSAYFNMVL

SEQ ID NO: 67099 - protein, 9 aa, synthetic construct
  source 1..9: note = Seed: TVAYFNMVY
TSAYFNMVM

SEQ ID NO: 67100 - protein, 9 aa, synthetic construct
  source 1..9: note = Seed: TVAYFNMVY
TSAYFNMVR

SEQ ID NO: 67101 - protein, 9 aa, synthetic construct
  source 1..9: note = Seed: TVAYFNMVY
TSAYFNMVV

SEQ ID NO: 67102 - protein, 9 aa, synthetic construct
  source 1..9: note = Seed: TVAYFNMVY
TSAYFNMVW

SEQ ID NO: 67103 - protein, 9 aa, synthetic construct
  source 1..9: note = Seed: TVAYFNMVY
TSAYFNMVY

SEQ ID NO: 67104 - protein, 10 aa, synthetic construct
  source 1..10: note = Seed: TVAYFNMVYM
TSAYFNMVYA

SEQ ID NO: 67105 - protein, 10 aa, synthetic construct
  source 1..10: note = Seed: TVAYFNMVYM
TSAYFNMVYI

SEQ ID NO: 67106 - protein, 10 aa, synthetic construct
  source 1..10: note = Seed: TVAYFNMVYM
TSAYFNMVYK

SEQ ID NO: 67107 - protein, 10 aa, synthetic construct
  source 1..10: note = Seed: TVAYFNMVYM
TSAYFNMVYL

SEQ ID NO: 67108 - protein, 10 aa, synthetic construct
  source 1..10: note = Seed: TVAYFNMVYM
TSAYFNMVYR

SEQ ID NO: 67109 - protein, 10 aa, synthetic construct
  source 1..10: note = Seed: TVAYFNMVYM
TSAYFNMVYV

SEQ ID NO: 67110 - protein, 9 aa, synthetic construct
  source 1..9: note = Seed: TVCTVCGMW
TSCTVCGMW

SEQ ID NO: 67111 - protein, 9 aa, synthetic construct
  source 1..9: note = Seed: TSDLATNNL
TSDLATNNF

SEQ ID NO: 67112 - protein, 9 aa, synthetic construct
  source 1..9: note = Seed: TSDLATNNL
TSDLATNNM

SEQ ID NO: 67113 - protein, 9 aa, synthetic construct
  source 1..9: note = Seed: TLDSKTQSL
TSDSKTQSF

SEQ ID NO: 67114 - protein, 9 aa, synthetic construct
  source 1..9: note = Seed: TLDSKTQSL
TSDSKTQSL

SEQ ID NO: 67115 - protein, 9 aa, synthetic construct
  source 1..9: note = Seed: TLDSKTQSL
TSDSKTQSM

SEQ ID NO: 67116 - protein, 9 aa, synthetic construct
  source 1..9: note = Seed: TIDYTEISF
TSDYTEISF

SEQ ID NO: 67117 - protein, 11 aa, synthetic construct
  source 1..11: note = Seed: TIDYTEISFML
TSDYTEISFMF

SEQ ID NO: 67118 - protein, 9 aa, synthetic construct
  source 1..9: note = Seed: TIDYTEISF
TSDYTEISL

SEQ ID NO: 67119 - protein, 9 aa, synthetic construct
  source 1..9: note = Seed: TIDYTEISF
TSDYTEISM

SEQ ID NO: 67120 - protein, 9 aa, synthetic construct
  source 1..9: note = Seed: TSDYYQLYS
TSDYYQLYF

SEQ ID NO: 67121 - protein, 9 aa, synthetic construct
  source 1..9: note = Seed: TSDYYQLYS
TSDYYQLYM

SEQ ID NO: 67122 - protein, 9 aa, synthetic construct
  source 1..9: note = Seed: TSDYYQLYS
TSDYYQLYV

SEQ ID NO: 67123 - protein, 9 aa, synthetic construct
  source 1..9: note = Seed: TSDYYQLYS
TSDYYQLYY

SEQ ID NO: 67124 - protein, 10 aa, synthetic construct
  source 1..10: note = Seed: TIEVNSFSGY
TSEVNSFSGW

SEQ ID NO: 67125 - protein, 9 aa, synthetic construct
  source 1..9: note = Seed: TRFASVYAW
TSFASVYAF

SEQ ID NO: 67126 - protein, 9 aa, synthetic construct
  source 1..9: note = Seed: TRFASVYAW
TSFASVYAL

SEQ ID NO: 67127 - protein, 9 aa, synthetic construct
  source 1..9: note = Seed: TRFASVYAW
TSFASVYAM

SEQ ID NO: 67128 - protein, 9 aa, synthetic construct
  source 1..9: note = Seed: TRFASVYAW
TSFASVYAY

SEQ ID NO: 67129 - protein, 9 aa, synthetic construct
  source 1..9: note = Seed: TPFEIKLAK
TSFEIKLAK

SEQ ID NO: 67130 - protein, 10 aa, synthetic construct
  source 1..10: note = Seed: TPFEIKLAKK
TSFEIKLAKK

SEQ ID NO: 67131 - protein, 10 aa, synthetic construct
  source 1..10: note = Seed: TPFEIKLAKK
TSFEIKLAKR

SEQ ID NO: 67132 - protein, 9 aa, synthetic construct
  source 1..9: note = Seed: TPFEIKLAK
TSFEIKLAR

SEQ ID NO: 67133 - protein, 9 aa, synthetic construct
  source 1..9: note = Seed: TRFFYVLGL
TSFFYVLGF

SEQ ID NO: 67134 - protein, 9 aa, synthetic construct
  source 1..9: note = Seed: TRFFYVLGL
TSFFYVLGY

SEQ ID NO: 67135 - protein, 9 aa, synthetic construct
  source 1..9: note = Seed: TIFKDASGK
TSFKDASGK

SEQ ID NO: 67136 - protein, 9 aa, synthetic construct
  source 1..9: note = Seed: TIFKDASGK
TSFKDASGR

SEQ ID NO: 67137 - protein, 10 aa, synthetic construct
  source 1..10: note = Seed: TWFSQRGGSY
TSFSQRGGSY

SEQ ID NO: 67138 - protein, 9 aa, synthetic construct
  source 1..9: note = Seed: TCFSTQFAF
TSFSTQFAF

SEQ ID NO: 67139 - protein, 9 aa, synthetic construct
  source 1..9: note = Seed: TCFSTQFAF
TSFSTQFAI

SEQ ID NO: 67140 - protein, 9 aa, synthetic construct
  source 1..9: note = Seed: TCFSTQFAF
TSFSTQFAL

SEQ ID NO: 67141 - protein, 9 aa, synthetic construct
  source 1..9: note = Seed: TCFSTQFAF
TSFSTQFAM

SEQ ID NO: 67142 - protein, 9 aa, synthetic construct
  source 1..9: note = Seed: TCFSTQFAF
TSFSTQFAW

SEQ ID NO: 67143 - protein, 9 aa, synthetic construct
  source 1..9: note = Seed: TCFSTQFAF
TSFSTQFAY

SEQ ID NO: 67144 - protein, 9 aa, synthetic construct
  source 1..9: note = Seed: TAFVTNVNA
TSFVTNVNV

SEQ ID NO: 67145 - protein, 11 aa, synthetic construct
  source 1..11: note = Seed: TCGTTTLNGLW
TSGTTTLNGLW

SEQ ID NO: 67146 - protein, 10 aa, synthetic construct
  source 1..10: note = Seed: TNGVGYQPYR
TSGVGYQPYR

SEQ ID NO: 67147 - protein, 11 aa, synthetic construct
  source 1..11: note = Seed: TLGVYDYLVST
TSGVYDYLVSV

SEQ ID NO: 67148 - protein, 9 aa, synthetic construct
  source 1..9: note = Seed: TAHSCNVNR
TSHSCNVNR

SEQ ID NO: 67149 - protein, 9 aa, synthetic construct
  source 1..9: note = Seed: TPHTVLQAV
TSHTVLQAY

SEQ ID NO: 67150 - protein, 10 aa, synthetic construct
  source 1..10: note = Seed: TWICLLQFAY
TSICLLQFAY

SEQ ID NO: 67151 - protein, 9 aa, synthetic construct
  source 1..9: note = Seed: TTIKPVTYK
TSIKPVTYK

SEQ ID NO: 67152 - protein, 10 aa, synthetic construct
  source 1..10: note = Seed: TTIKPVTYKL
TSIKPVTYKF

SEQ ID NO: 67153 - protein, 10 aa, synthetic construct
  source 1..10: note = Seed: TTIKPVTYKL
TSIKPVTYKK

SEQ ID NO: 67154 - protein, 10 aa, synthetic construct
  source 1..10: note = Seed: TTIKPVTYKL
TSIKPVTYKR

SEQ ID NO: 67155 - protein, 10 aa, synthetic construct
  source 1..10: note = Seed: TTIKPVTYKL
TSIKPVTYKV

SEQ ID NO: 67156 - protein, 10 aa, synthetic construct
  source 1..10: note = Seed: TTIKPVTYKL
TSIKPVTYKW

SEQ ID NO: 67157 - protein, 10 aa, synthetic construct
  source 1..10: note = Seed: TTIKPVTYKL
TSIKPVTYKY

SEQ ID NO: 67158 - protein, 9 aa, synthetic construct
  source 1..9: note = Seed: TTIKPVTYK
TSIKPVTYR

SEQ ID NO: 67159 - protein, 9 aa, synthetic construct
  source 1..9: note = Seed: TFISDEVAR
TSISDEVAR

SEQ ID NO: 67160 - protein, 10 aa, synthetic construct
  source 1..10: note = Seed: TNIVTRCLNR
TSIVTRCLNR

SEQ ID NO: 67161 - protein, 10 aa, synthetic construct
  source 1..10: note = Seed: TGKIADYNYK
TSKIADYNYK

SEQ ID NO: 67162 - protein, 9 aa, synthetic construct
  source 1..9: note = Seed: TVKPGNFNK
TSKPGNFNK

SEQ ID NO: 67163 - protein, 9 aa, synthetic construct
  source 1..9: note = Seed: TVKPGNFNK
TSKPGNFNR

SEQ ID NO: 67164 - protein, 10 aa, synthetic construct
  source 1..10: note = Seed: TFLLNKEMYL
TSLLNKEMYI

SEQ ID NO: 67165 - protein, 10 aa, synthetic construct
  source 1..10: note = Seed: TFLLNKEMYL
TSLLNKEMYL

SEQ ID NO: 67166 - protein, 10 aa, synthetic construct
  source 1..10: note = Seed: TFLLNKEMYL
TSLLNKEMYV

SEQ ID NO: 67167 - protein, 10 aa, synthetic construct
  source 1..10: note = Seed: TLLLQLCTFT
TSLLQLCTFV

SEQ ID NO: 67168 - protein, 9 aa, synthetic construct
  source 1..9: note = Seed: TTLPVNVAF
TSLPVNVAF

SEQ ID NO: 67169 - protein, 9 aa, synthetic construct
  source 1..9: note = Seed: TTLPVNVAF
TSLPVNVAL

SEQ ID NO: 67170 - protein, 9 aa, synthetic construct
  source 1..9: note = Seed: TTLPVNVAF
TSLPVNVAM

SEQ ID NO: 67171 - protein, 9 aa, synthetic construct
  source 1..9: note = Seed: TTLPVNVAF
TSLPVNVAW

SEQ ID NO: 67172 - protein, 9 aa, synthetic construct
  source 1..9: note = Seed: TTLPVNVAF
TSLPVNVAY

SEQ ID NO: 67173 - protein, 10 aa, synthetic construct
  source 1..10: note = Seed: TILTSLLVLV
TSLTSLLVLI

SEQ ID NO: 67174 - protein, 10 aa, synthetic construct
  source 1..10: note = Seed: TILTSLLVLV
TSLTSLLVLL

SEQ ID NO: 67175 - protein, 10 aa, synthetic construct
  source 1..10: note = Seed: TILTSLLVLV
TSLTSLLVLV

SEQ ID NO: 67176 - protein, 10 aa, synthetic construct
  source 1..10: note = Seed: TPLVPFWITI
TSLVPFWITV

SEQ ID NO: 67177 - protein, 10 aa, synthetic construct
  source 1..10: note = Seed: TQLYLGGMSY
TSLYLGGMSF

SEQ ID NO: 67178 - protein, 10 aa, synthetic construct
  source 1..10: note = Seed: TQLYLGGMSY
TSLYLGGMSK

SEQ ID NO: 67179 - protein, 10 aa, synthetic construct
  source 1..10: note = Seed: TQLYLGGMSY
TSLYLGGMSY

SEQ ID NO: 67180 - protein, 10 aa, synthetic construct
  source 1..10: note = Seed: TLMIERFVSL
TSMIERFVSA

SEQ ID NO: 67181 - protein, 10 aa, synthetic construct
  source 1..10: note = Seed: TLMIERFVSL
TSMIERFVSF

SEQ ID NO: 67182 - protein, 10 aa, synthetic construct
  source 1..10: note = Seed: TLMIERFVSL
TSMIERFVSI

SEQ ID NO: 67183 - protein, 10 aa, synthetic construct
  source 1..10: note = Seed: TLMIERFVSL
TSMIERFVSL

SEQ ID NO: 67184 - protein, 11 aa, synthetic construct
  source 1..11: note = Seed: TLMIERFVSLA
TSMIERFVSLV

SEQ ID NO: 67185 - protein, 10 aa, synthetic construct
  source 1..10: note = Seed: TLMIERFVSL
TSMIERFVSM

SEQ ID NO: 67186 - protein, 10 aa, synthetic construct
  source 1..10: note = Seed: TLMIERFVSL
TSMIERFVSV

SEQ ID NO: 67187 - protein, 10 aa, synthetic construct
  source 1..10: note = Seed: TLMIERFVSL
TSMIERFVSY

SEQ ID NO: 67188 - protein, 9 aa, synthetic construct
  source 1..9: note = Seed: TSMKYFVKI
TSMKYFVKF

SEQ ID NO: 67189 - protein, 9 aa, synthetic construct
  source 1..9: note = Seed: TSMKYFVKI
TSMKYFVKL

SEQ ID NO: 67190 - protein, 9 aa, synthetic construct
  source 1..9: note = Seed: TSMKYFVKI
TSMKYFVKM

SEQ ID NO: 67191 - protein, 9 aa, synthetic construct
  source 1..9: note = Seed: TSMKYFVKI
TSMKYFVKV

SEQ ID NO: 67192 - protein, 9 aa, synthetic construct
  source 1..9: note = Seed: TSMKYFVKI
TSMKYFVKW

SEQ ID NO: 67193 - protein, 9 aa, synthetic construct
  source 1..9: note = Seed: TSMKYFVKI
TSMKYFVKY

SEQ ID NO: 67194 - protein, 10 aa, synthetic construct
  source 1..10: note = Seed: TCMMCYKRNR
TSMMCYKRNR

SEQ ID NO: 67195 - protein, 9 aa, synthetic construct
  source 1..9: note = Seed: TQMNLKYAI
TSMNLKYAF

SEQ ID NO: 67196 - protein, 9 aa, synthetic construct
  source 1..9: note = Seed: TQMNLKYAI
TSMNLKYAY

SEQ ID NO: 67197 - protein, 9 aa, synthetic construct
  source 1..9: note = Seed: TTNGDFLHF
TSNGDFLHF

SEQ ID NO: 67198 - protein, 10 aa, synthetic construct
  source 1..10: note = Seed: TTNGDFLHFL
TSNGDFLHFV

SEQ ID NO: 67199 - protein, 9 aa, synthetic construct
  source 1..9: note = Seed: TTNGDFLHF
TSNGDFLHM

SEQ ID NO: 67200 - protein, 9 aa, synthetic construct
  source 1..9: note = Seed: TTNGDFLHF
TSNGDFLHW

SEQ ID NO: 67201 - protein, 9 aa, synthetic construct
  source 1..9: note = Seed: TTNGDFLHF
TSNGDFLHY

SEQ ID NO: 67202 - protein, 9 aa, synthetic construct
  source 1..9: note = Seed: TTNIVTRCL
TSNIVTRCM

SEQ ID NO: 67203 - protein, 9 aa, synthetic construct
  source 1..9: note = Seed: TANKWDLII
TSNKWDLIF

SEQ ID NO: 67204 - protein, 9 aa, synthetic construct
  source 1..9: note = Seed: TANKWDLII
TSNKWDLIL

SEQ ID NO: 67205 - protein, 9 aa, synthetic construct
  source 1..9: note = Seed: TANKWDLII
TSNKWDLIM

SEQ ID NO: 67206 - protein, 9 aa, synthetic construct
  source 1..9: note = Seed: TANKWDLII
TSNKWDLIW

SEQ ID NO: 67207 - protein, 9 aa, synthetic construct
  source 1..9: note = Seed: TANKWDLII
TSNKWDLIY

SEQ ID NO: 67208 - protein, 9 aa, synthetic construct
  source 1..9: note = Seed: TSNPTTFHL
TSNPTTFHF

SEQ ID NO: 67209 - protein, 9 aa, synthetic construct
  source 1..9: note = Seed: TSNPTTFHL
TSNPTTFHM

SEQ ID NO: 67210 - protein, 9 aa, synthetic construct
  source 1..9: note = Seed: TSNPTTFHL
TSNPTTFHV

SEQ ID NO: 67211 - protein, 9 aa, synthetic construct
  source 1..9: note = Seed: TSNPTTFHL
TSNPTTFHW

SEQ ID NO: 67212 - protein, 9 aa, synthetic construct
  source 1..9: note = Seed: TSNPTTFHL
TSNPTTFHY

SEQ ID NO: 67213 - protein, 9 aa, synthetic construct
  source 1..9: note = Seed: TVNVLAWLY
TSNVLAWLK

SEQ ID NO: 67214 - protein, 9 aa, synthetic construct
  source 1..9: note = Seed: TVNVLAWLY
TSNVLAWLR

SEQ ID NO: 67215 - protein, 9 aa, synthetic construct
  source 1..9: note = Seed: TVNVLAWLY
TSNVLAWLY

SEQ ID NO: 67216 - protein, 9 aa, synthetic construct
  source 1..9: note = Seed: TGNYQCGHY
TSNYQCGHY

SEQ ID NO: 67217 - protein, 10 aa, synthetic construct
  source 1..10: note = Seed: TGNYQCGHYK
TSNYQCGHYK

SEQ ID NO: 67218 - protein, 10 aa, synthetic construct
  source 1..10: note = Seed: TGNYQCGHYK
TSNYQCGHYR

SEQ ID NO: 67219 - protein, 10 aa, synthetic construct
  source 1..10: note = Seed: TLPVNVAFEL
TSPVNVAFEF

SEQ ID NO: 67220 - protein, 11 aa, synthetic construct
  source 1..11: note = Seed: TLPVNVAFELW
TSPVNVAFELW

SEQ ID NO: 67221 - protein, 10 aa, synthetic construct
  source 1..10: note = Seed: TLPVNVAFEL
TSPVNVAFEW

SEQ ID NO: 67222 - protein, 10 aa, synthetic construct
  source 1..10: note = Seed: TLPVNVAFEL
TSPVNVAFEY

SEQ ID NO: 67223 - protein, 10 aa, synthetic construct
  source 1..10: note = Seed: TLQAENVTGL
TSQAENVTGV

SEQ ID NO: 67224 - protein, 10 aa, synthetic construct
  source 1..10: note = Seed: TIQITISSFK
TSQITISSFK

SEQ ID NO: 67225 - protein, 10 aa, synthetic construct
  source 1..10: note = Seed: TIQITISSFK
TSQITISSFR

SEQ ID NO: 67226 - protein, 9 aa, synthetic construct
  source 1..9: note = Seed: TAQNSVRVL
TSQNSVRVF

SEQ ID NO: 67227 - protein, 9 aa, synthetic construct
  source 1..9: note = Seed: TAQNSVRVL
TSQNSVRVL

SEQ ID NO: 67228 - protein, 9 aa, synthetic construct
  source 1..9: note = Seed: TAQNSVRVL
TSQNSVRVM

SEQ ID NO: 67229 - protein, 9 aa, synthetic construct
  source 1..9: note = Seed: TAQNSVRVL
TSQNSVRVY

SEQ ID NO: 67230 - protein, 11 aa, synthetic construct
  source 1..11: note = Seed: TRQVVNVVTTK
TSQVVNVVTTR

SEQ ID NO: 67231 - protein, 9 aa, synthetic construct
  source 1..9: note = Seed: TVRLQAGNA
TSRLQAGNK

SEQ ID NO: 67232 - protein, 9 aa, synthetic construct
  source 1..9: note = Seed: TTRQVVNVV
TSRQVVNVK

SEQ ID NO: 67233 - protein, 9 aa, synthetic construct
  source 1..9: note = Seed: TTRQVVNVV
TSRQVVNVM

SEQ ID NO: 67234 - protein, 9 aa, synthetic construct
  source 1..9: note = Seed: TYRRLISMM
TSRRLISMA

SEQ ID NO: 67235 - protein, 9 aa, synthetic construct
  source 1..9: note = Seed: TYRRLISMM
TSRRLISMK

SEQ ID NO: 67236 - protein, 9 aa, synthetic construct
  source 1..9: note = Seed: TASDTYACW
TSSDTYACW

SEQ ID NO: 67237 - protein, 9 aa, synthetic construct
  source 1..9: note = Seed: TISLAGSYK
TSSLAGSYK

SEQ ID NO: 67238 - protein, 11 aa, synthetic construct
  source 1..11: note = Seed: TISLAGSYKDW
TSSLAGSYKDW

SEQ ID NO: 67239 - protein, 9 aa, synthetic construct
  source 1..9: note = Seed: TISLAGSYK
TSSLAGSYR

SEQ ID NO: 67240 - protein, 9 aa, synthetic construct
  source 1..9: note = Seed: TGSNVFQTR
TSSNVFQTK

SEQ ID NO: 67241 - protein, 9 aa, synthetic construct
  source 1..9: note = Seed: TGSNVFQTR
TSSNVFQTR

SEQ ID NO: 67242 - protein, 9 aa, synthetic construct
  source 1..9: note = Seed: TASWFTALT
TSSWFTALA

SEQ ID NO: 67243 - protein, 9 aa, synthetic construct
  source 1..9: note = Seed: TASWFTALT
TSSWFTALI

SEQ ID NO: 67244 - protein, 9 aa, synthetic construct
  source 1..9: note = Seed: TASWFTALT
TSSWFTALL

SEQ ID NO: 67245 - protein, 9 aa, synthetic construct
  source 1..9: note = Seed: TASWFTALT
TSSWFTALM

SEQ ID NO: 67246 - protein, 9 aa, synthetic construct
  source 1..9: note = Seed: TASWFTALT
TSSWFTALT

SEQ ID NO: 67247 - protein, 9 aa, synthetic construct
  source 1..9: note = Seed: TASWFTALT
TSSWFTALV

SEQ ID NO: 67248 - protein, 9 aa, synthetic construct
  source 1..9: note = Seed: TLSYEQFKK
TSSYEQFKK

SEQ ID NO: 67249 - protein, 9 aa, synthetic construct
  source 1..9: note = Seed: TLSYEQFKK
TSSYEQFKR

SEQ ID NO: 67250 - protein, 9 aa, synthetic construct
  source 1..9: note = Seed: TTTIKPVTY
TSTIKPVTF

SEQ ID NO: 67251 - protein, 9 aa, synthetic construct
  source 1..9: note = Seed: TTTIKPVTY
TSTIKPVTL

SEQ ID NO: 67252 - protein, 9 aa, synthetic construct
  source 1..9: note = Seed: TTTIKPVTY
TSTIKPVTM

SEQ ID NO: 67253 - protein, 9 aa, synthetic construct
  source 1..9: note = Seed: TTTIKPVTY
TSTIKPVTW

SEQ ID NO: 67254 - protein, 9 aa, synthetic construct
  source 1..9: note = Seed: TTTIKPVTY
TSTIKPVTY

SEQ ID NO: 67255 - protein, 10 aa, synthetic construct
  source 1..10: note = Seed: TTTIKPVTYK
TSTIKPVTYK

SEQ ID NO: 67256 - protein, 10 aa, synthetic construct
  source 1..10: note = Seed: TTTIKPVTYK
TSTIKPVTYR

SEQ ID NO: 67257 - protein, 9 aa, synthetic construct
  source 1..9: note = Seed: TTTLNGLWL
TSTLNGLWW

SEQ ID NO: 67258 - protein, 9 aa, synthetic construct
  source 1..9: note = Seed: TITVNVLAW
TSTVNVLAF

SEQ ID NO: 67259 - protein, 9 aa, synthetic construct
  source 1..9: note = Seed: TITVNVLAW
TSTVNVLAW

SEQ ID NO: 67260 - protein, 10 aa, synthetic construct
  source 1..10: note = Seed: TITVNVLAWL
TSTVNVLAWA

SEQ ID NO: 67261 - protein, 10 aa, synthetic construct
  source 1..10: note = Seed: TITVNVLAWL
TSTVNVLAWI

SEQ ID NO: 67262 - protein, 10 aa, synthetic construct
  source 1..10: note = Seed: TITVNVLAWL
TSTVNVLAWV

SEQ ID NO: 67263 - protein, 9 aa, synthetic construct
  source 1..9: note = Seed: TITVNVLAW
TSTVNVLAY

SEQ ID NO: 67264 - protein, 9 aa, synthetic construct
  source 1..9: note = Seed: TTVDNINLH
TSVDNINLK

SEQ ID NO: 67265 - protein, 9 aa, synthetic construct
  source 1..9: note = Seed: TTVDNINLH
TSVDNINLR

SEQ ID NO: 67266 - protein, 10 aa, synthetic construct
  source 1..10: note = Seed: TNVLEGSVAY
TSVLEGSVAY

SEQ ID NO: 67267 - protein, 10 aa, synthetic construct
  source 1..10: note = Seed: TEVVGDIILK
TSVVGDIILK

SEQ ID NO: 67268 - protein, 10 aa, synthetic construct
  source 1..10: note = Seed: TEVVGDIILK
TSVVGDIILR

SEQ ID NO: 67269 - protein, 9 aa, synthetic construct
  source 1..9: note = Seed: TSVVLLSVL
TSVVLLSVF

SEQ ID NO: 67270 - protein, 9 aa, synthetic construct
  source 1..9: note = Seed: TSVVLLSVL
TSVVLLSVM

SEQ ID NO: 67271 - protein, 9 aa, synthetic construct
  source 1..9: note = Seed: TSVVLLSVL
TSVVLLSVW

SEQ ID NO: 67272 - protein, 9 aa, synthetic construct
  source 1..9: note = Seed: TSVVLLSVL
TSVVLLSVY

SEQ ID NO: 67273 - protein, 9 aa, synthetic construct
  source 1..9: note = Seed: TPVVQTIEV
TSVVQTIEY

SEQ ID NO: 67274 - protein, 9 aa, synthetic construct
  source 1..9: note = Seed: TNVYADSFV
TSVYADSFV

SEQ ID NO: 67275 - protein, 10 aa, synthetic construct
  source 1..10: note = Seed: TNVYADSFVI
TSVYADSFVV

SEQ ID NO: 67276 - protein, 9 aa, synthetic construct
  source 1..9: note = Seed: TPVYSFLPG
TSVYSFLPF

SEQ ID NO: 67277 - protein, 10 aa, synthetic construct
  source 1..10: note = Seed: TPVYSFLPGV
TSVYSFLPGV

SEQ ID NO: 67278 - protein, 9 aa, synthetic construct
  source 1..9: note = Seed: TPVYSFLPG
TSVYSFLPY

SEQ ID NO: 67279 - protein, 10 aa, synthetic construct
  source 1..10: note = Seed: TAYANSVFNI
TSYANSVFNF

SEQ ID NO: 67280 - protein, 10 aa, synthetic construct
  source 1..10: note = Seed: TAYANSVFNI
TSYANSVFNI

SEQ ID NO: 67281 - protein, 10 aa, synthetic construct
  source 1..10: note = Seed: TAYANSVFNI
TSYANSVFNL

SEQ ID NO: 67282 - protein, 10 aa, synthetic construct
  source 1..10: note = Seed: TAYANSVFNI
TSYANSVFNV

SEQ ID NO: 67283 - protein, 10 aa, synthetic construct
  source 1..10: note = Seed: TAYANSVFNI
TSYANSVFNW

SEQ ID NO: 67284 - protein, 8 aa, synthetic construct
  source 1..8: note = Seed: TAYANSVF
TSYANSVW

SEQ ID NO: 67285 - protein, 9 aa, synthetic construct
  source 1..9: note = Seed: TLYCIDGAL
TSYCIDGAF

SEQ ID NO: 67286 - protein, 9 aa, synthetic construct
  source 1..9: note = Seed: TLYCIDGAL
TSYCIDGAY

SEQ ID NO: 67287 - protein, 11 aa, synthetic construct
  source 1..11: note = Seed: TNYDLSVVNAR
TSYDLSVVNAR

SEQ ID NO: 67288 - protein, 9 aa, synthetic construct
  source 1..9: note = Seed: TVYEKLKPV
TSYEKLKPF

SEQ ID NO: 67289 - protein, 9 aa, synthetic construct
  source 1..9: note = Seed: TVYEKLKPV
TSYEKLKPI

SEQ ID NO: 67290 - protein, 9 aa, synthetic construct
  source 1..9: note = Seed: TVYEKLKPV
TSYEKLKPL

SEQ ID NO: 67291 - protein, 9 aa, synthetic construct
  source 1..9: note = Seed: TVYEKLKPV
TSYEKLKPM

SEQ ID NO: 67292 - protein, 9 aa, synthetic construct
  source 1..9: note = Seed: TVYEKLKPV
TSYEKLKPV

SEQ ID NO: 67293 - protein, 9 aa, synthetic construct
  source 1..9: note = Seed: TVYEKLKPV
TSYEKLKPY

SEQ ID NO: 67294 - protein, 10 aa, synthetic construct
  source 1..10: note = Seed: TFYLTNDVSF
TSYLTNDVSF

SEQ ID NO: 67295 - protein, 9 aa, synthetic construct
  source 1..9: note = Seed: TAYNGYLTS
TSYNGYLTF

SEQ ID NO: 67296 - protein, 9 aa, synthetic construct
  source 1..9: note = Seed: TAYNGYLTS
TSYNGYLTI

SEQ ID NO: 67297 - protein, 9 aa, synthetic construct
  source 1..9: note = Seed: TAYNGYLTS
TSYNGYLTL

SEQ ID NO: 67298 - protein, 9 aa, synthetic construct
  source 1..9: note = Seed: TAYNGYLTS
TSYNGYLTM

SEQ ID NO: 67299 - protein, 9 aa, synthetic construct
  source 1..9: note = Seed: TAYNGYLTS
TSYNGYLTV

SEQ ID NO: 67300 - protein, 9 aa, synthetic construct
  source 1..9: note = Seed: TAYNGYLTS
TSYNGYLTY

SEQ ID NO: 67301 - protein, 11 aa, synthetic construct
  source 1..11: note = Seed: TTYPGQGLNGY
TSYPGQGLNGF

SEQ ID NO: 67302 - protein, 11 aa, synthetic construct
  source 1..11: note = Seed: TTYPGQGLNGY
TSYPGQGLNGW

SEQ ID NO: 67303 - protein, 11 aa, synthetic construct
  source 1..11: note = Seed: TTYPGQGLNGY
TSYPGQGLNGY

SEQ ID NO: 67304 - protein, 10 aa, synthetic construct
  source 1..10: note = Seed: TKYTMADLVY
TSYTMADLVF

SEQ ID NO: 67305 - protein, 10 aa, synthetic construct
  source 1..10: note = Seed: TKYTMADLVY
TSYTMADLVY

SEQ ID NO: 67306 - protein, 11 aa, synthetic construct
  source 1..11: note = Seed: TKYTMADLVYA
TSYTMADLVYV

SEQ ID NO: 67307 - protein, 9 aa, synthetic construct
  source 1..9: note = Seed: TMADLVYAL
TTADLVYAA

SEQ ID NO: 67308 - protein, 9 aa, synthetic construct
  source 1..9: note = Seed: TMADLVYAL
TTADLVYAF

SEQ ID NO: 67309 - protein, 9 aa, synthetic construct
  source 1..9: note = Seed: TMADLVYAL
TTADLVYAI

SEQ ID NO: 67310 - protein, 9 aa, synthetic construct
  source 1..9: note = Seed: TMADLVYAL
TTADLVYAL

SEQ ID NO: 67311 - protein, 10 aa, synthetic construct
  source 1..10: note = Seed: TMADLVYALR
TTADLVYALK

SEQ ID NO: 67312 - protein, 10 aa, synthetic construct
  source 1..10: note = Seed: TMADLVYALR
TTADLVYALL

SEQ ID NO: 67313 - protein, 10 aa, synthetic construct
  source 1..10: note = Seed: TMADLVYALR
TTADLVYALR

SEQ ID NO: 67314 - protein, 10 aa, synthetic construct
  source 1..10: note = Seed: TMADLVYALR
TTADLVYALV

SEQ ID NO: 67315 - protein, 10 aa, synthetic construct
  source 1..10: note = Seed: TMADLVYALR
TTADLVYALY

SEQ ID NO: 67316 - protein, 9 aa, synthetic construct
  source 1..9: note = Seed: TMADLVYAL
TTADLVYAM

SEQ ID NO: 67317 - protein, 9 aa, synthetic construct
  source 1..9: note = Seed: TMADLVYAL
TTADLVYAS

SEQ ID NO: 67318 - protein, 9 aa, synthetic construct
  source 1..9: note = Seed: TMADLVYAL
TTADLVYAT

SEQ ID NO: 67319 - protein, 9 aa, synthetic construct
  source 1..9: note = Seed: TMADLVYAL
TTADLVYAV

SEQ ID NO: 67320 - protein, 9 aa, synthetic construct
  source 1..9: note = Seed: TMADLVYAL
TTADLVYAY

SEQ ID NO: 67321 - protein, 9 aa, synthetic construct
  source 1..9: note = Seed: TIAEILLII
TTAEILLIA

SEQ ID NO: 67322 - protein, 9 aa, synthetic construct
  source 1..9: note = Seed: TIAEILLII
TTAEILLII

SEQ ID NO: 67323 - protein, 9 aa, synthetic construct
  source 1..9: note = Seed: TIAEILLII
TTAEILLIL

SEQ ID NO: 67324 - protein, 9 aa, synthetic construct
  source 1..9: note = Seed: TIAEILLII
TTAEILLIV

SEQ ID NO: 67325 - protein, 9 aa, synthetic construct
  source 1..9: note = Seed: TSAFVETVK
TTAFVETVK

SEQ ID NO: 67326 - protein, 9 aa, synthetic construct
  source 1..9: note = Seed: TSAFVETVK
TTAFVETVR

SEQ ID NO: 67327 - protein, 10 aa, synthetic construct
  source 1..10: note = Seed: TVAGVSICST
TTAGVSICSA

SEQ ID NO: 67328 - protein, 10 aa, synthetic construct
  source 1..10: note = Seed: TVAGVSICST
TTAGVSICSI

SEQ ID NO: 67329 - protein, 10 aa, synthetic construct
  source 1..10: note = Seed: TVAGVSICST
TTAGVSICSL

SEQ ID NO: 67330 - protein, 10 aa, synthetic construct
  source 1..10: note = Seed: TVAGVSICST
TTAGVSICSM

SEQ ID NO: 67331 - protein, 10 aa, synthetic construct
  source 1..10: note = Seed: TVAGVSICST
TTAGVSICSV

SEQ ID NO: 67332 - protein, 9 aa, synthetic construct
  source 1..9: note = Seed: TSAMQTMLF
TTAMQTMLF

SEQ ID NO: 67333 - protein, 9 aa, synthetic construct
  source 1..9: note = Seed: TSAMQTMLF
TTAMQTMLL

SEQ ID NO: 67334 - protein, 9 aa, synthetic construct
  source 1..9: note = Seed: TSAMQTMLF
TTAMQTMLM

SEQ ID NO: 67335 - protein, 9 aa, synthetic construct
  source 1..9: note = Seed: TSAMQTMLF
TTAMQTMLW

SEQ ID NO: 67336 - protein, 9 aa, synthetic construct
  source 1..9: note = Seed: TSAMQTMLF
TTAMQTMLY

SEQ ID NO: 67337 - protein, 9 aa, synthetic construct
  source 1..9: note = Seed: TVASLINTL
TTASLINTA

SEQ ID NO: 67338 - protein, 9 aa, synthetic construct
  source 1..9: note = Seed: TVASLINTL
TTASLINTI

SEQ ID NO: 67339 - protein, 9 aa, synthetic construct
  source 1..9: note = Seed: TVASLINTL
TTASLINTL

SEQ ID NO: 67340 - protein, 9 aa, synthetic construct
  source 1..9: note = Seed: TVASLINTL
TTASLINTM

SEQ ID NO: 67341 - protein, 9 aa, synthetic construct
  source 1..9: note = Seed: TVASLINTL
TTASLINTT

SEQ ID NO: 67342 - protein, 9 aa, synthetic construct
  source 1..9: note = Seed: TVASLINTL
TTASLINTV

SEQ ID NO: 67343 - protein, 9 aa, synthetic construct
  source 1..9: note = Seed: TSAVLQSGF
TTAVLQSGF

SEQ ID NO: 67344 - protein, 10 aa, synthetic construct
  source 1..10: note = Seed: TSAVLQSGFR
TTAVLQSGFK

SEQ ID NO: 67345 - protein, 10 aa, synthetic construct
  source 1..10: note = Seed: TSAVLQSGFR
TTAVLQSGFR

SEQ ID NO: 67346 - protein, 9 aa, synthetic construct
  source 1..9: note = Seed: TSAVLQSGF
TTAVLQSGW

SEQ ID NO: 67347 - protein, 9 aa, synthetic construct
  source 1..9: note = Seed: TSAVLQSGF
TTAVLQSGY

SEQ ID NO: 67348 - protein, 9 aa, synthetic construct
  source 1..9: note = Seed: TLAVPYNMR
TTAVPYNMK

SEQ ID NO: 67349 - protein, 9 aa, synthetic construct
  source 1..9: note = Seed: TLAVPYNMR
TTAVPYNMR

SEQ ID NO: 67350 - protein, 10 aa, synthetic construct
  source 1..10: note = Seed: TLAVPYNMRV
TTAVPYNMRV

SEQ ID NO: 67351 - protein, 11 aa, synthetic construct
  source 1..11: note = Seed: TTAYANSVFNI
TTAYANSVFNF

SEQ ID NO: 67352 - protein, 11 aa, synthetic construct
  source 1..11: note = Seed: TTAYANSVFNI
TTAYANSVFNV

SEQ ID NO: 67353 - protein, 11 aa, synthetic construct
  source 1..11: note = Seed: TTAYANSVFNI
TTAYANSVFNW

SEQ ID NO: 67354 - protein, 9 aa, synthetic construct
  source 1..9: note = Seed: TTAYANSVF
TTAYANSVM

SEQ ID NO: 67355 - protein, 9 aa, synthetic construct
  source 1..9: note = Seed: TTAYANSVF
TTAYANSVW

SEQ ID NO: 67356 - protein, 9 aa, synthetic construct
  source 1..9: note = Seed: TTAYANSVF
TTAYANSVY

SEQ ID NO: 67357 - protein, 9 aa, synthetic construct
  source 1..9: note = Seed: TVAYFNMVY
TTAYFNMVF

SEQ ID NO: 67358 - protein, 9 aa, synthetic construct
  source 1..9: note = Seed: TVAYFNMVY
TTAYFNMVK

SEQ ID NO: 67359 - protein, 9 aa, synthetic construct
  source 1..9: note = Seed: TVAYFNMVY
TTAYFNMVL

SEQ ID NO: 67360 - protein, 9 aa, synthetic construct
  source 1..9: note = Seed: TVAYFNMVY
TTAYFNMVM

SEQ ID NO: 67361 - protein, 9 aa, synthetic construct
  source 1..9: note = Seed: TVAYFNMVY
TTAYFNMVR

SEQ ID NO: 67362 - protein, 9 aa, synthetic construct
  source 1..9: note = Seed: TVAYFNMVY
TTAYFNMVW

SEQ ID NO: 67363 - protein, 9 aa, synthetic construct
  source 1..9: note = Seed: TVAYFNMVY
TTAYFNMVY

SEQ ID NO: 67364 - protein, 10 aa, synthetic construct
  source 1..10: note = Seed: TVAYFNMVYM
TTAYFNMVYA

SEQ ID NO: 67365 - protein, 10 aa, synthetic construct
  source 1..10: note = Seed: TVAYFNMVYM
TTAYFNMVYI

SEQ ID NO: 67366 - protein, 10 aa, synthetic construct
  source 1..10: note = Seed: TVAYFNMVYM
TTAYFNMVYK

SEQ ID NO: 67367 - protein, 10 aa, synthetic construct
  source 1..10: note = Seed: TVAYFNMVYM
TTAYFNMVYL

SEQ ID NO: 67368 - protein, 10 aa, synthetic construct
  source 1..10: note = Seed: TVAYFNMVYM
TTAYFNMVYM

SEQ ID NO: 67369 - protein, 10 aa, synthetic construct
  source 1..10: note = Seed: TVAYFNMVYM
TTAYFNMVYR

SEQ ID NO: 67370 - protein, 10 aa, synthetic construct
  source 1..10: note = Seed: TVAYFNMVYM
TTAYFNMVYT

SEQ ID NO: 67371 - protein, 10 aa, synthetic construct
  source 1..10: note = Seed: TVAYFNMVYM
TTAYFNMVYV

SEQ ID NO: 67372 - protein, 10 aa, synthetic construct
  source 1..10: note = Seed: TVAYFNMVYM
TTAYFNMVYY

SEQ ID NO: 67373 - protein, 9 aa, synthetic construct
  source 1..9: note = Seed: TVCTVCGMW
TTCTVCGMW

SEQ ID NO: 67374 - protein, 9 aa, synthetic construct
  source 1..9: note = Seed: TSDLATNNL
TTDLATNNL

SEQ ID NO: 67375 - protein, 9 aa, synthetic construct
  source 1..9: note = Seed: TIDYTEISF
TTDYTEISF

SEQ ID NO: 67376 - protein, 11 aa, synthetic construct
  source 1..11: note = Seed: TIDYTEISFML
TTDYTEISFMF

SEQ ID NO: 67377 - protein, 9 aa, synthetic construct
  source 1..9: note = Seed: TIDYTEISF
TTDYTEISL

SEQ ID NO: 67378 - protein, 8 aa, synthetic construct
  source 1..8: note = Seed: TSDYYQLY
TTDYYQLY

SEQ ID NO: 67379 - protein, 9 aa, synthetic construct
  source 1..9: note = Seed: TSDYYQLYS
TTDYYQLYF

SEQ ID NO: 67380 - protein, 9 aa, synthetic construct
  source 1..9: note = Seed: TSDYYQLYS
TTDYYQLYI

SEQ ID NO: 67381 - protein, 9 aa, synthetic construct
  source 1..9: note = Seed: TSDYYQLYS
TTDYYQLYL

SEQ ID NO: 67382 - protein, 9 aa, synthetic construct
  source 1..9: note = Seed: TSDYYQLYS
TTDYYQLYM

SEQ ID NO: 67383 - protein, 9 aa, synthetic construct
  source 1..9: note = Seed: TSDYYQLYS
TTDYYQLYV

SEQ ID NO: 67384 - protein, 9 aa, synthetic construct
  source 1..9: note = Seed: TSDYYQLYS
TTDYYQLYY

SEQ ID NO: 67385 - protein, 10 aa, synthetic construct
  source 1..10: note = Seed: TIEVNSFSGY
TTEVNSFSGK

SEQ ID NO: 67386 - protein, 10 aa, synthetic construct
  source 1..10: note = Seed: TIEVNSFSGY
TTEVNSFSGW

SEQ ID NO: 67387 - protein, 10 aa, synthetic construct
  source 1..10: note = Seed: TIEVNSFSGY
TTEVNSFSGY

SEQ ID NO: 67388 - protein, 11 aa, synthetic construct
  source 1..11: note = Seed: TTEVVGDIILK
TTEVVGDIILR

SEQ ID NO: 67389 - protein, 9 aa, synthetic construct
  source 1..9: note = Seed: TRFASVYAW
TTFASVYAF

SEQ ID NO: 67390 - protein, 9 aa, synthetic construct
  source 1..9: note = Seed: TRFASVYAW
TTFASVYAM

SEQ ID NO: 67391 - protein, 9 aa, synthetic construct
  source 1..9: note = Seed: TRFASVYAW
TTFASVYAY

SEQ ID NO: 67392 - protein, 9 aa, synthetic construct
  source 1..9: note = Seed: TPFEIKLAK
TTFEIKLAK

SEQ ID NO: 67393 - protein, 10 aa, synthetic construct
  source 1..10: note = Seed: TPFEIKLAKK
TTFEIKLAKK

SEQ ID NO: 67394 - protein, 10 aa, synthetic construct
  source 1..10: note = Seed: TPFEIKLAKK
TTFEIKLAKR

SEQ ID NO: 67395 - protein, 9 aa, synthetic construct
  source 1..9: note = Seed: TPFEIKLAK
TTFEIKLAR

SEQ ID NO: 67396 - protein, 9 aa, synthetic construct
  source 1..9: note = Seed: TPFEIKLAK
TTFEIKLAY

SEQ ID NO: 67397 - protein, 9 aa, synthetic construct
  source 1..9: note = Seed: TIFKDASGK
TTFKDASGK

SEQ ID NO: 67398 - protein, 9 aa, synthetic construct
  source 1..9: note = Seed: TIFKDASGK
TTFKDASGR

SEQ ID NO: 67399 - protein, 10 aa, synthetic construct
  source 1..10: note = Seed: TWFSQRGGSY
TTFSQRGGSY

SEQ ID NO: 67400 - protein, 9 aa, synthetic construct
  source 1..9: note = Seed: TCFSTQFAF
TTFSTQFAF

SEQ ID NO: 67401 - protein, 9 aa, synthetic construct
  source 1..9: note = Seed: TCFSTQFAF
TTFSTQFAI

SEQ ID NO: 67402 - protein, 9 aa, synthetic construct
  source 1..9: note = Seed: TCFSTQFAF
TTFSTQFAL

SEQ ID NO: 67403 - protein, 9 aa, synthetic construct
  source 1..9: note = Seed: TCFSTQFAF
TTFSTQFAM

SEQ ID NO: 67404 - protein, 9 aa, synthetic construct
  source 1..9: note = Seed: TCFSTQFAF
TTFSTQFAW

SEQ ID NO: 67405 - protein, 9 aa, synthetic construct
  source 1..9: note = Seed: TCFSTQFAF
TTFSTQFAY

SEQ ID NO: 67406 - protein, 9 aa, synthetic construct
  source 1..9: note = Seed: TAFVTNVNA
TTFVTNVNA

SEQ ID NO: 67407 - protein, 9 aa, synthetic construct
  source 1..9: note = Seed: TAFVTNVNA
TTFVTNVNI

SEQ ID NO: 67408 - protein, 9 aa, synthetic construct
  source 1..9: note = Seed: TAFVTNVNA
TTFVTNVNV

SEQ ID NO: 67409 - protein, 10 aa, synthetic construct
  source 1..10: note = Seed: TNGVGYQPYR
TTGVGYQPYK

SEQ ID NO: 67410 - protein, 10 aa, synthetic construct
  source 1..10: note = Seed: TNGVGYQPYR
TTGVGYQPYR

SEQ ID NO: 67411 - protein, 11 aa, synthetic construct
  source 1..11: note = Seed: TLGVYDYLVST
TTGVYDYLVSV

SEQ ID NO: 67412 - protein, 9 aa, synthetic construct
  source 1..9: note = Seed: TAHSCNVNR
TTHSCNVNK

SEQ ID NO: 67413 - protein, 9 aa, synthetic construct
  source 1..9: note = Seed: TAHSCNVNR
TTHSCNVNR

SEQ ID NO: 67414 - protein, 9 aa, synthetic construct
  source 1..9: note = Seed: TPHTVLQAV
TTHTVLQAY

SEQ ID NO: 67415 - protein, 10 aa, synthetic construct
  source 1..10: note = Seed: TWICLLQFAY
TTICLLQFAY

SEQ ID NO: 67416 - protein, 10 aa, synthetic construct
  source 1..10: note = Seed: TTIKPVTYKL
TTIKPVTYKA

SEQ ID NO: 67417 - protein, 10 aa, synthetic construct
  source 1..10: note = Seed: TTIKPVTYKL
TTIKPVTYKF

SEQ ID NO: 67418 - protein, 10 aa, synthetic construct
  source 1..10: note = Seed: TTIKPVTYKL
TTIKPVTYKI

SEQ ID NO: 67419 - protein, 10 aa, synthetic construct
  source 1..10: note = Seed: TTIKPVTYKL
TTIKPVTYKK

SEQ ID NO: 67420 - protein, 10 aa, synthetic construct
  source 1..10: note = Seed: TTIKPVTYKL
TTIKPVTYKR

SEQ ID NO: 67421 - protein, 10 aa, synthetic construct
  source 1..10: note = Seed: TTIKPVTYKL
TTIKPVTYKV

SEQ ID NO: 67422 - protein, 10 aa, synthetic construct
  source 1..10: note = Seed: TTIKPVTYKL
TTIKPVTYKW

SEQ ID NO: 67423 - protein, 9 aa, synthetic construct
  source 1..9: note = Seed: TTIKPVTYK
TTIKPVTYR

SEQ ID NO: 67424 - protein, 9 aa, synthetic construct
  source 1..9: note = Seed: TFISDEVAR
TTISDEVAK

SEQ ID NO: 67425 - protein, 9 aa, synthetic construct
  source 1..9: note = Seed: TFISDEVAR
TTISDEVAR

SEQ ID NO: 67426 - protein, 10 aa, synthetic construct
  source 1..10: note = Seed: TNIVTRCLNR
TTIVTRCLNK

SEQ ID NO: 67427 - protein, 10 aa, synthetic construct
  source 1..10: note = Seed: TNIVTRCLNR
TTIVTRCLNR

SEQ ID NO: 67428 - protein, 10 aa, synthetic construct
  source 1..10: note = Seed: TGKIADYNYK
TTKIADYNYK

SEQ ID NO: 67429 - protein, 10 aa, synthetic construct
  source 1..10: note = Seed: TTKIALKGGK
TTKIALKGGR

SEQ ID NO: 67430 - protein, 9 aa, synthetic construct
  source 1..9: note = Seed: TVKPGNFNK
TTKPGNFNK

SEQ ID NO: 67431 - protein, 9 aa, synthetic construct
  source 1..9: note = Seed: TVKPGNFNK
TTKPGNFNR

SEQ ID NO: 67432 - protein, 9 aa, synthetic construct
  source 1..9: note = Seed: TIKPVTYKL
TTKPVTYKI

SEQ ID NO: 67433 - protein, 9 aa, synthetic construct
  source 1..9: note = Seed: TIKPVTYKL
TTKPVTYKV

SEQ ID NO: 67434 - protein, 10 aa, synthetic construct
  source 1..10: note = Seed: TFLLNKEMYL
TTLLNKEMYI

SEQ ID NO: 67435 - protein, 10 aa, synthetic construct
  source 1..10: note = Seed: TFLLNKEMYL
TTLLNKEMYL

SEQ ID NO: 67436 - protein, 10 aa, synthetic construct
  source 1..10: note = Seed: TFLLNKEMYL
TTLLNKEMYV

SEQ ID NO: 67437 - protein, 10 aa, synthetic construct
  source 1..10: note = Seed: TLLLQLCTFT
TTLLQLCTFV

SEQ ID NO: 67438 - protein, 9 aa, synthetic construct
  source 1..9: note = Seed: TTLPVNVAF
TTLPVNVAM

SEQ ID NO: 67439 - protein, 9 aa, synthetic construct
  source 1..9: note = Seed: TTLPVNVAF
TTLPVNVAY

SEQ ID NO: 67440 - protein, 9 aa, synthetic construct
  source 1..9: note = Seed: TSLSGFKLK
TTLSGFKLK

SEQ ID NO: 67441 - protein, 9 aa, synthetic construct
  source 1..9: note = Seed: TSLSGFKLK
TTLSGFKLR

SEQ ID NO: 67442 - protein, 10 aa, synthetic construct
  source 1..10: note = Seed: TILTSLLVLV
TTLTSLLVLI

SEQ ID NO: 67443 - protein, 10 aa, synthetic construct
  source 1..10: note = Seed: TILTSLLVLV
TTLTSLLVLL

SEQ ID NO: 67444 - protein, 10 aa, synthetic construct
  source 1..10: note = Seed: TILTSLLVLV
TTLTSLLVLV

SEQ ID NO: 67445 - protein, 10 aa, synthetic construct
  source 1..10: note = Seed: TPLVPFWITI
TTLVPFWITV

SEQ ID NO: 67446 - protein, 10 aa, synthetic construct
  source 1..10: note = Seed: TQLYLGGMSY
TTLYLGGMSF

SEQ ID NO: 67447 - protein, 10 aa, synthetic construct
  source 1..10: note = Seed: TQLYLGGMSY
TTLYLGGMSK

SEQ ID NO: 67448 - protein, 10 aa, synthetic construct
  source 1..10: note = Seed: TQLYLGGMSY
TTLYLGGMSR

SEQ ID NO: 67449 - protein, 10 aa, synthetic construct
  source 1..10: note = Seed: TQLYLGGMSY
TTLYLGGMSY

SEQ ID NO: 67450 - protein, 10 aa, synthetic construct
  source 1..10: note = Seed: TLMIERFVSL
TTMIERFVSA

SEQ ID NO: 67451 - protein, 10 aa, synthetic construct
  source 1..10: note = Seed: TLMIERFVSL
TTMIERFVSF

SEQ ID NO: 67452 - protein, 10 aa, synthetic construct
  source 1..10: note = Seed: TLMIERFVSL
TTMIERFVSI

SEQ ID NO: 67453 - protein, 10 aa, synthetic construct
  source 1..10: note = Seed: TLMIERFVSL
TTMIERFVSL

SEQ ID NO: 67454 - protein, 10 aa, synthetic construct
  source 1..10: note = Seed: TLMIERFVSL
TTMIERFVSV

SEQ ID NO: 67455 - protein, 10 aa, synthetic construct
  source 1..10: note = Seed: TLMIERFVSL
TTMIERFVSY

SEQ ID NO: 67456 - protein, 9 aa, synthetic construct
  source 1..9: note = Seed: TSMKYFVKI
TTMKYFVKA

SEQ ID NO: 67457 - protein, 9 aa, synthetic construct
  source 1..9: note = Seed: TSMKYFVKI
TTMKYFVKF

SEQ ID NO: 67458 - protein, 9 aa, synthetic construct
  source 1..9: note = Seed: TSMKYFVKI
TTMKYFVKI

SEQ ID NO: 67459 - protein, 9 aa, synthetic construct
  source 1..9: note = Seed: TSMKYFVKI
TTMKYFVKL

SEQ ID NO: 67460 - protein, 9 aa, synthetic construct
  source 1..9: note = Seed: TSMKYFVKI
TTMKYFVKM

SEQ ID NO: 67461 - protein, 9 aa, synthetic construct
  source 1..9: note = Seed: TSMKYFVKI
TTMKYFVKV

SEQ ID NO: 67462 - protein, 9 aa, synthetic construct
  source 1..9: note = Seed: TSMKYFVKI
TTMKYFVKW

SEQ ID NO: 67463 - protein, 9 aa, synthetic construct
  source 1..9: note = Seed: TSMKYFVKI
TTMKYFVKY

SEQ ID NO: 67464 - protein, 10 aa, synthetic construct
  source 1..10: note = Seed: TCMMCYKRNR
TTMMCYKRNR

SEQ ID NO: 67465 - protein, 9 aa, synthetic construct
  source 1..9: note = Seed: TQMNLKYAI
TTMNLKYAF

SEQ ID NO: 67466 - protein, 9 aa, synthetic construct
  source 1..9: note = Seed: TQMNLKYAI
TTMNLKYAV

SEQ ID NO: 67467 - protein, 9 aa, synthetic construct
  source 1..9: note = Seed: TQMNLKYAI
TTMNLKYAW

SEQ ID NO: 67468 - protein, 11 aa, synthetic construct
  source 1..11: note = Seed: TLNDFNLVAMK
TTNDFNLVAMK

SEQ ID NO: 67469 - protein, 10 aa, synthetic construct
  source 1..10: note = Seed: TTNGDFLHFL
TTNGDFLHFA

SEQ ID NO: 67470 - protein, 10 aa, synthetic construct
  source 1..10: note = Seed: TTNGDFLHFL
TTNGDFLHFI

SEQ ID NO: 67471 - protein, 10 aa, synthetic construct
  source 1..10: note = Seed: TTNGDFLHFL
TTNGDFLHFV

SEQ ID NO: 67472 - protein, 9 aa, synthetic construct
  source 1..9: note = Seed: TTNGDFLHF
TTNGDFLHM

SEQ ID NO: 67473 - protein, 9 aa, synthetic construct
  source 1..9: note = Seed: TTNGDFLHF
TTNGDFLHW

SEQ ID NO: 67474 - protein, 9 aa, synthetic construct
  source 1..9: note = Seed: TTNGDFLHF
TTNGDFLHY

SEQ ID NO: 67475 - protein, 9 aa, synthetic construct
  source 1..9: note = Seed: TANKWDLII
TTNKWDLIF

SEQ ID NO: 67476 - protein, 9 aa, synthetic construct
  source 1..9: note = Seed: TANKWDLII
TTNKWDLIL

SEQ ID NO: 67477 - protein, 9 aa, synthetic construct
  source 1..9: note = Seed: TANKWDLII
TTNKWDLIM

SEQ ID NO: 67478 - protein, 9 aa, synthetic construct
  source 1..9: note = Seed: TANKWDLII
TTNKWDLIW

SEQ ID NO: 67479 - protein, 9 aa, synthetic construct
  source 1..9: note = Seed: TANKWDLII
TTNKWDLIY

SEQ ID NO: 67480 - protein, 9 aa, synthetic construct
  source 1..9: note = Seed: TSNPTTFHL
TTNPTTFHA

SEQ ID NO: 67481 - protein, 9 aa, synthetic construct
  source 1..9: note = Seed: TSNPTTFHL
TTNPTTFHF

SEQ ID NO: 67482 - protein, 9 aa, synthetic construct
  source 1..9: note = Seed: TSNPTTFHL
TTNPTTFHI

SEQ ID NO: 67483 - protein, 9 aa, synthetic construct
  source 1..9: note = Seed: TSNPTTFHL
TTNPTTFHL

SEQ ID NO: 67484 - protein, 9 aa, synthetic construct
  source 1..9: note = Seed: TSNPTTFHL
TTNPTTFHM

SEQ ID NO: 67485 - protein, 9 aa, synthetic construct
  source 1..9: note = Seed: TSNPTTFHL
TTNPTTFHV

SEQ ID NO: 67486 - protein, 9 aa, synthetic construct
  source 1..9: note = Seed: TSNPTTFHL
TTNPTTFHW

SEQ ID NO: 67487 - protein, 9 aa, synthetic construct
  source 1..9: note = Seed: TSNPTTFHL
TTNPTTFHY

SEQ ID NO: 67488 - protein, 9 aa, synthetic construct
  source 1..9: note = Seed: TVNVLAWLY
TTNVLAWLK

SEQ ID NO: 67489 - protein, 9 aa, synthetic construct
  source 1..9: note = Seed: TVNVLAWLY
TTNVLAWLR

SEQ ID NO: 67490 - protein, 9 aa, synthetic construct
  source 1..9: note = Seed: TVNVLAWLY
TTNVLAWLY

SEQ ID NO: 67491 - protein, 10 aa, synthetic construct
  source 1..10: note = Seed: TVNVLAWLYA
TTNVLAWLYV

SEQ ID NO: 67492 - protein, 9 aa, synthetic construct
  source 1..9: note = Seed: TGNYQCGHY
TTNYQCGHY

SEQ ID NO: 67493 - protein, 10 aa, synthetic construct
  source 1..10: note = Seed: TGNYQCGHYK
TTNYQCGHYK

SEQ ID NO: 67494 - protein, 10 aa, synthetic construct
  source 1..10: note = Seed: TGNYQCGHYK
TTNYQCGHYR

SEQ ID NO: 67495 - protein, 10 aa, synthetic construct
  source 1..10: note = Seed: TLPVNVAFEL
TTPVNVAFEF

SEQ ID NO: 67496 - protein, 10 aa, synthetic construct
  source 1..10: note = Seed: TLPVNVAFEL
TTPVNVAFEW

SEQ ID NO: 67497 - protein, 10 aa, synthetic construct
  source 1..10: note = Seed: TLPVNVAFEL
TTPVNVAFEY

SEQ ID NO: 67498 - protein, 10 aa, synthetic construct
  source 1..10: note = Seed: TIQITISSFK
TTQITISSFK

SEQ ID NO: 67499 - protein, 10 aa, synthetic construct
  source 1..10: note = Seed: TIQITISSFK
TTQITISSFR

SEQ ID NO: 67500 - protein, 10 aa, synthetic construct
  source 1..10: note = Seed: TIQITISSFK
TTQITISSFY

SEQ ID NO: 67501 - protein, 9 aa, synthetic construct
  source 1..9: note = Seed: TAQNSVRVL
TTQNSVRVM

SEQ ID NO: 67502 - protein, 9 aa, synthetic construct
  source 1..9: note = Seed: TAQNSVRVL
TTQNSVRVY

SEQ ID NO: 67503 - protein, 9 aa, synthetic construct
  source 1..9: note = Seed: TIQPRVEKK
TTQPRVEKR

SEQ ID NO: 67504 - protein, 11 aa, synthetic construct
  source 1..11: note = Seed: TRQVVNVVTTK
TTQVVNVVTTR

SEQ ID NO: 67505 - protein, 9 aa, synthetic construct
  source 1..9: note = Seed: TVREVLSDR
TTREVLSDR

SEQ ID NO: 67506 - protein, 9 aa, synthetic construct
  source 1..9: note = Seed: TVRLQAGNA
TTRLQAGNK

SEQ ID NO: 67507 - protein, 11 aa, synthetic construct
  source 1..11: note = Seed: TNRQFHQKLLK
TTRQFHQKLLK

SEQ ID NO: 67508 - protein, 9 aa, synthetic construct
  source 1..9: note = Seed: TTRQVVNVV
TTRQVVNVA

SEQ ID NO: 67509 - protein, 9 aa, synthetic construct
  source 1..9: note = Seed: TTRQVVNVV
TTRQVVNVK

SEQ ID NO: 67510 - protein, 9 aa, synthetic construct
  source 1..9: note = Seed: TYRRLISMM
TTRRLISMA

SEQ ID NO: 67511 - protein, 9 aa, synthetic construct
  source 1..9: note = Seed: TYRRLISMM
TTRRLISMK

SEQ ID NO: 67512 - protein, 9 aa, synthetic construct
  source 1..9: note = Seed: TYRRLISMM
TTRRLISMV

SEQ ID NO: 67513 - protein, 9 aa, synthetic construct
  source 1..9: note = Seed: TASDTYACW
TTSDTYACW

SEQ ID NO: 67514 - protein, 9 aa, synthetic construct
  source 1..9: note = Seed: TISLAGSYK
TTSLAGSYK

SEQ ID NO: 67515 - protein, 9 aa, synthetic construct
  source 1..9: note = Seed: TISLAGSYK
TTSLAGSYR

SEQ ID NO: 67516 - protein, 9 aa, synthetic construct
  source 1..9: note = Seed: TGSNVFQTR
TTSNVFQTK

SEQ ID NO: 67517 - protein, 9 aa, synthetic construct
  source 1..9: note = Seed: TGSNVFQTR
TTSNVFQTR

SEQ ID NO: 67518 - protein, 10 aa, synthetic construct
  source 1..10: note = Seed: TQSRNLQEFK
TTSRNLQEFK

SEQ ID NO: 67519 - protein, 10 aa, synthetic construct
  source 1..10: note = Seed: TQSRNLQEFK
TTSRNLQEFR

SEQ ID NO: 67520 - protein, 9 aa, synthetic construct
  source 1..9: note = Seed: TASWFTALT
TTSWFTALA

SEQ ID NO: 67521 - protein, 9 aa, synthetic construct
  source 1..9: note = Seed: TASWFTALT
TTSWFTALI

SEQ ID NO: 67522 - protein, 9 aa, synthetic construct
  source 1..9: note = Seed: TASWFTALT
TTSWFTALL

SEQ ID NO: 67523 - protein, 9 aa, synthetic construct
  source 1..9: note = Seed: TASWFTALT
TTSWFTALM

SEQ ID NO: 67524 - protein, 9 aa, synthetic construct
  source 1..9: note = Seed: TASWFTALT
TTSWFTALS

SEQ ID NO: 67525 - protein, 9 aa, synthetic construct
  source 1..9: note = Seed: TASWFTALT
TTSWFTALT

SEQ ID NO: 67526 - protein, 9 aa, synthetic construct
  source 1..9: note = Seed: TASWFTALT
TTSWFTALV

SEQ ID NO: 67527 - protein, 9 aa, synthetic construct
  source 1..9: note = Seed: TLSYEQFKK
TTSYEQFKK

SEQ ID NO: 67528 - protein, 9 aa, synthetic construct
  source 1..9: note = Seed: TLSYEQFKK
TTSYEQFKR

SEQ ID NO: 67529 - protein, 9 aa, synthetic construct
  source 1..9: note = Seed: TTTIKPVTY
TTTIKPVTM

SEQ ID NO: 67530 - protein, 9 aa, synthetic construct
  source 1..9: note = Seed: TTTIKPVTY
TTTIKPVTW

SEQ ID NO: 67531 - protein, 10 aa, synthetic construct
  source 1..10: note = Seed: TTTIKPVTYK
TTTIKPVTYR

SEQ ID NO: 67532 - protein, 9 aa, synthetic construct
  source 1..9: note = Seed: TTTLNGLWL
TTTLNGLWW

SEQ ID NO: 67533 - protein, 10 aa, synthetic construct
  source 1..10: note = Seed: TTTNIVTRCL
TTTNIVTRCV

SEQ ID NO: 67534 - protein, 10 aa, synthetic construct
  source 1..10: note = Seed: TMTNRQFHQK
TTTNRQFHQR

SEQ ID NO: 67535 - protein, 9 aa, synthetic construct
  source 1..9: note = Seed: TITQMNLKY
TTTQMNLKY

SEQ ID NO: 67536 - protein, 9 aa, synthetic construct
  source 1..9: note = Seed: TITVNVLAW
TTTVNVLAF

SEQ ID NO: 67537 - protein, 9 aa, synthetic construct
  source 1..9: note = Seed: TITVNVLAW
TTTVNVLAW

SEQ ID NO: 67538 - protein, 10 aa, synthetic construct
  source 1..10: note = Seed: TITVNVLAWL
TTTVNVLAWA

SEQ ID NO: 67539 - protein, 10 aa, synthetic construct
  source 1..10: note = Seed: TITVNVLAWL
TTTVNVLAWI

SEQ ID NO: 67540 - protein, 10 aa, synthetic construct
  source 1..10: note = Seed: TITVNVLAWL
TTTVNVLAWL

SEQ ID NO: 67541 - protein, 10 aa, synthetic construct
  source 1..10: note = Seed: TITVNVLAWL
TTTVNVLAWV

SEQ ID NO: 67542 - protein, 9 aa, synthetic construct
  source 1..9: note = Seed: TITVNVLAW
TTTVNVLAY

SEQ ID NO: 67543 - protein, 9 aa, synthetic construct
  source 1..9: note = Seed: TTVDNINLH
TTVDNINLF

SEQ ID NO: 67544 - protein, 9 aa, synthetic construct
  source 1..9: note = Seed: TTVDNINLH
TTVDNINLK

SEQ ID NO: 67545 - protein, 9 aa, synthetic construct
  source 1..9: note = Seed: TTVDNINLH
TTVDNINLM

SEQ ID NO: 67546 - protein, 9 aa, synthetic construct
  source 1..9: note = Seed: TTVDNINLH
TTVDNINLR

SEQ ID NO: 67547 - protein, 9 aa, synthetic construct
  source 1..9: note = Seed: TTVDNINLH
TTVDNINLY

SEQ ID NO: 67548 - protein, 10 aa, synthetic construct
  source 1..10: note = Seed: TNVLEGSVAY
TTVLEGSVAY

SEQ ID NO: 67549 - protein, 10 aa, synthetic construct
  source 1..10: note = Seed: TEVNEFACVV
TTVNEFACVV

SEQ ID NO: 67550 - protein, 10 aa, synthetic construct
  source 1..10: note = Seed: TEVVGDIILK
TTVVGDIILK

SEQ ID NO: 67551 - protein, 10 aa, synthetic construct
  source 1..10: note = Seed: TEVVGDIILK
TTVVGDIILR

SEQ ID NO: 67552 - protein, 9 aa, synthetic construct
  source 1..9: note = Seed: TSVVLLSVL
TTVVLLSVF

SEQ ID NO: 67553 - protein, 9 aa, synthetic construct
  source 1..9: note = Seed: TSVVLLSVL
TTVVLLSVM

SEQ ID NO: 67554 - protein, 9 aa, synthetic construct
  source 1..9: note = Seed: TSVVLLSVL
TTVVLLSVW

SEQ ID NO: 67555 - protein, 9 aa, synthetic construct
  source 1..9: note = Seed: TSVVLLSVL
TTVVLLSVY

SEQ ID NO: 67556 - protein, 9 aa, synthetic construct
  source 1..9: note = Seed: TVVVNAANV
TTVVNAANV

SEQ ID NO: 67557 - protein, 9 aa, synthetic construct
  source 1..9: note = Seed: TNVYADSFV
TTVYADSFA

SEQ ID NO: 67558 - protein, 9 aa, synthetic construct
  source 1..9: note = Seed: TNVYADSFV
TTVYADSFI

SEQ ID NO: 67559 - protein, 9 aa, synthetic construct
  source 1..9: note = Seed: TNVYADSFV
TTVYADSFL

SEQ ID NO: 67560 - protein, 9 aa, synthetic construct
  source 1..9: note = Seed: TNVYADSFV
TTVYADSFV

SEQ ID NO: 67561 - protein, 11 aa, synthetic construct
  source 1..11: note = Seed: TNVYADSFVIR
TTVYADSFVIR

SEQ ID NO: 67562 - protein, 10 aa, synthetic construct
  source 1..10: note = Seed: TNVYADSFVI
TTVYADSFVV

SEQ ID NO: 67563 - protein, 10 aa, synthetic construct
  source 1..10: note = Seed: TPVYSFLPGV
TTVYSFLPGA

SEQ ID NO: 67564 - protein, 10 aa, synthetic construct
  source 1..10: note = Seed: TPVYSFLPGV
TTVYSFLPGI

SEQ ID NO: 67565 - protein, 10 aa, synthetic construct
  source 1..10: note = Seed: TPVYSFLPGV
TTVYSFLPGL

SEQ ID NO: 67566 - protein, 10 aa, synthetic construct
  source 1..10: note = Seed: TPVYSFLPGV
TTVYSFLPGV

SEQ ID NO: 67567 - protein, 9 aa, synthetic construct
  source 1..9: note = Seed: TPVYSFLPG
TTVYSFLPY

SEQ ID NO: 67568 - protein, 10 aa, synthetic construct
  source 1..10: note = Seed: TAYANSVFNI
TTYANSVFNA

SEQ ID NO: 67569 - protein, 10 aa, synthetic construct
  source 1..10: note = Seed: TAYANSVFNI
TTYANSVFNF

SEQ ID NO: 67570 - protein, 10 aa, synthetic construct
  source 1..10: note = Seed: TAYANSVFNI
TTYANSVFNI

SEQ ID NO: 67571 - protein, 10 aa, synthetic construct
  source 1..10: note = Seed: TAYANSVFNI
TTYANSVFNL

SEQ ID NO: 67572 - protein, 10 aa, synthetic construct
  source 1..10: note = Seed: TAYANSVFNI
TTYANSVFNV

SEQ ID NO: 67573 - protein, 10 aa, synthetic construct
  source 1..10: note = Seed: TAYANSVFNI
TTYANSVFNW

SEQ ID NO: 67574 - protein, 8 aa, synthetic construct
  source 1..8: note = Seed: TAYANSVF
TTYANSVW

SEQ ID NO: 67575 - protein, 9 aa, synthetic construct
  source 1..9: note = Seed: TLYCIDGAL
TTYCIDGAF

SEQ ID NO: 67576 - protein, 9 aa, synthetic construct
  source 1..9: note = Seed: TLYCIDGAL
TTYCIDGAY

SEQ ID NO: 67577 - protein, 11 aa, synthetic construct
  source 1..11: note = Seed: TNYDLSVVNAR
TTYDLSVVNAK

SEQ ID NO: 67578 - protein, 11 aa, synthetic construct
  source 1..11: note = Seed: TNYDLSVVNAR
TTYDLSVVNAR

SEQ ID NO: 67579 - protein, 9 aa, synthetic construct
  source 1..9: note = Seed: TVYEKLKPV
TTYEKLKPF

SEQ ID NO: 67580 - protein, 9 aa, synthetic construct
  source 1..9: note = Seed: TVYEKLKPV
TTYEKLKPL

SEQ ID NO: 67581 - protein, 9 aa, synthetic construct
  source 1..9: note = Seed: TVYEKLKPV
TTYEKLKPM

SEQ ID NO: 67582 - protein, 9 aa, synthetic construct
  source 1..9: note = Seed: TVYEKLKPV
TTYEKLKPV

SEQ ID NO: 67583 - protein, 9 aa, synthetic construct
  source 1..9: note = Seed: TVYEKLKPV
TTYEKLKPY

SEQ ID NO: 67584 - protein, 10 aa, synthetic construct
  source 1..10: note = Seed: TFYLTNDVSF
TTYLTNDVSF

SEQ ID NO: 67585 - protein, 9 aa, synthetic construct
  source 1..9: note = Seed: TAYNGYLTS
TTYNGYLTF

SEQ ID NO: 67586 - protein, 9 aa, synthetic construct
  source 1..9: note = Seed: TAYNGYLTS
TTYNGYLTI

SEQ ID NO: 67587 - protein, 9 aa, synthetic construct
  source 1..9: note = Seed: TAYNGYLTS
TTYNGYLTL

SEQ ID NO: 67588 - protein, 9 aa, synthetic construct
  source 1..9: note = Seed: TAYNGYLTS
TTYNGYLTM

SEQ ID NO: 67589 - protein, 9 aa, synthetic construct
  source 1..9: note = Seed: TAYNGYLTS
TTYNGYLTV

SEQ ID NO: 67590 - protein, 9 aa, synthetic construct
  source 1..9: note = Seed: TAYNGYLTS
TTYNGYLTY

SEQ ID NO: 67591 - protein, 11 aa, synthetic construct
  source 1..11: note = Seed: TTYPGQGLNGY
TTYPGQGLNGF

SEQ ID NO: 67592 - protein, 11 aa, synthetic construct
  source 1..11: note = Seed: TTYPGQGLNGY
TTYPGQGLNGW

SEQ ID NO: 67593 - protein, 10 aa, synthetic construct
  source 1..10: note = Seed: TKYTMADLVY
TTYTMADLVF

SEQ ID NO: 67594 - protein, 10 aa, synthetic construct
  source 1..10: note = Seed: TKYTMADLVY
TTYTMADLVY

SEQ ID NO: 67595 - protein, 11 aa, synthetic construct
  source 1..11: note = Seed: TKYTMADLVYA
TTYTMADLVYV

SEQ ID NO: 67596 - protein, 9 aa, synthetic construct
  source 1..9: note = Seed: TMADLVYAL
TVADLVYAA

SEQ ID NO: 67597 - protein, 9 aa, synthetic construct
  source 1..9: note = Seed: TMADLVYAL
TVADLVYAF

SEQ ID NO: 67598 - protein, 9 aa, synthetic construct
  source 1..9: note = Seed: TMADLVYAL
TVADLVYAI

SEQ ID NO: 67599 - protein, 9 aa, synthetic construct
  source 1..9: note = Seed: TMADLVYAL
TVADLVYAL

SEQ ID NO: 67600 - protein, 10 aa, synthetic construct
  source 1..10: note = Seed: TMADLVYALR
TVADLVYALI

SEQ ID NO: 67601 - protein, 10 aa, synthetic construct
  source 1..10: note = Seed: TMADLVYALR
TVADLVYALK

SEQ ID NO: 67602 - protein, 10 aa, synthetic construct
  source 1..10: note = Seed: TMADLVYALR
TVADLVYALL

SEQ ID NO: 67603 - protein, 10 aa, synthetic construct
  source 1..10: note = Seed: TMADLVYALR
TVADLVYALR

SEQ ID NO: 67604 - protein, 10 aa, synthetic construct
  source 1..10: note = Seed: TMADLVYALR
TVADLVYALV

SEQ ID NO: 67605 - protein, 10 aa, synthetic construct
  source 1..10: note = Seed: TMADLVYALR
TVADLVYALY

SEQ ID NO: 67606 - protein, 9 aa, synthetic construct
  source 1..9: note = Seed: TMADLVYAL
TVADLVYAM

SEQ ID NO: 67607 - protein, 9 aa, synthetic construct
  source 1..9: note = Seed: TMADLVYAL
TVADLVYAT

SEQ ID NO: 67608 - protein, 9 aa, synthetic construct
  source 1..9: note = Seed: TMADLVYAL
TVADLVYAV

SEQ ID NO: 67609 - protein, 9 aa, synthetic construct
  source 1..9: note = Seed: TMADLVYAL
TVADLVYAY

SEQ ID NO: 67610 - protein, 9 aa, synthetic construct
  source 1..9: note = Seed: TIAEILLII
TVAEILLIA

SEQ ID NO: 67611 - protein, 9 aa, synthetic construct
  source 1..9: note = Seed: TIAEILLII
TVAEILLII

SEQ ID NO: 67612 - protein, 9 aa, synthetic construct
  source 1..9: note = Seed: TIAEILLII
TVAEILLIL

SEQ ID NO: 67613 - protein, 9 aa, synthetic construct
  source 1..9: note = Seed: TIAEILLII
TVAEILLIV

SEQ ID NO: 67614 - protein, 9 aa, synthetic construct
  source 1..9: note = Seed: TSAFVETVK
TVAFVETVK

SEQ ID NO: 67615 - protein, 9 aa, synthetic construct
  source 1..9: note = Seed: TSAFVETVK
TVAFVETVR

SEQ ID NO: 67616 - protein, 10 aa, synthetic construct
  source 1..10: note = Seed: TVAGVSICST
TVAGVSICSA

SEQ ID NO: 67617 - protein, 10 aa, synthetic construct
  source 1..10: note = Seed: TVAGVSICST
TVAGVSICSI

SEQ ID NO: 67618 - protein, 10 aa, synthetic construct
  source 1..10: note = Seed: TVAGVSICST
TVAGVSICSL

SEQ ID NO: 67619 - protein, 10 aa, synthetic construct
  source 1..10: note = Seed: TVAGVSICST
TVAGVSICSV

SEQ ID NO: 67620 - protein, 9 aa, synthetic construct
  source 1..9: note = Seed: TSAMQTMLF
TVAMQTMLF

SEQ ID NO: 67621 - protein, 9 aa, synthetic construct
  source 1..9: note = Seed: TSAMQTMLF
TVAMQTMLW

SEQ ID NO: 67622 - protein, 9 aa, synthetic construct
  source 1..9: note = Seed: TVASLINTL
TVASLINTA

SEQ ID NO: 67623 - protein, 9 aa, synthetic construct
  source 1..9: note = Seed: TVASLINTL
TVASLINTI

SEQ ID NO: 67624 - protein, 9 aa, synthetic construct
  source 1..9: note = Seed: TVASLINTL
TVASLINTM

SEQ ID NO: 67625 - protein, 9 aa, synthetic construct
  source 1..9: note = Seed: TVASLINTL
TVASLINTV

SEQ ID NO: 67626 - protein, 10 aa, synthetic construct
  source 1..10: note = Seed: TSAVLQSGFR
TVAVLQSGFK

SEQ ID NO: 67627 - protein, 10 aa, synthetic construct
  source 1..10: note = Seed: TSAVLQSGFR
TVAVLQSGFR

SEQ ID NO: 67628 - protein, 9 aa, synthetic construct
  source 1..9: note = Seed: TLAVPYNMR
TVAVPYNMK

SEQ ID NO: 67629 - protein, 9 aa, synthetic construct
  source 1..9: note = Seed: TLAVPYNMR
TVAVPYNMR

SEQ ID NO: 67630 - protein, 10 aa, synthetic construct
  source 1..10: note = Seed: TLAVPYNMRV
TVAVPYNMRV

SEQ ID NO: 67631 - protein, 9 aa, synthetic construct
  source 1..9: note = Seed: TTAYANSVF
TVAYANSVF

SEQ ID NO: 67632 - protein, 11 aa, synthetic construct
  source 1..11: note = Seed: TTAYANSVFNI
TVAYANSVFNF

SEQ ID NO: 67633 - protein, 11 aa, synthetic construct
  source 1..11: note = Seed: TTAYANSVFNI
TVAYANSVFNV

SEQ ID NO: 67634 - protein, 11 aa, synthetic construct
  source 1..11: note = Seed: TTAYANSVFNI
TVAYANSVFNW

SEQ ID NO: 67635 - protein, 9 aa, synthetic construct
  source 1..9: note = Seed: TTAYANSVF
TVAYANSVL

SEQ ID NO: 67636 - protein, 9 aa, synthetic construct
  source 1..9: note = Seed: TTAYANSVF
TVAYANSVM

SEQ ID NO: 67637 - protein, 9 aa, synthetic construct
  source 1..9: note = Seed: TTAYANSVF
TVAYANSVW

SEQ ID NO: 67638 - protein, 9 aa, synthetic construct
  source 1..9: note = Seed: TTAYANSVF
TVAYANSVY

SEQ ID NO: 67639 - protein, 9 aa, synthetic construct
  source 1..9: note = Seed: TVAYFNMVY
TVAYFNMVF

SEQ ID NO: 67640 - protein, 9 aa, synthetic construct
  source 1..9: note = Seed: TVAYFNMVY
TVAYFNMVK

SEQ ID NO: 67641 - protein, 9 aa, synthetic construct
  source 1..9: note = Seed: TVAYFNMVY
TVAYFNMVM

SEQ ID NO: 67642 - protein, 9 aa, synthetic construct
  source 1..9: note = Seed: TVAYFNMVY
TVAYFNMVR

SEQ ID NO: 67643 - protein, 9 aa, synthetic construct
  source 1..9: note = Seed: TVAYFNMVY
TVAYFNMVW

SEQ ID NO: 67644 - protein, 10 aa, synthetic construct
  source 1..10: note = Seed: TVAYFNMVYM
TVAYFNMVYA

SEQ ID NO: 67645 - protein, 10 aa, synthetic construct
  source 1..10: note = Seed: TVAYFNMVYM
TVAYFNMVYI

SEQ ID NO: 67646 - protein, 10 aa, synthetic construct
  source 1..10: note = Seed: TVAYFNMVYM
TVAYFNMVYK

SEQ ID NO: 67647 - protein, 10 aa, synthetic construct
  source 1..10: note = Seed: TVAYFNMVYM
TVAYFNMVYL

SEQ ID NO: 67648 - protein, 10 aa, synthetic construct
  source 1..10: note = Seed: TVAYFNMVYM
TVAYFNMVYR

SEQ ID NO: 67649 - protein, 10 aa, synthetic construct
  source 1..10: note = Seed: TVAYFNMVYM
TVAYFNMVYT

SEQ ID NO: 67650 - protein, 10 aa, synthetic construct
  source 1..10: note = Seed: TVAYFNMVYM
TVAYFNMVYV

SEQ ID NO: 67651 - protein, 10 aa, synthetic construct
  source 1..10: note = Seed: TVAYFNMVYM
TVAYFNMVYY

SEQ ID NO: 67652 - protein, 11 aa, synthetic construct
  source 1..11: note = Seed: TIDYTEISFML
TVDYTEISFMF

SEQ ID NO: 67653 - protein, 9 aa, synthetic construct
  source 1..9: note = Seed: TSDYYQLYS
TVDYYQLYY

SEQ ID NO: 67654 - protein, 10 aa, synthetic construct
  source 1..10: note = Seed: TVEEAKTVLK
TVEEAKTVLR

SEQ ID NO: 67655 - protein, 10 aa, synthetic construct
  source 1..10: note = Seed: TIEVNSFSGY
TVEVNSFSGK

SEQ ID NO: 67656 - protein, 10 aa, synthetic construct
  source 1..10: note = Seed: TIEVNSFSGY
TVEVNSFSGW

SEQ ID NO: 67657 - protein, 10 aa, synthetic construct
  source 1..10: note = Seed: TIEVNSFSGY
TVEVNSFSGY

SEQ ID NO: 67658 - protein, 9 aa, synthetic construct
  source 1..9: note = Seed: TFEYVSQPF
TVEYVSQPY

SEQ ID NO: 67659 - protein, 9 aa, synthetic construct
  source 1..9: note = Seed: TRFASVYAW
TVFASVYAF

SEQ ID NO: 67660 - protein, 9 aa, synthetic construct
  source 1..9: note = Seed: TRFASVYAW
TVFASVYAM

SEQ ID NO: 67661 - protein, 9 aa, synthetic construct
  source 1..9: note = Seed: TRFASVYAW
TVFASVYAY

SEQ ID NO: 67662 - protein, 9 aa, synthetic construct
  source 1..9: note = Seed: TPFEIKLAK
TVFEIKLAK

SEQ ID NO: 67663 - protein, 10 aa, synthetic construct
  source 1..10: note = Seed: TPFEIKLAKK
TVFEIKLAKK

SEQ ID NO: 67664 - protein, 10 aa, synthetic construct
  source 1..10: note = Seed: TPFEIKLAKK
TVFEIKLAKR

SEQ ID NO: 67665 - protein, 9 aa, synthetic construct
  source 1..9: note = Seed: TPFEIKLAK
TVFEIKLAR

SEQ ID NO: 67666 - protein, 9 aa, synthetic construct
  source 1..9: note = Seed: TIFKDASGK
TVFKDASGK

SEQ ID NO: 67667 - protein, 9 aa, synthetic construct
  source 1..9: note = Seed: TIFKDASGK
TVFKDASGR

SEQ ID NO: 67668 - protein, 9 aa, synthetic construct
  source 1..9: note = Seed: TCFSTQFAF
TVFSTQFAF

SEQ ID NO: 67669 - protein, 9 aa, synthetic construct
  source 1..9: note = Seed: TCFSTQFAF
TVFSTQFAM

SEQ ID NO: 67670 - protein, 9 aa, synthetic construct
  source 1..9: note = Seed: TCFSTQFAF
TVFSTQFAW

SEQ ID NO: 67671 - protein, 9 aa, synthetic construct
  source 1..9: note = Seed: TCFSTQFAF
TVFSTQFAY

SEQ ID NO: 67672 - protein, 9 aa, synthetic construct
  source 1..9: note = Seed: TAFVTNVNA
TVFVTNVNV

SEQ ID NO: 67673 - protein, 10 aa, synthetic construct
  source 1..10: note = Seed: TNGVGYQPYR
TVGVGYQPYK

SEQ ID NO: 67674 - protein, 10 aa, synthetic construct
  source 1..10: note = Seed: TNGVGYQPYR
TVGVGYQPYR

SEQ ID NO: 67675 - protein, 11 aa, synthetic construct
  source 1..11: note = Seed: TLGVYDYLVST
TVGVYDYLVSV

SEQ ID NO: 67676 - protein, 9 aa, synthetic construct
  source 1..9: note = Seed: TAHSCNVNR
TVHSCNVNK

SEQ ID NO: 67677 - protein, 9 aa, synthetic construct
  source 1..9: note = Seed: TAHSCNVNR
TVHSCNVNR

SEQ ID NO: 67678 - protein, 9 aa, synthetic construct
  source 1..9: note = Seed: TPHTVLQAV
TVHTVLQAY

SEQ ID NO: 67679 - protein, 10 aa, synthetic construct
  source 1..10: note = Seed: TWICLLQFAY
TVICLLQFAY

SEQ ID NO: 67680 - protein, 9 aa, synthetic construct
  source 1..9: note = Seed: TTIKPVTYK
TVIKPVTYK

SEQ ID NO: 67681 - protein, 10 aa, synthetic construct
  source 1..10: note = Seed: TTIKPVTYKL
TVIKPVTYKI

SEQ ID NO: 67682 - protein, 10 aa, synthetic construct
  source 1..10: note = Seed: TTIKPVTYKL
TVIKPVTYKK

SEQ ID NO: 67683 - protein, 10 aa, synthetic construct
  source 1..10: note = Seed: TTIKPVTYKL
TVIKPVTYKR

SEQ ID NO: 67684 - protein, 10 aa, synthetic construct
  source 1..10: note = Seed: TTIKPVTYKL
TVIKPVTYKV

SEQ ID NO: 67685 - protein, 9 aa, synthetic construct
  source 1..9: note = Seed: TTIKPVTYK
TVIKPVTYR

SEQ ID NO: 67686 - protein, 9 aa, synthetic construct
  source 1..9: note = Seed: TFISDEVAR
TVISDEVAK

SEQ ID NO: 67687 - protein, 9 aa, synthetic construct
  source 1..9: note = Seed: TFISDEVAR
TVISDEVAR

SEQ ID NO: 67688 - protein, 10 aa, synthetic construct
  source 1..10: note = Seed: TNIVTRCLNR
TVIVTRCLNK

SEQ ID NO: 67689 - protein, 10 aa, synthetic construct
  source 1..10: note = Seed: TNIVTRCLNR
TVIVTRCLNR

SEQ ID NO: 67690 - protein, 9 aa, synthetic construct
  source 1..9: note = Seed: TVKPGNFNK
TVKPGNFNR

SEQ ID NO: 67691 - protein, 9 aa, synthetic construct
  source 1..9: note = Seed: TIKPVTYKL
TVKPVTYKV

SEQ ID NO: 67692 - protein, 10 aa, synthetic construct
  source 1..10: note = Seed: TFLLNKEMYL
TVLLNKEMYI

SEQ ID NO: 67693 - protein, 10 aa, synthetic construct
  source 1..10: note = Seed: TFLLNKEMYL
TVLLNKEMYL

SEQ ID NO: 67694 - protein, 10 aa, synthetic construct
  source 1..10: note = Seed: TFLLNKEMYL
TVLLNKEMYV

SEQ ID NO: 67695 - protein, 10 aa, synthetic construct
  source 1..10: note = Seed: TLLLQLCTFT
TVLLQLCTFV

SEQ ID NO: 67696 - protein, 9 aa, synthetic construct
  source 1..9: note = Seed: TTLPVNVAF
TVLPVNVAF

SEQ ID NO: 67697 - protein, 9 aa, synthetic construct
  source 1..9: note = Seed: TTLPVNVAF
TVLPVNVAM

SEQ ID NO: 67698 - protein, 9 aa, synthetic construct
  source 1..9: note = Seed: TTLPVNVAF
TVLPVNVAW

SEQ ID NO: 67699 - protein, 9 aa, synthetic construct
  source 1..9: note = Seed: TTLPVNVAF
TVLPVNVAY

SEQ ID NO: 67700 - protein, 9 aa, synthetic construct
  source 1..9: note = Seed: TSLSGFKLK
TVLSGFKLK

SEQ ID NO: 67701 - protein, 9 aa, synthetic construct
  source 1..9: note = Seed: TSLSGFKLK
TVLSGFKLR

SEQ ID NO: 67702 - protein, 10 aa, synthetic construct
  source 1..10: note = Seed: TILTSLLVLV
TVLTSLLVLI

SEQ ID NO: 67703 - protein, 10 aa, synthetic construct
  source 1..10: note = Seed: TILTSLLVLV
TVLTSLLVLL

SEQ ID NO: 67704 - protein, 10 aa, synthetic construct
  source 1..10: note = Seed: TILTSLLVLV
TVLTSLLVLV

SEQ ID NO: 67705 - protein, 9 aa, synthetic construct
  source 1..9: note = Seed: TILTSLLVL
TVLTSLLVV

SEQ ID NO: 67706 - protein, 10 aa, synthetic construct
  source 1..10: note = Seed: TPLVPFWITI
TVLVPFWITV

SEQ ID NO: 67707 - protein, 10 aa, synthetic construct
  source 1..10: note = Seed: TQLYLGGMSY
TVLYLGGMSF

SEQ ID NO: 67708 - protein, 10 aa, synthetic construct
  source 1..10: note = Seed: TQLYLGGMSY
TVLYLGGMSK

SEQ ID NO: 67709 - protein, 10 aa, synthetic construct
  source 1..10: note = Seed: TQLYLGGMSY
TVLYLGGMSR

SEQ ID NO: 67710 - protein, 10 aa, synthetic construct
  source 1..10: note = Seed: TQLYLGGMSY
TVLYLGGMSY

SEQ ID NO: 67711 - protein, 10 aa, synthetic construct
  source 1..10: note = Seed: TLMIERFVSL
TVMIERFVSA

SEQ ID NO: 67712 - protein, 10 aa, synthetic construct
  source 1..10: note = Seed: TLMIERFVSL
TVMIERFVSF

SEQ ID NO: 67713 - protein, 10 aa, synthetic construct
  source 1..10: note = Seed: TLMIERFVSL
TVMIERFVSI

SEQ ID NO: 67714 - protein, 10 aa, synthetic construct
  source 1..10: note = Seed: TLMIERFVSL
TVMIERFVSL

SEQ ID NO: 67715 - protein, 10 aa, synthetic construct
  source 1..10: note = Seed: TLMIERFVSL
TVMIERFVSM

SEQ ID NO: 67716 - protein, 10 aa, synthetic construct
  source 1..10: note = Seed: TLMIERFVSL
TVMIERFVSV

SEQ ID NO: 67717 - protein, 10 aa, synthetic construct
  source 1..10: note = Seed: TLMIERFVSL
TVMIERFVSY

SEQ ID NO: 67718 - protein, 9 aa, synthetic construct
  source 1..9: note = Seed: TSMKYFVKI
TVMKYFVKA

SEQ ID NO: 67719 - protein, 9 aa, synthetic construct
  source 1..9: note = Seed: TSMKYFVKI
TVMKYFVKI

SEQ ID NO: 67720 - protein, 9 aa, synthetic construct
  source 1..9: note = Seed: TSMKYFVKI
TVMKYFVKL

SEQ ID NO: 67721 - protein, 9 aa, synthetic construct
  source 1..9: note = Seed: TSMKYFVKI
TVMKYFVKV

SEQ ID NO: 67722 - protein, 9 aa, synthetic construct
  source 1..9: note = Seed: TSMKYFVKI
TVMKYFVKW

SEQ ID NO: 67723 - protein, 10 aa, synthetic construct
  source 1..10: note = Seed: TCMMCYKRNR
TVMMCYKRNR

SEQ ID NO: 67724 - protein, 9 aa, synthetic construct
  source 1..9: note = Seed: TQMNLKYAI
TVMNLKYAF

SEQ ID NO: 67725 - protein, 9 aa, synthetic construct
  source 1..9: note = Seed: TQMNLKYAI
TVMNLKYAI

SEQ ID NO: 67726 - protein, 9 aa, synthetic construct
  source 1..9: note = Seed: TQMNLKYAI
TVMNLKYAV

SEQ ID NO: 67727 - protein, 9 aa, synthetic construct
  source 1..9: note = Seed: TQMNLKYAI
TVMNLKYAW

SEQ ID NO: 67728 - protein, 9 aa, synthetic construct
  source 1..9: note = Seed: TQMNLKYAI
TVMNLKYAY

SEQ ID NO: 67729 - protein, 11 aa, synthetic construct
  source 1..11: note = Seed: TLNDFNLVAMK
TVNDFNLVAMK

SEQ ID NO: 67730 - protein, 10 aa, synthetic construct
  source 1..10: note = Seed: TLNDFNLVAM
TVNDFNLVAV

SEQ ID NO: 67731 - protein, 9 aa, synthetic construct
  source 1..9: note = Seed: TLNDFNLVA
TVNDFNLVV

SEQ ID NO: 67732 - protein, 9 aa, synthetic construct
  source 1..9: note = Seed: TLNDLNETL
TVNDLNETV

SEQ ID NO: 67733 - protein, 10 aa, synthetic construct
  source 1..10: note = Seed: TTNGDFLHFL
TVNGDFLHFI

SEQ ID NO: 67734 - protein, 10 aa, synthetic construct
  source 1..10: note = Seed: TTNGDFLHFL
TVNGDFLHFL

SEQ ID NO: 67735 - protein, 10 aa, synthetic construct
  source 1..10: note = Seed: TTNGDFLHFL
TVNGDFLHFV

SEQ ID NO: 67736 - protein, 9 aa, synthetic construct
  source 1..9: note = Seed: TTNGDFLHF
TVNGDFLHW

SEQ ID NO: 67737 - protein, 9 aa, synthetic construct
  source 1..9: note = Seed: TTNGDFLHF
TVNGDFLHY

SEQ ID NO: 67738 - protein, 9 aa, synthetic construct
  source 1..9: note = Seed: TANKWDLII
TVNKWDLIF

SEQ ID NO: 67739 - protein, 9 aa, synthetic construct
  source 1..9: note = Seed: TANKWDLII
TVNKWDLIW

SEQ ID NO: 67740 - protein, 9 aa, synthetic construct
  source 1..9: note = Seed: TSNPTTFHL
TVNPTTFHI

SEQ ID NO: 67741 - protein, 9 aa, synthetic construct
  source 1..9: note = Seed: TSNPTTFHL
TVNPTTFHL

SEQ ID NO: 67742 - protein, 9 aa, synthetic construct
  source 1..9: note = Seed: TSNPTTFHL
TVNPTTFHV

SEQ ID NO: 67743 - protein, 9 aa, synthetic construct
  source 1..9: note = Seed: TSNPTTFHL
TVNPTTFHW

SEQ ID NO: 67744 - protein, 9 aa, synthetic construct
  source 1..9: note = Seed: TVNVLAWLY
TVNVLAWLK

SEQ ID NO: 67745 - protein, 9 aa, synthetic construct
  source 1..9: note = Seed: TVNVLAWLY
TVNVLAWLR

SEQ ID NO: 67746 - protein, 9 aa, synthetic construct
  source 1..9: note = Seed: TGNYQCGHY
TVNYQCGHY

SEQ ID NO: 67747 - protein, 10 aa, synthetic construct
  source 1..10: note = Seed: TGNYQCGHYK
TVNYQCGHYK

SEQ ID NO: 67748 - protein, 10 aa, synthetic construct
  source 1..10: note = Seed: TGNYQCGHYK
TVNYQCGHYR

SEQ ID NO: 67749 - protein, 10 aa, synthetic construct
  source 1..10: note = Seed: TLPVNVAFEL
TVPVNVAFEF

SEQ ID NO: 67750 - protein, 10 aa, synthetic construct
  source 1..10: note = Seed: TLPVNVAFEL
TVPVNVAFEW

SEQ ID NO: 67751 - protein, 10 aa, synthetic construct
  source 1..10: note = Seed: TLPVNVAFEL
TVPVNVAFEY

SEQ ID NO: 67752 - protein, 10 aa, synthetic construct
  source 1..10: note = Seed: TLQAENVTGL
TVQAENVTGV

SEQ ID NO: 67753 - protein, 9 aa, synthetic construct
  source 1..9: note = Seed: TIQITISSF
TVQITISSF

SEQ ID NO: 67754 - protein, 10 aa, synthetic construct
  source 1..10: note = Seed: TIQITISSFK
TVQITISSFK

SEQ ID NO: 67755 - protein, 10 aa, synthetic construct
  source 1..10: note = Seed: TIQITISSFK
TVQITISSFR

SEQ ID NO: 67756 - protein, 9 aa, synthetic construct
  source 1..9: note = Seed: TIQITISSF
TVQITISSY

SEQ ID NO: 67757 - protein, 9 aa, synthetic construct
  source 1..9: note = Seed: TIQPRVEKK
TVQPRVEKR

SEQ ID NO: 67758 - protein, 11 aa, synthetic construct
  source 1..11: note = Seed: TRQVVNVVTTK
TVQVVNVVTTR

SEQ ID NO: 67759 - protein, 11 aa, synthetic construct
  source 1..11: note = Seed: TNRQFHQKLLK
TVRQFHQKLLK

SEQ ID NO: 67760 - protein, 9 aa, synthetic construct
  source 1..9: note = Seed: TTRQVVNVV
TVRQVVNVK

SEQ ID NO: 67761 - protein, 9 aa, synthetic construct
  source 1..9: note = Seed: TYRRLISMM
TVRRLISMK

SEQ ID NO: 67762 - protein, 9 aa, synthetic construct
  source 1..9: note = Seed: TISLAGSYK
TVSLAGSYK

SEQ ID NO: 67763 - protein, 9 aa, synthetic construct
  source 1..9: note = Seed: TISLAGSYK
TVSLAGSYR

SEQ ID NO: 67764 - protein, 9 aa, synthetic construct
  source 1..9: note = Seed: TGSNVFQTR
TVSNVFQTK

SEQ ID NO: 67765 - protein, 9 aa, synthetic construct
  source 1..9: note = Seed: TGSNVFQTR
TVSNVFQTR

SEQ ID NO: 67766 - protein, 10 aa, synthetic construct
  source 1..10: note = Seed: TQSRNLQEFK
TVSRNLQEFK

SEQ ID NO: 67767 - protein, 10 aa, synthetic construct
  source 1..10: note = Seed: TQSRNLQEFK
TVSRNLQEFR

SEQ ID NO: 67768 - protein, 9 aa, synthetic construct
  source 1..9: note = Seed: TASWFTALT
TVSWFTALA

SEQ ID NO: 67769 - protein, 9 aa, synthetic construct
  source 1..9: note = Seed: TASWFTALT
TVSWFTALI

SEQ ID NO: 67770 - protein, 9 aa, synthetic construct
  source 1..9: note = Seed: TASWFTALT
TVSWFTALL

SEQ ID NO: 67771 - protein, 9 aa, synthetic construct
  source 1..9: note = Seed: TASWFTALT
TVSWFTALM

SEQ ID NO: 67772 - protein, 9 aa, synthetic construct
  source 1..9: note = Seed: TASWFTALT
TVSWFTALS

SEQ ID NO: 67773 - protein, 9 aa, synthetic construct
  source 1..9: note = Seed: TASWFTALT
TVSWFTALT

SEQ ID NO: 67774 - protein, 9 aa, synthetic construct
  source 1..9: note = Seed: TASWFTALT
TVSWFTALV

SEQ ID NO: 67775 - protein, 9 aa, synthetic construct
  source 1..9: note = Seed: TLSYEQFKK
TVSYEQFKK

SEQ ID NO: 67776 - protein, 9 aa, synthetic construct
  source 1..9: note = Seed: TLSYEQFKK
TVSYEQFKR

SEQ ID NO: 67777 - protein, 10 aa, synthetic construct
  source 1..10: note = Seed: TTTIKPVTYK
TVTIKPVTYK

SEQ ID NO: 67778 - protein, 10 aa, synthetic construct
  source 1..10: note = Seed: TTTIKPVTYK
TVTIKPVTYR

SEQ ID NO: 67779 - protein, 10 aa, synthetic construct
  source 1..10: note = Seed: TMTNRQFHQK
TVTNRQFHQR

SEQ ID NO: 67780 - protein, 9 aa, synthetic construct
  source 1..9: note = Seed: TITQMNLKY
TVTQMNLKY

SEQ ID NO: 67781 - protein, 10 aa, synthetic construct
  source 1..10: note = Seed: TITVNVLAWL
TVTVNVLAWA

SEQ ID NO: 67782 - protein, 10 aa, synthetic construct
  source 1..10: note = Seed: TITVNVLAWL
TVTVNVLAWI

SEQ ID NO: 67783 - protein, 10 aa, synthetic construct
  source 1..10: note = Seed: TITVNVLAWL
TVTVNVLAWV

SEQ ID NO: 67784 - protein, 9 aa, synthetic construct
  source 1..9: note = Seed: TTVDNINLH
TVVDNINLF

SEQ ID NO: 67785 - protein, 9 aa, synthetic construct
  source 1..9: note = Seed: TTVDNINLH
TVVDNINLK

SEQ ID NO: 67786 - protein, 9 aa, synthetic construct
  source 1..9: note = Seed: TTVDNINLH
TVVDNINLM

SEQ ID NO: 67787 - protein, 9 aa, synthetic construct
  source 1..9: note = Seed: TTVDNINLH
TVVDNINLR

SEQ ID NO: 67788 - protein, 9 aa, synthetic construct
  source 1..9: note = Seed: TTVDNINLH
TVVDNINLY

SEQ ID NO: 67789 - protein, 10 aa, synthetic construct
  source 1..10: note = Seed: TNVLEGSVAY
TVVLEGSVAY

SEQ ID NO: 67790 - protein, 10 aa, synthetic construct
  source 1..10: note = Seed: TEVNEFACVV
TVVNEFACVV

SEQ ID NO: 67791 - protein, 10 aa, synthetic construct
  source 1..10: note = Seed: TEVVGDIILK
TVVVGDIILK

SEQ ID NO: 67792 - protein, 10 aa, synthetic construct
  source 1..10: note = Seed: TEVVGDIILK
TVVVGDIILR

SEQ ID NO: 67793 - protein, 9 aa, synthetic construct
  source 1..9: note = Seed: TPVVQTIEV
TVVVQTIEY

SEQ ID NO: 67794 - protein, 9 aa, synthetic construct
  source 1..9: note = Seed: TNVYADSFV
TVVYADSFI

SEQ ID NO: 67795 - protein, 9 aa, synthetic construct
  source 1..9: note = Seed: TNVYADSFV
TVVYADSFL

SEQ ID NO: 67796 - protein, 9 aa, synthetic construct
  source 1..9: note = Seed: TNVYADSFV
TVVYADSFV

SEQ ID NO: 67797 - protein, 11 aa, synthetic construct
  source 1..11: note = Seed: TNVYADSFVIR
TVVYADSFVIR

SEQ ID NO: 67798 - protein, 10 aa, synthetic construct
  source 1..10: note = Seed: TNVYADSFVI
TVVYADSFVV

SEQ ID NO: 67799 - protein, 9 aa, synthetic construct
  source 1..9: note = Seed: TPVYSFLPG
TVVYSFLPF

SEQ ID NO: 67800 - protein, 10 aa, synthetic construct
  source 1..10: note = Seed: TPVYSFLPGV
TVVYSFLPGI

SEQ ID NO: 67801 - protein, 10 aa, synthetic construct
  source 1..10: note = Seed: TPVYSFLPGV
TVVYSFLPGV

SEQ ID NO: 67802 - protein, 9 aa, synthetic construct
  source 1..9: note = Seed: TPVYSFLPG
TVVYSFLPM

SEQ ID NO: 67803 - protein, 9 aa, synthetic construct
  source 1..9: note = Seed: TPVYSFLPG
TVVYSFLPY

SEQ ID NO: 67804 - protein, 10 aa, synthetic construct
  source 1..10: note = Seed: TAYANSVFNI
TVYANSVFNF

SEQ ID NO: 67805 - protein, 10 aa, synthetic construct
  source 1..10: note = Seed: TAYANSVFNI
TVYANSVFNI

SEQ ID NO: 67806 - protein, 10 aa, synthetic construct
  source 1..10: note = Seed: TAYANSVFNI
TVYANSVFNL

SEQ ID NO: 67807 - protein, 10 aa, synthetic construct
  source 1..10: note = Seed: TAYANSVFNI
TVYANSVFNV

SEQ ID NO: 67808 - protein, 10 aa, synthetic construct
  source 1..10: note = Seed: TAYANSVFNI
TVYANSVFNW

SEQ ID NO: 67809 - protein, 9 aa, synthetic construct
  source 1..9: note = Seed: TLYCIDGAL
TVYCIDGAF

SEQ ID NO: 67810 - protein, 9 aa, synthetic construct
  source 1..9: note = Seed: TLYCIDGAL
TVYCIDGAY

SEQ ID NO: 67811 - protein, 11 aa, synthetic construct
  source 1..11: note = Seed: TNYDLSVVNAR
TVYDLSVVNAK

SEQ ID NO: 67812 - protein, 11 aa, synthetic construct
  source 1..11: note = Seed: TNYDLSVVNAR
TVYDLSVVNAR

SEQ ID NO: 67813 - protein, 9 aa, synthetic construct
  source 1..9: note = Seed: TVYEKLKPV
TVYEKLKPA

SEQ ID NO: 67814 - protein, 9 aa, synthetic construct
  source 1..9: note = Seed: TVYEKLKPV
TVYEKLKPI

SEQ ID NO: 67815 - protein, 9 aa, synthetic construct
  source 1..9: note = Seed: TVYEKLKPV
TVYEKLKPL

SEQ ID NO: 67816 - protein, 9 aa, synthetic construct
  source 1..9: note = Seed: TVYEKLKPV
TVYEKLKPM

SEQ ID NO: 67817 - protein, 10 aa, synthetic construct
  source 1..10: note = Seed: TVYEKLKPVL
TVYEKLKPVV

SEQ ID NO: 67818 - protein, 10 aa, synthetic construct
  source 1..10: note = Seed: TFYLTNDVSF
TVYLTNDVSF

SEQ ID NO: 67819 - protein, 10 aa, synthetic construct
  source 1..10: note = Seed: TFYLTNDVSF
TVYLTNDVSY

SEQ ID NO: 67820 - protein, 9 aa, synthetic construct
  source 1..9: note = Seed: TAYNGYLTS
TVYNGYLTI

SEQ ID NO: 67821 - protein, 9 aa, synthetic construct
  source 1..9: note = Seed: TAYNGYLTS
TVYNGYLTL

SEQ ID NO: 67822 - protein, 9 aa, synthetic construct
  source 1..9: note = Seed: TAYNGYLTS
TVYNGYLTM

SEQ ID NO: 67823 - protein, 9 aa, synthetic construct
  source 1..9: note = Seed: TAYNGYLTS
TVYNGYLTV

SEQ ID NO: 67824 - protein, 9 aa, synthetic construct
  source 1..9: note = Seed: TAYNGYLTS
TVYNGYLTY

SEQ ID NO: 67825 - protein, 11 aa, synthetic construct
  source 1..11: note = Seed: TTYPGQGLNGY
TVYPGQGLNGK

SEQ ID NO: 67826 - protein, 10 aa, synthetic construct
  source 1..10: note = Seed: TKYTMADLVY
TVYTMADLVF

SEQ ID NO: 67827 - protein, 10 aa, synthetic construct
  source 1..10: note = Seed: TKYTMADLVY
TVYTMADLVY

SEQ ID NO: 67828 - protein, 11 aa, synthetic construct
  source 1..11: note = Seed: TKYTMADLVYA
TVYTMADLVYV

SEQ ID NO: 67829 - protein, 9 aa, synthetic construct
  source 1..9: note = Seed: TYACWHHSI
TWACWHHSF

SEQ ID NO: 67830 - protein, 9 aa, synthetic construct
  source 1..9: note = Seed: TYACWHHSI
TWACWHHSI

SEQ ID NO: 67831 - protein, 9 aa, synthetic construct
  source 1..9: note = Seed: TYACWHHSI
TWACWHHSL

SEQ ID NO: 67832 - protein, 9 aa, synthetic construct
  source 1..9: note = Seed: TYACWHHSI
TWACWHHSM

SEQ ID NO: 67833 - protein, 9 aa, synthetic construct
  source 1..9: note = Seed: TYACWHHSI
TWACWHHSW

SEQ ID NO: 67834 - protein, 9 aa, synthetic construct
  source 1..9: note = Seed: TYACWHHSI
TWACWHHSY

SEQ ID NO: 67835 - protein, 9 aa, synthetic construct
  source 1..9: note = Seed: TMADLVYAL
TWADLVYAL

SEQ ID NO: 67836 - protein, 10 aa, synthetic construct
  source 1..10: note = Seed: TMADLVYALR
TWADLVYALR

SEQ ID NO: 67837 - protein, 9 aa, synthetic construct
  source 1..9: note = Seed: TMADLVYAL
TWADLVYAM

SEQ ID NO: 67838 - protein, 10 aa, synthetic construct
  source 1..10: note = Seed: TSAVLQSGFR
TWAVLQSGFR

SEQ ID NO: 67839 - protein, 9 aa, synthetic construct
  source 1..9: note = Seed: TTAYANSVF
TWAYANSVF

SEQ ID NO: 67840 - protein, 11 aa, synthetic construct
  source 1..11: note = Seed: TTAYANSVFNI
TWAYANSVFNF

SEQ ID NO: 67841 - protein, 11 aa, synthetic construct
  source 1..11: note = Seed: TTAYANSVFNI
TWAYANSVFNW

SEQ ID NO: 67842 - protein, 9 aa, synthetic construct
  source 1..9: note = Seed: TTAYANSVF
TWAYANSVL

SEQ ID NO: 67843 - protein, 9 aa, synthetic construct
  source 1..9: note = Seed: TTAYANSVF
TWAYANSVM

SEQ ID NO: 67844 - protein, 9 aa, synthetic construct
  source 1..9: note = Seed: TTAYANSVF
TWAYANSVY

SEQ ID NO: 67845 - protein, 9 aa, synthetic construct
  source 1..9: note = Seed: TVAYFNMVY
TWAYFNMVF

SEQ ID NO: 67846 - protein, 9 aa, synthetic construct
  source 1..9: note = Seed: TVAYFNMVY
TWAYFNMVL

SEQ ID NO: 67847 - protein, 9 aa, synthetic construct
  source 1..9: note = Seed: TVAYFNMVY
TWAYFNMVM

SEQ ID NO: 67848 - protein, 9 aa, synthetic construct
  source 1..9: note = Seed: TVAYFNMVY
TWAYFNMVY

SEQ ID NO: 67849 - protein, 10 aa, synthetic construct
  source 1..10: note = Seed: TVAYFNMVYM
TWAYFNMVYK

SEQ ID NO: 67850 - protein, 10 aa, synthetic construct
  source 1..10: note = Seed: TVAYFNMVYM
TWAYFNMVYR

SEQ ID NO: 67851 - protein, 10 aa, synthetic construct
  source 1..10: note = Seed: TVAYFNMVYM
TWAYFNMVYV

SEQ ID NO: 67852 - protein, 11 aa, synthetic construct
  source 1..11: note = Seed: TIDYTEISFML
TWDYTEISFMF

SEQ ID NO: 67853 - protein, 10 aa, synthetic construct
  source 1..10: note = Seed: TIEVNSFSGY
TWEVNSFSGW

SEQ ID NO: 67854 - protein, 9 aa, synthetic construct
  source 1..9: note = Seed: TFEYVSQPF
TWEYVSQPF

SEQ ID NO: 67855 - protein, 9 aa, synthetic construct
  source 1..9: note = Seed: TFEYVSQPF
TWEYVSQPM

SEQ ID NO: 67856 - protein, 9 aa, synthetic construct
  source 1..9: note = Seed: TYFTQSRNL
TWFTQSRNF

SEQ ID NO: 67857 - protein, 9 aa, synthetic construct
  source 1..9: note = Seed: TYFTQSRNL
TWFTQSRNL

SEQ ID NO: 67858 - protein, 9 aa, synthetic construct
  source 1..9: note = Seed: TYFTQSRNL
TWFTQSRNM

SEQ ID NO: 67859 - protein, 11 aa, synthetic construct
  source 1..11: note = Seed: TLGVYDYLVST
TWGVYDYLVSV

SEQ ID NO: 67860 - protein, 10 aa, synthetic construct
  source 1..10: note = Seed: TGHMLDMYSV
TWHMLDMYSL

SEQ ID NO: 67861 - protein, 10 aa, synthetic construct
  source 1..10: note = Seed: TFISAARQGF
TWISAARQGF

SEQ ID NO: 67862 - protein, 9 aa, synthetic construct
  source 1..9: note = Seed: TFKVSIWNL
TWKVSIWNF

SEQ ID NO: 67863 - protein, 9 aa, synthetic construct
  source 1..9: note = Seed: TFKVSIWNL
TWKVSIWNI

SEQ ID NO: 67864 - protein, 9 aa, synthetic construct
  source 1..9: note = Seed: TFKVSIWNL
TWKVSIWNL

SEQ ID NO: 67865 - protein, 10 aa, synthetic construct
  source 1..10: note = Seed: TFLLNKEMYL
TWLLNKEMYI

SEQ ID NO: 67866 - protein, 10 aa, synthetic construct
  source 1..10: note = Seed: TFLLNKEMYL
TWLLNKEMYL

SEQ ID NO: 67867 - protein, 10 aa, synthetic construct
  source 1..10: note = Seed: TFLLNKEMYL
TWLLNKEMYV

SEQ ID NO: 67868 - protein, 10 aa, synthetic construct
  source 1..10: note = Seed: TLLLQLCTFT
TWLLQLCTFV

SEQ ID NO: 67869 - protein, 10 aa, synthetic construct
  source 1..10: note = Seed: TILTSLLVLV
TWLTSLLVLI

SEQ ID NO: 67870 - protein, 10 aa, synthetic construct
  source 1..10: note = Seed: TILTSLLVLV
TWLTSLLVLL

SEQ ID NO: 67871 - protein, 10 aa, synthetic construct
  source 1..10: note = Seed: TILTSLLVLV
TWLTSLLVLV

SEQ ID NO: 67872 - protein, 10 aa, synthetic construct
  source 1..10: note = Seed: TPLVPFWITI
TWLVPFWITV

SEQ ID NO: 67873 - protein, 10 aa, synthetic construct
  source 1..10: note = Seed: TQLYLGGMSY
TWLYLGGMSF

SEQ ID NO: 67874 - protein, 10 aa, synthetic construct
  source 1..10: note = Seed: TQLYLGGMSY
TWLYLGGMSK

SEQ ID NO: 67875 - protein, 10 aa, synthetic construct
  source 1..10: note = Seed: TQLYLGGMSY
TWLYLGGMSY

SEQ ID NO: 67876 - protein, 10 aa, synthetic construct
  source 1..10: note = Seed: TLMIERFVSL
TWMIERFVSA

SEQ ID NO: 67877 - protein, 10 aa, synthetic construct
  source 1..10: note = Seed: TLMIERFVSL
TWMIERFVSF

SEQ ID NO: 67878 - protein, 10 aa, synthetic construct
  source 1..10: note = Seed: TLMIERFVSL
TWMIERFVSI

SEQ ID NO: 67879 - protein, 10 aa, synthetic construct
  source 1..10: note = Seed: TLMIERFVSL
TWMIERFVSL

SEQ ID NO: 67880 - protein, 10 aa, synthetic construct
  source 1..10: note = Seed: TLMIERFVSL
TWMIERFVSM

SEQ ID NO: 67881 - protein, 10 aa, synthetic construct
  source 1..10: note = Seed: TLMIERFVSL
TWMIERFVSV

SEQ ID NO: 67882 - protein, 10 aa, synthetic construct
  source 1..10: note = Seed: TLMIERFVSL
TWMIERFVSY

SEQ ID NO: 67883 - protein, 10 aa, synthetic construct
  source 1..10: note = Seed: TCMMCYKRNR
TWMMCYKRNR

SEQ ID NO: 67884 - protein, 9 aa, synthetic construct
  source 1..9: note = Seed: TTNGDFLHF
TWNGDFLHF

SEQ ID NO: 67885 - protein, 9 aa, synthetic construct
  source 1..9: note = Seed: TTNGDFLHF
TWNGDFLHI

SEQ ID NO: 67886 - protein, 9 aa, synthetic construct
  source 1..9: note = Seed: TTNGDFLHF
TWNGDFLHL

SEQ ID NO: 67887 - protein, 9 aa, synthetic construct
  source 1..9: note = Seed: TTNGDFLHF
TWNGDFLHW

SEQ ID NO: 67888 - protein, 9 aa, synthetic construct
  source 1..9: note = Seed: TVNVLAWLY
TWNVLAWLY

SEQ ID NO: 67889 - protein, 10 aa, synthetic construct
  source 1..10: note = Seed: TGNYQCGHYK
TWNYQCGHYR

SEQ ID NO: 67890 - protein, 10 aa, synthetic construct
  source 1..10: note = Seed: TLPVNVAFEL
TWPVNVAFEF

SEQ ID NO: 67891 - protein, 10 aa, synthetic construct
  source 1..10: note = Seed: TLPVNVAFEL
TWPVNVAFEM

SEQ ID NO: 67892 - protein, 10 aa, synthetic construct
  source 1..10: note = Seed: TLPVNVAFEL
TWPVNVAFEW

SEQ ID NO: 67893 - protein, 10 aa, synthetic construct
  source 1..10: note = Seed: TLPVNVAFEL
TWPVNVAFEY

SEQ ID NO: 67894 - protein, 10 aa, synthetic construct
  source 1..10: note = Seed: TLQAENVTGL
TWQAENVTGV

SEQ ID NO: 67895 - protein, 10 aa, synthetic construct
  source 1..10: note = Seed: TIQITISSFK
TWQITISSFK

SEQ ID NO: 67896 - protein, 10 aa, synthetic construct
  source 1..10: note = Seed: TIQITISSFK
TWQITISSFR

SEQ ID NO: 67897 - protein, 11 aa, synthetic construct
  source 1..11: note = Seed: TRQVVNVVTTK
TWQVVNVVTTR

SEQ ID NO: 67898 - protein, 9 aa, synthetic construct
  source 1..9: note = Seed: TYRRLISMM
TWRRLISMF

SEQ ID NO: 67899 - protein, 10 aa, synthetic construct
  source 1..10: note = Seed: TTTIKPVTYK
TWTIKPVTYK

SEQ ID NO: 67900 - protein, 10 aa, synthetic construct
  source 1..10: note = Seed: TTTIKPVTYK
TWTIKPVTYR

SEQ ID NO: 67901 - protein, 10 aa, synthetic construct
  source 1..10: note = Seed: TITVNVLAWL
TWTVNVLAWA

SEQ ID NO: 67902 - protein, 10 aa, synthetic construct
  source 1..10: note = Seed: TITVNVLAWL
TWTVNVLAWI

SEQ ID NO: 67903 - protein, 10 aa, synthetic construct
  source 1..10: note = Seed: TITVNVLAWL
TWTVNVLAWV

SEQ ID NO: 67904 - protein, 10 aa, synthetic construct
  source 1..10: note = Seed: TNVLEGSVAY
TWVLEGSVAY

SEQ ID NO: 67905 - protein, 10 aa, synthetic construct
  source 1..10: note = Seed: TEVVGDIILK
TWVVGDIILK

SEQ ID NO: 67906 - protein, 10 aa, synthetic construct
  source 1..10: note = Seed: TEVVGDIILK
TWVVGDIILR

SEQ ID NO: 67907 - protein, 10 aa, synthetic construct
  source 1..10: note = Seed: TPVYSFLPGV
TWVYSFLPGV

SEQ ID NO: 67908 - protein, 10 aa, synthetic construct
  source 1..10: note = Seed: TAYANSVFNI
TWYANSVFNF

SEQ ID NO: 67909 - protein, 10 aa, synthetic construct
  source 1..10: note = Seed: TAYANSVFNI
TWYANSVFNI

SEQ ID NO: 67910 - protein, 10 aa, synthetic construct
  source 1..10: note = Seed: TAYANSVFNI
TWYANSVFNL

SEQ ID NO: 67911 - protein, 10 aa, synthetic construct
  source 1..10: note = Seed: TAYANSVFNI
TWYANSVFNM

SEQ ID NO: 67912 - protein, 10 aa, synthetic construct
  source 1..10: note = Seed: TAYANSVFNI
TWYANSVFNW

SEQ ID NO: 67913 - protein, 10 aa, synthetic construct
  source 1..10: note = Seed: TLYCIDGALL
TWYCIDGALF

SEQ ID NO: 67914 - protein, 10 aa, synthetic construct
  source 1..10: note = Seed: TLYCIDGALL
TWYCIDGALW

SEQ ID NO: 67915 - protein, 10 aa, synthetic construct
  source 1..10: note = Seed: TFYLTNDVSF
TWYLTNDVSF

SEQ ID NO: 67916 - protein, 11 aa, synthetic construct
  source 1..11: note = Seed: TFYLTNDVSFL
TWYLTNDVSFF

SEQ ID NO: 67917 - protein, 10 aa, synthetic construct
  source 1..10: note = Seed: TFYLTNDVSF
TWYLTNDVSW

SEQ ID NO: 67918 - protein, 10 aa, synthetic construct
  source 1..10: note = Seed: TKYTMADLVY
TWYTMADLVY

SEQ ID NO: 67919 - protein, 11 aa, synthetic construct
  source 1..11: note = Seed: TKYTMADLVYA
TWYTMADLVYV

SEQ ID NO: 67920 - protein, 9 aa, synthetic construct
  source 1..9: note = Seed: TYACWHHSI
TYACWHHSF

SEQ ID NO: 67921 - protein, 9 aa, synthetic construct
  source 1..9: note = Seed: TYACWHHSI
TYACWHHSL

SEQ ID NO: 67922 - protein, 9 aa, synthetic construct
  source 1..9: note = Seed: TYACWHHSI
TYACWHHSM

SEQ ID NO: 67923 - protein, 9 aa, synthetic construct
  source 1..9: note = Seed: TYACWHHSI
TYACWHHSV

SEQ ID NO: 67924 - protein, 9 aa, synthetic construct
  source 1..9: note = Seed: TYACWHHSI
TYACWHHSW

SEQ ID NO: 67925 - protein, 9 aa, synthetic construct
  source 1..9: note = Seed: TYACWHHSI
TYACWHHSY

SEQ ID NO: 67926 - protein, 9 aa, synthetic construct
  source 1..9: note = Seed: TMADLVYAL
TYADLVYAF

SEQ ID NO: 67927 - protein, 9 aa, synthetic construct
  source 1..9: note = Seed: TMADLVYAL
TYADLVYAI

SEQ ID NO: 67928 - protein, 9 aa, synthetic construct
  source 1..9: note = Seed: TMADLVYAL
TYADLVYAL

SEQ ID NO: 67929 - protein, 10 aa, synthetic construct
  source 1..10: note = Seed: TMADLVYALR
TYADLVYALR

SEQ ID NO: 67930 - protein, 9 aa, synthetic construct
  source 1..9: note = Seed: TMADLVYAL
TYADLVYAM

SEQ ID NO: 67931 - protein, 9 aa, synthetic construct
  source 1..9: note = Seed: TMADLVYAL
TYADLVYAV

SEQ ID NO: 67932 - protein, 9 aa, synthetic construct
  source 1..9: note = Seed: TMADLVYAL
TYADLVYAY

SEQ ID NO: 67933 - protein, 10 aa, synthetic construct
  source 1..10: note = Seed: TEAFEKMVSL
TYAFEKMVSY

SEQ ID NO: 67934 - protein, 10 aa, synthetic construct
  source 1..10: note = Seed: TSAVLQSGFR
TYAVLQSGFR

SEQ ID NO: 67935 - protein, 9 aa, synthetic construct
  source 1..9: note = Seed: TLAVPYNMR
TYAVPYNMR

SEQ ID NO: 67936 - protein, 9 aa, synthetic construct
  source 1..9: note = Seed: TTAYANSVF
TYAYANSVF

SEQ ID NO: 67937 - protein, 11 aa, synthetic construct
  source 1..11: note = Seed: TTAYANSVFNI
TYAYANSVFNF

SEQ ID NO: 67938 - protein, 11 aa, synthetic construct
  source 1..11: note = Seed: TTAYANSVFNI
TYAYANSVFNI

SEQ ID NO: 67939 - protein, 11 aa, synthetic construct
  source 1..11: note = Seed: TTAYANSVFNI
TYAYANSVFNL

SEQ ID NO: 67940 - protein, 11 aa, synthetic construct
  source 1..11: note = Seed: TTAYANSVFNI
TYAYANSVFNW

SEQ ID NO: 67941 - protein, 9 aa, synthetic construct
  source 1..9: note = Seed: TTAYANSVF
TYAYANSVI

SEQ ID NO: 67942 - protein, 9 aa, synthetic construct
  source 1..9: note = Seed: TTAYANSVF
TYAYANSVL

SEQ ID NO: 67943 - protein, 9 aa, synthetic construct
  source 1..9: note = Seed: TTAYANSVF
TYAYANSVM

SEQ ID NO: 67944 - protein, 9 aa, synthetic construct
  source 1..9: note = Seed: TTAYANSVF
TYAYANSVV

SEQ ID NO: 67945 - protein, 9 aa, synthetic construct
  source 1..9: note = Seed: TTAYANSVF
TYAYANSVY

SEQ ID NO: 67946 - protein, 9 aa, synthetic construct
  source 1..9: note = Seed: TVAYFNMVY
TYAYFNMVF

SEQ ID NO: 67947 - protein, 9 aa, synthetic construct
  source 1..9: note = Seed: TVAYFNMVY
TYAYFNMVI

SEQ ID NO: 67948 - protein, 9 aa, synthetic construct
  source 1..9: note = Seed: TVAYFNMVY
TYAYFNMVL

SEQ ID NO: 67949 - protein, 9 aa, synthetic construct
  source 1..9: note = Seed: TVAYFNMVY
TYAYFNMVM

SEQ ID NO: 67950 - protein, 9 aa, synthetic construct
  source 1..9: note = Seed: TVAYFNMVY
TYAYFNMVV

SEQ ID NO: 67951 - protein, 9 aa, synthetic construct
  source 1..9: note = Seed: TVAYFNMVY
TYAYFNMVY

SEQ ID NO: 67952 - protein, 10 aa, synthetic construct
  source 1..10: note = Seed: TVAYFNMVYM
TYAYFNMVYK

SEQ ID NO: 67953 - protein, 10 aa, synthetic construct
  source 1..10: note = Seed: TVAYFNMVYM
TYAYFNMVYR

SEQ ID NO: 67954 - protein, 10 aa, synthetic construct
  source 1..10: note = Seed: TVAYFNMVYM
TYAYFNMVYV

SEQ ID NO: 67955 - protein, 11 aa, synthetic construct
  source 1..11: note = Seed: TIDYTEISFML
TYDYTEISFMF

SEQ ID NO: 67956 - protein, 10 aa, synthetic construct
  source 1..10: note = Seed: TFEEAALCTF
TYEEAALCTF

SEQ ID NO: 67957 - protein, 10 aa, synthetic construct
  source 1..10: note = Seed: TIEVNSFSGY
TYEVNSFSGW

SEQ ID NO: 67958 - protein, 9 aa, synthetic construct
  source 1..9: note = Seed: TFEYVSQPF
TYEYVSQPF

SEQ ID NO: 67959 - protein, 9 aa, synthetic construct
  source 1..9: note = Seed: TFEYVSQPF
TYEYVSQPI

SEQ ID NO: 67960 - protein, 9 aa, synthetic construct
  source 1..9: note = Seed: TFEYVSQPF
TYEYVSQPL

SEQ ID NO: 67961 - protein, 9 aa, synthetic construct
  source 1..9: note = Seed: TFEYVSQPF
TYEYVSQPM

SEQ ID NO: 67962 - protein, 9 aa, synthetic construct
  source 1..9: note = Seed: TFEYVSQPF
TYEYVSQPV

SEQ ID NO: 67963 - protein, 9 aa, synthetic construct
  source 1..9: note = Seed: TFEYVSQPF
TYEYVSQPW

SEQ ID NO: 67964 - protein, 9 aa, synthetic construct
  source 1..9: note = Seed: TFEYVSQPF
TYEYVSQPY

SEQ ID NO: 67965 - protein, 9 aa, synthetic construct
  source 1..9: note = Seed: TRFASVYAW
TYFASVYAF

SEQ ID NO: 67966 - protein, 9 aa, synthetic construct
  source 1..9: note = Seed: TFFIYNKIV
TYFIYNKIF

SEQ ID NO: 67967 - protein, 9 aa, synthetic construct
  source 1..9: note = Seed: TFFIYNKIV
TYFIYNKIL

SEQ ID NO: 67968 - protein, 9 aa, synthetic construct
  source 1..9: note = Seed: TFFIYNKIV
TYFIYNKIM

SEQ ID NO: 67969 - protein, 9 aa, synthetic construct
  source 1..9: note = Seed: TFFIYNKIV
TYFIYNKIY

SEQ ID NO: 67970 - protein, 10 aa, synthetic construct
  source 1..10: note = Seed: TWFSQRGGSY
TYFSQRGGSF

SEQ ID NO: 67971 - protein, 10 aa, synthetic construct
  source 1..10: note = Seed: TWFSQRGGSY
TYFSQRGGSL

SEQ ID NO: 67972 - protein, 10 aa, synthetic construct
  source 1..10: note = Seed: TWFSQRGGSY
TYFSQRGGSM

SEQ ID NO: 67973 - protein, 10 aa, synthetic construct
  source 1..10: note = Seed: TWFSQRGGSY
TYFSQRGGSY

SEQ ID NO: 67974 - protein, 9 aa, synthetic construct
  source 1..9: note = Seed: TCFSTQFAF
TYFSTQFAF

SEQ ID NO: 67975 - protein, 9 aa, synthetic construct
  source 1..9: note = Seed: TYFTQSRNL
TYFTQSRNF

SEQ ID NO: 67976 - protein, 9 aa, synthetic construct
  source 1..9: note = Seed: TYFTQSRNL
TYFTQSRNI

SEQ ID NO: 67977 - protein, 9 aa, synthetic construct
  source 1..9: note = Seed: TYFTQSRNL
TYFTQSRNM

SEQ ID NO: 67978 - protein, 9 aa, synthetic construct
  source 1..9: note = Seed: TYFTQSRNL
TYFTQSRNV

SEQ ID NO: 67979 - protein, 9 aa, synthetic construct
  source 1..9: note = Seed: TYFTQSRNL
TYFTQSRNW

SEQ ID NO: 67980 - protein, 9 aa, synthetic construct
  source 1..9: note = Seed: TYFTQSRNL
TYFTQSRNY

SEQ ID NO: 67981 - protein, 11 aa, synthetic construct
  source 1..11: note = Seed: TLGVYDYLVST
TYGVYDYLVSV

SEQ ID NO: 67982 - protein, 10 aa, synthetic construct
  source 1..10: note = Seed: TGHMLDMYSV
TYHMLDMYSL

SEQ ID NO: 67983 - protein, 9 aa, synthetic construct
  source 1..9: note = Seed: TAHSCNVNR
TYHSCNVNR

SEQ ID NO: 67984 - protein, 10 aa, synthetic construct
  source 1..10: note = Seed: TWICLLQFAY
TYICLLQFAY

SEQ ID NO: 67985 - protein, 9 aa, synthetic construct
  source 1..9: note = Seed: TTIKPVTYK
TYIKPVTYR

SEQ ID NO: 67986 - protein, 10 aa, synthetic construct
  source 1..10: note = Seed: TFISAARQGF
TYISAARQGF

SEQ ID NO: 67987 - protein, 10 aa, synthetic construct
  source 1..10: note = Seed: TFISAARQGF
TYISAARQGI

SEQ ID NO: 67988 - protein, 10 aa, synthetic construct
  source 1..10: note = Seed: TFISAARQGF
TYISAARQGM

SEQ ID NO: 67989 - protein, 10 aa, synthetic construct
  source 1..10: note = Seed: TFISAARQGF
TYISAARQGW

SEQ ID NO: 67990 - protein, 10 aa, synthetic construct
  source 1..10: note = Seed: TNIVTRCLNR
TYIVTRCLNR

SEQ ID NO: 67991 - protein, 9 aa, synthetic construct
  source 1..9: note = Seed: TVKPGNFNK
TYKPGNFNR

SEQ ID NO: 67992 - protein, 9 aa, synthetic construct
  source 1..9: note = Seed: TFKVSIWNL
TYKVSIWNF

SEQ ID NO: 67993 - protein, 9 aa, synthetic construct
  source 1..9: note = Seed: TFKVSIWNL
TYKVSIWNI

SEQ ID NO: 67994 - protein, 9 aa, synthetic construct
  source 1..9: note = Seed: TFKVSIWNL
TYKVSIWNL

SEQ ID NO: 67995 - protein, 9 aa, synthetic construct
  source 1..9: note = Seed: TFKVSIWNL
TYKVSIWNM

SEQ ID NO: 67996 - protein, 9 aa, synthetic construct
  source 1..9: note = Seed: TFKVSIWNL
TYKVSIWNV

SEQ ID NO: 67997 - protein, 9 aa, synthetic construct
  source 1..9: note = Seed: TFKVSIWNL
TYKVSIWNW

SEQ ID NO: 67998 - protein, 10 aa, synthetic construct
  source 1..10: note = Seed: TGLFKDCSKV
TYLFKDCSKV

SEQ ID NO: 67999 - protein, 10 aa, synthetic construct
  source 1..10: note = Seed: TFLLNKEMYL
TYLLNKEMYI

SEQ ID NO: 68000 - protein, 10 aa, synthetic construct
  source 1..10: note = Seed: TFLLNKEMYL
TYLLNKEMYL

SEQ ID NO: 68001 - protein, 10 aa, synthetic construct
  source 1..10: note = Seed: TFLLNKEMYL
TYLLNKEMYV

SEQ ID NO: 68002 - protein, 10 aa, synthetic construct
  source 1..10: note = Seed: TLLLQLCTFT
TYLLQLCTFL

SEQ ID NO: 68003 - protein, 10 aa, synthetic construct
  source 1..10: note = Seed: TLLLQLCTFT
TYLLQLCTFV

SEQ ID NO: 68004 - protein, 10 aa, synthetic construct
  source 1..10: note = Seed: TILTSLLVLV
TYLTSLLVLA

SEQ ID NO: 68005 - protein, 10 aa, synthetic construct
  source 1..10: note = Seed: TILTSLLVLV
TYLTSLLVLI

SEQ ID NO: 68006 - protein, 10 aa, synthetic construct
  source 1..10: note = Seed: TILTSLLVLV
TYLTSLLVLL

SEQ ID NO: 68007 - protein, 10 aa, synthetic construct
  source 1..10: note = Seed: TILTSLLVLV
TYLTSLLVLM

SEQ ID NO: 68008 - protein, 10 aa, synthetic construct
  source 1..10: note = Seed: TILTSLLVLV
TYLTSLLVLV

SEQ ID NO: 68009 - protein, 10 aa, synthetic construct
  source 1..10: note = Seed: TPLVPFWITI
TYLVPFWITV

SEQ ID NO: 68010 - protein, 10 aa, synthetic construct
  source 1..10: note = Seed: TQLYLGGMSY
TYLYLGGMSF

SEQ ID NO: 68011 - protein, 10 aa, synthetic construct
  source 1..10: note = Seed: TQLYLGGMSY
TYLYLGGMSK

SEQ ID NO: 68012 - protein, 10 aa, synthetic construct
  source 1..10: note = Seed: TQLYLGGMSY
TYLYLGGMSY

SEQ ID NO: 68013 - protein, 11 aa, synthetic construct
  source 1..11: note = Seed: TQLYLGGMSYY
TYLYLGGMSYY

SEQ ID NO: 68014 - protein, 10 aa, synthetic construct
  source 1..10: note = Seed: TLMIERFVSL
TYMIERFVSA

SEQ ID NO: 68015 - protein, 10 aa, synthetic construct
  source 1..10: note = Seed: TLMIERFVSL
TYMIERFVSF

SEQ ID NO: 68016 - protein, 10 aa, synthetic construct
  source 1..10: note = Seed: TLMIERFVSL
TYMIERFVSI

SEQ ID NO: 68017 - protein, 10 aa, synthetic construct
  source 1..10: note = Seed: TLMIERFVSL
TYMIERFVSL

SEQ ID NO: 68018 - protein, 11 aa, synthetic construct
  source 1..11: note = Seed: TLMIERFVSLA
TYMIERFVSLA

SEQ ID NO: 68019 - protein, 11 aa, synthetic construct
  source 1..11: note = Seed: TLMIERFVSLA
TYMIERFVSLI

SEQ ID NO: 68020 - protein, 11 aa, synthetic construct
  source 1..11: note = Seed: TLMIERFVSLA
TYMIERFVSLL

SEQ ID NO: 68021 - protein, 11 aa, synthetic construct
  source 1..11: note = Seed: TLMIERFVSLA
TYMIERFVSLV

SEQ ID NO: 68022 - protein, 10 aa, synthetic construct
  source 1..10: note = Seed: TLMIERFVSL
TYMIERFVSM

SEQ ID NO: 68023 - protein, 10 aa, synthetic construct
  source 1..10: note = Seed: TLMIERFVSL
TYMIERFVSV

SEQ ID NO: 68024 - protein, 10 aa, synthetic construct
  source 1..10: note = Seed: TLMIERFVSL
TYMIERFVSY

SEQ ID NO: 68025 - protein, 10 aa, synthetic construct
  source 1..10: note = Seed: TCMMCYKRNR
TYMMCYKRNR

SEQ ID NO: 68026 - protein, 9 aa, synthetic construct
  source 1..9: note = Seed: TTNGDFLHF
TYNGDFLHF

SEQ ID NO: 68027 - protein, 9 aa, synthetic construct
  source 1..9: note = Seed: TTNGDFLHF
TYNGDFLHI

SEQ ID NO: 68028 - protein, 9 aa, synthetic construct
  source 1..9: note = Seed: TTNGDFLHF
TYNGDFLHL

SEQ ID NO: 68029 - protein, 9 aa, synthetic construct
  source 1..9: note = Seed: TTNGDFLHF
TYNGDFLHM

SEQ ID NO: 68030 - protein, 9 aa, synthetic construct
  source 1..9: note = Seed: TTNGDFLHF
TYNGDFLHW

SEQ ID NO: 68031 - protein, 8 aa, synthetic construct
  source 1..8: note = Seed: TYNLWNTF
TYNLWNTM

SEQ ID NO: 68032 - protein, 9 aa, synthetic construct
  source 1..9: note = Seed: TVNVLAWLY
TYNVLAWLY

SEQ ID NO: 68033 - protein, 10 aa, synthetic construct
  source 1..10: note = Seed: TGNYQCGHYK
TYNYQCGHYK

SEQ ID NO: 68034 - protein, 10 aa, synthetic construct
  source 1..10: note = Seed: TGNYQCGHYK
TYNYQCGHYR

SEQ ID NO: 68035 - protein, 10 aa, synthetic construct
  source 1..10: note = Seed: TLPVNVAFEL
TYPVNVAFEF

SEQ ID NO: 68036 - protein, 11 aa, synthetic construct
  source 1..11: note = Seed: TLPVNVAFELW
TYPVNVAFELW

SEQ ID NO: 68037 - protein, 10 aa, synthetic construct
  source 1..10: note = Seed: TLPVNVAFEL
TYPVNVAFEM

SEQ ID NO: 68038 - protein, 10 aa, synthetic construct
  source 1..10: note = Seed: TLPVNVAFEL
TYPVNVAFEW

SEQ ID NO: 68039 - protein, 10 aa, synthetic construct
  source 1..10: note = Seed: TLPVNVAFEL
TYPVNVAFEY

SEQ ID NO: 68040 - protein, 10 aa, synthetic construct
  source 1..10: note = Seed: TLQAENVTGL
TYQAENVTGL

SEQ ID NO: 68041 - protein, 10 aa, synthetic construct
  source 1..10: note = Seed: TLQAENVTGL
TYQAENVTGV

SEQ ID NO: 68042 - protein, 10 aa, synthetic construct
  source 1..10: note = Seed: TIQITISSFK
TYQITISSFK

SEQ ID NO: 68043 - protein, 10 aa, synthetic construct
  source 1..10: note = Seed: TIQITISSFK
TYQITISSFR

SEQ ID NO: 68044 - protein, 11 aa, synthetic construct
  source 1..11: note = Seed: TRQVVNVVTTK
TYQVVNVVTTR

SEQ ID NO: 68045 - protein, 9 aa, synthetic construct
  source 1..9: note = Seed: TVREVLSDR
TYREVLSDR

SEQ ID NO: 68046 - protein, 9 aa, synthetic construct
  source 1..9: note = Seed: TTRQVVNVV
TYRQVVNVK

SEQ ID NO: 68047 - protein, 9 aa, synthetic construct
  source 1..9: note = Seed: TYRRLISMM
TYRRLISMF

SEQ ID NO: 68048 - protein, 9 aa, synthetic construct
  source 1..9: note = Seed: TYRRLISMM
TYRRLISMI

SEQ ID NO: 68049 - protein, 9 aa, synthetic construct
  source 1..9: note = Seed: TYRRLISMM
TYRRLISMK

SEQ ID NO: 68050 - protein, 9 aa, synthetic construct
  source 1..9: note = Seed: TYRRLISMM
TYRRLISML

SEQ ID NO: 68051 - protein, 9 aa, synthetic construct
  source 1..9: note = Seed: TYRRLISMM
TYRRLISMW

SEQ ID NO: 68052 - protein, 9 aa, synthetic construct
  source 1..9: note = Seed: TISLAGSYK
TYSLAGSYR

SEQ ID NO: 68053 - protein, 9 aa, synthetic construct
  source 1..9: note = Seed: TGSNVFQTR
TYSNVFQTR

SEQ ID NO: 68054 - protein, 10 aa, synthetic construct
  source 1..10: note = Seed: TQSRNLQEFK
TYSRNLQEFR

SEQ ID NO: 68055 - protein, 10 aa, synthetic construct
  source 1..10: note = Seed: TTTIKPVTYK
TYTIKPVTYK

SEQ ID NO: 68056 - protein, 10 aa, synthetic construct
  source 1..10: note = Seed: TTTIKPVTYK
TYTIKPVTYR

SEQ ID NO: 68057 - protein, 9 aa, synthetic construct
  source 1..9: note = Seed: TITQMNLKY
TYTQMNLKY

SEQ ID NO: 68058 - protein, 10 aa, synthetic construct
  source 1..10: note = Seed: TITVNVLAWL
TYTVNVLAWA

SEQ ID NO: 68059 - protein, 10 aa, synthetic construct
  source 1..10: note = Seed: TITVNVLAWL
TYTVNVLAWI

SEQ ID NO: 68060 - protein, 10 aa, synthetic construct
  source 1..10: note = Seed: TITVNVLAWL
TYTVNVLAWV

SEQ ID NO: 68061 - protein, 10 aa, synthetic construct
  source 1..10: note = Seed: TNVLEGSVAY
TYVLEGSVAY

SEQ ID NO: 68062 - protein, 10 aa, synthetic construct
  source 1..10: note = Seed: TLVSDIDITF
TYVSDIDITV

SEQ ID NO: 68063 - protein, 10 aa, synthetic construct
  source 1..10: note = Seed: TEVVGDIILK
TYVVGDIILK

SEQ ID NO: 68064 - protein, 10 aa, synthetic construct
  source 1..10: note = Seed: TEVVGDIILK
TYVVGDIILR

SEQ ID NO: 68065 - protein, 10 aa, synthetic construct
  source 1..10: note = Seed: TPVYSFLPGV
TYVYSFLPGI

SEQ ID NO: 68066 - protein, 10 aa, synthetic construct
  source 1..10: note = Seed: TPVYSFLPGV
TYVYSFLPGV

SEQ ID NO: 68067 - protein, 10 aa, synthetic construct
  source 1..10: note = Seed: TAYANSVFNI
TYYANSVFNF

SEQ ID NO: 68068 - protein, 10 aa, synthetic construct
  source 1..10: note = Seed: TAYANSVFNI
TYYANSVFNI

SEQ ID NO: 68069 - protein, 10 aa, synthetic construct
  source 1..10: note = Seed: TAYANSVFNI
TYYANSVFNL

SEQ ID NO: 68070 - protein, 10 aa, synthetic construct
  source 1..10: note = Seed: TAYANSVFNI
TYYANSVFNM

SEQ ID NO: 68071 - protein, 10 aa, synthetic construct
  source 1..10: note = Seed: TAYANSVFNI
TYYANSVFNW

SEQ ID NO: 68072 - protein, 10 aa, synthetic construct
  source 1..10: note = Seed: TLYCIDGALL
TYYCIDGALF

SEQ ID NO: 68073 - protein, 10 aa, synthetic construct
  source 1..10: note = Seed: TLYCIDGALL
TYYCIDGALL

SEQ ID NO: 68074 - protein, 10 aa, synthetic construct
  source 1..10: note = Seed: TLYCIDGALL
TYYCIDGALW

SEQ ID NO: 68075 - protein, 10 aa, synthetic construct
  source 1..10: note = Seed: TFYLTNDVSF
TYYLTNDVSF

SEQ ID NO: 68076 - protein, 11 aa, synthetic construct
  source 1..11: note = Seed: TFYLTNDVSFL
TYYLTNDVSFF

SEQ ID NO: 68077 - protein, 11 aa, synthetic construct
  source 1..11: note = Seed: TFYLTNDVSFL
TYYLTNDVSFW

SEQ ID NO: 68078 - protein, 10 aa, synthetic construct
  source 1..10: note = Seed: TFYLTNDVSF
TYYLTNDVSI

SEQ ID NO: 68079 - protein, 10 aa, synthetic construct
  source 1..10: note = Seed: TFYLTNDVSF
TYYLTNDVSL

SEQ ID NO: 68080 - protein, 10 aa, synthetic construct
  source 1..10: note = Seed: TFYLTNDVSF
TYYLTNDVSM

SEQ ID NO: 68081 - protein, 10 aa, synthetic construct
  source 1..10: note = Seed: TFYLTNDVSF
TYYLTNDVSW

SEQ ID NO: 68082 - protein, 10 aa, synthetic construct
  source 1..10: note = Seed: TFYLTNDVSF
TYYLTNDVSY

SEQ ID NO: 68083 - protein, 10 aa, synthetic construct
  source 1..10: note = Seed: TKYTMADLVY
TYYTMADLVF

SEQ ID NO: 68084 - protein, 10 aa, synthetic construct
  source 1..10: note = Seed: TKYTMADLVY
TYYTMADLVL

SEQ ID NO: 68085 - protein, 10 aa, synthetic construct
  source 1..10: note = Seed: TKYTMADLVY
TYYTMADLVM

SEQ ID NO: 68086 - protein, 10 aa, synthetic construct
  source 1..10: note = Seed: TKYTMADLVY
TYYTMADLVY

SEQ ID NO: 68087 - protein, 11 aa, synthetic construct
  source 1..11: note = Seed: TKYTMADLVYA
TYYTMADLVYV

SEQ ID NO: 68088 - protein, 9 aa, synthetic construct
  source 1..9: note = Seed: VLAAECTIF
VAAAECTIF

SEQ ID NO: 68089 - protein, 10 aa, synthetic construct
  source 1..10: note = Seed: VLAAECTIFK
VAAAECTIFK

SEQ ID NO: 68090 - protein, 10 aa, synthetic construct
  source 1..10: note = Seed: VLAAECTIFK
VAAAECTIFR

SEQ ID NO: 68091 - protein, 9 aa, synthetic construct
  source 1..9: note = Seed: VLAAECTIF
VAAAECTIY

SEQ ID NO: 68092 - protein, 9 aa, synthetic construct
  source 1..9: note = Seed: VTANVNALL
VAANVNALF

SEQ ID NO: 68093 - protein, 9 aa, synthetic construct
  source 1..9: note = Seed: VTANVNALL
VAANVNALL

SEQ ID NO: 68094 - protein, 9 aa, synthetic construct
  source 1..9: note = Seed: VTANVNALL
VAANVNALM

SEQ ID NO: 68095 - protein, 9 aa, synthetic construct
  source 1..9: note = Seed: VTANVNALL
VAANVNALV

SEQ ID NO: 68096 - protein, 9 aa, synthetic construct
  source 1..9: note = Seed: VTANVNALL
VAANVNALW

SEQ ID NO: 68097 - protein, 9 aa, synthetic construct
  source 1..9: note = Seed: VTANVNALL
VAANVNALY

SEQ ID NO: 68098 - protein, 10 aa, synthetic construct
  source 1..10: note = Seed: VFAQVKQIYK
VAAQVKQIYK

SEQ ID NO: 68099 - protein, 10 aa, synthetic construct
  source 1..10: note = Seed: VFAQVKQIYK
VAAQVKQIYR

SEQ ID NO: 68100 - protein, 9 aa, synthetic construct
  source 1..9: note = Seed: VLARKHTTC
VAARKHTTL

SEQ ID NO: 68101 - protein, 9 aa, synthetic construct
  source 1..9: note = Seed: VNASSSEAF
VAASSSEAF

SEQ ID NO: 68102 - protein, 9 aa, synthetic construct
  source 1..9: note = Seed: VNASSSEAF
VAASSSEAM

SEQ ID NO: 68103 - protein, 9 aa, synthetic construct
  source 1..9: note = Seed: VNASSSEAF
VAASSSEAY

SEQ ID NO: 68104 - protein, 9 aa, synthetic construct
  source 1..9: note = Seed: VLAWLYAAV
VAAWLYAAI

SEQ ID NO: 68105 - protein, 9 aa, synthetic construct
  source 1..9: note = Seed: VLAWLYAAV
VAAWLYAAV

SEQ ID NO: 68106 - protein, 9 aa, synthetic construct
  source 1..9: note = Seed: VMAYITGGV
VAAYITGGI

SEQ ID NO: 68107 - protein, 9 aa, synthetic construct
  source 1..9: note = Seed: VMAYITGGV
VAAYITGGL

SEQ ID NO: 68108 - protein, 9 aa, synthetic construct
  source 1..9: note = Seed: VMAYITGGV
VAAYITGGV

SEQ ID NO: 68109 - protein, 9 aa, synthetic construct
  source 1..9: note = Seed: VVDADSKIV
VADADSKIF

SEQ ID NO: 68110 - protein, 9 aa, synthetic construct
  source 1..9: note = Seed: VVDADSKIV
VADADSKIL

SEQ ID NO: 68111 - protein, 9 aa, synthetic construct
  source 1..9: note = Seed: VSDIDITFL
VADIDITFF

SEQ ID NO: 68112 - protein, 9 aa, synthetic construct
  source 1..9: note = Seed: VSDIDITFL
VADIDITFI

SEQ ID NO: 68113 - protein, 9 aa, synthetic construct
  source 1..9: note = Seed: VSDIDITFL
VADIDITFL

SEQ ID NO: 68114 - protein, 10 aa, synthetic construct
  source 1..10: note = Seed: VSDIDITFLK
VADIDITFLK

SEQ ID NO: 68115 - protein, 10 aa, synthetic construct
  source 1..10: note = Seed: VSDIDITFLK
VADIDITFLR

SEQ ID NO: 68116 - protein, 9 aa, synthetic construct
  source 1..9: note = Seed: VSDIDITFL
VADIDITFM

SEQ ID NO: 68117 - protein, 9 aa, synthetic construct
  source 1..9: note = Seed: VSDIDITFL
VADIDITFV

SEQ ID NO: 68118 - protein, 9 aa, synthetic construct
  source 1..9: note = Seed: VSDIDYVPL
VADIDYVPL

SEQ ID NO: 68119 - protein, 9 aa, synthetic construct
  source 1..9: note = Seed: VSDIDYVPL
VADIDYVPM

SEQ ID NO: 68120 - protein, 9 aa, synthetic construct
  source 1..9: note = Seed: VVDKYFDCY
VADKYFDCY

SEQ ID NO: 68121 - protein, 9 aa, synthetic construct
  source 1..9: note = Seed: VVDSYYSLL
VADSYYSLF

SEQ ID NO: 68122 - protein, 9 aa, synthetic construct
  source 1..9: note = Seed: VVDSYYSLL
VADSYYSLI

SEQ ID NO: 68123 - protein, 9 aa, synthetic construct
  source 1..9: note = Seed: VVDSYYSLL
VADSYYSLL

SEQ ID NO: 68124 - protein, 10 aa, synthetic construct
  source 1..10: note = Seed: VVDSYYSLLM
VADSYYSLLL

SEQ ID NO: 68125 - protein, 10 aa, synthetic construct
  source 1..10: note = Seed: VVDSYYSLLM
VADSYYSLLY

SEQ ID NO: 68126 - protein, 9 aa, synthetic construct
  source 1..9: note = Seed: VVDSYYSLL
VADSYYSLM

SEQ ID NO: 68127 - protein, 9 aa, synthetic construct
  source 1..9: note = Seed: VVDSYYSLL
VADSYYSLV

SEQ ID NO: 68128 - protein, 11 aa, synthetic construct
  source 1..11: note = Seed: VYDYLVSTQEF
VADYLVSTQEF

SEQ ID NO: 68129 - protein, 11 aa, synthetic construct
  source 1..11: note = Seed: VYDYLVSTQEF
VADYLVSTQEW

SEQ ID NO: 68130 - protein, 9 aa, synthetic construct
  source 1..9: note = Seed: VTFFIYNKI
VAFFIYNKV

SEQ ID NO: 68131 - protein, 9 aa, synthetic construct
  source 1..9: note = Seed: VTFFIYNKI
VAFFIYNKW

SEQ ID NO: 68132 - protein, 9 aa, synthetic construct
  source 1..9: note = Seed: VTFFIYNKI
VAFFIYNKY

SEQ ID NO: 68133 - protein, 9 aa, synthetic construct
  source 1..9: note = Seed: VTFGDDTVI
VAFGDDTVF

SEQ ID NO: 68134 - protein, 9 aa, synthetic construct
  source 1..9: note = Seed: VTFGDDTVI
VAFGDDTVL

SEQ ID NO: 68135 - protein, 9 aa, synthetic construct
  source 1..9: note = Seed: VTFGDDTVI
VAFGDDTVM

SEQ ID NO: 68136 - protein, 9 aa, synthetic construct
  source 1..9: note = Seed: VTFGDDTVI
VAFGDDTVW

SEQ ID NO: 68137 - protein, 9 aa, synthetic construct
  source 1..9: note = Seed: VTFGDDTVI
VAFGDDTVY

SEQ ID NO: 68138 - protein, 9 aa, synthetic construct
  source 1..9: note = Seed: VHFISNSWL
VAFISNSWF

SEQ ID NO: 68139 - protein, 9 aa, synthetic construct
  source 1..9: note = Seed: VHFISNSWL
VAFISNSWY

SEQ ID NO: 68140 - protein, 9 aa, synthetic construct
  source 1..9: note = Seed: VSFLAHIQW
VAFLAHIQF

SEQ ID NO: 68141 - protein, 9 aa, synthetic construct
  source 1..9: note = Seed: VSFLAHIQW
VAFLAHIQM

SEQ ID NO: 68142 - protein, 9 aa, synthetic construct
  source 1..9: note = Seed: VSFLAHIQW
VAFLAHIQW

SEQ ID NO: 68143 - protein, 11 aa, synthetic construct
  source 1..11: note = Seed: VSFLAHIQWMV
VAFLAHIQWMV

SEQ ID NO: 68144 - protein, 10 aa, synthetic construct
  source 1..10: note = Seed: VSFLAHIQWM
VAFLAHIQWW

SEQ ID NO: 68145 - protein, 9 aa, synthetic construct
  source 1..9: note = Seed: VSFLAHIQW
VAFLAHIQY

SEQ ID NO: 68146 - protein, 9 aa, synthetic construct
  source 1..9: note = Seed: VVFLHVTYV
VAFLHVTYA

SEQ ID NO: 68147 - protein, 9 aa, synthetic construct
  source 1..9: note = Seed: VVFLHVTYV
VAFLHVTYF

SEQ ID NO: 68148 - protein, 9 aa, synthetic construct
  source 1..9: note = Seed: VVFLHVTYV
VAFLHVTYI

SEQ ID NO: 68149 - protein, 9 aa, synthetic construct
  source 1..9: note = Seed: VVFLHVTYV
VAFLHVTYK

SEQ ID NO: 68150 - protein, 9 aa, synthetic construct
  source 1..9: note = Seed: VVFLHVTYV
VAFLHVTYL

SEQ ID NO: 68151 - protein, 9 aa, synthetic construct
  source 1..9: note = Seed: VVFLHVTYV
VAFLHVTYM

SEQ ID NO: 68152 - protein, 9 aa, synthetic construct
  source 1..9: note = Seed: VVFLHVTYV
VAFLHVTYV

SEQ ID NO: 68153 - protein, 9 aa, synthetic construct
  source 1..9: note = Seed: VVFLHVTYV
VAFLHVTYY

SEQ ID NO: 68154 - protein, 10 aa, synthetic construct
  source 1..10: note = Seed: VEFLRDGWEI
VAFLRDGWEF

SEQ ID NO: 68155 - protein, 11 aa, synthetic construct
  source 1..11: note = Seed: VVFNGVSFSTF
VAFNGVSFSTF

SEQ ID NO: 68156 - protein, 11 aa, synthetic construct
  source 1..11: note = Seed: VVFNGVSFSTF
VAFNGVSFSTW

SEQ ID NO: 68157 - protein, 11 aa, synthetic construct
  source 1..11: note = Seed: VVFNGVSFSTF
VAFNGVSFSTY

SEQ ID NO: 68158 - protein, 10 aa, synthetic construct
  source 1..10: note = Seed: VVFNGVSFST
VAFNGVSFSV

SEQ ID NO: 68159 - protein, 8 aa, synthetic construct
  source 1..8: note = Seed: VVFNGVSF
VAFNGVSY

SEQ ID NO: 68160 - protein, 11 aa, synthetic construct
  source 1..11: note = Seed: VSFSTFEEAAL
VAFSTFEEAAW

SEQ ID NO: 68161 - protein, 10 aa, synthetic construct
  source 1..10: note = Seed: VVFVLWAHGF
VAFVLWAHGW

SEQ ID NO: 68162 - protein, 9 aa, synthetic construct
  source 1..9: note = Seed: VPFVVSTGY
VAFVVSTGF

SEQ ID NO: 68163 - protein, 9 aa, synthetic construct
  source 1..9: note = Seed: VPFVVSTGY
VAFVVSTGW

SEQ ID NO: 68164 - protein, 9 aa, synthetic construct
  source 1..9: note = Seed: VPFVVSTGY
VAFVVSTGY

SEQ ID NO: 68165 - protein, 9 aa, synthetic construct
  source 1..9: note = Seed: VIGFLFLTW
VAGFLFLTW

SEQ ID NO: 68166 - protein, 9 aa, synthetic construct
  source 1..9: note = Seed: VIGFLFLTW
VAGFLFLTY

SEQ ID NO: 68167 - protein, 9 aa, synthetic construct
  source 1..9: note = Seed: VGGNYNYLY
VAGNYNYLY

SEQ ID NO: 68168 - protein, 10 aa, synthetic construct
  source 1..10: note = Seed: VGGNYNYLYR
VAGNYNYLYR

SEQ ID NO: 68169 - protein, 9 aa, synthetic construct
  source 1..9: note = Seed: VMHANYIFW
VAHANYIFF

SEQ ID NO: 68170 - protein, 9 aa, synthetic construct
  source 1..9: note = Seed: VMHANYIFW
VAHANYIFW

SEQ ID NO: 68171 - protein, 9 aa, synthetic construct
  source 1..9: note = Seed: VMHANYIFW
VAHANYIFY

SEQ ID NO: 68172 - protein, 9 aa, synthetic construct
  source 1..9: note = Seed: VLHDIGNPK
VAHDIGNPR

SEQ ID NO: 68173 - protein, 9 aa, synthetic construct
  source 1..9: note = Seed: VTHSKGLYR
VAHSKGLYK

SEQ ID NO: 68174 - protein, 9 aa, synthetic construct
  source 1..9: note = Seed: VTHSKGLYR
VAHSKGLYR

SEQ ID NO: 68175 - protein, 10 aa, synthetic construct
  source 1..10: note = Seed: VLHSYFTSDY
VAHSYFTSDF

SEQ ID NO: 68176 - protein, 10 aa, synthetic construct
  source 1..10: note = Seed: VLHSYFTSDY
VAHSYFTSDY

SEQ ID NO: 68177 - protein, 11 aa, synthetic construct
  source 1..11: note = Seed: VLHSYFTSDYY
VAHSYFTSDYW

SEQ ID NO: 68178 - protein, 9 aa, synthetic construct
  source 1..9: note = Seed: VEHVTFFIY
VAHVTFFIF

SEQ ID NO: 68179 - protein, 9 aa, synthetic construct
  source 1..9: note = Seed: VEHVTFFIY
VAHVTFFIY

SEQ ID NO: 68180 - protein, 9 aa, synthetic construct
  source 1..9: note = Seed: VTIAEILLI
VAIAEILLF

SEQ ID NO: 68181 - protein, 9 aa, synthetic construct
  source 1..9: note = Seed: VTIAEILLI
VAIAEILLI

SEQ ID NO: 68182 - protein, 10 aa, synthetic construct
  source 1..10: note = Seed: VTIAEILLII
VAIAEILLIF

SEQ ID NO: 68183 - protein, 10 aa, synthetic construct
  source 1..10: note = Seed: VTIAEILLII
VAIAEILLIW

SEQ ID NO: 68184 - protein, 10 aa, synthetic construct
  source 1..10: note = Seed: VTIAEILLII
VAIAEILLIY

SEQ ID NO: 68185 - protein, 9 aa, synthetic construct
  source 1..9: note = Seed: VTIAEILLI
VAIAEILLL

SEQ ID NO: 68186 - protein, 9 aa, synthetic construct
  source 1..9: note = Seed: VTIAEILLI
VAIAEILLM

SEQ ID NO: 68187 - protein, 9 aa, synthetic construct
  source 1..9: note = Seed: VTIAEILLI
VAIAEILLV

SEQ ID NO: 68188 - protein, 9 aa, synthetic construct
  source 1..9: note = Seed: VTIAEILLI
VAIAEILLW

SEQ ID NO: 68189 - protein, 9 aa, synthetic construct
  source 1..9: note = Seed: VTIAEILLI
VAIAEILLY

SEQ ID NO: 68190 - protein, 10 aa, synthetic construct
  source 1..10: note = Seed: VSICSTMTNR
VAICSTMTNK

SEQ ID NO: 68191 - protein, 10 aa, synthetic construct
  source 1..10: note = Seed: VSICSTMTNR
VAICSTMTNR

SEQ ID NO: 68192 - protein, 9 aa, synthetic construct
  source 1..9: note = Seed: VQIDRLITG
VAIDRLITF

SEQ ID NO: 68193 - protein, 9 aa, synthetic construct
  source 1..9: note = Seed: VQIDRLITG
VAIDRLITY

SEQ ID NO: 68194 - protein, 9 aa, synthetic construct
  source 1..9: note = Seed: VSIINNTVY
VAIINNTVF

SEQ ID NO: 68195 - protein, 9 aa, synthetic construct
  source 1..9: note = Seed: VSIINNTVY
VAIINNTVL

SEQ ID NO: 68196 - protein, 9 aa, synthetic construct
  source 1..9: note = Seed: VSIINNTVY
VAIINNTVM

SEQ ID NO: 68197 - protein, 9 aa, synthetic construct
  source 1..9: note = Seed: VSIINNTVY
VAIINNTVV

SEQ ID NO: 68198 - protein, 9 aa, synthetic construct
  source 1..9: note = Seed: VSIINNTVY
VAIINNTVW

SEQ ID NO: 68199 - protein, 9 aa, synthetic construct
  source 1..9: note = Seed: VSIINNTVY
VAIINNTVY

SEQ ID NO: 68200 - protein, 11 aa, synthetic construct
  source 1..11: note = Seed: VAIKITEHSWN
VAIKITEHSWW

SEQ ID NO: 68201 - protein, 10 aa, synthetic construct
  source 1..10: note = Seed: VNINIVGDFK
VAINIVGDFK

SEQ ID NO: 68202 - protein, 10 aa, synthetic construct
  source 1..10: note = Seed: VNINIVGDFK
VAINIVGDFR

SEQ ID NO: 68203 - protein, 9 aa, synthetic construct
  source 1..9: note = Seed: VVIPDYNTY
VAIPDYNTF

SEQ ID NO: 68204 - protein, 9 aa, synthetic construct
  source 1..9: note = Seed: VVIPDYNTY
VAIPDYNTI

SEQ ID NO: 68205 - protein, 9 aa, synthetic construct
  source 1..9: note = Seed: VVIPDYNTY
VAIPDYNTL

SEQ ID NO: 68206 - protein, 9 aa, synthetic construct
  source 1..9: note = Seed: VVIPDYNTY
VAIPDYNTM

SEQ ID NO: 68207 - protein, 9 aa, synthetic construct
  source 1..9: note = Seed: VVIPDYNTY
VAIPDYNTV

SEQ ID NO: 68208 - protein, 9 aa, synthetic construct
  source 1..9: note = Seed: VVIPDYNTY
VAIPDYNTW

SEQ ID NO: 68209 - protein, 9 aa, synthetic construct
  source 1..9: note = Seed: VVIPDYNTY
VAIPDYNTY

SEQ ID NO: 68210 - protein, 10 aa, synthetic construct
  source 1..10: note = Seed: VVIPDYNTYK
VAIPDYNTYK

SEQ ID NO: 68211 - protein, 10 aa, synthetic construct
  source 1..10: note = Seed: VVIPDYNTYK
VAIPDYNTYR

SEQ ID NO: 68212 - protein, 10 aa, synthetic construct
  source 1..10: note = Seed: VFKNIDGYFK
VAKNIDGYFR

SEQ ID NO: 68213 - protein, 9 aa, synthetic construct
  source 1..9: note = Seed: VAKNLNESL
VAKNLNESM

SEQ ID NO: 68214 - protein, 9 aa, synthetic construct
  source 1..9: note = Seed: VVKRHTFSN
VAKRHTFSA

SEQ ID NO: 68215 - protein, 9 aa, synthetic construct
  source 1..9: note = Seed: VVKRHTFSN
VAKRHTFSK

SEQ ID NO: 68216 - protein, 10 aa, synthetic construct
  source 1..10: note = Seed: VVKRHTFSNY
VAKRHTFSNK

SEQ ID NO: 68217 - protein, 10 aa, synthetic construct
  source 1..10: note = Seed: VAKYTQLCQY
VAKYTQLCQW

SEQ ID NO: 68218 - protein, 11 aa, synthetic construct
  source 1..11: note = Seed: VAKYTQLCQYL
VAKYTQLCQYF

SEQ ID NO: 68219 - protein, 10 aa, synthetic construct
  source 1..10: note = Seed: VELFENKTTL
VALFENKTTV

SEQ ID NO: 68220 - protein, 10 aa, synthetic construct
  source 1..10: note = Seed: VQLHNDILLA
VALHNDILLV

SEQ ID NO: 68221 - protein, 10 aa, synthetic construct
  source 1..10: note = Seed: VNLHSSRLSF
VALHSSRLSF

SEQ ID NO: 68222 - protein, 10 aa, synthetic construct
  source 1..10: note = Seed: VNLHSSRLSF
VALHSSRLSY

SEQ ID NO: 68223 - protein, 10 aa, synthetic construct
  source 1..10: note = Seed: VNLKQLPFFY
VALKQLPFFY

SEQ ID NO: 68224 - protein, 10 aa, synthetic construct
  source 1..10: note = Seed: VVLLSVLQQL
VALLSVLQQI

SEQ ID NO: 68225 - protein, 10 aa, synthetic construct
  source 1..10: note = Seed: VVLLSVLQQL
VALLSVLQQL

SEQ ID NO: 68226 - protein, 10 aa, synthetic construct
  source 1..10: note = Seed: VVLLSVLQQL
VALLSVLQQV

SEQ ID NO: 68227 - protein, 9 aa, synthetic construct
  source 1..9: note = Seed: VGLMWLSYF
VALMWLSYF

SEQ ID NO: 68228 - protein, 10 aa, synthetic construct
  source 1..10: note = Seed: VGLMWLSYFI
VALMWLSYFA

SEQ ID NO: 68229 - protein, 10 aa, synthetic construct
  source 1..10: note = Seed: VGLMWLSYFI
VALMWLSYFI

SEQ ID NO: 68230 - protein, 10 aa, synthetic construct
  source 1..10: note = Seed: VGLMWLSYFI
VALMWLSYFL

SEQ ID NO: 68231 - protein, 10 aa, synthetic construct
  source 1..10: note = Seed: VGLMWLSYFI
VALMWLSYFM

SEQ ID NO: 68232 - protein, 10 aa, synthetic construct
  source 1..10: note = Seed: VGLMWLSYFI
VALMWLSYFV

SEQ ID NO: 68233 - protein, 9 aa, synthetic construct
  source 1..9: note = Seed: VGLMWLSYF
VALMWLSYM

SEQ ID NO: 68234 - protein, 9 aa, synthetic construct
  source 1..9: note = Seed: VGLMWLSYF
VALMWLSYW

SEQ ID NO: 68235 - protein, 9 aa, synthetic construct
  source 1..9: note = Seed: VGLMWLSYF
VALMWLSYY

SEQ ID NO: 68236 - protein, 9 aa, synthetic construct
  source 1..9: note = Seed: VVLSFELLH
VALSFELLK

SEQ ID NO: 68237 - protein, 9 aa, synthetic construct
  source 1..9: note = Seed: VVLSFELLH
VALSFELLY

SEQ ID NO: 68238 - protein, 9 aa, synthetic construct
  source 1..9: note = Seed: VLLSVLQQL
VALSVLQQV

SEQ ID NO: 68239 - protein, 10 aa, synthetic construct
  source 1..10: note = Seed: VELVAELEGI
VALVAELEGV

SEQ ID NO: 68240 - protein, 10 aa, synthetic construct
  source 1..10: note = Seed: VVMAYITGGV
VAMAYITGGI

SEQ ID NO: 68241 - protein, 10 aa, synthetic construct
  source 1..10: note = Seed: VVMAYITGGV
VAMAYITGGL

SEQ ID NO: 68242 - protein, 10 aa, synthetic construct
  source 1..10: note = Seed: VVMAYITGGV
VAMAYITGGV

SEQ ID NO: 68243 - protein, 10 aa, synthetic construct
  source 1..10: note = Seed: VRMYIFFASF
VAMYIFFASF

SEQ ID NO: 68244 - protein, 10 aa, synthetic construct
  source 1..10: note = Seed: VRMYIFFASF
VAMYIFFASY

SEQ ID NO: 68245 - protein, 9 aa, synthetic construct
  source 1..9: note = Seed: VLNDILSRL
VANDILSRL

SEQ ID NO: 68246 - protein, 10 aa, synthetic construct
  source 1..10: note = Seed: VFNGVSFSTF
VANGVSFSTY

SEQ ID NO: 68247 - protein, 9 aa, synthetic construct
  source 1..9: note = Seed: VVNQNAQAL
VANQNAQAF

SEQ ID NO: 68248 - protein, 9 aa, synthetic construct
  source 1..9: note = Seed: VVNQNAQAL
VANQNAQAI

SEQ ID NO: 68249 - protein, 9 aa, synthetic construct
  source 1..9: note = Seed: VVNQNAQAL
VANQNAQAL

SEQ ID NO: 68250 - protein, 9 aa, synthetic construct
  source 1..9: note = Seed: VVNQNAQAL
VANQNAQAM

SEQ ID NO: 68251 - protein, 9 aa, synthetic construct
  source 1..9: note = Seed: VVNQNAQAL
VANQNAQAV

SEQ ID NO: 68252 - protein, 9 aa, synthetic construct
  source 1..9: note = Seed: VVNQNAQAL
VANQNAQAY

SEQ ID NO: 68253 - protein, 10 aa, synthetic construct
  source 1..10: note = Seed: VLPFNDGVYF
VAPFNDGVYW

SEQ ID NO: 68254 - protein, 10 aa, synthetic construct
  source 1..10: note = Seed: VLPFNDGVYF
VAPFNDGVYY

SEQ ID NO: 68255 - protein, 9 aa, synthetic construct
  source 1..9: note = Seed: VRQCSGVTF
VAQCSGVTF

SEQ ID NO: 68256 - protein, 9 aa, synthetic construct
  source 1..9: note = Seed: VRQCSGVTF
VAQCSGVTM

SEQ ID NO: 68257 - protein, 9 aa, synthetic construct
  source 1..9: note = Seed: VRQCSGVTF
VAQCSGVTY

SEQ ID NO: 68258 - protein, 10 aa, synthetic construct
  source 1..10: note = Seed: VLQLPQGTTL
VAQLPQGTTF

SEQ ID NO: 68259 - protein, 10 aa, synthetic construct
  source 1..10: note = Seed: VLQLPQGTTL
VAQLPQGTTM

SEQ ID NO: 68260 - protein, 10 aa, synthetic construct
  source 1..10: note = Seed: VLQLPQGTTL
VAQLPQGTTY

SEQ ID NO: 68261 - protein, 9 aa, synthetic construct
  source 1..9: note = Seed: VTRCLNRVC
VARCLNRVK

SEQ ID NO: 68262 - protein, 9 aa, synthetic construct
  source 1..9: note = Seed: VARDLSLQF
VARDLSLQI

SEQ ID NO: 68263 - protein, 9 aa, synthetic construct
  source 1..9: note = Seed: VARDLSLQF
VARDLSLQL

SEQ ID NO: 68264 - protein, 9 aa, synthetic construct
  source 1..9: note = Seed: VARDLSLQF
VARDLSLQM

SEQ ID NO: 68265 - protein, 9 aa, synthetic construct
  source 1..9: note = Seed: VARDLSLQF
VARDLSLQV

SEQ ID NO: 68266 - protein, 9 aa, synthetic construct
  source 1..9: note = Seed: VARDLSLQF
VARDLSLQW

SEQ ID NO: 68267 - protein, 9 aa, synthetic construct
  source 1..9: note = Seed: VARDLSLQF
VARDLSLQY

SEQ ID NO: 68268 - protein, 9 aa, synthetic construct
  source 1..9: note = Seed: VTRELMREL
VARELMREF

SEQ ID NO: 68269 - protein, 9 aa, synthetic construct
  source 1..9: note = Seed: VTRELMREL
VARELMREI

SEQ ID NO: 68270 - protein, 9 aa, synthetic construct
  source 1..9: note = Seed: VTRELMREL
VARELMREL

SEQ ID NO: 68271 - protein, 9 aa, synthetic construct
  source 1..9: note = Seed: VTRELMREL
VARELMREM

SEQ ID NO: 68272 - protein, 9 aa, synthetic construct
  source 1..9: note = Seed: VTRELMREL
VARELMREV

SEQ ID NO: 68273 - protein, 9 aa, synthetic construct
  source 1..9: note = Seed: VTRELMREL
VARELMREW

SEQ ID NO: 68274 - protein, 9 aa, synthetic construct
  source 1..9: note = Seed: VTRELMREL
VARELMREY

SEQ ID NO: 68275 - protein, 10 aa, synthetic construct
  source 1..10: note = Seed: VNRFNVAITR
VARFNVAITR

SEQ ID NO: 68276 - protein, 9 aa, synthetic construct
  source 1..9: note = Seed: VYRGTTTYK
VARGTTTYA

SEQ ID NO: 68277 - protein, 9 aa, synthetic construct
  source 1..9: note = Seed: VYRGTTTYK
VARGTTTYK

SEQ ID NO: 68278 - protein, 10 aa, synthetic construct
  source 1..10: note = Seed: VYRGTTTYKL
VARGTTTYKK

SEQ ID NO: 68279 - protein, 9 aa, synthetic construct
  source 1..9: note = Seed: VYRGTTTYK
VARGTTTYR

SEQ ID NO: 68280 - protein, 9 aa, synthetic construct
  source 1..9: note = Seed: VKRHTFSNY
VARHTFSNF

SEQ ID NO: 68281 - protein, 9 aa, synthetic construct
  source 1..9: note = Seed: VKRHTFSNY
VARHTFSNY

SEQ ID NO: 68282 - protein, 10 aa, synthetic construct
  source 1..10: note = Seed: VVRQCSGVTF
VARQCSGVTF

SEQ ID NO: 68283 - protein, 10 aa, synthetic construct
  source 1..10: note = Seed: VVRQCSGVTF
VARQCSGVTW

SEQ ID NO: 68284 - protein, 10 aa, synthetic construct
  source 1..10: note = Seed: VVRQCSGVTF
VARQCSGVTY

SEQ ID NO: 68285 - protein, 11 aa, synthetic construct
  source 1..11: note = Seed: VKRTIKGTHHW
VARTIKGTHHW

SEQ ID NO: 68286 - protein, 9 aa, synthetic construct
  source 1..9: note = Seed: VTSAMQTML
VASAMQTMF

SEQ ID NO: 68287 - protein, 9 aa, synthetic construct
  source 1..9: note = Seed: VTSAMQTML
VASAMQTML

SEQ ID NO: 68288 - protein, 10 aa, synthetic construct
  source 1..10: note = Seed: VTSAMQTMLF
VASAMQTMLF

SEQ ID NO: 68289 - protein, 10 aa, synthetic construct
  source 1..10: note = Seed: VTSAMQTMLF
VASAMQTMLM

SEQ ID NO: 68290 - protein, 10 aa, synthetic construct
  source 1..10: note = Seed: VTSAMQTMLF
VASAMQTMLW

SEQ ID NO: 68291 - protein, 10 aa, synthetic construct
  source 1..10: note = Seed: VTSAMQTMLF
VASAMQTMLY

SEQ ID NO: 68292 - protein, 9 aa, synthetic construct
  source 1..9: note = Seed: VTSAMQTML
VASAMQTMM

SEQ ID NO: 68293 - protein, 9 aa, synthetic construct
  source 1..9: note = Seed: VTSAMQTML
VASAMQTMW

SEQ ID NO: 68294 - protein, 9 aa, synthetic construct
  source 1..9: note = Seed: VTSAMQTML
VASAMQTMY

SEQ ID NO: 68295 - protein, 10 aa, synthetic construct
  source 1..10: note = Seed: VVSDIDYVPL
VASDIDYVPV

SEQ ID NO: 68296 - protein, 9 aa, synthetic construct
  source 1..9: note = Seed: VLSFCAFAV
VASFCAFAV

SEQ ID NO: 68297 - protein, 9 aa, synthetic construct
  source 1..9: note = Seed: VYSFLPGVY
VASFLPGVF

SEQ ID NO: 68298 - protein, 9 aa, synthetic construct
  source 1..9: note = Seed: VYSFLPGVY
VASFLPGVY

SEQ ID NO: 68299 - protein, 11 aa, synthetic construct
  source 1..11: note = Seed: VYSFLPGVYSV
VASFLPGVYSF

SEQ ID NO: 68300 - protein, 9 aa, synthetic construct
  source 1..9: note = Seed: VNSFSGYLK
VASFSGYLK

SEQ ID NO: 68301 - protein, 10 aa, synthetic construct
  source 1..10: note = Seed: VNSFSGYLKL
VASFSGYLKF

SEQ ID NO: 68302 - protein, 10 aa, synthetic construct
  source 1..10: note = Seed: VNSFSGYLKL
VASFSGYLKL

SEQ ID NO: 68303 - protein, 10 aa, synthetic construct
  source 1..10: note = Seed: VNSFSGYLKL
VASFSGYLKM

SEQ ID NO: 68304 - protein, 10 aa, synthetic construct
  source 1..10: note = Seed: VNSFSGYLKL
VASFSGYLKW

SEQ ID NO: 68305 - protein, 10 aa, synthetic construct
  source 1..10: note = Seed: VNSFSGYLKL
VASFSGYLKY

SEQ ID NO: 68306 - protein, 9 aa, synthetic construct
  source 1..9: note = Seed: VNSFSGYLK
VASFSGYLR

SEQ ID NO: 68307 - protein, 9 aa, synthetic construct
  source 1..9: note = Seed: VTSNYSGVV
VASNYSGVF

SEQ ID NO: 68308 - protein, 9 aa, synthetic construct
  source 1..9: note = Seed: VTSNYSGVV
VASNYSGVI

SEQ ID NO: 68309 - protein, 9 aa, synthetic construct
  source 1..9: note = Seed: VTSNYSGVV
VASNYSGVL

SEQ ID NO: 68310 - protein, 9 aa, synthetic construct
  source 1..9: note = Seed: VTSNYSGVV
VASNYSGVM

SEQ ID NO: 68311 - protein, 9 aa, synthetic construct
  source 1..9: note = Seed: VTSNYSGVV
VASNYSGVV

SEQ ID NO: 68312 - protein, 9 aa, synthetic construct
  source 1..9: note = Seed: VTSNYSGVV
VASNYSGVY

SEQ ID NO: 68313 - protein, 10 aa, synthetic construct
  source 1..10: note = Seed: VYSSANNCTF
VASSANNCTW

SEQ ID NO: 68314 - protein, 9 aa, synthetic construct
  source 1..9: note = Seed: VYSTGSNVF
VASTGSNVF

SEQ ID NO: 68315 - protein, 9 aa, synthetic construct
  source 1..9: note = Seed: VYSTGSNVF
VASTGSNVY

SEQ ID NO: 68316 - protein, 9 aa, synthetic construct
  source 1..9: note = Seed: VVSTGYHFR
VASTGYHFK

SEQ ID NO: 68317 - protein, 9 aa, synthetic construct
  source 1..9: note = Seed: VVSTGYHFR
VASTGYHFR

SEQ ID NO: 68318 - protein, 10 aa, synthetic construct
  source 1..10: note = Seed: VVSTGYHFRE
VASTGYHFRR

SEQ ID NO: 68319 - protein, 11 aa, synthetic construct
  source 1..11: note = Seed: VDSYYSLLMPI
VASYYSLLMPF

SEQ ID NO: 68320 - protein, 10 aa, synthetic construct
  source 1..10: note = Seed: VSTGYHFREL
VATGYHFREM

SEQ ID NO: 68321 - protein, 10 aa, synthetic construct
  source 1..10: note = Seed: VSTGYHFREL
VATGYHFREY

SEQ ID NO: 68322 - protein, 9 aa, synthetic construct
  source 1..9: note = Seed: VSTQEFRYM
VATQEFRYF

SEQ ID NO: 68323 - protein, 9 aa, synthetic construct
  source 1..9: note = Seed: VSTQEFRYM
VATQEFRYL

SEQ ID NO: 68324 - protein, 9 aa, synthetic construct
  source 1..9: note = Seed: VSTQEFRYM
VATQEFRYM

SEQ ID NO: 68325 - protein, 9 aa, synthetic construct
  source 1..9: note = Seed: VSTQEFRYM
VATQEFRYW

SEQ ID NO: 68326 - protein, 9 aa, synthetic construct
  source 1..9: note = Seed: VSTQEFRYM
VATQEFRYY

SEQ ID NO: 68327 - protein, 9 aa, synthetic construct
  source 1..9: note = Seed: VSTSGRWVL
VATSGRWVF

SEQ ID NO: 68328 - protein, 9 aa, synthetic construct
  source 1..9: note = Seed: VSTSGRWVL
VATSGRWVI

SEQ ID NO: 68329 - protein, 9 aa, synthetic construct
  source 1..9: note = Seed: VSTSGRWVL
VATSGRWVL

SEQ ID NO: 68330 - protein, 9 aa, synthetic construct
  source 1..9: note = Seed: VSTSGRWVL
VATSGRWVM

SEQ ID NO: 68331 - protein, 9 aa, synthetic construct
  source 1..9: note = Seed: VSTSGRWVL
VATSGRWVV

SEQ ID NO: 68332 - protein, 9 aa, synthetic construct
  source 1..9: note = Seed: VSTSGRWVL
VATSGRWVW

SEQ ID NO: 68333 - protein, 9 aa, synthetic construct
  source 1..9: note = Seed: VSTSGRWVL
VATSGRWVY

SEQ ID NO: 68334 - protein, 10 aa, synthetic construct
  source 1..10: note = Seed: VNVAFELWAK
VAVAFELWAR

SEQ ID NO: 68335 - protein, 10 aa, synthetic construct
  source 1..10: note = Seed: VNVLAWLYAA
VAVLAWLYAI

SEQ ID NO: 68336 - protein, 10 aa, synthetic construct
  source 1..10: note = Seed: VNVLAWLYAA
VAVLAWLYAL

SEQ ID NO: 68337 - protein, 10 aa, synthetic construct
  source 1..10: note = Seed: VNVLAWLYAA
VAVLAWLYAV

SEQ ID NO: 68338 - protein, 11 aa, synthetic construct
  source 1..11: note = Seed: VFVLWAHGFEL
VAVLWAHGFEI

SEQ ID NO: 68339 - protein, 11 aa, synthetic construct
  source 1..11: note = Seed: VFVLWAHGFEL
VAVLWAHGFEL

SEQ ID NO: 68340 - protein, 11 aa, synthetic construct
  source 1..11: note = Seed: VFVLWAHGFEL
VAVLWAHGFEV

SEQ ID NO: 68341 - protein, 9 aa, synthetic construct
  source 1..9: note = Seed: VCVSTSGRW
VAVSTSGRF

SEQ ID NO: 68342 - protein, 9 aa, synthetic construct
  source 1..9: note = Seed: VCVSTSGRW
VAVSTSGRW

SEQ ID NO: 68343 - protein, 9 aa, synthetic construct
  source 1..9: note = Seed: VCVSTSGRW
VAVSTSGRY

SEQ ID NO: 68344 - protein, 9 aa, synthetic construct
  source 1..9: note = Seed: VQVTCGTTT
VAVTCGTTF

SEQ ID NO: 68345 - protein, 9 aa, synthetic construct
  source 1..9: note = Seed: VQVTCGTTT
VAVTCGTTM

SEQ ID NO: 68346 - protein, 10 aa, synthetic construct
  source 1..10: note = Seed: VQVTCGTTTL
VAVTCGTTTY

SEQ ID NO: 68347 - protein, 9 aa, synthetic construct
  source 1..9: note = Seed: VQVTCGTTT
VAVTCGTTY

SEQ ID NO: 68348 - protein, 9 aa, synthetic construct
  source 1..9: note = Seed: VLWAHGFEL
VAWAHGFEF

SEQ ID NO: 68349 - protein, 9 aa, synthetic construct
  source 1..9: note = Seed: VLWAHGFEL
VAWAHGFEI

SEQ ID NO: 68350 - protein, 9 aa, synthetic construct
  source 1..9: note = Seed: VLWAHGFEL
VAWAHGFEL

SEQ ID NO: 68351 - protein, 9 aa, synthetic construct
  source 1..9: note = Seed: VLWAHGFEL
VAWAHGFEM

SEQ ID NO: 68352 - protein, 9 aa, synthetic construct
  source 1..9: note = Seed: VLWAHGFEL
VAWAHGFEV

SEQ ID NO: 68353 - protein, 9 aa, synthetic construct
  source 1..9: note = Seed: VLWAHGFEL
VAWAHGFEY

SEQ ID NO: 68354 - protein, 9 aa, synthetic construct
  source 1..9: note = Seed: VPWDTIANY
VAWDTIANW

SEQ ID NO: 68355 - protein, 9 aa, synthetic construct
  source 1..9: note = Seed: VPWDTIANY
VAWDTIANY

SEQ ID NO: 68356 - protein, 8 aa, synthetic construct
  source 1..8: note = Seed: VMYASAVV
VAYASAVF

SEQ ID NO: 68357 - protein, 9 aa, synthetic construct
  source 1..9: note = Seed: VMYASAVVL
VAYASAVVF

SEQ ID NO: 68358 - protein, 9 aa, synthetic construct
  source 1..9: note = Seed: VMYASAVVL
VAYASAVVI

SEQ ID NO: 68359 - protein, 9 aa, synthetic construct
  source 1..9: note = Seed: VMYASAVVL
VAYASAVVL

SEQ ID NO: 68360 - protein, 10 aa, synthetic construct
  source 1..10: note = Seed: VMYASAVVLL
VAYASAVVLF

SEQ ID NO: 68361 - protein, 10 aa, synthetic construct
  source 1..10: note = Seed: VMYASAVVLL
VAYASAVVLI

SEQ ID NO: 68362 - protein, 10 aa, synthetic construct
  source 1..10: note = Seed: VMYASAVVLL
VAYASAVVLL

SEQ ID NO: 68363 - protein, 10 aa, synthetic construct
  source 1..10: note = Seed: VMYASAVVLL
VAYASAVVLM

SEQ ID NO: 68364 - protein, 10 aa, synthetic construct
  source 1..10: note = Seed: VMYASAVVLL
VAYASAVVLW

SEQ ID NO: 68365 - protein, 10 aa, synthetic construct
  source 1..10: note = Seed: VMYASAVVLL
VAYASAVVLY

SEQ ID NO: 68366 - protein, 9 aa, synthetic construct
  source 1..9: note = Seed: VMYASAVVL
VAYASAVVM

SEQ ID NO: 68367 - protein, 9 aa, synthetic construct
  source 1..9: note = Seed: VMYASAVVL
VAYASAVVV

SEQ ID NO: 68368 - protein, 9 aa, synthetic construct
  source 1..9: note = Seed: VMYASAVVL
VAYASAVVW

SEQ ID NO: 68369 - protein, 9 aa, synthetic construct
  source 1..9: note = Seed: VMYASAVVL
VAYASAVVY

SEQ ID NO: 68370 - protein, 8 aa, synthetic construct
  source 1..8: note = Seed: VMYASAVV
VAYASAVY

SEQ ID NO: 68371 - protein, 10 aa, synthetic construct
  source 1..10: note = Seed: VPYCYDTNVL
VAYCYDTNVY

SEQ ID NO: 68372 - protein, 8 aa, synthetic construct
  source 1..8: note = Seed: VAYFNMVY
VAYFNMVL

SEQ ID NO: 68373 - protein, 8 aa, synthetic construct
  source 1..8: note = Seed: VAYFNMVY
VAYFNMVM

SEQ ID NO: 68374 - protein, 9 aa, synthetic construct
  source 1..9: note = Seed: VAYFNMVYM
VAYFNMVYF

SEQ ID NO: 68375 - protein, 9 aa, synthetic construct
  source 1..9: note = Seed: VAYFNMVYM
VAYFNMVYI

SEQ ID NO: 68376 - protein, 9 aa, synthetic construct
  source 1..9: note = Seed: VAYFNMVYM
VAYFNMVYL

SEQ ID NO: 68377 - protein, 9 aa, synthetic construct
  source 1..9: note = Seed: VAYFNMVYM
VAYFNMVYV

SEQ ID NO: 68378 - protein, 9 aa, synthetic construct
  source 1..9: note = Seed: VAYFNMVYM
VAYFNMVYW

SEQ ID NO: 68379 - protein, 9 aa, synthetic construct
  source 1..9: note = Seed: VAYFNMVYM
VAYFNMVYY

SEQ ID NO: 68380 - protein, 9 aa, synthetic construct
  source 1..9: note = Seed: VTYKLDGVV
VAYKLDGVF

SEQ ID NO: 68381 - protein, 9 aa, synthetic construct
  source 1..9: note = Seed: VTYKLDGVV
VAYKLDGVW

SEQ ID NO: 68382 - protein, 9 aa, synthetic construct
  source 1..9: note = Seed: VTYKLDGVV
VAYKLDGVY

SEQ ID NO: 68383 - protein, 9 aa, synthetic construct
  source 1..9: note = Seed: VGYLQPRTF
VAYLQPRTF

SEQ ID NO: 68384 - protein, 10 aa, synthetic construct
  source 1..10: note = Seed: VGYLQPRTFL
VAYLQPRTFF

SEQ ID NO: 68385 - protein, 11 aa, synthetic construct
  source 1..11: note = Seed: VGYLQPRTFLL
VAYLQPRTFLV

SEQ ID NO: 68386 - protein, 9 aa, synthetic construct
  source 1..9: note = Seed: VGYLQPRTF
VAYLQPRTI

SEQ ID NO: 68387 - protein, 9 aa, synthetic construct
  source 1..9: note = Seed: VGYLQPRTF
VAYLQPRTL

SEQ ID NO: 68388 - protein, 9 aa, synthetic construct
  source 1..9: note = Seed: VGYLQPRTF
VAYLQPRTM

SEQ ID NO: 68389 - protein, 9 aa, synthetic construct
  source 1..9: note = Seed: VGYLQPRTF
VAYLQPRTV

SEQ ID NO: 68390 - protein, 9 aa, synthetic construct
  source 1..9: note = Seed: VGYLQPRTF
VAYLQPRTW

SEQ ID NO: 68391 - protein, 9 aa, synthetic construct
  source 1..9: note = Seed: VGYLQPRTF
VAYLQPRTY

SEQ ID NO: 68392 - protein, 10 aa, synthetic construct
  source 1..10: note = Seed: VLYQPPQTSI
VAYQPPQTSF

SEQ ID NO: 68393 - protein, 10 aa, synthetic construct
  source 1..10: note = Seed: VLYQPPQTSI
VAYQPPQTSM

SEQ ID NO: 68394 - protein, 10 aa, synthetic construct
  source 1..10: note = Seed: VLYQPPQTSI
VAYQPPQTSW

SEQ ID NO: 68395 - protein, 9 aa, synthetic construct
  source 1..9: note = Seed: VGYQPYRVV
VAYQPYRVF

SEQ ID NO: 68396 - protein, 9 aa, synthetic construct
  source 1..9: note = Seed: VGYQPYRVV
VAYQPYRVI

SEQ ID NO: 68397 - protein, 9 aa, synthetic construct
  source 1..9: note = Seed: VGYQPYRVV
VAYQPYRVL

SEQ ID NO: 68398 - protein, 9 aa, synthetic construct
  source 1..9: note = Seed: VGYQPYRVV
VAYQPYRVM

SEQ ID NO: 68399 - protein, 9 aa, synthetic construct
  source 1..9: note = Seed: VGYQPYRVV
VAYQPYRVV

SEQ ID NO: 68400 - protein, 10 aa, synthetic construct
  source 1..10: note = Seed: VGYQPYRVVV
VAYQPYRVVF

SEQ ID NO: 68401 - protein, 10 aa, synthetic construct
  source 1..10: note = Seed: VGYQPYRVVV
VAYQPYRVVI

SEQ ID NO: 68402 - protein, 10 aa, synthetic construct
  source 1..10: note = Seed: VGYQPYRVVV
VAYQPYRVVL

SEQ ID NO: 68403 - protein, 10 aa, synthetic construct
  source 1..10: note = Seed: VGYQPYRVVV
VAYQPYRVVM

SEQ ID NO: 68404 - protein, 10 aa, synthetic construct
  source 1..10: note = Seed: VGYQPYRVVV
VAYQPYRVVW

SEQ ID NO: 68405 - protein, 9 aa, synthetic construct
  source 1..9: note = Seed: VGYQPYRVV
VAYQPYRVY

SEQ ID NO: 68406 - protein, 9 aa, synthetic construct
  source 1..9: note = Seed: VVYRGTTTY
VAYRGTTTF

SEQ ID NO: 68407 - protein, 9 aa, synthetic construct
  source 1..9: note = Seed: VVYRGTTTY
VAYRGTTTI

SEQ ID NO: 68408 - protein, 9 aa, synthetic construct
  source 1..9: note = Seed: VVYRGTTTY
VAYRGTTTK

SEQ ID NO: 68409 - protein, 9 aa, synthetic construct
  source 1..9: note = Seed: VVYRGTTTY
VAYRGTTTL

SEQ ID NO: 68410 - protein, 9 aa, synthetic construct
  source 1..9: note = Seed: VVYRGTTTY
VAYRGTTTM

SEQ ID NO: 68411 - protein, 9 aa, synthetic construct
  source 1..9: note = Seed: VVYRGTTTY
VAYRGTTTV

SEQ ID NO: 68412 - protein, 9 aa, synthetic construct
  source 1..9: note = Seed: VVYRGTTTY
VAYRGTTTW

SEQ ID NO: 68413 - protein, 9 aa, synthetic construct
  source 1..9: note = Seed: VVYRGTTTY
VAYRGTTTY

SEQ ID NO: 68414 - protein, 10 aa, synthetic construct
  source 1..10: note = Seed: VVYRGTTTYK
VAYRGTTTYF

SEQ ID NO: 68415 - protein, 10 aa, synthetic construct
  source 1..10: note = Seed: VVYRGTTTYK
VAYRGTTTYK

SEQ ID NO: 68416 - protein, 10 aa, synthetic construct
  source 1..10: note = Seed: VVYRGTTTYK
VAYRGTTTYR

SEQ ID NO: 68417 - protein, 10 aa, synthetic construct
  source 1..10: note = Seed: VVYRGTTTYK
VAYRGTTTYY

SEQ ID NO: 68418 - protein, 10 aa, synthetic construct
  source 1..10: note = Seed: VYYTSNPTTF
VAYTSNPTTF

SEQ ID NO: 68419 - protein, 10 aa, synthetic construct
  source 1..10: note = Seed: VYYTSNPTTF
VAYTSNPTTY

SEQ ID NO: 68420 - protein, 9 aa, synthetic construct
  source 1..9: note = Seed: VLYYQNNVF
VAYYQNNVF

SEQ ID NO: 68421 - protein, 10 aa, synthetic construct
  source 1..10: note = Seed: VLYYQNNVFM
VAYYQNNVFF

SEQ ID NO: 68422 - protein, 10 aa, synthetic construct
  source 1..10: note = Seed: VLYYQNNVFM
VAYYQNNVFI

SEQ ID NO: 68423 - protein, 10 aa, synthetic construct
  source 1..10: note = Seed: VLYYQNNVFM
VAYYQNNVFL

SEQ ID NO: 68424 - protein, 10 aa, synthetic construct
  source 1..10: note = Seed: VLYYQNNVFM
VAYYQNNVFW

SEQ ID NO: 68425 - protein, 9 aa, synthetic construct
  source 1..9: note = Seed: VLYYQNNVF
VAYYQNNVL

SEQ ID NO: 68426 - protein, 9 aa, synthetic construct
  source 1..9: note = Seed: VLYYQNNVF
VAYYQNNVM

SEQ ID NO: 68427 - protein, 9 aa, synthetic construct
  source 1..9: note = Seed: VLYYQNNVF
VAYYQNNVW

SEQ ID NO: 68428 - protein, 9 aa, synthetic construct
  source 1..9: note = Seed: VLYYQNNVF
VAYYQNNVY

SEQ ID NO: 68429 - protein, 10 aa, synthetic construct
  source 1..10: note = Seed: VLAAECTIFK
VCAAECTIFR

SEQ ID NO: 68430 - protein, 9 aa, synthetic construct
  source 1..9: note = Seed: VTANVNALL
VCANVNALW

SEQ ID NO: 68431 - protein, 11 aa, synthetic construct
  source 1..11: note = Seed: VYDYLVSTQEF
VCDYLVSTQEF

SEQ ID NO: 68432 - protein, 11 aa, synthetic construct
  source 1..11: note = Seed: VYDYLVSTQEF
VCDYLVSTQEW

SEQ ID NO: 68433 - protein, 11 aa, synthetic construct
  source 1..11: note = Seed: VSFLAHIQWMV
VCFLAHIQWMV

SEQ ID NO: 68434 - protein, 10 aa, synthetic construct
  source 1..10: note = Seed: VEFLRDGWEI
VCFLRDGWEF

SEQ ID NO: 68435 - protein, 11 aa, synthetic construct
  source 1..11: note = Seed: VLHSYFTSDYY
VCHSYFTSDYW

SEQ ID NO: 68436 - protein, 9 aa, synthetic construct
  source 1..9: note = Seed: VTIAEILLI
VCIAEILLW

SEQ ID NO: 68437 - protein, 10 aa, synthetic construct
  source 1..10: note = Seed: VAIKITEHSW
VCIKITEHSW

SEQ ID NO: 68438 - protein, 11 aa, synthetic construct
  source 1..11: note = Seed: VAKYTQLCQYL
VCKYTQLCQYF

SEQ ID NO: 68439 - protein, 10 aa, synthetic construct
  source 1..10: note = Seed: VELFENKTTL
VCLFENKTTV

SEQ ID NO: 68440 - protein, 10 aa, synthetic construct
  source 1..10: note = Seed: VQLHNDILLA
VCLHNDILLV

SEQ ID NO: 68441 - protein, 10 aa, synthetic construct
  source 1..10: note = Seed: VNLHSSRLSF
VCLHSSRLSF

SEQ ID NO: 68442 - protein, 10 aa, synthetic construct
  source 1..10: note = Seed: VNLHSSRLSF
VCLHSSRLSY

SEQ ID NO: 68443 - protein, 10 aa, synthetic construct
  source 1..10: note = Seed: VVLLSVLQQL
VCLLSVLQQI

SEQ ID NO: 68444 - protein, 10 aa, synthetic construct
  source 1..10: note = Seed: VVLLSVLQQL
VCLLSVLQQL

SEQ ID NO: 68445 - protein, 10 aa, synthetic construct
  source 1..10: note = Seed: VVLLSVLQQL
VCLLSVLQQV

SEQ ID NO: 68446 - protein, 10 aa, synthetic construct
  source 1..10: note = Seed: VGLMWLSYFI
VCLMWLSYFA

SEQ ID NO: 68447 - protein, 10 aa, synthetic construct
  source 1..10: note = Seed: VGLMWLSYFI
VCLMWLSYFI

SEQ ID NO: 68448 - protein, 10 aa, synthetic construct
  source 1..10: note = Seed: VGLMWLSYFI
VCLMWLSYFL

SEQ ID NO: 68449 - protein, 10 aa, synthetic construct
  source 1..10: note = Seed: VGLMWLSYFI
VCLMWLSYFM

SEQ ID NO: 68450 - protein, 10 aa, synthetic construct
  source 1..10: note = Seed: VGLMWLSYFI
VCLMWLSYFV

SEQ ID NO: 68451 - protein, 10 aa, synthetic construct
  source 1..10: note = Seed: VELVAELEGI
VCLVAELEGV

SEQ ID NO: 68452 - protein, 10 aa, synthetic construct
  source 1..10: note = Seed: VVMAYITGGV
VCMAYITGGI

SEQ ID NO: 68453 - protein, 10 aa, synthetic construct
  source 1..10: note = Seed: VVMAYITGGV
VCMAYITGGL

SEQ ID NO: 68454 - protein, 10 aa, synthetic construct
  source 1..10: note = Seed: VVMAYITGGV
VCMAYITGGV

SEQ ID NO: 68455 - protein, 10 aa, synthetic construct
  source 1..10: note = Seed: VRMYIFFASF
VCMYIFFASY

SEQ ID NO: 68456 - protein, 10 aa, synthetic construct
  source 1..10: note = Seed: VLPFNDGVYF
VCPFNDGVYW

SEQ ID NO: 68457 - protein, 10 aa, synthetic construct
  source 1..10: note = Seed: VLPFNDGVYF
VCPFNDGVYY

SEQ ID NO: 68458 - protein, 10 aa, synthetic construct
  source 1..10: note = Seed: VLQLPQGTTL
VCQLPQGTTF

SEQ ID NO: 68459 - protein, 10 aa, synthetic construct
  source 1..10: note = Seed: VLQLPQGTTL
VCQLPQGTTM

SEQ ID NO: 68460 - protein, 10 aa, synthetic construct
  source 1..10: note = Seed: VLQLPQGTTL
VCQLPQGTTY

SEQ ID NO: 68461 - protein, 11 aa, synthetic construct
  source 1..11: note = Seed: VKRTIKGTHHW
VCRTIKGTHHW

SEQ ID NO: 68462 - protein, 10 aa, synthetic construct
  source 1..10: note = Seed: VTSAMQTMLF
VCSAMQTMLF

SEQ ID NO: 68463 - protein, 10 aa, synthetic construct
  source 1..10: note = Seed: VTSAMQTMLF
VCSAMQTMLW

SEQ ID NO: 68464 - protein, 10 aa, synthetic construct
  source 1..10: note = Seed: VTSAMQTMLF
VCSAMQTMLY

SEQ ID NO: 68465 - protein, 9 aa, synthetic construct
  source 1..9: note = Seed: VTSAMQTML
VCSAMQTMW

SEQ ID NO: 68466 - protein, 11 aa, synthetic construct
  source 1..11: note = Seed: VYSFLPGVYSV
VCSFLPGVYSF

SEQ ID NO: 68467 - protein, 10 aa, synthetic construct
  source 1..10: note = Seed: VNSFSGYLKL
VCSFSGYLKF

SEQ ID NO: 68468 - protein, 10 aa, synthetic construct
  source 1..10: note = Seed: VNSFSGYLKL
VCSFSGYLKM

SEQ ID NO: 68469 - protein, 10 aa, synthetic construct
  source 1..10: note = Seed: VNSFSGYLKL
VCSFSGYLKW

SEQ ID NO: 68470 - protein, 10 aa, synthetic construct
  source 1..10: note = Seed: VNSFSGYLKL
VCSFSGYLKY

SEQ ID NO: 68471 - protein, 10 aa, synthetic construct
  source 1..10: note = Seed: VYSSANNCTF
VCSSANNCTW

SEQ ID NO: 68472 - protein, 11 aa, synthetic construct
  source 1..11: note = Seed: VDSYYSLLMPI
VCSYYSLLMPF

SEQ ID NO: 68473 - protein, 9 aa, synthetic construct
  source 1..9: note = Seed: VSTSGRWVL
VCTSGRWVW

SEQ ID NO: 68474 - protein, 10 aa, synthetic construct
  source 1..10: note = Seed: VNVLAWLYAA
VCVLAWLYAI

SEQ ID NO: 68475 - protein, 10 aa, synthetic construct
  source 1..10: note = Seed: VNVLAWLYAA
VCVLAWLYAL

SEQ ID NO: 68476 - protein, 10 aa, synthetic construct
  source 1..10: note = Seed: VNVLAWLYAA
VCVLAWLYAV

SEQ ID NO: 68477 - protein, 11 aa, synthetic construct
  source 1..11: note = Seed: VFVLWAHGFEL
VCVLWAHGFEI

SEQ ID NO: 68478 - protein, 11 aa, synthetic construct
  source 1..11: note = Seed: VFVLWAHGFEL
VCVLWAHGFEL

SEQ ID NO: 68479 - protein, 11 aa, synthetic construct
  source 1..11: note = Seed: VFVLWAHGFEL
VCVLWAHGFEV

SEQ ID NO: 68480 - protein, 9 aa, synthetic construct
  source 1..9: note = Seed: VMYASAVVL
VCYASAVVF

SEQ ID NO: 68481 - protein, 10 aa, synthetic construct
  source 1..10: note = Seed: VMYASAVVLL
VCYASAVVLF

SEQ ID NO: 68482 - protein, 10 aa, synthetic construct
  source 1..10: note = Seed: VMYASAVVLL
VCYASAVVLI

SEQ ID NO: 68483 - protein, 10 aa, synthetic construct
  source 1..10: note = Seed: VMYASAVVLL
VCYASAVVLL

SEQ ID NO: 68484 - protein, 10 aa, synthetic construct
  source 1..10: note = Seed: VMYASAVVLL
VCYASAVVLM

SEQ ID NO: 68485 - protein, 10 aa, synthetic construct
  source 1..10: note = Seed: VMYASAVVLL
VCYASAVVLW

SEQ ID NO: 68486 - protein, 9 aa, synthetic construct
  source 1..9: note = Seed: VMYASAVVL
VCYASAVVY

SEQ ID NO: 68487 - protein, 10 aa, synthetic construct
  source 1..10: note = Seed: VGYLQPRTFL
VCYLQPRTFF

SEQ ID NO: 68488 - protein, 11 aa, synthetic construct
  source 1..11: note = Seed: VGYLQPRTFLL
VCYLQPRTFLV

SEQ ID NO: 68489 - protein, 10 aa, synthetic construct
  source 1..10: note = Seed: VLYQPPQTSI
VCYQPPQTSF

SEQ ID NO: 68490 - protein, 10 aa, synthetic construct
  source 1..10: note = Seed: VLYQPPQTSI
VCYQPPQTSM

SEQ ID NO: 68491 - protein, 10 aa, synthetic construct
  source 1..10: note = Seed: VLYQPPQTSI
VCYQPPQTSW

SEQ ID NO: 68492 - protein, 10 aa, synthetic construct
  source 1..10: note = Seed: VGYQPYRVVV
VCYQPYRVVF

SEQ ID NO: 68493 - protein, 10 aa, synthetic construct
  source 1..10: note = Seed: VGYQPYRVVV
VCYQPYRVVI

SEQ ID NO: 68494 - protein, 10 aa, synthetic construct
  source 1..10: note = Seed: VGYQPYRVVV
VCYQPYRVVL

SEQ ID NO: 68495 - protein, 10 aa, synthetic construct
  source 1..10: note = Seed: VGYQPYRVVV
VCYQPYRVVM

SEQ ID NO: 68496 - protein, 10 aa, synthetic construct
  source 1..10: note = Seed: VGYQPYRVVV
VCYQPYRVVW

SEQ ID NO: 68497 - protein, 9 aa, synthetic construct
  source 1..9: note = Seed: VVYRGTTTY
VCYRGTTTF

SEQ ID NO: 68498 - protein, 9 aa, synthetic construct
  source 1..9: note = Seed: VVYRGTTTY
VCYRGTTTW

SEQ ID NO: 68499 - protein, 9 aa, synthetic construct
  source 1..9: note = Seed: VVYRGTTTY
VCYRGTTTY

SEQ ID NO: 68500 - protein, 10 aa, synthetic construct
  source 1..10: note = Seed: VVYRGTTTYK
VCYRGTTTYR

SEQ ID NO: 68501 - protein, 10 aa, synthetic construct
  source 1..10: note = Seed: VYYTSNPTTF
VCYTSNPTTF

SEQ ID NO: 68502 - protein, 10 aa, synthetic construct
  source 1..10: note = Seed: VLYYQNNVFM
VCYYQNNVFF

SEQ ID NO: 68503 - protein, 10 aa, synthetic construct
  source 1..10: note = Seed: VLYYQNNVFM
VCYYQNNVFI

SEQ ID NO: 68504 - protein, 10 aa, synthetic construct
  source 1..10: note = Seed: VLYYQNNVFM
VCYYQNNVFL

SEQ ID NO: 68505 - protein, 10 aa, synthetic construct
  source 1..10: note = Seed: VLYYQNNVFM
VCYYQNNVFW

SEQ ID NO: 68506 - protein, 10 aa, synthetic construct
  source 1..10: note = Seed: VLAAECTIFK
VDAAECTIFR

SEQ ID NO: 68507 - protein, 11 aa, synthetic construct
  source 1..11: note = Seed: VYDYLVSTQEF
VDDYLVSTQEF

SEQ ID NO: 68508 - protein, 11 aa, synthetic construct
  source 1..11: note = Seed: VYDYLVSTQEF
VDDYLVSTQEW

SEQ ID NO: 68509 - protein, 10 aa, synthetic construct
  source 1..10: note = Seed: VAEWFLAYIL
VDEWFLAYIY

SEQ ID NO: 68510 - protein, 11 aa, synthetic construct
  source 1..11: note = Seed: VSFLAHIQWMV
VDFLAHIQWMV

SEQ ID NO: 68511 - protein, 10 aa, synthetic construct
  source 1..10: note = Seed: VEFLRDGWEI
VDFLRDGWEF

SEQ ID NO: 68512 - protein, 11 aa, synthetic construct
  source 1..11: note = Seed: VLHSYFTSDYY
VDHSYFTSDYW

SEQ ID NO: 68513 - protein, 11 aa, synthetic construct
  source 1..11: note = Seed: VAKYTQLCQYL
VDKYTQLCQYF

SEQ ID NO: 68514 - protein, 10 aa, synthetic construct
  source 1..10: note = Seed: VELFENKTTL
VDLFENKTTV

SEQ ID NO: 68515 - protein, 10 aa, synthetic construct
  source 1..10: note = Seed: VQLHNDILLA
VDLHNDILLV

SEQ ID NO: 68516 - protein, 10 aa, synthetic construct
  source 1..10: note = Seed: VNLHSSRLSF
VDLHSSRLSF

SEQ ID NO: 68517 - protein, 10 aa, synthetic construct
  source 1..10: note = Seed: VNLHSSRLSF
VDLHSSRLSY

SEQ ID NO: 68518 - protein, 10 aa, synthetic construct
  source 1..10: note = Seed: VVLLSVLQQL
VDLLSVLQQI

SEQ ID NO: 68519 - protein, 10 aa, synthetic construct
  source 1..10: note = Seed: VVLLSVLQQL
VDLLSVLQQL

SEQ ID NO: 68520 - protein, 10 aa, synthetic construct
  source 1..10: note = Seed: VVLLSVLQQL
VDLLSVLQQV

SEQ ID NO: 68521 - protein, 10 aa, synthetic construct
  source 1..10: note = Seed: VGLMWLSYFI
VDLMWLSYFA

SEQ ID NO: 68522 - protein, 10 aa, synthetic construct
  source 1..10: note = Seed: VGLMWLSYFI
VDLMWLSYFI

SEQ ID NO: 68523 - protein, 10 aa, synthetic construct
  source 1..10: note = Seed: VGLMWLSYFI
VDLMWLSYFL

SEQ ID NO: 68524 - protein, 10 aa, synthetic construct
  source 1..10: note = Seed: VGLMWLSYFI
VDLMWLSYFM

SEQ ID NO: 68525 - protein, 10 aa, synthetic construct
  source 1..10: note = Seed: VGLMWLSYFI
VDLMWLSYFV

SEQ ID NO: 68526 - protein, 10 aa, synthetic construct
  source 1..10: note = Seed: VELVAELEGI
VDLVAELEGV

SEQ ID NO: 68527 - protein, 10 aa, synthetic construct
  source 1..10: note = Seed: VVMAYITGGV
VDMAYITGGI

SEQ ID NO: 68528 - protein, 10 aa, synthetic construct
  source 1..10: note = Seed: VVMAYITGGV
VDMAYITGGL

SEQ ID NO: 68529 - protein, 10 aa, synthetic construct
  source 1..10: note = Seed: VVMAYITGGV
VDMAYITGGV

SEQ ID NO: 68530 - protein, 10 aa, synthetic construct
  source 1..10: note = Seed: VRMYIFFASF
VDMYIFFASF

SEQ ID NO: 68531 - protein, 10 aa, synthetic construct
  source 1..10: note = Seed: VRMYIFFASF
VDMYIFFASY

SEQ ID NO: 68532 - protein, 10 aa, synthetic construct
  source 1..10: note = Seed: VLPFNDGVYF
VDPFNDGVYW

SEQ ID NO: 68533 - protein, 10 aa, synthetic construct
  source 1..10: note = Seed: VLPFNDGVYF
VDPFNDGVYY

SEQ ID NO: 68534 - protein, 10 aa, synthetic construct
  source 1..10: note = Seed: VLQLPQGTTL
VDQLPQGTTF

SEQ ID NO: 68535 - protein, 10 aa, synthetic construct
  source 1..10: note = Seed: VLQLPQGTTL
VDQLPQGTTM

SEQ ID NO: 68536 - protein, 10 aa, synthetic construct
  source 1..10: note = Seed: VLQLPQGTTL
VDQLPQGTTY

SEQ ID NO: 68537 - protein, 11 aa, synthetic construct
  source 1..11: note = Seed: VKRTIKGTHHW
VDRTIKGTHHW

SEQ ID NO: 68538 - protein, 10 aa, synthetic construct
  source 1..10: note = Seed: VTSAMQTMLF
VDSAMQTMLF

SEQ ID NO: 68539 - protein, 10 aa, synthetic construct
  source 1..10: note = Seed: VTSAMQTMLF
VDSAMQTMLW

SEQ ID NO: 68540 - protein, 10 aa, synthetic construct
  source 1..10: note = Seed: VTSAMQTMLF
VDSAMQTMLY

SEQ ID NO: 68541 - protein, 11 aa, synthetic construct
  source 1..11: note = Seed: VYSFLPGVYSV
VDSFLPGVYSF

SEQ ID NO: 68542 - protein, 10 aa, synthetic construct
  source 1..10: note = Seed: VNSFSGYLKL
VDSFSGYLKF

SEQ ID NO: 68543 - protein, 10 aa, synthetic construct
  source 1..10: note = Seed: VNSFSGYLKL
VDSFSGYLKM

SEQ ID NO: 68544 - protein, 10 aa, synthetic construct
  source 1..10: note = Seed: VNSFSGYLKL
VDSFSGYLKW

SEQ ID NO: 68545 - protein, 10 aa, synthetic construct
  source 1..10: note = Seed: VNSFSGYLKL
VDSFSGYLKY

SEQ ID NO: 68546 - protein, 10 aa, synthetic construct
  source 1..10: note = Seed: VYSSANNCTF
VDSSANNCTW

SEQ ID NO: 68547 - protein, 11 aa, synthetic construct
  source 1..11: note = Seed: VDSYYSLLMPI
VDSYYSLLMPF

SEQ ID NO: 68548 - protein, 10 aa, synthetic construct
  source 1..10: note = Seed: VNVLAWLYAA
VDVLAWLYAI

SEQ ID NO: 68549 - protein, 10 aa, synthetic construct
  source 1..10: note = Seed: VNVLAWLYAA
VDVLAWLYAL

SEQ ID NO: 68550 - protein, 10 aa, synthetic construct
  source 1..10: note = Seed: VNVLAWLYAA
VDVLAWLYAV

SEQ ID NO: 68551 - protein, 11 aa, synthetic construct
  source 1..11: note = Seed: VFVLWAHGFEL
VDVLWAHGFEI

SEQ ID NO: 68552 - protein, 11 aa, synthetic construct
  source 1..11: note = Seed: VFVLWAHGFEL
VDVLWAHGFEL

SEQ ID NO: 68553 - protein, 11 aa, synthetic construct
  source 1..11: note = Seed: VFVLWAHGFEL
VDVLWAHGFEV

SEQ ID NO: 68554 - protein, 10 aa, synthetic construct
  source 1..10: note = Seed: VMYASAVVLL
VDYASAVVLF

SEQ ID NO: 68555 - protein, 10 aa, synthetic construct
  source 1..10: note = Seed: VMYASAVVLL
VDYASAVVLI

SEQ ID NO: 68556 - protein, 10 aa, synthetic construct
  source 1..10: note = Seed: VMYASAVVLL
VDYASAVVLL

SEQ ID NO: 68557 - protein, 10 aa, synthetic construct
  source 1..10: note = Seed: VMYASAVVLL
VDYASAVVLM

SEQ ID NO: 68558 - protein, 10 aa, synthetic construct
  source 1..10: note = Seed: VMYASAVVLL
VDYASAVVLW

SEQ ID NO: 68559 - protein, 10 aa, synthetic construct
  source 1..10: note = Seed: VGYLQPRTFL
VDYLQPRTFF

SEQ ID NO: 68560 - protein, 11 aa, synthetic construct
  source 1..11: note = Seed: VGYLQPRTFLL
VDYLQPRTFLV

SEQ ID NO: 68561 - protein, 10 aa, synthetic construct
  source 1..10: note = Seed: VLYQPPQTSI
VDYQPPQTSF

SEQ ID NO: 68562 - protein, 10 aa, synthetic construct
  source 1..10: note = Seed: VLYQPPQTSI
VDYQPPQTSM

SEQ ID NO: 68563 - protein, 10 aa, synthetic construct
  source 1..10: note = Seed: VLYQPPQTSI
VDYQPPQTSW

SEQ ID NO: 68564 - protein, 10 aa, synthetic construct
  source 1..10: note = Seed: VGYQPYRVVV
VDYQPYRVVF

SEQ ID NO: 68565 - protein, 10 aa, synthetic construct
  source 1..10: note = Seed: VGYQPYRVVV
VDYQPYRVVI

SEQ ID NO: 68566 - protein, 10 aa, synthetic construct
  source 1..10: note = Seed: VGYQPYRVVV
VDYQPYRVVL

SEQ ID NO: 68567 - protein, 10 aa, synthetic construct
  source 1..10: note = Seed: VGYQPYRVVV
VDYQPYRVVM

SEQ ID NO: 68568 - protein, 10 aa, synthetic construct
  source 1..10: note = Seed: VGYQPYRVVV
VDYQPYRVVW

SEQ ID NO: 68569 - protein, 10 aa, synthetic construct
  source 1..10: note = Seed: VVYRGTTTYK
VDYRGTTTYR

SEQ ID NO: 68570 - protein, 10 aa, synthetic construct
  source 1..10: note = Seed: VYYTSNPTTF
VDYTSNPTTF

SEQ ID NO: 68571 - protein, 10 aa, synthetic construct
  source 1..10: note = Seed: VLYYQNNVFM
VDYYQNNVFF

SEQ ID NO: 68572 - protein, 10 aa, synthetic construct
  source 1..10: note = Seed: VLYYQNNVFM
VDYYQNNVFI

SEQ ID NO: 68573 - protein, 10 aa, synthetic construct
  source 1..10: note = Seed: VLYYQNNVFM
VDYYQNNVFL

SEQ ID NO: 68574 - protein, 10 aa, synthetic construct
  source 1..10: note = Seed: VLYYQNNVFM
VDYYQNNVFW

SEQ ID NO: 68575 - protein, 10 aa, synthetic construct
  source 1..10: note = Seed: VLAAECTIFK
VEAAECTIFR

SEQ ID NO: 68576 - protein, 9 aa, synthetic construct
  source 1..9: note = Seed: VNASSSEAF
VEASSSEAF

SEQ ID NO: 68577 - protein, 9 aa, synthetic construct
  source 1..9: note = Seed: VNASSSEAF
VEASSSEAY

SEQ ID NO: 68578 - protein, 11 aa, synthetic construct
  source 1..11: note = Seed: VYDYLVSTQEF
VEDYLVSTQEF

SEQ ID NO: 68579 - protein, 11 aa, synthetic construct
  source 1..11: note = Seed: VYDYLVSTQEF
VEDYLVSTQEW

SEQ ID NO: 68580 - protein, 10 aa, synthetic construct
  source 1..10: note = Seed: VAEWFLAYIL
VEEWFLAYIL

SEQ ID NO: 68581 - protein, 11 aa, synthetic construct
  source 1..11: note = Seed: VSFLAHIQWMV
VEFLAHIQWMV

SEQ ID NO: 68582 - protein, 10 aa, synthetic construct
  source 1..10: note = Seed: VEFLRDGWEI
VEFLRDGWEF

SEQ ID NO: 68583 - protein, 10 aa, synthetic construct
  source 1..10: note = Seed: VEFLRDGWEI
VEFLRDGWEL

SEQ ID NO: 68584 - protein, 9 aa, synthetic construct
  source 1..9: note = Seed: VPFVVSTGY
VEFVVSTGF

SEQ ID NO: 68585 - protein, 9 aa, synthetic construct
  source 1..9: note = Seed: VPFVVSTGY
VEFVVSTGY

SEQ ID NO: 68586 - protein, 9 aa, synthetic construct
  source 1..9: note = Seed: VMHANYIFW
VEHANYIFF

SEQ ID NO: 68587 - protein, 11 aa, synthetic construct
  source 1..11: note = Seed: VLHSYFTSDYY
VEHSYFTSDYW

SEQ ID NO: 68588 - protein, 9 aa, synthetic construct
  source 1..9: note = Seed: VEHVTFFIY
VEHVTFFIF

SEQ ID NO: 68589 - protein, 9 aa, synthetic construct
  source 1..9: note = Seed: VEHVTFFIY
VEHVTFFIM

SEQ ID NO: 68590 - protein, 9 aa, synthetic construct
  source 1..9: note = Seed: VEHVTFFIY
VEHVTFFIW

SEQ ID NO: 68591 - protein, 9 aa, synthetic construct
  source 1..9: note = Seed: VQIDRLITG
VEIDRLITY

SEQ ID NO: 68592 - protein, 9 aa, synthetic construct
  source 1..9: note = Seed: VSIINNTVY
VEIINNTVF

SEQ ID NO: 68593 - protein, 9 aa, synthetic construct
  source 1..9: note = Seed: VSIINNTVY
VEIINNTVY

SEQ ID NO: 68594 - protein, 11 aa, synthetic construct
  source 1..11: note = Seed: VAKYTQLCQYL
VEKYTQLCQYF

SEQ ID NO: 68595 - protein, 10 aa, synthetic construct
  source 1..10: note = Seed: VELFENKTTL
VELFENKTTV

SEQ ID NO: 68596 - protein, 10 aa, synthetic construct
  source 1..10: note = Seed: VQLHNDILLA
VELHNDILLV

SEQ ID NO: 68597 - protein, 10 aa, synthetic construct
  source 1..10: note = Seed: VNLHSSRLSF
VELHSSRLSF

SEQ ID NO: 68598 - protein, 10 aa, synthetic construct
  source 1..10: note = Seed: VNLHSSRLSF
VELHSSRLSY

SEQ ID NO: 68599 - protein, 10 aa, synthetic construct
  source 1..10: note = Seed: VVLLSVLQQL
VELLSVLQQI

SEQ ID NO: 68600 - protein, 10 aa, synthetic construct
  source 1..10: note = Seed: VVLLSVLQQL
VELLSVLQQL

SEQ ID NO: 68601 - protein, 10 aa, synthetic construct
  source 1..10: note = Seed: VVLLSVLQQL
VELLSVLQQV

SEQ ID NO: 68602 - protein, 9 aa, synthetic construct
  source 1..9: note = Seed: VGLMWLSYF
VELMWLSYF

SEQ ID NO: 68603 - protein, 10 aa, synthetic construct
  source 1..10: note = Seed: VGLMWLSYFI
VELMWLSYFA

SEQ ID NO: 68604 - protein, 10 aa, synthetic construct
  source 1..10: note = Seed: VGLMWLSYFI
VELMWLSYFI

SEQ ID NO: 68605 - protein, 10 aa, synthetic construct
  source 1..10: note = Seed: VGLMWLSYFI
VELMWLSYFL

SEQ ID NO: 68606 - protein, 10 aa, synthetic construct
  source 1..10: note = Seed: VGLMWLSYFI
VELMWLSYFM

SEQ ID NO: 68607 - protein, 10 aa, synthetic construct
  source 1..10: note = Seed: VGLMWLSYFI
VELMWLSYFV

SEQ ID NO: 68608 - protein, 9 aa, synthetic construct
  source 1..9: note = Seed: VVLSFELLH
VELSFELLY

SEQ ID NO: 68609 - protein, 10 aa, synthetic construct
  source 1..10: note = Seed: VELVAELEGI
VELVAELEGV

SEQ ID NO: 68610 - protein, 10 aa, synthetic construct
  source 1..10: note = Seed: VVMAYITGGV
VEMAYITGGI

SEQ ID NO: 68611 - protein, 10 aa, synthetic construct
  source 1..10: note = Seed: VVMAYITGGV
VEMAYITGGL

SEQ ID NO: 68612 - protein, 10 aa, synthetic construct
  source 1..10: note = Seed: VVMAYITGGV
VEMAYITGGV

SEQ ID NO: 68613 - protein, 10 aa, synthetic construct
  source 1..10: note = Seed: VRMYIFFASF
VEMYIFFASF

SEQ ID NO: 68614 - protein, 10 aa, synthetic construct
  source 1..10: note = Seed: VRMYIFFASF
VEMYIFFASM

SEQ ID NO: 68615 - protein, 10 aa, synthetic construct
  source 1..10: note = Seed: VRMYIFFASF
VEMYIFFASY

SEQ ID NO: 68616 - protein, 10 aa, synthetic construct
  source 1..10: note = Seed: VLPFNDGVYF
VEPFNDGVYW

SEQ ID NO: 68617 - protein, 10 aa, synthetic construct
  source 1..10: note = Seed: VLPFNDGVYF
VEPFNDGVYY

SEQ ID NO: 68618 - protein, 10 aa, synthetic construct
  source 1..10: note = Seed: VLQLPQGTTL
VEQLPQGTTF

SEQ ID NO: 68619 - protein, 10 aa, synthetic construct
  source 1..10: note = Seed: VLQLPQGTTL
VEQLPQGTTM

SEQ ID NO: 68620 - protein, 10 aa, synthetic construct
  source 1..10: note = Seed: VLQLPQGTTL
VEQLPQGTTY

SEQ ID NO: 68621 - protein, 9 aa, synthetic construct
  source 1..9: note = Seed: VARDLSLQF
VERDLSLQF

SEQ ID NO: 68622 - protein, 9 aa, synthetic construct
  source 1..9: note = Seed: VARDLSLQF
VERDLSLQY

SEQ ID NO: 68623 - protein, 9 aa, synthetic construct
  source 1..9: note = Seed: VKRHTFSNY
VERHTFSNF

SEQ ID NO: 68624 - protein, 9 aa, synthetic construct
  source 1..9: note = Seed: VKRHTFSNY
VERHTFSNY

SEQ ID NO: 68625 - protein, 10 aa, synthetic construct
  source 1..10: note = Seed: VVRQCSGVTF
VERQCSGVTF

SEQ ID NO: 68626 - protein, 10 aa, synthetic construct
  source 1..10: note = Seed: VVRQCSGVTF
VERQCSGVTY

SEQ ID NO: 68627 - protein, 11 aa, synthetic construct
  source 1..11: note = Seed: VKRTIKGTHHW
VERTIKGTHHW

SEQ ID NO: 68628 - protein, 9 aa, synthetic construct
  source 1..9: note = Seed: VDRYPANSI
VERYPANSL

SEQ ID NO: 68629 - protein, 10 aa, synthetic construct
  source 1..10: note = Seed: VTSAMQTMLF
VESAMQTMLF

SEQ ID NO: 68630 - protein, 10 aa, synthetic construct
  source 1..10: note = Seed: VTSAMQTMLF
VESAMQTMLW

SEQ ID NO: 68631 - protein, 10 aa, synthetic construct
  source 1..10: note = Seed: VTSAMQTMLF
VESAMQTMLY

SEQ ID NO: 68632 - protein, 11 aa, synthetic construct
  source 1..11: note = Seed: VYSFLPGVYSV
VESFLPGVYSF

SEQ ID NO: 68633 - protein, 10 aa, synthetic construct
  source 1..10: note = Seed: VNSFSGYLKL
VESFSGYLKF

SEQ ID NO: 68634 - protein, 10 aa, synthetic construct
  source 1..10: note = Seed: VNSFSGYLKL
VESFSGYLKM

SEQ ID NO: 68635 - protein, 10 aa, synthetic construct
  source 1..10: note = Seed: VNSFSGYLKL
VESFSGYLKW

SEQ ID NO: 68636 - protein, 10 aa, synthetic construct
  source 1..10: note = Seed: VNSFSGYLKL
VESFSGYLKY

SEQ ID NO: 68637 - protein, 10 aa, synthetic construct
  source 1..10: note = Seed: VYSSANNCTF
VESSANNCTW

SEQ ID NO: 68638 - protein, 9 aa, synthetic construct
  source 1..9: note = Seed: VYSTGSNVF
VESTGSNVF

SEQ ID NO: 68639 - protein, 9 aa, synthetic construct
  source 1..9: note = Seed: VYSTGSNVF
VESTGSNVY

SEQ ID NO: 68640 - protein, 11 aa, synthetic construct
  source 1..11: note = Seed: VDSYYSLLMPI
VESYYSLLMPF

SEQ ID NO: 68641 - protein, 10 aa, synthetic construct
  source 1..10: note = Seed: VRTIKVFTTV
VETIKVFTTV

SEQ ID NO: 68642 - protein, 10 aa, synthetic construct
  source 1..10: note = Seed: VETVKGLDYK
VETVKGLDYR

SEQ ID NO: 68643 - protein, 10 aa, synthetic construct
  source 1..10: note = Seed: VNVAFELWAK
VEVAFELWAR

SEQ ID NO: 68644 - protein, 10 aa, synthetic construct
  source 1..10: note = Seed: VNVLAWLYAA
VEVLAWLYAI

SEQ ID NO: 68645 - protein, 10 aa, synthetic construct
  source 1..10: note = Seed: VNVLAWLYAA
VEVLAWLYAL

SEQ ID NO: 68646 - protein, 10 aa, synthetic construct
  source 1..10: note = Seed: VNVLAWLYAA
VEVLAWLYAV

SEQ ID NO: 68647 - protein, 11 aa, synthetic construct
  source 1..11: note = Seed: VFVLWAHGFEL
VEVLWAHGFEI

SEQ ID NO: 68648 - protein, 11 aa, synthetic construct
  source 1..11: note = Seed: VFVLWAHGFEL
VEVLWAHGFEL

SEQ ID NO: 68649 - protein, 11 aa, synthetic construct
  source 1..11: note = Seed: VFVLWAHGFEL
VEVLWAHGFEV

SEQ ID NO: 68650 - protein, 9 aa, synthetic construct
  source 1..9: note = Seed: VQVTCGTTT
VEVTCGTTF

SEQ ID NO: 68651 - protein, 9 aa, synthetic construct
  source 1..9: note = Seed: VQVTCGTTT
VEVTCGTTY

SEQ ID NO: 68652 - protein, 9 aa, synthetic construct
  source 1..9: note = Seed: VLWAHGFEL
VEWAHGFEF

SEQ ID NO: 68653 - protein, 9 aa, synthetic construct
  source 1..9: note = Seed: VLWAHGFEL
VEWAHGFEM

SEQ ID NO: 68654 - protein, 9 aa, synthetic construct
  source 1..9: note = Seed: VLWAHGFEL
VEWAHGFEY

SEQ ID NO: 68655 - protein, 9 aa, synthetic construct
  source 1..9: note = Seed: VMYASAVVL
VEYASAVVF

SEQ ID NO: 68656 - protein, 9 aa, synthetic construct
  source 1..9: note = Seed: VMYASAVVL
VEYASAVVL

SEQ ID NO: 68657 - protein, 10 aa, synthetic construct
  source 1..10: note = Seed: VMYASAVVLL
VEYASAVVLF

SEQ ID NO: 68658 - protein, 10 aa, synthetic construct
  source 1..10: note = Seed: VMYASAVVLL
VEYASAVVLI

SEQ ID NO: 68659 - protein, 10 aa, synthetic construct
  source 1..10: note = Seed: VMYASAVVLL
VEYASAVVLL

SEQ ID NO: 68660 - protein, 10 aa, synthetic construct
  source 1..10: note = Seed: VMYASAVVLL
VEYASAVVLM

SEQ ID NO: 68661 - protein, 10 aa, synthetic construct
  source 1..10: note = Seed: VMYASAVVLL
VEYASAVVLW

SEQ ID NO: 68662 - protein, 10 aa, synthetic construct
  source 1..10: note = Seed: VMYASAVVLL
VEYASAVVLY

SEQ ID NO: 68663 - protein, 9 aa, synthetic construct
  source 1..9: note = Seed: VMYASAVVL
VEYASAVVM

SEQ ID NO: 68664 - protein, 9 aa, synthetic construct
  source 1..9: note = Seed: VMYASAVVL
VEYASAVVY

SEQ ID NO: 68665 - protein, 8 aa, synthetic construct
  source 1..8: note = Seed: VMYASAVV
VEYASAVY

SEQ ID NO: 68666 - protein, 9 aa, synthetic construct
  source 1..9: note = Seed: VAYFNMVYM
VEYFNMVYF

SEQ ID NO: 68667 - protein, 9 aa, synthetic construct
  source 1..9: note = Seed: VAYFNMVYM
VEYFNMVYY

SEQ ID NO: 68668 - protein, 9 aa, synthetic construct
  source 1..9: note = Seed: VGYLQPRTF
VEYLQPRTF

SEQ ID NO: 68669 - protein, 10 aa, synthetic construct
  source 1..10: note = Seed: VGYLQPRTFL
VEYLQPRTFF

SEQ ID NO: 68670 - protein, 11 aa, synthetic construct
  source 1..11: note = Seed: VGYLQPRTFLL
VEYLQPRTFLV

SEQ ID NO: 68671 - protein, 9 aa, synthetic construct
  source 1..9: note = Seed: VGYLQPRTF
VEYLQPRTY

SEQ ID NO: 68672 - protein, 10 aa, synthetic construct
  source 1..10: note = Seed: VLYQPPQTSI
VEYQPPQTSF

SEQ ID NO: 68673 - protein, 10 aa, synthetic construct
  source 1..10: note = Seed: VLYQPPQTSI
VEYQPPQTSM

SEQ ID NO: 68674 - protein, 10 aa, synthetic construct
  source 1..10: note = Seed: VLYQPPQTSI
VEYQPPQTSW

SEQ ID NO: 68675 - protein, 10 aa, synthetic construct
  source 1..10: note = Seed: VGYQPYRVVV
VEYQPYRVVF

SEQ ID NO: 68676 - protein, 10 aa, synthetic construct
  source 1..10: note = Seed: VGYQPYRVVV
VEYQPYRVVI

SEQ ID NO: 68677 - protein, 10 aa, synthetic construct
  source 1..10: note = Seed: VGYQPYRVVV
VEYQPYRVVL

SEQ ID NO: 68678 - protein, 10 aa, synthetic construct
  source 1..10: note = Seed: VGYQPYRVVV
VEYQPYRVVM

SEQ ID NO: 68679 - protein, 10 aa, synthetic construct
  source 1..10: note = Seed: VGYQPYRVVV
VEYQPYRVVW

SEQ ID NO: 68680 - protein, 9 aa, synthetic construct
  source 1..9: note = Seed: VVYRGTTTY
VEYRGTTTF

SEQ ID NO: 68681 - protein, 9 aa, synthetic construct
  source 1..9: note = Seed: VVYRGTTTY
VEYRGTTTL

SEQ ID NO: 68682 - protein, 9 aa, synthetic construct
  source 1..9: note = Seed: VVYRGTTTY
VEYRGTTTM

SEQ ID NO: 68683 - protein, 9 aa, synthetic construct
  source 1..9: note = Seed: VVYRGTTTY
VEYRGTTTY

SEQ ID NO: 68684 - protein, 10 aa, synthetic construct
  source 1..10: note = Seed: VVYRGTTTYK
VEYRGTTTYR

SEQ ID NO: 68685 - protein, 10 aa, synthetic construct
  source 1..10: note = Seed: VYYTSNPTTF
VEYTSNPTTF

SEQ ID NO: 68686 - protein, 10 aa, synthetic construct
  source 1..10: note = Seed: VYYTSNPTTF
VEYTSNPTTY

SEQ ID NO: 68687 - protein, 9 aa, synthetic construct
  source 1..9: note = Seed: VLYYQNNVF
VEYYQNNVF

SEQ ID NO: 68688 - protein, 10 aa, synthetic construct
  source 1..10: note = Seed: VLYYQNNVFM
VEYYQNNVFF

SEQ ID NO: 68689 - protein, 10 aa, synthetic construct
  source 1..10: note = Seed: VLYYQNNVFM
VEYYQNNVFI

SEQ ID NO: 68690 - protein, 10 aa, synthetic construct
  source 1..10: note = Seed: VLYYQNNVFM
VEYYQNNVFL

SEQ ID NO: 68691 - protein, 10 aa, synthetic construct
  source 1..10: note = Seed: VLYYQNNVFM
VEYYQNNVFW

SEQ ID NO: 68692 - protein, 9 aa, synthetic construct
  source 1..9: note = Seed: VLYYQNNVF
VEYYQNNVM

SEQ ID NO: 68693 - protein, 9 aa, synthetic construct
  source 1..9: note = Seed: VLYYQNNVF
VEYYQNNVY

SEQ ID NO: 68694 - protein, 10 aa, synthetic construct
  source 1..10: note = Seed: VLAAECTIFK
VFAAECTIFR

SEQ ID NO: 68695 - protein, 8 aa, synthetic construct
  source 1..8: note = Seed: VYADSFVI
VFADSFVM

SEQ ID NO: 68696 - protein, 9 aa, synthetic construct
  source 1..9: note = Seed: VYANGGKGF
VFANGGKGF

SEQ ID NO: 68697 - protein, 9 aa, synthetic construct
  source 1..9: note = Seed: VYANGGKGF
VFANGGKGL

SEQ ID NO: 68698 - protein, 9 aa, synthetic construct
  source 1..9: note = Seed: VYANGGKGF
VFANGGKGM

SEQ ID NO: 68699 - protein, 9 aa, synthetic construct
  source 1..9: note = Seed: VYANGGKGF
VFANGGKGY

SEQ ID NO: 68700 - protein, 9 aa, synthetic construct
  source 1..9: note = Seed: VFAQVKQIY
VFAQVKQIF

SEQ ID NO: 68701 - protein, 9 aa, synthetic construct
  source 1..9: note = Seed: VFAQVKQIY
VFAQVKQIL

SEQ ID NO: 68702 - protein, 9 aa, synthetic construct
  source 1..9: note = Seed: VFAQVKQIY
VFAQVKQIM

SEQ ID NO: 68703 - protein, 10 aa, synthetic construct
  source 1..10: note = Seed: VFAQVKQIYK
VFAQVKQIYR

SEQ ID NO: 68704 - protein, 10 aa, synthetic construct
  source 1..10: note = Seed: VLCLTPVYSF
VFCLTPVYSF

SEQ ID NO: 68705 - protein, 11 aa, synthetic construct
  source 1..11: note = Seed: VLCLTPVYSFL
VFCLTPVYSFV

SEQ ID NO: 68706 - protein, 10 aa, synthetic construct
  source 1..10: note = Seed: VLCNSQTSLR
VFCNSQTSLR

SEQ ID NO: 68707 - protein, 10 aa, synthetic construct
  source 1..10: note = Seed: VSDIDITFLK
VFDIDITFLK

SEQ ID NO: 68708 - protein, 10 aa, synthetic construct
  source 1..10: note = Seed: VSDIDITFLK
VFDIDITFLR

SEQ ID NO: 68709 - protein, 11 aa, synthetic construct
  source 1..11: note = Seed: VYDYLVSTQEF
VFDYLVSTQEF

SEQ ID NO: 68710 - protein, 11 aa, synthetic construct
  source 1..11: note = Seed: VYDYLVSTQEF
VFDYLVSTQEI

SEQ ID NO: 68711 - protein, 11 aa, synthetic construct
  source 1..11: note = Seed: VYDYLVSTQEF
VFDYLVSTQEL

SEQ ID NO: 68712 - protein, 11 aa, synthetic construct
  source 1..11: note = Seed: VYDYLVSTQEF
VFDYLVSTQEW

SEQ ID NO: 68713 - protein, 9 aa, synthetic construct
  source 1..9: note = Seed: VAFELWAKR
VFFELWAKR

SEQ ID NO: 68714 - protein, 8 aa, synthetic construct
  source 1..8: note = Seed: VTFFIYNK
VFFFIYNR

SEQ ID NO: 68715 - protein, 11 aa, synthetic construct
  source 1..11: note = Seed: VSFLAHIQWMV
VFFLAHIQWMI

SEQ ID NO: 68716 - protein, 11 aa, synthetic construct
  source 1..11: note = Seed: VSFLAHIQWMV
VFFLAHIQWMV

SEQ ID NO: 68717 - protein, 9 aa, synthetic construct
  source 1..9: note = Seed: VVFLHVTYV
VFFLHVTYK

SEQ ID NO: 68718 - protein, 10 aa, synthetic construct
  source 1..10: note = Seed: VEFLRDGWEI
VFFLRDGWEF

SEQ ID NO: 68719 - protein, 11 aa, synthetic construct
  source 1..11: note = Seed: VVFNGVSFSTF
VFFNGVSFSTF

SEQ ID NO: 68720 - protein, 11 aa, synthetic construct
  source 1..11: note = Seed: VVFNGVSFSTF
VFFNGVSFSTW

SEQ ID NO: 68721 - protein, 10 aa, synthetic construct
  source 1..10: note = Seed: VVFVLWAHGF
VFFVLWAHGF

SEQ ID NO: 68722 - protein, 9 aa, synthetic construct
  source 1..9: note = Seed: VPFVVSTGY
VFFVVSTGY

SEQ ID NO: 68723 - protein, 9 aa, synthetic construct
  source 1..9: note = Seed: VGGNYNYLY
VFGNYNYLF

SEQ ID NO: 68724 - protein, 9 aa, synthetic construct
  source 1..9: note = Seed: VGGNYNYLY
VFGNYNYLY

SEQ ID NO: 68725 - protein, 10 aa, synthetic construct
  source 1..10: note = Seed: VGGNYNYLYR
VFGNYNYLYK

SEQ ID NO: 68726 - protein, 10 aa, synthetic construct
  source 1..10: note = Seed: VGGNYNYLYR
VFGNYNYLYR

SEQ ID NO: 68727 - protein, 9 aa, synthetic construct
  source 1..9: note = Seed: VMHANYIFW
VFHANYIFF

SEQ ID NO: 68728 - protein, 9 aa, synthetic construct
  source 1..9: note = Seed: VMHANYIFW
VFHANYIFI

SEQ ID NO: 68729 - protein, 9 aa, synthetic construct
  source 1..9: note = Seed: VMHANYIFW
VFHANYIFL

SEQ ID NO: 68730 - protein, 9 aa, synthetic construct
  source 1..9: note = Seed: VMHANYIFW
VFHANYIFW

SEQ ID NO: 68731 - protein, 9 aa, synthetic construct
  source 1..9: note = Seed: VLHDIGNPK
VFHDIGNPR

SEQ ID NO: 68732 - protein, 9 aa, synthetic construct
  source 1..9: note = Seed: VFHLYLQYI
VFHLYLQYF

SEQ ID NO: 68733 - protein, 9 aa, synthetic construct
  source 1..9: note = Seed: VFHLYLQYI
VFHLYLQYL

SEQ ID NO: 68734 - protein, 9 aa, synthetic construct
  source 1..9: note = Seed: VFHLYLQYI
VFHLYLQYM

SEQ ID NO: 68735 - protein, 9 aa, synthetic construct
  source 1..9: note = Seed: VFHLYLQYI
VFHLYLQYY

SEQ ID NO: 68736 - protein, 9 aa, synthetic construct
  source 1..9: note = Seed: VTHSKGLYR
VFHSKGLYK

SEQ ID NO: 68737 - protein, 9 aa, synthetic construct
  source 1..9: note = Seed: VTHSKGLYR
VFHSKGLYR

SEQ ID NO: 68738 - protein, 10 aa, synthetic construct
  source 1..10: note = Seed: VTHSKGLYRK
VFHSKGLYRR

SEQ ID NO: 68739 - protein, 10 aa, synthetic construct
  source 1..10: note = Seed: VLHSYFTSDY
VFHSYFTSDY

SEQ ID NO: 68740 - protein, 11 aa, synthetic construct
  source 1..11: note = Seed: VLHSYFTSDYY
VFHSYFTSDYW

SEQ ID NO: 68741 - protein, 11 aa, synthetic construct
  source 1..11: note = Seed: VLHSYFTSDYY
VFHSYFTSDYY

SEQ ID NO: 68742 - protein, 9 aa, synthetic construct
  source 1..9: note = Seed: VEHVTFFIY
VFHVTFFIY

SEQ ID NO: 68743 - protein, 10 aa, synthetic construct
  source 1..10: note = Seed: VTIAEILLII
VFIAEILLIV

SEQ ID NO: 68744 - protein, 10 aa, synthetic construct
  source 1..10: note = Seed: VSICSTMTNR
VFICSTMTNR

SEQ ID NO: 68745 - protein, 10 aa, synthetic construct
  source 1..10: note = Seed: VQIDRLITGR
VFIDRLITGR

SEQ ID NO: 68746 - protein, 9 aa, synthetic construct
  source 1..9: note = Seed: VYIKNADIV
VFIKNADIF

SEQ ID NO: 68747 - protein, 9 aa, synthetic construct
  source 1..9: note = Seed: VYIKNADIV
VFIKNADIM

SEQ ID NO: 68748 - protein, 9 aa, synthetic construct
  source 1..9: note = Seed: VYIKNADIV
VFIKNADIW

SEQ ID NO: 68749 - protein, 10 aa, synthetic construct
  source 1..10: note = Seed: VNINIVGDFK
VFINIVGDFR

SEQ ID NO: 68750 - protein, 9 aa, synthetic construct
  source 1..9: note = Seed: VVIPDYNTY
VFIPDYNTY

SEQ ID NO: 68751 - protein, 10 aa, synthetic construct
  source 1..10: note = Seed: VVIPDYNTYK
VFIPDYNTYK

SEQ ID NO: 68752 - protein, 10 aa, synthetic construct
  source 1..10: note = Seed: VVIPDYNTYK
VFIPDYNTYR

SEQ ID NO: 68753 - protein, 11 aa, synthetic construct
  source 1..11: note = Seed: VFKNIDGYFKI
VFKNIDGYFKF

SEQ ID NO: 68754 - protein, 10 aa, synthetic construct
  source 1..10: note = Seed: VFKNIDGYFK
VFKNIDGYFR

SEQ ID NO: 68755 - protein, 9 aa, synthetic construct
  source 1..9: note = Seed: VFKNIDGYF
VFKNIDGYM

SEQ ID NO: 68756 - protein, 9 aa, synthetic construct
  source 1..9: note = Seed: VFKNIDGYF
VFKNIDGYY

SEQ ID NO: 68757 - protein, 10 aa, synthetic construct
  source 1..10: note = Seed: VYKQFDTYNL
VFKQFDTYNF

SEQ ID NO: 68758 - protein, 11 aa, synthetic construct
  source 1..11: note = Seed: VYKQFDTYNLW
VFKQFDTYNLF

SEQ ID NO: 68759 - protein, 9 aa, synthetic construct
  source 1..9: note = Seed: VVKRHTFSN
VFKRHTFSA

SEQ ID NO: 68760 - protein, 9 aa, synthetic construct
  source 1..9: note = Seed: VVKRHTFSN
VFKRHTFSK

SEQ ID NO: 68761 - protein, 9 aa, synthetic construct
  source 1..9: note = Seed: VWKSYVHVV
VFKSYVHVF

SEQ ID NO: 68762 - protein, 9 aa, synthetic construct
  source 1..9: note = Seed: VWKSYVHVV
VFKSYVHVI

SEQ ID NO: 68763 - protein, 9 aa, synthetic construct
  source 1..9: note = Seed: VWKSYVHVV
VFKSYVHVL

SEQ ID NO: 68764 - protein, 9 aa, synthetic construct
  source 1..9: note = Seed: VWKSYVHVV
VFKSYVHVM

SEQ ID NO: 68765 - protein, 9 aa, synthetic construct
  source 1..9: note = Seed: VWKSYVHVV
VFKSYVHVW

SEQ ID NO: 68766 - protein, 9 aa, synthetic construct
  source 1..9: note = Seed: VWKSYVHVV
VFKSYVHVY

SEQ ID NO: 68767 - protein, 11 aa, synthetic construct
  source 1..11: note = Seed: VAKYTQLCQYL
VFKYTQLCQYF

SEQ ID NO: 68768 - protein, 10 aa, synthetic construct
  source 1..10: note = Seed: VELFENKTTL
VFLFENKTTI

SEQ ID NO: 68769 - protein, 10 aa, synthetic construct
  source 1..10: note = Seed: VELFENKTTL
VFLFENKTTL

SEQ ID NO: 68770 - protein, 10 aa, synthetic construct
  source 1..10: note = Seed: VELFENKTTL
VFLFENKTTV

SEQ ID NO: 68771 - protein, 10 aa, synthetic construct
  source 1..10: note = Seed: VQLHNDILLA
VFLHNDILLA

SEQ ID NO: 68772 - protein, 10 aa, synthetic construct
  source 1..10: note = Seed: VQLHNDILLA
VFLHNDILLI

SEQ ID NO: 68773 - protein, 10 aa, synthetic construct
  source 1..10: note = Seed: VQLHNDILLA
VFLHNDILLL

SEQ ID NO: 68774 - protein, 10 aa, synthetic construct
  source 1..10: note = Seed: VQLHNDILLA
VFLHNDILLV

SEQ ID NO: 68775 - protein, 10 aa, synthetic construct
  source 1..10: note = Seed: VNLHSSRLSF
VFLHSSRLSF

SEQ ID NO: 68776 - protein, 10 aa, synthetic construct
  source 1..10: note = Seed: VNLHSSRLSF
VFLHSSRLSY

SEQ ID NO: 68777 - protein, 10 aa, synthetic construct
  source 1..10: note = Seed: VFLHVTYVPA
VFLHVTYVPV

SEQ ID NO: 68778 - protein, 10 aa, synthetic construct
  source 1..10: note = Seed: VNLKQLPFFY
VFLKQLPFFY

SEQ ID NO: 68779 - protein, 10 aa, synthetic construct
  source 1..10: note = Seed: VVLLSVLQQL
VFLLSVLQQA

SEQ ID NO: 68780 - protein, 10 aa, synthetic construct
  source 1..10: note = Seed: VVLLSVLQQL
VFLLSVLQQI

SEQ ID NO: 68781 - protein, 10 aa, synthetic construct
  source 1..10: note = Seed: VVLLSVLQQL
VFLLSVLQQL

SEQ ID NO: 68782 - protein, 10 aa, synthetic construct
  source 1..10: note = Seed: VVLLSVLQQL
VFLLSVLQQV

SEQ ID NO: 68783 - protein, 10 aa, synthetic construct
  source 1..10: note = Seed: VGLMWLSYFI
VFLMWLSYFA

SEQ ID NO: 68784 - protein, 10 aa, synthetic construct
  source 1..10: note = Seed: VGLMWLSYFI
VFLMWLSYFI

SEQ ID NO: 68785 - protein, 11 aa, synthetic construct
  source 1..11: note = Seed: VGLMWLSYFIA
VFLMWLSYFIL

SEQ ID NO: 68786 - protein, 11 aa, synthetic construct
  source 1..11: note = Seed: VGLMWLSYFIA
VFLMWLSYFIV

SEQ ID NO: 68787 - protein, 10 aa, synthetic construct
  source 1..10: note = Seed: VGLMWLSYFI
VFLMWLSYFL

SEQ ID NO: 68788 - protein, 10 aa, synthetic construct
  source 1..10: note = Seed: VGLMWLSYFI
VFLMWLSYFM

SEQ ID NO: 68789 - protein, 10 aa, synthetic construct
  source 1..10: note = Seed: VGLMWLSYFI
VFLMWLSYFT

SEQ ID NO: 68790 - protein, 10 aa, synthetic construct
  source 1..10: note = Seed: VGLMWLSYFI
VFLMWLSYFV

SEQ ID NO: 68791 - protein, 9 aa, synthetic construct
  source 1..9: note = Seed: VVLSFELLH
VFLSFELLF

SEQ ID NO: 68792 - protein, 9 aa, synthetic construct
  source 1..9: note = Seed: VVLSFELLH
VFLSFELLY

SEQ ID NO: 68793 - protein, 10 aa, synthetic construct
  source 1..10: note = Seed: VQLSLPVLQV
VFLSLPVLQV

SEQ ID NO: 68794 - protein, 10 aa, synthetic construct
  source 1..10: note = Seed: VLLSVLQQLR
VFLSVLQQLI

SEQ ID NO: 68795 - protein, 10 aa, synthetic construct
  source 1..10: note = Seed: VLLSVLQQLR
VFLSVLQQLL

SEQ ID NO: 68796 - protein, 10 aa, synthetic construct
  source 1..10: note = Seed: VLLSVLQQLR
VFLSVLQQLR

SEQ ID NO: 68797 - protein, 10 aa, synthetic construct
  source 1..10: note = Seed: VLLSVLQQLR
VFLSVLQQLV

SEQ ID NO: 68798 - protein, 10 aa, synthetic construct
  source 1..10: note = Seed: VELVAELEGI
VFLVAELEGI

SEQ ID NO: 68799 - protein, 10 aa, synthetic construct
  source 1..10: note = Seed: VELVAELEGI
VFLVAELEGL

SEQ ID NO: 68800 - protein, 10 aa, synthetic construct
  source 1..10: note = Seed: VELVAELEGI
VFLVAELEGV

SEQ ID NO: 68801 - protein, 10 aa, synthetic construct
  source 1..10: note = Seed: VVMAYITGGV
VFMAYITGGA

SEQ ID NO: 68802 - protein, 10 aa, synthetic construct
  source 1..10: note = Seed: VVMAYITGGV
VFMAYITGGI

SEQ ID NO: 68803 - protein, 10 aa, synthetic construct
  source 1..10: note = Seed: VVMAYITGGV
VFMAYITGGL

SEQ ID NO: 68804 - protein, 10 aa, synthetic construct
  source 1..10: note = Seed: VVMAYITGGV
VFMAYITGGV

SEQ ID NO: 68805 - protein, 10 aa, synthetic construct
  source 1..10: note = Seed: VFMCVEYCPI
VFMCVEYCPF

SEQ ID NO: 68806 - protein, 10 aa, synthetic construct
  source 1..10: note = Seed: VFMCVEYCPI
VFMCVEYCPW

SEQ ID NO: 68807 - protein, 9 aa, synthetic construct
  source 1..9: note = Seed: VQMLSDTLK
VFMLSDTLR

SEQ ID NO: 68808 - protein, 10 aa, synthetic construct
  source 1..10: note = Seed: VRMYIFFASF
VFMYIFFASF

SEQ ID NO: 68809 - protein, 11 aa, synthetic construct
  source 1..11: note = Seed: VRMYIFFASFY
VFMYIFFASFY

SEQ ID NO: 68810 - protein, 10 aa, synthetic construct
  source 1..10: note = Seed: VRMYIFFASF
VFMYIFFASW

SEQ ID NO: 68811 - protein, 10 aa, synthetic construct
  source 1..10: note = Seed: VRMYIFFASF
VFMYIFFASY

SEQ ID NO: 68812 - protein, 11 aa, synthetic construct
  source 1..11: note = Seed: VFNGVSFSTFE
VFNGVSFSTFF

SEQ ID NO: 68813 - protein, 10 aa, synthetic construct
  source 1..10: note = Seed: VFNGVSFSTF
VFNGVSFSTM

SEQ ID NO: 68814 - protein, 10 aa, synthetic construct
  source 1..10: note = Seed: VFNGVSFSTF
VFNGVSFSTW

SEQ ID NO: 68815 - protein, 10 aa, synthetic construct
  source 1..10: note = Seed: VFNGVSFSTF
VFNGVSFSTY

SEQ ID NO: 68816 - protein, 9 aa, synthetic construct
  source 1..9: note = Seed: VYNPFMIDV
VFNPFMIDF

SEQ ID NO: 68817 - protein, 9 aa, synthetic construct
  source 1..9: note = Seed: VYNPFMIDV
VFNPFMIDL

SEQ ID NO: 68818 - protein, 9 aa, synthetic construct
  source 1..9: note = Seed: VYNPFMIDV
VFNPFMIDM

SEQ ID NO: 68819 - protein, 9 aa, synthetic construct
  source 1..9: note = Seed: VVNQNAQAL
VFNQNAQAF

SEQ ID NO: 68820 - protein, 9 aa, synthetic construct
  source 1..9: note = Seed: VVNQNAQAL
VFNQNAQAI

SEQ ID NO: 68821 - protein, 9 aa, synthetic construct
  source 1..9: note = Seed: VVNQNAQAL
VFNQNAQAL

SEQ ID NO: 68822 - protein, 9 aa, synthetic construct
  source 1..9: note = Seed: VVNQNAQAL
VFNQNAQAM

SEQ ID NO: 68823 - protein, 9 aa, synthetic construct
  source 1..9: note = Seed: VVNQNAQAL
VFNQNAQAV

SEQ ID NO: 68824 - protein, 9 aa, synthetic construct
  source 1..9: note = Seed: VVNQNAQAL
VFNQNAQAY

SEQ ID NO: 68825 - protein, 9 aa, synthetic construct
  source 1..9: note = Seed: VIPDYNTYK
VFPDYNTYR

SEQ ID NO: 68826 - protein, 10 aa, synthetic construct
  source 1..10: note = Seed: VLPFNDGVYF
VFPFNDGVYF

SEQ ID NO: 68827 - protein, 10 aa, synthetic construct
  source 1..10: note = Seed: VLPFNDGVYF
VFPFNDGVYM

SEQ ID NO: 68828 - protein, 10 aa, synthetic construct
  source 1..10: note = Seed: VLPFNDGVYF
VFPFNDGVYW

SEQ ID NO: 68829 - protein, 10 aa, synthetic construct
  source 1..10: note = Seed: VLPFNDGVYF
VFPFNDGVYY

SEQ ID NO: 68830 - protein, 9 aa, synthetic construct
  source 1..9: note = Seed: VRQCSGVTF
VFQCSGVTF

SEQ ID NO: 68831 - protein, 9 aa, synthetic construct
  source 1..9: note = Seed: VRQCSGVTF
VFQCSGVTI

SEQ ID NO: 68832 - protein, 9 aa, synthetic construct
  source 1..9: note = Seed: VRQCSGVTF
VFQCSGVTL

SEQ ID NO: 68833 - protein, 9 aa, synthetic construct
  source 1..9: note = Seed: VRQCSGVTF
VFQCSGVTM

SEQ ID NO: 68834 - protein, 9 aa, synthetic construct
  source 1..9: note = Seed: VRQCSGVTF
VFQCSGVTY

SEQ ID NO: 68835 - protein, 10 aa, synthetic construct
  source 1..10: note = Seed: VLQLPQGTTL
VFQLPQGTTF

SEQ ID NO: 68836 - protein, 10 aa, synthetic construct
  source 1..10: note = Seed: VLQLPQGTTL
VFQLPQGTTM

SEQ ID NO: 68837 - protein, 10 aa, synthetic construct
  source 1..10: note = Seed: VLQLPQGTTL
VFQLPQGTTY

SEQ ID NO: 68838 - protein, 9 aa, synthetic construct
  source 1..9: note = Seed: VVQQLPETY
VFQQLPETY

SEQ ID NO: 68839 - protein, 9 aa, synthetic construct
  source 1..9: note = Seed: VFQTRAGCL
VFQTRAGCF

SEQ ID NO: 68840 - protein, 9 aa, synthetic construct
  source 1..9: note = Seed: VFQTRAGCL
VFQTRAGCM

SEQ ID NO: 68841 - protein, 9 aa, synthetic construct
  source 1..9: note = Seed: VFQTRAGCL
VFQTRAGCY

SEQ ID NO: 68842 - protein, 9 aa, synthetic construct
  source 1..9: note = Seed: VTRCLNRVC
VFRCLNRVK

SEQ ID NO: 68843 - protein, 10 aa, synthetic construct
  source 1..10: note = Seed: VARDLSLQFK
VFRDLSLQFK

SEQ ID NO: 68844 - protein, 10 aa, synthetic construct
  source 1..10: note = Seed: VARDLSLQFK
VFRDLSLQFR

SEQ ID NO: 68845 - protein, 10 aa, synthetic construct
  source 1..10: note = Seed: VNRFNVAITR
VFRFNVAITR

SEQ ID NO: 68846 - protein, 8 aa, synthetic construct
  source 1..8: note = Seed: VYRGTTTY
VFRGTTTF

SEQ ID NO: 68847 - protein, 8 aa, synthetic construct
  source 1..8: note = Seed: VYRGTTTY
VFRGTTTL

SEQ ID NO: 68848 - protein, 8 aa, synthetic construct
  source 1..8: note = Seed: VYRGTTTY
VFRGTTTM

SEQ ID NO: 68849 - protein, 9 aa, synthetic construct
  source 1..9: note = Seed: VYRGTTTYK
VFRGTTTYK

SEQ ID NO: 68850 - protein, 10 aa, synthetic construct
  source 1..10: note = Seed: VYRGTTTYKL
VFRGTTTYKF

SEQ ID NO: 68851 - protein, 9 aa, synthetic construct
  source 1..9: note = Seed: VYRGTTTYK
VFRGTTTYR

SEQ ID NO: 68852 - protein, 11 aa, synthetic construct
  source 1..11: note = Seed: VKRTIKGTHHW
VFRTIKGTHHW

SEQ ID NO: 68853 - protein, 10 aa, synthetic construct
  source 1..10: note = Seed: VTSAMQTMLF
VFSAMQTMLF

SEQ ID NO: 68854 - protein, 10 aa, synthetic construct
  source 1..10: note = Seed: VTSAMQTMLF
VFSAMQTMLW

SEQ ID NO: 68855 - protein, 10 aa, synthetic construct
  source 1..10: note = Seed: VTSAMQTMLF
VFSAMQTMLY

SEQ ID NO: 68856 - protein, 9 aa, synthetic construct
  source 1..9: note = Seed: VYSFLPGVY
VFSFLPGVF

SEQ ID NO: 68857 - protein, 9 aa, synthetic construct
  source 1..9: note = Seed: VYSFLPGVY
VFSFLPGVL

SEQ ID NO: 68858 - protein, 9 aa, synthetic construct
  source 1..9: note = Seed: VYSFLPGVY
VFSFLPGVM

SEQ ID NO: 68859 - protein, 9 aa, synthetic construct
  source 1..9: note = Seed: VYSFLPGVY
VFSFLPGVY

SEQ ID NO: 68860 - protein, 11 aa, synthetic construct
  source 1..11: note = Seed: VYSFLPGVYSV
VFSFLPGVYSF

SEQ ID NO: 68861 - protein, 9 aa, synthetic construct
  source 1..9: note = Seed: VNSFSGYLK
VFSFSGYLK

SEQ ID NO: 68862 - protein, 10 aa, synthetic construct
  source 1..10: note = Seed: VNSFSGYLKL
VFSFSGYLKF

SEQ ID NO: 68863 - protein, 10 aa, synthetic construct
  source 1..10: note = Seed: VNSFSGYLKL
VFSFSGYLKM

SEQ ID NO: 68864 - protein, 10 aa, synthetic construct
  source 1..10: note = Seed: VNSFSGYLKL
VFSFSGYLKW

SEQ ID NO: 68865 - protein, 10 aa, synthetic construct
  source 1..10: note = Seed: VNSFSGYLKL
VFSFSGYLKY

SEQ ID NO: 68866 - protein, 9 aa, synthetic construct
  source 1..9: note = Seed: VNSFSGYLK
VFSFSGYLR

SEQ ID NO: 68867 - protein, 9 aa, synthetic construct
  source 1..9: note = Seed: VLSGHNLAK
VFSGHNLAR

SEQ ID NO: 68868 - protein, 10 aa, synthetic construct
  source 1..10: note = Seed: VYSSANNCTF
VFSSANNCTF

SEQ ID NO: 68869 - protein, 11 aa, synthetic construct
  source 1..11: note = Seed: VYSSANNCTFE
VFSSANNCTFF

SEQ ID NO: 68870 - protein, 10 aa, synthetic construct
  source 1..10: note = Seed: VYSSANNCTF
VFSSANNCTW

SEQ ID NO: 68871 - protein, 9 aa, synthetic construct
  source 1..9: note = Seed: VYSTGSNVF
VFSTGSNVF

SEQ ID NO: 68872 - protein, 9 aa, synthetic construct
  source 1..9: note = Seed: VYSTGSNVF
VFSTGSNVI

SEQ ID NO: 68873 - protein, 9 aa, synthetic construct
  source 1..9: note = Seed: VYSTGSNVF
VFSTGSNVL

SEQ ID NO: 68874 - protein, 9 aa, synthetic construct
  source 1..9: note = Seed: VYSTGSNVF
VFSTGSNVM

SEQ ID NO: 68875 - protein, 9 aa, synthetic construct
  source 1..9: note = Seed: VYSTGSNVF
VFSTGSNVY

SEQ ID NO: 68876 - protein, 9 aa, synthetic construct
  source 1..9: note = Seed: VVSTGYHFR
VFSTGYHFK

SEQ ID NO: 68877 - protein, 9 aa, synthetic construct
  source 1..9: note = Seed: VVSTGYHFR
VFSTGYHFR

SEQ ID NO: 68878 - protein, 10 aa, synthetic construct
  source 1..10: note = Seed: VVSTGYHFRE
VFSTGYHFRR

SEQ ID NO: 68879 - protein, 9 aa, synthetic construct
  source 1..9: note = Seed: VQSTQWSLF
VFSTQWSLF

SEQ ID NO: 68880 - protein, 9 aa, synthetic construct
  source 1..9: note = Seed: VQSTQWSLF
VFSTQWSLL

SEQ ID NO: 68881 - protein, 9 aa, synthetic construct
  source 1..9: note = Seed: VQSTQWSLF
VFSTQWSLW

SEQ ID NO: 68882 - protein, 11 aa, synthetic construct
  source 1..11: note = Seed: VDSYYSLLMPI
VFSYYSLLMPF

SEQ ID NO: 68883 - protein, 9 aa, synthetic construct
  source 1..9: note = Seed: VFTGYRVTK
VFTGYRVTR

SEQ ID NO: 68884 - protein, 10 aa, synthetic construct
  source 1..10: note = Seed: VRTIKVFTTV
VFTIKVFTTV

SEQ ID NO: 68885 - protein, 9 aa, synthetic construct
  source 1..9: note = Seed: VVTTKIALK
VFTTKIALR

SEQ ID NO: 68886 - protein, 10 aa, synthetic construct
  source 1..10: note = Seed: VNVAFELWAK
VFVAFELWAR

SEQ ID NO: 68887 - protein, 11 aa, synthetic construct
  source 1..11: note = Seed: VNVLAWLYAAV
VFVLAWLYAAV

SEQ ID NO: 68888 - protein, 10 aa, synthetic construct
  source 1..10: note = Seed: VNVLAWLYAA
VFVLAWLYAI

SEQ ID NO: 68889 - protein, 10 aa, synthetic construct
  source 1..10: note = Seed: VNVLAWLYAA
VFVLAWLYAL

SEQ ID NO: 68890 - protein, 10 aa, synthetic construct
  source 1..10: note = Seed: VNVLAWLYAA
VFVLAWLYAV

SEQ ID NO: 68891 - protein, 11 aa, synthetic construct
  source 1..11: note = Seed: VFVLWAHGFEL
VFVLWAHGFEA

SEQ ID NO: 68892 - protein, 11 aa, synthetic construct
  source 1..11: note = Seed: VFVLWAHGFEL
VFVLWAHGFEI

SEQ ID NO: 68893 - protein, 11 aa, synthetic construct
  source 1..11: note = Seed: VFVLWAHGFEL
VFVLWAHGFEV

SEQ ID NO: 68894 - protein, 9 aa, synthetic construct
  source 1..9: note = Seed: VFVLWAHGF
VFVLWAHGY

SEQ ID NO: 68895 - protein, 10 aa, synthetic construct
  source 1..10: note = Seed: VLVQSTQWSL
VFVQSTQWSV

SEQ ID NO: 68896 - protein, 9 aa, synthetic construct
  source 1..9: note = Seed: VFVSNGTHW
VFVSNGTHF

SEQ ID NO: 68897 - protein, 9 aa, synthetic construct
  source 1..9: note = Seed: VFVSNGTHW
VFVSNGTHI

SEQ ID NO: 68898 - protein, 9 aa, synthetic construct
  source 1..9: note = Seed: VFVSNGTHW
VFVSNGTHL

SEQ ID NO: 68899 - protein, 9 aa, synthetic construct
  source 1..9: note = Seed: VFVSNGTHW
VFVSNGTHM

SEQ ID NO: 68900 - protein, 9 aa, synthetic construct
  source 1..9: note = Seed: VFVSNGTHW
VFVSNGTHY

SEQ ID NO: 68901 - protein, 10 aa, synthetic construct
  source 1..10: note = Seed: VPVVDSYYSL
VFVVDSYYSV

SEQ ID NO: 68902 - protein, 9 aa, synthetic construct
  source 1..9: note = Seed: VLWAHGFEL
VFWAHGFEF

SEQ ID NO: 68903 - protein, 9 aa, synthetic construct
  source 1..9: note = Seed: VLWAHGFEL
VFWAHGFEV

SEQ ID NO: 68904 - protein, 9 aa, synthetic construct
  source 1..9: note = Seed: VMYASAVVL
VFYASAVVF

SEQ ID NO: 68905 - protein, 9 aa, synthetic construct
  source 1..9: note = Seed: VMYASAVVL
VFYASAVVI

SEQ ID NO: 68906 - protein, 9 aa, synthetic construct
  source 1..9: note = Seed: VMYASAVVL
VFYASAVVL

SEQ ID NO: 68907 - protein, 10 aa, synthetic construct
  source 1..10: note = Seed: VMYASAVVLL
VFYASAVVLF

SEQ ID NO: 68908 - protein, 10 aa, synthetic construct
  source 1..10: note = Seed: VMYASAVVLL
VFYASAVVLI

SEQ ID NO: 68909 - protein, 10 aa, synthetic construct
  source 1..10: note = Seed: VMYASAVVLL
VFYASAVVLL

SEQ ID NO: 68910 - protein, 11 aa, synthetic construct
  source 1..11: note = Seed: VMYASAVVLLI
VFYASAVVLLF

SEQ ID NO: 68911 - protein, 10 aa, synthetic construct
  source 1..10: note = Seed: VMYASAVVLL
VFYASAVVLM

SEQ ID NO: 68912 - protein, 10 aa, synthetic construct
  source 1..10: note = Seed: VMYASAVVLL
VFYASAVVLW

SEQ ID NO: 68913 - protein, 9 aa, synthetic construct
  source 1..9: note = Seed: VMYASAVVL
VFYASAVVM

SEQ ID NO: 68914 - protein, 9 aa, synthetic construct
  source 1..9: note = Seed: VMYASAVVL
VFYASAVVV

SEQ ID NO: 68915 - protein, 9 aa, synthetic construct
  source 1..9: note = Seed: VMYASAVVL
VFYASAVVY

SEQ ID NO: 68916 - protein, 10 aa, synthetic construct
  source 1..10: note = Seed: VPYCYDTNVL
VFYCYDTNVF

SEQ ID NO: 68917 - protein, 9 aa, synthetic construct
  source 1..9: note = Seed: VAYFNMVYM
VFYFNMVYF

SEQ ID NO: 68918 - protein, 9 aa, synthetic construct
  source 1..9: note = Seed: VAYFNMVYM
VFYFNMVYL

SEQ ID NO: 68919 - protein, 9 aa, synthetic construct
  source 1..9: note = Seed: VAYFNMVYM
VFYFNMVYM

SEQ ID NO: 68920 - protein, 10 aa, synthetic construct
  source 1..10: note = Seed: VGYLQPRTFL
VFYLQPRTFF

SEQ ID NO: 68921 - protein, 11 aa, synthetic construct
  source 1..11: note = Seed: VGYLQPRTFLL
VFYLQPRTFLV

SEQ ID NO: 68922 - protein, 10 aa, synthetic construct
  source 1..10: note = Seed: VGYLQPRTFL
VFYLQPRTFM

SEQ ID NO: 68923 - protein, 10 aa, synthetic construct
  source 1..10: note = Seed: VGYLQPRTFL
VFYLQPRTFW

SEQ ID NO: 68924 - protein, 10 aa, synthetic construct
  source 1..10: note = Seed: VGYLQPRTFL
VFYLQPRTFY

SEQ ID NO: 68925 - protein, 10 aa, synthetic construct
  source 1..10: note = Seed: VLYQPPQTSI
VFYQPPQTSF

SEQ ID NO: 68926 - protein, 10 aa, synthetic construct
  source 1..10: note = Seed: VLYQPPQTSI
VFYQPPQTSL

SEQ ID NO: 68927 - protein, 10 aa, synthetic construct
  source 1..10: note = Seed: VLYQPPQTSI
VFYQPPQTSM

SEQ ID NO: 68928 - protein, 10 aa, synthetic construct
  source 1..10: note = Seed: VLYQPPQTSI
VFYQPPQTSW

SEQ ID NO: 68929 - protein, 10 aa, synthetic construct
  source 1..10: note = Seed: VLYQPPQTSI
VFYQPPQTSY

SEQ ID NO: 68930 - protein, 10 aa, synthetic construct
  source 1..10: note = Seed: VGYQPYRVVV
VFYQPYRVVF

SEQ ID NO: 68931 - protein, 10 aa, synthetic construct
  source 1..10: note = Seed: VGYQPYRVVV
VFYQPYRVVI

SEQ ID NO: 68932 - protein, 10 aa, synthetic construct
  source 1..10: note = Seed: VGYQPYRVVV
VFYQPYRVVL

SEQ ID NO: 68933 - protein, 10 aa, synthetic construct
  source 1..10: note = Seed: VGYQPYRVVV
VFYQPYRVVM

SEQ ID NO: 68934 - protein, 10 aa, synthetic construct
  source 1..10: note = Seed: VGYQPYRVVV
VFYQPYRVVW

SEQ ID NO: 68935 - protein, 10 aa, synthetic construct
  source 1..10: note = Seed: VGYQPYRVVV
VFYQPYRVVY

SEQ ID NO: 68936 - protein, 9 aa, synthetic construct
  source 1..9: note = Seed: VVYRGTTTY
VFYRGTTTF

SEQ ID NO: 68937 - protein, 9 aa, synthetic construct
  source 1..9: note = Seed: VVYRGTTTY
VFYRGTTTH

SEQ ID NO: 68938 - protein, 9 aa, synthetic construct
  source 1..9: note = Seed: VVYRGTTTY
VFYRGTTTI

SEQ ID NO: 68939 - protein, 9 aa, synthetic construct
  source 1..9: note = Seed: VVYRGTTTY
VFYRGTTTL

SEQ ID NO: 68940 - protein, 9 aa, synthetic construct
  source 1..9: note = Seed: VVYRGTTTY
VFYRGTTTM

SEQ ID NO: 68941 - protein, 9 aa, synthetic construct
  source 1..9: note = Seed: VVYRGTTTY
VFYRGTTTV

SEQ ID NO: 68942 - protein, 9 aa, synthetic construct
  source 1..9: note = Seed: VVYRGTTTY
VFYRGTTTW

SEQ ID NO: 68943 - protein, 9 aa, synthetic construct
  source 1..9: note = Seed: VVYRGTTTY
VFYRGTTTY

SEQ ID NO: 68944 - protein, 10 aa, synthetic construct
  source 1..10: note = Seed: VVYRGTTTYK
VFYRGTTTYK

SEQ ID NO: 68945 - protein, 10 aa, synthetic construct
  source 1..10: note = Seed: VVYRGTTTYK
VFYRGTTTYR

SEQ ID NO: 68946 - protein, 9 aa, synthetic construct
  source 1..9: note = Seed: VYYTSNPTT
VFYTSNPTF

SEQ ID NO: 68947 - protein, 9 aa, synthetic construct
  source 1..9: note = Seed: VYYTSNPTT
VFYTSNPTI

SEQ ID NO: 68948 - protein, 9 aa, synthetic construct
  source 1..9: note = Seed: VYYTSNPTT
VFYTSNPTL

SEQ ID NO: 68949 - protein, 9 aa, synthetic construct
  source 1..9: note = Seed: VYYTSNPTT
VFYTSNPTM

SEQ ID NO: 68950 - protein, 10 aa, synthetic construct
  source 1..10: note = Seed: VYYTSNPTTF
VFYTSNPTTF

SEQ ID NO: 68951 - protein, 11 aa, synthetic construct
  source 1..11: note = Seed: VYYTSNPTTFH
VFYTSNPTTFF

SEQ ID NO: 68952 - protein, 10 aa, synthetic construct
  source 1..10: note = Seed: VYYTSNPTTF
VFYTSNPTTL

SEQ ID NO: 68953 - protein, 10 aa, synthetic construct
  source 1..10: note = Seed: VYYTSNPTTF
VFYTSNPTTM

SEQ ID NO: 68954 - protein, 10 aa, synthetic construct
  source 1..10: note = Seed: VYYTSNPTTF
VFYTSNPTTW

SEQ ID NO: 68955 - protein, 10 aa, synthetic construct
  source 1..10: note = Seed: VYYTSNPTTF
VFYTSNPTTY

SEQ ID NO: 68956 - protein, 9 aa, synthetic construct
  source 1..9: note = Seed: VYYTSNPTT
VFYTSNPTV

SEQ ID NO: 68957 - protein, 9 aa, synthetic construct
  source 1..9: note = Seed: VYYTSNPTT
VFYTSNPTY

SEQ ID NO: 68958 - protein, 9 aa, synthetic construct
  source 1..9: note = Seed: VLYYQNNVF
VFYYQNNVF

SEQ ID NO: 68959 - protein, 10 aa, synthetic construct
  source 1..10: note = Seed: VLYYQNNVFM
VFYYQNNVFF

SEQ ID NO: 68960 - protein, 10 aa, synthetic construct
  source 1..10: note = Seed: VLYYQNNVFM
VFYYQNNVFI

SEQ ID NO: 68961 - protein, 10 aa, synthetic construct
  source 1..10: note = Seed: VLYYQNNVFM
VFYYQNNVFL

SEQ ID NO: 68962 - protein, 10 aa, synthetic construct
  source 1..10: note = Seed: VLYYQNNVFM
VFYYQNNVFM

SEQ ID NO: 68963 - protein, 10 aa, synthetic construct
  source 1..10: note = Seed: VLYYQNNVFM
VFYYQNNVFW

SEQ ID NO: 68964 - protein, 10 aa, synthetic construct
  source 1..10: note = Seed: VLYYQNNVFM
VFYYQNNVFY

SEQ ID NO: 68965 - protein, 9 aa, synthetic construct
  source 1..9: note = Seed: VLYYQNNVF
VFYYQNNVI

SEQ ID NO: 68966 - protein, 9 aa, synthetic construct
  source 1..9: note = Seed: VLYYQNNVF
VFYYQNNVL

SEQ ID NO: 68967 - protein, 9 aa, synthetic construct
  source 1..9: note = Seed: VLYYQNNVF
VFYYQNNVM

SEQ ID NO: 68968 - protein, 9 aa, synthetic construct
  source 1..9: note = Seed: VLYYQNNVF
VFYYQNNVV

SEQ ID NO: 68969 - protein, 9 aa, synthetic construct
  source 1..9: note = Seed: VLYYQNNVF
VFYYQNNVY

SEQ ID NO: 68970 - protein, 10 aa, synthetic construct
  source 1..10: note = Seed: VLAAECTIFK
VGAAECTIFR

SEQ ID NO: 68971 - protein, 9 aa, synthetic construct
  source 1..9: note = Seed: VTANVNALL
VGANVNALW

SEQ ID NO: 68972 - protein, 9 aa, synthetic construct
  source 1..9: note = Seed: VVDSYYSLL
VGDSYYSLL

SEQ ID NO: 68973 - protein, 11 aa, synthetic construct
  source 1..11: note = Seed: VYDYLVSTQEF
VGDYLVSTQEF

SEQ ID NO: 68974 - protein, 11 aa, synthetic construct
  source 1..11: note = Seed: VYDYLVSTQEF
VGDYLVSTQEW

SEQ ID NO: 68975 - protein, 10 aa, synthetic construct
  source 1..10: note = Seed: VAEWFLAYIL
VGEWFLAYIL

SEQ ID NO: 68976 - protein, 11 aa, synthetic construct
  source 1..11: note = Seed: VSFLAHIQWMV
VGFLAHIQWMV

SEQ ID NO: 68977 - protein, 9 aa, synthetic construct
  source 1..9: note = Seed: VVFLHVTYV
VGFLHVTYK

SEQ ID NO: 68978 - protein, 10 aa, synthetic construct
  source 1..10: note = Seed: VEFLRDGWEI
VGFLRDGWEF

SEQ ID NO: 68979 - protein, 11 aa, synthetic construct
  source 1..11: note = Seed: VLHSYFTSDYY
VGHSYFTSDYW

SEQ ID NO: 68980 - protein, 10 aa, synthetic construct
  source 1..10: note = Seed: VTIAEILLII
VGIAEILLIW

SEQ ID NO: 68981 - protein, 9 aa, synthetic construct
  source 1..9: note = Seed: VTIAEILLI
VGIAEILLW

SEQ ID NO: 68982 - protein, 9 aa, synthetic construct
  source 1..9: note = Seed: VSIINNTVY
VGIINNTVW

SEQ ID NO: 68983 - protein, 10 aa, synthetic construct
  source 1..10: note = Seed: VAIKITEHSW
VGIKITEHSW

SEQ ID NO: 68984 - protein, 10 aa, synthetic construct
  source 1..10: note = Seed: VNINIVGDFK
VGINIVGDFR

SEQ ID NO: 68985 - protein, 9 aa, synthetic construct
  source 1..9: note = Seed: VVKRHTFSN
VGKRHTFSK

SEQ ID NO: 68986 - protein, 11 aa, synthetic construct
  source 1..11: note = Seed: VAKYTQLCQYL
VGKYTQLCQYF

SEQ ID NO: 68987 - protein, 10 aa, synthetic construct
  source 1..10: note = Seed: VELFENKTTL
VGLFENKTTV

SEQ ID NO: 68988 - protein, 10 aa, synthetic construct
  source 1..10: note = Seed: VQLHNDILLA
VGLHNDILLV

SEQ ID NO: 68989 - protein, 10 aa, synthetic construct
  source 1..10: note = Seed: VNLHSSRLSF
VGLHSSRLSF

SEQ ID NO: 68990 - protein, 10 aa, synthetic construct
  source 1..10: note = Seed: VNLHSSRLSF
VGLHSSRLSY

SEQ ID NO: 68991 - protein, 10 aa, synthetic construct
  source 1..10: note = Seed: VVLLSVLQQL
VGLLSVLQQI

SEQ ID NO: 68992 - protein, 10 aa, synthetic construct
  source 1..10: note = Seed: VVLLSVLQQL
VGLLSVLQQL

SEQ ID NO: 68993 - protein, 10 aa, synthetic construct
  source 1..10: note = Seed: VVLLSVLQQL
VGLLSVLQQV

SEQ ID NO: 68994 - protein, 10 aa, synthetic construct
  source 1..10: note = Seed: VGLMWLSYFI
VGLMWLSYFA

SEQ ID NO: 68995 - protein, 10 aa, synthetic construct
  source 1..10: note = Seed: VGLMWLSYFI
VGLMWLSYFL

SEQ ID NO: 68996 - protein, 10 aa, synthetic construct
  source 1..10: note = Seed: VGLMWLSYFI
VGLMWLSYFM

SEQ ID NO: 68997 - protein, 10 aa, synthetic construct
  source 1..10: note = Seed: VGLMWLSYFI
VGLMWLSYFV

SEQ ID NO: 68998 - protein, 9 aa, synthetic construct
  source 1..9: note = Seed: VVLSFELLH
VGLSFELLY

SEQ ID NO: 68999 - protein, 10 aa, synthetic construct
  source 1..10: note = Seed: VELVAELEGI
VGLVAELEGV

SEQ ID NO: 69000 - protein, 10 aa, synthetic construct
  source 1..10: note = Seed: VVMAYITGGV
VGMAYITGGI

SEQ ID NO: 69001 - protein, 10 aa, synthetic construct
  source 1..10: note = Seed: VVMAYITGGV
VGMAYITGGL

SEQ ID NO: 69002 - protein, 10 aa, synthetic construct
  source 1..10: note = Seed: VVMAYITGGV
VGMAYITGGV

SEQ ID NO: 69003 - protein, 10 aa, synthetic construct
  source 1..10: note = Seed: VRMYIFFASF
VGMYIFFASF

SEQ ID NO: 69004 - protein, 10 aa, synthetic construct
  source 1..10: note = Seed: VRMYIFFASF
VGMYIFFASY

SEQ ID NO: 69005 - protein, 10 aa, synthetic construct
  source 1..10: note = Seed: VLPFNDGVYF
VGPFNDGVYW

SEQ ID NO: 69006 - protein, 10 aa, synthetic construct
  source 1..10: note = Seed: VLPFNDGVYF
VGPFNDGVYY

SEQ ID NO: 69007 - protein, 10 aa, synthetic construct
  source 1..10: note = Seed: VLQLPQGTTL
VGQLPQGTTF

SEQ ID NO: 69008 - protein, 10 aa, synthetic construct
  source 1..10: note = Seed: VLQLPQGTTL
VGQLPQGTTM

SEQ ID NO: 69009 - protein, 10 aa, synthetic construct
  source 1..10: note = Seed: VLQLPQGTTL
VGQLPQGTTY

SEQ ID NO: 69010 - protein, 9 aa, synthetic construct
  source 1..9: note = Seed: VYRGTTTYK
VGRGTTTYK

SEQ ID NO: 69011 - protein, 9 aa, synthetic construct
  source 1..9: note = Seed: VYRGTTTYK
VGRGTTTYR

SEQ ID NO: 69012 - protein, 11 aa, synthetic construct
  source 1..11: note = Seed: VKRTIKGTHHW
VGRTIKGTHHW

SEQ ID NO: 69013 - protein, 10 aa, synthetic construct
  source 1..10: note = Seed: VTSAMQTMLF
VGSAMQTMLF

SEQ ID NO: 69014 - protein, 10 aa, synthetic construct
  source 1..10: note = Seed: VTSAMQTMLF
VGSAMQTMLW

SEQ ID NO: 69015 - protein, 10 aa, synthetic construct
  source 1..10: note = Seed: VTSAMQTMLF
VGSAMQTMLY

SEQ ID NO: 69016 - protein, 9 aa, synthetic construct
  source 1..9: note = Seed: VTSAMQTML
VGSAMQTMW

SEQ ID NO: 69017 - protein, 9 aa, synthetic construct
  source 1..9: note = Seed: VYSFLPGVY
VGSFLPGVY

SEQ ID NO: 69018 - protein, 11 aa, synthetic construct
  source 1..11: note = Seed: VYSFLPGVYSV
VGSFLPGVYSF

SEQ ID NO: 69019 - protein, 10 aa, synthetic construct
  source 1..10: note = Seed: VNSFSGYLKL
VGSFSGYLKF

SEQ ID NO: 69020 - protein, 10 aa, synthetic construct
  source 1..10: note = Seed: VNSFSGYLKL
VGSFSGYLKM

SEQ ID NO: 69021 - protein, 10 aa, synthetic construct
  source 1..10: note = Seed: VNSFSGYLKL
VGSFSGYLKW

SEQ ID NO: 69022 - protein, 10 aa, synthetic construct
  source 1..10: note = Seed: VNSFSGYLKL
VGSFSGYLKY

SEQ ID NO: 69023 - protein, 9 aa, synthetic construct
  source 1..9: note = Seed: VNSFSGYLK
VGSFSGYLR

SEQ ID NO: 69024 - protein, 10 aa, synthetic construct
  source 1..10: note = Seed: VYSSANNCTF
VGSSANNCTW

SEQ ID NO: 69025 - protein, 9 aa, synthetic construct
  source 1..9: note = Seed: VVSTGYHFR
VGSTGYHFR

SEQ ID NO: 69026 - protein, 10 aa, synthetic construct
  source 1..10: note = Seed: VVSTGYHFRE
VGSTGYHFRR

SEQ ID NO: 69027 - protein, 11 aa, synthetic construct
  source 1..11: note = Seed: VDSYYSLLMPI
VGSYYSLLMPF

SEQ ID NO: 69028 - protein, 9 aa, synthetic construct
  source 1..9: note = Seed: VSTSGRWVL
VGTSGRWVW

SEQ ID NO: 69029 - protein, 10 aa, synthetic construct
  source 1..10: note = Seed: VNVAFELWAK
VGVAFELWAR

SEQ ID NO: 69030 - protein, 10 aa, synthetic construct
  source 1..10: note = Seed: VNVLAWLYAA
VGVLAWLYAI

SEQ ID NO: 69031 - protein, 10 aa, synthetic construct
  source 1..10: note = Seed: VNVLAWLYAA
VGVLAWLYAL

SEQ ID NO: 69032 - protein, 10 aa, synthetic construct
  source 1..10: note = Seed: VNVLAWLYAA
VGVLAWLYAV

SEQ ID NO: 69033 - protein, 11 aa, synthetic construct
  source 1..11: note = Seed: VFVLWAHGFEL
VGVLWAHGFEI

SEQ ID NO: 69034 - protein, 11 aa, synthetic construct
  source 1..11: note = Seed: VFVLWAHGFEL
VGVLWAHGFEL

SEQ ID NO: 69035 - protein, 11 aa, synthetic construct
  source 1..11: note = Seed: VFVLWAHGFEL
VGVLWAHGFEV

SEQ ID NO: 69036 - protein, 9 aa, synthetic construct
  source 1..9: note = Seed: VLWAHGFEL
VGWAHGFEF

SEQ ID NO: 69037 - protein, 9 aa, synthetic construct
  source 1..9: note = Seed: VLWAHGFEL
VGWAHGFEY

SEQ ID NO: 69038 - protein, 9 aa, synthetic construct
  source 1..9: note = Seed: VMYASAVVL
VGYASAVVF

SEQ ID NO: 69039 - protein, 10 aa, synthetic construct
  source 1..10: note = Seed: VMYASAVVLL
VGYASAVVLF

SEQ ID NO: 69040 - protein, 10 aa, synthetic construct
  source 1..10: note = Seed: VMYASAVVLL
VGYASAVVLI

SEQ ID NO: 69041 - protein, 10 aa, synthetic construct
  source 1..10: note = Seed: VMYASAVVLL
VGYASAVVLL

SEQ ID NO: 69042 - protein, 10 aa, synthetic construct
  source 1..10: note = Seed: VMYASAVVLL
VGYASAVVLM

SEQ ID NO: 69043 - protein, 10 aa, synthetic construct
  source 1..10: note = Seed: VMYASAVVLL
VGYASAVVLW

SEQ ID NO: 69044 - protein, 9 aa, synthetic construct
  source 1..9: note = Seed: VMYASAVVL
VGYASAVVM

SEQ ID NO: 69045 - protein, 9 aa, synthetic construct
  source 1..9: note = Seed: VMYASAVVL
VGYASAVVW

SEQ ID NO: 69046 - protein, 9 aa, synthetic construct
  source 1..9: note = Seed: VMYASAVVL
VGYASAVVY

SEQ ID NO: 69047 - protein, 10 aa, synthetic construct
  source 1..10: note = Seed: VGYLQPRTFL
VGYLQPRTFF

SEQ ID NO: 69048 - protein, 11 aa, synthetic construct
  source 1..11: note = Seed: VGYLQPRTFLL
VGYLQPRTFLV

SEQ ID NO: 69049 - protein, 10 aa, synthetic construct
  source 1..10: note = Seed: VLYQPPQTSI
VGYQPPQTSF

SEQ ID NO: 69050 - protein, 10 aa, synthetic construct
  source 1..10: note = Seed: VLYQPPQTSI
VGYQPPQTSM

SEQ ID NO: 69051 - protein, 10 aa, synthetic construct
  source 1..10: note = Seed: VLYQPPQTSI
VGYQPPQTSW

SEQ ID NO: 69052 - protein, 10 aa, synthetic construct
  source 1..10: note = Seed: VGYQPYRVVV
VGYQPYRVVF

SEQ ID NO: 69053 - protein, 10 aa, synthetic construct
  source 1..10: note = Seed: VGYQPYRVVV
VGYQPYRVVI

SEQ ID NO: 69054 - protein, 10 aa, synthetic construct
  source 1..10: note = Seed: VGYQPYRVVV
VGYQPYRVVL

SEQ ID NO: 69055 - protein, 10 aa, synthetic construct
  source 1..10: note = Seed: VGYQPYRVVV
VGYQPYRVVM

SEQ ID NO: 69056 - protein, 10 aa, synthetic construct
  source 1..10: note = Seed: VGYQPYRVVV
VGYQPYRVVW

SEQ ID NO: 69057 - protein, 9 aa, synthetic construct
  source 1..9: note = Seed: VVYRGTTTY
VGYRGTTTF

SEQ ID NO: 69058 - protein, 9 aa, synthetic construct
  source 1..9: note = Seed: VVYRGTTTY
VGYRGTTTW

SEQ ID NO: 69059 - protein, 9 aa, synthetic construct
  source 1..9: note = Seed: VVYRGTTTY
VGYRGTTTY

SEQ ID NO: 69060 - protein, 10 aa, synthetic construct
  source 1..10: note = Seed: VVYRGTTTYK
VGYRGTTTYK

SEQ ID NO: 69061 - protein, 10 aa, synthetic construct
  source 1..10: note = Seed: VVYRGTTTYK
VGYRGTTTYR

SEQ ID NO: 69062 - protein, 10 aa, synthetic construct
  source 1..10: note = Seed: VYYTSNPTTF
VGYTSNPTTF

SEQ ID NO: 69063 - protein, 9 aa, synthetic construct
  source 1..9: note = Seed: VLYYQNNVF
VGYYQNNVF

SEQ ID NO: 69064 - protein, 10 aa, synthetic construct
  source 1..10: note = Seed: VLYYQNNVFM
VGYYQNNVFF

SEQ ID NO: 69065 - protein, 10 aa, synthetic construct
  source 1..10: note = Seed: VLYYQNNVFM
VGYYQNNVFI

SEQ ID NO: 69066 - protein, 10 aa, synthetic construct
  source 1..10: note = Seed: VLYYQNNVFM
VGYYQNNVFL

SEQ ID NO: 69067 - protein, 10 aa, synthetic construct
  source 1..10: note = Seed: VLYYQNNVFM
VGYYQNNVFW

SEQ ID NO: 69068 - protein, 9 aa, synthetic construct
  source 1..9: note = Seed: VLYYQNNVF
VGYYQNNVW

SEQ ID NO: 69069 - protein, 9 aa, synthetic construct
  source 1..9: note = Seed: VLYYQNNVF
VGYYQNNVY

SEQ ID NO: 69070 - protein, 9 aa, synthetic construct
  source 1..9: note = Seed: VLAAECTIF
VHAAECTIF

SEQ ID NO: 69071 - protein, 10 aa, synthetic construct
  source 1..10: note = Seed: VLAAECTIFK
VHAAECTIFR

SEQ ID NO: 69072 - protein, 9 aa, synthetic construct
  source 1..9: note = Seed: VLAAECTIF
VHAAECTIY

SEQ ID NO: 69073 - protein, 9 aa, synthetic construct
  source 1..9: note = Seed: VFAQVKQIY
VHAQVKQIY

SEQ ID NO: 69074 - protein, 9 aa, synthetic construct
  source 1..9: note = Seed: VNASSSEAF
VHASSSEAF

SEQ ID NO: 69075 - protein, 9 aa, synthetic construct
  source 1..9: note = Seed: VNASSSEAF
VHASSSEAY

SEQ ID NO: 69076 - protein, 11 aa, synthetic construct
  source 1..11: note = Seed: VYDYLVSTQEF
VHDYLVSTQEF

SEQ ID NO: 69077 - protein, 11 aa, synthetic construct
  source 1..11: note = Seed: VYDYLVSTQEF
VHDYLVSTQEW

SEQ ID NO: 69078 - protein, 10 aa, synthetic construct
  source 1..10: note = Seed: VAEWFLAYIL
VHEWFLAYIL

SEQ ID NO: 69079 - protein, 9 aa, synthetic construct
  source 1..9: note = Seed: VHFISNSWL
VHFISNSWF

SEQ ID NO: 69080 - protein, 9 aa, synthetic construct
  source 1..9: note = Seed: VHFISNSWL
VHFISNSWY

SEQ ID NO: 69081 - protein, 11 aa, synthetic construct
  source 1..11: note = Seed: VSFLAHIQWMV
VHFLAHIQWMV

SEQ ID NO: 69082 - protein, 10 aa, synthetic construct
  source 1..10: note = Seed: VEFLRDGWEI
VHFLRDGWEF

SEQ ID NO: 69083 - protein, 11 aa, synthetic construct
  source 1..11: note = Seed: VVFNGVSFSTF
VHFNGVSFSTY

SEQ ID NO: 69084 - protein, 9 aa, synthetic construct
  source 1..9: note = Seed: VPFVVSTGY
VHFVVSTGF

SEQ ID NO: 69085 - protein, 9 aa, synthetic construct
  source 1..9: note = Seed: VPFVVSTGY
VHFVVSTGY

SEQ ID NO: 69086 - protein, 9 aa, synthetic construct
  source 1..9: note = Seed: VMHANYIFW
VHHANYIFY

SEQ ID NO: 69087 - protein, 10 aa, synthetic construct
  source 1..10: note = Seed: VLHSYFTSDY
VHHSYFTSDF

SEQ ID NO: 69088 - protein, 10 aa, synthetic construct
  source 1..10: note = Seed: VLHSYFTSDY
VHHSYFTSDY

SEQ ID NO: 69089 - protein, 11 aa, synthetic construct
  source 1..11: note = Seed: VLHSYFTSDYY
VHHSYFTSDYW

SEQ ID NO: 69090 - protein, 9 aa, synthetic construct
  source 1..9: note = Seed: VEHVTFFIY
VHHVTFFIF

SEQ ID NO: 69091 - protein, 9 aa, synthetic construct
  source 1..9: note = Seed: VEHVTFFIY
VHHVTFFIY

SEQ ID NO: 69092 - protein, 9 aa, synthetic construct
  source 1..9: note = Seed: VQIDRLITG
VHIDRLITF

SEQ ID NO: 69093 - protein, 9 aa, synthetic construct
  source 1..9: note = Seed: VQIDRLITG
VHIDRLITY

SEQ ID NO: 69094 - protein, 9 aa, synthetic construct
  source 1..9: note = Seed: VSIINNTVY
VHIINNTVF

SEQ ID NO: 69095 - protein, 9 aa, synthetic construct
  source 1..9: note = Seed: VSIINNTVY
VHIINNTVY

SEQ ID NO: 69096 - protein, 9 aa, synthetic construct
  source 1..9: note = Seed: VVIPDYNTY
VHIPDYNTF

SEQ ID NO: 69097 - protein, 9 aa, synthetic construct
  source 1..9: note = Seed: VVIPDYNTY
VHIPDYNTY

SEQ ID NO: 69098 - protein, 11 aa, synthetic construct
  source 1..11: note = Seed: VAKYTQLCQYL
VHKYTQLCQYF

SEQ ID NO: 69099 - protein, 10 aa, synthetic construct
  source 1..10: note = Seed: VELFENKTTL
VHLFENKTTV

SEQ ID NO: 69100 - protein, 10 aa, synthetic construct
  source 1..10: note = Seed: VLLFLAFVVF
VHLFLAFVVY

SEQ ID NO: 69101 - protein, 10 aa, synthetic construct
  source 1..10: note = Seed: VQLHNDILLA
VHLHNDILLV

SEQ ID NO: 69102 - protein, 10 aa, synthetic construct
  source 1..10: note = Seed: VNLHSSRLSF
VHLHSSRLSF

SEQ ID NO: 69103 - protein, 10 aa, synthetic construct
  source 1..10: note = Seed: VNLHSSRLSF
VHLHSSRLSY

SEQ ID NO: 69104 - protein, 10 aa, synthetic construct
  source 1..10: note = Seed: VVLLSVLQQL
VHLLSVLQQI

SEQ ID NO: 69105 - protein, 10 aa, synthetic construct
  source 1..10: note = Seed: VVLLSVLQQL
VHLLSVLQQL

SEQ ID NO: 69106 - protein, 10 aa, synthetic construct
  source 1..10: note = Seed: VVLLSVLQQL
VHLLSVLQQV

SEQ ID NO: 69107 - protein, 9 aa, synthetic construct
  source 1..9: note = Seed: VGLMWLSYF
VHLMWLSYF

SEQ ID NO: 69108 - protein, 10 aa, synthetic construct
  source 1..10: note = Seed: VGLMWLSYFI
VHLMWLSYFA

SEQ ID NO: 69109 - protein, 10 aa, synthetic construct
  source 1..10: note = Seed: VGLMWLSYFI
VHLMWLSYFI

SEQ ID NO: 69110 - protein, 10 aa, synthetic construct
  source 1..10: note = Seed: VGLMWLSYFI
VHLMWLSYFL

SEQ ID NO: 69111 - protein, 10 aa, synthetic construct
  source 1..10: note = Seed: VGLMWLSYFI
VHLMWLSYFM

SEQ ID NO: 69112 - protein, 10 aa, synthetic construct
  source 1..10: note = Seed: VGLMWLSYFI
VHLMWLSYFV

SEQ ID NO: 69113 - protein, 9 aa, synthetic construct
  source 1..9: note = Seed: VGLMWLSYF
VHLMWLSYY

SEQ ID NO: 69114 - protein, 9 aa, synthetic construct
  source 1..9: note = Seed: VVLSFELLH
VHLSFELLY

SEQ ID NO: 69115 - protein, 10 aa, synthetic construct
  source 1..10: note = Seed: VELVAELEGI
VHLVAELEGV

SEQ ID NO: 69116 - protein, 10 aa, synthetic construct
  source 1..10: note = Seed: VVMAYITGGV
VHMAYITGGI

SEQ ID NO: 69117 - protein, 10 aa, synthetic construct
  source 1..10: note = Seed: VVMAYITGGV
VHMAYITGGL

SEQ ID NO: 69118 - protein, 10 aa, synthetic construct
  source 1..10: note = Seed: VVMAYITGGV
VHMAYITGGV

SEQ ID NO: 69119 - protein, 9 aa, synthetic construct
  source 1..9: note = Seed: VRMYIFFAS
VHMYIFFAA

SEQ ID NO: 69120 - protein, 10 aa, synthetic construct
  source 1..10: note = Seed: VRMYIFFASF
VHMYIFFASF

SEQ ID NO: 69121 - protein, 10 aa, synthetic construct
  source 1..10: note = Seed: VRMYIFFASF
VHMYIFFASM

SEQ ID NO: 69122 - protein, 10 aa, synthetic construct
  source 1..10: note = Seed: VRMYIFFASF
VHMYIFFASY

SEQ ID NO: 69123 - protein, 10 aa, synthetic construct
  source 1..10: note = Seed: VFNGVSFSTF
VHNGVSFSTF

SEQ ID NO: 69124 - protein, 10 aa, synthetic construct
  source 1..10: note = Seed: VFNGVSFSTF
VHNGVSFSTY

SEQ ID NO: 69125 - protein, 10 aa, synthetic construct
  source 1..10: note = Seed: VLPFNDGVYF
VHPFNDGVYF

SEQ ID NO: 69126 - protein, 10 aa, synthetic construct
  source 1..10: note = Seed: VLPFNDGVYF
VHPFNDGVYW

SEQ ID NO: 69127 - protein, 10 aa, synthetic construct
  source 1..10: note = Seed: VLPFNDGVYF
VHPFNDGVYY

SEQ ID NO: 69128 - protein, 9 aa, synthetic construct
  source 1..9: note = Seed: VRQCSGVTF
VHQCSGVTF

SEQ ID NO: 69129 - protein, 9 aa, synthetic construct
  source 1..9: note = Seed: VRQCSGVTF
VHQCSGVTY

SEQ ID NO: 69130 - protein, 10 aa, synthetic construct
  source 1..10: note = Seed: VLQLPQGTTL
VHQLPQGTTF

SEQ ID NO: 69131 - protein, 10 aa, synthetic construct
  source 1..10: note = Seed: VLQLPQGTTL
VHQLPQGTTM

SEQ ID NO: 69132 - protein, 10 aa, synthetic construct
  source 1..10: note = Seed: VLQLPQGTTL
VHQLPQGTTY

SEQ ID NO: 69133 - protein, 9 aa, synthetic construct
  source 1..9: note = Seed: VARDLSLQF
VHRDLSLQF

SEQ ID NO: 69134 - protein, 9 aa, synthetic construct
  source 1..9: note = Seed: VARDLSLQF
VHRDLSLQY

SEQ ID NO: 69135 - protein, 9 aa, synthetic construct
  source 1..9: note = Seed: VKRHTFSNY
VHRHTFSNF

SEQ ID NO: 69136 - protein, 9 aa, synthetic construct
  source 1..9: note = Seed: VKRHTFSNY
VHRHTFSNY

SEQ ID NO: 69137 - protein, 10 aa, synthetic construct
  source 1..10: note = Seed: VVRQCSGVTF
VHRQCSGVTF

SEQ ID NO: 69138 - protein, 10 aa, synthetic construct
  source 1..10: note = Seed: VVRQCSGVTF
VHRQCSGVTY

SEQ ID NO: 69139 - protein, 11 aa, synthetic construct
  source 1..11: note = Seed: VKRTIKGTHHW
VHRTIKGTHHW

SEQ ID NO: 69140 - protein, 10 aa, synthetic construct
  source 1..10: note = Seed: VTSAMQTMLF
VHSAMQTMLF

SEQ ID NO: 69141 - protein, 10 aa, synthetic construct
  source 1..10: note = Seed: VTSAMQTMLF
VHSAMQTMLW

SEQ ID NO: 69142 - protein, 10 aa, synthetic construct
  source 1..10: note = Seed: VTSAMQTMLF
VHSAMQTMLY

SEQ ID NO: 69143 - protein, 9 aa, synthetic construct
  source 1..9: note = Seed: VYSFLPGVY
VHSFLPGVF

SEQ ID NO: 69144 - protein, 9 aa, synthetic construct
  source 1..9: note = Seed: VYSFLPGVY
VHSFLPGVY

SEQ ID NO: 69145 - protein, 11 aa, synthetic construct
  source 1..11: note = Seed: VYSFLPGVYSV
VHSFLPGVYSF

SEQ ID NO: 69146 - protein, 10 aa, synthetic construct
  source 1..10: note = Seed: VNSFSGYLKL
VHSFSGYLKF

SEQ ID NO: 69147 - protein, 10 aa, synthetic construct
  source 1..10: note = Seed: VNSFSGYLKL
VHSFSGYLKM

SEQ ID NO: 69148 - protein, 10 aa, synthetic construct
  source 1..10: note = Seed: VNSFSGYLKL
VHSFSGYLKW

SEQ ID NO: 69149 - protein, 10 aa, synthetic construct
  source 1..10: note = Seed: VNSFSGYLKL
VHSFSGYLKY

SEQ ID NO: 69150 - protein, 10 aa, synthetic construct
  source 1..10: note = Seed: VYSSANNCTF
VHSSANNCTW

SEQ ID NO: 69151 - protein, 9 aa, synthetic construct
  source 1..9: note = Seed: VYSTGSNVF
VHSTGSNVF

SEQ ID NO: 69152 - protein, 9 aa, synthetic construct
  source 1..9: note = Seed: VYSTGSNVF
VHSTGSNVY

SEQ ID NO: 69153 - protein, 11 aa, synthetic construct
  source 1..11: note = Seed: VDSYYSLLMPI
VHSYYSLLMPF

SEQ ID NO: 69154 - protein, 10 aa, synthetic construct
  source 1..10: note = Seed: VNVAFELWAK
VHVAFELWAR

SEQ ID NO: 69155 - protein, 10 aa, synthetic construct
  source 1..10: note = Seed: VNVLAWLYAA
VHVLAWLYAI

SEQ ID NO: 69156 - protein, 10 aa, synthetic construct
  source 1..10: note = Seed: VNVLAWLYAA
VHVLAWLYAL

SEQ ID NO: 69157 - protein, 10 aa, synthetic construct
  source 1..10: note = Seed: VNVLAWLYAA
VHVLAWLYAV

SEQ ID NO: 69158 - protein, 11 aa, synthetic construct
  source 1..11: note = Seed: VFVLWAHGFEL
VHVLWAHGFEI

SEQ ID NO: 69159 - protein, 11 aa, synthetic construct
  source 1..11: note = Seed: VFVLWAHGFEL
VHVLWAHGFEL

SEQ ID NO: 69160 - protein, 11 aa, synthetic construct
  source 1..11: note = Seed: VFVLWAHGFEL
VHVLWAHGFEV

SEQ ID NO: 69161 - protein, 9 aa, synthetic construct
  source 1..9: note = Seed: VQVTCGTTT
VHVTCGTTF

SEQ ID NO: 69162 - protein, 9 aa, synthetic construct
  source 1..9: note = Seed: VQVTCGTTT
VHVTCGTTM

SEQ ID NO: 69163 - protein, 10 aa, synthetic construct
  source 1..10: note = Seed: VQVTCGTTTL
VHVTCGTTTY

SEQ ID NO: 69164 - protein, 9 aa, synthetic construct
  source 1..9: note = Seed: VQVTCGTTT
VHVTCGTTY

SEQ ID NO: 69165 - protein, 9 aa, synthetic construct
  source 1..9: note = Seed: VLWAHGFEL
VHWAHGFEF

SEQ ID NO: 69166 - protein, 9 aa, synthetic construct
  source 1..9: note = Seed: VLWAHGFEL
VHWAHGFEM

SEQ ID NO: 69167 - protein, 9 aa, synthetic construct
  source 1..9: note = Seed: VLWAHGFEL
VHWAHGFEY

SEQ ID NO: 69168 - protein, 9 aa, synthetic construct
  source 1..9: note = Seed: VMYASAVVL
VHYASAVVF

SEQ ID NO: 69169 - protein, 9 aa, synthetic construct
  source 1..9: note = Seed: VMYASAVVL
VHYASAVVL

SEQ ID NO: 69170 - protein, 10 aa, synthetic construct
  source 1..10: note = Seed: VMYASAVVLL
VHYASAVVLF

SEQ ID NO: 69171 - protein, 10 aa, synthetic construct
  source 1..10: note = Seed: VMYASAVVLL
VHYASAVVLI

SEQ ID NO: 69172 - protein, 10 aa, synthetic construct
  source 1..10: note = Seed: VMYASAVVLL
VHYASAVVLL

SEQ ID NO: 69173 - protein, 11 aa, synthetic construct
  source 1..11: note = Seed: VMYASAVVLLI
VHYASAVVLLF

SEQ ID NO: 69174 - protein, 10 aa, synthetic construct
  source 1..10: note = Seed: VMYASAVVLL
VHYASAVVLM

SEQ ID NO: 69175 - protein, 10 aa, synthetic construct
  source 1..10: note = Seed: VMYASAVVLL
VHYASAVVLW

SEQ ID NO: 69176 - protein, 10 aa, synthetic construct
  source 1..10: note = Seed: VMYASAVVLL
VHYASAVVLY

SEQ ID NO: 69177 - protein, 9 aa, synthetic construct
  source 1..9: note = Seed: VMYASAVVL
VHYASAVVM

SEQ ID NO: 69178 - protein, 9 aa, synthetic construct
  source 1..9: note = Seed: VMYASAVVL
VHYASAVVY

SEQ ID NO: 69179 - protein, 8 aa, synthetic construct
  source 1..8: note = Seed: VMYASAVV
VHYASAVY

SEQ ID NO: 69180 - protein, 10 aa, synthetic construct
  source 1..10: note = Seed: VPYCYDTNVL
VHYCYDTNVF

SEQ ID NO: 69181 - protein, 9 aa, synthetic construct
  source 1..9: note = Seed: VAYFNMVYM
VHYFNMVYF

SEQ ID NO: 69182 - protein, 9 aa, synthetic construct
  source 1..9: note = Seed: VAYFNMVYM
VHYFNMVYY

SEQ ID NO: 69183 - protein, 9 aa, synthetic construct
  source 1..9: note = Seed: VGYLQPRTF
VHYLQPRTF

SEQ ID NO: 69184 - protein, 10 aa, synthetic construct
  source 1..10: note = Seed: VGYLQPRTFL
VHYLQPRTFF

SEQ ID NO: 69185 - protein, 11 aa, synthetic construct
  source 1..11: note = Seed: VGYLQPRTFLL
VHYLQPRTFLV

SEQ ID NO: 69186 - protein, 9 aa, synthetic construct
  source 1..9: note = Seed: VGYLQPRTF
VHYLQPRTY

SEQ ID NO: 69187 - protein, 10 aa, synthetic construct
  source 1..10: note = Seed: VLYQPPQTSI
VHYQPPQTSF

SEQ ID NO: 69188 - protein, 10 aa, synthetic construct
  source 1..10: note = Seed: VLYQPPQTSI
VHYQPPQTSM

SEQ ID NO: 69189 - protein, 10 aa, synthetic construct
  source 1..10: note = Seed: VLYQPPQTSI
VHYQPPQTSW

SEQ ID NO: 69190 - protein, 10 aa, synthetic construct
  source 1..10: note = Seed: VGYQPYRVVV
VHYQPYRVVF

SEQ ID NO: 69191 - protein, 10 aa, synthetic construct
  source 1..10: note = Seed: VGYQPYRVVV
VHYQPYRVVI

SEQ ID NO: 69192 - protein, 10 aa, synthetic construct
  source 1..10: note = Seed: VGYQPYRVVV
VHYQPYRVVL

SEQ ID NO: 69193 - protein, 10 aa, synthetic construct
  source 1..10: note = Seed: VGYQPYRVVV
VHYQPYRVVM

SEQ ID NO: 69194 - protein, 10 aa, synthetic construct
  source 1..10: note = Seed: VGYQPYRVVV
VHYQPYRVVW

SEQ ID NO: 69195 - protein, 10 aa, synthetic construct
  source 1..10: note = Seed: VGYQPYRVVV
VHYQPYRVVY

SEQ ID NO: 69196 - protein, 9 aa, synthetic construct
  source 1..9: note = Seed: VVYRGTTTY
VHYRGTTTF

SEQ ID NO: 69197 - protein, 9 aa, synthetic construct
  source 1..9: note = Seed: VVYRGTTTY
VHYRGTTTL

SEQ ID NO: 69198 - protein, 9 aa, synthetic construct
  source 1..9: note = Seed: VVYRGTTTY
VHYRGTTTM

SEQ ID NO: 69199 - protein, 9 aa, synthetic construct
  source 1..9: note = Seed: VVYRGTTTY
VHYRGTTTY

SEQ ID NO: 69200 - protein, 10 aa, synthetic construct
  source 1..10: note = Seed: VVYRGTTTYK
VHYRGTTTYR

SEQ ID NO: 69201 - protein, 10 aa, synthetic construct
  source 1..10: note = Seed: VYYTSNPTTF
VHYTSNPTTF

SEQ ID NO: 69202 - protein, 10 aa, synthetic construct
  source 1..10: note = Seed: VYYTSNPTTF
VHYTSNPTTY

SEQ ID NO: 69203 - protein, 9 aa, synthetic construct
  source 1..9: note = Seed: VLYYQNNVF
VHYYQNNVF

SEQ ID NO: 69204 - protein, 10 aa, synthetic construct
  source 1..10: note = Seed: VLYYQNNVFM
VHYYQNNVFF

SEQ ID NO: 69205 - protein, 10 aa, synthetic construct
  source 1..10: note = Seed: VLYYQNNVFM
VHYYQNNVFI

SEQ ID NO: 69206 - protein, 10 aa, synthetic construct
  source 1..10: note = Seed: VLYYQNNVFM
VHYYQNNVFL

SEQ ID NO: 69207 - protein, 10 aa, synthetic construct
  source 1..10: note = Seed: VLYYQNNVFM
VHYYQNNVFW

SEQ ID NO: 69208 - protein, 9 aa, synthetic construct
  source 1..9: note = Seed: VLYYQNNVF
VHYYQNNVM

SEQ ID NO: 69209 - protein, 9 aa, synthetic construct
  source 1..9: note = Seed: VLYYQNNVF
VHYYQNNVY

SEQ ID NO: 69210 - protein, 9 aa, synthetic construct
  source 1..9: note = Seed: VLAAECTIF
VIAAECTIF

SEQ ID NO: 69211 - protein, 10 aa, synthetic construct
  source 1..10: note = Seed: VLAAECTIFK
VIAAECTIFK

SEQ ID NO: 69212 - protein, 10 aa, synthetic construct
  source 1..10: note = Seed: VLAAECTIFK
VIAAECTIFR

SEQ ID NO: 69213 - protein, 9 aa, synthetic construct
  source 1..9: note = Seed: VLAAECTIF
VIAAECTIY

SEQ ID NO: 69214 - protein, 9 aa, synthetic construct
  source 1..9: note = Seed: VTANVNALL
VIANVNALF

SEQ ID NO: 69215 - protein, 9 aa, synthetic construct
  source 1..9: note = Seed: VTANVNALL
VIANVNALI

SEQ ID NO: 69216 - protein, 9 aa, synthetic construct
  source 1..9: note = Seed: VTANVNALL
VIANVNALL

SEQ ID NO: 69217 - protein, 9 aa, synthetic construct
  source 1..9: note = Seed: VTANVNALL
VIANVNALM

SEQ ID NO: 69218 - protein, 9 aa, synthetic construct
  source 1..9: note = Seed: VTANVNALL
VIANVNALV

SEQ ID NO: 69219 - protein, 9 aa, synthetic construct
  source 1..9: note = Seed: VTANVNALL
VIANVNALW

SEQ ID NO: 69220 - protein, 9 aa, synthetic construct
  source 1..9: note = Seed: VTANVNALL
VIANVNALY

SEQ ID NO: 69221 - protein, 10 aa, synthetic construct
  source 1..10: note = Seed: VFAQVKQIYK
VIAQVKQIYK

SEQ ID NO: 69222 - protein, 10 aa, synthetic construct
  source 1..10: note = Seed: VFAQVKQIYK
VIAQVKQIYR

SEQ ID NO: 69223 - protein, 9 aa, synthetic construct
  source 1..9: note = Seed: VLARKHTTC
VIARKHTTL

SEQ ID NO: 69224 - protein, 9 aa, synthetic construct
  source 1..9: note = Seed: VNASSSEAF
VIASSSEAF

SEQ ID NO: 69225 - protein, 9 aa, synthetic construct
  source 1..9: note = Seed: VNASSSEAF
VIASSSEAY

SEQ ID NO: 69226 - protein, 9 aa, synthetic construct
  source 1..9: note = Seed: VLAWLYAAV
VIAWLYAAA

SEQ ID NO: 69227 - protein, 9 aa, synthetic construct
  source 1..9: note = Seed: VLAWLYAAV
VIAWLYAAI

SEQ ID NO: 69228 - protein, 9 aa, synthetic construct
  source 1..9: note = Seed: VLAWLYAAV
VIAWLYAAL

SEQ ID NO: 69229 - protein, 9 aa, synthetic construct
  source 1..9: note = Seed: VLAWLYAAV
VIAWLYAAV

SEQ ID NO: 69230 - protein, 9 aa, synthetic construct
  source 1..9: note = Seed: VMAYITGGV
VIAYITGGI

SEQ ID NO: 69231 - protein, 9 aa, synthetic construct
  source 1..9: note = Seed: VMAYITGGV
VIAYITGGV

SEQ ID NO: 69232 - protein, 10 aa, synthetic construct
  source 1..10: note = Seed: VSDIDITFLK
VIDIDITFLK

SEQ ID NO: 69233 - protein, 10 aa, synthetic construct
  source 1..10: note = Seed: VSDIDITFLK
VIDIDITFLR

SEQ ID NO: 69234 - protein, 9 aa, synthetic construct
  source 1..9: note = Seed: VVDKYFDCY
VIDKYFDCY

SEQ ID NO: 69235 - protein, 9 aa, synthetic construct
  source 1..9: note = Seed: VVDSYYSLL
VIDSYYSLI

SEQ ID NO: 69236 - protein, 9 aa, synthetic construct
  source 1..9: note = Seed: VVDSYYSLL
VIDSYYSLL

SEQ ID NO: 69237 - protein, 10 aa, synthetic construct
  source 1..10: note = Seed: VVDSYYSLLM
VIDSYYSLLY

SEQ ID NO: 69238 - protein, 9 aa, synthetic construct
  source 1..9: note = Seed: VVDSYYSLL
VIDSYYSLM

SEQ ID NO: 69239 - protein, 9 aa, synthetic construct
  source 1..9: note = Seed: VVDSYYSLL
VIDSYYSLV

SEQ ID NO: 69240 - protein, 11 aa, synthetic construct
  source 1..11: note = Seed: VYDYLVSTQEF
VIDYLVSTQEF

SEQ ID NO: 69241 - protein, 11 aa, synthetic construct
  source 1..11: note = Seed: VYDYLVSTQEF
VIDYLVSTQEW

SEQ ID NO: 69242 - protein, 9 aa, synthetic construct
  source 1..9: note = Seed: VAEWFLAYI
VIEWFLAYA

SEQ ID NO: 69243 - protein, 9 aa, synthetic construct
  source 1..9: note = Seed: VAEWFLAYI
VIEWFLAYI

SEQ ID NO: 69244 - protein, 9 aa, synthetic construct
  source 1..9: note = Seed: VAEWFLAYI
VIEWFLAYL

SEQ ID NO: 69245 - protein, 9 aa, synthetic construct
  source 1..9: note = Seed: VAEWFLAYI
VIEWFLAYV

SEQ ID NO: 69246 - protein, 9 aa, synthetic construct
  source 1..9: note = Seed: VAFELWAKR
VIFELWAKR

SEQ ID NO: 69247 - protein, 11 aa, synthetic construct
  source 1..11: note = Seed: VTFGDDTVIEV
VIFGDDTVIEV

SEQ ID NO: 69248 - protein, 9 aa, synthetic construct
  source 1..9: note = Seed: VTFGDDTVI
VIFGDDTVW

SEQ ID NO: 69249 - protein, 11 aa, synthetic construct
  source 1..11: note = Seed: VSFLAHIQWMV
VIFLAHIQWMI

SEQ ID NO: 69250 - protein, 11 aa, synthetic construct
  source 1..11: note = Seed: VSFLAHIQWMV
VIFLAHIQWMV

SEQ ID NO: 69251 - protein, 9 aa, synthetic construct
  source 1..9: note = Seed: VVFLHVTYV
VIFLHVTYA

SEQ ID NO: 69252 - protein, 9 aa, synthetic construct
  source 1..9: note = Seed: VVFLHVTYV
VIFLHVTYI

SEQ ID NO: 69253 - protein, 9 aa, synthetic construct
  source 1..9: note = Seed: VVFLHVTYV
VIFLHVTYK

SEQ ID NO: 69254 - protein, 9 aa, synthetic construct
  source 1..9: note = Seed: VVFLHVTYV
VIFLHVTYL

SEQ ID NO: 69255 - protein, 9 aa, synthetic construct
  source 1..9: note = Seed: VVFLHVTYV
VIFLHVTYM

SEQ ID NO: 69256 - protein, 9 aa, synthetic construct
  source 1..9: note = Seed: VVFLHVTYV
VIFLHVTYV

SEQ ID NO: 69257 - protein, 10 aa, synthetic construct
  source 1..10: note = Seed: VVFLHVTYVP
VIFLHVTYVV

SEQ ID NO: 69258 - protein, 10 aa, synthetic construct
  source 1..10: note = Seed: VEFLRDGWEI
VIFLRDGWEF

SEQ ID NO: 69259 - protein, 11 aa, synthetic construct
  source 1..11: note = Seed: VVFNGVSFSTF
VIFNGVSFSTF

SEQ ID NO: 69260 - protein, 11 aa, synthetic construct
  source 1..11: note = Seed: VVFNGVSFSTF
VIFNGVSFSTY

SEQ ID NO: 69261 - protein, 10 aa, synthetic construct
  source 1..10: note = Seed: VVFNGVSFST
VIFNGVSFSV

SEQ ID NO: 69262 - protein, 9 aa, synthetic construct
  source 1..9: note = Seed: VPFVVSTGY
VIFVVSTGF

SEQ ID NO: 69263 - protein, 9 aa, synthetic construct
  source 1..9: note = Seed: VPFVVSTGY
VIFVVSTGY

SEQ ID NO: 69264 - protein, 9 aa, synthetic construct
  source 1..9: note = Seed: VGGNYNYLY
VIGNYNYLY

SEQ ID NO: 69265 - protein, 10 aa, synthetic construct
  source 1..10: note = Seed: VGGNYNYLYR
VIGNYNYLYR

SEQ ID NO: 69266 - protein, 9 aa, synthetic construct
  source 1..9: note = Seed: VLHDIGNPK
VIHDIGNPK

SEQ ID NO: 69267 - protein, 9 aa, synthetic construct
  source 1..9: note = Seed: VLHDIGNPK
VIHDIGNPR

SEQ ID NO: 69268 - protein, 10 aa, synthetic construct
  source 1..10: note = Seed: VFHLYLQYIR
VIHLYLQYIR

SEQ ID NO: 69269 - protein, 9 aa, synthetic construct
  source 1..9: note = Seed: VTHSKGLYR
VIHSKGLYK

SEQ ID NO: 69270 - protein, 9 aa, synthetic construct
  source 1..9: note = Seed: VTHSKGLYR
VIHSKGLYR

SEQ ID NO: 69271 - protein, 10 aa, synthetic construct
  source 1..10: note = Seed: VTHSKGLYRK
VIHSKGLYRK

SEQ ID NO: 69272 - protein, 10 aa, synthetic construct
  source 1..10: note = Seed: VTHSKGLYRK
VIHSKGLYRR

SEQ ID NO: 69273 - protein, 10 aa, synthetic construct
  source 1..10: note = Seed: VLHSYFTSDY
VIHSYFTSDY

SEQ ID NO: 69274 - protein, 11 aa, synthetic construct
  source 1..11: note = Seed: VLHSYFTSDYY
VIHSYFTSDYW

SEQ ID NO: 69275 - protein, 9 aa, synthetic construct
  source 1..9: note = Seed: VEHVTFFIY
VIHVTFFIY

SEQ ID NO: 69276 - protein, 9 aa, synthetic construct
  source 1..9: note = Seed: VTIAEILLI
VIIAEILLI

SEQ ID NO: 69277 - protein, 9 aa, synthetic construct
  source 1..9: note = Seed: VTIAEILLI
VIIAEILLL

SEQ ID NO: 69278 - protein, 9 aa, synthetic construct
  source 1..9: note = Seed: VTIAEILLI
VIIAEILLV

SEQ ID NO: 69279 - protein, 9 aa, synthetic construct
  source 1..9: note = Seed: VTIAEILLI
VIIAEILLW

SEQ ID NO: 69280 - protein, 10 aa, synthetic construct
  source 1..10: note = Seed: VSICSTMTNR
VIICSTMTNK

SEQ ID NO: 69281 - protein, 10 aa, synthetic construct
  source 1..10: note = Seed: VSICSTMTNR
VIICSTMTNR

SEQ ID NO: 69282 - protein, 9 aa, synthetic construct
  source 1..9: note = Seed: VQIDRLITG
VIIDRLITY

SEQ ID NO: 69283 - protein, 9 aa, synthetic construct
  source 1..9: note = Seed: VSIINNTVY
VIIINNTVF

SEQ ID NO: 69284 - protein, 9 aa, synthetic construct
  source 1..9: note = Seed: VSIINNTVY
VIIINNTVW

SEQ ID NO: 69285 - protein, 9 aa, synthetic construct
  source 1..9: note = Seed: VSIINNTVY
VIIINNTVY

SEQ ID NO: 69286 - protein, 10 aa, synthetic construct
  source 1..10: note = Seed: VNINIVGDFK
VIINIVGDFK

SEQ ID NO: 69287 - protein, 10 aa, synthetic construct
  source 1..10: note = Seed: VNINIVGDFK
VIINIVGDFR

SEQ ID NO: 69288 - protein, 9 aa, synthetic construct
  source 1..9: note = Seed: VVIPDYNTY
VIIPDYNTF

SEQ ID NO: 69289 - protein, 9 aa, synthetic construct
  source 1..9: note = Seed: VVIPDYNTY
VIIPDYNTM

SEQ ID NO: 69290 - protein, 9 aa, synthetic construct
  source 1..9: note = Seed: VVIPDYNTY
VIIPDYNTW

SEQ ID NO: 69291 - protein, 9 aa, synthetic construct
  source 1..9: note = Seed: VVIPDYNTY
VIIPDYNTY

SEQ ID NO: 69292 - protein, 10 aa, synthetic construct
  source 1..10: note = Seed: VVIPDYNTYK
VIIPDYNTYK

SEQ ID NO: 69293 - protein, 10 aa, synthetic construct
  source 1..10: note = Seed: VVIPDYNTYK
VIIPDYNTYR

SEQ ID NO: 69294 - protein, 10 aa, synthetic construct
  source 1..10: note = Seed: VFKNIDGYFK
VIKNIDGYFK

SEQ ID NO: 69295 - protein, 10 aa, synthetic construct
  source 1..10: note = Seed: VFKNIDGYFK
VIKNIDGYFR

SEQ ID NO: 69296 - protein, 9 aa, synthetic construct
  source 1..9: note = Seed: VVKRHTFSN
VIKRHTFSA

SEQ ID NO: 69297 - protein, 9 aa, synthetic construct
  source 1..9: note = Seed: VVKRHTFSN
VIKRHTFSI

SEQ ID NO: 69298 - protein, 9 aa, synthetic construct
  source 1..9: note = Seed: VVKRHTFSN
VIKRHTFSK

SEQ ID NO: 69299 - protein, 9 aa, synthetic construct
  source 1..9: note = Seed: VVKRHTFSN
VIKRHTFSV

SEQ ID NO: 69300 - protein, 11 aa, synthetic construct
  source 1..11: note = Seed: VAKYTQLCQYL
VIKYTQLCQYF

SEQ ID NO: 69301 - protein, 10 aa, synthetic construct
  source 1..10: note = Seed: VELFENKTTL
VILFENKTTV

SEQ ID NO: 69302 - protein, 9 aa, synthetic construct
  source 1..9: note = Seed: VLLFLAFVV
VILFLAFVV

SEQ ID NO: 69303 - protein, 10 aa, synthetic construct
  source 1..10: note = Seed: VQLHNDILLA
VILHNDILLV

SEQ ID NO: 69304 - protein, 10 aa, synthetic construct
  source 1..10: note = Seed: VNLHSSRLSF
VILHSSRLSF

SEQ ID NO: 69305 - protein, 10 aa, synthetic construct
  source 1..10: note = Seed: VNLHSSRLSF
VILHSSRLSY

SEQ ID NO: 69306 - protein, 10 aa, synthetic construct
  source 1..10: note = Seed: VFLHVTYVPA
VILHVTYVPI

SEQ ID NO: 69307 - protein, 10 aa, synthetic construct
  source 1..10: note = Seed: VFLHVTYVPA
VILHVTYVPV

SEQ ID NO: 69308 - protein, 10 aa, synthetic construct
  source 1..10: note = Seed: VNLKQLPFFY
VILKQLPFFY

SEQ ID NO: 69309 - protein, 10 aa, synthetic construct
  source 1..10: note = Seed: VVLLSVLQQL
VILLSVLQQI

SEQ ID NO: 69310 - protein, 10 aa, synthetic construct
  source 1..10: note = Seed: VVLLSVLQQL
VILLSVLQQL

SEQ ID NO: 69311 - protein, 10 aa, synthetic construct
  source 1..10: note = Seed: VVLLSVLQQL
VILLSVLQQV

SEQ ID NO: 69312 - protein, 10 aa, synthetic construct
  source 1..10: note = Seed: VGLMWLSYFI
VILMWLSYFA

SEQ ID NO: 69313 - protein, 10 aa, synthetic construct
  source 1..10: note = Seed: VGLMWLSYFI
VILMWLSYFI

SEQ ID NO: 69314 - protein, 11 aa, synthetic construct
  source 1..11: note = Seed: VGLMWLSYFIA
VILMWLSYFIV

SEQ ID NO: 69315 - protein, 10 aa, synthetic construct
  source 1..10: note = Seed: VGLMWLSYFI
VILMWLSYFL

SEQ ID NO: 69316 - protein, 10 aa, synthetic construct
  source 1..10: note = Seed: VGLMWLSYFI
VILMWLSYFM

SEQ ID NO: 69317 - protein, 10 aa, synthetic construct
  source 1..10: note = Seed: VGLMWLSYFI
VILMWLSYFV

SEQ ID NO: 69318 - protein, 9 aa, synthetic construct
  source 1..9: note = Seed: VVLSFELLH
VILSFELLK

SEQ ID NO: 69319 - protein, 9 aa, synthetic construct
  source 1..9: note = Seed: VVLSFELLH
VILSFELLY

SEQ ID NO: 69320 - protein, 10 aa, synthetic construct
  source 1..10: note = Seed: VQLSLPVLQV
VILSLPVLQV

SEQ ID NO: 69321 - protein, 9 aa, synthetic construct
  source 1..9: note = Seed: VLLSVLQQL
VILSVLQQI

SEQ ID NO: 69322 - protein, 9 aa, synthetic construct
  source 1..9: note = Seed: VLLSVLQQL
VILSVLQQL

SEQ ID NO: 69323 - protein, 10 aa, synthetic construct
  source 1..10: note = Seed: VLLSVLQQLR
VILSVLQQLV

SEQ ID NO: 69324 - protein, 9 aa, synthetic construct
  source 1..9: note = Seed: VLLSVLQQL
VILSVLQQV

SEQ ID NO: 69325 - protein, 10 aa, synthetic construct
  source 1..10: note = Seed: VELVAELEGI
VILVAELEGV

SEQ ID NO: 69326 - protein, 10 aa, synthetic construct
  source 1..10: note = Seed: VVMAYITGGV
VIMAYITGGA

SEQ ID NO: 69327 - protein, 10 aa, synthetic construct
  source 1..10: note = Seed: VVMAYITGGV
VIMAYITGGI

SEQ ID NO: 69328 - protein, 10 aa, synthetic construct
  source 1..10: note = Seed: VVMAYITGGV
VIMAYITGGL

SEQ ID NO: 69329 - protein, 10 aa, synthetic construct
  source 1..10: note = Seed: VVMAYITGGV
VIMAYITGGV

SEQ ID NO: 69330 - protein, 10 aa, synthetic construct
  source 1..10: note = Seed: VFMCVEYCPI
VIMCVEYCPV

SEQ ID NO: 69331 - protein, 9 aa, synthetic construct
  source 1..9: note = Seed: VQMLSDTLK
VIMLSDTLK

SEQ ID NO: 69332 - protein, 9 aa, synthetic construct
  source 1..9: note = Seed: VQMLSDTLK
VIMLSDTLR

SEQ ID NO: 69333 - protein, 10 aa, synthetic construct
  source 1..10: note = Seed: VRMYIFFASF
VIMYIFFASF

SEQ ID NO: 69334 - protein, 11 aa, synthetic construct
  source 1..11: note = Seed: VRMYIFFASFY
VIMYIFFASFK

SEQ ID NO: 69335 - protein, 10 aa, synthetic construct
  source 1..10: note = Seed: VRMYIFFASF
VIMYIFFASY

SEQ ID NO: 69336 - protein, 9 aa, synthetic construct
  source 1..9: note = Seed: VLNDILSRL
VINDILSRA

SEQ ID NO: 69337 - protein, 9 aa, synthetic construct
  source 1..9: note = Seed: VLNDILSRL
VINDILSRI

SEQ ID NO: 69338 - protein, 9 aa, synthetic construct
  source 1..9: note = Seed: VLNDILSRL
VINDILSRL

SEQ ID NO: 69339 - protein, 10 aa, synthetic construct
  source 1..10: note = Seed: VLNDILSRLD
VINDILSRLV

SEQ ID NO: 69340 - protein, 9 aa, synthetic construct
  source 1..9: note = Seed: VLNDILSRL
VINDILSRV

SEQ ID NO: 69341 - protein, 10 aa, synthetic construct
  source 1..10: note = Seed: VFNGVSFSTF
VINGVSFSTF

SEQ ID NO: 69342 - protein, 10 aa, synthetic construct
  source 1..10: note = Seed: VFNGVSFSTF
VINGVSFSTY

SEQ ID NO: 69343 - protein, 9 aa, synthetic construct
  source 1..9: note = Seed: VVNQNAQAL
VINQNAQAF

SEQ ID NO: 69344 - protein, 9 aa, synthetic construct
  source 1..9: note = Seed: VVNQNAQAL
VINQNAQAM

SEQ ID NO: 69345 - protein, 9 aa, synthetic construct
  source 1..9: note = Seed: VVNQNAQAL
VINQNAQAY

SEQ ID NO: 69346 - protein, 9 aa, synthetic construct
  source 1..9: note = Seed: VIPDYNTYK
VIPDYNTYR

SEQ ID NO: 69347 - protein, 10 aa, synthetic construct
  source 1..10: note = Seed: VLPFNDGVYF
VIPFNDGVYW

SEQ ID NO: 69348 - protein, 10 aa, synthetic construct
  source 1..10: note = Seed: VLPFNDGVYF
VIPFNDGVYY

SEQ ID NO: 69349 - protein, 9 aa, synthetic construct
  source 1..9: note = Seed: VRQCSGVTF
VIQCSGVTF

SEQ ID NO: 69350 - protein, 9 aa, synthetic construct
  source 1..9: note = Seed: VRQCSGVTF
VIQCSGVTY

SEQ ID NO: 69351 - protein, 10 aa, synthetic construct
  source 1..10: note = Seed: VLQLPQGTTL
VIQLPQGTTF

SEQ ID NO: 69352 - protein, 10 aa, synthetic construct
  source 1..10: note = Seed: VLQLPQGTTL
VIQLPQGTTM

SEQ ID NO: 69353 - protein, 10 aa, synthetic construct
  source 1..10: note = Seed: VLQLPQGTTL
VIQLPQGTTY

SEQ ID NO: 69354 - protein, 9 aa, synthetic construct
  source 1..9: note = Seed: VTRCLNRVC
VIRCLNRVK

SEQ ID NO: 69355 - protein, 9 aa, synthetic construct
  source 1..9: note = Seed: VARDLSLQF
VIRDLSLQF

SEQ ID NO: 69356 - protein, 10 aa, synthetic construct
  source 1..10: note = Seed: VARDLSLQFK
VIRDLSLQFK

SEQ ID NO: 69357 - protein, 10 aa, synthetic construct
  source 1..10: note = Seed: VARDLSLQFK
VIRDLSLQFR

SEQ ID NO: 69358 - protein, 9 aa, synthetic construct
  source 1..9: note = Seed: VARDLSLQF
VIRDLSLQW

SEQ ID NO: 69359 - protein, 9 aa, synthetic construct
  source 1..9: note = Seed: VARDLSLQF
VIRDLSLQY

SEQ ID NO: 69360 - protein, 10 aa, synthetic construct
  source 1..10: note = Seed: VNRFNVAITR
VIRFNVAITR

SEQ ID NO: 69361 - protein, 9 aa, synthetic construct
  source 1..9: note = Seed: VYRGTTTYK
VIRGTTTYA

SEQ ID NO: 69362 - protein, 9 aa, synthetic construct
  source 1..9: note = Seed: VYRGTTTYK
VIRGTTTYI

SEQ ID NO: 69363 - protein, 9 aa, synthetic construct
  source 1..9: note = Seed: VYRGTTTYK
VIRGTTTYK

SEQ ID NO: 69364 - protein, 9 aa, synthetic construct
  source 1..9: note = Seed: VYRGTTTYK
VIRGTTTYR

SEQ ID NO: 69365 - protein, 10 aa, synthetic construct
  source 1..10: note = Seed: VVRQCSGVTF
VIRQCSGVTF

SEQ ID NO: 69366 - protein, 10 aa, synthetic construct
  source 1..10: note = Seed: VVRQCSGVTF
VIRQCSGVTY

SEQ ID NO: 69367 - protein, 11 aa, synthetic construct
  source 1..11: note = Seed: VKRTIKGTHHW
VIRTIKGTHHW

SEQ ID NO: 69368 - protein, 10 aa, synthetic construct
  source 1..10: note = Seed: VTSAMQTMLF
VISAMQTMLF

SEQ ID NO: 69369 - protein, 10 aa, synthetic construct
  source 1..10: note = Seed: VTSAMQTMLF
VISAMQTMLW

SEQ ID NO: 69370 - protein, 10 aa, synthetic construct
  source 1..10: note = Seed: VTSAMQTMLF
VISAMQTMLY

SEQ ID NO: 69371 - protein, 9 aa, synthetic construct
  source 1..9: note = Seed: VTSAMQTML
VISAMQTMW

SEQ ID NO: 69372 - protein, 10 aa, synthetic construct
  source 1..10: note = Seed: VVSDIDYVPL
VISDIDYVPI

SEQ ID NO: 69373 - protein, 10 aa, synthetic construct
  source 1..10: note = Seed: VVSDIDYVPL
VISDIDYVPL

SEQ ID NO: 69374 - protein, 10 aa, synthetic construct
  source 1..10: note = Seed: VVSDIDYVPL
VISDIDYVPV

SEQ ID NO: 69375 - protein, 9 aa, synthetic construct
  source 1..9: note = Seed: VLSFCAFAV
VISFCAFAI

SEQ ID NO: 69376 - protein, 9 aa, synthetic construct
  source 1..9: note = Seed: VLSFCAFAV
VISFCAFAL

SEQ ID NO: 69377 - protein, 9 aa, synthetic construct
  source 1..9: note = Seed: VLSFCAFAV
VISFCAFAV

SEQ ID NO: 69378 - protein, 9 aa, synthetic construct
  source 1..9: note = Seed: VYSFLPGVY
VISFLPGVY

SEQ ID NO: 69379 - protein, 11 aa, synthetic construct
  source 1..11: note = Seed: VYSFLPGVYSV
VISFLPGVYSF

SEQ ID NO: 69380 - protein, 11 aa, synthetic construct
  source 1..11: note = Seed: VYSFLPGVYSV
VISFLPGVYSV

SEQ ID NO: 69381 - protein, 9 aa, synthetic construct
  source 1..9: note = Seed: VNSFSGYLK
VISFSGYLK

SEQ ID NO: 69382 - protein, 10 aa, synthetic construct
  source 1..10: note = Seed: VNSFSGYLKL
VISFSGYLKF

SEQ ID NO: 69383 - protein, 10 aa, synthetic construct
  source 1..10: note = Seed: VNSFSGYLKL
VISFSGYLKM

SEQ ID NO: 69384 - protein, 10 aa, synthetic construct
  source 1..10: note = Seed: VNSFSGYLKL
VISFSGYLKW

SEQ ID NO: 69385 - protein, 10 aa, synthetic construct
  source 1..10: note = Seed: VNSFSGYLKL
VISFSGYLKY

SEQ ID NO: 69386 - protein, 9 aa, synthetic construct
  source 1..9: note = Seed: VNSFSGYLK
VISFSGYLR

SEQ ID NO: 69387 - protein, 9 aa, synthetic construct
  source 1..9: note = Seed: VLSGHNLAK
VISGHNLAK

SEQ ID NO: 69388 - protein, 10 aa, synthetic construct
  source 1..10: note = Seed: VYSSANNCTF
VISSANNCTW

SEQ ID NO: 69389 - protein, 9 aa, synthetic construct
  source 1..9: note = Seed: VYSTGSNVF
VISTGSNVF

SEQ ID NO: 69390 - protein, 9 aa, synthetic construct
  source 1..9: note = Seed: VVSTGYHFR
VISTGYHFK

SEQ ID NO: 69391 - protein, 9 aa, synthetic construct
  source 1..9: note = Seed: VVSTGYHFR
VISTGYHFR

SEQ ID NO: 69392 - protein, 10 aa, synthetic construct
  source 1..10: note = Seed: VVSTGYHFRE
VISTGYHFRR

SEQ ID NO: 69393 - protein, 11 aa, synthetic construct
  source 1..11: note = Seed: VDSYYSLLMPI
VISYYSLLMPF

SEQ ID NO: 69394 - protein, 9 aa, synthetic construct
  source 1..9: note = Seed: VFTGYRVTK
VITGYRVTR

SEQ ID NO: 69395 - protein, 9 aa, synthetic construct
  source 1..9: note = Seed: VSTSGRWVL
VITSGRWVW

SEQ ID NO: 69396 - protein, 10 aa, synthetic construct
  source 1..10: note = Seed: VNVAFELWAK
VIVAFELWAR

SEQ ID NO: 69397 - protein, 10 aa, synthetic construct
  source 1..10: note = Seed: VNVLAWLYAA
VIVLAWLYAI

SEQ ID NO: 69398 - protein, 10 aa, synthetic construct
  source 1..10: note = Seed: VNVLAWLYAA
VIVLAWLYAL

SEQ ID NO: 69399 - protein, 10 aa, synthetic construct
  source 1..10: note = Seed: VNVLAWLYAA
VIVLAWLYAV

SEQ ID NO: 69400 - protein, 11 aa, synthetic construct
  source 1..11: note = Seed: VFVLWAHGFEL
VIVLWAHGFEI

SEQ ID NO: 69401 - protein, 11 aa, synthetic construct
  source 1..11: note = Seed: VFVLWAHGFEL
VIVLWAHGFEL

SEQ ID NO: 69402 - protein, 11 aa, synthetic construct
  source 1..11: note = Seed: VFVLWAHGFEL
VIVLWAHGFEV

SEQ ID NO: 69403 - protein, 9 aa, synthetic construct
  source 1..9: note = Seed: VFVLWAHGF
VIVLWAHGY

SEQ ID NO: 69404 - protein, 10 aa, synthetic construct
  source 1..10: note = Seed: VLVQSTQWSL
VIVQSTQWSV

SEQ ID NO: 69405 - protein, 9 aa, synthetic construct
  source 1..9: note = Seed: VCVSTSGRW
VIVSTSGRW

SEQ ID NO: 69406 - protein, 9 aa, synthetic construct
  source 1..9: note = Seed: VQVTCGTTT
VIVTCGTTF

SEQ ID NO: 69407 - protein, 10 aa, synthetic construct
  source 1..10: note = Seed: VQVTCGTTTL
VIVTCGTTTF

SEQ ID NO: 69408 - protein, 10 aa, synthetic construct
  source 1..10: note = Seed: VQVTCGTTTL
VIVTCGTTTY

SEQ ID NO: 69409 - protein, 9 aa, synthetic construct
  source 1..9: note = Seed: VLWAHGFEL
VIWAHGFEA

SEQ ID NO: 69410 - protein, 9 aa, synthetic construct
  source 1..9: note = Seed: VLWAHGFEL
VIWAHGFEF

SEQ ID NO: 69411 - protein, 9 aa, synthetic construct
  source 1..9: note = Seed: VLWAHGFEL
VIWAHGFEI

SEQ ID NO: 69412 - protein, 9 aa, synthetic construct
  source 1..9: note = Seed: VLWAHGFEL
VIWAHGFEL

SEQ ID NO: 69413 - protein, 10 aa, synthetic construct
  source 1..10: note = Seed: VLWAHGFELT
VIWAHGFELI

SEQ ID NO: 69414 - protein, 10 aa, synthetic construct
  source 1..10: note = Seed: VLWAHGFELT
VIWAHGFELL

SEQ ID NO: 69415 - protein, 11 aa, synthetic construct
  source 1..11: note = Seed: VLWAHGFELTS
VIWAHGFELTV

SEQ ID NO: 69416 - protein, 10 aa, synthetic construct
  source 1..10: note = Seed: VLWAHGFELT
VIWAHGFELV

SEQ ID NO: 69417 - protein, 9 aa, synthetic construct
  source 1..9: note = Seed: VLWAHGFEL
VIWAHGFEM

SEQ ID NO: 69418 - protein, 9 aa, synthetic construct
  source 1..9: note = Seed: VLWAHGFEL
VIWAHGFEV

SEQ ID NO: 69419 - protein, 9 aa, synthetic construct
  source 1..9: note = Seed: VLWAHGFEL
VIWAHGFEW

SEQ ID NO: 69420 - protein, 9 aa, synthetic construct
  source 1..9: note = Seed: VLWAHGFEL
VIWAHGFEY

SEQ ID NO: 69421 - protein, 9 aa, synthetic construct
  source 1..9: note = Seed: VMYASAVVL
VIYASAVVF

SEQ ID NO: 69422 - protein, 9 aa, synthetic construct
  source 1..9: note = Seed: VMYASAVVL
VIYASAVVL

SEQ ID NO: 69423 - protein, 10 aa, synthetic construct
  source 1..10: note = Seed: VMYASAVVLL
VIYASAVVLF

SEQ ID NO: 69424 - protein, 10 aa, synthetic construct
  source 1..10: note = Seed: VMYASAVVLL
VIYASAVVLI

SEQ ID NO: 69425 - protein, 10 aa, synthetic construct
  source 1..10: note = Seed: VMYASAVVLL
VIYASAVVLL

SEQ ID NO: 69426 - protein, 11 aa, synthetic construct
  source 1..11: note = Seed: VMYASAVVLLI
VIYASAVVLLF

SEQ ID NO: 69427 - protein, 10 aa, synthetic construct
  source 1..10: note = Seed: VMYASAVVLL
VIYASAVVLM

SEQ ID NO: 69428 - protein, 10 aa, synthetic construct
  source 1..10: note = Seed: VMYASAVVLL
VIYASAVVLV

SEQ ID NO: 69429 - protein, 10 aa, synthetic construct
  source 1..10: note = Seed: VMYASAVVLL
VIYASAVVLW

SEQ ID NO: 69430 - protein, 10 aa, synthetic construct
  source 1..10: note = Seed: VMYASAVVLL
VIYASAVVLY

SEQ ID NO: 69431 - protein, 9 aa, synthetic construct
  source 1..9: note = Seed: VMYASAVVL
VIYASAVVM

SEQ ID NO: 69432 - protein, 9 aa, synthetic construct
  source 1..9: note = Seed: VMYASAVVL
VIYASAVVV

SEQ ID NO: 69433 - protein, 9 aa, synthetic construct
  source 1..9: note = Seed: VMYASAVVL
VIYASAVVW

SEQ ID NO: 69434 - protein, 9 aa, synthetic construct
  source 1..9: note = Seed: VMYASAVVL
VIYASAVVY

SEQ ID NO: 69435 - protein, 9 aa, synthetic construct
  source 1..9: note = Seed: VLYENQKLI
VIYENQKLV

SEQ ID NO: 69436 - protein, 9 aa, synthetic construct
  source 1..9: note = Seed: VTYKLDGVV
VIYKLDGVW

SEQ ID NO: 69437 - protein, 9 aa, synthetic construct
  source 1..9: note = Seed: VGYLQPRTF
VIYLQPRTF

SEQ ID NO: 69438 - protein, 10 aa, synthetic construct
  source 1..10: note = Seed: VGYLQPRTFL
VIYLQPRTFF

SEQ ID NO: 69439 - protein, 11 aa, synthetic construct
  source 1..11: note = Seed: VGYLQPRTFLL
VIYLQPRTFLV

SEQ ID NO: 69440 - protein, 9 aa, synthetic construct
  source 1..9: note = Seed: VGYLQPRTF
VIYLQPRTW

SEQ ID NO: 69441 - protein, 9 aa, synthetic construct
  source 1..9: note = Seed: VGYLQPRTF
VIYLQPRTY

SEQ ID NO: 69442 - protein, 10 aa, synthetic construct
  source 1..10: note = Seed: VLYQPPQTSI
VIYQPPQTSF

SEQ ID NO: 69443 - protein, 10 aa, synthetic construct
  source 1..10: note = Seed: VLYQPPQTSI
VIYQPPQTSM

SEQ ID NO: 69444 - protein, 10 aa, synthetic construct
  source 1..10: note = Seed: VLYQPPQTSI
VIYQPPQTSW

SEQ ID NO: 69445 - protein, 10 aa, synthetic construct
  source 1..10: note = Seed: VGYQPYRVVV
VIYQPYRVVF

SEQ ID NO: 69446 - protein, 10 aa, synthetic construct
  source 1..10: note = Seed: VGYQPYRVVV
VIYQPYRVVI

SEQ ID NO: 69447 - protein, 10 aa, synthetic construct
  source 1..10: note = Seed: VGYQPYRVVV
VIYQPYRVVL

SEQ ID NO: 69448 - protein, 10 aa, synthetic construct
  source 1..10: note = Seed: VGYQPYRVVV
VIYQPYRVVM

SEQ ID NO: 69449 - protein, 10 aa, synthetic construct
  source 1..10: note = Seed: VGYQPYRVVV
VIYQPYRVVW

SEQ ID NO: 69450 - protein, 9 aa, synthetic construct
  source 1..9: note = Seed: VVYRGTTTY
VIYRGTTTF

SEQ ID NO: 69451 - protein, 9 aa, synthetic construct
  source 1..9: note = Seed: VVYRGTTTY
VIYRGTTTI

SEQ ID NO: 69452 - protein, 9 aa, synthetic construct
  source 1..9: note = Seed: VVYRGTTTY
VIYRGTTTK

SEQ ID NO: 69453 - protein, 9 aa, synthetic construct
  source 1..9: note = Seed: VVYRGTTTY
VIYRGTTTM

SEQ ID NO: 69454 - protein, 9 aa, synthetic construct
  source 1..9: note = Seed: VVYRGTTTY
VIYRGTTTW

SEQ ID NO: 69455 - protein, 9 aa, synthetic construct
  source 1..9: note = Seed: VVYRGTTTY
VIYRGTTTY

SEQ ID NO: 69456 - protein, 10 aa, synthetic construct
  source 1..10: note = Seed: VVYRGTTTYK
VIYRGTTTYF

SEQ ID NO: 69457 - protein, 10 aa, synthetic construct
  source 1..10: note = Seed: VVYRGTTTYK
VIYRGTTTYK

SEQ ID NO: 69458 - protein, 11 aa, synthetic construct
  source 1..11: note = Seed: VVYRGTTTYKL
VIYRGTTTYKK

SEQ ID NO: 69459 - protein, 10 aa, synthetic construct
  source 1..10: note = Seed: VVYRGTTTYK
VIYRGTTTYR

SEQ ID NO: 69460 - protein, 10 aa, synthetic construct
  source 1..10: note = Seed: VVYRGTTTYK
VIYRGTTTYY

SEQ ID NO: 69461 - protein, 10 aa, synthetic construct
  source 1..10: note = Seed: VYYTSNPTTF
VIYTSNPTTF

SEQ ID NO: 69462 - protein, 9 aa, synthetic construct
  source 1..9: note = Seed: VLYYQNNVF
VIYYQNNVF

SEQ ID NO: 69463 - protein, 10 aa, synthetic construct
  source 1..10: note = Seed: VLYYQNNVFM
VIYYQNNVFF

SEQ ID NO: 69464 - protein, 10 aa, synthetic construct
  source 1..10: note = Seed: VLYYQNNVFM
VIYYQNNVFI

SEQ ID NO: 69465 - protein, 10 aa, synthetic construct
  source 1..10: note = Seed: VLYYQNNVFM
VIYYQNNVFL

SEQ ID NO: 69466 - protein, 10 aa, synthetic construct
  source 1..10: note = Seed: VLYYQNNVFM
VIYYQNNVFV

SEQ ID NO: 69467 - protein, 10 aa, synthetic construct
  source 1..10: note = Seed: VLYYQNNVFM
VIYYQNNVFW

SEQ ID NO: 69468 - protein, 9 aa, synthetic construct
  source 1..9: note = Seed: VLYYQNNVF
VIYYQNNVW

SEQ ID NO: 69469 - protein, 9 aa, synthetic construct
  source 1..9: note = Seed: VLYYQNNVF
VIYYQNNVY

SEQ ID NO: 69470 - protein, 9 aa, synthetic construct
  source 1..9: note = Seed: VLAAECTIF
VKAAECTIF

SEQ ID NO: 69471 - protein, 10 aa, synthetic construct
  source 1..10: note = Seed: VLAAECTIFK
VKAAECTIFR

SEQ ID NO: 69472 - protein, 9 aa, synthetic construct
  source 1..9: note = Seed: VLAAECTIF
VKAAECTIM

SEQ ID NO: 69473 - protein, 9 aa, synthetic construct
  source 1..9: note = Seed: VLAAECTIF
VKAAECTIY

SEQ ID NO: 69474 - protein, 9 aa, synthetic construct
  source 1..9: note = Seed: VFAQVKQIY
VKAQVKQIF

SEQ ID NO: 69475 - protein, 9 aa, synthetic construct
  source 1..9: note = Seed: VFAQVKQIY
VKAQVKQIM

SEQ ID NO: 69476 - protein, 9 aa, synthetic construct
  source 1..9: note = Seed: VFAQVKQIY
VKAQVKQIY

SEQ ID NO: 69477 - protein, 9 aa, synthetic construct
  source 1..9: note = Seed: VNASSSEAF
VKASSSEAF

SEQ ID NO: 69478 - protein, 9 aa, synthetic construct
  source 1..9: note = Seed: VNASSSEAF
VKASSSEAL

SEQ ID NO: 69479 - protein, 9 aa, synthetic construct
  source 1..9: note = Seed: VNASSSEAF
VKASSSEAM

SEQ ID NO: 69480 - protein, 9 aa, synthetic construct
  source 1..9: note = Seed: VNASSSEAF
VKASSSEAY

SEQ ID NO: 69481 - protein, 9 aa, synthetic construct
  source 1..9: note = Seed: VKCTSVVLL
VKCTSVVLF

SEQ ID NO: 69482 - protein, 9 aa, synthetic construct
  source 1..9: note = Seed: VKCTSVVLL
VKCTSVVLY

SEQ ID NO: 69483 - protein, 11 aa, synthetic construct
  source 1..11: note = Seed: VYDYLVSTQEF
VKDYLVSTQEF

SEQ ID NO: 69484 - protein, 11 aa, synthetic construct
  source 1..11: note = Seed: VYDYLVSTQEF
VKDYLVSTQEW

SEQ ID NO: 69485 - protein, 10 aa, synthetic construct
  source 1..10: note = Seed: VAEWFLAYIL
VKEWFLAYIL

SEQ ID NO: 69486 - protein, 9 aa, synthetic construct
  source 1..9: note = Seed: VHFISNSWL
VKFISNSWF

SEQ ID NO: 69487 - protein, 9 aa, synthetic construct
  source 1..9: note = Seed: VHFISNSWL
VKFISNSWM

SEQ ID NO: 69488 - protein, 9 aa, synthetic construct
  source 1..9: note = Seed: VHFISNSWL
VKFISNSWY

SEQ ID NO: 69489 - protein, 11 aa, synthetic construct
  source 1..11: note = Seed: VSFLAHIQWMV
VKFLAHIQWMI

SEQ ID NO: 69490 - protein, 11 aa, synthetic construct
  source 1..11: note = Seed: VSFLAHIQWMV
VKFLAHIQWMV

SEQ ID NO: 69491 - protein, 8 aa, synthetic construct
  source 1..8: note = Seed: VVFLHVTY
VKFLHVTY

SEQ ID NO: 69492 - protein, 10 aa, synthetic construct
  source 1..10: note = Seed: VEFLRDGWEI
VKFLRDGWEF

SEQ ID NO: 69493 - protein, 8 aa, synthetic construct
  source 1..8: note = Seed: VVFNGVSF
VKFNGVSF

SEQ ID NO: 69494 - protein, 11 aa, synthetic construct
  source 1..11: note = Seed: VVFNGVSFSTF
VKFNGVSFSTF

SEQ ID NO: 69495 - protein, 11 aa, synthetic construct
  source 1..11: note = Seed: VVFNGVSFSTF
VKFNGVSFSTM

SEQ ID NO: 69496 - protein, 11 aa, synthetic construct
  source 1..11: note = Seed: VVFNGVSFSTF
VKFNGVSFSTY

SEQ ID NO: 69497 - protein, 8 aa, synthetic construct
  source 1..8: note = Seed: VVFNGVSF
VKFNGVSY

SEQ ID NO: 69498 - protein, 9 aa, synthetic construct
  source 1..9: note = Seed: VPFVVSTGY
VKFVVSTGF

SEQ ID NO: 69499 - protein, 9 aa, synthetic construct
  source 1..9: note = Seed: VPFVVSTGY
VKFVVSTGL

SEQ ID NO: 69500 - protein, 9 aa, synthetic construct
  source 1..9: note = Seed: VPFVVSTGY
VKFVVSTGM

SEQ ID NO: 69501 - protein, 9 aa, synthetic construct
  source 1..9: note = Seed: VPFVVSTGY
VKFVVSTGY

SEQ ID NO: 69502 - protein, 10 aa, synthetic construct
  source 1..10: note = Seed: VAGDSGFAAY
VKGDSGFAAF

SEQ ID NO: 69503 - protein, 10 aa, synthetic construct
  source 1..10: note = Seed: VAGDSGFAAY
VKGDSGFAAY

SEQ ID NO: 69504 - protein, 9 aa, synthetic construct
  source 1..9: note = Seed: VMHANYIFW
VKHANYIFF

SEQ ID NO: 69505 - protein, 9 aa, synthetic construct
  source 1..9: note = Seed: VMHANYIFW
VKHANYIFM

SEQ ID NO: 69506 - protein, 9 aa, synthetic construct
  source 1..9: note = Seed: VMHANYIFW
VKHANYIFY

SEQ ID NO: 69507 - protein, 10 aa, synthetic construct
  source 1..10: note = Seed: VLHSYFTSDY
VKHSYFTSDF

SEQ ID NO: 69508 - protein, 10 aa, synthetic construct
  source 1..10: note = Seed: VLHSYFTSDY
VKHSYFTSDM

SEQ ID NO: 69509 - protein, 10 aa, synthetic construct
  source 1..10: note = Seed: VLHSYFTSDY
VKHSYFTSDY

SEQ ID NO: 69510 - protein, 11 aa, synthetic construct
  source 1..11: note = Seed: VLHSYFTSDYY
VKHSYFTSDYF

SEQ ID NO: 69511 - protein, 11 aa, synthetic construct
  source 1..11: note = Seed: VLHSYFTSDYY
VKHSYFTSDYW

SEQ ID NO: 69512 - protein, 11 aa, synthetic construct
  source 1..11: note = Seed: VLHSYFTSDYY
VKHSYFTSDYY

SEQ ID NO: 69513 - protein, 9 aa, synthetic construct
  source 1..9: note = Seed: VEHVTFFIY
VKHVTFFIF

SEQ ID NO: 69514 - protein, 9 aa, synthetic construct
  source 1..9: note = Seed: VEHVTFFIY
VKHVTFFIM

SEQ ID NO: 69515 - protein, 9 aa, synthetic construct
  source 1..9: note = Seed: VEHVTFFIY
VKHVTFFIY

SEQ ID NO: 69516 - protein, 9 aa, synthetic construct
  source 1..9: note = Seed: VQIDRLITG
VKIDRLITF

SEQ ID NO: 69517 - protein, 9 aa, synthetic construct
  source 1..9: note = Seed: VQIDRLITG
VKIDRLITM

SEQ ID NO: 69518 - protein, 9 aa, synthetic construct
  source 1..9: note = Seed: VQIDRLITG
VKIDRLITY

SEQ ID NO: 69519 - protein, 9 aa, synthetic construct
  source 1..9: note = Seed: VSIINNTVY
VKIINNTVF

SEQ ID NO: 69520 - protein, 9 aa, synthetic construct
  source 1..9: note = Seed: VSIINNTVY
VKIINNTVL

SEQ ID NO: 69521 - protein, 9 aa, synthetic construct
  source 1..9: note = Seed: VSIINNTVY
VKIINNTVM

SEQ ID NO: 69522 - protein, 9 aa, synthetic construct
  source 1..9: note = Seed: VSIINNTVY
VKIINNTVY

SEQ ID NO: 69523 - protein, 9 aa, synthetic construct
  source 1..9: note = Seed: VNINIVGDF
VKINIVGDF

SEQ ID NO: 69524 - protein, 9 aa, synthetic construct
  source 1..9: note = Seed: VNINIVGDF
VKINIVGDY

SEQ ID NO: 69525 - protein, 9 aa, synthetic construct
  source 1..9: note = Seed: VVIPDYNTY
VKIPDYNTF

SEQ ID NO: 69526 - protein, 9 aa, synthetic construct
  source 1..9: note = Seed: VVIPDYNTY
VKIPDYNTL

SEQ ID NO: 69527 - protein, 9 aa, synthetic construct
  source 1..9: note = Seed: VVIPDYNTY
VKIPDYNTM

SEQ ID NO: 69528 - protein, 9 aa, synthetic construct
  source 1..9: note = Seed: VVIPDYNTY
VKIPDYNTY

SEQ ID NO: 69529 - protein, 11 aa, synthetic construct
  source 1..11: note = Seed: VAKYTQLCQYL
VKKYTQLCQYF

SEQ ID NO: 69530 - protein, 10 aa, synthetic construct
  source 1..10: note = Seed: VELFENKTTL
VKLFENKTTV

SEQ ID NO: 69531 - protein, 10 aa, synthetic construct
  source 1..10: note = Seed: VLLFLAFVVF
VKLFLAFVVF

SEQ ID NO: 69532 - protein, 10 aa, synthetic construct
  source 1..10: note = Seed: VLLFLAFVVF
VKLFLAFVVY

SEQ ID NO: 69533 - protein, 9 aa, synthetic construct
  source 1..9: note = Seed: VQLHNDILL
VKLHNDILF

SEQ ID NO: 69534 - protein, 10 aa, synthetic construct
  source 1..10: note = Seed: VQLHNDILLA
VKLHNDILLV

SEQ ID NO: 69535 - protein, 9 aa, synthetic construct
  source 1..9: note = Seed: VQLHNDILL
VKLHNDILY

SEQ ID NO: 69536 - protein, 10 aa, synthetic construct
  source 1..10: note = Seed: VNLHSSRLSF
VKLHSSRLSF

SEQ ID NO: 69537 - protein, 10 aa, synthetic construct
  source 1..10: note = Seed: VNLHSSRLSF
VKLHSSRLSM

SEQ ID NO: 69538 - protein, 10 aa, synthetic construct
  source 1..10: note = Seed: VNLHSSRLSF
VKLHSSRLSY

SEQ ID NO: 69539 - protein, 10 aa, synthetic construct
  source 1..10: note = Seed: VVLLSVLQQL
VKLLSVLQQI

SEQ ID NO: 69540 - protein, 10 aa, synthetic construct
  source 1..10: note = Seed: VVLLSVLQQL
VKLLSVLQQL

SEQ ID NO: 69541 - protein, 10 aa, synthetic construct
  source 1..10: note = Seed: VVLLSVLQQL
VKLLSVLQQV

SEQ ID NO: 69542 - protein, 9 aa, synthetic construct
  source 1..9: note = Seed: VGLMWLSYF
VKLMWLSYF

SEQ ID NO: 69543 - protein, 10 aa, synthetic construct
  source 1..10: note = Seed: VGLMWLSYFI
VKLMWLSYFA

SEQ ID NO: 69544 - protein, 10 aa, synthetic construct
  source 1..10: note = Seed: VGLMWLSYFI
VKLMWLSYFI

SEQ ID NO: 69545 - protein, 11 aa, synthetic construct
  source 1..11: note = Seed: VGLMWLSYFIA
VKLMWLSYFIV

SEQ ID NO: 69546 - protein, 10 aa, synthetic construct
  source 1..10: note = Seed: VGLMWLSYFI
VKLMWLSYFL

SEQ ID NO: 69547 - protein, 10 aa, synthetic construct
  source 1..10: note = Seed: VGLMWLSYFI
VKLMWLSYFM

SEQ ID NO: 69548 - protein, 10 aa, synthetic construct
  source 1..10: note = Seed: VGLMWLSYFI
VKLMWLSYFV

SEQ ID NO: 69549 - protein, 9 aa, synthetic construct
  source 1..9: note = Seed: VGLMWLSYF
VKLMWLSYM

SEQ ID NO: 69550 - protein, 9 aa, synthetic construct
  source 1..9: note = Seed: VGLMWLSYF
VKLMWLSYY

SEQ ID NO: 69551 - protein, 10 aa, synthetic construct
  source 1..10: note = Seed: VELVAELEGI
VKLVAELEGV

SEQ ID NO: 69552 - protein, 10 aa, synthetic construct
  source 1..10: note = Seed: VVMAYITGGV
VKMAYITGGI

SEQ ID NO: 69553 - protein, 10 aa, synthetic construct
  source 1..10: note = Seed: VVMAYITGGV
VKMAYITGGL

SEQ ID NO: 69554 - protein, 10 aa, synthetic construct
  source 1..10: note = Seed: VVMAYITGGV
VKMAYITGGV

SEQ ID NO: 69555 - protein, 10 aa, synthetic construct
  source 1..10: note = Seed: VRMYIFFASF
VKMYIFFASF

SEQ ID NO: 69556 - protein, 11 aa, synthetic construct
  source 1..11: note = Seed: VRMYIFFASFY
VKMYIFFASFK

SEQ ID NO: 69557 - protein, 10 aa, synthetic construct
  source 1..10: note = Seed: VRMYIFFASF
VKMYIFFASM

SEQ ID NO: 69558 - protein, 10 aa, synthetic construct
  source 1..10: note = Seed: VRMYIFFASF
VKMYIFFASY

SEQ ID NO: 69559 - protein, 10 aa, synthetic construct
  source 1..10: note = Seed: VFNGVSFSTF
VKNGVSFSTF

SEQ ID NO: 69560 - protein, 10 aa, synthetic construct
  source 1..10: note = Seed: VFNGVSFSTF
VKNGVSFSTM

SEQ ID NO: 69561 - protein, 10 aa, synthetic construct
  source 1..10: note = Seed: VFNGVSFSTF
VKNGVSFSTY

SEQ ID NO: 69562 - protein, 9 aa, synthetic construct
  source 1..9: note = Seed: VRNLQHRLY
VKNLQHRLF

SEQ ID NO: 69563 - protein, 10 aa, synthetic construct
  source 1..10: note = Seed: VLPFNDGVYF
VKPFNDGVYF

SEQ ID NO: 69564 - protein, 10 aa, synthetic construct
  source 1..10: note = Seed: VLPFNDGVYF
VKPFNDGVYW

SEQ ID NO: 69565 - protein, 10 aa, synthetic construct
  source 1..10: note = Seed: VLPFNDGVYF
VKPFNDGVYY

SEQ ID NO: 69566 - protein, 9 aa, synthetic construct
  source 1..9: note = Seed: VRQCSGVTF
VKQCSGVTF

SEQ ID NO: 69567 - protein, 9 aa, synthetic construct
  source 1..9: note = Seed: VRQCSGVTF
VKQCSGVTL

SEQ ID NO: 69568 - protein, 9 aa, synthetic construct
  source 1..9: note = Seed: VRQCSGVTF
VKQCSGVTM

SEQ ID NO: 69569 - protein, 9 aa, synthetic construct
  source 1..9: note = Seed: VRQCSGVTF
VKQCSGVTY

SEQ ID NO: 69570 - protein, 9 aa, synthetic construct
  source 1..9: note = Seed: VQQLPETYF
VKQLPETYF

SEQ ID NO: 69571 - protein, 9 aa, synthetic construct
  source 1..9: note = Seed: VQQLPETYF
VKQLPETYY

SEQ ID NO: 69572 - protein, 10 aa, synthetic construct
  source 1..10: note = Seed: VLQLPQGTTL
VKQLPQGTTF

SEQ ID NO: 69573 - protein, 10 aa, synthetic construct
  source 1..10: note = Seed: VLQLPQGTTL
VKQLPQGTTM

SEQ ID NO: 69574 - protein, 10 aa, synthetic construct
  source 1..10: note = Seed: VLQLPQGTTL
VKQLPQGTTY

SEQ ID NO: 69575 - protein, 9 aa, synthetic construct
  source 1..9: note = Seed: VVQQLPETY
VKQQLPETF

SEQ ID NO: 69576 - protein, 9 aa, synthetic construct
  source 1..9: note = Seed: VVQQLPETY
VKQQLPETY

SEQ ID NO: 69577 - protein, 9 aa, synthetic construct
  source 1..9: note = Seed: VARDLSLQF
VKRDLSLQF

SEQ ID NO: 69578 - protein, 9 aa, synthetic construct
  source 1..9: note = Seed: VARDLSLQF
VKRDLSLQM

SEQ ID NO: 69579 - protein, 9 aa, synthetic construct
  source 1..9: note = Seed: VARDLSLQF
VKRDLSLQY

SEQ ID NO: 69580 - protein, 9 aa, synthetic construct
  source 1..9: note = Seed: VKRHTFSNY
VKRHTFSNF

SEQ ID NO: 69581 - protein, 9 aa, synthetic construct
  source 1..9: note = Seed: VKRHTFSNY
VKRHTFSNM

SEQ ID NO: 69582 - protein, 10 aa, synthetic construct
  source 1..10: note = Seed: VVRQCSGVTF
VKRQCSGVTF

SEQ ID NO: 69583 - protein, 10 aa, synthetic construct
  source 1..10: note = Seed: VVRQCSGVTF
VKRQCSGVTM

SEQ ID NO: 69584 - protein, 10 aa, synthetic construct
  source 1..10: note = Seed: VVRQCSGVTF
VKRQCSGVTY

SEQ ID NO: 69585 - protein, 10 aa, synthetic construct
  source 1..10: note = Seed: VTSAMQTMLF
VKSAMQTMLF

SEQ ID NO: 69586 - protein, 10 aa, synthetic construct
  source 1..10: note = Seed: VTSAMQTMLF
VKSAMQTMLW

SEQ ID NO: 69587 - protein, 10 aa, synthetic construct
  source 1..10: note = Seed: VTSAMQTMLF
VKSAMQTMLY

SEQ ID NO: 69588 - protein, 9 aa, synthetic construct
  source 1..9: note = Seed: VYSFLPGVY
VKSFLPGVF

SEQ ID NO: 69589 - protein, 9 aa, synthetic construct
  source 1..9: note = Seed: VYSFLPGVY
VKSFLPGVM

SEQ ID NO: 69590 - protein, 9 aa, synthetic construct
  source 1..9: note = Seed: VYSFLPGVY
VKSFLPGVY

SEQ ID NO: 69591 - protein, 11 aa, synthetic construct
  source 1..11: note = Seed: VYSFLPGVYSV
VKSFLPGVYSF

SEQ ID NO: 69592 - protein, 10 aa, synthetic construct
  source 1..10: note = Seed: VNSFSGYLKL
VKSFSGYLKF

SEQ ID NO: 69593 - protein, 10 aa, synthetic construct
  source 1..10: note = Seed: VNSFSGYLKL
VKSFSGYLKM

SEQ ID NO: 69594 - protein, 10 aa, synthetic construct
  source 1..10: note = Seed: VNSFSGYLKL
VKSFSGYLKW

SEQ ID NO: 69595 - protein, 10 aa, synthetic construct
  source 1..10: note = Seed: VNSFSGYLKL
VKSFSGYLKY

SEQ ID NO: 69596 - protein, 10 aa, synthetic construct
  source 1..10: note = Seed: VYSSANNCTF
VKSSANNCTF

SEQ ID NO: 69597 - protein, 10 aa, synthetic construct
  source 1..10: note = Seed: VYSSANNCTF
VKSSANNCTW

SEQ ID NO: 69598 - protein, 10 aa, synthetic construct
  source 1..10: note = Seed: VYSSANNCTF
VKSSANNCTY

SEQ ID NO: 69599 - protein, 9 aa, synthetic construct
  source 1..9: note = Seed: VYSTGSNVF
VKSTGSNVF

SEQ ID NO: 69600 - protein, 9 aa, synthetic construct
  source 1..9: note = Seed: VYSTGSNVF
VKSTGSNVL

SEQ ID NO: 69601 - protein, 9 aa, synthetic construct
  source 1..9: note = Seed: VYSTGSNVF
VKSTGSNVM

SEQ ID NO: 69602 - protein, 9 aa, synthetic construct
  source 1..9: note = Seed: VYSTGSNVF
VKSTGSNVY

SEQ ID NO: 69603 - protein, 10 aa, synthetic construct
  source 1..10: note = Seed: VVSTGYHFRE
VKSTGYHFRR

SEQ ID NO: 69604 - protein, 9 aa, synthetic construct
  source 1..9: note = Seed: VQSTQWSLF
VKSTQWSLF

SEQ ID NO: 69605 - protein, 9 aa, synthetic construct
  source 1..9: note = Seed: VQSTQWSLF
VKSTQWSLY

SEQ ID NO: 69606 - protein, 10 aa, synthetic construct
  source 1..10: note = Seed: VNSVLLFLAF
VKSVLLFLAF

SEQ ID NO: 69607 - protein, 10 aa, synthetic construct
  source 1..10: note = Seed: VNSVLLFLAF
VKSVLLFLAY

SEQ ID NO: 69608 - protein, 11 aa, synthetic construct
  source 1..11: note = Seed: VDSYYSLLMPI
VKSYYSLLMPF

SEQ ID NO: 69609 - protein, 9 aa, synthetic construct
  source 1..9: note = Seed: VQTIEVNSF
VKTIEVNSF

SEQ ID NO: 69610 - protein, 9 aa, synthetic construct
  source 1..9: note = Seed: VQTIEVNSF
VKTIEVNSM

SEQ ID NO: 69611 - protein, 9 aa, synthetic construct
  source 1..9: note = Seed: VQTIEVNSF
VKTIEVNSY

SEQ ID NO: 69612 - protein, 10 aa, synthetic construct
  source 1..10: note = Seed: VNVLAWLYAA
VKVLAWLYAI

SEQ ID NO: 69613 - protein, 10 aa, synthetic construct
  source 1..10: note = Seed: VNVLAWLYAA
VKVLAWLYAL

SEQ ID NO: 69614 - protein, 10 aa, synthetic construct
  source 1..10: note = Seed: VNVLAWLYAA
VKVLAWLYAV

SEQ ID NO: 69615 - protein, 11 aa, synthetic construct
  source 1..11: note = Seed: VFVLWAHGFEL
VKVLWAHGFEI

SEQ ID NO: 69616 - protein, 11 aa, synthetic construct
  source 1..11: note = Seed: VFVLWAHGFEL
VKVLWAHGFEL

SEQ ID NO: 69617 - protein, 11 aa, synthetic construct
  source 1..11: note = Seed: VFVLWAHGFEL
VKVLWAHGFEV

SEQ ID NO: 69618 - protein, 9 aa, synthetic construct
  source 1..9: note = Seed: VQVTCGTTT
VKVTCGTTF

SEQ ID NO: 69619 - protein, 9 aa, synthetic construct
  source 1..9: note = Seed: VQVTCGTTT
VKVTCGTTI

SEQ ID NO: 69620 - protein, 9 aa, synthetic construct
  source 1..9: note = Seed: VQVTCGTTT
VKVTCGTTL

SEQ ID NO: 69621 - protein, 9 aa, synthetic construct
  source 1..9: note = Seed: VQVTCGTTT
VKVTCGTTM

SEQ ID NO: 69622 - protein, 10 aa, synthetic construct
  source 1..10: note = Seed: VQVTCGTTTL
VKVTCGTTTF

SEQ ID NO: 69623 - protein, 10 aa, synthetic construct
  source 1..10: note = Seed: VQVTCGTTTL
VKVTCGTTTM

SEQ ID NO: 69624 - protein, 10 aa, synthetic construct
  source 1..10: note = Seed: VQVTCGTTTL
VKVTCGTTTY

SEQ ID NO: 69625 - protein, 9 aa, synthetic construct
  source 1..9: note = Seed: VQVTCGTTT
VKVTCGTTY

SEQ ID NO: 69626 - protein, 9 aa, synthetic construct
  source 1..9: note = Seed: VLWAHGFEL
VKWAHGFEF

SEQ ID NO: 69627 - protein, 9 aa, synthetic construct
  source 1..9: note = Seed: VLWAHGFEL
VKWAHGFEI

SEQ ID NO: 69628 - protein, 9 aa, synthetic construct
  source 1..9: note = Seed: VLWAHGFEL
VKWAHGFEL

SEQ ID NO: 69629 - protein, 9 aa, synthetic construct
  source 1..9: note = Seed: VLWAHGFEL
VKWAHGFEM

SEQ ID NO: 69630 - protein, 9 aa, synthetic construct
  source 1..9: note = Seed: VLWAHGFEL
VKWAHGFEY

SEQ ID NO: 69631 - protein, 8 aa, synthetic construct
  source 1..8: note = Seed: VMYASAVV
VKYASAVF

SEQ ID NO: 69632 - protein, 8 aa, synthetic construct
  source 1..8: note = Seed: VMYASAVV
VKYASAVM

SEQ ID NO: 69633 - protein, 9 aa, synthetic construct
  source 1..9: note = Seed: VMYASAVVL
VKYASAVVF

SEQ ID NO: 69634 - protein, 9 aa, synthetic construct
  source 1..9: note = Seed: VMYASAVVL
VKYASAVVH

SEQ ID NO: 69635 - protein, 9 aa, synthetic construct
  source 1..9: note = Seed: VMYASAVVL
VKYASAVVI

SEQ ID NO: 69636 - protein, 9 aa, synthetic construct
  source 1..9: note = Seed: VMYASAVVL
VKYASAVVL

SEQ ID NO: 69637 - protein, 10 aa, synthetic construct
  source 1..10: note = Seed: VMYASAVVLL
VKYASAVVLF

SEQ ID NO: 69638 - protein, 10 aa, synthetic construct
  source 1..10: note = Seed: VMYASAVVLL
VKYASAVVLI

SEQ ID NO: 69639 - protein, 10 aa, synthetic construct
  source 1..10: note = Seed: VMYASAVVLL
VKYASAVVLL

SEQ ID NO: 69640 - protein, 11 aa, synthetic construct
  source 1..11: note = Seed: VMYASAVVLLI
VKYASAVVLLF

SEQ ID NO: 69641 - protein, 10 aa, synthetic construct
  source 1..10: note = Seed: VMYASAVVLL
VKYASAVVLM

SEQ ID NO: 69642 - protein, 10 aa, synthetic construct
  source 1..10: note = Seed: VMYASAVVLL
VKYASAVVLW

SEQ ID NO: 69643 - protein, 10 aa, synthetic construct
  source 1..10: note = Seed: VMYASAVVLL
VKYASAVVLY

SEQ ID NO: 69644 - protein, 9 aa, synthetic construct
  source 1..9: note = Seed: VMYASAVVL
VKYASAVVM

SEQ ID NO: 69645 - protein, 9 aa, synthetic construct
  source 1..9: note = Seed: VMYASAVVL
VKYASAVVV

SEQ ID NO: 69646 - protein, 9 aa, synthetic construct
  source 1..9: note = Seed: VMYASAVVL
VKYASAVVW

SEQ ID NO: 69647 - protein, 9 aa, synthetic construct
  source 1..9: note = Seed: VMYASAVVL
VKYASAVVY

SEQ ID NO: 69648 - protein, 8 aa, synthetic construct
  source 1..8: note = Seed: VMYASAVV
VKYASAVY

SEQ ID NO: 69649 - protein, 10 aa, synthetic construct
  source 1..10: note = Seed: VPYCYDTNVL
VKYCYDTNVF

SEQ ID NO: 69650 - protein, 8 aa, synthetic construct
  source 1..8: note = Seed: VAYFNMVY
VKYFNMVF

SEQ ID NO: 69651 - protein, 8 aa, synthetic construct
  source 1..8: note = Seed: VAYFNMVY
VKYFNMVY

SEQ ID NO: 69652 - protein, 9 aa, synthetic construct
  source 1..9: note = Seed: VAYFNMVYM
VKYFNMVYF

SEQ ID NO: 69653 - protein, 9 aa, synthetic construct
  source 1..9: note = Seed: VAYFNMVYM
VKYFNMVYL

SEQ ID NO: 69654 - protein, 9 aa, synthetic construct
  source 1..9: note = Seed: VAYFNMVYM
VKYFNMVYM

SEQ ID NO: 69655 - protein, 9 aa, synthetic construct
  source 1..9: note = Seed: VAYFNMVYM
VKYFNMVYY

SEQ ID NO: 69656 - protein, 9 aa, synthetic construct
  source 1..9: note = Seed: VGYLQPRTF
VKYLQPRTF

SEQ ID NO: 69657 - protein, 10 aa, synthetic construct
  source 1..10: note = Seed: VGYLQPRTFL
VKYLQPRTFF

SEQ ID NO: 69658 - protein, 11 aa, synthetic construct
  source 1..11: note = Seed: VGYLQPRTFLL
VKYLQPRTFLV

SEQ ID NO: 69659 - protein, 10 aa, synthetic construct
  source 1..10: note = Seed: VGYLQPRTFL
VKYLQPRTFW

SEQ ID NO: 69660 - protein, 9 aa, synthetic construct
  source 1..9: note = Seed: VGYLQPRTF
VKYLQPRTL

SEQ ID NO: 69661 - protein, 9 aa, synthetic construct
  source 1..9: note = Seed: VGYLQPRTF
VKYLQPRTM

SEQ ID NO: 69662 - protein, 9 aa, synthetic construct
  source 1..9: note = Seed: VGYLQPRTF
VKYLQPRTY

SEQ ID NO: 69663 - protein, 10 aa, synthetic construct
  source 1..10: note = Seed: VLYQPPQTSI
VKYQPPQTSF

SEQ ID NO: 69664 - protein, 10 aa, synthetic construct
  source 1..10: note = Seed: VLYQPPQTSI
VKYQPPQTSM

SEQ ID NO: 69665 - protein, 10 aa, synthetic construct
  source 1..10: note = Seed: VLYQPPQTSI
VKYQPPQTSW

SEQ ID NO: 69666 - protein, 10 aa, synthetic construct
  source 1..10: note = Seed: VGYQPYRVVV
VKYQPYRVVF

SEQ ID NO: 69667 - protein, 10 aa, synthetic construct
  source 1..10: note = Seed: VGYQPYRVVV
VKYQPYRVVI

SEQ ID NO: 69668 - protein, 10 aa, synthetic construct
  source 1..10: note = Seed: VGYQPYRVVV
VKYQPYRVVL

SEQ ID NO: 69669 - protein, 10 aa, synthetic construct
  source 1..10: note = Seed: VGYQPYRVVV
VKYQPYRVVM

SEQ ID NO: 69670 - protein, 10 aa, synthetic construct
  source 1..10: note = Seed: VGYQPYRVVV
VKYQPYRVVW

SEQ ID NO: 69671 - protein, 9 aa, synthetic construct
  source 1..9: note = Seed: VVYRGTTTY
VKYRGTTTF

SEQ ID NO: 69672 - protein, 9 aa, synthetic construct
  source 1..9: note = Seed: VVYRGTTTY
VKYRGTTTH

SEQ ID NO: 69673 - protein, 9 aa, synthetic construct
  source 1..9: note = Seed: VVYRGTTTY
VKYRGTTTI

SEQ ID NO: 69674 - protein, 9 aa, synthetic construct
  source 1..9: note = Seed: VVYRGTTTY
VKYRGTTTL

SEQ ID NO: 69675 - protein, 9 aa, synthetic construct
  source 1..9: note = Seed: VVYRGTTTY
VKYRGTTTM

SEQ ID NO: 69676 - protein, 9 aa, synthetic construct
  source 1..9: note = Seed: VVYRGTTTY
VKYRGTTTV

SEQ ID NO: 69677 - protein, 9 aa, synthetic construct
  source 1..9: note = Seed: VVYRGTTTY
VKYRGTTTW

SEQ ID NO: 69678 - protein, 9 aa, synthetic construct
  source 1..9: note = Seed: VVYRGTTTY
VKYRGTTTY

SEQ ID NO: 69679 - protein, 10 aa, synthetic construct
  source 1..10: note = Seed: VVYRGTTTYK
VKYRGTTTYK

SEQ ID NO: 69680 - protein, 10 aa, synthetic construct
  source 1..10: note = Seed: VVYRGTTTYK
VKYRGTTTYR

SEQ ID NO: 69681 - protein, 10 aa, synthetic construct
  source 1..10: note = Seed: VYYTSNPTTF
VKYTSNPTTF

SEQ ID NO: 69682 - protein, 10 aa, synthetic construct
  source 1..10: note = Seed: VYYTSNPTTF
VKYTSNPTTM

SEQ ID NO: 69683 - protein, 10 aa, synthetic construct
  source 1..10: note = Seed: VYYTSNPTTF
VKYTSNPTTY

SEQ ID NO: 69684 - protein, 9 aa, synthetic construct
  source 1..9: note = Seed: VLYYQNNVF
VKYYQNNVF

SEQ ID NO: 69685 - protein, 10 aa, synthetic construct
  source 1..10: note = Seed: VLYYQNNVFM
VKYYQNNVFF

SEQ ID NO: 69686 - protein, 10 aa, synthetic construct
  source 1..10: note = Seed: VLYYQNNVFM
VKYYQNNVFI

SEQ ID NO: 69687 - protein, 10 aa, synthetic construct
  source 1..10: note = Seed: VLYYQNNVFM
VKYYQNNVFL

SEQ ID NO: 69688 - protein, 10 aa, synthetic construct
  source 1..10: note = Seed: VLYYQNNVFM
VKYYQNNVFW

SEQ ID NO: 69689 - protein, 10 aa, synthetic construct
  source 1..10: note = Seed: VLYYQNNVFM
VKYYQNNVFY

SEQ ID NO: 69690 - protein, 9 aa, synthetic construct
  source 1..9: note = Seed: VLYYQNNVF
VKYYQNNVI

SEQ ID NO: 69691 - protein, 9 aa, synthetic construct
  source 1..9: note = Seed: VLYYQNNVF
VKYYQNNVL

SEQ ID NO: 69692 - protein, 9 aa, synthetic construct
  source 1..9: note = Seed: VLYYQNNVF
VKYYQNNVM

SEQ ID NO: 69693 - protein, 9 aa, synthetic construct
  source 1..9: note = Seed: VLYYQNNVF
VKYYQNNVY

SEQ ID NO: 69694 - protein, 10 aa, synthetic construct
  source 1..10: note = Seed: VLAAECTIFK
VLAAECTIFR

SEQ ID NO: 69695 - protein, 9 aa, synthetic construct
  source 1..9: note = Seed: VLAAECTIF
VLAAECTIY

SEQ ID NO: 69696 - protein, 9 aa, synthetic construct
  source 1..9: note = Seed: VYADSFVIR
VLADSFVIR

SEQ ID NO: 69697 - protein, 9 aa, synthetic construct
  source 1..9: note = Seed: VTANVNALL
VLANVNALA

SEQ ID NO: 69698 - protein, 9 aa, synthetic construct
  source 1..9: note = Seed: VTANVNALL
VLANVNALI

SEQ ID NO: 69699 - protein, 9 aa, synthetic construct
  source 1..9: note = Seed: VTANVNALL
VLANVNALL

SEQ ID NO: 69700 - protein, 9 aa, synthetic construct
  source 1..9: note = Seed: VTANVNALL
VLANVNALM

SEQ ID NO: 69701 - protein, 9 aa, synthetic construct
  source 1..9: note = Seed: VTANVNALL
VLANVNALT

SEQ ID NO: 69702 - protein, 9 aa, synthetic construct
  source 1..9: note = Seed: VTANVNALL
VLANVNALV

SEQ ID NO: 69703 - protein, 9 aa, synthetic construct
  source 1..9: note = Seed: VTANVNALL
VLANVNALW

SEQ ID NO: 69704 - protein, 9 aa, synthetic construct
  source 1..9: note = Seed: VFAQVKQIY
VLAQVKQIF

SEQ ID NO: 69705 - protein, 9 aa, synthetic construct
  source 1..9: note = Seed: VFAQVKQIY
VLAQVKQIY

SEQ ID NO: 69706 - protein, 10 aa, synthetic construct
  source 1..10: note = Seed: VFAQVKQIYK
VLAQVKQIYK

SEQ ID NO: 69707 - protein, 10 aa, synthetic construct
  source 1..10: note = Seed: VFAQVKQIYK
VLAQVKQIYR

SEQ ID NO: 69708 - protein, 9 aa, synthetic construct
  source 1..9: note = Seed: VLARKHTTC
VLARKHTTL

SEQ ID NO: 69709 - protein, 9 aa, synthetic construct
  source 1..9: note = Seed: VLARKHTTC
VLARKHTTM

SEQ ID NO: 69710 - protein, 9 aa, synthetic construct
  source 1..9: note = Seed: VNASSSEAF
VLASSSEAF

SEQ ID NO: 69711 - protein, 9 aa, synthetic construct
  source 1..9: note = Seed: VNASSSEAF
VLASSSEAM

SEQ ID NO: 69712 - protein, 9 aa, synthetic construct
  source 1..9: note = Seed: VNASSSEAF
VLASSSEAY

SEQ ID NO: 69713 - protein, 9 aa, synthetic construct
  source 1..9: note = Seed: VLAWLYAAV
VLAWLYAAA

SEQ ID NO: 69714 - protein, 9 aa, synthetic construct
  source 1..9: note = Seed: VLAWLYAAV
VLAWLYAAI

SEQ ID NO: 69715 - protein, 9 aa, synthetic construct
  source 1..9: note = Seed: VLAWLYAAV
VLAWLYAAL

SEQ ID NO: 69716 - protein, 9 aa, synthetic construct
  source 1..9: note = Seed: VLAWLYAAV
VLAWLYAAM

SEQ ID NO: 69717 - protein, 9 aa, synthetic construct
  source 1..9: note = Seed: VLAWLYAAV
VLAWLYAAT

SEQ ID NO: 69718 - protein, 8 aa, synthetic construct
  source 1..8: note = Seed: VLAWLYAA
VLAWLYAI

SEQ ID NO: 69719 - protein, 8 aa, synthetic construct
  source 1..8: note = Seed: VLAWLYAA
VLAWLYAL

SEQ ID NO: 69720 - protein, 8 aa, synthetic construct
  source 1..8: note = Seed: VLAWLYAA
VLAWLYAV

SEQ ID NO: 69721 - protein, 9 aa, synthetic construct
  source 1..9: note = Seed: VMAYITGGV
VLAYITGGA

SEQ ID NO: 69722 - protein, 9 aa, synthetic construct
  source 1..9: note = Seed: VMAYITGGV
VLAYITGGI

SEQ ID NO: 69723 - protein, 9 aa, synthetic construct
  source 1..9: note = Seed: VMAYITGGV
VLAYITGGL

SEQ ID NO: 69724 - protein, 9 aa, synthetic construct
  source 1..9: note = Seed: VMAYITGGV
VLAYITGGM

SEQ ID NO: 69725 - protein, 9 aa, synthetic construct
  source 1..9: note = Seed: VMAYITGGV
VLAYITGGV

SEQ ID NO: 69726 - protein, 11 aa, synthetic construct
  source 1..11: note = Seed: VLCLTPVYSFL
VLCLTPVYSFV

SEQ ID NO: 69727 - protein, 10 aa, synthetic construct
  source 1..10: note = Seed: VLCNSQTSLR
VLCNSQTSLK

SEQ ID NO: 69728 - protein, 9 aa, synthetic construct
  source 1..9: note = Seed: VLCNSQTSL
VLCNSQTSV

SEQ ID NO: 69729 - protein, 9 aa, synthetic construct
  source 1..9: note = Seed: VSDIDITFL
VLDIDITFL

SEQ ID NO: 69730 - protein, 10 aa, synthetic construct
  source 1..10: note = Seed: VSDIDITFLK
VLDIDITFLK

SEQ ID NO: 69731 - protein, 10 aa, synthetic construct
  source 1..10: note = Seed: VSDIDITFLK
VLDIDITFLR

SEQ ID NO: 69732 - protein, 9 aa, synthetic construct
  source 1..9: note = Seed: VVDKYFDCY
VLDKYFDCY

SEQ ID NO: 69733 - protein, 9 aa, synthetic construct
  source 1..9: note = Seed: VVDSYYSLL
VLDSYYSLA

SEQ ID NO: 69734 - protein, 9 aa, synthetic construct
  source 1..9: note = Seed: VVDSYYSLL
VLDSYYSLI

SEQ ID NO: 69735 - protein, 9 aa, synthetic construct
  source 1..9: note = Seed: VVDSYYSLL
VLDSYYSLL

SEQ ID NO: 69736 - protein, 10 aa, synthetic construct
  source 1..10: note = Seed: VVDSYYSLLM
VLDSYYSLLY

SEQ ID NO: 69737 - protein, 9 aa, synthetic construct
  source 1..9: note = Seed: VVDSYYSLL
VLDSYYSLM

SEQ ID NO: 69738 - protein, 9 aa, synthetic construct
  source 1..9: note = Seed: VVDSYYSLL
VLDSYYSLV

SEQ ID NO: 69739 - protein, 11 aa, synthetic construct
  source 1..11: note = Seed: VYDYLVSTQEF
VLDYLVSTQEF

SEQ ID NO: 69740 - protein, 11 aa, synthetic construct
  source 1..11: note = Seed: VYDYLVSTQEF
VLDYLVSTQEW

SEQ ID NO: 69741 - protein, 9 aa, synthetic construct
  source 1..9: note = Seed: VAEWFLAYI
VLEWFLAYA

SEQ ID NO: 69742 - protein, 9 aa, synthetic construct
  source 1..9: note = Seed: VAEWFLAYI
VLEWFLAYI

SEQ ID NO: 69743 - protein, 9 aa, synthetic construct
  source 1..9: note = Seed: VAEWFLAYI
VLEWFLAYL

SEQ ID NO: 69744 - protein, 9 aa, synthetic construct
  source 1..9: note = Seed: VAEWFLAYI
VLEWFLAYM

SEQ ID NO: 69745 - protein, 9 aa, synthetic construct
  source 1..9: note = Seed: VAEWFLAYI
VLEWFLAYT

SEQ ID NO: 69746 - protein, 9 aa, synthetic construct
  source 1..9: note = Seed: VAEWFLAYI
VLEWFLAYV

SEQ ID NO: 69747 - protein, 9 aa, synthetic construct
  source 1..9: note = Seed: VAFELWAKR
VLFELWAKR

SEQ ID NO: 69748 - protein, 11 aa, synthetic construct
  source 1..11: note = Seed: VTFGDDTVIEV
VLFGDDTVIEA

SEQ ID NO: 69749 - protein, 11 aa, synthetic construct
  source 1..11: note = Seed: VTFGDDTVIEV
VLFGDDTVIEI

SEQ ID NO: 69750 - protein, 11 aa, synthetic construct
  source 1..11: note = Seed: VTFGDDTVIEV
VLFGDDTVIEL

SEQ ID NO: 69751 - protein, 11 aa, synthetic construct
  source 1..11: note = Seed: VTFGDDTVIEV
VLFGDDTVIEM

SEQ ID NO: 69752 - protein, 11 aa, synthetic construct
  source 1..11: note = Seed: VTFGDDTVIEV
VLFGDDTVIEV

SEQ ID NO: 69753 - protein, 9 aa, synthetic construct
  source 1..9: note = Seed: VHFISNSWL
VLFISNSWF

SEQ ID NO: 69754 - protein, 9 aa, synthetic construct
  source 1..9: note = Seed: VHFISNSWL
VLFISNSWY

SEQ ID NO: 69755 - protein, 11 aa, synthetic construct
  source 1..11: note = Seed: VSFLAHIQWMV
VLFLAHIQWMI

SEQ ID NO: 69756 - protein, 11 aa, synthetic construct
  source 1..11: note = Seed: VSFLAHIQWMV
VLFLAHIQWML

SEQ ID NO: 69757 - protein, 11 aa, synthetic construct
  source 1..11: note = Seed: VSFLAHIQWMV
VLFLAHIQWMV

SEQ ID NO: 69758 - protein, 9 aa, synthetic construct
  source 1..9: note = Seed: VVFLHVTYV
VLFLHVTYA

SEQ ID NO: 69759 - protein, 9 aa, synthetic construct
  source 1..9: note = Seed: VVFLHVTYV
VLFLHVTYC

SEQ ID NO: 69760 - protein, 9 aa, synthetic construct
  source 1..9: note = Seed: VVFLHVTYV
VLFLHVTYI

SEQ ID NO: 69761 - protein, 9 aa, synthetic construct
  source 1..9: note = Seed: VVFLHVTYV
VLFLHVTYL

SEQ ID NO: 69762 - protein, 9 aa, synthetic construct
  source 1..9: note = Seed: VVFLHVTYV
VLFLHVTYM

SEQ ID NO: 69763 - protein, 9 aa, synthetic construct
  source 1..9: note = Seed: VVFLHVTYV
VLFLHVTYS

SEQ ID NO: 69764 - protein, 9 aa, synthetic construct
  source 1..9: note = Seed: VVFLHVTYV
VLFLHVTYT

SEQ ID NO: 69765 - protein, 9 aa, synthetic construct
  source 1..9: note = Seed: VVFLHVTYV
VLFLHVTYV

SEQ ID NO: 69766 - protein, 10 aa, synthetic construct
  source 1..10: note = Seed: VVFLHVTYVP
VLFLHVTYVA

SEQ ID NO: 69767 - protein, 10 aa, synthetic construct
  source 1..10: note = Seed: VVFLHVTYVP
VLFLHVTYVC

SEQ ID NO: 69768 - protein, 10 aa, synthetic construct
  source 1..10: note = Seed: VVFLHVTYVP
VLFLHVTYVD

SEQ ID NO: 69769 - protein, 10 aa, synthetic construct
  source 1..10: note = Seed: VVFLHVTYVP
VLFLHVTYVE

SEQ ID NO: 69770 - protein, 10 aa, synthetic construct
  source 1..10: note = Seed: VVFLHVTYVP
VLFLHVTYVF

SEQ ID NO: 69771 - protein, 10 aa, synthetic construct
  source 1..10: note = Seed: VVFLHVTYVP
VLFLHVTYVG

SEQ ID NO: 69772 - protein, 10 aa, synthetic construct
  source 1..10: note = Seed: VVFLHVTYVP
VLFLHVTYVH

SEQ ID NO: 69773 - protein, 10 aa, synthetic construct
  source 1..10: note = Seed: VVFLHVTYVP
VLFLHVTYVI

SEQ ID NO: 69774 - protein, 10 aa, synthetic construct
  source 1..10: note = Seed: VVFLHVTYVP
VLFLHVTYVK

SEQ ID NO: 69775 - protein, 10 aa, synthetic construct
  source 1..10: note = Seed: VVFLHVTYVP
VLFLHVTYVL

SEQ ID NO: 69776 - protein, 10 aa, synthetic construct
  source 1..10: note = Seed: VVFLHVTYVP
VLFLHVTYVM

SEQ ID NO: 69777 - protein, 10 aa, synthetic construct
  source 1..10: note = Seed: VVFLHVTYVP
VLFLHVTYVN

SEQ ID NO: 69778 - protein, 10 aa, synthetic construct
  source 1..10: note = Seed: VVFLHVTYVP
VLFLHVTYVP

SEQ ID NO: 69779 - protein, 10 aa, synthetic construct
  source 1..10: note = Seed: VVFLHVTYVP
VLFLHVTYVQ

SEQ ID NO: 69780 - protein, 10 aa, synthetic construct
  source 1..10: note = Seed: VVFLHVTYVP
VLFLHVTYVR

SEQ ID NO: 69781 - protein, 10 aa, synthetic construct
  source 1..10: note = Seed: VVFLHVTYVP
VLFLHVTYVS

SEQ ID NO: 69782 - protein, 10 aa, synthetic construct
  source 1..10: note = Seed: VVFLHVTYVP
VLFLHVTYVT

SEQ ID NO: 69783 - protein, 10 aa, synthetic construct
  source 1..10: note = Seed: VVFLHVTYVP
VLFLHVTYVV

SEQ ID NO: 69784 - protein, 10 aa, synthetic construct
  source 1..10: note = Seed: VVFLHVTYVP
VLFLHVTYVW

SEQ ID NO: 69785 - protein, 10 aa, synthetic construct
  source 1..10: note = Seed: VVFLHVTYVP
VLFLHVTYVY

SEQ ID NO: 69786 - protein, 10 aa, synthetic construct
  source 1..10: note = Seed: VEFLRDGWEI
VLFLRDGWEF

SEQ ID NO: 69787 - protein, 8 aa, synthetic construct
  source 1..8: note = Seed: VVFNGVSF
VLFNGVSF

SEQ ID NO: 69788 - protein, 10 aa, synthetic construct
  source 1..10: note = Seed: VVFNGVSFST
VLFNGVSFSA

SEQ ID NO: 69789 - protein, 10 aa, synthetic construct
  source 1..10: note = Seed: VVFNGVSFST
VLFNGVSFSI

SEQ ID NO: 69790 - protein, 10 aa, synthetic construct
  source 1..10: note = Seed: VVFNGVSFST
VLFNGVSFSL

SEQ ID NO: 69791 - protein, 11 aa, synthetic construct
  source 1..11: note = Seed: VVFNGVSFSTF
VLFNGVSFSTF

SEQ ID NO: 69792 - protein, 11 aa, synthetic construct
  source 1..11: note = Seed: VVFNGVSFSTF
VLFNGVSFSTY

SEQ ID NO: 69793 - protein, 10 aa, synthetic construct
  source 1..10: note = Seed: VVFNGVSFST
VLFNGVSFSV

SEQ ID NO: 69794 - protein, 8 aa, synthetic construct
  source 1..8: note = Seed: VVFNGVSF
VLFNGVSY

SEQ ID NO: 69795 - protein, 9 aa, synthetic construct
  source 1..9: note = Seed: VPFVVSTGY
VLFVVSTGF

SEQ ID NO: 69796 - protein, 9 aa, synthetic construct
  source 1..9: note = Seed: VPFVVSTGY
VLFVVSTGY

SEQ ID NO: 69797 - protein, 10 aa, synthetic construct
  source 1..10: note = Seed: VAGDSGFAAY
VLGDSGFAAY

SEQ ID NO: 69798 - protein, 10 aa, synthetic construct
  source 1..10: note = Seed: VIGFLFLTWI
VLGFLFLTWV

SEQ ID NO: 69799 - protein, 9 aa, synthetic construct
  source 1..9: note = Seed: VIGIVNNTV
VLGIVNNTL

SEQ ID NO: 69800 - protein, 9 aa, synthetic construct
  source 1..9: note = Seed: VIGIVNNTV
VLGIVNNTV

SEQ ID NO: 69801 - protein, 9 aa, synthetic construct
  source 1..9: note = Seed: VGGNYNYLY
VLGNYNYLY

SEQ ID NO: 69802 - protein, 10 aa, synthetic construct
  source 1..10: note = Seed: VGGNYNYLYR
VLGNYNYLYK

SEQ ID NO: 69803 - protein, 10 aa, synthetic construct
  source 1..10: note = Seed: VGGNYNYLYR
VLGNYNYLYR

SEQ ID NO: 69804 - protein, 9 aa, synthetic construct
  source 1..9: note = Seed: VMHANYIFW
VLHANYIFF

SEQ ID NO: 69805 - protein, 9 aa, synthetic construct
  source 1..9: note = Seed: VMHANYIFW
VLHANYIFY

SEQ ID NO: 69806 - protein, 10 aa, synthetic construct
  source 1..10: note = Seed: VLHDIGNPKA
VLHDIGNPKL

SEQ ID NO: 69807 - protein, 10 aa, synthetic construct
  source 1..10: note = Seed: VLHDIGNPKA
VLHDIGNPKV

SEQ ID NO: 69808 - protein, 9 aa, synthetic construct
  source 1..9: note = Seed: VLHDIGNPK
VLHDIGNPR

SEQ ID NO: 69809 - protein, 10 aa, synthetic construct
  source 1..10: note = Seed: VFHLYLQYIR
VLHLYLQYIR

SEQ ID NO: 69810 - protein, 9 aa, synthetic construct
  source 1..9: note = Seed: VTHSKGLYR
VLHSKGLYK

SEQ ID NO: 69811 - protein, 9 aa, synthetic construct
  source 1..9: note = Seed: VTHSKGLYR
VLHSKGLYR

SEQ ID NO: 69812 - protein, 10 aa, synthetic construct
  source 1..10: note = Seed: VTHSKGLYRK
VLHSKGLYRK

SEQ ID NO: 69813 - protein, 10 aa, synthetic construct
  source 1..10: note = Seed: VTHSKGLYRK
VLHSKGLYRR

SEQ ID NO: 69814 - protein, 9 aa, synthetic construct
  source 1..9: note = Seed: VTHSKGLYR
VLHSKGLYY

SEQ ID NO: 69815 - protein, 10 aa, synthetic construct
  source 1..10: note = Seed: VLHSYFTSDY
VLHSYFTSDF

SEQ ID NO: 69816 - protein, 11 aa, synthetic construct
  source 1..11: note = Seed: VLHSYFTSDYY
VLHSYFTSDYW

SEQ ID NO: 69817 - protein, 9 aa, synthetic construct
  source 1..9: note = Seed: VEHVTFFIY
VLHVTFFIF

SEQ ID NO: 69818 - protein, 9 aa, synthetic construct
  source 1..9: note = Seed: VEHVTFFIY
VLHVTFFIY

SEQ ID NO: 69819 - protein, 9 aa, synthetic construct
  source 1..9: note = Seed: VTIAEILLI
VLIAEILLA

SEQ ID NO: 69820 - protein, 9 aa, synthetic construct
  source 1..9: note = Seed: VTIAEILLI
VLIAEILLI

SEQ ID NO: 69821 - protein, 10 aa, synthetic construct
  source 1..10: note = Seed: VTIAEILLII
VLIAEILLIA

SEQ ID NO: 69822 - protein, 10 aa, synthetic construct
  source 1..10: note = Seed: VTIAEILLII
VLIAEILLII

SEQ ID NO: 69823 - protein, 10 aa, synthetic construct
  source 1..10: note = Seed: VTIAEILLII
VLIAEILLIL

SEQ ID NO: 69824 - protein, 10 aa, synthetic construct
  source 1..10: note = Seed: VTIAEILLII
VLIAEILLIV

SEQ ID NO: 69825 - protein, 9 aa, synthetic construct
  source 1..9: note = Seed: VTIAEILLI
VLIAEILLL

SEQ ID NO: 69826 - protein, 9 aa, synthetic construct
  source 1..9: note = Seed: VTIAEILLI
VLIAEILLM

SEQ ID NO: 69827 - protein, 9 aa, synthetic construct
  source 1..9: note = Seed: VTIAEILLI
VLIAEILLV

SEQ ID NO: 69828 - protein, 9 aa, synthetic construct
  source 1..9: note = Seed: VTIAEILLI
VLIAEILLW

SEQ ID NO: 69829 - protein, 10 aa, synthetic construct
  source 1..10: note = Seed: VSICSTMTNR
VLICSTMTNK

SEQ ID NO: 69830 - protein, 10 aa, synthetic construct
  source 1..10: note = Seed: VSICSTMTNR
VLICSTMTNR

SEQ ID NO: 69831 - protein, 9 aa, synthetic construct
  source 1..9: note = Seed: VQIDRLITG
VLIDRLITF

SEQ ID NO: 69832 - protein, 9 aa, synthetic construct
  source 1..9: note = Seed: VQIDRLITG
VLIDRLITY

SEQ ID NO: 69833 - protein, 9 aa, synthetic construct
  source 1..9: note = Seed: VSIINNTVY
VLIINNTVF

SEQ ID NO: 69834 - protein, 9 aa, synthetic construct
  source 1..9: note = Seed: VSIINNTVY
VLIINNTVM

SEQ ID NO: 69835 - protein, 9 aa, synthetic construct
  source 1..9: note = Seed: VSIINNTVY
VLIINNTVY

SEQ ID NO: 69836 - protein, 10 aa, synthetic construct
  source 1..10: note = Seed: VNINIVGDFK
VLINIVGDFK

SEQ ID NO: 69837 - protein, 10 aa, synthetic construct
  source 1..10: note = Seed: VNINIVGDFK
VLINIVGDFR

SEQ ID NO: 69838 - protein, 9 aa, synthetic construct
  source 1..9: note = Seed: VVIPDYNTY
VLIPDYNTF

SEQ ID NO: 69839 - protein, 9 aa, synthetic construct
  source 1..9: note = Seed: VVIPDYNTY
VLIPDYNTM

SEQ ID NO: 69840 - protein, 9 aa, synthetic construct
  source 1..9: note = Seed: VVIPDYNTY
VLIPDYNTY

SEQ ID NO: 69841 - protein, 10 aa, synthetic construct
  source 1..10: note = Seed: VVIPDYNTYK
VLIPDYNTYK

SEQ ID NO: 69842 - protein, 10 aa, synthetic construct
  source 1..10: note = Seed: VVIPDYNTYK
VLIPDYNTYR

SEQ ID NO: 69843 - protein, 10 aa, synthetic construct
  source 1..10: note = Seed: VFKNIDGYFK
VLKNIDGYFK

SEQ ID NO: 69844 - protein, 10 aa, synthetic construct
  source 1..10: note = Seed: VFKNIDGYFK
VLKNIDGYFR

SEQ ID NO: 69845 - protein, 9 aa, synthetic construct
  source 1..9: note = Seed: VVKRHTFSN
VLKRHTFSK

SEQ ID NO: 69846 - protein, 10 aa, synthetic construct
  source 1..10: note = Seed: VVKRHTFSNY
VLKRHTFSNY

SEQ ID NO: 69847 - protein, 11 aa, synthetic construct
  source 1..11: note = Seed: VAKYTQLCQYL
VLKYTQLCQYF

SEQ ID NO: 69848 - protein, 10 aa, synthetic construct
  source 1..10: note = Seed: VELFENKTTL
VLLFENKTTV

SEQ ID NO: 69849 - protein, 9 aa, synthetic construct
  source 1..9: note = Seed: VLLFLAFVV
VLLFLAFVA

SEQ ID NO: 69850 - protein, 9 aa, synthetic construct
  source 1..9: note = Seed: VLLFLAFVV
VLLFLAFVI

SEQ ID NO: 69851 - protein, 9 aa, synthetic construct
  source 1..9: note = Seed: VLLFLAFVV
VLLFLAFVL

SEQ ID NO: 69852 - protein, 11 aa, synthetic construct
  source 1..11: note = Seed: VLLFLAFVVFL
VLLFLAFVVFV

SEQ ID NO: 69853 - protein, 10 aa, synthetic construct
  source 1..10: note = Seed: VLLFLAFVVF
VLLFLAFVVV

SEQ ID NO: 69854 - protein, 10 aa, synthetic construct
  source 1..10: note = Seed: VQLHNDILLA
VLLHNDILLI

SEQ ID NO: 69855 - protein, 10 aa, synthetic construct
  source 1..10: note = Seed: VQLHNDILLA
VLLHNDILLL

SEQ ID NO: 69856 - protein, 10 aa, synthetic construct
  source 1..10: note = Seed: VQLHNDILLA
VLLHNDILLV

SEQ ID NO: 69857 - protein, 9 aa, synthetic construct
  source 1..9: note = Seed: VQLHNDILL
VLLHNDILV

SEQ ID NO: 69858 - protein, 10 aa, synthetic construct
  source 1..10: note = Seed: VNLHSSRLSF
VLLHSSRLSF

SEQ ID NO: 69859 - protein, 10 aa, synthetic construct
  source 1..10: note = Seed: VNLHSSRLSF
VLLHSSRLSY

SEQ ID NO: 69860 - protein, 10 aa, synthetic construct
  source 1..10: note = Seed: VFLHVTYVPA
VLLHVTYVPA

SEQ ID NO: 69861 - protein, 10 aa, synthetic construct
  source 1..10: note = Seed: VFLHVTYVPA
VLLHVTYVPI

SEQ ID NO: 69862 - protein, 10 aa, synthetic construct
  source 1..10: note = Seed: VFLHVTYVPA
VLLHVTYVPL

SEQ ID NO: 69863 - protein, 10 aa, synthetic construct
  source 1..10: note = Seed: VFLHVTYVPA
VLLHVTYVPM

SEQ ID NO: 69864 - protein, 10 aa, synthetic construct
  source 1..10: note = Seed: VFLHVTYVPA
VLLHVTYVPV

SEQ ID NO: 69865 - protein, 10 aa, synthetic construct
  source 1..10: note = Seed: VNLKQLPFFY
VLLKQLPFFY

SEQ ID NO: 69866 - protein, 10 aa, synthetic construct
  source 1..10: note = Seed: VVLLSVLQQL
VLLLSVLQQI

SEQ ID NO: 69867 - protein, 10 aa, synthetic construct
  source 1..10: note = Seed: VVLLSVLQQL
VLLLSVLQQL

SEQ ID NO: 69868 - protein, 10 aa, synthetic construct
  source 1..10: note = Seed: VVLLSVLQQL
VLLLSVLQQV

SEQ ID NO: 69869 - protein, 10 aa, synthetic construct
  source 1..10: note = Seed: VGLMWLSYFI
VLLMWLSYFA

SEQ ID NO: 69870 - protein, 10 aa, synthetic construct
  source 1..10: note = Seed: VGLMWLSYFI
VLLMWLSYFI

SEQ ID NO: 69871 - protein, 11 aa, synthetic construct
  source 1..11: note = Seed: VGLMWLSYFIA
VLLMWLSYFIV

SEQ ID NO: 69872 - protein, 10 aa, synthetic construct
  source 1..10: note = Seed: VGLMWLSYFI
VLLMWLSYFL

SEQ ID NO: 69873 - protein, 10 aa, synthetic construct
  source 1..10: note = Seed: VGLMWLSYFI
VLLMWLSYFM

SEQ ID NO: 69874 - protein, 10 aa, synthetic construct
  source 1..10: note = Seed: VGLMWLSYFI
VLLMWLSYFT

SEQ ID NO: 69875 - protein, 10 aa, synthetic construct
  source 1..10: note = Seed: VGLMWLSYFI
VLLMWLSYFV

SEQ ID NO: 69876 - protein, 9 aa, synthetic construct
  source 1..9: note = Seed: VVLSFELLH
VLLSFELLK

SEQ ID NO: 69877 - protein, 9 aa, synthetic construct
  source 1..9: note = Seed: VVLSFELLH
VLLSFELLY

SEQ ID NO: 69878 - protein, 10 aa, synthetic construct
  source 1..10: note = Seed: VQLSLPVLQV
VLLSLPVLQI

SEQ ID NO: 69879 - protein, 10 aa, synthetic construct
  source 1..10: note = Seed: VQLSLPVLQV
VLLSLPVLQL

SEQ ID NO: 69880 - protein, 10 aa, synthetic construct
  source 1..10: note = Seed: VQLSLPVLQV
VLLSLPVLQV

SEQ ID NO: 69881 - protein, 9 aa, synthetic construct
  source 1..9: note = Seed: VLLSVLQQL
VLLSVLQQA

SEQ ID NO: 69882 - protein, 9 aa, synthetic construct
  source 1..9: note = Seed: VLLSVLQQL
VLLSVLQQI

SEQ ID NO: 69883 - protein, 10 aa, synthetic construct
  source 1..10: note = Seed: VLLSVLQQLR
VLLSVLQQLI

SEQ ID NO: 69884 - protein, 10 aa, synthetic construct
  source 1..10: note = Seed: VLLSVLQQLR
VLLSVLQQLK

SEQ ID NO: 69885 - protein, 10 aa, synthetic construct
  source 1..10: note = Seed: VLLSVLQQLR
VLLSVLQQLL

SEQ ID NO: 69886 - protein, 10 aa, synthetic construct
  source 1..10: note = Seed: VLLSVLQQLR
VLLSVLQQLV

SEQ ID NO: 69887 - protein, 9 aa, synthetic construct
  source 1..9: note = Seed: VLLSVLQQL
VLLSVLQQM

SEQ ID NO: 69888 - protein, 9 aa, synthetic construct
  source 1..9: note = Seed: VLLSVLQQL
VLLSVLQQT

SEQ ID NO: 69889 - protein, 9 aa, synthetic construct
  source 1..9: note = Seed: VLLSVLQQL
VLLSVLQQV

SEQ ID NO: 69890 - protein, 10 aa, synthetic construct
  source 1..10: note = Seed: VELVAELEGI
VLLVAELEGV

SEQ ID NO: 69891 - protein, 10 aa, synthetic construct
  source 1..10: note = Seed: VVMAYITGGV
VLMAYITGGA

SEQ ID NO: 69892 - protein, 10 aa, synthetic construct
  source 1..10: note = Seed: VVMAYITGGV
VLMAYITGGI

SEQ ID NO: 69893 - protein, 10 aa, synthetic construct
  source 1..10: note = Seed: VVMAYITGGV
VLMAYITGGL

SEQ ID NO: 69894 - protein, 10 aa, synthetic construct
  source 1..10: note = Seed: VVMAYITGGV
VLMAYITGGM

SEQ ID NO: 69895 - protein, 10 aa, synthetic construct
  source 1..10: note = Seed: VVMAYITGGV
VLMAYITGGV

SEQ ID NO: 69896 - protein, 10 aa, synthetic construct
  source 1..10: note = Seed: VFMCVEYCPI
VLMCVEYCPA

SEQ ID NO: 69897 - protein, 10 aa, synthetic construct
  source 1..10: note = Seed: VFMCVEYCPI
VLMCVEYCPI

SEQ ID NO: 69898 - protein, 10 aa, synthetic construct
  source 1..10: note = Seed: VFMCVEYCPI
VLMCVEYCPL

SEQ ID NO: 69899 - protein, 10 aa, synthetic construct
  source 1..10: note = Seed: VFMCVEYCPI
VLMCVEYCPM

SEQ ID NO: 69900 - protein, 10 aa, synthetic construct
  source 1..10: note = Seed: VFMCVEYCPI
VLMCVEYCPV

SEQ ID NO: 69901 - protein, 9 aa, synthetic construct
  source 1..9: note = Seed: VPMEKLKTL
VLMEKLKTL

SEQ ID NO: 69902 - protein, 9 aa, synthetic construct
  source 1..9: note = Seed: VPMEKLKTL
VLMEKLKTM

SEQ ID NO: 69903 - protein, 9 aa, synthetic construct
  source 1..9: note = Seed: VQMLSDTLK
VLMLSDTLK

SEQ ID NO: 69904 - protein, 9 aa, synthetic construct
  source 1..9: note = Seed: VQMLSDTLK
VLMLSDTLR

SEQ ID NO: 69905 - protein, 10 aa, synthetic construct
  source 1..10: note = Seed: VRMYIFFASF
VLMYIFFASF

SEQ ID NO: 69906 - protein, 11 aa, synthetic construct
  source 1..11: note = Seed: VRMYIFFASFY
VLMYIFFASFK

SEQ ID NO: 69907 - protein, 10 aa, synthetic construct
  source 1..10: note = Seed: VRMYIFFASF
VLMYIFFASY

SEQ ID NO: 69908 - protein, 9 aa, synthetic construct
  source 1..9: note = Seed: VLNDILSRL
VLNDILSRA

SEQ ID NO: 69909 - protein, 9 aa, synthetic construct
  source 1..9: note = Seed: VLNDILSRL
VLNDILSRC

SEQ ID NO: 69910 - protein, 9 aa, synthetic construct
  source 1..9: note = Seed: VLNDILSRL
VLNDILSRI

SEQ ID NO: 69911 - protein, 10 aa, synthetic construct
  source 1..10: note = Seed: VLNDILSRLD
VLNDILSRLA

SEQ ID NO: 69912 - protein, 10 aa, synthetic construct
  source 1..10: note = Seed: VLNDILSRLD
VLNDILSRLI

SEQ ID NO: 69913 - protein, 10 aa, synthetic construct
  source 1..10: note = Seed: VLNDILSRLD
VLNDILSRLL

SEQ ID NO: 69914 - protein, 10 aa, synthetic construct
  source 1..10: note = Seed: VLNDILSRLD
VLNDILSRLM

SEQ ID NO: 69915 - protein, 10 aa, synthetic construct
  source 1..10: note = Seed: VLNDILSRLD
VLNDILSRLV

SEQ ID NO: 69916 - protein, 9 aa, synthetic construct
  source 1..9: note = Seed: VLNDILSRL
VLNDILSRM

SEQ ID NO: 69917 - protein, 9 aa, synthetic construct
  source 1..9: note = Seed: VLNDILSRL
VLNDILSRT

SEQ ID NO: 69918 - protein, 9 aa, synthetic construct
  source 1..9: note = Seed: VLNDILSRL
VLNDILSRV

SEQ ID NO: 69919 - protein, 10 aa, synthetic construct
  source 1..10: note = Seed: VFNGVSFSTF
VLNGVSFSTF

SEQ ID NO: 69920 - protein, 10 aa, synthetic construct
  source 1..10: note = Seed: VFNGVSFSTF
VLNGVSFSTY

SEQ ID NO: 69921 - protein, 10 aa, synthetic construct
  source 1..10: note = Seed: VLNNDYYRSL
VLNNDYYRSV

SEQ ID NO: 69922 - protein, 9 aa, synthetic construct
  source 1..9: note = Seed: VIPDYNTYK
VLPDYNTYR

SEQ ID NO: 69923 - protein, 10 aa, synthetic construct
  source 1..10: note = Seed: VLPFNDGVYF
VLPFNDGVYW

SEQ ID NO: 69924 - protein, 10 aa, synthetic construct
  source 1..10: note = Seed: VLPFNDGVYF
VLPFNDGVYY

SEQ ID NO: 69925 - protein, 10 aa, synthetic construct
  source 1..10: note = Seed: VLPPLLTDEM
VLPPLLTDEI

SEQ ID NO: 69926 - protein, 10 aa, synthetic construct
  source 1..10: note = Seed: VLPPLLTDEM
VLPPLLTDEV

SEQ ID NO: 69927 - protein, 9 aa, synthetic construct
  source 1..9: note = Seed: VRQCSGVTF
VLQCSGVTF

SEQ ID NO: 69928 - protein, 9 aa, synthetic construct
  source 1..9: note = Seed: VRQCSGVTF
VLQCSGVTM

SEQ ID NO: 69929 - protein, 9 aa, synthetic construct
  source 1..9: note = Seed: VRQCSGVTF
VLQCSGVTY

SEQ ID NO: 69930 - protein, 10 aa, synthetic construct
  source 1..10: note = Seed: VLQLPQGTTL
VLQLPQGTTF

SEQ ID NO: 69931 - protein, 10 aa, synthetic construct
  source 1..10: note = Seed: VLQLPQGTTL
VLQLPQGTTM

SEQ ID NO: 69932 - protein, 10 aa, synthetic construct
  source 1..10: note = Seed: VLQLPQGTTL
VLQLPQGTTY

SEQ ID NO: 69933 - protein, 9 aa, synthetic construct
  source 1..9: note = Seed: VTRCLNRVC
VLRCLNRVK

SEQ ID NO: 69934 - protein, 9 aa, synthetic construct
  source 1..9: note = Seed: VARDLSLQF
VLRDLSLQF

SEQ ID NO: 69935 - protein, 10 aa, synthetic construct
  source 1..10: note = Seed: VARDLSLQFK
VLRDLSLQFK

SEQ ID NO: 69936 - protein, 10 aa, synthetic construct
  source 1..10: note = Seed: VARDLSLQFK
VLRDLSLQFR

SEQ ID NO: 69937 - protein, 9 aa, synthetic construct
  source 1..9: note = Seed: VARDLSLQF
VLRDLSLQM

SEQ ID NO: 69938 - protein, 9 aa, synthetic construct
  source 1..9: note = Seed: VARDLSLQF
VLRDLSLQW

SEQ ID NO: 69939 - protein, 9 aa, synthetic construct
  source 1..9: note = Seed: VARDLSLQF
VLRDLSLQY

SEQ ID NO: 69940 - protein, 10 aa, synthetic construct
  source 1..10: note = Seed: VNRFNVAITR
VLRFNVAITR

SEQ ID NO: 69941 - protein, 9 aa, synthetic construct
  source 1..9: note = Seed: VYRGTTTYK
VLRGTTTYK

SEQ ID NO: 69942 - protein, 9 aa, synthetic construct
  source 1..9: note = Seed: VYRGTTTYK
VLRGTTTYR

SEQ ID NO: 69943 - protein, 9 aa, synthetic construct
  source 1..9: note = Seed: VKRHTFSNY
VLRHTFSNF

SEQ ID NO: 69944 - protein, 9 aa, synthetic construct
  source 1..9: note = Seed: VKRHTFSNY
VLRHTFSNY

SEQ ID NO: 69945 - protein, 10 aa, synthetic construct
  source 1..10: note = Seed: VVRQCSGVTF
VLRQCSGVTF

SEQ ID NO: 69946 - protein, 10 aa, synthetic construct
  source 1..10: note = Seed: VVRQCSGVTF
VLRQCSGVTY

SEQ ID NO: 69947 - protein, 11 aa, synthetic construct
  source 1..11: note = Seed: VKRTIKGTHHW
VLRTIKGTHHW

SEQ ID NO: 69948 - protein, 10 aa, synthetic construct
  source 1..10: note = Seed: VTSAMQTMLF
VLSAMQTMLF

SEQ ID NO: 69949 - protein, 10 aa, synthetic construct
  source 1..10: note = Seed: VTSAMQTMLF
VLSAMQTMLW

SEQ ID NO: 69950 - protein, 10 aa, synthetic construct
  source 1..10: note = Seed: VTSAMQTMLF
VLSAMQTMLY

SEQ ID NO: 69951 - protein, 9 aa, synthetic construct
  source 1..9: note = Seed: VTSAMQTML
VLSAMQTMW

SEQ ID NO: 69952 - protein, 10 aa, synthetic construct
  source 1..10: note = Seed: VVSDIDYVPL
VLSDIDYVPA

SEQ ID NO: 69953 - protein, 10 aa, synthetic construct
  source 1..10: note = Seed: VVSDIDYVPL
VLSDIDYVPI

SEQ ID NO: 69954 - protein, 10 aa, synthetic construct
  source 1..10: note = Seed: VVSDIDYVPL
VLSDIDYVPL

SEQ ID NO: 69955 - protein, 10 aa, synthetic construct
  source 1..10: note = Seed: VVSDIDYVPL
VLSDIDYVPM

SEQ ID NO: 69956 - protein, 10 aa, synthetic construct
  source 1..10: note = Seed: VVSDIDYVPL
VLSDIDYVPV

SEQ ID NO: 69957 - protein, 9 aa, synthetic construct
  source 1..9: note = Seed: VLSFCAFAV
VLSFCAFAA

SEQ ID NO: 69958 - protein, 9 aa, synthetic construct
  source 1..9: note = Seed: VLSFCAFAV
VLSFCAFAI

SEQ ID NO: 69959 - protein, 9 aa, synthetic construct
  source 1..9: note = Seed: VLSFCAFAV
VLSFCAFAL

SEQ ID NO: 69960 - protein, 9 aa, synthetic construct
  source 1..9: note = Seed: VLSFCAFAV
VLSFCAFAM

SEQ ID NO: 69961 - protein, 10 aa, synthetic construct
  source 1..10: note = Seed: VLSFCAFAVD
VLSFCAFAVA

SEQ ID NO: 69962 - protein, 10 aa, synthetic construct
  source 1..10: note = Seed: VLSFCAFAVD
VLSFCAFAVI

SEQ ID NO: 69963 - protein, 10 aa, synthetic construct
  source 1..10: note = Seed: VLSFCAFAVD
VLSFCAFAVL

SEQ ID NO: 69964 - protein, 10 aa, synthetic construct
  source 1..10: note = Seed: VLSFCAFAVD
VLSFCAFAVV

SEQ ID NO: 69965 - protein, 9 aa, synthetic construct
  source 1..9: note = Seed: VYSFLPGVY
VLSFLPGVF

SEQ ID NO: 69966 - protein, 9 aa, synthetic construct
  source 1..9: note = Seed: VYSFLPGVY
VLSFLPGVY

SEQ ID NO: 69967 - protein, 11 aa, synthetic construct
  source 1..11: note = Seed: VYSFLPGVYSV
VLSFLPGVYSF

SEQ ID NO: 69968 - protein, 11 aa, synthetic construct
  source 1..11: note = Seed: VYSFLPGVYSV
VLSFLPGVYSI

SEQ ID NO: 69969 - protein, 11 aa, synthetic construct
  source 1..11: note = Seed: VYSFLPGVYSV
VLSFLPGVYSL

SEQ ID NO: 69970 - protein, 11 aa, synthetic construct
  source 1..11: note = Seed: VYSFLPGVYSV
VLSFLPGVYSV

SEQ ID NO: 69971 - protein, 9 aa, synthetic construct
  source 1..9: note = Seed: VNSFSGYLK
VLSFSGYLK

SEQ ID NO: 69972 - protein, 10 aa, synthetic construct
  source 1..10: note = Seed: VNSFSGYLKL
VLSFSGYLKF

SEQ ID NO: 69973 - protein, 10 aa, synthetic construct
  source 1..10: note = Seed: VNSFSGYLKL
VLSFSGYLKM

SEQ ID NO: 69974 - protein, 10 aa, synthetic construct
  source 1..10: note = Seed: VNSFSGYLKL
VLSFSGYLKW

SEQ ID NO: 69975 - protein, 10 aa, synthetic construct
  source 1..10: note = Seed: VNSFSGYLKL
VLSFSGYLKY

SEQ ID NO: 69976 - protein, 9 aa, synthetic construct
  source 1..9: note = Seed: VNSFSGYLK
VLSFSGYLR

SEQ ID NO: 69977 - protein, 10 aa, synthetic construct
  source 1..10: note = Seed: VYSSANNCTF
VLSSANNCTW

SEQ ID NO: 69978 - protein, 9 aa, synthetic construct
  source 1..9: note = Seed: VYSTGSNVF
VLSTGSNVF

SEQ ID NO: 69979 - protein, 9 aa, synthetic construct
  source 1..9: note = Seed: VYSTGSNVF
VLSTGSNVM

SEQ ID NO: 69980 - protein, 9 aa, synthetic construct
  source 1..9: note = Seed: VYSTGSNVF
VLSTGSNVY

SEQ ID NO: 69981 - protein, 9 aa, synthetic construct
  source 1..9: note = Seed: VVSTGYHFR
VLSTGYHFK

SEQ ID NO: 69982 - protein, 9 aa, synthetic construct
  source 1..9: note = Seed: VVSTGYHFR
VLSTGYHFR

SEQ ID NO: 69983 - protein, 10 aa, synthetic construct
  source 1..10: note = Seed: VVSTGYHFRE
VLSTGYHFRR

SEQ ID NO: 69984 - protein, 9 aa, synthetic construct
  source 1..9: note = Seed: VVSTTTNIV
VLSTTTNIV

SEQ ID NO: 69985 - protein, 11 aa, synthetic construct
  source 1..11: note = Seed: VDSYYSLLMPI
VLSYYSLLMPF

SEQ ID NO: 69986 - protein, 9 aa, synthetic construct
  source 1..9: note = Seed: VFTGYRVTK
VLTGYRVTR

SEQ ID NO: 69987 - protein, 10 aa, synthetic construct
  source 1..10: note = Seed: VRTIKVFTTV
VLTIKVFTTV

SEQ ID NO: 69988 - protein, 9 aa, synthetic construct
  source 1..9: note = Seed: VVTTKIALK
VLTTKIALK

SEQ ID NO: 69989 - protein, 10 aa, synthetic construct
  source 1..10: note = Seed: VNVAFELWAK
VLVAFELWAR

SEQ ID NO: 69990 - protein, 10 aa, synthetic construct
  source 1..10: note = Seed: VNVLAWLYAA
VLVLAWLYAA

SEQ ID NO: 69991 - protein, 10 aa, synthetic construct
  source 1..10: note = Seed: VNVLAWLYAA
VLVLAWLYAI

SEQ ID NO: 69992 - protein, 10 aa, synthetic construct
  source 1..10: note = Seed: VNVLAWLYAA
VLVLAWLYAL

SEQ ID NO: 69993 - protein, 10 aa, synthetic construct
  source 1..10: note = Seed: VNVLAWLYAA
VLVLAWLYAM

SEQ ID NO: 69994 - protein, 10 aa, synthetic construct
  source 1..10: note = Seed: VNVLAWLYAA
VLVLAWLYAT

SEQ ID NO: 69995 - protein, 10 aa, synthetic construct
  source 1..10: note = Seed: VNVLAWLYAA
VLVLAWLYAV

SEQ ID NO: 69996 - protein, 11 aa, synthetic construct
  source 1..11: note = Seed: VFVLWAHGFEL
VLVLWAHGFEI

SEQ ID NO: 69997 - protein, 11 aa, synthetic construct
  source 1..11: note = Seed: VFVLWAHGFEL
VLVLWAHGFEL

SEQ ID NO: 69998 - protein, 11 aa, synthetic construct
  source 1..11: note = Seed: VFVLWAHGFEL
VLVLWAHGFEV

SEQ ID NO: 69999 - protein, 9 aa, synthetic construct
  source 1..9: note = Seed: VFVLWAHGF
VLVLWAHGY

SEQ ID NO: 70000 - protein, 10 aa, synthetic construct
  source 1..10: note = Seed: VLVQSTQWSL
VLVQSTQWSI

SEQ ID NO: 70001 - protein, 10 aa, synthetic construct
  source 1..10: note = Seed: VLVQSTQWSL
VLVQSTQWSV

SEQ ID NO: 70002 - protein, 9 aa, synthetic construct
  source 1..9: note = Seed: VQVTCGTTT
VLVTCGTTF

SEQ ID NO: 70003 - protein, 9 aa, synthetic construct
  source 1..9: note = Seed: VQVTCGTTT
VLVTCGTTM

SEQ ID NO: 70004 - protein, 10 aa, synthetic construct
  source 1..10: note = Seed: VQVTCGTTTL
VLVTCGTTTF

SEQ ID NO: 70005 - protein, 10 aa, synthetic construct
  source 1..10: note = Seed: VQVTCGTTTL
VLVTCGTTTY

SEQ ID NO: 70006 - protein, 9 aa, synthetic construct
  source 1..9: note = Seed: VQVTCGTTT
VLVTCGTTY

SEQ ID NO: 70007 - protein, 9 aa, synthetic construct
  source 1..9: note = Seed: VLWAHGFEL
VLWAHGFEA

SEQ ID NO: 70008 - protein, 9 aa, synthetic construct
  source 1..9: note = Seed: VLWAHGFEL
VLWAHGFEC

SEQ ID NO: 70009 - protein, 9 aa, synthetic construct
  source 1..9: note = Seed: VLWAHGFEL
VLWAHGFEF

SEQ ID NO: 70010 - protein, 9 aa, synthetic construct
  source 1..9: note = Seed: VLWAHGFEL
VLWAHGFEI

SEQ ID NO: 70011 - protein, 10 aa, synthetic construct
  source 1..10: note = Seed: VLWAHGFELT
VLWAHGFELA

SEQ ID NO: 70012 - protein, 10 aa, synthetic construct
  source 1..10: note = Seed: VLWAHGFELT
VLWAHGFELC

SEQ ID NO: 70013 - protein, 10 aa, synthetic construct
  source 1..10: note = Seed: VLWAHGFELT
VLWAHGFELD

SEQ ID NO: 70014 - protein, 10 aa, synthetic construct
  source 1..10: note = Seed: VLWAHGFELT
VLWAHGFELE

SEQ ID NO: 70015 - protein, 10 aa, synthetic construct
  source 1..10: note = Seed: VLWAHGFELT
VLWAHGFELF

SEQ ID NO: 70016 - protein, 10 aa, synthetic construct
  source 1..10: note = Seed: VLWAHGFELT
VLWAHGFELG

SEQ ID NO: 70017 - protein, 10 aa, synthetic construct
  source 1..10: note = Seed: VLWAHGFELT
VLWAHGFELH

SEQ ID NO: 70018 - protein, 10 aa, synthetic construct
  source 1..10: note = Seed: VLWAHGFELT
VLWAHGFELI

SEQ ID NO: 70019 - protein, 10 aa, synthetic construct
  source 1..10: note = Seed: VLWAHGFELT
VLWAHGFELK

SEQ ID NO: 70020 - protein, 10 aa, synthetic construct
  source 1..10: note = Seed: VLWAHGFELT
VLWAHGFELL

SEQ ID NO: 70021 - protein, 10 aa, synthetic construct
  source 1..10: note = Seed: VLWAHGFELT
VLWAHGFELM

SEQ ID NO: 70022 - protein, 10 aa, synthetic construct
  source 1..10: note = Seed: VLWAHGFELT
VLWAHGFELN

SEQ ID NO: 70023 - protein, 10 aa, synthetic construct
  source 1..10: note = Seed: VLWAHGFELT
VLWAHGFELP

SEQ ID NO: 70024 - protein, 10 aa, synthetic construct
  source 1..10: note = Seed: VLWAHGFELT
VLWAHGFELQ

SEQ ID NO: 70025 - protein, 10 aa, synthetic construct
  source 1..10: note = Seed: VLWAHGFELT
VLWAHGFELR

SEQ ID NO: 70026 - protein, 10 aa, synthetic construct
  source 1..10: note = Seed: VLWAHGFELT
VLWAHGFELS

SEQ ID NO: 70027 - protein, 11 aa, synthetic construct
  source 1..11: note = Seed: VLWAHGFELTS
VLWAHGFELTA

SEQ ID NO: 70028 - protein, 11 aa, synthetic construct
  source 1..11: note = Seed: VLWAHGFELTS
VLWAHGFELTI

SEQ ID NO: 70029 - protein, 11 aa, synthetic construct
  source 1..11: note = Seed: VLWAHGFELTS
VLWAHGFELTL

SEQ ID NO: 70030 - protein, 11 aa, synthetic construct
  source 1..11: note = Seed: VLWAHGFELTS
VLWAHGFELTV

SEQ ID NO: 70031 - protein, 10 aa, synthetic construct
  source 1..10: note = Seed: VLWAHGFELT
VLWAHGFELV

SEQ ID NO: 70032 - protein, 10 aa, synthetic construct
  source 1..10: note = Seed: VLWAHGFELT
VLWAHGFELW

SEQ ID NO: 70033 - protein, 10 aa, synthetic construct
  source 1..10: note = Seed: VLWAHGFELT
VLWAHGFELY

SEQ ID NO: 70034 - protein, 9 aa, synthetic construct
  source 1..9: note = Seed: VLWAHGFEL
VLWAHGFEM

SEQ ID NO: 70035 - protein, 9 aa, synthetic construct
  source 1..9: note = Seed: VLWAHGFEL
VLWAHGFER

SEQ ID NO: 70036 - protein, 9 aa, synthetic construct
  source 1..9: note = Seed: VLWAHGFEL
VLWAHGFES

SEQ ID NO: 70037 - protein, 9 aa, synthetic construct
  source 1..9: note = Seed: VLWAHGFEL
VLWAHGFET

SEQ ID NO: 70038 - protein, 9 aa, synthetic construct
  source 1..9: note = Seed: VLWAHGFEL
VLWAHGFEV

SEQ ID NO: 70039 - protein, 9 aa, synthetic construct
  source 1..9: note = Seed: VLWAHGFEL
VLWAHGFEW

SEQ ID NO: 70040 - protein, 9 aa, synthetic construct
  source 1..9: note = Seed: VLWAHGFEL
VLWAHGFEY

SEQ ID NO: 70041 - protein, 8 aa, synthetic construct
  source 1..8: note = Seed: VMYASAVV
VLYASAVF

SEQ ID NO: 70042 - protein, 9 aa, synthetic construct
  source 1..9: note = Seed: VMYASAVVL
VLYASAVVA

SEQ ID NO: 70043 - protein, 9 aa, synthetic construct
  source 1..9: note = Seed: VMYASAVVL
VLYASAVVF

SEQ ID NO: 70044 - protein, 9 aa, synthetic construct
  source 1..9: note = Seed: VMYASAVVL
VLYASAVVI

SEQ ID NO: 70045 - protein, 9 aa, synthetic construct
  source 1..9: note = Seed: VMYASAVVL
VLYASAVVL

SEQ ID NO: 70046 - protein, 10 aa, synthetic construct
  source 1..10: note = Seed: VMYASAVVLL
VLYASAVVLA

SEQ ID NO: 70047 - protein, 10 aa, synthetic construct
  source 1..10: note = Seed: VMYASAVVLL
VLYASAVVLF

SEQ ID NO: 70048 - protein, 10 aa, synthetic construct
  source 1..10: note = Seed: VMYASAVVLL
VLYASAVVLI

SEQ ID NO: 70049 - protein, 10 aa, synthetic construct
  source 1..10: note = Seed: VMYASAVVLL
VLYASAVVLL

SEQ ID NO: 70050 - protein, 11 aa, synthetic construct
  source 1..11: note = Seed: VMYASAVVLLI
VLYASAVVLLV

SEQ ID NO: 70051 - protein, 10 aa, synthetic construct
  source 1..10: note = Seed: VMYASAVVLL
VLYASAVVLM

SEQ ID NO: 70052 - protein, 10 aa, synthetic construct
  source 1..10: note = Seed: VMYASAVVLL
VLYASAVVLV

SEQ ID NO: 70053 - protein, 10 aa, synthetic construct
  source 1..10: note = Seed: VMYASAVVLL
VLYASAVVLW

SEQ ID NO: 70054 - protein, 10 aa, synthetic construct
  source 1..10: note = Seed: VMYASAVVLL
VLYASAVVLY

SEQ ID NO: 70055 - protein, 9 aa, synthetic construct
  source 1..9: note = Seed: VMYASAVVL
VLYASAVVM

SEQ ID NO: 70056 - protein, 9 aa, synthetic construct
  source 1..9: note = Seed: VMYASAVVL
VLYASAVVV

SEQ ID NO: 70057 - protein, 9 aa, synthetic construct
  source 1..9: note = Seed: VMYASAVVL
VLYASAVVW

SEQ ID NO: 70058 - protein, 9 aa, synthetic construct
  source 1..9: note = Seed: VMYASAVVL
VLYASAVVY

SEQ ID NO: 70059 - protein, 8 aa, synthetic construct
  source 1..8: note = Seed: VMYASAVV
VLYASAVY

SEQ ID NO: 70060 - protein, 9 aa, synthetic construct
  source 1..9: note = Seed: VLYENQKLI
VLYENQKLA

SEQ ID NO: 70061 - protein, 9 aa, synthetic construct
  source 1..9: note = Seed: VLYENQKLI
VLYENQKLL

SEQ ID NO: 70062 - protein, 9 aa, synthetic construct
  source 1..9: note = Seed: VLYENQKLI
VLYENQKLV

SEQ ID NO: 70063 - protein, 9 aa, synthetic construct
  source 1..9: note = Seed: VGYLQPRTF
VLYLQPRTF

SEQ ID NO: 70064 - protein, 10 aa, synthetic construct
  source 1..10: note = Seed: VGYLQPRTFL
VLYLQPRTFF

SEQ ID NO: 70065 - protein, 11 aa, synthetic construct
  source 1..11: note = Seed: VGYLQPRTFLL
VLYLQPRTFLI

SEQ ID NO: 70066 - protein, 11 aa, synthetic construct
  source 1..11: note = Seed: VGYLQPRTFLL
VLYLQPRTFLL

SEQ ID NO: 70067 - protein, 11 aa, synthetic construct
  source 1..11: note = Seed: VGYLQPRTFLL
VLYLQPRTFLV

SEQ ID NO: 70068 - protein, 9 aa, synthetic construct
  source 1..9: note = Seed: VGYLQPRTF
VLYLQPRTM

SEQ ID NO: 70069 - protein, 9 aa, synthetic construct
  source 1..9: note = Seed: VGYLQPRTF
VLYLQPRTY

SEQ ID NO: 70070 - protein, 10 aa, synthetic construct
  source 1..10: note = Seed: VLYQPPQTSI
VLYQPPQTSF

SEQ ID NO: 70071 - protein, 10 aa, synthetic construct
  source 1..10: note = Seed: VLYQPPQTSI
VLYQPPQTSM

SEQ ID NO: 70072 - protein, 10 aa, synthetic construct
  source 1..10: note = Seed: VLYQPPQTSI
VLYQPPQTSV

SEQ ID NO: 70073 - protein, 10 aa, synthetic construct
  source 1..10: note = Seed: VLYQPPQTSI
VLYQPPQTSW

SEQ ID NO: 70074 - protein, 10 aa, synthetic construct
  source 1..10: note = Seed: VGYQPYRVVV
VLYQPYRVVF

SEQ ID NO: 70075 - protein, 10 aa, synthetic construct
  source 1..10: note = Seed: VGYQPYRVVV
VLYQPYRVVI

SEQ ID NO: 70076 - protein, 10 aa, synthetic construct
  source 1..10: note = Seed: VGYQPYRVVV
VLYQPYRVVL

SEQ ID NO: 70077 - protein, 10 aa, synthetic construct
  source 1..10: note = Seed: VGYQPYRVVV
VLYQPYRVVM

SEQ ID NO: 70078 - protein, 10 aa, synthetic construct
  source 1..10: note = Seed: VGYQPYRVVV
VLYQPYRVVW

SEQ ID NO: 70079 - protein, 9 aa, synthetic construct
  source 1..9: note = Seed: VVYRGTTTY
VLYRGTTTF

SEQ ID NO: 70080 - protein, 9 aa, synthetic construct
  source 1..9: note = Seed: VVYRGTTTY
VLYRGTTTI

SEQ ID NO: 70081 - protein, 9 aa, synthetic construct
  source 1..9: note = Seed: VVYRGTTTY
VLYRGTTTK

SEQ ID NO: 70082 - protein, 9 aa, synthetic construct
  source 1..9: note = Seed: VVYRGTTTY
VLYRGTTTL

SEQ ID NO: 70083 - protein, 9 aa, synthetic construct
  source 1..9: note = Seed: VVYRGTTTY
VLYRGTTTM

SEQ ID NO: 70084 - protein, 9 aa, synthetic construct
  source 1..9: note = Seed: VVYRGTTTY
VLYRGTTTR

SEQ ID NO: 70085 - protein, 9 aa, synthetic construct
  source 1..9: note = Seed: VVYRGTTTY
VLYRGTTTW

SEQ ID NO: 70086 - protein, 9 aa, synthetic construct
  source 1..9: note = Seed: VVYRGTTTY
VLYRGTTTY

SEQ ID NO: 70087 - protein, 10 aa, synthetic construct
  source 1..10: note = Seed: VVYRGTTTYK
VLYRGTTTYF

SEQ ID NO: 70088 - protein, 10 aa, synthetic construct
  source 1..10: note = Seed: VVYRGTTTYK
VLYRGTTTYK

SEQ ID NO: 70089 - protein, 11 aa, synthetic construct
  source 1..11: note = Seed: VVYRGTTTYKL
VLYRGTTTYKK

SEQ ID NO: 70090 - protein, 10 aa, synthetic construct
  source 1..10: note = Seed: VVYRGTTTYK
VLYRGTTTYM

SEQ ID NO: 70091 - protein, 10 aa, synthetic construct
  source 1..10: note = Seed: VVYRGTTTYK
VLYRGTTTYR

SEQ ID NO: 70092 - protein, 10 aa, synthetic construct
  source 1..10: note = Seed: VVYRGTTTYK
VLYRGTTTYY

SEQ ID NO: 70093 - protein, 10 aa, synthetic construct
  source 1..10: note = Seed: VYYTSNPTTF
VLYTSNPTTF

SEQ ID NO: 70094 - protein, 10 aa, synthetic construct
  source 1..10: note = Seed: VYYTSNPTTF
VLYTSNPTTY

SEQ ID NO: 70095 - protein, 10 aa, synthetic construct
  source 1..10: note = Seed: VLYYQNNVFM
VLYYQNNVFF

SEQ ID NO: 70096 - protein, 10 aa, synthetic construct
  source 1..10: note = Seed: VLYYQNNVFM
VLYYQNNVFI

SEQ ID NO: 70097 - protein, 10 aa, synthetic construct
  source 1..10: note = Seed: VLYYQNNVFM
VLYYQNNVFL

SEQ ID NO: 70098 - protein, 10 aa, synthetic construct
  source 1..10: note = Seed: VLYYQNNVFM
VLYYQNNVFV

SEQ ID NO: 70099 - protein, 10 aa, synthetic construct
  source 1..10: note = Seed: VLYYQNNVFM
VLYYQNNVFW

SEQ ID NO: 70100 - protein, 10 aa, synthetic construct
  source 1..10: note = Seed: VLYYQNNVFM
VLYYQNNVFY

SEQ ID NO: 70101 - protein, 9 aa, synthetic construct
  source 1..9: note = Seed: VLYYQNNVF
VLYYQNNVM

SEQ ID NO: 70102 - protein, 9 aa, synthetic construct
  source 1..9: note = Seed: VLYYQNNVF
VLYYQNNVY

SEQ ID NO: 70103 - protein, 9 aa, synthetic construct
  source 1..9: note = Seed: VLAAECTIF
VMAAECTIF

SEQ ID NO: 70104 - protein, 10 aa, synthetic construct
  source 1..10: note = Seed: VLAAECTIFK
VMAAECTIFK

SEQ ID NO: 70105 - protein, 10 aa, synthetic construct
  source 1..10: note = Seed: VLAAECTIFK
VMAAECTIFR

SEQ ID NO: 70106 - protein, 9 aa, synthetic construct
  source 1..9: note = Seed: VLAAECTIF
VMAAECTIM

SEQ ID NO: 70107 - protein, 9 aa, synthetic construct
  source 1..9: note = Seed: VLAAECTIF
VMAAECTIY

SEQ ID NO: 70108 - protein, 9 aa, synthetic construct
  source 1..9: note = Seed: VYADSFVIR
VMADSFVIR

SEQ ID NO: 70109 - protein, 9 aa, synthetic construct
  source 1..9: note = Seed: VVAIDYKHY
VMAIDYKHF

SEQ ID NO: 70110 - protein, 9 aa, synthetic construct
  source 1..9: note = Seed: VVAIDYKHY
VMAIDYKHY

SEQ ID NO: 70111 - protein, 9 aa, synthetic construct
  source 1..9: note = Seed: VTANVNALL
VMANVNALA

SEQ ID NO: 70112 - protein, 9 aa, synthetic construct
  source 1..9: note = Seed: VTANVNALL
VMANVNALF

SEQ ID NO: 70113 - protein, 9 aa, synthetic construct
  source 1..9: note = Seed: VTANVNALL
VMANVNALI

SEQ ID NO: 70114 - protein, 9 aa, synthetic construct
  source 1..9: note = Seed: VTANVNALL
VMANVNALL

SEQ ID NO: 70115 - protein, 9 aa, synthetic construct
  source 1..9: note = Seed: VTANVNALL
VMANVNALM

SEQ ID NO: 70116 - protein, 9 aa, synthetic construct
  source 1..9: note = Seed: VTANVNALL
VMANVNALT

SEQ ID NO: 70117 - protein, 9 aa, synthetic construct
  source 1..9: note = Seed: VTANVNALL
VMANVNALV

SEQ ID NO: 70118 - protein, 9 aa, synthetic construct
  source 1..9: note = Seed: VTANVNALL
VMANVNALW

SEQ ID NO: 70119 - protein, 9 aa, synthetic construct
  source 1..9: note = Seed: VTANVNALL
VMANVNALY

SEQ ID NO: 70120 - protein, 9 aa, synthetic construct
  source 1..9: note = Seed: VFAQVKQIY
VMAQVKQIF

SEQ ID NO: 70121 - protein, 9 aa, synthetic construct
  source 1..9: note = Seed: VFAQVKQIY
VMAQVKQIM

SEQ ID NO: 70122 - protein, 9 aa, synthetic construct
  source 1..9: note = Seed: VFAQVKQIY
VMAQVKQIY

SEQ ID NO: 70123 - protein, 10 aa, synthetic construct
  source 1..10: note = Seed: VFAQVKQIYK
VMAQVKQIYK

SEQ ID NO: 70124 - protein, 10 aa, synthetic construct
  source 1..10: note = Seed: VFAQVKQIYK
VMAQVKQIYR

SEQ ID NO: 70125 - protein, 9 aa, synthetic construct
  source 1..9: note = Seed: VLARKHTTC
VMARKHTTI

SEQ ID NO: 70126 - protein, 9 aa, synthetic construct
  source 1..9: note = Seed: VLARKHTTC
VMARKHTTL

SEQ ID NO: 70127 - protein, 9 aa, synthetic construct
  source 1..9: note = Seed: VLARKHTTC
VMARKHTTM

SEQ ID NO: 70128 - protein, 9 aa, synthetic construct
  source 1..9: note = Seed: VLARKHTTC
VMARKHTTV

SEQ ID NO: 70129 - protein, 9 aa, synthetic construct
  source 1..9: note = Seed: VNASSSEAF
VMASSSEAF

SEQ ID NO: 70130 - protein, 9 aa, synthetic construct
  source 1..9: note = Seed: VNASSSEAF
VMASSSEAI

SEQ ID NO: 70131 - protein, 9 aa, synthetic construct
  source 1..9: note = Seed: VNASSSEAF
VMASSSEAL

SEQ ID NO: 70132 - protein, 9 aa, synthetic construct
  source 1..9: note = Seed: VNASSSEAF
VMASSSEAM

SEQ ID NO: 70133 - protein, 9 aa, synthetic construct
  source 1..9: note = Seed: VNASSSEAF
VMASSSEAW

SEQ ID NO: 70134 - protein, 9 aa, synthetic construct
  source 1..9: note = Seed: VNASSSEAF
VMASSSEAY

SEQ ID NO: 70135 - protein, 9 aa, synthetic construct
  source 1..9: note = Seed: VLAWLYAAV
VMAWLYAAA

SEQ ID NO: 70136 - protein, 9 aa, synthetic construct
  source 1..9: note = Seed: VLAWLYAAV
VMAWLYAAI

SEQ ID NO: 70137 - protein, 9 aa, synthetic construct
  source 1..9: note = Seed: VLAWLYAAV
VMAWLYAAL

SEQ ID NO: 70138 - protein, 9 aa, synthetic construct
  source 1..9: note = Seed: VLAWLYAAV
VMAWLYAAM

SEQ ID NO: 70139 - protein, 9 aa, synthetic construct
  source 1..9: note = Seed: VLAWLYAAV
VMAWLYAAT

SEQ ID NO: 70140 - protein, 9 aa, synthetic construct
  source 1..9: note = Seed: VLAWLYAAV
VMAWLYAAV

SEQ ID NO: 70141 - protein, 8 aa, synthetic construct
  source 1..8: note = Seed: VLAWLYAA
VMAWLYAI

SEQ ID NO: 70142 - protein, 8 aa, synthetic construct
  source 1..8: note = Seed: VLAWLYAA
VMAWLYAL

SEQ ID NO: 70143 - protein, 8 aa, synthetic construct
  source 1..8: note = Seed: VLAWLYAA
VMAWLYAV

SEQ ID NO: 70144 - protein, 9 aa, synthetic construct
  source 1..9: note = Seed: VMAYITGGV
VMAYITGGA

SEQ ID NO: 70145 - protein, 9 aa, synthetic construct
  source 1..9: note = Seed: VMAYITGGV
VMAYITGGI

SEQ ID NO: 70146 - protein, 9 aa, synthetic construct
  source 1..9: note = Seed: VMAYITGGV
VMAYITGGL

SEQ ID NO: 70147 - protein, 9 aa, synthetic construct
  source 1..9: note = Seed: VMAYITGGV
VMAYITGGM

SEQ ID NO: 70148 - protein, 10 aa, synthetic construct
  source 1..10: note = Seed: VLCLTPVYSF
VMCLTPVYSF

SEQ ID NO: 70149 - protein, 11 aa, synthetic construct
  source 1..11: note = Seed: VLCLTPVYSFL
VMCLTPVYSFV

SEQ ID NO: 70150 - protein, 10 aa, synthetic construct
  source 1..10: note = Seed: VLCLTPVYSF
VMCLTPVYSY

SEQ ID NO: 70151 - protein, 10 aa, synthetic construct
  source 1..10: note = Seed: VLCNSQTSLR
VMCNSQTSLK

SEQ ID NO: 70152 - protein, 10 aa, synthetic construct
  source 1..10: note = Seed: VLCNSQTSLR
VMCNSQTSLR

SEQ ID NO: 70153 - protein, 9 aa, synthetic construct
  source 1..9: note = Seed: VLCNSQTSL
VMCNSQTSV

SEQ ID NO: 70154 - protein, 9 aa, synthetic construct
  source 1..9: note = Seed: VKCTSVVLL
VMCTSVVLF

SEQ ID NO: 70155 - protein, 9 aa, synthetic construct
  source 1..9: note = Seed: VKCTSVVLL
VMCTSVVLM

SEQ ID NO: 70156 - protein, 9 aa, synthetic construct
  source 1..9: note = Seed: VKCTSVVLL
VMCTSVVLY

SEQ ID NO: 70157 - protein, 9 aa, synthetic construct
  source 1..9: note = Seed: VSDIDITFL
VMDIDITFL

SEQ ID NO: 70158 - protein, 10 aa, synthetic construct
  source 1..10: note = Seed: VSDIDITFLK
VMDIDITFLK

SEQ ID NO: 70159 - protein, 10 aa, synthetic construct
  source 1..10: note = Seed: VSDIDITFLK
VMDIDITFLR

SEQ ID NO: 70160 - protein, 9 aa, synthetic construct
  source 1..9: note = Seed: VVDKYFDCY
VMDKYFDCY

SEQ ID NO: 70161 - protein, 9 aa, synthetic construct
  source 1..9: note = Seed: VVDSYYSLL
VMDSYYSLA

SEQ ID NO: 70162 - protein, 9 aa, synthetic construct
  source 1..9: note = Seed: VVDSYYSLL
VMDSYYSLF

SEQ ID NO: 70163 - protein, 9 aa, synthetic construct
  source 1..9: note = Seed: VVDSYYSLL
VMDSYYSLI

SEQ ID NO: 70164 - protein, 9 aa, synthetic construct
  source 1..9: note = Seed: VVDSYYSLL
VMDSYYSLL

SEQ ID NO: 70165 - protein, 10 aa, synthetic construct
  source 1..10: note = Seed: VVDSYYSLLM
VMDSYYSLLY

SEQ ID NO: 70166 - protein, 9 aa, synthetic construct
  source 1..9: note = Seed: VVDSYYSLL
VMDSYYSLM

SEQ ID NO: 70167 - protein, 9 aa, synthetic construct
  source 1..9: note = Seed: VVDSYYSLL
VMDSYYSLV

SEQ ID NO: 70168 - protein, 11 aa, synthetic construct
  source 1..11: note = Seed: VYDYLVSTQEF
VMDYLVSTQEF

SEQ ID NO: 70169 - protein, 11 aa, synthetic construct
  source 1..11: note = Seed: VYDYLVSTQEF
VMDYLVSTQEW

SEQ ID NO: 70170 - protein, 9 aa, synthetic construct
  source 1..9: note = Seed: VAEWFLAYI
VMEWFLAYA

SEQ ID NO: 70171 - protein, 9 aa, synthetic construct
  source 1..9: note = Seed: VAEWFLAYI
VMEWFLAYI

SEQ ID NO: 70172 - protein, 9 aa, synthetic construct
  source 1..9: note = Seed: VAEWFLAYI
VMEWFLAYL

SEQ ID NO: 70173 - protein, 9 aa, synthetic construct
  source 1..9: note = Seed: VAEWFLAYI
VMEWFLAYM

SEQ ID NO: 70174 - protein, 9 aa, synthetic construct
  source 1..9: note = Seed: VAEWFLAYI
VMEWFLAYT

SEQ ID NO: 70175 - protein, 9 aa, synthetic construct
  source 1..9: note = Seed: VAEWFLAYI
VMEWFLAYV

SEQ ID NO: 70176 - protein, 9 aa, synthetic construct
  source 1..9: note = Seed: VAFELWAKR
VMFELWAKK

SEQ ID NO: 70177 - protein, 9 aa, synthetic construct
  source 1..9: note = Seed: VAFELWAKR
VMFELWAKR

SEQ ID NO: 70178 - protein, 9 aa, synthetic construct
  source 1..9: note = Seed: VTFFIYNKI
VMFFIYNKF

SEQ ID NO: 70179 - protein, 9 aa, synthetic construct
  source 1..9: note = Seed: VTFFIYNKI
VMFFIYNKW

SEQ ID NO: 70180 - protein, 8 aa, synthetic construct
  source 1..8: note = Seed: VTFFIYNK
VMFFIYNR

SEQ ID NO: 70181 - protein, 11 aa, synthetic construct
  source 1..11: note = Seed: VTFGDDTVIEV
VMFGDDTVIEA

SEQ ID NO: 70182 - protein, 11 aa, synthetic construct
  source 1..11: note = Seed: VTFGDDTVIEV
VMFGDDTVIEI

SEQ ID NO: 70183 - protein, 11 aa, synthetic construct
  source 1..11: note = Seed: VTFGDDTVIEV
VMFGDDTVIEL

SEQ ID NO: 70184 - protein, 11 aa, synthetic construct
  source 1..11: note = Seed: VTFGDDTVIEV
VMFGDDTVIEV

SEQ ID NO: 70185 - protein, 9 aa, synthetic construct
  source 1..9: note = Seed: VTFGDDTVI
VMFGDDTVW

SEQ ID NO: 70186 - protein, 9 aa, synthetic construct
  source 1..9: note = Seed: VHFISNSWL
VMFISNSWF

SEQ ID NO: 70187 - protein, 9 aa, synthetic construct
  source 1..9: note = Seed: VHFISNSWL
VMFISNSWM

SEQ ID NO: 70188 - protein, 9 aa, synthetic construct
  source 1..9: note = Seed: VHFISNSWL
VMFISNSWY

SEQ ID NO: 70189 - protein, 11 aa, synthetic construct
  source 1..11: note = Seed: VSFLAHIQWMV
VMFLAHIQWMI

SEQ ID NO: 70190 - protein, 11 aa, synthetic construct
  source 1..11: note = Seed: VSFLAHIQWMV
VMFLAHIQWML

SEQ ID NO: 70191 - protein, 11 aa, synthetic construct
  source 1..11: note = Seed: VSFLAHIQWMV
VMFLAHIQWMV

SEQ ID NO: 70192 - protein, 8 aa, synthetic construct
  source 1..8: note = Seed: VVFLHVTY
VMFLHVTF

SEQ ID NO: 70193 - protein, 8 aa, synthetic construct
  source 1..8: note = Seed: VVFLHVTY
VMFLHVTY

SEQ ID NO: 70194 - protein, 9 aa, synthetic construct
  source 1..9: note = Seed: VVFLHVTYV
VMFLHVTYA

SEQ ID NO: 70195 - protein, 9 aa, synthetic construct
  source 1..9: note = Seed: VVFLHVTYV
VMFLHVTYC

SEQ ID NO: 70196 - protein, 9 aa, synthetic construct
  source 1..9: note = Seed: VVFLHVTYV
VMFLHVTYI

SEQ ID NO: 70197 - protein, 9 aa, synthetic construct
  source 1..9: note = Seed: VVFLHVTYV
VMFLHVTYK

SEQ ID NO: 70198 - protein, 9 aa, synthetic construct
  source 1..9: note = Seed: VVFLHVTYV
VMFLHVTYL

SEQ ID NO: 70199 - protein, 9 aa, synthetic construct
  source 1..9: note = Seed: VVFLHVTYV
VMFLHVTYM

SEQ ID NO: 70200 - protein, 9 aa, synthetic construct
  source 1..9: note = Seed: VVFLHVTYV
VMFLHVTYS

SEQ ID NO: 70201 - protein, 9 aa, synthetic construct
  source 1..9: note = Seed: VVFLHVTYV
VMFLHVTYT

SEQ ID NO: 70202 - protein, 9 aa, synthetic construct
  source 1..9: note = Seed: VVFLHVTYV
VMFLHVTYV

SEQ ID NO: 70203 - protein, 10 aa, synthetic construct
  source 1..10: note = Seed: VVFLHVTYVP
VMFLHVTYVA

SEQ ID NO: 70204 - protein, 10 aa, synthetic construct
  source 1..10: note = Seed: VVFLHVTYVP
VMFLHVTYVC

SEQ ID NO: 70205 - protein, 10 aa, synthetic construct
  source 1..10: note = Seed: VVFLHVTYVP
VMFLHVTYVD

SEQ ID NO: 70206 - protein, 10 aa, synthetic construct
  source 1..10: note = Seed: VVFLHVTYVP
VMFLHVTYVE

SEQ ID NO: 70207 - protein, 10 aa, synthetic construct
  source 1..10: note = Seed: VVFLHVTYVP
VMFLHVTYVF

SEQ ID NO: 70208 - protein, 10 aa, synthetic construct
  source 1..10: note = Seed: VVFLHVTYVP
VMFLHVTYVG

SEQ ID NO: 70209 - protein, 10 aa, synthetic construct
  source 1..10: note = Seed: VVFLHVTYVP
VMFLHVTYVH

SEQ ID NO: 70210 - protein, 10 aa, synthetic construct
  source 1..10: note = Seed: VVFLHVTYVP
VMFLHVTYVI

SEQ ID NO: 70211 - protein, 10 aa, synthetic construct
  source 1..10: note = Seed: VVFLHVTYVP
VMFLHVTYVK

SEQ ID NO: 70212 - protein, 10 aa, synthetic construct
  source 1..10: note = Seed: VVFLHVTYVP
VMFLHVTYVL

SEQ ID NO: 70213 - protein, 10 aa, synthetic construct
  source 1..10: note = Seed: VVFLHVTYVP
VMFLHVTYVM

SEQ ID NO: 70214 - protein, 10 aa, synthetic construct
  source 1..10: note = Seed: VVFLHVTYVP
VMFLHVTYVN

SEQ ID NO: 70215 - protein, 10 aa, synthetic construct
  source 1..10: note = Seed: VVFLHVTYVP
VMFLHVTYVP

SEQ ID NO: 70216 - protein, 10 aa, synthetic construct
  source 1..10: note = Seed: VVFLHVTYVP
VMFLHVTYVQ

SEQ ID NO: 70217 - protein, 10 aa, synthetic construct
  source 1..10: note = Seed: VVFLHVTYVP
VMFLHVTYVR

SEQ ID NO: 70218 - protein, 10 aa, synthetic construct
  source 1..10: note = Seed: VVFLHVTYVP
VMFLHVTYVS

SEQ ID NO: 70219 - protein, 10 aa, synthetic construct
  source 1..10: note = Seed: VVFLHVTYVP
VMFLHVTYVT

SEQ ID NO: 70220 - protein, 10 aa, synthetic construct
  source 1..10: note = Seed: VVFLHVTYVP
VMFLHVTYVV

SEQ ID NO: 70221 - protein, 10 aa, synthetic construct
  source 1..10: note = Seed: VVFLHVTYVP
VMFLHVTYVW

SEQ ID NO: 70222 - protein, 10 aa, synthetic construct
  source 1..10: note = Seed: VVFLHVTYVP
VMFLHVTYVY

SEQ ID NO: 70223 - protein, 10 aa, synthetic construct
  source 1..10: note = Seed: VEFLRDGWEI
VMFLRDGWEF

SEQ ID NO: 70224 - protein, 8 aa, synthetic construct
  source 1..8: note = Seed: VVFNGVSF
VMFNGVSF

SEQ ID NO: 70225 - protein, 10 aa, synthetic construct
  source 1..10: note = Seed: VVFNGVSFST
VMFNGVSFSA

SEQ ID NO: 70226 - protein, 10 aa, synthetic construct
  source 1..10: note = Seed: VVFNGVSFST
VMFNGVSFSI

SEQ ID NO: 70227 - protein, 10 aa, synthetic construct
  source 1..10: note = Seed: VVFNGVSFST
VMFNGVSFSL

SEQ ID NO: 70228 - protein, 11 aa, synthetic construct
  source 1..11: note = Seed: VVFNGVSFSTF
VMFNGVSFSTF

SEQ ID NO: 70229 - protein, 11 aa, synthetic construct
  source 1..11: note = Seed: VVFNGVSFSTF
VMFNGVSFSTM

SEQ ID NO: 70230 - protein, 11 aa, synthetic construct
  source 1..11: note = Seed: VVFNGVSFSTF
VMFNGVSFSTY

SEQ ID NO: 70231 - protein, 10 aa, synthetic construct
  source 1..10: note = Seed: VVFNGVSFST
VMFNGVSFSV

SEQ ID NO: 70232 - protein, 8 aa, synthetic construct
  source 1..8: note = Seed: VVFNGVSF
VMFNGVSM

SEQ ID NO: 70233 - protein, 8 aa, synthetic construct
  source 1..8: note = Seed: VVFNGVSF
VMFNGVSY

SEQ ID NO: 70234 - protein, 10 aa, synthetic construct
  source 1..10: note = Seed: VVFVLWAHGF
VMFVLWAHGY

SEQ ID NO: 70235 - protein, 9 aa, synthetic construct
  source 1..9: note = Seed: VPFVVSTGY
VMFVVSTGF

SEQ ID NO: 70236 - protein, 9 aa, synthetic construct
  source 1..9: note = Seed: VPFVVSTGY
VMFVVSTGL

SEQ ID NO: 70237 - protein, 9 aa, synthetic construct
  source 1..9: note = Seed: VPFVVSTGY
VMFVVSTGM

SEQ ID NO: 70238 - protein, 9 aa, synthetic construct
  source 1..9: note = Seed: VPFVVSTGY
VMFVVSTGY

SEQ ID NO: 70239 - protein, 10 aa, synthetic construct
  source 1..10: note = Seed: VAGDSGFAAY
VMGDSGFAAF

SEQ ID NO: 70240 - protein, 10 aa, synthetic construct
  source 1..10: note = Seed: VAGDSGFAAY
VMGDSGFAAY

SEQ ID NO: 70241 - protein, 9 aa, synthetic construct
  source 1..9: note = Seed: VIGFLFLTW
VMGFLFLTW

SEQ ID NO: 70242 - protein, 10 aa, synthetic construct
  source 1..10: note = Seed: VIGFLFLTWI
VMGFLFLTWV

SEQ ID NO: 70243 - protein, 9 aa, synthetic construct
  source 1..9: note = Seed: VIGIVNNTV
VMGIVNNTL

SEQ ID NO: 70244 - protein, 9 aa, synthetic construct
  source 1..9: note = Seed: VIGIVNNTV
VMGIVNNTV

SEQ ID NO: 70245 - protein, 10 aa, synthetic construct
  source 1..10: note = Seed: VIGIVNNTVY
VMGIVNNTVF

SEQ ID NO: 70246 - protein, 10 aa, synthetic construct
  source 1..10: note = Seed: VIGIVNNTVY
VMGIVNNTVY

SEQ ID NO: 70247 - protein, 9 aa, synthetic construct
  source 1..9: note = Seed: VGGNYNYLY
VMGNYNYLY

SEQ ID NO: 70248 - protein, 10 aa, synthetic construct
  source 1..10: note = Seed: VGGNYNYLYR
VMGNYNYLYK

SEQ ID NO: 70249 - protein, 10 aa, synthetic construct
  source 1..10: note = Seed: VGGNYNYLYR
VMGNYNYLYR

SEQ ID NO: 70250 - protein, 11 aa, synthetic construct
  source 1..11: note = Seed: VNGYPNMFITR
VMGYPNMFITR

SEQ ID NO: 70251 - protein, 9 aa, synthetic construct
  source 1..9: note = Seed: VMHANYIFW
VMHANYIFF

SEQ ID NO: 70252 - protein, 9 aa, synthetic construct
  source 1..9: note = Seed: VMHANYIFW
VMHANYIFM

SEQ ID NO: 70253 - protein, 9 aa, synthetic construct
  source 1..9: note = Seed: VMHANYIFW
VMHANYIFY

SEQ ID NO: 70254 - protein, 10 aa, synthetic construct
  source 1..10: note = Seed: VLHDIGNPKA
VMHDIGNPKV

SEQ ID NO: 70255 - protein, 9 aa, synthetic construct
  source 1..9: note = Seed: VLHDIGNPK
VMHDIGNPR

SEQ ID NO: 70256 - protein, 10 aa, synthetic construct
  source 1..10: note = Seed: VFHLYLQYIR
VMHLYLQYIR

SEQ ID NO: 70257 - protein, 9 aa, synthetic construct
  source 1..9: note = Seed: VTHSKGLYR
VMHSKGLYK

SEQ ID NO: 70258 - protein, 9 aa, synthetic construct
  source 1..9: note = Seed: VTHSKGLYR
VMHSKGLYR

SEQ ID NO: 70259 - protein, 10 aa, synthetic construct
  source 1..10: note = Seed: VTHSKGLYRK
VMHSKGLYRK

SEQ ID NO: 70260 - protein, 10 aa, synthetic construct
  source 1..10: note = Seed: VTHSKGLYRK
VMHSKGLYRR

SEQ ID NO: 70261 - protein, 9 aa, synthetic construct
  source 1..9: note = Seed: VTHSKGLYR
VMHSKGLYY

SEQ ID NO: 70262 - protein, 10 aa, synthetic construct
  source 1..10: note = Seed: VLHSYFTSDY
VMHSYFTSDF

SEQ ID NO: 70263 - protein, 10 aa, synthetic construct
  source 1..10: note = Seed: VLHSYFTSDY
VMHSYFTSDM

SEQ ID NO: 70264 - protein, 10 aa, synthetic construct
  source 1..10: note = Seed: VLHSYFTSDY
VMHSYFTSDY

SEQ ID NO: 70265 - protein, 11 aa, synthetic construct
  source 1..11: note = Seed: VLHSYFTSDYY
VMHSYFTSDYF

SEQ ID NO: 70266 - protein, 11 aa, synthetic construct
  source 1..11: note = Seed: VLHSYFTSDYY
VMHSYFTSDYW

SEQ ID NO: 70267 - protein, 11 aa, synthetic construct
  source 1..11: note = Seed: VLHSYFTSDYY
VMHSYFTSDYY

SEQ ID NO: 70268 - protein, 9 aa, synthetic construct
  source 1..9: note = Seed: VEHVTFFIY
VMHVTFFIF

SEQ ID NO: 70269 - protein, 9 aa, synthetic construct
  source 1..9: note = Seed: VEHVTFFIY
VMHVTFFIL

SEQ ID NO: 70270 - protein, 9 aa, synthetic construct
  source 1..9: note = Seed: VEHVTFFIY
VMHVTFFIM

SEQ ID NO: 70271 - protein, 9 aa, synthetic construct
  source 1..9: note = Seed: VEHVTFFIY
VMHVTFFIY

SEQ ID NO: 70272 - protein, 9 aa, synthetic construct
  source 1..9: note = Seed: VTIAEILLI
VMIAEILLA

SEQ ID NO: 70273 - protein, 9 aa, synthetic construct
  source 1..9: note = Seed: VTIAEILLI
VMIAEILLI

SEQ ID NO: 70274 - protein, 10 aa, synthetic construct
  source 1..10: note = Seed: VTIAEILLII
VMIAEILLIA

SEQ ID NO: 70275 - protein, 10 aa, synthetic construct
  source 1..10: note = Seed: VTIAEILLII
VMIAEILLII

SEQ ID NO: 70276 - protein, 10 aa, synthetic construct
  source 1..10: note = Seed: VTIAEILLII
VMIAEILLIL

SEQ ID NO: 70277 - protein, 10 aa, synthetic construct
  source 1..10: note = Seed: VTIAEILLII
VMIAEILLIV

SEQ ID NO: 70278 - protein, 10 aa, synthetic construct
  source 1..10: note = Seed: VTIAEILLII
VMIAEILLIW

SEQ ID NO: 70279 - protein, 9 aa, synthetic construct
  source 1..9: note = Seed: VTIAEILLI
VMIAEILLL

SEQ ID NO: 70280 - protein, 9 aa, synthetic construct
  source 1..9: note = Seed: VTIAEILLI
VMIAEILLM

SEQ ID NO: 70281 - protein, 9 aa, synthetic construct
  source 1..9: note = Seed: VTIAEILLI
VMIAEILLV

SEQ ID NO: 70282 - protein, 9 aa, synthetic construct
  source 1..9: note = Seed: VTIAEILLI
VMIAEILLW

SEQ ID NO: 70283 - protein, 9 aa, synthetic construct
  source 1..9: note = Seed: VTIAEILLI
VMIAEILLY

SEQ ID NO: 70284 - protein, 10 aa, synthetic construct
  source 1..10: note = Seed: VSICSTMTNR
VMICSTMTNK

SEQ ID NO: 70285 - protein, 10 aa, synthetic construct
  source 1..10: note = Seed: VSICSTMTNR
VMICSTMTNR

SEQ ID NO: 70286 - protein, 9 aa, synthetic construct
  source 1..9: note = Seed: VQIDRLITG
VMIDRLITF

SEQ ID NO: 70287 - protein, 10 aa, synthetic construct
  source 1..10: note = Seed: VQIDRLITGR
VMIDRLITGR

SEQ ID NO: 70288 - protein, 9 aa, synthetic construct
  source 1..9: note = Seed: VQIDRLITG
VMIDRLITM

SEQ ID NO: 70289 - protein, 9 aa, synthetic construct
  source 1..9: note = Seed: VQIDRLITG
VMIDRLITY

SEQ ID NO: 70290 - protein, 9 aa, synthetic construct
  source 1..9: note = Seed: VSIINNTVY
VMIINNTVF

SEQ ID NO: 70291 - protein, 9 aa, synthetic construct
  source 1..9: note = Seed: VSIINNTVY
VMIINNTVL

SEQ ID NO: 70292 - protein, 9 aa, synthetic construct
  source 1..9: note = Seed: VSIINNTVY
VMIINNTVM

SEQ ID NO: 70293 - protein, 9 aa, synthetic construct
  source 1..9: note = Seed: VSIINNTVY
VMIINNTVW

SEQ ID NO: 70294 - protein, 9 aa, synthetic construct
  source 1..9: note = Seed: VSIINNTVY
VMIINNTVY

SEQ ID NO: 70295 - protein, 10 aa, synthetic construct
  source 1..10: note = Seed: VAIKITEHSW
VMIKITEHSW

SEQ ID NO: 70296 - protein, 9 aa, synthetic construct
  source 1..9: note = Seed: VNINIVGDF
VMINIVGDF

SEQ ID NO: 70297 - protein, 10 aa, synthetic construct
  source 1..10: note = Seed: VNINIVGDFK
VMINIVGDFK

SEQ ID NO: 70298 - protein, 10 aa, synthetic construct
  source 1..10: note = Seed: VNINIVGDFK
VMINIVGDFR

SEQ ID NO: 70299 - protein, 9 aa, synthetic construct
  source 1..9: note = Seed: VNINIVGDF
VMINIVGDM

SEQ ID NO: 70300 - protein, 9 aa, synthetic construct
  source 1..9: note = Seed: VNINIVGDF
VMINIVGDY

SEQ ID NO: 70301 - protein, 9 aa, synthetic construct
  source 1..9: note = Seed: VVIPDYNTY
VMIPDYNTF

SEQ ID NO: 70302 - protein, 9 aa, synthetic construct
  source 1..9: note = Seed: VVIPDYNTY
VMIPDYNTL

SEQ ID NO: 70303 - protein, 9 aa, synthetic construct
  source 1..9: note = Seed: VVIPDYNTY
VMIPDYNTM

SEQ ID NO: 70304 - protein, 9 aa, synthetic construct
  source 1..9: note = Seed: VVIPDYNTY
VMIPDYNTW

SEQ ID NO: 70305 - protein, 9 aa, synthetic construct
  source 1..9: note = Seed: VVIPDYNTY
VMIPDYNTY

SEQ ID NO: 70306 - protein, 10 aa, synthetic construct
  source 1..10: note = Seed: VVIPDYNTYK
VMIPDYNTYK

SEQ ID NO: 70307 - protein, 10 aa, synthetic construct
  source 1..10: note = Seed: VVIPDYNTYK
VMIPDYNTYR

SEQ ID NO: 70308 - protein, 11 aa, synthetic construct
  source 1..11: note = Seed: VRKIFVDGVPF
VMKIFVDGVPF

SEQ ID NO: 70309 - protein, 11 aa, synthetic construct
  source 1..11: note = Seed: VRKIFVDGVPF
VMKIFVDGVPY

SEQ ID NO: 70310 - protein, 10 aa, synthetic construct
  source 1..10: note = Seed: VFKNIDGYFK
VMKNIDGYFK

SEQ ID NO: 70311 - protein, 10 aa, synthetic construct
  source 1..10: note = Seed: VFKNIDGYFK
VMKNIDGYFR

SEQ ID NO: 70312 - protein, 9 aa, synthetic construct
  source 1..9: note = Seed: VFKNIDGYF
VMKNIDGYY

SEQ ID NO: 70313 - protein, 9 aa, synthetic construct
  source 1..9: note = Seed: VVKRHTFSN
VMKRHTFSA

SEQ ID NO: 70314 - protein, 9 aa, synthetic construct
  source 1..9: note = Seed: VVKRHTFSN
VMKRHTFSI

SEQ ID NO: 70315 - protein, 9 aa, synthetic construct
  source 1..9: note = Seed: VVKRHTFSN
VMKRHTFSK

SEQ ID NO: 70316 - protein, 10 aa, synthetic construct
  source 1..10: note = Seed: VVKRHTFSNY
VMKRHTFSNF

SEQ ID NO: 70317 - protein, 10 aa, synthetic construct
  source 1..10: note = Seed: VVKRHTFSNY
VMKRHTFSNK

SEQ ID NO: 70318 - protein, 10 aa, synthetic construct
  source 1..10: note = Seed: VVKRHTFSNY
VMKRHTFSNY

SEQ ID NO: 70319 - protein, 9 aa, synthetic construct
  source 1..9: note = Seed: VVKRHTFSN
VMKRHTFSV

SEQ ID NO: 70320 - protein, 10 aa, synthetic construct
  source 1..10: note = Seed: VAKYTQLCQY
VMKYTQLCQF

SEQ ID NO: 70321 - protein, 10 aa, synthetic construct
  source 1..10: note = Seed: VAKYTQLCQY
VMKYTQLCQY

SEQ ID NO: 70322 - protein, 11 aa, synthetic construct
  source 1..11: note = Seed: VAKYTQLCQYL
VMKYTQLCQYF

SEQ ID NO: 70323 - protein, 10 aa, synthetic construct
  source 1..10: note = Seed: VELFENKTTL
VMLFENKTTV

SEQ ID NO: 70324 - protein, 9 aa, synthetic construct
  source 1..9: note = Seed: VLLFLAFVV
VMLFLAFVA

SEQ ID NO: 70325 - protein, 9 aa, synthetic construct
  source 1..9: note = Seed: VLLFLAFVV
VMLFLAFVI

SEQ ID NO: 70326 - protein, 9 aa, synthetic construct
  source 1..9: note = Seed: VLLFLAFVV
VMLFLAFVL

SEQ ID NO: 70327 - protein, 9 aa, synthetic construct
  source 1..9: note = Seed: VLLFLAFVV
VMLFLAFVM

SEQ ID NO: 70328 - protein, 9 aa, synthetic construct
  source 1..9: note = Seed: VLLFLAFVV
VMLFLAFVV

SEQ ID NO: 70329 - protein, 10 aa, synthetic construct
  source 1..10: note = Seed: VLLFLAFVVF
VMLFLAFVVF

SEQ ID NO: 70330 - protein, 11 aa, synthetic construct
  source 1..11: note = Seed: VLLFLAFVVFL
VMLFLAFVVFV

SEQ ID NO: 70331 - protein, 10 aa, synthetic construct
  source 1..10: note = Seed: VLLFLAFVVF
VMLFLAFVVV

SEQ ID NO: 70332 - protein, 10 aa, synthetic construct
  source 1..10: note = Seed: VLLFLAFVVF
VMLFLAFVVY

SEQ ID NO: 70333 - protein, 9 aa, synthetic construct
  source 1..9: note = Seed: VQLHNDILL
VMLHNDILF

SEQ ID NO: 70334 - protein, 10 aa, synthetic construct
  source 1..10: note = Seed: VQLHNDILLA
VMLHNDILLI

SEQ ID NO: 70335 - protein, 10 aa, synthetic construct
  source 1..10: note = Seed: VQLHNDILLA
VMLHNDILLL

SEQ ID NO: 70336 - protein, 10 aa, synthetic construct
  source 1..10: note = Seed: VQLHNDILLA
VMLHNDILLV

SEQ ID NO: 70337 - protein, 9 aa, synthetic construct
  source 1..9: note = Seed: VQLHNDILL
VMLHNDILV

SEQ ID NO: 70338 - protein, 9 aa, synthetic construct
  source 1..9: note = Seed: VQLHNDILL
VMLHNDILY

SEQ ID NO: 70339 - protein, 10 aa, synthetic construct
  source 1..10: note = Seed: VNLHSSRLSF
VMLHSSRLSF

SEQ ID NO: 70340 - protein, 10 aa, synthetic construct
  source 1..10: note = Seed: VNLHSSRLSF
VMLHSSRLSM

SEQ ID NO: 70341 - protein, 10 aa, synthetic construct
  source 1..10: note = Seed: VNLHSSRLSF
VMLHSSRLSY

SEQ ID NO: 70342 - protein, 10 aa, synthetic construct
  source 1..10: note = Seed: VFLHVTYVPA
VMLHVTYVPA

SEQ ID NO: 70343 - protein, 10 aa, synthetic construct
  source 1..10: note = Seed: VFLHVTYVPA
VMLHVTYVPI

SEQ ID NO: 70344 - protein, 10 aa, synthetic construct
  source 1..10: note = Seed: VFLHVTYVPA
VMLHVTYVPL

SEQ ID NO: 70345 - protein, 10 aa, synthetic construct
  source 1..10: note = Seed: VFLHVTYVPA
VMLHVTYVPM

SEQ ID NO: 70346 - protein, 10 aa, synthetic construct
  source 1..10: note = Seed: VFLHVTYVPA
VMLHVTYVPV

SEQ ID NO: 70347 - protein, 10 aa, synthetic construct
  source 1..10: note = Seed: VNLKQLPFFY
VMLKQLPFFY

SEQ ID NO: 70348 - protein, 10 aa, synthetic construct
  source 1..10: note = Seed: VVLLSVLQQL
VMLLSVLQQI

SEQ ID NO: 70349 - protein, 10 aa, synthetic construct
  source 1..10: note = Seed: VVLLSVLQQL
VMLLSVLQQL

SEQ ID NO: 70350 - protein, 10 aa, synthetic construct
  source 1..10: note = Seed: VVLLSVLQQL
VMLLSVLQQV

SEQ ID NO: 70351 - protein, 9 aa, synthetic construct
  source 1..9: note = Seed: VGLMWLSYF
VMLMWLSYF

SEQ ID NO: 70352 - protein, 10 aa, synthetic construct
  source 1..10: note = Seed: VGLMWLSYFI
VMLMWLSYFA

SEQ ID NO: 70353 - protein, 10 aa, synthetic construct
  source 1..10: note = Seed: VGLMWLSYFI
VMLMWLSYFI

SEQ ID NO: 70354 - protein, 11 aa, synthetic construct
  source 1..11: note = Seed: VGLMWLSYFIA
VMLMWLSYFII

SEQ ID NO: 70355 - protein, 11 aa, synthetic construct
  source 1..11: note = Seed: VGLMWLSYFIA
VMLMWLSYFIL

SEQ ID NO: 70356 - protein, 11 aa, synthetic construct
  source 1..11: note = Seed: VGLMWLSYFIA
VMLMWLSYFIV

SEQ ID NO: 70357 - protein, 10 aa, synthetic construct
  source 1..10: note = Seed: VGLMWLSYFI
VMLMWLSYFL

SEQ ID NO: 70358 - protein, 10 aa, synthetic construct
  source 1..10: note = Seed: VGLMWLSYFI
VMLMWLSYFM

SEQ ID NO: 70359 - protein, 10 aa, synthetic construct
  source 1..10: note = Seed: VGLMWLSYFI
VMLMWLSYFT

SEQ ID NO: 70360 - protein, 10 aa, synthetic construct
  source 1..10: note = Seed: VGLMWLSYFI
VMLMWLSYFV

SEQ ID NO: 70361 - protein, 9 aa, synthetic construct
  source 1..9: note = Seed: VGLMWLSYF
VMLMWLSYM

SEQ ID NO: 70362 - protein, 9 aa, synthetic construct
  source 1..9: note = Seed: VGLMWLSYF
VMLMWLSYY

SEQ ID NO: 70363 - protein, 9 aa, synthetic construct
  source 1..9: note = Seed: VVLSFELLH
VMLSFELLF

SEQ ID NO: 70364 - protein, 9 aa, synthetic construct
  source 1..9: note = Seed: VVLSFELLH
VMLSFELLK

SEQ ID NO: 70365 - protein, 9 aa, synthetic construct
  source 1..9: note = Seed: VVLSFELLH
VMLSFELLY

SEQ ID NO: 70366 - protein, 10 aa, synthetic construct
  source 1..10: note = Seed: VQLSLPVLQV
VMLSLPVLQI

SEQ ID NO: 70367 - protein, 10 aa, synthetic construct
  source 1..10: note = Seed: VQLSLPVLQV
VMLSLPVLQL

SEQ ID NO: 70368 - protein, 10 aa, synthetic construct
  source 1..10: note = Seed: VQLSLPVLQV
VMLSLPVLQV

SEQ ID NO: 70369 - protein, 9 aa, synthetic construct
  source 1..9: note = Seed: VLLSVLQQL
VMLSVLQQA

SEQ ID NO: 70370 - protein, 9 aa, synthetic construct
  source 1..9: note = Seed: VLLSVLQQL
VMLSVLQQI

SEQ ID NO: 70371 - protein, 9 aa, synthetic construct
  source 1..9: note = Seed: VLLSVLQQL
VMLSVLQQL

SEQ ID NO: 70372 - protein, 10 aa, synthetic construct
  source 1..10: note = Seed: VLLSVLQQLR
VMLSVLQQLI

SEQ ID NO: 70373 - protein, 10 aa, synthetic construct
  source 1..10: note = Seed: VLLSVLQQLR
VMLSVLQQLK

SEQ ID NO: 70374 - protein, 10 aa, synthetic construct
  source 1..10: note = Seed: VLLSVLQQLR
VMLSVLQQLL

SEQ ID NO: 70375 - protein, 10 aa, synthetic construct
  source 1..10: note = Seed: VLLSVLQQLR
VMLSVLQQLR

SEQ ID NO: 70376 - protein, 11 aa, synthetic construct
  source 1..11: note = Seed: VLLSVLQQLRV
VMLSVLQQLRV

SEQ ID NO: 70377 - protein, 10 aa, synthetic construct
  source 1..10: note = Seed: VLLSVLQQLR
VMLSVLQQLV

SEQ ID NO: 70378 - protein, 9 aa, synthetic construct
  source 1..9: note = Seed: VLLSVLQQL
VMLSVLQQM

SEQ ID NO: 70379 - protein, 9 aa, synthetic construct
  source 1..9: note = Seed: VLLSVLQQL
VMLSVLQQT

SEQ ID NO: 70380 - protein, 9 aa, synthetic construct
  source 1..9: note = Seed: VLLSVLQQL
VMLSVLQQV

SEQ ID NO: 70381 - protein, 10 aa, synthetic construct
  source 1..10: note = Seed: VELVAELEGI
VMLVAELEGL

SEQ ID NO: 70382 - protein, 10 aa, synthetic construct
  source 1..10: note = Seed: VELVAELEGI
VMLVAELEGV

SEQ ID NO: 70383 - protein, 10 aa, synthetic construct
  source 1..10: note = Seed: VVMAYITGGV
VMMAYITGGA

SEQ ID NO: 70384 - protein, 10 aa, synthetic construct
  source 1..10: note = Seed: VVMAYITGGV
VMMAYITGGI

SEQ ID NO: 70385 - protein, 10 aa, synthetic construct
  source 1..10: note = Seed: VVMAYITGGV
VMMAYITGGL

SEQ ID NO: 70386 - protein, 10 aa, synthetic construct
  source 1..10: note = Seed: VVMAYITGGV
VMMAYITGGM

SEQ ID NO: 70387 - protein, 10 aa, synthetic construct
  source 1..10: note = Seed: VVMAYITGGV
VMMAYITGGV

SEQ ID NO: 70388 - protein, 10 aa, synthetic construct
  source 1..10: note = Seed: VFMCVEYCPI
VMMCVEYCPA

SEQ ID NO: 70389 - protein, 10 aa, synthetic construct
  source 1..10: note = Seed: VFMCVEYCPI
VMMCVEYCPI

SEQ ID NO: 70390 - protein, 10 aa, synthetic construct
  source 1..10: note = Seed: VFMCVEYCPI
VMMCVEYCPL

SEQ ID NO: 70391 - protein, 10 aa, synthetic construct
  source 1..10: note = Seed: VFMCVEYCPI
VMMCVEYCPM

SEQ ID NO: 70392 - protein, 10 aa, synthetic construct
  source 1..10: note = Seed: VFMCVEYCPI
VMMCVEYCPV

SEQ ID NO: 70393 - protein, 9 aa, synthetic construct
  source 1..9: note = Seed: VPMEKLKTL
VMMEKLKTL

SEQ ID NO: 70394 - protein, 9 aa, synthetic construct
  source 1..9: note = Seed: VPMEKLKTL
VMMEKLKTM

SEQ ID NO: 70395 - protein, 8 aa, synthetic construct
  source 1..8: note = Seed: VQMLSDTL
VMMLSDTF

SEQ ID NO: 70396 - protein, 9 aa, synthetic construct
  source 1..9: note = Seed: VQMLSDTLK
VMMLSDTLK

SEQ ID NO: 70397 - protein, 9 aa, synthetic construct
  source 1..9: note = Seed: VQMLSDTLK
VMMLSDTLR

SEQ ID NO: 70398 - protein, 8 aa, synthetic construct
  source 1..8: note = Seed: VQMLSDTL
VMMLSDTY

SEQ ID NO: 70399 - protein, 10 aa, synthetic construct
  source 1..10: note = Seed: VRMYIFFASF
VMMYIFFASF

SEQ ID NO: 70400 - protein, 11 aa, synthetic construct
  source 1..11: note = Seed: VRMYIFFASFY
VMMYIFFASFK

SEQ ID NO: 70401 - protein, 11 aa, synthetic construct
  source 1..11: note = Seed: VRMYIFFASFY
VMMYIFFASFY

SEQ ID NO: 70402 - protein, 10 aa, synthetic construct
  source 1..10: note = Seed: VRMYIFFASF
VMMYIFFASM

SEQ ID NO: 70403 - protein, 10 aa, synthetic construct
  source 1..10: note = Seed: VRMYIFFASF
VMMYIFFASW

SEQ ID NO: 70404 - protein, 10 aa, synthetic construct
  source 1..10: note = Seed: VRMYIFFASF
VMMYIFFASY

SEQ ID NO: 70405 - protein, 9 aa, synthetic construct
  source 1..9: note = Seed: VLNDILSRL
VMNDILSRA

SEQ ID NO: 70406 - protein, 9 aa, synthetic construct
  source 1..9: note = Seed: VLNDILSRL
VMNDILSRC

SEQ ID NO: 70407 - protein, 9 aa, synthetic construct
  source 1..9: note = Seed: VLNDILSRL
VMNDILSRI

SEQ ID NO: 70408 - protein, 9 aa, synthetic construct
  source 1..9: note = Seed: VLNDILSRL
VMNDILSRL

SEQ ID NO: 70409 - protein, 10 aa, synthetic construct
  source 1..10: note = Seed: VLNDILSRLD
VMNDILSRLA

SEQ ID NO: 70410 - protein, 10 aa, synthetic construct
  source 1..10: note = Seed: VLNDILSRLD
VMNDILSRLI

SEQ ID NO: 70411 - protein, 10 aa, synthetic construct
  source 1..10: note = Seed: VLNDILSRLD
VMNDILSRLL

SEQ ID NO: 70412 - protein, 10 aa, synthetic construct
  source 1..10: note = Seed: VLNDILSRLD
VMNDILSRLM

SEQ ID NO: 70413 - protein, 10 aa, synthetic construct
  source 1..10: note = Seed: VLNDILSRLD
VMNDILSRLV

SEQ ID NO: 70414 - protein, 9 aa, synthetic construct
  source 1..9: note = Seed: VLNDILSRL
VMNDILSRM

SEQ ID NO: 70415 - protein, 9 aa, synthetic construct
  source 1..9: note = Seed: VLNDILSRL
VMNDILSRT

SEQ ID NO: 70416 - protein, 9 aa, synthetic construct
  source 1..9: note = Seed: VLNDILSRL
VMNDILSRV

SEQ ID NO: 70417 - protein, 10 aa, synthetic construct
  source 1..10: note = Seed: VFNGVSFSTF
VMNGVSFSTF

SEQ ID NO: 70418 - protein, 10 aa, synthetic construct
  source 1..10: note = Seed: VFNGVSFSTF
VMNGVSFSTM

SEQ ID NO: 70419 - protein, 10 aa, synthetic construct
  source 1..10: note = Seed: VFNGVSFSTF
VMNGVSFSTY

SEQ ID NO: 70420 - protein, 9 aa, synthetic construct
  source 1..9: note = Seed: VRNLQHRLY
VMNLQHRLF

SEQ ID NO: 70421 - protein, 9 aa, synthetic construct
  source 1..9: note = Seed: VRNLQHRLY
VMNLQHRLY

SEQ ID NO: 70422 - protein, 10 aa, synthetic construct
  source 1..10: note = Seed: VLNNDYYRSL
VMNNDYYRSV

SEQ ID NO: 70423 - protein, 9 aa, synthetic construct
  source 1..9: note = Seed: VVNQNAQAL
VMNQNAQAF

SEQ ID NO: 70424 - protein, 9 aa, synthetic construct
  source 1..9: note = Seed: VVNQNAQAL
VMNQNAQAM

SEQ ID NO: 70425 - protein, 9 aa, synthetic construct
  source 1..9: note = Seed: VVNQNAQAL
VMNQNAQAY

SEQ ID NO: 70426 - protein, 9 aa, synthetic construct
  source 1..9: note = Seed: VIPDYNTYK
VMPDYNTYK

SEQ ID NO: 70427 - protein, 9 aa, synthetic construct
  source 1..9: note = Seed: VIPDYNTYK
VMPDYNTYR

SEQ ID NO: 70428 - protein, 10 aa, synthetic construct
  source 1..10: note = Seed: VLPFNDGVYF
VMPFNDGVYF

SEQ ID NO: 70429 - protein, 10 aa, synthetic construct
  source 1..10: note = Seed: VLPFNDGVYF
VMPFNDGVYM

SEQ ID NO: 70430 - protein, 10 aa, synthetic construct
  source 1..10: note = Seed: VLPFNDGVYF
VMPFNDGVYW

SEQ ID NO: 70431 - protein, 10 aa, synthetic construct
  source 1..10: note = Seed: VLPFNDGVYF
VMPFNDGVYY

SEQ ID NO: 70432 - protein, 10 aa, synthetic construct
  source 1..10: note = Seed: VLPPLLTDEM
VMPPLLTDEV

SEQ ID NO: 70433 - protein, 9 aa, synthetic construct
  source 1..9: note = Seed: VRQCSGVTF
VMQCSGVTF

SEQ ID NO: 70434 - protein, 9 aa, synthetic construct
  source 1..9: note = Seed: VRQCSGVTF
VMQCSGVTL

SEQ ID NO: 70435 - protein, 9 aa, synthetic construct
  source 1..9: note = Seed: VRQCSGVTF
VMQCSGVTM

SEQ ID NO: 70436 - protein, 9 aa, synthetic construct
  source 1..9: note = Seed: VRQCSGVTF
VMQCSGVTY

SEQ ID NO: 70437 - protein, 9 aa, synthetic construct
  source 1..9: note = Seed: VQQLPETYF
VMQLPETYF

SEQ ID NO: 70438 - protein, 9 aa, synthetic construct
  source 1..9: note = Seed: VQQLPETYF
VMQLPETYY

SEQ ID NO: 70439 - protein, 10 aa, synthetic construct
  source 1..10: note = Seed: VLQLPQGTTL
VMQLPQGTTF

SEQ ID NO: 70440 - protein, 10 aa, synthetic construct
  source 1..10: note = Seed: VLQLPQGTTL
VMQLPQGTTM

SEQ ID NO: 70441 - protein, 10 aa, synthetic construct
  source 1..10: note = Seed: VLQLPQGTTL
VMQLPQGTTY

SEQ ID NO: 70442 - protein, 11 aa, synthetic construct
  source 1..11: note = Seed: VTQNVLYENQK
VMQNVLYENQR

SEQ ID NO: 70443 - protein, 9 aa, synthetic construct
  source 1..9: note = Seed: VVQQLPETY
VMQQLPETF

SEQ ID NO: 70444 - protein, 9 aa, synthetic construct
  source 1..9: note = Seed: VVQQLPETY
VMQQLPETM

SEQ ID NO: 70445 - protein, 9 aa, synthetic construct
  source 1..9: note = Seed: VVQQLPETY
VMQQLPETY

SEQ ID NO: 70446 - protein, 10 aa, synthetic construct
  source 1..10: note = Seed: VVQTIEVNSF
VMQTIEVNSF

SEQ ID NO: 70447 - protein, 10 aa, synthetic construct
  source 1..10: note = Seed: VVQTIEVNSF
VMQTIEVNSY

SEQ ID NO: 70448 - protein, 9 aa, synthetic construct
  source 1..9: note = Seed: VTRCLNRVC
VMRCLNRVK

SEQ ID NO: 70449 - protein, 9 aa, synthetic construct
  source 1..9: note = Seed: VARDLSLQF
VMRDLSLQF

SEQ ID NO: 70450 - protein, 10 aa, synthetic construct
  source 1..10: note = Seed: VARDLSLQFK
VMRDLSLQFK

SEQ ID NO: 70451 - protein, 11 aa, synthetic construct
  source 1..11: note = Seed: VARDLSLQFKR
VMRDLSLQFKR

SEQ ID NO: 70452 - protein, 10 aa, synthetic construct
  source 1..10: note = Seed: VARDLSLQFK
VMRDLSLQFR

SEQ ID NO: 70453 - protein, 9 aa, synthetic construct
  source 1..9: note = Seed: VARDLSLQF
VMRDLSLQL

SEQ ID NO: 70454 - protein, 9 aa, synthetic construct
  source 1..9: note = Seed: VARDLSLQF
VMRDLSLQM

SEQ ID NO: 70455 - protein, 9 aa, synthetic construct
  source 1..9: note = Seed: VARDLSLQF
VMRDLSLQW

SEQ ID NO: 70456 - protein, 9 aa, synthetic construct
  source 1..9: note = Seed: VARDLSLQF
VMRDLSLQY

SEQ ID NO: 70457 - protein, 9 aa, synthetic construct
  source 1..9: note = Seed: VTRELMREL
VMRELMREK

SEQ ID NO: 70458 - protein, 10 aa, synthetic construct
  source 1..10: note = Seed: VNRFNVAITR
VMRFNVAITR

SEQ ID NO: 70459 - protein, 8 aa, synthetic construct
  source 1..8: note = Seed: VYRGTTTY
VMRGTTTF

SEQ ID NO: 70460 - protein, 8 aa, synthetic construct
  source 1..8: note = Seed: VYRGTTTY
VMRGTTTY

SEQ ID NO: 70461 - protein, 9 aa, synthetic construct
  source 1..9: note = Seed: VYRGTTTYK
VMRGTTTYA

SEQ ID NO: 70462 - protein, 9 aa, synthetic construct
  source 1..9: note = Seed: VYRGTTTYK
VMRGTTTYI

SEQ ID NO: 70463 - protein, 9 aa, synthetic construct
  source 1..9: note = Seed: VYRGTTTYK
VMRGTTTYK

SEQ ID NO: 70464 - protein, 10 aa, synthetic construct
  source 1..10: note = Seed: VYRGTTTYKL
VMRGTTTYKK

SEQ ID NO: 70465 - protein, 9 aa, synthetic construct
  source 1..9: note = Seed: VYRGTTTYK
VMRGTTTYR

SEQ ID NO: 70466 - protein, 9 aa, synthetic construct
  source 1..9: note = Seed: VKRHTFSNY
VMRHTFSNF

SEQ ID NO: 70467 - protein, 9 aa, synthetic construct
  source 1..9: note = Seed: VKRHTFSNY
VMRHTFSNM

SEQ ID NO: 70468 - protein, 9 aa, synthetic construct
  source 1..9: note = Seed: VKRHTFSNY
VMRHTFSNY

SEQ ID NO: 70469 - protein, 10 aa, synthetic construct
  source 1..10: note = Seed: VVRQCSGVTF
VMRQCSGVTF

SEQ ID NO: 70470 - protein, 10 aa, synthetic construct
  source 1..10: note = Seed: VVRQCSGVTF
VMRQCSGVTM

SEQ ID NO: 70471 - protein, 10 aa, synthetic construct
  source 1..10: note = Seed: VVRQCSGVTF
VMRQCSGVTY

SEQ ID NO: 70472 - protein, 8 aa, synthetic construct
  source 1..8: note = Seed: VVRSIFSR
VMRSIFSR

SEQ ID NO: 70473 - protein, 11 aa, synthetic construct
  source 1..11: note = Seed: VKRTIKGTHHW
VMRTIKGTHHW

SEQ ID NO: 70474 - protein, 10 aa, synthetic construct
  source 1..10: note = Seed: VTSAMQTMLF
VMSAMQTMLF

SEQ ID NO: 70475 - protein, 10 aa, synthetic construct
  source 1..10: note = Seed: VTSAMQTMLF
VMSAMQTMLW

SEQ ID NO: 70476 - protein, 10 aa, synthetic construct
  source 1..10: note = Seed: VTSAMQTMLF
VMSAMQTMLY

SEQ ID NO: 70477 - protein, 9 aa, synthetic construct
  source 1..9: note = Seed: VTSAMQTML
VMSAMQTMW

SEQ ID NO: 70478 - protein, 10 aa, synthetic construct
  source 1..10: note = Seed: VFSAVGNICY
VMSAVGNICY

SEQ ID NO: 70479 - protein, 10 aa, synthetic construct
  source 1..10: note = Seed: VVSDIDYVPL
VMSDIDYVPA

SEQ ID NO: 70480 - protein, 10 aa, synthetic construct
  source 1..10: note = Seed: VVSDIDYVPL
VMSDIDYVPI

SEQ ID NO: 70481 - protein, 10 aa, synthetic construct
  source 1..10: note = Seed: VVSDIDYVPL
VMSDIDYVPL

SEQ ID NO: 70482 - protein, 10 aa, synthetic construct
  source 1..10: note = Seed: VVSDIDYVPL
VMSDIDYVPM

SEQ ID NO: 70483 - protein, 10 aa, synthetic construct
  source 1..10: note = Seed: VVSDIDYVPL
VMSDIDYVPV

SEQ ID NO: 70484 - protein, 9 aa, synthetic construct
  source 1..9: note = Seed: VLSFCAFAV
VMSFCAFAA

SEQ ID NO: 70485 - protein, 9 aa, synthetic construct
  source 1..9: note = Seed: VLSFCAFAV
VMSFCAFAI

SEQ ID NO: 70486 - protein, 9 aa, synthetic construct
  source 1..9: note = Seed: VLSFCAFAV
VMSFCAFAL

SEQ ID NO: 70487 - protein, 9 aa, synthetic construct
  source 1..9: note = Seed: VLSFCAFAV
VMSFCAFAM

SEQ ID NO: 70488 - protein, 9 aa, synthetic construct
  source 1..9: note = Seed: VLSFCAFAV
VMSFCAFAV

SEQ ID NO: 70489 - protein, 10 aa, synthetic construct
  source 1..10: note = Seed: VLSFCAFAVD
VMSFCAFAVA

SEQ ID NO: 70490 - protein, 10 aa, synthetic construct
  source 1..10: note = Seed: VLSFCAFAVD
VMSFCAFAVI

SEQ ID NO: 70491 - protein, 10 aa, synthetic construct
  source 1..10: note = Seed: VLSFCAFAVD
VMSFCAFAVL

SEQ ID NO: 70492 - protein, 10 aa, synthetic construct
  source 1..10: note = Seed: VLSFCAFAVD
VMSFCAFAVV

SEQ ID NO: 70493 - protein, 9 aa, synthetic construct
  source 1..9: note = Seed: VYSFLPGVY
VMSFLPGVF

SEQ ID NO: 70494 - protein, 9 aa, synthetic construct
  source 1..9: note = Seed: VYSFLPGVY
VMSFLPGVL

SEQ ID NO: 70495 - protein, 9 aa, synthetic construct
  source 1..9: note = Seed: VYSFLPGVY
VMSFLPGVM

SEQ ID NO: 70496 - protein, 9 aa, synthetic construct
  source 1..9: note = Seed: VYSFLPGVY
VMSFLPGVY

SEQ ID NO: 70497 - protein, 11 aa, synthetic construct
  source 1..11: note = Seed: VYSFLPGVYSV
VMSFLPGVYSF

SEQ ID NO: 70498 - protein, 11 aa, synthetic construct
  source 1..11: note = Seed: VYSFLPGVYSV
VMSFLPGVYSI

SEQ ID NO: 70499 - protein, 11 aa, synthetic construct
  source 1..11: note = Seed: VYSFLPGVYSV
VMSFLPGVYSL

SEQ ID NO: 70500 - protein, 11 aa, synthetic construct
  source 1..11: note = Seed: VYSFLPGVYSV
VMSFLPGVYSV

SEQ ID NO: 70501 - protein, 9 aa, synthetic construct
  source 1..9: note = Seed: VNSFSGYLK
VMSFSGYLK

SEQ ID NO: 70502 - protein, 10 aa, synthetic construct
  source 1..10: note = Seed: VNSFSGYLKL
VMSFSGYLKF

SEQ ID NO: 70503 - protein, 10 aa, synthetic construct
  source 1..10: note = Seed: VNSFSGYLKL
VMSFSGYLKL

SEQ ID NO: 70504 - protein, 10 aa, synthetic construct
  source 1..10: note = Seed: VNSFSGYLKL
VMSFSGYLKM

SEQ ID NO: 70505 - protein, 10 aa, synthetic construct
  source 1..10: note = Seed: VNSFSGYLKL
VMSFSGYLKW

SEQ ID NO: 70506 - protein, 10 aa, synthetic construct
  source 1..10: note = Seed: VNSFSGYLKL
VMSFSGYLKY

SEQ ID NO: 70507 - protein, 9 aa, synthetic construct
  source 1..9: note = Seed: VNSFSGYLK
VMSFSGYLR

SEQ ID NO: 70508 - protein, 9 aa, synthetic construct
  source 1..9: note = Seed: VLSGHNLAK
VMSGHNLAK

SEQ ID NO: 70509 - protein, 9 aa, synthetic construct
  source 1..9: note = Seed: VLSGHNLAK
VMSGHNLAR

SEQ ID NO: 70510 - protein, 10 aa, synthetic construct
  source 1..10: note = Seed: VYSSANNCTF
VMSSANNCTF

SEQ ID NO: 70511 - protein, 10 aa, synthetic construct
  source 1..10: note = Seed: VYSSANNCTF
VMSSANNCTW

SEQ ID NO: 70512 - protein, 10 aa, synthetic construct
  source 1..10: note = Seed: VYSSANNCTF
VMSSANNCTY

SEQ ID NO: 70513 - protein, 9 aa, synthetic construct
  source 1..9: note = Seed: VYSTGSNVF
VMSTGSNVF

SEQ ID NO: 70514 - protein, 9 aa, synthetic construct
  source 1..9: note = Seed: VYSTGSNVF
VMSTGSNVL

SEQ ID NO: 70515 - protein, 9 aa, synthetic construct
  source 1..9: note = Seed: VYSTGSNVF
VMSTGSNVM

SEQ ID NO: 70516 - protein, 9 aa, synthetic construct
  source 1..9: note = Seed: VYSTGSNVF
VMSTGSNVW

SEQ ID NO: 70517 - protein, 9 aa, synthetic construct
  source 1..9: note = Seed: VYSTGSNVF
VMSTGSNVY

SEQ ID NO: 70518 - protein, 9 aa, synthetic construct
  source 1..9: note = Seed: VVSTGYHFR
VMSTGYHFK

SEQ ID NO: 70519 - protein, 9 aa, synthetic construct
  source 1..9: note = Seed: VVSTGYHFR
VMSTGYHFR

SEQ ID NO: 70520 - protein, 10 aa, synthetic construct
  source 1..10: note = Seed: VVSTGYHFRE
VMSTGYHFRK

SEQ ID NO: 70521 - protein, 10 aa, synthetic construct
  source 1..10: note = Seed: VVSTGYHFRE
VMSTGYHFRR

SEQ ID NO: 70522 - protein, 9 aa, synthetic construct
  source 1..9: note = Seed: VQSTQWSLF
VMSTQWSLF

SEQ ID NO: 70523 - protein, 9 aa, synthetic construct
  source 1..9: note = Seed: VQSTQWSLF
VMSTQWSLM

SEQ ID NO: 70524 - protein, 9 aa, synthetic construct
  source 1..9: note = Seed: VQSTQWSLF
VMSTQWSLY

SEQ ID NO: 70525 - protein, 9 aa, synthetic construct
  source 1..9: note = Seed: VVSTTTNIV
VMSTTTNIV

SEQ ID NO: 70526 - protein, 11 aa, synthetic construct
  source 1..11: note = Seed: VDSYYSLLMPI
VMSYYSLLMPF

SEQ ID NO: 70527 - protein, 9 aa, synthetic construct
  source 1..9: note = Seed: VFTGYRVTK
VMTGYRVTR

SEQ ID NO: 70528 - protein, 9 aa, synthetic construct
  source 1..9: note = Seed: VQTIEVNSF
VMTIEVNSF

SEQ ID NO: 70529 - protein, 9 aa, synthetic construct
  source 1..9: note = Seed: VQTIEVNSF
VMTIEVNSM

SEQ ID NO: 70530 - protein, 9 aa, synthetic construct
  source 1..9: note = Seed: VQTIEVNSF
VMTIEVNSY

SEQ ID NO: 70531 - protein, 10 aa, synthetic construct
  source 1..10: note = Seed: VRTIKVFTTV
VMTIKVFTTV

SEQ ID NO: 70532 - protein, 9 aa, synthetic construct
  source 1..9: note = Seed: VSTSGRWVL
VMTSGRWVW

SEQ ID NO: 70533 - protein, 9 aa, synthetic construct
  source 1..9: note = Seed: VVTTKIALK
VMTTKIALK

SEQ ID NO: 70534 - protein, 9 aa, synthetic construct
  source 1..9: note = Seed: VVTTKIALK
VMTTKIALR

SEQ ID NO: 70535 - protein, 10 aa, synthetic construct
  source 1..10: note = Seed: VSTTTNIVTR
VMTTTNIVTR

SEQ ID NO: 70536 - protein, 10 aa, synthetic construct
  source 1..10: note = Seed: VETVKGLDYK
VMTVKGLDYR

SEQ ID NO: 70537 - protein, 10 aa, synthetic construct
  source 1..10: note = Seed: VNVAFELWAK
VMVAFELWAK

SEQ ID NO: 70538 - protein, 10 aa, synthetic construct
  source 1..10: note = Seed: VNVAFELWAK
VMVAFELWAR

SEQ ID NO: 70539 - protein, 10 aa, synthetic construct
  source 1..10: note = Seed: VNVLAWLYAA
VMVLAWLYAA

SEQ ID NO: 70540 - protein, 11 aa, synthetic construct
  source 1..11: note = Seed: VNVLAWLYAAV
VMVLAWLYAAV

SEQ ID NO: 70541 - protein, 10 aa, synthetic construct
  source 1..10: note = Seed: VNVLAWLYAA
VMVLAWLYAI

SEQ ID NO: 70542 - protein, 10 aa, synthetic construct
  source 1..10: note = Seed: VNVLAWLYAA
VMVLAWLYAL

SEQ ID NO: 70543 - protein, 10 aa, synthetic construct
  source 1..10: note = Seed: VNVLAWLYAA
VMVLAWLYAM

SEQ ID NO: 70544 - protein, 10 aa, synthetic construct
  source 1..10: note = Seed: VNVLAWLYAA
VMVLAWLYAT

SEQ ID NO: 70545 - protein, 10 aa, synthetic construct
  source 1..10: note = Seed: VNVLAWLYAA
VMVLAWLYAV

SEQ ID NO: 70546 - protein, 9 aa, synthetic construct
  source 1..9: note = Seed: VVVLSFELL
VMVLSFELV

SEQ ID NO: 70547 - protein, 11 aa, synthetic construct
  source 1..11: note = Seed: VFVLWAHGFEL
VMVLWAHGFEA

SEQ ID NO: 70548 - protein, 11 aa, synthetic construct
  source 1..11: note = Seed: VFVLWAHGFEL
VMVLWAHGFEI

SEQ ID NO: 70549 - protein, 11 aa, synthetic construct
  source 1..11: note = Seed: VFVLWAHGFEL
VMVLWAHGFEL

SEQ ID NO: 70550 - protein, 11 aa, synthetic construct
  source 1..11: note = Seed: VFVLWAHGFEL
VMVLWAHGFEV

SEQ ID NO: 70551 - protein, 9 aa, synthetic construct
  source 1..9: note = Seed: VFVLWAHGF
VMVLWAHGY

SEQ ID NO: 70552 - protein, 10 aa, synthetic construct
  source 1..10: note = Seed: VLVQSTQWSL
VMVQSTQWSI

SEQ ID NO: 70553 - protein, 10 aa, synthetic construct
  source 1..10: note = Seed: VLVQSTQWSL
VMVQSTQWSL

SEQ ID NO: 70554 - protein, 11 aa, synthetic construct
  source 1..11: note = Seed: VLVQSTQWSLF
VMVQSTQWSLY

SEQ ID NO: 70555 - protein, 10 aa, synthetic construct
  source 1..10: note = Seed: VLVQSTQWSL
VMVQSTQWSV

SEQ ID NO: 70556 - protein, 10 aa, synthetic construct
  source 1..10: note = Seed: VLVRGFGDSV
VMVRGFGDSV

SEQ ID NO: 70557 - protein, 9 aa, synthetic construct
  source 1..9: note = Seed: VCVSTSGRW
VMVSTSGRW

SEQ ID NO: 70558 - protein, 9 aa, synthetic construct
  source 1..9: note = Seed: VQVTCGTTT
VMVTCGTTF

SEQ ID NO: 70559 - protein, 9 aa, synthetic construct
  source 1..9: note = Seed: VQVTCGTTT
VMVTCGTTI

SEQ ID NO: 70560 - protein, 9 aa, synthetic construct
  source 1..9: note = Seed: VQVTCGTTT
VMVTCGTTL

SEQ ID NO: 70561 - protein, 9 aa, synthetic construct
  source 1..9: note = Seed: VQVTCGTTT
VMVTCGTTM

SEQ ID NO: 70562 - protein, 10 aa, synthetic construct
  source 1..10: note = Seed: VQVTCGTTTL
VMVTCGTTTF

SEQ ID NO: 70563 - protein, 10 aa, synthetic construct
  source 1..10: note = Seed: VQVTCGTTTL
VMVTCGTTTM

SEQ ID NO: 70564 - protein, 10 aa, synthetic construct
  source 1..10: note = Seed: VQVTCGTTTL
VMVTCGTTTY

SEQ ID NO: 70565 - protein, 9 aa, synthetic construct
  source 1..9: note = Seed: VQVTCGTTT
VMVTCGTTW

SEQ ID NO: 70566 - protein, 9 aa, synthetic construct
  source 1..9: note = Seed: VQVTCGTTT
VMVTCGTTY

SEQ ID NO: 70567 - protein, 10 aa, synthetic construct
  source 1..10: note = Seed: VPVVDSYYSL
VMVVDSYYSV

SEQ ID NO: 70568 - protein, 9 aa, synthetic construct
  source 1..9: note = Seed: VLWAHGFEL
VMWAHGFEA

SEQ ID NO: 70569 - protein, 9 aa, synthetic construct
  source 1..9: note = Seed: VLWAHGFEL
VMWAHGFEC

SEQ ID NO: 70570 - protein, 9 aa, synthetic construct
  source 1..9: note = Seed: VLWAHGFEL
VMWAHGFEF

SEQ ID NO: 70571 - protein, 9 aa, synthetic construct
  source 1..9: note = Seed: VLWAHGFEL
VMWAHGFEI

SEQ ID NO: 70572 - protein, 9 aa, synthetic construct
  source 1..9: note = Seed: VLWAHGFEL
VMWAHGFEL

SEQ ID NO: 70573 - protein, 10 aa, synthetic construct
  source 1..10: note = Seed: VLWAHGFELT
VMWAHGFELA

SEQ ID NO: 70574 - protein, 10 aa, synthetic construct
  source 1..10: note = Seed: VLWAHGFELT
VMWAHGFELC

SEQ ID NO: 70575 - protein, 10 aa, synthetic construct
  source 1..10: note = Seed: VLWAHGFELT
VMWAHGFELD

SEQ ID NO: 70576 - protein, 10 aa, synthetic construct
  source 1..10: note = Seed: VLWAHGFELT
VMWAHGFELE

SEQ ID NO: 70577 - protein, 10 aa, synthetic construct
  source 1..10: note = Seed: VLWAHGFELT
VMWAHGFELF

SEQ ID NO: 70578 - protein, 10 aa, synthetic construct
  source 1..10: note = Seed: VLWAHGFELT
VMWAHGFELG

SEQ ID NO: 70579 - protein, 10 aa, synthetic construct
  source 1..10: note = Seed: VLWAHGFELT
VMWAHGFELH

SEQ ID NO: 70580 - protein, 10 aa, synthetic construct
  source 1..10: note = Seed: VLWAHGFELT
VMWAHGFELI

SEQ ID NO: 70581 - protein, 10 aa, synthetic construct
  source 1..10: note = Seed: VLWAHGFELT
VMWAHGFELK

SEQ ID NO: 70582 - protein, 10 aa, synthetic construct
  source 1..10: note = Seed: VLWAHGFELT
VMWAHGFELL

SEQ ID NO: 70583 - protein, 10 aa, synthetic construct
  source 1..10: note = Seed: VLWAHGFELT
VMWAHGFELM

SEQ ID NO: 70584 - protein, 10 aa, synthetic construct
  source 1..10: note = Seed: VLWAHGFELT
VMWAHGFELN

SEQ ID NO: 70585 - protein, 10 aa, synthetic construct
  source 1..10: note = Seed: VLWAHGFELT
VMWAHGFELP

SEQ ID NO: 70586 - protein, 10 aa, synthetic construct
  source 1..10: note = Seed: VLWAHGFELT
VMWAHGFELQ

SEQ ID NO: 70587 - protein, 10 aa, synthetic construct
  source 1..10: note = Seed: VLWAHGFELT
VMWAHGFELR

SEQ ID NO: 70588 - protein, 10 aa, synthetic construct
  source 1..10: note = Seed: VLWAHGFELT
VMWAHGFELS

SEQ ID NO: 70589 - protein, 10 aa, synthetic construct
  source 1..10: note = Seed: VLWAHGFELT
VMWAHGFELT

SEQ ID NO: 70590 - protein, 11 aa, synthetic construct
  source 1..11: note = Seed: VLWAHGFELTS
VMWAHGFELTA

SEQ ID NO: 70591 - protein, 11 aa, synthetic construct
  source 1..11: note = Seed: VLWAHGFELTS
VMWAHGFELTI

SEQ ID NO: 70592 - protein, 11 aa, synthetic construct
  source 1..11: note = Seed: VLWAHGFELTS
VMWAHGFELTL

SEQ ID NO: 70593 - protein, 11 aa, synthetic construct
  source 1..11: note = Seed: VLWAHGFELTS
VMWAHGFELTV

SEQ ID NO: 70594 - protein, 10 aa, synthetic construct
  source 1..10: note = Seed: VLWAHGFELT
VMWAHGFELV

SEQ ID NO: 70595 - protein, 10 aa, synthetic construct
  source 1..10: note = Seed: VLWAHGFELT
VMWAHGFELW

SEQ ID NO: 70596 - protein, 10 aa, synthetic construct
  source 1..10: note = Seed: VLWAHGFELT
VMWAHGFELY

SEQ ID NO: 70597 - protein, 9 aa, synthetic construct
  source 1..9: note = Seed: VLWAHGFEL
VMWAHGFEM

SEQ ID NO: 70598 - protein, 9 aa, synthetic construct
  source 1..9: note = Seed: VLWAHGFEL
VMWAHGFER

SEQ ID NO: 70599 - protein, 9 aa, synthetic construct
  source 1..9: note = Seed: VLWAHGFEL
VMWAHGFES

SEQ ID NO: 70600 - protein, 9 aa, synthetic construct
  source 1..9: note = Seed: VLWAHGFEL
VMWAHGFET

SEQ ID NO: 70601 - protein, 9 aa, synthetic construct
  source 1..9: note = Seed: VLWAHGFEL
VMWAHGFEV

SEQ ID NO: 70602 - protein, 9 aa, synthetic construct
  source 1..9: note = Seed: VLWAHGFEL
VMWAHGFEW

SEQ ID NO: 70603 - protein, 9 aa, synthetic construct
  source 1..9: note = Seed: VLWAHGFEL
VMWAHGFEY

SEQ ID NO: 70604 - protein, 9 aa, synthetic construct
  source 1..9: note = Seed: VPWDTIANY
VMWDTIANY

SEQ ID NO: 70605 - protein, 8 aa, synthetic construct
  source 1..8: note = Seed: VMYASAVV
VMYASAVF

SEQ ID NO: 70606 - protein, 8 aa, synthetic construct
  source 1..8: note = Seed: VMYASAVV
VMYASAVM

SEQ ID NO: 70607 - protein, 9 aa, synthetic construct
  source 1..9: note = Seed: VMYASAVVL
VMYASAVVA

SEQ ID NO: 70608 - protein, 9 aa, synthetic construct
  source 1..9: note = Seed: VMYASAVVL
VMYASAVVF

SEQ ID NO: 70609 - protein, 9 aa, synthetic construct
  source 1..9: note = Seed: VMYASAVVL
VMYASAVVG

SEQ ID NO: 70610 - protein, 9 aa, synthetic construct
  source 1..9: note = Seed: VMYASAVVL
VMYASAVVH

SEQ ID NO: 70611 - protein, 9 aa, synthetic construct
  source 1..9: note = Seed: VMYASAVVL
VMYASAVVI

SEQ ID NO: 70612 - protein, 10 aa, synthetic construct
  source 1..10: note = Seed: VMYASAVVLL
VMYASAVVLA

SEQ ID NO: 70613 - protein, 10 aa, synthetic construct
  source 1..10: note = Seed: VMYASAVVLL
VMYASAVVLF

SEQ ID NO: 70614 - protein, 10 aa, synthetic construct
  source 1..10: note = Seed: VMYASAVVLL
VMYASAVVLI

SEQ ID NO: 70615 - protein, 11 aa, synthetic construct
  source 1..11: note = Seed: VMYASAVVLLI
VMYASAVVLLF

SEQ ID NO: 70616 - protein, 11 aa, synthetic construct
  source 1..11: note = Seed: VMYASAVVLLI
VMYASAVVLLV

SEQ ID NO: 70617 - protein, 10 aa, synthetic construct
  source 1..10: note = Seed: VMYASAVVLL
VMYASAVVLM

SEQ ID NO: 70618 - protein, 10 aa, synthetic construct
  source 1..10: note = Seed: VMYASAVVLL
VMYASAVVLV

SEQ ID NO: 70619 - protein, 10 aa, synthetic construct
  source 1..10: note = Seed: VMYASAVVLL
VMYASAVVLW

SEQ ID NO: 70620 - protein, 10 aa, synthetic construct
  source 1..10: note = Seed: VMYASAVVLL
VMYASAVVLY

SEQ ID NO: 70621 - protein, 9 aa, synthetic construct
  source 1..9: note = Seed: VMYASAVVL
VMYASAVVM

SEQ ID NO: 70622 - protein, 9 aa, synthetic construct
  source 1..9: note = Seed: VMYASAVVL
VMYASAVVV

SEQ ID NO: 70623 - protein, 9 aa, synthetic construct
  source 1..9: note = Seed: VMYASAVVL
VMYASAVVW

SEQ ID NO: 70624 - protein, 9 aa, synthetic construct
  source 1..9: note = Seed: VMYASAVVL
VMYASAVVY

SEQ ID NO: 70625 - protein, 8 aa, synthetic construct
  source 1..8: note = Seed: VMYASAVV
VMYASAVY

SEQ ID NO: 70626 - protein, 10 aa, synthetic construct
  source 1..10: note = Seed: VPYCYDTNVL
VMYCYDTNVF

SEQ ID NO: 70627 - protein, 9 aa, synthetic construct
  source 1..9: note = Seed: VLYENQKLI
VMYENQKLA

SEQ ID NO: 70628 - protein, 9 aa, synthetic construct
  source 1..9: note = Seed: VLYENQKLI
VMYENQKLI

SEQ ID NO: 70629 - protein, 9 aa, synthetic construct
  source 1..9: note = Seed: VLYENQKLI
VMYENQKLL

SEQ ID NO: 70630 - protein, 9 aa, synthetic construct
  source 1..9: note = Seed: VLYENQKLI
VMYENQKLV

SEQ ID NO: 70631 - protein, 8 aa, synthetic construct
  source 1..8: note = Seed: VAYFNMVY
VMYFNMVF

SEQ ID NO: 70632 - protein, 8 aa, synthetic construct
  source 1..8: note = Seed: VAYFNMVY
VMYFNMVM

SEQ ID NO: 70633 - protein, 8 aa, synthetic construct
  source 1..8: note = Seed: VAYFNMVY
VMYFNMVY

SEQ ID NO: 70634 - protein, 9 aa, synthetic construct
  source 1..9: note = Seed: VAYFNMVYM
VMYFNMVYF

SEQ ID NO: 70635 - protein, 9 aa, synthetic construct
  source 1..9: note = Seed: VAYFNMVYM
VMYFNMVYM

SEQ ID NO: 70636 - protein, 9 aa, synthetic construct
  source 1..9: note = Seed: VAYFNMVYM
VMYFNMVYY

SEQ ID NO: 70637 - protein, 9 aa, synthetic construct
  source 1..9: note = Seed: VTYKLDGVV
VMYKLDGVW

SEQ ID NO: 70638 - protein, 9 aa, synthetic construct
  source 1..9: note = Seed: VGYLQPRTF
VMYLQPRTF

SEQ ID NO: 70639 - protein, 10 aa, synthetic construct
  source 1..10: note = Seed: VGYLQPRTFL
VMYLQPRTFF

SEQ ID NO: 70640 - protein, 11 aa, synthetic construct
  source 1..11: note = Seed: VGYLQPRTFLL
VMYLQPRTFLI

SEQ ID NO: 70641 - protein, 11 aa, synthetic construct
  source 1..11: note = Seed: VGYLQPRTFLL
VMYLQPRTFLL

SEQ ID NO: 70642 - protein, 11 aa, synthetic construct
  source 1..11: note = Seed: VGYLQPRTFLL
VMYLQPRTFLV

SEQ ID NO: 70643 - protein, 10 aa, synthetic construct
  source 1..10: note = Seed: VGYLQPRTFL
VMYLQPRTFW

SEQ ID NO: 70644 - protein, 9 aa, synthetic construct
  source 1..9: note = Seed: VGYLQPRTF
VMYLQPRTL

SEQ ID NO: 70645 - protein, 9 aa, synthetic construct
  source 1..9: note = Seed: VGYLQPRTF
VMYLQPRTM

SEQ ID NO: 70646 - protein, 9 aa, synthetic construct
  source 1..9: note = Seed: VGYLQPRTF
VMYLQPRTW

SEQ ID NO: 70647 - protein, 9 aa, synthetic construct
  source 1..9: note = Seed: VGYLQPRTF
VMYLQPRTY

SEQ ID NO: 70648 - protein, 10 aa, synthetic construct
  source 1..10: note = Seed: VLYQPPQTSI
VMYQPPQTSF

SEQ ID NO: 70649 - protein, 10 aa, synthetic construct
  source 1..10: note = Seed: VLYQPPQTSI
VMYQPPQTSM

SEQ ID NO: 70650 - protein, 10 aa, synthetic construct
  source 1..10: note = Seed: VLYQPPQTSI
VMYQPPQTSV

SEQ ID NO: 70651 - protein, 10 aa, synthetic construct
  source 1..10: note = Seed: VLYQPPQTSI
VMYQPPQTSW

SEQ ID NO: 70652 - protein, 10 aa, synthetic construct
  source 1..10: note = Seed: VGYQPYRVVV
VMYQPYRVVF

SEQ ID NO: 70653 - protein, 10 aa, synthetic construct
  source 1..10: note = Seed: VGYQPYRVVV
VMYQPYRVVI

SEQ ID NO: 70654 - protein, 10 aa, synthetic construct
  source 1..10: note = Seed: VGYQPYRVVV
VMYQPYRVVL

SEQ ID NO: 70655 - protein, 10 aa, synthetic construct
  source 1..10: note = Seed: VGYQPYRVVV
VMYQPYRVVM

SEQ ID NO: 70656 - protein, 10 aa, synthetic construct
  source 1..10: note = Seed: VGYQPYRVVV
VMYQPYRVVW

SEQ ID NO: 70657 - protein, 10 aa, synthetic construct
  source 1..10: note = Seed: VGYQPYRVVV
VMYQPYRVVY

SEQ ID NO: 70658 - protein, 9 aa, synthetic construct
  source 1..9: note = Seed: VVYRGTTTY
VMYRGTTTA

SEQ ID NO: 70659 - protein, 9 aa, synthetic construct
  source 1..9: note = Seed: VVYRGTTTY
VMYRGTTTF

SEQ ID NO: 70660 - protein, 9 aa, synthetic construct
  source 1..9: note = Seed: VVYRGTTTY
VMYRGTTTH

SEQ ID NO: 70661 - protein, 9 aa, synthetic construct
  source 1..9: note = Seed: VVYRGTTTY
VMYRGTTTI

SEQ ID NO: 70662 - protein, 9 aa, synthetic construct
  source 1..9: note = Seed: VVYRGTTTY
VMYRGTTTK

SEQ ID NO: 70663 - protein, 9 aa, synthetic construct
  source 1..9: note = Seed: VVYRGTTTY
VMYRGTTTL

SEQ ID NO: 70664 - protein, 9 aa, synthetic construct
  source 1..9: note = Seed: VVYRGTTTY
VMYRGTTTM

SEQ ID NO: 70665 - protein, 9 aa, synthetic construct
  source 1..9: note = Seed: VVYRGTTTY
VMYRGTTTR

SEQ ID NO: 70666 - protein, 9 aa, synthetic construct
  source 1..9: note = Seed: VVYRGTTTY
VMYRGTTTV

SEQ ID NO: 70667 - protein, 9 aa, synthetic construct
  source 1..9: note = Seed: VVYRGTTTY
VMYRGTTTW

SEQ ID NO: 70668 - protein, 9 aa, synthetic construct
  source 1..9: note = Seed: VVYRGTTTY
VMYRGTTTY

SEQ ID NO: 70669 - protein, 10 aa, synthetic construct
  source 1..10: note = Seed: VVYRGTTTYK
VMYRGTTTYA

SEQ ID NO: 70670 - protein, 10 aa, synthetic construct
  source 1..10: note = Seed: VVYRGTTTYK
VMYRGTTTYC

SEQ ID NO: 70671 - protein, 10 aa, synthetic construct
  source 1..10: note = Seed: VVYRGTTTYK
VMYRGTTTYD

SEQ ID NO: 70672 - protein, 10 aa, synthetic construct
  source 1..10: note = Seed: VVYRGTTTYK
VMYRGTTTYE

SEQ ID NO: 70673 - protein, 10 aa, synthetic construct
  source 1..10: note = Seed: VVYRGTTTYK
VMYRGTTTYF

SEQ ID NO: 70674 - protein, 10 aa, synthetic construct
  source 1..10: note = Seed: VVYRGTTTYK
VMYRGTTTYG

SEQ ID NO: 70675 - protein, 10 aa, synthetic construct
  source 1..10: note = Seed: VVYRGTTTYK
VMYRGTTTYH

SEQ ID NO: 70676 - protein, 10 aa, synthetic construct
  source 1..10: note = Seed: VVYRGTTTYK
VMYRGTTTYI

SEQ ID NO: 70677 - protein, 10 aa, synthetic construct
  source 1..10: note = Seed: VVYRGTTTYK
VMYRGTTTYK

SEQ ID NO: 70678 - protein, 11 aa, synthetic construct
  source 1..11: note = Seed: VVYRGTTTYKL
VMYRGTTTYKK

SEQ ID NO: 70679 - protein, 10 aa, synthetic construct
  source 1..10: note = Seed: VVYRGTTTYK
VMYRGTTTYL

SEQ ID NO: 70680 - protein, 10 aa, synthetic construct
  source 1..10: note = Seed: VVYRGTTTYK
VMYRGTTTYM

SEQ ID NO: 70681 - protein, 10 aa, synthetic construct
  source 1..10: note = Seed: VVYRGTTTYK
VMYRGTTTYN

SEQ ID NO: 70682 - protein, 10 aa, synthetic construct
  source 1..10: note = Seed: VVYRGTTTYK
VMYRGTTTYP

SEQ ID NO: 70683 - protein, 10 aa, synthetic construct
  source 1..10: note = Seed: VVYRGTTTYK
VMYRGTTTYQ

SEQ ID NO: 70684 - protein, 10 aa, synthetic construct
  source 1..10: note = Seed: VVYRGTTTYK
VMYRGTTTYR

SEQ ID NO: 70685 - protein, 10 aa, synthetic construct
  source 1..10: note = Seed: VVYRGTTTYK
VMYRGTTTYS

SEQ ID NO: 70686 - protein, 10 aa, synthetic construct
  source 1..10: note = Seed: VVYRGTTTYK
VMYRGTTTYT

SEQ ID NO: 70687 - protein, 10 aa, synthetic construct
  source 1..10: note = Seed: VVYRGTTTYK
VMYRGTTTYV

SEQ ID NO: 70688 - protein, 10 aa, synthetic construct
  source 1..10: note = Seed: VVYRGTTTYK
VMYRGTTTYW

SEQ ID NO: 70689 - protein, 10 aa, synthetic construct
  source 1..10: note = Seed: VVYRGTTTYK
VMYRGTTTYY

SEQ ID NO: 70690 - protein, 9 aa, synthetic construct
  source 1..9: note = Seed: VYYTSNPTT
VMYTSNPTM

SEQ ID NO: 70691 - protein, 10 aa, synthetic construct
  source 1..10: note = Seed: VYYTSNPTTF
VMYTSNPTTF

SEQ ID NO: 70692 - protein, 11 aa, synthetic construct
  source 1..11: note = Seed: VYYTSNPTTFH
VMYTSNPTTFF

SEQ ID NO: 70693 - protein, 10 aa, synthetic construct
  source 1..10: note = Seed: VYYTSNPTTF
VMYTSNPTTM

SEQ ID NO: 70694 - protein, 10 aa, synthetic construct
  source 1..10: note = Seed: VYYTSNPTTF
VMYTSNPTTY

SEQ ID NO: 70695 - protein, 9 aa, synthetic construct
  source 1..9: note = Seed: VLYYQNNVF
VMYYQNNVF

SEQ ID NO: 70696 - protein, 10 aa, synthetic construct
  source 1..10: note = Seed: VLYYQNNVFM
VMYYQNNVFF

SEQ ID NO: 70697 - protein, 10 aa, synthetic construct
  source 1..10: note = Seed: VLYYQNNVFM
VMYYQNNVFI

SEQ ID NO: 70698 - protein, 10 aa, synthetic construct
  source 1..10: note = Seed: VLYYQNNVFM
VMYYQNNVFL

SEQ ID NO: 70699 - protein, 10 aa, synthetic construct
  source 1..10: note = Seed: VLYYQNNVFM
VMYYQNNVFM

SEQ ID NO: 70700 - protein, 10 aa, synthetic construct
  source 1..10: note = Seed: VLYYQNNVFM
VMYYQNNVFV

SEQ ID NO: 70701 - protein, 10 aa, synthetic construct
  source 1..10: note = Seed: VLYYQNNVFM
VMYYQNNVFW

SEQ ID NO: 70702 - protein, 10 aa, synthetic construct
  source 1..10: note = Seed: VLYYQNNVFM
VMYYQNNVFY

SEQ ID NO: 70703 - protein, 9 aa, synthetic construct
  source 1..9: note = Seed: VLYYQNNVF
VMYYQNNVI

SEQ ID NO: 70704 - protein, 9 aa, synthetic construct
  source 1..9: note = Seed: VLYYQNNVF
VMYYQNNVL

SEQ ID NO: 70705 - protein, 9 aa, synthetic construct
  source 1..9: note = Seed: VLYYQNNVF
VMYYQNNVM

SEQ ID NO: 70706 - protein, 9 aa, synthetic construct
  source 1..9: note = Seed: VLYYQNNVF
VMYYQNNVW

SEQ ID NO: 70707 - protein, 9 aa, synthetic construct
  source 1..9: note = Seed: VLYYQNNVF
VMYYQNNVY

SEQ ID NO: 70708 - protein, 10 aa, synthetic construct
  source 1..10: note = Seed: VLAAECTIFK
VNAAECTIFR

SEQ ID NO: 70709 - protein, 9 aa, synthetic construct
  source 1..9: note = Seed: VTANVNALL
VNANVNALW

SEQ ID NO: 70710 - protein, 11 aa, synthetic construct
  source 1..11: note = Seed: VYDYLVSTQEF
VNDYLVSTQEF

SEQ ID NO: 70711 - protein, 11 aa, synthetic construct
  source 1..11: note = Seed: VYDYLVSTQEF
VNDYLVSTQEW

SEQ ID NO: 70712 - protein, 10 aa, synthetic construct
  source 1..10: note = Seed: VAEWFLAYIL
VNEWFLAYIY

SEQ ID NO: 70713 - protein, 11 aa, synthetic construct
  source 1..11: note = Seed: VSFLAHIQWMV
VNFLAHIQWMV

SEQ ID NO: 70714 - protein, 10 aa, synthetic construct
  source 1..10: note = Seed: VEFLRDGWEI
VNFLRDGWEF

SEQ ID NO: 70715 - protein, 11 aa, synthetic construct
  source 1..11: note = Seed: VLHSYFTSDYY
VNHSYFTSDYW

SEQ ID NO: 70716 - protein, 9 aa, synthetic construct
  source 1..9: note = Seed: VTIAEILLI
VNIAEILLW

SEQ ID NO: 70717 - protein, 9 aa, synthetic construct
  source 1..9: note = Seed: VVKRHTFSN
VNKRHTFSK

SEQ ID NO: 70718 - protein, 11 aa, synthetic construct
  source 1..11: note = Seed: VAKYTQLCQYL
VNKYTQLCQYF

SEQ ID NO: 70719 - protein, 10 aa, synthetic construct
  source 1..10: note = Seed: VELFENKTTL
VNLFENKTTV

SEQ ID NO: 70720 - protein, 10 aa, synthetic construct
  source 1..10: note = Seed: VQLHNDILLA
VNLHNDILLV

SEQ ID NO: 70721 - protein, 10 aa, synthetic construct
  source 1..10: note = Seed: VNLHSSRLSF
VNLHSSRLSY

SEQ ID NO: 70722 - protein, 10 aa, synthetic construct
  source 1..10: note = Seed: VVLLSVLQQL
VNLLSVLQQI

SEQ ID NO: 70723 - protein, 10 aa, synthetic construct
  source 1..10: note = Seed: VVLLSVLQQL
VNLLSVLQQL

SEQ ID NO: 70724 - protein, 10 aa, synthetic construct
  source 1..10: note = Seed: VVLLSVLQQL
VNLLSVLQQV

SEQ ID NO: 70725 - protein, 10 aa, synthetic construct
  source 1..10: note = Seed: VGLMWLSYFI
VNLMWLSYFA

SEQ ID NO: 70726 - protein, 10 aa, synthetic construct
  source 1..10: note = Seed: VGLMWLSYFI
VNLMWLSYFI

SEQ ID NO: 70727 - protein, 10 aa, synthetic construct
  source 1..10: note = Seed: VGLMWLSYFI
VNLMWLSYFL

SEQ ID NO: 70728 - protein, 10 aa, synthetic construct
  source 1..10: note = Seed: VGLMWLSYFI
VNLMWLSYFM

SEQ ID NO: 70729 - protein, 10 aa, synthetic construct
  source 1..10: note = Seed: VGLMWLSYFI
VNLMWLSYFV

SEQ ID NO: 70730 - protein, 9 aa, synthetic construct
  source 1..9: note = Seed: VVLSFELLH
VNLSFELLY

SEQ ID NO: 70731 - protein, 10 aa, synthetic construct
  source 1..10: note = Seed: VELVAELEGI
VNLVAELEGV

SEQ ID NO: 70732 - protein, 10 aa, synthetic construct
  source 1..10: note = Seed: VVMAYITGGV
VNMAYITGGI

SEQ ID NO: 70733 - protein, 10 aa, synthetic construct
  source 1..10: note = Seed: VVMAYITGGV
VNMAYITGGL

SEQ ID NO: 70734 - protein, 10 aa, synthetic construct
  source 1..10: note = Seed: VVMAYITGGV
VNMAYITGGV

SEQ ID NO: 70735 - protein, 10 aa, synthetic construct
  source 1..10: note = Seed: VRMYIFFASF
VNMYIFFASF

SEQ ID NO: 70736 - protein, 10 aa, synthetic construct
  source 1..10: note = Seed: VRMYIFFASF
VNMYIFFASY

SEQ ID NO: 70737 - protein, 10 aa, synthetic construct
  source 1..10: note = Seed: VLPFNDGVYF
VNPFNDGVYW

SEQ ID NO: 70738 - protein, 10 aa, synthetic construct
  source 1..10: note = Seed: VLPFNDGVYF
VNPFNDGVYY

SEQ ID NO: 70739 - protein, 10 aa, synthetic construct
  source 1..10: note = Seed: VLQLPQGTTL
VNQLPQGTTF

SEQ ID NO: 70740 - protein, 10 aa, synthetic construct
  source 1..10: note = Seed: VLQLPQGTTL
VNQLPQGTTM

SEQ ID NO: 70741 - protein, 10 aa, synthetic construct
  source 1..10: note = Seed: VLQLPQGTTL
VNQLPQGTTY

SEQ ID NO: 70742 - protein, 9 aa, synthetic construct
  source 1..9: note = Seed: VYRGTTTYK
VNRGTTTYK

SEQ ID NO: 70743 - protein, 11 aa, synthetic construct
  source 1..11: note = Seed: VKRTIKGTHHW
VNRTIKGTHHW

SEQ ID NO: 70744 - protein, 10 aa, synthetic construct
  source 1..10: note = Seed: VTSAMQTMLF
VNSAMQTMLF

SEQ ID NO: 70745 - protein, 10 aa, synthetic construct
  source 1..10: note = Seed: VTSAMQTMLF
VNSAMQTMLW

SEQ ID NO: 70746 - protein, 10 aa, synthetic construct
  source 1..10: note = Seed: VTSAMQTMLF
VNSAMQTMLY

SEQ ID NO: 70747 - protein, 11 aa, synthetic construct
  source 1..11: note = Seed: VYSFLPGVYSV
VNSFLPGVYSF

SEQ ID NO: 70748 - protein, 10 aa, synthetic construct
  source 1..10: note = Seed: VNSFSGYLKL
VNSFSGYLKF

SEQ ID NO: 70749 - protein, 10 aa, synthetic construct
  source 1..10: note = Seed: VNSFSGYLKL
VNSFSGYLKM

SEQ ID NO: 70750 - protein, 10 aa, synthetic construct
  source 1..10: note = Seed: VNSFSGYLKL
VNSFSGYLKW

SEQ ID NO: 70751 - protein, 10 aa, synthetic construct
  source 1..10: note = Seed: VNSFSGYLKL
VNSFSGYLKY

SEQ ID NO: 70752 - protein, 10 aa, synthetic construct
  source 1..10: note = Seed: VYSSANNCTF
VNSSANNCTW

SEQ ID NO: 70753 - protein, 10 aa, synthetic construct
  source 1..10: note = Seed: VVSTGYHFRE
VNSTGYHFRR

SEQ ID NO: 70754 - protein, 11 aa, synthetic construct
  source 1..11: note = Seed: VDSYYSLLMPI
VNSYYSLLMPF

SEQ ID NO: 70755 - protein, 10 aa, synthetic construct
  source 1..10: note = Seed: VRTIKVFTTV
VNTIKVFTTV

SEQ ID NO: 70756 - protein, 10 aa, synthetic construct
  source 1..10: note = Seed: VNVLAWLYAA
VNVLAWLYAI

SEQ ID NO: 70757 - protein, 10 aa, synthetic construct
  source 1..10: note = Seed: VNVLAWLYAA
VNVLAWLYAL

SEQ ID NO: 70758 - protein, 10 aa, synthetic construct
  source 1..10: note = Seed: VNVLAWLYAA
VNVLAWLYAV

SEQ ID NO: 70759 - protein, 11 aa, synthetic construct
  source 1..11: note = Seed: VFVLWAHGFEL
VNVLWAHGFEI

SEQ ID NO: 70760 - protein, 11 aa, synthetic construct
  source 1..11: note = Seed: VFVLWAHGFEL
VNVLWAHGFEL

SEQ ID NO: 70761 - protein, 11 aa, synthetic construct
  source 1..11: note = Seed: VFVLWAHGFEL
VNVLWAHGFEV

SEQ ID NO: 70762 - protein, 9 aa, synthetic construct
  source 1..9: note = Seed: VQVTCGTTT
VNVTCGTTF

SEQ ID NO: 70763 - protein, 9 aa, synthetic construct
  source 1..9: note = Seed: VLWAHGFEL
VNWAHGFEF

SEQ ID NO: 70764 - protein, 9 aa, synthetic construct
  source 1..9: note = Seed: VLWAHGFEL
VNWAHGFEY

SEQ ID NO: 70765 - protein, 9 aa, synthetic construct
  source 1..9: note = Seed: VMYASAVVL
VNYASAVVF

SEQ ID NO: 70766 - protein, 10 aa, synthetic construct
  source 1..10: note = Seed: VMYASAVVLL
VNYASAVVLF

SEQ ID NO: 70767 - protein, 10 aa, synthetic construct
  source 1..10: note = Seed: VMYASAVVLL
VNYASAVVLI

SEQ ID NO: 70768 - protein, 10 aa, synthetic construct
  source 1..10: note = Seed: VMYASAVVLL
VNYASAVVLL

SEQ ID NO: 70769 - protein, 10 aa, synthetic construct
  source 1..10: note = Seed: VMYASAVVLL
VNYASAVVLM

SEQ ID NO: 70770 - protein, 10 aa, synthetic construct
  source 1..10: note = Seed: VMYASAVVLL
VNYASAVVLW

SEQ ID NO: 70771 - protein, 9 aa, synthetic construct
  source 1..9: note = Seed: VMYASAVVL
VNYASAVVM

SEQ ID NO: 70772 - protein, 9 aa, synthetic construct
  source 1..9: note = Seed: VMYASAVVL
VNYASAVVY

SEQ ID NO: 70773 - protein, 10 aa, synthetic construct
  source 1..10: note = Seed: VPYCYDTNVL
VNYCYDTNVF

SEQ ID NO: 70774 - protein, 10 aa, synthetic construct
  source 1..10: note = Seed: VGYLQPRTFL
VNYLQPRTFF

SEQ ID NO: 70775 - protein, 11 aa, synthetic construct
  source 1..11: note = Seed: VGYLQPRTFLL
VNYLQPRTFLV

SEQ ID NO: 70776 - protein, 10 aa, synthetic construct
  source 1..10: note = Seed: VLYQPPQTSI
VNYQPPQTSF

SEQ ID NO: 70777 - protein, 10 aa, synthetic construct
  source 1..10: note = Seed: VLYQPPQTSI
VNYQPPQTSM

SEQ ID NO: 70778 - protein, 10 aa, synthetic construct
  source 1..10: note = Seed: VLYQPPQTSI
VNYQPPQTSW

SEQ ID NO: 70779 - protein, 10 aa, synthetic construct
  source 1..10: note = Seed: VGYQPYRVVV
VNYQPYRVVF

SEQ ID NO: 70780 - protein, 10 aa, synthetic construct
  source 1..10: note = Seed: VGYQPYRVVV
VNYQPYRVVI

SEQ ID NO: 70781 - protein, 10 aa, synthetic construct
  source 1..10: note = Seed: VGYQPYRVVV
VNYQPYRVVL

SEQ ID NO: 70782 - protein, 10 aa, synthetic construct
  source 1..10: note = Seed: VGYQPYRVVV
VNYQPYRVVM

SEQ ID NO: 70783 - protein, 10 aa, synthetic construct
  source 1..10: note = Seed: VGYQPYRVVV
VNYQPYRVVW

SEQ ID NO: 70784 - protein, 10 aa, synthetic construct
  source 1..10: note = Seed: VGYQPYRVVV
VNYQPYRVVY

SEQ ID NO: 70785 - protein, 9 aa, synthetic construct
  source 1..9: note = Seed: VVYRGTTTY
VNYRGTTTF

SEQ ID NO: 70786 - protein, 9 aa, synthetic construct
  source 1..9: note = Seed: VVYRGTTTY
VNYRGTTTM

SEQ ID NO: 70787 - protein, 9 aa, synthetic construct
  source 1..9: note = Seed: VVYRGTTTY
VNYRGTTTY

SEQ ID NO: 70788 - protein, 10 aa, synthetic construct
  source 1..10: note = Seed: VVYRGTTTYK
VNYRGTTTYR

SEQ ID NO: 70789 - protein, 10 aa, synthetic construct
  source 1..10: note = Seed: VYYTSNPTTF
VNYTSNPTTF

SEQ ID NO: 70790 - protein, 9 aa, synthetic construct
  source 1..9: note = Seed: VLYYQNNVF
VNYYQNNVF

SEQ ID NO: 70791 - protein, 10 aa, synthetic construct
  source 1..10: note = Seed: VLYYQNNVFM
VNYYQNNVFF

SEQ ID NO: 70792 - protein, 10 aa, synthetic construct
  source 1..10: note = Seed: VLYYQNNVFM
VNYYQNNVFI

SEQ ID NO: 70793 - protein, 10 aa, synthetic construct
  source 1..10: note = Seed: VLYYQNNVFM
VNYYQNNVFL

SEQ ID NO: 70794 - protein, 10 aa, synthetic construct
  source 1..10: note = Seed: VLYYQNNVFM
VNYYQNNVFW

SEQ ID NO: 70795 - protein, 9 aa, synthetic construct
  source 1..9: note = Seed: VLYYQNNVF
VNYYQNNVY

SEQ ID NO: 70796 - protein, 10 aa, synthetic construct
  source 1..10: note = Seed: VLAAECTIFK
VPAAECTIFR

SEQ ID NO: 70797 - protein, 9 aa, synthetic construct
  source 1..9: note = Seed: VLARKHTTC
VPARKHTTL

SEQ ID NO: 70798 - protein, 9 aa, synthetic construct
  source 1..9: note = Seed: VLARKHTTC
VPARKHTTM

SEQ ID NO: 70799 - protein, 11 aa, synthetic construct
  source 1..11: note = Seed: VYDYLVSTQEF
VPDYLVSTQEF

SEQ ID NO: 70800 - protein, 11 aa, synthetic construct
  source 1..11: note = Seed: VYDYLVSTQEF
VPDYLVSTQEW

SEQ ID NO: 70801 - protein, 11 aa, synthetic construct
  source 1..11: note = Seed: VSFLAHIQWMV
VPFLAHIQWMV

SEQ ID NO: 70802 - protein, 10 aa, synthetic construct
  source 1..10: note = Seed: VEFLRDGWEI
VPFLRDGWEF

SEQ ID NO: 70803 - protein, 9 aa, synthetic construct
  source 1..9: note = Seed: VPFVVSTGY
VPFVVSTGF

SEQ ID NO: 70804 - protein, 9 aa, synthetic construct
  source 1..9: note = Seed: VPFVVSTGY
VPFVVSTGM

SEQ ID NO: 70805 - protein, 9 aa, synthetic construct
  source 1..9: note = Seed: VPFVVSTGY
VPFVVSTGW

SEQ ID NO: 70806 - protein, 10 aa, synthetic construct
  source 1..10: note = Seed: VAGDSGFAAY
VPGDSGFAAY

SEQ ID NO: 70807 - protein, 9 aa, synthetic construct
  source 1..9: note = Seed: VPHISRQRL
VPHISRQRI

SEQ ID NO: 70808 - protein, 9 aa, synthetic construct
  source 1..9: note = Seed: VPHISRQRL
VPHISRQRM

SEQ ID NO: 70809 - protein, 9 aa, synthetic construct
  source 1..9: note = Seed: VPHISRQRL
VPHISRQRV

SEQ ID NO: 70810 - protein, 11 aa, synthetic construct
  source 1..11: note = Seed: VLHSYFTSDYY
VPHSYFTSDYW

SEQ ID NO: 70811 - protein, 9 aa, synthetic construct
  source 1..9: note = Seed: VSIINNTVY
VPIINNTVF

SEQ ID NO: 70812 - protein, 9 aa, synthetic construct
  source 1..9: note = Seed: VSIINNTVY
VPIINNTVM

SEQ ID NO: 70813 - protein, 9 aa, synthetic construct
  source 1..9: note = Seed: VSIINNTVY
VPIINNTVY

SEQ ID NO: 70814 - protein, 10 aa, synthetic construct
  source 1..10: note = Seed: VAIKITEHSW
VPIKITEHSW

SEQ ID NO: 70815 - protein, 9 aa, synthetic construct
  source 1..9: note = Seed: VVIPDYNTY
VPIPDYNTF

SEQ ID NO: 70816 - protein, 9 aa, synthetic construct
  source 1..9: note = Seed: VVIPDYNTY
VPIPDYNTL

SEQ ID NO: 70817 - protein, 9 aa, synthetic construct
  source 1..9: note = Seed: VVIPDYNTY
VPIPDYNTM

SEQ ID NO: 70818 - protein, 9 aa, synthetic construct
  source 1..9: note = Seed: VVIPDYNTY
VPIPDYNTY

SEQ ID NO: 70819 - protein, 11 aa, synthetic construct
  source 1..11: note = Seed: VAKYTQLCQYL
VPKYTQLCQYF

SEQ ID NO: 70820 - protein, 10 aa, synthetic construct
  source 1..10: note = Seed: VELFENKTTL
VPLFENKTTV

SEQ ID NO: 70821 - protein, 10 aa, synthetic construct
  source 1..10: note = Seed: VQLHNDILLA
VPLHNDILLV

SEQ ID NO: 70822 - protein, 10 aa, synthetic construct
  source 1..10: note = Seed: VNLHSSRLSF
VPLHSSRLSF

SEQ ID NO: 70823 - protein, 10 aa, synthetic construct
  source 1..10: note = Seed: VNLHSSRLSF
VPLHSSRLSY

SEQ ID NO: 70824 - protein, 9 aa, synthetic construct
  source 1..9: note = Seed: VPLKSATCI
VPLKSATCL

SEQ ID NO: 70825 - protein, 10 aa, synthetic construct
  source 1..10: note = Seed: VVLLSVLQQL
VPLLSVLQQI

SEQ ID NO: 70826 - protein, 10 aa, synthetic construct
  source 1..10: note = Seed: VVLLSVLQQL
VPLLSVLQQL

SEQ ID NO: 70827 - protein, 10 aa, synthetic construct
  source 1..10: note = Seed: VVLLSVLQQL
VPLLSVLQQV

SEQ ID NO: 70828 - protein, 10 aa, synthetic construct
  source 1..10: note = Seed: VGLMWLSYFI
VPLMWLSYFA

SEQ ID NO: 70829 - protein, 10 aa, synthetic construct
  source 1..10: note = Seed: VGLMWLSYFI
VPLMWLSYFI

SEQ ID NO: 70830 - protein, 10 aa, synthetic construct
  source 1..10: note = Seed: VGLMWLSYFI
VPLMWLSYFL

SEQ ID NO: 70831 - protein, 10 aa, synthetic construct
  source 1..10: note = Seed: VGLMWLSYFI
VPLMWLSYFM

SEQ ID NO: 70832 - protein, 10 aa, synthetic construct
  source 1..10: note = Seed: VGLMWLSYFI
VPLMWLSYFV

SEQ ID NO: 70833 - protein, 10 aa, synthetic construct
  source 1..10: note = Seed: VELVAELEGI
VPLVAELEGV

SEQ ID NO: 70834 - protein, 10 aa, synthetic construct
  source 1..10: note = Seed: VVMAYITGGV
VPMAYITGGI

SEQ ID NO: 70835 - protein, 10 aa, synthetic construct
  source 1..10: note = Seed: VVMAYITGGV
VPMAYITGGL

SEQ ID NO: 70836 - protein, 10 aa, synthetic construct
  source 1..10: note = Seed: VVMAYITGGV
VPMAYITGGV

SEQ ID NO: 70837 - protein, 9 aa, synthetic construct
  source 1..9: note = Seed: VPMEKLKTL
VPMEKLKTA

SEQ ID NO: 70838 - protein, 9 aa, synthetic construct
  source 1..9: note = Seed: VPMEKLKTL
VPMEKLKTF

SEQ ID NO: 70839 - protein, 9 aa, synthetic construct
  source 1..9: note = Seed: VPMEKLKTL
VPMEKLKTI

SEQ ID NO: 70840 - protein, 9 aa, synthetic construct
  source 1..9: note = Seed: VPMEKLKTL
VPMEKLKTM

SEQ ID NO: 70841 - protein, 9 aa, synthetic construct
  source 1..9: note = Seed: VPMEKLKTL
VPMEKLKTV

SEQ ID NO: 70842 - protein, 9 aa, synthetic construct
  source 1..9: note = Seed: VPMEKLKTL
VPMEKLKTY

SEQ ID NO: 70843 - protein, 10 aa, synthetic construct
  source 1..10: note = Seed: VRMYIFFASF
VPMYIFFASF

SEQ ID NO: 70844 - protein, 10 aa, synthetic construct
  source 1..10: note = Seed: VRMYIFFASF
VPMYIFFASY

SEQ ID NO: 70845 - protein, 10 aa, synthetic construct
  source 1..10: note = Seed: VLPFNDGVYF
VPPFNDGVYW

SEQ ID NO: 70846 - protein, 10 aa, synthetic construct
  source 1..10: note = Seed: VLPFNDGVYF
VPPFNDGVYY

SEQ ID NO: 70847 - protein, 10 aa, synthetic construct
  source 1..10: note = Seed: VLQLPQGTTL
VPQLPQGTTF

SEQ ID NO: 70848 - protein, 10 aa, synthetic construct
  source 1..10: note = Seed: VLQLPQGTTL
VPQLPQGTTM

SEQ ID NO: 70849 - protein, 10 aa, synthetic construct
  source 1..10: note = Seed: VLQLPQGTTL
VPQLPQGTTY

SEQ ID NO: 70850 - protein, 9 aa, synthetic construct
  source 1..9: note = Seed: VVQQLPETY
VPQQLPETM

SEQ ID NO: 70851 - protein, 9 aa, synthetic construct
  source 1..9: note = Seed: VVQQLPETY
VPQQLPETY

SEQ ID NO: 70852 - protein, 9 aa, synthetic construct
  source 1..9: note = Seed: VARDLSLQF
VPRDLSLQF

SEQ ID NO: 70853 - protein, 9 aa, synthetic construct
  source 1..9: note = Seed: VARDLSLQF
VPRDLSLQM

SEQ ID NO: 70854 - protein, 9 aa, synthetic construct
  source 1..9: note = Seed: VARDLSLQF
VPRDLSLQY

SEQ ID NO: 70855 - protein, 11 aa, synthetic construct
  source 1..11: note = Seed: VKRTIKGTHHW
VPRTIKGTHHW

SEQ ID NO: 70856 - protein, 10 aa, synthetic construct
  source 1..10: note = Seed: VTSAMQTMLF
VPSAMQTMLF

SEQ ID NO: 70857 - protein, 10 aa, synthetic construct
  source 1..10: note = Seed: VTSAMQTMLF
VPSAMQTMLW

SEQ ID NO: 70858 - protein, 10 aa, synthetic construct
  source 1..10: note = Seed: VTSAMQTMLF
VPSAMQTMLY

SEQ ID NO: 70859 - protein, 11 aa, synthetic construct
  source 1..11: note = Seed: VYSFLPGVYSV
VPSFLPGVYSF

SEQ ID NO: 70860 - protein, 10 aa, synthetic construct
  source 1..10: note = Seed: VNSFSGYLKL
VPSFSGYLKF

SEQ ID NO: 70861 - protein, 10 aa, synthetic construct
  source 1..10: note = Seed: VNSFSGYLKL
VPSFSGYLKM

SEQ ID NO: 70862 - protein, 10 aa, synthetic construct
  source 1..10: note = Seed: VNSFSGYLKL
VPSFSGYLKW

SEQ ID NO: 70863 - protein, 10 aa, synthetic construct
  source 1..10: note = Seed: VNSFSGYLKL
VPSFSGYLKY

SEQ ID NO: 70864 - protein, 10 aa, synthetic construct
  source 1..10: note = Seed: VYSSANNCTF
VPSSANNCTW

SEQ ID NO: 70865 - protein, 11 aa, synthetic construct
  source 1..11: note = Seed: VDSYYSLLMPI
VPSYYSLLMPF

SEQ ID NO: 70866 - protein, 10 aa, synthetic construct
  source 1..10: note = Seed: VNVLAWLYAA
VPVLAWLYAI

SEQ ID NO: 70867 - protein, 10 aa, synthetic construct
  source 1..10: note = Seed: VNVLAWLYAA
VPVLAWLYAL

SEQ ID NO: 70868 - protein, 10 aa, synthetic construct
  source 1..10: note = Seed: VNVLAWLYAA
VPVLAWLYAV

SEQ ID NO: 70869 - protein, 11 aa, synthetic construct
  source 1..11: note = Seed: VFVLWAHGFEL
VPVLWAHGFEI

SEQ ID NO: 70870 - protein, 11 aa, synthetic construct
  source 1..11: note = Seed: VFVLWAHGFEL
VPVLWAHGFEL

SEQ ID NO: 70871 - protein, 11 aa, synthetic construct
  source 1..11: note = Seed: VFVLWAHGFEL
VPVLWAHGFEV

SEQ ID NO: 70872 - protein, 9 aa, synthetic construct
  source 1..9: note = Seed: VPWDTIANY
VPWDTIANF

SEQ ID NO: 70873 - protein, 9 aa, synthetic construct
  source 1..9: note = Seed: VPWDTIANY
VPWDTIANM

SEQ ID NO: 70874 - protein, 9 aa, synthetic construct
  source 1..9: note = Seed: VPWDTIANY
VPWDTIANW

SEQ ID NO: 70875 - protein, 9 aa, synthetic construct
  source 1..9: note = Seed: VMYASAVVL
VPYASAVVF

SEQ ID NO: 70876 - protein, 10 aa, synthetic construct
  source 1..10: note = Seed: VMYASAVVLL
VPYASAVVLF

SEQ ID NO: 70877 - protein, 10 aa, synthetic construct
  source 1..10: note = Seed: VMYASAVVLL
VPYASAVVLI

SEQ ID NO: 70878 - protein, 10 aa, synthetic construct
  source 1..10: note = Seed: VMYASAVVLL
VPYASAVVLL

SEQ ID NO: 70879 - protein, 10 aa, synthetic construct
  source 1..10: note = Seed: VMYASAVVLL
VPYASAVVLM

SEQ ID NO: 70880 - protein, 10 aa, synthetic construct
  source 1..10: note = Seed: VMYASAVVLL
VPYASAVVLW

SEQ ID NO: 70881 - protein, 9 aa, synthetic construct
  source 1..9: note = Seed: VMYASAVVL
VPYASAVVY

SEQ ID NO: 70882 - protein, 9 aa, synthetic construct
  source 1..9: note = Seed: VPYCYDTNV
VPYCYDTNA

SEQ ID NO: 70883 - protein, 9 aa, synthetic construct
  source 1..9: note = Seed: VPYCYDTNV
VPYCYDTNL

SEQ ID NO: 70884 - protein, 10 aa, synthetic construct
  source 1..10: note = Seed: VPYCYDTNVL
VPYCYDTNVF

SEQ ID NO: 70885 - protein, 10 aa, synthetic construct
  source 1..10: note = Seed: VPYCYDTNVL
VPYCYDTNVM

SEQ ID NO: 70886 - protein, 10 aa, synthetic construct
  source 1..10: note = Seed: VPYCYDTNVL
VPYCYDTNVY

SEQ ID NO: 70887 - protein, 9 aa, synthetic construct
  source 1..9: note = Seed: VAYFNMVYM
VPYFNMVYF

SEQ ID NO: 70888 - protein, 9 aa, synthetic construct
  source 1..9: note = Seed: VAYFNMVYM
VPYFNMVYM

SEQ ID NO: 70889 - protein, 9 aa, synthetic construct
  source 1..9: note = Seed: VAYFNMVYM
VPYFNMVYY

SEQ ID NO: 70890 - protein, 10 aa, synthetic construct
  source 1..10: note = Seed: VGYLQPRTFL
VPYLQPRTFF

SEQ ID NO: 70891 - protein, 11 aa, synthetic construct
  source 1..11: note = Seed: VGYLQPRTFLL
VPYLQPRTFLV

SEQ ID NO: 70892 - protein, 10 aa, synthetic construct
  source 1..10: note = Seed: VLYQPPQTSI
VPYQPPQTSF

SEQ ID NO: 70893 - protein, 10 aa, synthetic construct
  source 1..10: note = Seed: VLYQPPQTSI
VPYQPPQTSM

SEQ ID NO: 70894 - protein, 10 aa, synthetic construct
  source 1..10: note = Seed: VLYQPPQTSI
VPYQPPQTSW

SEQ ID NO: 70895 - protein, 10 aa, synthetic construct
  source 1..10: note = Seed: VGYQPYRVVV
VPYQPYRVVF

SEQ ID NO: 70896 - protein, 10 aa, synthetic construct
  source 1..10: note = Seed: VGYQPYRVVV
VPYQPYRVVI

SEQ ID NO: 70897 - protein, 10 aa, synthetic construct
  source 1..10: note = Seed: VGYQPYRVVV
VPYQPYRVVL

SEQ ID NO: 70898 - protein, 10 aa, synthetic construct
  source 1..10: note = Seed: VGYQPYRVVV
VPYQPYRVVM

SEQ ID NO: 70899 - protein, 10 aa, synthetic construct
  source 1..10: note = Seed: VGYQPYRVVV
VPYQPYRVVW

SEQ ID NO: 70900 - protein, 9 aa, synthetic construct
  source 1..9: note = Seed: VVYRGTTTY
VPYRGTTTF

SEQ ID NO: 70901 - protein, 9 aa, synthetic construct
  source 1..9: note = Seed: VVYRGTTTY
VPYRGTTTL

SEQ ID NO: 70902 - protein, 9 aa, synthetic construct
  source 1..9: note = Seed: VVYRGTTTY
VPYRGTTTM

SEQ ID NO: 70903 - protein, 9 aa, synthetic construct
  source 1..9: note = Seed: VVYRGTTTY
VPYRGTTTY

SEQ ID NO: 70904 - protein, 10 aa, synthetic construct
  source 1..10: note = Seed: VVYRGTTTYK
VPYRGTTTYR

SEQ ID NO: 70905 - protein, 10 aa, synthetic construct
  source 1..10: note = Seed: VYYTSNPTTF
VPYTSNPTTF

SEQ ID NO: 70906 - protein, 10 aa, synthetic construct
  source 1..10: note = Seed: VLYYQNNVFM
VPYYQNNVFF

SEQ ID NO: 70907 - protein, 10 aa, synthetic construct
  source 1..10: note = Seed: VLYYQNNVFM
VPYYQNNVFI

SEQ ID NO: 70908 - protein, 10 aa, synthetic construct
  source 1..10: note = Seed: VLYYQNNVFM
VPYYQNNVFL

SEQ ID NO: 70909 - protein, 10 aa, synthetic construct
  source 1..10: note = Seed: VLYYQNNVFM
VPYYQNNVFW

SEQ ID NO: 70910 - protein, 9 aa, synthetic construct
  source 1..9: note = Seed: VLAAECTIF
VQAAECTIF

SEQ ID NO: 70911 - protein, 10 aa, synthetic construct
  source 1..10: note = Seed: VLAAECTIFK
VQAAECTIFK

SEQ ID NO: 70912 - protein, 10 aa, synthetic construct
  source 1..10: note = Seed: VLAAECTIFK
VQAAECTIFR

SEQ ID NO: 70913 - protein, 9 aa, synthetic construct
  source 1..9: note = Seed: VLAAECTIF
VQAAECTIL

SEQ ID NO: 70914 - protein, 9 aa, synthetic construct
  source 1..9: note = Seed: VLAAECTIF
VQAAECTIM

SEQ ID NO: 70915 - protein, 9 aa, synthetic construct
  source 1..9: note = Seed: VLAAECTIF
VQAAECTIY

SEQ ID NO: 70916 - protein, 9 aa, synthetic construct
  source 1..9: note = Seed: VTANVNALL
VQANVNALI

SEQ ID NO: 70917 - protein, 9 aa, synthetic construct
  source 1..9: note = Seed: VTANVNALL
VQANVNALL

SEQ ID NO: 70918 - protein, 9 aa, synthetic construct
  source 1..9: note = Seed: VTANVNALL
VQANVNALV

SEQ ID NO: 70919 - protein, 9 aa, synthetic construct
  source 1..9: note = Seed: VTANVNALL
VQANVNALW

SEQ ID NO: 70920 - protein, 9 aa, synthetic construct
  source 1..9: note = Seed: VFAQVKQIY
VQAQVKQIF

SEQ ID NO: 70921 - protein, 9 aa, synthetic construct
  source 1..9: note = Seed: VFAQVKQIY
VQAQVKQIM

SEQ ID NO: 70922 - protein, 9 aa, synthetic construct
  source 1..9: note = Seed: VFAQVKQIY
VQAQVKQIY

SEQ ID NO: 70923 - protein, 10 aa, synthetic construct
  source 1..10: note = Seed: VFAQVKQIYK
VQAQVKQIYK

SEQ ID NO: 70924 - protein, 10 aa, synthetic construct
  source 1..10: note = Seed: VFAQVKQIYK
VQAQVKQIYR

SEQ ID NO: 70925 - protein, 9 aa, synthetic construct
  source 1..9: note = Seed: VNASSSEAF
VQASSSEAF

SEQ ID NO: 70926 - protein, 9 aa, synthetic construct
  source 1..9: note = Seed: VNASSSEAF
VQASSSEAI

SEQ ID NO: 70927 - protein, 9 aa, synthetic construct
  source 1..9: note = Seed: VNASSSEAF
VQASSSEAL

SEQ ID NO: 70928 - protein, 9 aa, synthetic construct
  source 1..9: note = Seed: VNASSSEAF
VQASSSEAM

SEQ ID NO: 70929 - protein, 9 aa, synthetic construct
  source 1..9: note = Seed: VNASSSEAF
VQASSSEAV

SEQ ID NO: 70930 - protein, 9 aa, synthetic construct
  source 1..9: note = Seed: VNASSSEAF
VQASSSEAW

SEQ ID NO: 70931 - protein, 9 aa, synthetic construct
  source 1..9: note = Seed: VNASSSEAF
VQASSSEAY

SEQ ID NO: 70932 - protein, 9 aa, synthetic construct
  source 1..9: note = Seed: VLAWLYAAV
VQAWLYAAA

SEQ ID NO: 70933 - protein, 9 aa, synthetic construct
  source 1..9: note = Seed: VLAWLYAAV
VQAWLYAAI

SEQ ID NO: 70934 - protein, 9 aa, synthetic construct
  source 1..9: note = Seed: VLAWLYAAV
VQAWLYAAL

SEQ ID NO: 70935 - protein, 9 aa, synthetic construct
  source 1..9: note = Seed: VLAWLYAAV
VQAWLYAAM

SEQ ID NO: 70936 - protein, 9 aa, synthetic construct
  source 1..9: note = Seed: VLAWLYAAV
VQAWLYAAV

SEQ ID NO: 70937 - protein, 9 aa, synthetic construct
  source 1..9: note = Seed: VMAYITGGV
VQAYITGGL

SEQ ID NO: 70938 - protein, 9 aa, synthetic construct
  source 1..9: note = Seed: VMAYITGGV
VQAYITGGV

SEQ ID NO: 70939 - protein, 10 aa, synthetic construct
  source 1..10: note = Seed: VLCLTPVYSF
VQCLTPVYSF

SEQ ID NO: 70940 - protein, 10 aa, synthetic construct
  source 1..10: note = Seed: VLCLTPVYSF
VQCLTPVYSY

SEQ ID NO: 70941 - protein, 9 aa, synthetic construct
  source 1..9: note = Seed: VKCTSVVLL
VQCTSVVLF

SEQ ID NO: 70942 - protein, 9 aa, synthetic construct
  source 1..9: note = Seed: VKCTSVVLL
VQCTSVVLM

SEQ ID NO: 70943 - protein, 9 aa, synthetic construct
  source 1..9: note = Seed: VKCTSVVLL
VQCTSVVLY

SEQ ID NO: 70944 - protein, 10 aa, synthetic construct
  source 1..10: note = Seed: VSDIDITFLK
VQDIDITFLK

SEQ ID NO: 70945 - protein, 10 aa, synthetic construct
  source 1..10: note = Seed: VSDIDITFLK
VQDIDITFLR

SEQ ID NO: 70946 - protein, 9 aa, synthetic construct
  source 1..9: note = Seed: VVDSYYSLL
VQDSYYSLL

SEQ ID NO: 70947 - protein, 9 aa, synthetic construct
  source 1..9: note = Seed: VVDSYYSLL
VQDSYYSLM

SEQ ID NO: 70948 - protein, 9 aa, synthetic construct
  source 1..9: note = Seed: VVDSYYSLL
VQDSYYSLV

SEQ ID NO: 70949 - protein, 11 aa, synthetic construct
  source 1..11: note = Seed: VYDYLVSTQEF
VQDYLVSTQEF

SEQ ID NO: 70950 - protein, 11 aa, synthetic construct
  source 1..11: note = Seed: VYDYLVSTQEF
VQDYLVSTQEW

SEQ ID NO: 70951 - protein, 9 aa, synthetic construct
  source 1..9: note = Seed: VAEWFLAYI
VQEWFLAYV

SEQ ID NO: 70952 - protein, 9 aa, synthetic construct
  source 1..9: note = Seed: VAFELWAKR
VQFELWAKR

SEQ ID NO: 70953 - protein, 9 aa, synthetic construct
  source 1..9: note = Seed: VHFISNSWL
VQFISNSWF

SEQ ID NO: 70954 - protein, 9 aa, synthetic construct
  source 1..9: note = Seed: VHFISNSWL
VQFISNSWL

SEQ ID NO: 70955 - protein, 9 aa, synthetic construct
  source 1..9: note = Seed: VHFISNSWL
VQFISNSWM

SEQ ID NO: 70956 - protein, 9 aa, synthetic construct
  source 1..9: note = Seed: VHFISNSWL
VQFISNSWY

SEQ ID NO: 70957 - protein, 11 aa, synthetic construct
  source 1..11: note = Seed: VSFLAHIQWMV
VQFLAHIQWMI

SEQ ID NO: 70958 - protein, 11 aa, synthetic construct
  source 1..11: note = Seed: VSFLAHIQWMV
VQFLAHIQWMV

SEQ ID NO: 70959 - protein, 8 aa, synthetic construct
  source 1..8: note = Seed: VVFLHVTY
VQFLHVTF

SEQ ID NO: 70960 - protein, 8 aa, synthetic construct
  source 1..8: note = Seed: VVFLHVTY
VQFLHVTM

SEQ ID NO: 70961 - protein, 8 aa, synthetic construct
  source 1..8: note = Seed: VVFLHVTY
VQFLHVTY

SEQ ID NO: 70962 - protein, 9 aa, synthetic construct
  source 1..9: note = Seed: VVFLHVTYV
VQFLHVTYA

SEQ ID NO: 70963 - protein, 9 aa, synthetic construct
  source 1..9: note = Seed: VVFLHVTYV
VQFLHVTYI

SEQ ID NO: 70964 - protein, 9 aa, synthetic construct
  source 1..9: note = Seed: VVFLHVTYV
VQFLHVTYK

SEQ ID NO: 70965 - protein, 9 aa, synthetic construct
  source 1..9: note = Seed: VVFLHVTYV
VQFLHVTYL

SEQ ID NO: 70966 - protein, 9 aa, synthetic construct
  source 1..9: note = Seed: VVFLHVTYV
VQFLHVTYV

SEQ ID NO: 70967 - protein, 10 aa, synthetic construct
  source 1..10: note = Seed: VVFLHVTYVP
VQFLHVTYVV

SEQ ID NO: 70968 - protein, 10 aa, synthetic construct
  source 1..10: note = Seed: VEFLRDGWEI
VQFLRDGWEF

SEQ ID NO: 70969 - protein, 8 aa, synthetic construct
  source 1..8: note = Seed: VVFNGVSF
VQFNGVSF

SEQ ID NO: 70970 - protein, 10 aa, synthetic construct
  source 1..10: note = Seed: VVFNGVSFST
VQFNGVSFSI

SEQ ID NO: 70971 - protein, 10 aa, synthetic construct
  source 1..10: note = Seed: VVFNGVSFST
VQFNGVSFSL

SEQ ID NO: 70972 - protein, 11 aa, synthetic construct
  source 1..11: note = Seed: VVFNGVSFSTF
VQFNGVSFSTF

SEQ ID NO: 70973 - protein, 11 aa, synthetic construct
  source 1..11: note = Seed: VVFNGVSFSTF
VQFNGVSFSTL

SEQ ID NO: 70974 - protein, 11 aa, synthetic construct
  source 1..11: note = Seed: VVFNGVSFSTF
VQFNGVSFSTM

SEQ ID NO: 70975 - protein, 11 aa, synthetic construct
  source 1..11: note = Seed: VVFNGVSFSTF
VQFNGVSFSTY

SEQ ID NO: 70976 - protein, 10 aa, synthetic construct
  source 1..10: note = Seed: VVFNGVSFST
VQFNGVSFSV

SEQ ID NO: 70977 - protein, 8 aa, synthetic construct
  source 1..8: note = Seed: VVFNGVSF
VQFNGVSL

SEQ ID NO: 70978 - protein, 8 aa, synthetic construct
  source 1..8: note = Seed: VVFNGVSF
VQFNGVSM

SEQ ID NO: 70979 - protein, 8 aa, synthetic construct
  source 1..8: note = Seed: VVFNGVSF
VQFNGVSY

SEQ ID NO: 70980 - protein, 10 aa, synthetic construct
  source 1..10: note = Seed: VVFVLWAHGF
VQFVLWAHGY

SEQ ID NO: 70981 - protein, 9 aa, synthetic construct
  source 1..9: note = Seed: VPFVVSTGY
VQFVVSTGF

SEQ ID NO: 70982 - protein, 9 aa, synthetic construct
  source 1..9: note = Seed: VPFVVSTGY
VQFVVSTGI

SEQ ID NO: 70983 - protein, 9 aa, synthetic construct
  source 1..9: note = Seed: VPFVVSTGY
VQFVVSTGL

SEQ ID NO: 70984 - protein, 9 aa, synthetic construct
  source 1..9: note = Seed: VPFVVSTGY
VQFVVSTGM

SEQ ID NO: 70985 - protein, 9 aa, synthetic construct
  source 1..9: note = Seed: VPFVVSTGY
VQFVVSTGW

SEQ ID NO: 70986 - protein, 9 aa, synthetic construct
  source 1..9: note = Seed: VPFVVSTGY
VQFVVSTGY

SEQ ID NO: 70987 - protein, 10 aa, synthetic construct
  source 1..10: note = Seed: VAGDSGFAAY
VQGDSGFAAF

SEQ ID NO: 70988 - protein, 10 aa, synthetic construct
  source 1..10: note = Seed: VAGDSGFAAY
VQGDSGFAAM

SEQ ID NO: 70989 - protein, 10 aa, synthetic construct
  source 1..10: note = Seed: VAGDSGFAAY
VQGDSGFAAY

SEQ ID NO: 70990 - protein, 10 aa, synthetic construct
  source 1..10: note = Seed: VIGIVNNTVY
VQGIVNNTVF

SEQ ID NO: 70991 - protein, 10 aa, synthetic construct
  source 1..10: note = Seed: VIGIVNNTVY
VQGIVNNTVY

SEQ ID NO: 70992 - protein, 9 aa, synthetic construct
  source 1..9: note = Seed: VGGNYNYLY
VQGNYNYLY

SEQ ID NO: 70993 - protein, 10 aa, synthetic construct
  source 1..10: note = Seed: VGGNYNYLYR
VQGNYNYLYR

SEQ ID NO: 70994 - protein, 8 aa, synthetic construct
  source 1..8: note = Seed: VMHANYIF
VQHANYIF

SEQ ID NO: 70995 - protein, 9 aa, synthetic construct
  source 1..9: note = Seed: VMHANYIFW
VQHANYIFF

SEQ ID NO: 70996 - protein, 9 aa, synthetic construct
  source 1..9: note = Seed: VMHANYIFW
VQHANYIFL

SEQ ID NO: 70997 - protein, 9 aa, synthetic construct
  source 1..9: note = Seed: VMHANYIFW
VQHANYIFM

SEQ ID NO: 70998 - protein, 9 aa, synthetic construct
  source 1..9: note = Seed: VMHANYIFW
VQHANYIFY

SEQ ID NO: 70999 - protein, 8 aa, synthetic construct
  source 1..8: note = Seed: VMHANYIF
VQHANYIY

SEQ ID NO: 71000 - protein, 11 aa, synthetic construct
  source 1..11: note = Seed: VKHKHAFLCLF
VQHKHAFLCLF

SEQ ID NO: 71001 - protein, 11 aa, synthetic construct
  source 1..11: note = Seed: VKHKHAFLCLF
VQHKHAFLCLY

SEQ ID NO: 71002 - protein, 9 aa, synthetic construct
  source 1..9: note = Seed: VTHSKGLYR
VQHSKGLYK

SEQ ID NO: 71003 - protein, 9 aa, synthetic construct
  source 1..9: note = Seed: VTHSKGLYR
VQHSKGLYR

SEQ ID NO: 71004 - protein, 10 aa, synthetic construct
  source 1..10: note = Seed: VLHSYFTSDY
VQHSYFTSDF

SEQ ID NO: 71005 - protein, 10 aa, synthetic construct
  source 1..10: note = Seed: VLHSYFTSDY
VQHSYFTSDL

SEQ ID NO: 71006 - protein, 10 aa, synthetic construct
  source 1..10: note = Seed: VLHSYFTSDY
VQHSYFTSDM

SEQ ID NO: 71007 - protein, 10 aa, synthetic construct
  source 1..10: note = Seed: VLHSYFTSDY
VQHSYFTSDY

SEQ ID NO: 71008 - protein, 11 aa, synthetic construct
  source 1..11: note = Seed: VLHSYFTSDYY
VQHSYFTSDYF

SEQ ID NO: 71009 - protein, 11 aa, synthetic construct
  source 1..11: note = Seed: VLHSYFTSDYY
VQHSYFTSDYM

SEQ ID NO: 71010 - protein, 11 aa, synthetic construct
  source 1..11: note = Seed: VLHSYFTSDYY
VQHSYFTSDYW

SEQ ID NO: 71011 - protein, 11 aa, synthetic construct
  source 1..11: note = Seed: VLHSYFTSDYY
VQHSYFTSDYY

SEQ ID NO: 71012 - protein, 9 aa, synthetic construct
  source 1..9: note = Seed: VEHVTFFIY
VQHVTFFIF

SEQ ID NO: 71013 - protein, 9 aa, synthetic construct
  source 1..9: note = Seed: VEHVTFFIY
VQHVTFFII

SEQ ID NO: 71014 - protein, 9 aa, synthetic construct
  source 1..9: note = Seed: VEHVTFFIY
VQHVTFFIL

SEQ ID NO: 71015 - protein, 9 aa, synthetic construct
  source 1..9: note = Seed: VEHVTFFIY
VQHVTFFIM

SEQ ID NO: 71016 - protein, 9 aa, synthetic construct
  source 1..9: note = Seed: VEHVTFFIY
VQHVTFFIY

SEQ ID NO: 71017 - protein, 9 aa, synthetic construct
  source 1..9: note = Seed: VTIAEILLI
VQIAEILLA

SEQ ID NO: 71018 - protein, 9 aa, synthetic construct
  source 1..9: note = Seed: VTIAEILLI
VQIAEILLI

SEQ ID NO: 71019 - protein, 10 aa, synthetic construct
  source 1..10: note = Seed: VTIAEILLII
VQIAEILLIV

SEQ ID NO: 71020 - protein, 9 aa, synthetic construct
  source 1..9: note = Seed: VTIAEILLI
VQIAEILLL

SEQ ID NO: 71021 - protein, 9 aa, synthetic construct
  source 1..9: note = Seed: VTIAEILLI
VQIAEILLV

SEQ ID NO: 71022 - protein, 9 aa, synthetic construct
  source 1..9: note = Seed: VTIAEILLI
VQIAEILLW

SEQ ID NO: 71023 - protein, 10 aa, synthetic construct
  source 1..10: note = Seed: VSICSTMTNR
VQICSTMTNK

SEQ ID NO: 71024 - protein, 10 aa, synthetic construct
  source 1..10: note = Seed: VSICSTMTNR
VQICSTMTNR

SEQ ID NO: 71025 - protein, 9 aa, synthetic construct
  source 1..9: note = Seed: VQIDRLITG
VQIDRLITF

SEQ ID NO: 71026 - protein, 9 aa, synthetic construct
  source 1..9: note = Seed: VQIDRLITG
VQIDRLITL

SEQ ID NO: 71027 - protein, 9 aa, synthetic construct
  source 1..9: note = Seed: VQIDRLITG
VQIDRLITM

SEQ ID NO: 71028 - protein, 9 aa, synthetic construct
  source 1..9: note = Seed: VQIDRLITG
VQIDRLITY

SEQ ID NO: 71029 - protein, 9 aa, synthetic construct
  source 1..9: note = Seed: VSIINNTVY
VQIINNTVF

SEQ ID NO: 71030 - protein, 9 aa, synthetic construct
  source 1..9: note = Seed: VSIINNTVY
VQIINNTVI

SEQ ID NO: 71031 - protein, 9 aa, synthetic construct
  source 1..9: note = Seed: VSIINNTVY
VQIINNTVL

SEQ ID NO: 71032 - protein, 9 aa, synthetic construct
  source 1..9: note = Seed: VSIINNTVY
VQIINNTVM

SEQ ID NO: 71033 - protein, 9 aa, synthetic construct
  source 1..9: note = Seed: VSIINNTVY
VQIINNTVW

SEQ ID NO: 71034 - protein, 9 aa, synthetic construct
  source 1..9: note = Seed: VSIINNTVY
VQIINNTVY

SEQ ID NO: 71035 - protein, 9 aa, synthetic construct
  source 1..9: note = Seed: VNINIVGDF
VQINIVGDF

SEQ ID NO: 71036 - protein, 10 aa, synthetic construct
  source 1..10: note = Seed: VNINIVGDFK
VQINIVGDFR

SEQ ID NO: 71037 - protein, 9 aa, synthetic construct
  source 1..9: note = Seed: VNINIVGDF
VQINIVGDM

SEQ ID NO: 71038 - protein, 9 aa, synthetic construct
  source 1..9: note = Seed: VNINIVGDF
VQINIVGDY

SEQ ID NO: 71039 - protein, 9 aa, synthetic construct
  source 1..9: note = Seed: VVIPDYNTY
VQIPDYNTF

SEQ ID NO: 71040 - protein, 9 aa, synthetic construct
  source 1..9: note = Seed: VVIPDYNTY
VQIPDYNTI

SEQ ID NO: 71041 - protein, 9 aa, synthetic construct
  source 1..9: note = Seed: VVIPDYNTY
VQIPDYNTL

SEQ ID NO: 71042 - protein, 9 aa, synthetic construct
  source 1..9: note = Seed: VVIPDYNTY
VQIPDYNTM

SEQ ID NO: 71043 - protein, 9 aa, synthetic construct
  source 1..9: note = Seed: VVIPDYNTY
VQIPDYNTY

SEQ ID NO: 71044 - protein, 10 aa, synthetic construct
  source 1..10: note = Seed: VVIPDYNTYK
VQIPDYNTYK

SEQ ID NO: 71045 - protein, 10 aa, synthetic construct
  source 1..10: note = Seed: VVIPDYNTYK
VQIPDYNTYR

SEQ ID NO: 71046 - protein, 11 aa, synthetic construct
  source 1..11: note = Seed: VRKIFVDGVPF
VQKIFVDGVPF

SEQ ID NO: 71047 - protein, 11 aa, synthetic construct
  source 1..11: note = Seed: VRKIFVDGVPF
VQKIFVDGVPM

SEQ ID NO: 71048 - protein, 11 aa, synthetic construct
  source 1..11: note = Seed: VRKIFVDGVPF
VQKIFVDGVPY

SEQ ID NO: 71049 - protein, 10 aa, synthetic construct
  source 1..10: note = Seed: VFKNIDGYFK
VQKNIDGYFR

SEQ ID NO: 71050 - protein, 9 aa, synthetic construct
  source 1..9: note = Seed: VVKRHTFSN
VQKRHTFSK

SEQ ID NO: 71051 - protein, 10 aa, synthetic construct
  source 1..10: note = Seed: VVKRHTFSNY
VQKRHTFSNF

SEQ ID NO: 71052 - protein, 10 aa, synthetic construct
  source 1..10: note = Seed: VVKRHTFSNY
VQKRHTFSNK

SEQ ID NO: 71053 - protein, 10 aa, synthetic construct
  source 1..10: note = Seed: VVKRHTFSNY
VQKRHTFSNM

SEQ ID NO: 71054 - protein, 10 aa, synthetic construct
  source 1..10: note = Seed: VVKRHTFSNY
VQKRHTFSNY

SEQ ID NO: 71055 - protein, 10 aa, synthetic construct
  source 1..10: note = Seed: VAKYTQLCQY
VQKYTQLCQF

SEQ ID NO: 71056 - protein, 10 aa, synthetic construct
  source 1..10: note = Seed: VAKYTQLCQY
VQKYTQLCQM

SEQ ID NO: 71057 - protein, 10 aa, synthetic construct
  source 1..10: note = Seed: VAKYTQLCQY
VQKYTQLCQY

SEQ ID NO: 71058 - protein, 11 aa, synthetic construct
  source 1..11: note = Seed: VAKYTQLCQYL
VQKYTQLCQYF

SEQ ID NO: 71059 - protein, 10 aa, synthetic construct
  source 1..10: note = Seed: VELFENKTTL
VQLFENKTTV

SEQ ID NO: 71060 - protein, 9 aa, synthetic construct
  source 1..9: note = Seed: VLLFLAFVV
VQLFLAFVI

SEQ ID NO: 71061 - protein, 9 aa, synthetic construct
  source 1..9: note = Seed: VLLFLAFVV
VQLFLAFVL

SEQ ID NO: 71062 - protein, 9 aa, synthetic construct
  source 1..9: note = Seed: VLLFLAFVV
VQLFLAFVV

SEQ ID NO: 71063 - protein, 10 aa, synthetic construct
  source 1..10: note = Seed: VLLFLAFVVF
VQLFLAFVVF

SEQ ID NO: 71064 - protein, 10 aa, synthetic construct
  source 1..10: note = Seed: VLLFLAFVVF
VQLFLAFVVM

SEQ ID NO: 71065 - protein, 10 aa, synthetic construct
  source 1..10: note = Seed: VLLFLAFVVF
VQLFLAFVVY

SEQ ID NO: 71066 - protein, 9 aa, synthetic construct
  source 1..9: note = Seed: VQLHNDILL
VQLHNDILF

SEQ ID NO: 71067 - protein, 10 aa, synthetic construct
  source 1..10: note = Seed: VQLHNDILLA
VQLHNDILLV

SEQ ID NO: 71068 - protein, 9 aa, synthetic construct
  source 1..9: note = Seed: VQLHNDILL
VQLHNDILM

SEQ ID NO: 71069 - protein, 9 aa, synthetic construct
  source 1..9: note = Seed: VQLHNDILL
VQLHNDILV

SEQ ID NO: 71070 - protein, 9 aa, synthetic construct
  source 1..9: note = Seed: VQLHNDILL
VQLHNDILY

SEQ ID NO: 71071 - protein, 10 aa, synthetic construct
  source 1..10: note = Seed: VNLHSSRLSF
VQLHSSRLSF

SEQ ID NO: 71072 - protein, 10 aa, synthetic construct
  source 1..10: note = Seed: VNLHSSRLSF
VQLHSSRLSL

SEQ ID NO: 71073 - protein, 10 aa, synthetic construct
  source 1..10: note = Seed: VNLHSSRLSF
VQLHSSRLSM

SEQ ID NO: 71074 - protein, 10 aa, synthetic construct
  source 1..10: note = Seed: VNLHSSRLSF
VQLHSSRLSY

SEQ ID NO: 71075 - protein, 10 aa, synthetic construct
  source 1..10: note = Seed: VFLHVTYVPA
VQLHVTYVPV

SEQ ID NO: 71076 - protein, 10 aa, synthetic construct
  source 1..10: note = Seed: VNLKQLPFFY
VQLKQLPFFY

SEQ ID NO: 71077 - protein, 10 aa, synthetic construct
  source 1..10: note = Seed: VVLLSVLQQL
VQLLSVLQQI

SEQ ID NO: 71078 - protein, 10 aa, synthetic construct
  source 1..10: note = Seed: VVLLSVLQQL
VQLLSVLQQL

SEQ ID NO: 71079 - protein, 10 aa, synthetic construct
  source 1..10: note = Seed: VVLLSVLQQL
VQLLSVLQQV

SEQ ID NO: 71080 - protein, 9 aa, synthetic construct
  source 1..9: note = Seed: VGLMWLSYF
VQLMWLSYF

SEQ ID NO: 71081 - protein, 10 aa, synthetic construct
  source 1..10: note = Seed: VGLMWLSYFI
VQLMWLSYFA

SEQ ID NO: 71082 - protein, 10 aa, synthetic construct
  source 1..10: note = Seed: VGLMWLSYFI
VQLMWLSYFI

SEQ ID NO: 71083 - protein, 10 aa, synthetic construct
  source 1..10: note = Seed: VGLMWLSYFI
VQLMWLSYFL

SEQ ID NO: 71084 - protein, 10 aa, synthetic construct
  source 1..10: note = Seed: VGLMWLSYFI
VQLMWLSYFM

SEQ ID NO: 71085 - protein, 10 aa, synthetic construct
  source 1..10: note = Seed: VGLMWLSYFI
VQLMWLSYFV

SEQ ID NO: 71086 - protein, 9 aa, synthetic construct
  source 1..9: note = Seed: VGLMWLSYF
VQLMWLSYL

SEQ ID NO: 71087 - protein, 9 aa, synthetic construct
  source 1..9: note = Seed: VGLMWLSYF
VQLMWLSYM

SEQ ID NO: 71088 - protein, 9 aa, synthetic construct
  source 1..9: note = Seed: VGLMWLSYF
VQLMWLSYY

SEQ ID NO: 71089 - protein, 9 aa, synthetic construct
  source 1..9: note = Seed: VVLSFELLH
VQLSFELLK

SEQ ID NO: 71090 - protein, 9 aa, synthetic construct
  source 1..9: note = Seed: VVLSFELLH
VQLSFELLY

SEQ ID NO: 71091 - protein, 8 aa, synthetic construct
  source 1..8: note = Seed: VQLSLPVL
VQLSLPVF

SEQ ID NO: 71092 - protein, 8 aa, synthetic construct
  source 1..8: note = Seed: VQLSLPVL
VQLSLPVY

SEQ ID NO: 71093 - protein, 9 aa, synthetic construct
  source 1..9: note = Seed: VLLSVLQQL
VQLSVLQQA

SEQ ID NO: 71094 - protein, 9 aa, synthetic construct
  source 1..9: note = Seed: VLLSVLQQL
VQLSVLQQI

SEQ ID NO: 71095 - protein, 9 aa, synthetic construct
  source 1..9: note = Seed: VLLSVLQQL
VQLSVLQQL

SEQ ID NO: 71096 - protein, 9 aa, synthetic construct
  source 1..9: note = Seed: VLLSVLQQL
VQLSVLQQV

SEQ ID NO: 71097 - protein, 10 aa, synthetic construct
  source 1..10: note = Seed: VELVAELEGI
VQLVAELEGV

SEQ ID NO: 71098 - protein, 10 aa, synthetic construct
  source 1..10: note = Seed: VVMAYITGGV
VQMAYITGGA

SEQ ID NO: 71099 - protein, 10 aa, synthetic construct
  source 1..10: note = Seed: VVMAYITGGV
VQMAYITGGI

SEQ ID NO: 71100 - protein, 10 aa, synthetic construct
  source 1..10: note = Seed: VVMAYITGGV
VQMAYITGGL

SEQ ID NO: 71101 - protein, 10 aa, synthetic construct
  source 1..10: note = Seed: VVMAYITGGV
VQMAYITGGV

SEQ ID NO: 71102 - protein, 10 aa, synthetic construct
  source 1..10: note = Seed: VFMCVEYCPI
VQMCVEYCPV

SEQ ID NO: 71103 - protein, 8 aa, synthetic construct
  source 1..8: note = Seed: VQMLSDTL
VQMLSDTF

SEQ ID NO: 71104 - protein, 8 aa, synthetic construct
  source 1..8: note = Seed: VQMLSDTL
VQMLSDTM

SEQ ID NO: 71105 - protein, 8 aa, synthetic construct
  source 1..8: note = Seed: VQMLSDTL
VQMLSDTY

SEQ ID NO: 71106 - protein, 9 aa, synthetic construct
  source 1..9: note = Seed: VRMYIFFAS
VQMYIFFAL

SEQ ID NO: 71107 - protein, 10 aa, synthetic construct
  source 1..10: note = Seed: VRMYIFFASF
VQMYIFFASF

SEQ ID NO: 71108 - protein, 11 aa, synthetic construct
  source 1..11: note = Seed: VRMYIFFASFY
VQMYIFFASFF

SEQ ID NO: 71109 - protein, 11 aa, synthetic construct
  source 1..11: note = Seed: VRMYIFFASFY
VQMYIFFASFY

SEQ ID NO: 71110 - protein, 10 aa, synthetic construct
  source 1..10: note = Seed: VRMYIFFASF
VQMYIFFASL

SEQ ID NO: 71111 - protein, 10 aa, synthetic construct
  source 1..10: note = Seed: VRMYIFFASF
VQMYIFFASM

SEQ ID NO: 71112 - protein, 10 aa, synthetic construct
  source 1..10: note = Seed: VRMYIFFASF
VQMYIFFASY

SEQ ID NO: 71113 - protein, 9 aa, synthetic construct
  source 1..9: note = Seed: VLNDILSRL
VQNDILSRI

SEQ ID NO: 71114 - protein, 9 aa, synthetic construct
  source 1..9: note = Seed: VLNDILSRL
VQNDILSRL

SEQ ID NO: 71115 - protein, 10 aa, synthetic construct
  source 1..10: note = Seed: VLNDILSRLD
VQNDILSRLV

SEQ ID NO: 71116 - protein, 9 aa, synthetic construct
  source 1..9: note = Seed: VLNDILSRL
VQNDILSRV

SEQ ID NO: 71117 - protein, 10 aa, synthetic construct
  source 1..10: note = Seed: VFNGVSFSTF
VQNGVSFSTF

SEQ ID NO: 71118 - protein, 10 aa, synthetic construct
  source 1..10: note = Seed: VFNGVSFSTF
VQNGVSFSTL

SEQ ID NO: 71119 - protein, 10 aa, synthetic construct
  source 1..10: note = Seed: VFNGVSFSTF
VQNGVSFSTM

SEQ ID NO: 71120 - protein, 10 aa, synthetic construct
  source 1..10: note = Seed: VFNGVSFSTF
VQNGVSFSTY

SEQ ID NO: 71121 - protein, 10 aa, synthetic construct
  source 1..10: note = Seed: VKNKCVNFNF
VQNKCVNFNF

SEQ ID NO: 71122 - protein, 9 aa, synthetic construct
  source 1..9: note = Seed: VRNLQHRLY
VQNLQHRLF

SEQ ID NO: 71123 - protein, 9 aa, synthetic construct
  source 1..9: note = Seed: VRNLQHRLY
VQNLQHRLM

SEQ ID NO: 71124 - protein, 9 aa, synthetic construct
  source 1..9: note = Seed: VRNLQHRLY
VQNLQHRLY

SEQ ID NO: 71125 - protein, 10 aa, synthetic construct
  source 1..10: note = Seed: VLPFNDGVYF
VQPFNDGVYF

SEQ ID NO: 71126 - protein, 10 aa, synthetic construct
  source 1..10: note = Seed: VLPFNDGVYF
VQPFNDGVYM

SEQ ID NO: 71127 - protein, 10 aa, synthetic construct
  source 1..10: note = Seed: VLPFNDGVYF
VQPFNDGVYW

SEQ ID NO: 71128 - protein, 10 aa, synthetic construct
  source 1..10: note = Seed: VLPFNDGVYF
VQPFNDGVYY

SEQ ID NO: 71129 - protein, 9 aa, synthetic construct
  source 1..9: note = Seed: VRQCSGVTF
VQQCSGVTF

SEQ ID NO: 71130 - protein, 9 aa, synthetic construct
  source 1..9: note = Seed: VRQCSGVTF
VQQCSGVTI

SEQ ID NO: 71131 - protein, 9 aa, synthetic construct
  source 1..9: note = Seed: VRQCSGVTF
VQQCSGVTL

SEQ ID NO: 71132 - protein, 9 aa, synthetic construct
  source 1..9: note = Seed: VRQCSGVTF
VQQCSGVTM

SEQ ID NO: 71133 - protein, 9 aa, synthetic construct
  source 1..9: note = Seed: VRQCSGVTF
VQQCSGVTW

SEQ ID NO: 71134 - protein, 9 aa, synthetic construct
  source 1..9: note = Seed: VRQCSGVTF
VQQCSGVTY

SEQ ID NO: 71135 - protein, 9 aa, synthetic construct
  source 1..9: note = Seed: VQQLPETYF
VQQLPETYM

SEQ ID NO: 71136 - protein, 9 aa, synthetic construct
  source 1..9: note = Seed: VQQLPETYF
VQQLPETYY

SEQ ID NO: 71137 - protein, 10 aa, synthetic construct
  source 1..10: note = Seed: VLQLPQGTTL
VQQLPQGTTF

SEQ ID NO: 71138 - protein, 10 aa, synthetic construct
  source 1..10: note = Seed: VLQLPQGTTL
VQQLPQGTTM

SEQ ID NO: 71139 - protein, 10 aa, synthetic construct
  source 1..10: note = Seed: VLQLPQGTTL
VQQLPQGTTY

SEQ ID NO: 71140 - protein, 9 aa, synthetic construct
  source 1..9: note = Seed: VVQQLPETY
VQQQLPETF

SEQ ID NO: 71141 - protein, 9 aa, synthetic construct
  source 1..9: note = Seed: VVQQLPETY
VQQQLPETM

SEQ ID NO: 71142 - protein, 9 aa, synthetic construct
  source 1..9: note = Seed: VVQQLPETY
VQQQLPETY

SEQ ID NO: 71143 - protein, 10 aa, synthetic construct
  source 1..10: note = Seed: VVQTIEVNSF
VQQTIEVNSF

SEQ ID NO: 71144 - protein, 10 aa, synthetic construct
  source 1..10: note = Seed: VVQTIEVNSF
VQQTIEVNSY

SEQ ID NO: 71145 - protein, 9 aa, synthetic construct
  source 1..9: note = Seed: VTRCLNRVC
VQRCLNRVK

SEQ ID NO: 71146 - protein, 9 aa, synthetic construct
  source 1..9: note = Seed: VARDLSLQF
VQRDLSLQF

SEQ ID NO: 71147 - protein, 10 aa, synthetic construct
  source 1..10: note = Seed: VARDLSLQFK
VQRDLSLQFK

SEQ ID NO: 71148 - protein, 10 aa, synthetic construct
  source 1..10: note = Seed: VARDLSLQFK
VQRDLSLQFR

SEQ ID NO: 71149 - protein, 9 aa, synthetic construct
  source 1..9: note = Seed: VARDLSLQF
VQRDLSLQL

SEQ ID NO: 71150 - protein, 9 aa, synthetic construct
  source 1..9: note = Seed: VARDLSLQF
VQRDLSLQM

SEQ ID NO: 71151 - protein, 9 aa, synthetic construct
  source 1..9: note = Seed: VARDLSLQF
VQRDLSLQY

SEQ ID NO: 71152 - protein, 8 aa, synthetic construct
  source 1..8: note = Seed: VYRGTTTY
VQRGTTTF

SEQ ID NO: 71153 - protein, 8 aa, synthetic construct
  source 1..8: note = Seed: VYRGTTTY
VQRGTTTM

SEQ ID NO: 71154 - protein, 8 aa, synthetic construct
  source 1..8: note = Seed: VYRGTTTY
VQRGTTTY

SEQ ID NO: 71155 - protein, 9 aa, synthetic construct
  source 1..9: note = Seed: VYRGTTTYK
VQRGTTTYK

SEQ ID NO: 71156 - protein, 9 aa, synthetic construct
  source 1..9: note = Seed: VYRGTTTYK
VQRGTTTYR

SEQ ID NO: 71157 - protein, 9 aa, synthetic construct
  source 1..9: note = Seed: VKRHTFSNY
VQRHTFSNF

SEQ ID NO: 71158 - protein, 9 aa, synthetic construct
  source 1..9: note = Seed: VKRHTFSNY
VQRHTFSNL

SEQ ID NO: 71159 - protein, 9 aa, synthetic construct
  source 1..9: note = Seed: VKRHTFSNY
VQRHTFSNM

SEQ ID NO: 71160 - protein, 9 aa, synthetic construct
  source 1..9: note = Seed: VKRHTFSNY
VQRHTFSNY

SEQ ID NO: 71161 - protein, 10 aa, synthetic construct
  source 1..10: note = Seed: VVRQCSGVTF
VQRQCSGVTF

SEQ ID NO: 71162 - protein, 10 aa, synthetic construct
  source 1..10: note = Seed: VVRQCSGVTF
VQRQCSGVTL

SEQ ID NO: 71163 - protein, 10 aa, synthetic construct
  source 1..10: note = Seed: VVRQCSGVTF
VQRQCSGVTM

SEQ ID NO: 71164 - protein, 10 aa, synthetic construct
  source 1..10: note = Seed: VVRQCSGVTF
VQRQCSGVTY

SEQ ID NO: 71165 - protein, 11 aa, synthetic construct
  source 1..11: note = Seed: VKRTIKGTHHW
VQRTIKGTHHW

SEQ ID NO: 71166 - protein, 10 aa, synthetic construct
  source 1..10: note = Seed: VTSAMQTMLF
VQSAMQTMLF

SEQ ID NO: 71167 - protein, 10 aa, synthetic construct
  source 1..10: note = Seed: VTSAMQTMLF
VQSAMQTMLM

SEQ ID NO: 71168 - protein, 10 aa, synthetic construct
  source 1..10: note = Seed: VTSAMQTMLF
VQSAMQTMLW

SEQ ID NO: 71169 - protein, 10 aa, synthetic construct
  source 1..10: note = Seed: VTSAMQTMLF
VQSAMQTMLY

SEQ ID NO: 71170 - protein, 9 aa, synthetic construct
  source 1..9: note = Seed: VTSAMQTML
VQSAMQTMW

SEQ ID NO: 71171 - protein, 10 aa, synthetic construct
  source 1..10: note = Seed: VVSDIDYVPL
VQSDIDYVPV

SEQ ID NO: 71172 - protein, 9 aa, synthetic construct
  source 1..9: note = Seed: VLSFCAFAV
VQSFCAFAI

SEQ ID NO: 71173 - protein, 9 aa, synthetic construct
  source 1..9: note = Seed: VLSFCAFAV
VQSFCAFAL

SEQ ID NO: 71174 - protein, 9 aa, synthetic construct
  source 1..9: note = Seed: VLSFCAFAV
VQSFCAFAV

SEQ ID NO: 71175 - protein, 9 aa, synthetic construct
  source 1..9: note = Seed: VYSFLPGVY
VQSFLPGVF

SEQ ID NO: 71176 - protein, 9 aa, synthetic construct
  source 1..9: note = Seed: VYSFLPGVY
VQSFLPGVL

SEQ ID NO: 71177 - protein, 9 aa, synthetic construct
  source 1..9: note = Seed: VYSFLPGVY
VQSFLPGVM

SEQ ID NO: 71178 - protein, 9 aa, synthetic construct
  source 1..9: note = Seed: VYSFLPGVY
VQSFLPGVY

SEQ ID NO: 71179 - protein, 11 aa, synthetic construct
  source 1..11: note = Seed: VYSFLPGVYSV
VQSFLPGVYSF

SEQ ID NO: 71180 - protein, 9 aa, synthetic construct
  source 1..9: note = Seed: VNSFSGYLK
VQSFSGYLK

SEQ ID NO: 71181 - protein, 10 aa, synthetic construct
  source 1..10: note = Seed: VNSFSGYLKL
VQSFSGYLKF

SEQ ID NO: 71182 - protein, 10 aa, synthetic construct
  source 1..10: note = Seed: VNSFSGYLKL
VQSFSGYLKM

SEQ ID NO: 71183 - protein, 10 aa, synthetic construct
  source 1..10: note = Seed: VNSFSGYLKL
VQSFSGYLKW

SEQ ID NO: 71184 - protein, 10 aa, synthetic construct
  source 1..10: note = Seed: VNSFSGYLKL
VQSFSGYLKY

SEQ ID NO: 71185 - protein, 9 aa, synthetic construct
  source 1..9: note = Seed: VNSFSGYLK
VQSFSGYLR

SEQ ID NO: 71186 - protein, 10 aa, synthetic construct
  source 1..10: note = Seed: VYSSANNCTF
VQSSANNCTF

SEQ ID NO: 71187 - protein, 10 aa, synthetic construct
  source 1..10: note = Seed: VYSSANNCTF
VQSSANNCTM

SEQ ID NO: 71188 - protein, 10 aa, synthetic construct
  source 1..10: note = Seed: VYSSANNCTF
VQSSANNCTW

SEQ ID NO: 71189 - protein, 10 aa, synthetic construct
  source 1..10: note = Seed: VYSSANNCTF
VQSSANNCTY

SEQ ID NO: 71190 - protein, 9 aa, synthetic construct
  source 1..9: note = Seed: VYSTGSNVF
VQSTGSNVF

SEQ ID NO: 71191 - protein, 9 aa, synthetic construct
  source 1..9: note = Seed: VYSTGSNVF
VQSTGSNVI

SEQ ID NO: 71192 - protein, 9 aa, synthetic construct
  source 1..9: note = Seed: VYSTGSNVF
VQSTGSNVL

SEQ ID NO: 71193 - protein, 9 aa, synthetic construct
  source 1..9: note = Seed: VYSTGSNVF
VQSTGSNVM

SEQ ID NO: 71194 - protein, 9 aa, synthetic construct
  source 1..9: note = Seed: VYSTGSNVF
VQSTGSNVW

SEQ ID NO: 71195 - protein, 9 aa, synthetic construct
  source 1..9: note = Seed: VYSTGSNVF
VQSTGSNVY

SEQ ID NO: 71196 - protein, 9 aa, synthetic construct
  source 1..9: note = Seed: VVSTGYHFR
VQSTGYHFK

SEQ ID NO: 71197 - protein, 9 aa, synthetic construct
  source 1..9: note = Seed: VVSTGYHFR
VQSTGYHFR

SEQ ID NO: 71198 - protein, 10 aa, synthetic construct
  source 1..10: note = Seed: VVSTGYHFRE
VQSTGYHFRR

SEQ ID NO: 71199 - protein, 9 aa, synthetic construct
  source 1..9: note = Seed: VQSTQWSLF
VQSTQWSLM

SEQ ID NO: 71200 - protein, 9 aa, synthetic construct
  source 1..9: note = Seed: VQSTQWSLF
VQSTQWSLY

SEQ ID NO: 71201 - protein, 10 aa, synthetic construct
  source 1..10: note = Seed: VNSVLLFLAF
VQSVLLFLAF

SEQ ID NO: 71202 - protein, 10 aa, synthetic construct
  source 1..10: note = Seed: VNSVLLFLAF
VQSVLLFLAM

SEQ ID NO: 71203 - protein, 10 aa, synthetic construct
  source 1..10: note = Seed: VNSVLLFLAF
VQSVLLFLAY

SEQ ID NO: 71204 - protein, 11 aa, synthetic construct
  source 1..11: note = Seed: VDSYYSLLMPI
VQSYYSLLMPF

SEQ ID NO: 71205 - protein, 9 aa, synthetic construct
  source 1..9: note = Seed: VFTGYRVTK
VQTGYRVTR

SEQ ID NO: 71206 - protein, 9 aa, synthetic construct
  source 1..9: note = Seed: VQTIEVNSF
VQTIEVNSM

SEQ ID NO: 71207 - protein, 9 aa, synthetic construct
  source 1..9: note = Seed: VQTIEVNSF
VQTIEVNSY

SEQ ID NO: 71208 - protein, 10 aa, synthetic construct
  source 1..10: note = Seed: VNVAFELWAK
VQVAFELWAR

SEQ ID NO: 71209 - protein, 10 aa, synthetic construct
  source 1..10: note = Seed: VNVLAWLYAA
VQVLAWLYAA

SEQ ID NO: 71210 - protein, 10 aa, synthetic construct
  source 1..10: note = Seed: VNVLAWLYAA
VQVLAWLYAI

SEQ ID NO: 71211 - protein, 10 aa, synthetic construct
  source 1..10: note = Seed: VNVLAWLYAA
VQVLAWLYAL

SEQ ID NO: 71212 - protein, 10 aa, synthetic construct
  source 1..10: note = Seed: VNVLAWLYAA
VQVLAWLYAV

SEQ ID NO: 71213 - protein, 9 aa, synthetic construct
  source 1..9: note = Seed: VVVLSFELL
VQVLSFELV

SEQ ID NO: 71214 - protein, 11 aa, synthetic construct
  source 1..11: note = Seed: VFVLWAHGFEL
VQVLWAHGFEI

SEQ ID NO: 71215 - protein, 11 aa, synthetic construct
  source 1..11: note = Seed: VFVLWAHGFEL
VQVLWAHGFEL

SEQ ID NO: 71216 - protein, 11 aa, synthetic construct
  source 1..11: note = Seed: VFVLWAHGFEL
VQVLWAHGFEV

SEQ ID NO: 71217 - protein, 11 aa, synthetic construct
  source 1..11: note = Seed: VLVQSTQWSLF
VQVQSTQWSLF

SEQ ID NO: 71218 - protein, 11 aa, synthetic construct
  source 1..11: note = Seed: VLVQSTQWSLF
VQVQSTQWSLY

SEQ ID NO: 71219 - protein, 9 aa, synthetic construct
  source 1..9: note = Seed: VQVTCGTTT
VQVTCGTTF

SEQ ID NO: 71220 - protein, 9 aa, synthetic construct
  source 1..9: note = Seed: VQVTCGTTT
VQVTCGTTH

SEQ ID NO: 71221 - protein, 9 aa, synthetic construct
  source 1..9: note = Seed: VQVTCGTTT
VQVTCGTTI

SEQ ID NO: 71222 - protein, 9 aa, synthetic construct
  source 1..9: note = Seed: VQVTCGTTT
VQVTCGTTL

SEQ ID NO: 71223 - protein, 9 aa, synthetic construct
  source 1..9: note = Seed: VQVTCGTTT
VQVTCGTTM

SEQ ID NO: 71224 - protein, 10 aa, synthetic construct
  source 1..10: note = Seed: VQVTCGTTTL
VQVTCGTTTF

SEQ ID NO: 71225 - protein, 10 aa, synthetic construct
  source 1..10: note = Seed: VQVTCGTTTL
VQVTCGTTTM

SEQ ID NO: 71226 - protein, 10 aa, synthetic construct
  source 1..10: note = Seed: VQVTCGTTTL
VQVTCGTTTY

SEQ ID NO: 71227 - protein, 9 aa, synthetic construct
  source 1..9: note = Seed: VQVTCGTTT
VQVTCGTTV

SEQ ID NO: 71228 - protein, 9 aa, synthetic construct
  source 1..9: note = Seed: VQVTCGTTT
VQVTCGTTW

SEQ ID NO: 71229 - protein, 9 aa, synthetic construct
  source 1..9: note = Seed: VQVTCGTTT
VQVTCGTTY

SEQ ID NO: 71230 - protein, 10 aa, synthetic construct
  source 1..10: note = Seed: VPVVDSYYSL
VQVVDSYYSV

SEQ ID NO: 71231 - protein, 9 aa, synthetic construct
  source 1..9: note = Seed: VLWAHGFEL
VQWAHGFEA

SEQ ID NO: 71232 - protein, 9 aa, synthetic construct
  source 1..9: note = Seed: VLWAHGFEL
VQWAHGFEF

SEQ ID NO: 71233 - protein, 9 aa, synthetic construct
  source 1..9: note = Seed: VLWAHGFEL
VQWAHGFEH

SEQ ID NO: 71234 - protein, 9 aa, synthetic construct
  source 1..9: note = Seed: VLWAHGFEL
VQWAHGFEI

SEQ ID NO: 71235 - protein, 9 aa, synthetic construct
  source 1..9: note = Seed: VLWAHGFEL
VQWAHGFEL

SEQ ID NO: 71236 - protein, 10 aa, synthetic construct
  source 1..10: note = Seed: VLWAHGFELT
VQWAHGFELI

SEQ ID NO: 71237 - protein, 10 aa, synthetic construct
  source 1..10: note = Seed: VLWAHGFELT
VQWAHGFELL

SEQ ID NO: 71238 - protein, 10 aa, synthetic construct
  source 1..10: note = Seed: VLWAHGFELT
VQWAHGFELV

SEQ ID NO: 71239 - protein, 9 aa, synthetic construct
  source 1..9: note = Seed: VLWAHGFEL
VQWAHGFEM

SEQ ID NO: 71240 - protein, 9 aa, synthetic construct
  source 1..9: note = Seed: VLWAHGFEL
VQWAHGFEV

SEQ ID NO: 71241 - protein, 9 aa, synthetic construct
  source 1..9: note = Seed: VLWAHGFEL
VQWAHGFEW

SEQ ID NO: 71242 - protein, 9 aa, synthetic construct
  source 1..9: note = Seed: VLWAHGFEL
VQWAHGFEY

SEQ ID NO: 71243 - protein, 8 aa, synthetic construct
  source 1..8: note = Seed: VMYASAVV
VQYASAVF

SEQ ID NO: 71244 - protein, 8 aa, synthetic construct
  source 1..8: note = Seed: VMYASAVV
VQYASAVI

SEQ ID NO: 71245 - protein, 8 aa, synthetic construct
  source 1..8: note = Seed: VMYASAVV
VQYASAVL

SEQ ID NO: 71246 - protein, 8 aa, synthetic construct
  source 1..8: note = Seed: VMYASAVV
VQYASAVM

SEQ ID NO: 71247 - protein, 9 aa, synthetic construct
  source 1..9: note = Seed: VMYASAVVL
VQYASAVVA

SEQ ID NO: 71248 - protein, 9 aa, synthetic construct
  source 1..9: note = Seed: VMYASAVVL
VQYASAVVC

SEQ ID NO: 71249 - protein, 9 aa, synthetic construct
  source 1..9: note = Seed: VMYASAVVL
VQYASAVVF

SEQ ID NO: 71250 - protein, 9 aa, synthetic construct
  source 1..9: note = Seed: VMYASAVVL
VQYASAVVG

SEQ ID NO: 71251 - protein, 9 aa, synthetic construct
  source 1..9: note = Seed: VMYASAVVL
VQYASAVVH

SEQ ID NO: 71252 - protein, 9 aa, synthetic construct
  source 1..9: note = Seed: VMYASAVVL
VQYASAVVI

SEQ ID NO: 71253 - protein, 9 aa, synthetic construct
  source 1..9: note = Seed: VMYASAVVL
VQYASAVVL

SEQ ID NO: 71254 - protein, 10 aa, synthetic construct
  source 1..10: note = Seed: VMYASAVVLL
VQYASAVVLF

SEQ ID NO: 71255 - protein, 10 aa, synthetic construct
  source 1..10: note = Seed: VMYASAVVLL
VQYASAVVLH

SEQ ID NO: 71256 - protein, 10 aa, synthetic construct
  source 1..10: note = Seed: VMYASAVVLL
VQYASAVVLI

SEQ ID NO: 71257 - protein, 10 aa, synthetic construct
  source 1..10: note = Seed: VMYASAVVLL
VQYASAVVLL

SEQ ID NO: 71258 - protein, 10 aa, synthetic construct
  source 1..10: note = Seed: VMYASAVVLL
VQYASAVVLM

SEQ ID NO: 71259 - protein, 10 aa, synthetic construct
  source 1..10: note = Seed: VMYASAVVLL
VQYASAVVLW

SEQ ID NO: 71260 - protein, 10 aa, synthetic construct
  source 1..10: note = Seed: VMYASAVVLL
VQYASAVVLY

SEQ ID NO: 71261 - protein, 9 aa, synthetic construct
  source 1..9: note = Seed: VMYASAVVL
VQYASAVVM

SEQ ID NO: 71262 - protein, 9 aa, synthetic construct
  source 1..9: note = Seed: VMYASAVVL
VQYASAVVS

SEQ ID NO: 71263 - protein, 9 aa, synthetic construct
  source 1..9: note = Seed: VMYASAVVL
VQYASAVVT

SEQ ID NO: 71264 - protein, 9 aa, synthetic construct
  source 1..9: note = Seed: VMYASAVVL
VQYASAVVV

SEQ ID NO: 71265 - protein, 9 aa, synthetic construct
  source 1..9: note = Seed: VMYASAVVL
VQYASAVVW

SEQ ID NO: 71266 - protein, 9 aa, synthetic construct
  source 1..9: note = Seed: VMYASAVVL
VQYASAVVY

SEQ ID NO: 71267 - protein, 8 aa, synthetic construct
  source 1..8: note = Seed: VMYASAVV
VQYASAVW

SEQ ID NO: 71268 - protein, 8 aa, synthetic construct
  source 1..8: note = Seed: VMYASAVV
VQYASAVY

SEQ ID NO: 71269 - protein, 10 aa, synthetic construct
  source 1..10: note = Seed: VPYCYDTNVL
VQYCYDTNVF

SEQ ID NO: 71270 - protein, 8 aa, synthetic construct
  source 1..8: note = Seed: VAYFNMVY
VQYFNMVF

SEQ ID NO: 71271 - protein, 8 aa, synthetic construct
  source 1..8: note = Seed: VAYFNMVY
VQYFNMVL

SEQ ID NO: 71272 - protein, 8 aa, synthetic construct
  source 1..8: note = Seed: VAYFNMVY
VQYFNMVM

SEQ ID NO: 71273 - protein, 8 aa, synthetic construct
  source 1..8: note = Seed: VAYFNMVY
VQYFNMVY

SEQ ID NO: 71274 - protein, 9 aa, synthetic construct
  source 1..9: note = Seed: VAYFNMVYM
VQYFNMVYF

SEQ ID NO: 71275 - protein, 9 aa, synthetic construct
  source 1..9: note = Seed: VAYFNMVYM
VQYFNMVYI

SEQ ID NO: 71276 - protein, 9 aa, synthetic construct
  source 1..9: note = Seed: VAYFNMVYM
VQYFNMVYL

SEQ ID NO: 71277 - protein, 9 aa, synthetic construct
  source 1..9: note = Seed: VAYFNMVYM
VQYFNMVYM

SEQ ID NO: 71278 - protein, 9 aa, synthetic construct
  source 1..9: note = Seed: VAYFNMVYM
VQYFNMVYY

SEQ ID NO: 71279 - protein, 9 aa, synthetic construct
  source 1..9: note = Seed: VGYLQPRTF
VQYLQPRTF

SEQ ID NO: 71280 - protein, 10 aa, synthetic construct
  source 1..10: note = Seed: VGYLQPRTFL
VQYLQPRTFF

SEQ ID NO: 71281 - protein, 11 aa, synthetic construct
  source 1..11: note = Seed: VGYLQPRTFLL
VQYLQPRTFLV

SEQ ID NO: 71282 - protein, 9 aa, synthetic construct
  source 1..9: note = Seed: VGYLQPRTF
VQYLQPRTH

SEQ ID NO: 71283 - protein, 9 aa, synthetic construct
  source 1..9: note = Seed: VGYLQPRTF
VQYLQPRTI

SEQ ID NO: 71284 - protein, 9 aa, synthetic construct
  source 1..9: note = Seed: VGYLQPRTF
VQYLQPRTL

SEQ ID NO: 71285 - protein, 9 aa, synthetic construct
  source 1..9: note = Seed: VGYLQPRTF
VQYLQPRTM

SEQ ID NO: 71286 - protein, 9 aa, synthetic construct
  source 1..9: note = Seed: VGYLQPRTF
VQYLQPRTY

SEQ ID NO: 71287 - protein, 10 aa, synthetic construct
  source 1..10: note = Seed: VLYQPPQTSI
VQYQPPQTSF

SEQ ID NO: 71288 - protein, 10 aa, synthetic construct
  source 1..10: note = Seed: VLYQPPQTSI
VQYQPPQTSM

SEQ ID NO: 71289 - protein, 10 aa, synthetic construct
  source 1..10: note = Seed: VLYQPPQTSI
VQYQPPQTSW

SEQ ID NO: 71290 - protein, 10 aa, synthetic construct
  source 1..10: note = Seed: VGYQPYRVVV
VQYQPYRVVF

SEQ ID NO: 71291 - protein, 10 aa, synthetic construct
  source 1..10: note = Seed: VGYQPYRVVV
VQYQPYRVVI

SEQ ID NO: 71292 - protein, 10 aa, synthetic construct
  source 1..10: note = Seed: VGYQPYRVVV
VQYQPYRVVL

SEQ ID NO: 71293 - protein, 10 aa, synthetic construct
  source 1..10: note = Seed: VGYQPYRVVV
VQYQPYRVVM

SEQ ID NO: 71294 - protein, 10 aa, synthetic construct
  source 1..10: note = Seed: VGYQPYRVVV
VQYQPYRVVW

SEQ ID NO: 71295 - protein, 9 aa, synthetic construct
  source 1..9: note = Seed: VVYRGTTTY
VQYRGTTTA

SEQ ID NO: 71296 - protein, 9 aa, synthetic construct
  source 1..9: note = Seed: VVYRGTTTY
VQYRGTTTC

SEQ ID NO: 71297 - protein, 9 aa, synthetic construct
  source 1..9: note = Seed: VVYRGTTTY
VQYRGTTTF

SEQ ID NO: 71298 - protein, 9 aa, synthetic construct
  source 1..9: note = Seed: VVYRGTTTY
VQYRGTTTG

SEQ ID NO: 71299 - protein, 9 aa, synthetic construct
  source 1..9: note = Seed: VVYRGTTTY
VQYRGTTTH

SEQ ID NO: 71300 - protein, 9 aa, synthetic construct
  source 1..9: note = Seed: VVYRGTTTY
VQYRGTTTI

SEQ ID NO: 71301 - protein, 9 aa, synthetic construct
  source 1..9: note = Seed: VVYRGTTTY
VQYRGTTTK

SEQ ID NO: 71302 - protein, 9 aa, synthetic construct
  source 1..9: note = Seed: VVYRGTTTY
VQYRGTTTL

SEQ ID NO: 71303 - protein, 9 aa, synthetic construct
  source 1..9: note = Seed: VVYRGTTTY
VQYRGTTTM

SEQ ID NO: 71304 - protein, 9 aa, synthetic construct
  source 1..9: note = Seed: VVYRGTTTY
VQYRGTTTT

SEQ ID NO: 71305 - protein, 9 aa, synthetic construct
  source 1..9: note = Seed: VVYRGTTTY
VQYRGTTTV

SEQ ID NO: 71306 - protein, 9 aa, synthetic construct
  source 1..9: note = Seed: VVYRGTTTY
VQYRGTTTW

SEQ ID NO: 71307 - protein, 9 aa, synthetic construct
  source 1..9: note = Seed: VVYRGTTTY
VQYRGTTTY

SEQ ID NO: 71308 - protein, 10 aa, synthetic construct
  source 1..10: note = Seed: VVYRGTTTYK
VQYRGTTTYA

SEQ ID NO: 71309 - protein, 10 aa, synthetic construct
  source 1..10: note = Seed: VVYRGTTTYK
VQYRGTTTYC

SEQ ID NO: 71310 - protein, 10 aa, synthetic construct
  source 1..10: note = Seed: VVYRGTTTYK
VQYRGTTTYD

SEQ ID NO: 71311 - protein, 10 aa, synthetic construct
  source 1..10: note = Seed: VVYRGTTTYK
VQYRGTTTYE

SEQ ID NO: 71312 - protein, 10 aa, synthetic construct
  source 1..10: note = Seed: VVYRGTTTYK
VQYRGTTTYF

SEQ ID NO: 71313 - protein, 10 aa, synthetic construct
  source 1..10: note = Seed: VVYRGTTTYK
VQYRGTTTYG

SEQ ID NO: 71314 - protein, 10 aa, synthetic construct
  source 1..10: note = Seed: VVYRGTTTYK
VQYRGTTTYH

SEQ ID NO: 71315 - protein, 10 aa, synthetic construct
  source 1..10: note = Seed: VVYRGTTTYK
VQYRGTTTYI

SEQ ID NO: 71316 - protein, 10 aa, synthetic construct
  source 1..10: note = Seed: VVYRGTTTYK
VQYRGTTTYK

SEQ ID NO: 71317 - protein, 10 aa, synthetic construct
  source 1..10: note = Seed: VVYRGTTTYK
VQYRGTTTYL

SEQ ID NO: 71318 - protein, 10 aa, synthetic construct
  source 1..10: note = Seed: VVYRGTTTYK
VQYRGTTTYM

SEQ ID NO: 71319 - protein, 10 aa, synthetic construct
  source 1..10: note = Seed: VVYRGTTTYK
VQYRGTTTYN

SEQ ID NO: 71320 - protein, 10 aa, synthetic construct
  source 1..10: note = Seed: VVYRGTTTYK
VQYRGTTTYP

SEQ ID NO: 71321 - protein, 10 aa, synthetic construct
  source 1..10: note = Seed: VVYRGTTTYK
VQYRGTTTYQ

SEQ ID NO: 71322 - protein, 10 aa, synthetic construct
  source 1..10: note = Seed: VVYRGTTTYK
VQYRGTTTYR

SEQ ID NO: 71323 - protein, 10 aa, synthetic construct
  source 1..10: note = Seed: VVYRGTTTYK
VQYRGTTTYS

SEQ ID NO: 71324 - protein, 10 aa, synthetic construct
  source 1..10: note = Seed: VVYRGTTTYK
VQYRGTTTYT

SEQ ID NO: 71325 - protein, 10 aa, synthetic construct
  source 1..10: note = Seed: VVYRGTTTYK
VQYRGTTTYV

SEQ ID NO: 71326 - protein, 10 aa, synthetic construct
  source 1..10: note = Seed: VVYRGTTTYK
VQYRGTTTYW

SEQ ID NO: 71327 - protein, 10 aa, synthetic construct
  source 1..10: note = Seed: VVYRGTTTYK
VQYRGTTTYY

SEQ ID NO: 71328 - protein, 10 aa, synthetic construct
  source 1..10: note = Seed: VYYTSNPTTF
VQYTSNPTTF

SEQ ID NO: 71329 - protein, 10 aa, synthetic construct
  source 1..10: note = Seed: VYYTSNPTTF
VQYTSNPTTL

SEQ ID NO: 71330 - protein, 10 aa, synthetic construct
  source 1..10: note = Seed: VYYTSNPTTF
VQYTSNPTTM

SEQ ID NO: 71331 - protein, 10 aa, synthetic construct
  source 1..10: note = Seed: VYYTSNPTTF
VQYTSNPTTY

SEQ ID NO: 71332 - protein, 9 aa, synthetic construct
  source 1..9: note = Seed: VLYYQNNVF
VQYYQNNVA

SEQ ID NO: 71333 - protein, 9 aa, synthetic construct
  source 1..9: note = Seed: VLYYQNNVF
VQYYQNNVF

SEQ ID NO: 71334 - protein, 10 aa, synthetic construct
  source 1..10: note = Seed: VLYYQNNVFM
VQYYQNNVFA

SEQ ID NO: 71335 - protein, 10 aa, synthetic construct
  source 1..10: note = Seed: VLYYQNNVFM
VQYYQNNVFC

SEQ ID NO: 71336 - protein, 10 aa, synthetic construct
  source 1..10: note = Seed: VLYYQNNVFM
VQYYQNNVFD

SEQ ID NO: 71337 - protein, 10 aa, synthetic construct
  source 1..10: note = Seed: VLYYQNNVFM
VQYYQNNVFE

SEQ ID NO: 71338 - protein, 10 aa, synthetic construct
  source 1..10: note = Seed: VLYYQNNVFM
VQYYQNNVFF

SEQ ID NO: 71339 - protein, 10 aa, synthetic construct
  source 1..10: note = Seed: VLYYQNNVFM
VQYYQNNVFG

SEQ ID NO: 71340 - protein, 10 aa, synthetic construct
  source 1..10: note = Seed: VLYYQNNVFM
VQYYQNNVFH

SEQ ID NO: 71341 - protein, 10 aa, synthetic construct
  source 1..10: note = Seed: VLYYQNNVFM
VQYYQNNVFI

SEQ ID NO: 71342 - protein, 10 aa, synthetic construct
  source 1..10: note = Seed: VLYYQNNVFM
VQYYQNNVFK

SEQ ID NO: 71343 - protein, 10 aa, synthetic construct
  source 1..10: note = Seed: VLYYQNNVFM
VQYYQNNVFL

SEQ ID NO: 71344 - protein, 10 aa, synthetic construct
  source 1..10: note = Seed: VLYYQNNVFM
VQYYQNNVFM

SEQ ID NO: 71345 - protein, 10 aa, synthetic construct
  source 1..10: note = Seed: VLYYQNNVFM
VQYYQNNVFN

SEQ ID NO: 71346 - protein, 10 aa, synthetic construct
  source 1..10: note = Seed: VLYYQNNVFM
VQYYQNNVFP

SEQ ID NO: 71347 - protein, 10 aa, synthetic construct
  source 1..10: note = Seed: VLYYQNNVFM
VQYYQNNVFQ

SEQ ID NO: 71348 - protein, 10 aa, synthetic construct
  source 1..10: note = Seed: VLYYQNNVFM
VQYYQNNVFR

SEQ ID NO: 71349 - protein, 10 aa, synthetic construct
  source 1..10: note = Seed: VLYYQNNVFM
VQYYQNNVFS

SEQ ID NO: 71350 - protein, 10 aa, synthetic construct
  source 1..10: note = Seed: VLYYQNNVFM
VQYYQNNVFT

SEQ ID NO: 71351 - protein, 10 aa, synthetic construct
  source 1..10: note = Seed: VLYYQNNVFM
VQYYQNNVFV

SEQ ID NO: 71352 - protein, 10 aa, synthetic construct
  source 1..10: note = Seed: VLYYQNNVFM
VQYYQNNVFW

SEQ ID NO: 71353 - protein, 10 aa, synthetic construct
  source 1..10: note = Seed: VLYYQNNVFM
VQYYQNNVFY

SEQ ID NO: 71354 - protein, 9 aa, synthetic construct
  source 1..9: note = Seed: VLYYQNNVF
VQYYQNNVH

SEQ ID NO: 71355 - protein, 9 aa, synthetic construct
  source 1..9: note = Seed: VLYYQNNVF
VQYYQNNVI

SEQ ID NO: 71356 - protein, 9 aa, synthetic construct
  source 1..9: note = Seed: VLYYQNNVF
VQYYQNNVL

SEQ ID NO: 71357 - protein, 9 aa, synthetic construct
  source 1..9: note = Seed: VLYYQNNVF
VQYYQNNVM

SEQ ID NO: 71358 - protein, 9 aa, synthetic construct
  source 1..9: note = Seed: VLYYQNNVF
VQYYQNNVV

SEQ ID NO: 71359 - protein, 9 aa, synthetic construct
  source 1..9: note = Seed: VLYYQNNVF
VQYYQNNVW

SEQ ID NO: 71360 - protein, 9 aa, synthetic construct
  source 1..9: note = Seed: VLYYQNNVF
VQYYQNNVY

SEQ ID NO: 71361 - protein, 9 aa, synthetic construct
  source 1..9: note = Seed: VLAAECTIF
VRAAECTIF

SEQ ID NO: 71362 - protein, 10 aa, synthetic construct
  source 1..10: note = Seed: VLAAECTIFK
VRAAECTIFR

SEQ ID NO: 71363 - protein, 9 aa, synthetic construct
  source 1..9: note = Seed: VLAAECTIF
VRAAECTIY

SEQ ID NO: 71364 - protein, 9 aa, synthetic construct
  source 1..9: note = Seed: VNASSSEAF
VRASSSEAF

SEQ ID NO: 71365 - protein, 9 aa, synthetic construct
  source 1..9: note = Seed: VNASSSEAF
VRASSSEAM

SEQ ID NO: 71366 - protein, 9 aa, synthetic construct
  source 1..9: note = Seed: VNASSSEAF
VRASSSEAY

SEQ ID NO: 71367 - protein, 9 aa, synthetic construct
  source 1..9: note = Seed: VRAWIGFDV
VRAWIGFDF

SEQ ID NO: 71368 - protein, 9 aa, synthetic construct
  source 1..9: note = Seed: VRAWIGFDV
VRAWIGFDI

SEQ ID NO: 71369 - protein, 9 aa, synthetic construct
  source 1..9: note = Seed: VRAWIGFDV
VRAWIGFDL

SEQ ID NO: 71370 - protein, 9 aa, synthetic construct
  source 1..9: note = Seed: VRAWIGFDV
VRAWIGFDM

SEQ ID NO: 71371 - protein, 11 aa, synthetic construct
  source 1..11: note = Seed: VYDYLVSTQEF
VRDYLVSTQEF

SEQ ID NO: 71372 - protein, 11 aa, synthetic construct
  source 1..11: note = Seed: VYDYLVSTQEF
VRDYLVSTQEI

SEQ ID NO: 71373 - protein, 11 aa, synthetic construct
  source 1..11: note = Seed: VYDYLVSTQEF
VRDYLVSTQEW

SEQ ID NO: 71374 - protein, 10 aa, synthetic construct
  source 1..10: note = Seed: VAEWFLAYIL
VREWFLAYIL

SEQ ID NO: 71375 - protein, 9 aa, synthetic construct
  source 1..9: note = Seed: VHFISNSWL
VRFISNSWY

SEQ ID NO: 71376 - protein, 11 aa, synthetic construct
  source 1..11: note = Seed: VSFLAHIQWMV
VRFLAHIQWMV

SEQ ID NO: 71377 - protein, 10 aa, synthetic construct
  source 1..10: note = Seed: VEFLRDGWEI
VRFLRDGWEF

SEQ ID NO: 71378 - protein, 9 aa, synthetic construct
  source 1..9: note = Seed: VPFVVSTGY
VRFVVSTGF

SEQ ID NO: 71379 - protein, 9 aa, synthetic construct
  source 1..9: note = Seed: VPFVVSTGY
VRFVVSTGY

SEQ ID NO: 71380 - protein, 11 aa, synthetic construct
  source 1..11: note = Seed: VLHSYFTSDYY
VRHSYFTSDYW

SEQ ID NO: 71381 - protein, 9 aa, synthetic construct
  source 1..9: note = Seed: VEHVTFFIY
VRHVTFFIF

SEQ ID NO: 71382 - protein, 9 aa, synthetic construct
  source 1..9: note = Seed: VEHVTFFIY
VRHVTFFIY

SEQ ID NO: 71383 - protein, 9 aa, synthetic construct
  source 1..9: note = Seed: VQIDRLITG
VRIDRLITF

SEQ ID NO: 71384 - protein, 9 aa, synthetic construct
  source 1..9: note = Seed: VQIDRLITG
VRIDRLITY

SEQ ID NO: 71385 - protein, 9 aa, synthetic construct
  source 1..9: note = Seed: VSIINNTVY
VRIINNTVF

SEQ ID NO: 71386 - protein, 9 aa, synthetic construct
  source 1..9: note = Seed: VSIINNTVY
VRIINNTVY

SEQ ID NO: 71387 - protein, 9 aa, synthetic construct
  source 1..9: note = Seed: VVIPDYNTY
VRIPDYNTF

SEQ ID NO: 71388 - protein, 9 aa, synthetic construct
  source 1..9: note = Seed: VVIPDYNTY
VRIPDYNTY

SEQ ID NO: 71389 - protein, 11 aa, synthetic construct
  source 1..11: note = Seed: VAKYTQLCQYL
VRKYTQLCQYF

SEQ ID NO: 71390 - protein, 10 aa, synthetic construct
  source 1..10: note = Seed: VELFENKTTL
VRLFENKTTV

SEQ ID NO: 71391 - protein, 10 aa, synthetic construct
  source 1..10: note = Seed: VQLHNDILLA
VRLHNDILLV

SEQ ID NO: 71392 - protein, 10 aa, synthetic construct
  source 1..10: note = Seed: VNLHSSRLSF
VRLHSSRLSF

SEQ ID NO: 71393 - protein, 10 aa, synthetic construct
  source 1..10: note = Seed: VNLHSSRLSF
VRLHSSRLSY

SEQ ID NO: 71394 - protein, 10 aa, synthetic construct
  source 1..10: note = Seed: VVLLSVLQQL
VRLLSVLQQI

SEQ ID NO: 71395 - protein, 10 aa, synthetic construct
  source 1..10: note = Seed: VVLLSVLQQL
VRLLSVLQQL

SEQ ID NO: 71396 - protein, 10 aa, synthetic construct
  source 1..10: note = Seed: VVLLSVLQQL
VRLLSVLQQV

SEQ ID NO: 71397 - protein, 10 aa, synthetic construct
  source 1..10: note = Seed: VGLMWLSYFI
VRLMWLSYFA

SEQ ID NO: 71398 - protein, 10 aa, synthetic construct
  source 1..10: note = Seed: VGLMWLSYFI
VRLMWLSYFI

SEQ ID NO: 71399 - protein, 11 aa, synthetic construct
  source 1..11: note = Seed: VGLMWLSYFIA
VRLMWLSYFIV

SEQ ID NO: 71400 - protein, 10 aa, synthetic construct
  source 1..10: note = Seed: VGLMWLSYFI
VRLMWLSYFL

SEQ ID NO: 71401 - protein, 10 aa, synthetic construct
  source 1..10: note = Seed: VGLMWLSYFI
VRLMWLSYFM

SEQ ID NO: 71402 - protein, 10 aa, synthetic construct
  source 1..10: note = Seed: VGLMWLSYFI
VRLMWLSYFV

SEQ ID NO: 71403 - protein, 10 aa, synthetic construct
  source 1..10: note = Seed: VELVAELEGI
VRLVAELEGV

SEQ ID NO: 71404 - protein, 10 aa, synthetic construct
  source 1..10: note = Seed: VVMAYITGGV
VRMAYITGGI

SEQ ID NO: 71405 - protein, 10 aa, synthetic construct
  source 1..10: note = Seed: VVMAYITGGV
VRMAYITGGL

SEQ ID NO: 71406 - protein, 10 aa, synthetic construct
  source 1..10: note = Seed: VVMAYITGGV
VRMAYITGGV

SEQ ID NO: 71407 - protein, 9 aa, synthetic construct
  source 1..9: note = Seed: VRMYIFFAS
VRMYIFFAA

SEQ ID NO: 71408 - protein, 9 aa, synthetic construct
  source 1..9: note = Seed: VRMYIFFAS
VRMYIFFAF

SEQ ID NO: 71409 - protein, 9 aa, synthetic construct
  source 1..9: note = Seed: VRMYIFFAS
VRMYIFFAH

SEQ ID NO: 71410 - protein, 9 aa, synthetic construct
  source 1..9: note = Seed: VRMYIFFAS
VRMYIFFAI

SEQ ID NO: 71411 - protein, 9 aa, synthetic construct
  source 1..9: note = Seed: VRMYIFFAS
VRMYIFFAK

SEQ ID NO: 71412 - protein, 9 aa, synthetic construct
  source 1..9: note = Seed: VRMYIFFAS
VRMYIFFAL

SEQ ID NO: 71413 - protein, 9 aa, synthetic construct
  source 1..9: note = Seed: VRMYIFFAS
VRMYIFFAM

SEQ ID NO: 71414 - protein, 9 aa, synthetic construct
  source 1..9: note = Seed: VRMYIFFAS
VRMYIFFAP

SEQ ID NO: 71415 - protein, 9 aa, synthetic construct
  source 1..9: note = Seed: VRMYIFFAS
VRMYIFFAR

SEQ ID NO: 71416 - protein, 11 aa, synthetic construct
  source 1..11: note = Seed: VRMYIFFASFY
VRMYIFFASFK

SEQ ID NO: 71417 - protein, 10 aa, synthetic construct
  source 1..10: note = Seed: VRMYIFFASF
VRMYIFFASI

SEQ ID NO: 71418 - protein, 10 aa, synthetic construct
  source 1..10: note = Seed: VRMYIFFASF
VRMYIFFASK

SEQ ID NO: 71419 - protein, 10 aa, synthetic construct
  source 1..10: note = Seed: VRMYIFFASF
VRMYIFFASL

SEQ ID NO: 71420 - protein, 10 aa, synthetic construct
  source 1..10: note = Seed: VRMYIFFASF
VRMYIFFASM

SEQ ID NO: 71421 - protein, 10 aa, synthetic construct
  source 1..10: note = Seed: VRMYIFFASF
VRMYIFFASR

SEQ ID NO: 71422 - protein, 10 aa, synthetic construct
  source 1..10: note = Seed: VRMYIFFASF
VRMYIFFASV

SEQ ID NO: 71423 - protein, 10 aa, synthetic construct
  source 1..10: note = Seed: VRMYIFFASF
VRMYIFFASY

SEQ ID NO: 71424 - protein, 9 aa, synthetic construct
  source 1..9: note = Seed: VRMYIFFAS
VRMYIFFAT

SEQ ID NO: 71425 - protein, 9 aa, synthetic construct
  source 1..9: note = Seed: VRMYIFFAS
VRMYIFFAV

SEQ ID NO: 71426 - protein, 9 aa, synthetic construct
  source 1..9: note = Seed: VRMYIFFAS
VRMYIFFAY

SEQ ID NO: 71427 - protein, 10 aa, synthetic construct
  source 1..10: note = Seed: VLPFNDGVYF
VRPFNDGVYW

SEQ ID NO: 71428 - protein, 10 aa, synthetic construct
  source 1..10: note = Seed: VLPFNDGVYF
VRPFNDGVYY

SEQ ID NO: 71429 - protein, 9 aa, synthetic construct
  source 1..9: note = Seed: VRQCSGVTF
VRQCSGVTY

SEQ ID NO: 71430 - protein, 10 aa, synthetic construct
  source 1..10: note = Seed: VLQLPQGTTL
VRQLPQGTTF

SEQ ID NO: 71431 - protein, 10 aa, synthetic construct
  source 1..10: note = Seed: VLQLPQGTTL
VRQLPQGTTM

SEQ ID NO: 71432 - protein, 10 aa, synthetic construct
  source 1..10: note = Seed: VLQLPQGTTL
VRQLPQGTTY

SEQ ID NO: 71433 - protein, 10 aa, synthetic construct
  source 1..10: note = Seed: VNRFNVAITR
VRRFNVAITK

SEQ ID NO: 71434 - protein, 10 aa, synthetic construct
  source 1..10: note = Seed: VNRFNVAITR
VRRFNVAITR

SEQ ID NO: 71435 - protein, 11 aa, synthetic construct
  source 1..11: note = Seed: VKRTIKGTHHW
VRRTIKGTHHW

SEQ ID NO: 71436 - protein, 10 aa, synthetic construct
  source 1..10: note = Seed: VTSAMQTMLF
VRSAMQTMLF

SEQ ID NO: 71437 - protein, 10 aa, synthetic construct
  source 1..10: note = Seed: VTSAMQTMLF
VRSAMQTMLW

SEQ ID NO: 71438 - protein, 10 aa, synthetic construct
  source 1..10: note = Seed: VTSAMQTMLF
VRSAMQTMLY

SEQ ID NO: 71439 - protein, 11 aa, synthetic construct
  source 1..11: note = Seed: VYSFLPGVYSV
VRSFLPGVYSF

SEQ ID NO: 71440 - protein, 10 aa, synthetic construct
  source 1..10: note = Seed: VNSFSGYLKL
VRSFSGYLKF

SEQ ID NO: 71441 - protein, 10 aa, synthetic construct
  source 1..10: note = Seed: VNSFSGYLKL
VRSFSGYLKM

SEQ ID NO: 71442 - protein, 10 aa, synthetic construct
  source 1..10: note = Seed: VNSFSGYLKL
VRSFSGYLKW

SEQ ID NO: 71443 - protein, 10 aa, synthetic construct
  source 1..10: note = Seed: VNSFSGYLKL
VRSFSGYLKY

SEQ ID NO: 71444 - protein, 10 aa, synthetic construct
  source 1..10: note = Seed: VYSSANNCTF
VRSSANNCTW

SEQ ID NO: 71445 - protein, 9 aa, synthetic construct
  source 1..9: note = Seed: VYSTGSNVF
VRSTGSNVF

SEQ ID NO: 71446 - protein, 9 aa, synthetic construct
  source 1..9: note = Seed: VYSTGSNVF
VRSTGSNVY

SEQ ID NO: 71447 - protein, 10 aa, synthetic construct
  source 1..10: note = Seed: VVSTGYHFRE
VRSTGYHFRR

SEQ ID NO: 71448 - protein, 11 aa, synthetic construct
  source 1..11: note = Seed: VDSYYSLLMPI
VRSYYSLLMPF

SEQ ID NO: 71449 - protein, 10 aa, synthetic construct
  source 1..10: note = Seed: VRTIKVFTTV
VRTIKVFTTL

SEQ ID NO: 71450 - protein, 10 aa, synthetic construct
  source 1..10: note = Seed: VNVLAWLYAA
VRVLAWLYAI

SEQ ID NO: 71451 - protein, 10 aa, synthetic construct
  source 1..10: note = Seed: VNVLAWLYAA
VRVLAWLYAL

SEQ ID NO: 71452 - protein, 10 aa, synthetic construct
  source 1..10: note = Seed: VNVLAWLYAA
VRVLAWLYAV

SEQ ID NO: 71453 - protein, 11 aa, synthetic construct
  source 1..11: note = Seed: VFVLWAHGFEL
VRVLWAHGFEI

SEQ ID NO: 71454 - protein, 11 aa, synthetic construct
  source 1..11: note = Seed: VFVLWAHGFEL
VRVLWAHGFEL

SEQ ID NO: 71455 - protein, 11 aa, synthetic construct
  source 1..11: note = Seed: VFVLWAHGFEL
VRVLWAHGFEV

SEQ ID NO: 71456 - protein, 9 aa, synthetic construct
  source 1..9: note = Seed: VQVTCGTTT
VRVTCGTTF

SEQ ID NO: 71457 - protein, 9 aa, synthetic construct
  source 1..9: note = Seed: VQVTCGTTT
VRVTCGTTM

SEQ ID NO: 71458 - protein, 9 aa, synthetic construct
  source 1..9: note = Seed: VQVTCGTTT
VRVTCGTTY

SEQ ID NO: 71459 - protein, 9 aa, synthetic construct
  source 1..9: note = Seed: VLWAHGFEL
VRWAHGFEF

SEQ ID NO: 71460 - protein, 9 aa, synthetic construct
  source 1..9: note = Seed: VLWAHGFEL
VRWAHGFEM

SEQ ID NO: 71461 - protein, 9 aa, synthetic construct
  source 1..9: note = Seed: VLWAHGFEL
VRWAHGFEY

SEQ ID NO: 71462 - protein, 9 aa, synthetic construct
  source 1..9: note = Seed: VMYASAVVL
VRYASAVVF

SEQ ID NO: 71463 - protein, 9 aa, synthetic construct
  source 1..9: note = Seed: VMYASAVVL
VRYASAVVL

SEQ ID NO: 71464 - protein, 10 aa, synthetic construct
  source 1..10: note = Seed: VMYASAVVLL
VRYASAVVLF

SEQ ID NO: 71465 - protein, 10 aa, synthetic construct
  source 1..10: note = Seed: VMYASAVVLL
VRYASAVVLI

SEQ ID NO: 71466 - protein, 10 aa, synthetic construct
  source 1..10: note = Seed: VMYASAVVLL
VRYASAVVLL

SEQ ID NO: 71467 - protein, 11 aa, synthetic construct
  source 1..11: note = Seed: VMYASAVVLLI
VRYASAVVLLF

SEQ ID NO: 71468 - protein, 10 aa, synthetic construct
  source 1..10: note = Seed: VMYASAVVLL
VRYASAVVLM

SEQ ID NO: 71469 - protein, 10 aa, synthetic construct
  source 1..10: note = Seed: VMYASAVVLL
VRYASAVVLW

SEQ ID NO: 71470 - protein, 10 aa, synthetic construct
  source 1..10: note = Seed: VMYASAVVLL
VRYASAVVLY

SEQ ID NO: 71471 - protein, 9 aa, synthetic construct
  source 1..9: note = Seed: VMYASAVVL
VRYASAVVM

SEQ ID NO: 71472 - protein, 9 aa, synthetic construct
  source 1..9: note = Seed: VMYASAVVL
VRYASAVVY

SEQ ID NO: 71473 - protein, 10 aa, synthetic construct
  source 1..10: note = Seed: VPYCYDTNVL
VRYCYDTNVF

SEQ ID NO: 71474 - protein, 9 aa, synthetic construct
  source 1..9: note = Seed: VAYFNMVYM
VRYFNMVYF

SEQ ID NO: 71475 - protein, 9 aa, synthetic construct
  source 1..9: note = Seed: VAYFNMVYM
VRYFNMVYY

SEQ ID NO: 71476 - protein, 10 aa, synthetic construct
  source 1..10: note = Seed: VGYLQPRTFL
VRYLQPRTFF

SEQ ID NO: 71477 - protein, 11 aa, synthetic construct
  source 1..11: note = Seed: VGYLQPRTFLL
VRYLQPRTFLV

SEQ ID NO: 71478 - protein, 10 aa, synthetic construct
  source 1..10: note = Seed: VGYLQPRTFL
VRYLQPRTFW

SEQ ID NO: 71479 - protein, 9 aa, synthetic construct
  source 1..9: note = Seed: VGYLQPRTF
VRYLQPRTY

SEQ ID NO: 71480 - protein, 10 aa, synthetic construct
  source 1..10: note = Seed: VLYQPPQTSI
VRYQPPQTSF

SEQ ID NO: 71481 - protein, 10 aa, synthetic construct
  source 1..10: note = Seed: VLYQPPQTSI
VRYQPPQTSM

SEQ ID NO: 71482 - protein, 10 aa, synthetic construct
  source 1..10: note = Seed: VLYQPPQTSI
VRYQPPQTSW

SEQ ID NO: 71483 - protein, 10 aa, synthetic construct
  source 1..10: note = Seed: VGYQPYRVVV
VRYQPYRVVF

SEQ ID NO: 71484 - protein, 10 aa, synthetic construct
  source 1..10: note = Seed: VGYQPYRVVV
VRYQPYRVVI

SEQ ID NO: 71485 - protein, 10 aa, synthetic construct
  source 1..10: note = Seed: VGYQPYRVVV
VRYQPYRVVL

SEQ ID NO: 71486 - protein, 10 aa, synthetic construct
  source 1..10: note = Seed: VGYQPYRVVV
VRYQPYRVVM

SEQ ID NO: 71487 - protein, 10 aa, synthetic construct
  source 1..10: note = Seed: VGYQPYRVVV
VRYQPYRVVW

SEQ ID NO: 71488 - protein, 10 aa, synthetic construct
  source 1..10: note = Seed: VGYQPYRVVV
VRYQPYRVVY

SEQ ID NO: 71489 - protein, 9 aa, synthetic construct
  source 1..9: note = Seed: VVYRGTTTY
VRYRGTTTF

SEQ ID NO: 71490 - protein, 9 aa, synthetic construct
  source 1..9: note = Seed: VVYRGTTTY
VRYRGTTTM

SEQ ID NO: 71491 - protein, 9 aa, synthetic construct
  source 1..9: note = Seed: VVYRGTTTY
VRYRGTTTY

SEQ ID NO: 71492 - protein, 10 aa, synthetic construct
  source 1..10: note = Seed: VVYRGTTTYK
VRYRGTTTYK

SEQ ID NO: 71493 - protein, 10 aa, synthetic construct
  source 1..10: note = Seed: VVYRGTTTYK
VRYRGTTTYR

SEQ ID NO: 71494 - protein, 10 aa, synthetic construct
  source 1..10: note = Seed: VYYTSNPTTF
VRYTSNPTTF

SEQ ID NO: 71495 - protein, 11 aa, synthetic construct
  source 1..11: note = Seed: VYYTSNPTTFH
VRYTSNPTTFF

SEQ ID NO: 71496 - protein, 10 aa, synthetic construct
  source 1..10: note = Seed: VYYTSNPTTF
VRYTSNPTTY

SEQ ID NO: 71497 - protein, 9 aa, synthetic construct
  source 1..9: note = Seed: VLYYQNNVF
VRYYQNNVF

SEQ ID NO: 71498 - protein, 10 aa, synthetic construct
  source 1..10: note = Seed: VLYYQNNVFM
VRYYQNNVFF

SEQ ID NO: 71499 - protein, 10 aa, synthetic construct
  source 1..10: note = Seed: VLYYQNNVFM
VRYYQNNVFI

SEQ ID NO: 71500 - protein, 10 aa, synthetic construct
  source 1..10: note = Seed: VLYYQNNVFM
VRYYQNNVFL

SEQ ID NO: 71501 - protein, 10 aa, synthetic construct
  source 1..10: note = Seed: VLYYQNNVFM
VRYYQNNVFW

SEQ ID NO: 71502 - protein, 9 aa, synthetic construct
  source 1..9: note = Seed: VLYYQNNVF
VRYYQNNVM

SEQ ID NO: 71503 - protein, 9 aa, synthetic construct
  source 1..9: note = Seed: VLYYQNNVF
VRYYQNNVY

SEQ ID NO: 71504 - protein, 9 aa, synthetic construct
  source 1..9: note = Seed: VLAAECTIF
VSAAECTIF

SEQ ID NO: 71505 - protein, 10 aa, synthetic construct
  source 1..10: note = Seed: VLAAECTIFK
VSAAECTIFK

SEQ ID NO: 71506 - protein, 10 aa, synthetic construct
  source 1..10: note = Seed: VLAAECTIFK
VSAAECTIFR

SEQ ID NO: 71507 - protein, 9 aa, synthetic construct
  source 1..9: note = Seed: VVAIDYKHY
VSAIDYKHF

SEQ ID NO: 71508 - protein, 9 aa, synthetic construct
  source 1..9: note = Seed: VVAIDYKHY
VSAIDYKHW

SEQ ID NO: 71509 - protein, 9 aa, synthetic construct
  source 1..9: note = Seed: VTANVNALL
VSANVNALF

SEQ ID NO: 71510 - protein, 9 aa, synthetic construct
  source 1..9: note = Seed: VTANVNALL
VSANVNALI

SEQ ID NO: 71511 - protein, 9 aa, synthetic construct
  source 1..9: note = Seed: VTANVNALL
VSANVNALL

SEQ ID NO: 71512 - protein, 9 aa, synthetic construct
  source 1..9: note = Seed: VTANVNALL
VSANVNALM

SEQ ID NO: 71513 - protein, 9 aa, synthetic construct
  source 1..9: note = Seed: VTANVNALL
VSANVNALV

SEQ ID NO: 71514 - protein, 9 aa, synthetic construct
  source 1..9: note = Seed: VTANVNALL
VSANVNALW

SEQ ID NO: 71515 - protein, 9 aa, synthetic construct
  source 1..9: note = Seed: VTANVNALL
VSANVNALY

SEQ ID NO: 71516 - protein, 10 aa, synthetic construct
  source 1..10: note = Seed: VFAQVKQIYK
VSAQVKQIYK

SEQ ID NO: 71517 - protein, 10 aa, synthetic construct
  source 1..10: note = Seed: VFAQVKQIYK
VSAQVKQIYR

SEQ ID NO: 71518 - protein, 9 aa, synthetic construct
  source 1..9: note = Seed: VNASSSEAF
VSASSSEAF

SEQ ID NO: 71519 - protein, 9 aa, synthetic construct
  source 1..9: note = Seed: VNASSSEAF
VSASSSEAY

SEQ ID NO: 71520 - protein, 9 aa, synthetic construct
  source 1..9: note = Seed: VLAWLYAAV
VSAWLYAAI

SEQ ID NO: 71521 - protein, 9 aa, synthetic construct
  source 1..9: note = Seed: VLAWLYAAV
VSAWLYAAV

SEQ ID NO: 71522 - protein, 9 aa, synthetic construct
  source 1..9: note = Seed: VMAYITGGV
VSAYITGGI

SEQ ID NO: 71523 - protein, 9 aa, synthetic construct
  source 1..9: note = Seed: VMAYITGGV
VSAYITGGV

SEQ ID NO: 71524 - protein, 9 aa, synthetic construct
  source 1..9: note = Seed: VSDIDITFL
VSDIDITFF

SEQ ID NO: 71525 - protein, 10 aa, synthetic construct
  source 1..10: note = Seed: VSDIDITFLK
VSDIDITFLR

SEQ ID NO: 71526 - protein, 9 aa, synthetic construct
  source 1..9: note = Seed: VSDIDITFL
VSDIDITFM

SEQ ID NO: 71527 - protein, 9 aa, synthetic construct
  source 1..9: note = Seed: VSDIDYVPL
VSDIDYVPM

SEQ ID NO: 71528 - protein, 9 aa, synthetic construct
  source 1..9: note = Seed: VVDSYYSLL
VSDSYYSLF

SEQ ID NO: 71529 - protein, 9 aa, synthetic construct
  source 1..9: note = Seed: VVDSYYSLL
VSDSYYSLI

SEQ ID NO: 71530 - protein, 9 aa, synthetic construct
  source 1..9: note = Seed: VVDSYYSLL
VSDSYYSLL

SEQ ID NO: 71531 - protein, 10 aa, synthetic construct
  source 1..10: note = Seed: VVDSYYSLLM
VSDSYYSLLY

SEQ ID NO: 71532 - protein, 9 aa, synthetic construct
  source 1..9: note = Seed: VVDSYYSLL
VSDSYYSLM

SEQ ID NO: 71533 - protein, 9 aa, synthetic construct
  source 1..9: note = Seed: VVDSYYSLL
VSDSYYSLV

SEQ ID NO: 71534 - protein, 11 aa, synthetic construct
  source 1..11: note = Seed: VYDYLVSTQEF
VSDYLVSTQEF

SEQ ID NO: 71535 - protein, 11 aa, synthetic construct
  source 1..11: note = Seed: VYDYLVSTQEF
VSDYLVSTQEI

SEQ ID NO: 71536 - protein, 11 aa, synthetic construct
  source 1..11: note = Seed: VYDYLVSTQEF
VSDYLVSTQEW

SEQ ID NO: 71537 - protein, 10 aa, synthetic construct
  source 1..10: note = Seed: VAEWFLAYIL
VSEWFLAYIL

SEQ ID NO: 71538 - protein, 9 aa, synthetic construct
  source 1..9: note = Seed: VAFELWAKR
VSFELWAKR

SEQ ID NO: 71539 - protein, 9 aa, synthetic construct
  source 1..9: note = Seed: VTFFIYNKI
VSFFIYNKF

SEQ ID NO: 71540 - protein, 9 aa, synthetic construct
  source 1..9: note = Seed: VTFFIYNKI
VSFFIYNKM

SEQ ID NO: 71541 - protein, 9 aa, synthetic construct
  source 1..9: note = Seed: VTFFIYNKI
VSFFIYNKV

SEQ ID NO: 71542 - protein, 9 aa, synthetic construct
  source 1..9: note = Seed: VTFFIYNKI
VSFFIYNKW

SEQ ID NO: 71543 - protein, 9 aa, synthetic construct
  source 1..9: note = Seed: VTFFIYNKI
VSFFIYNKY

SEQ ID NO: 71544 - protein, 9 aa, synthetic construct
  source 1..9: note = Seed: VTFGDDTVI
VSFGDDTVF

SEQ ID NO: 71545 - protein, 9 aa, synthetic construct
  source 1..9: note = Seed: VTFGDDTVI
VSFGDDTVI

SEQ ID NO: 71546 - protein, 9 aa, synthetic construct
  source 1..9: note = Seed: VTFGDDTVI
VSFGDDTVL

SEQ ID NO: 71547 - protein, 9 aa, synthetic construct
  source 1..9: note = Seed: VTFGDDTVI
VSFGDDTVM

SEQ ID NO: 71548 - protein, 9 aa, synthetic construct
  source 1..9: note = Seed: VTFGDDTVI
VSFGDDTVW

SEQ ID NO: 71549 - protein, 9 aa, synthetic construct
  source 1..9: note = Seed: VTFGDDTVI
VSFGDDTVY

SEQ ID NO: 71550 - protein, 9 aa, synthetic construct
  source 1..9: note = Seed: VHFISNSWL
VSFISNSWF

SEQ ID NO: 71551 - protein, 9 aa, synthetic construct
  source 1..9: note = Seed: VHFISNSWL
VSFISNSWY

SEQ ID NO: 71552 - protein, 9 aa, synthetic construct
  source 1..9: note = Seed: VSFLAHIQW
VSFLAHIQF

SEQ ID NO: 71553 - protein, 9 aa, synthetic construct
  source 1..9: note = Seed: VSFLAHIQW
VSFLAHIQI

SEQ ID NO: 71554 - protein, 9 aa, synthetic construct
  source 1..9: note = Seed: VSFLAHIQW
VSFLAHIQL

SEQ ID NO: 71555 - protein, 9 aa, synthetic construct
  source 1..9: note = Seed: VSFLAHIQW
VSFLAHIQM

SEQ ID NO: 71556 - protein, 10 aa, synthetic construct
  source 1..10: note = Seed: VSFLAHIQWM
VSFLAHIQWF

SEQ ID NO: 71557 - protein, 10 aa, synthetic construct
  source 1..10: note = Seed: VSFLAHIQWM
VSFLAHIQWW

SEQ ID NO: 71558 - protein, 10 aa, synthetic construct
  source 1..10: note = Seed: VSFLAHIQWM
VSFLAHIQWY

SEQ ID NO: 71559 - protein, 9 aa, synthetic construct
  source 1..9: note = Seed: VSFLAHIQW
VSFLAHIQY

SEQ ID NO: 71560 - protein, 9 aa, synthetic construct
  source 1..9: note = Seed: VVFLHVTYV
VSFLHVTYF

SEQ ID NO: 71561 - protein, 9 aa, synthetic construct
  source 1..9: note = Seed: VVFLHVTYV
VSFLHVTYI

SEQ ID NO: 71562 - protein, 9 aa, synthetic construct
  source 1..9: note = Seed: VVFLHVTYV
VSFLHVTYK

SEQ ID NO: 71563 - protein, 9 aa, synthetic construct
  source 1..9: note = Seed: VVFLHVTYV
VSFLHVTYL

SEQ ID NO: 71564 - protein, 9 aa, synthetic construct
  source 1..9: note = Seed: VVFLHVTYV
VSFLHVTYM

SEQ ID NO: 71565 - protein, 9 aa, synthetic construct
  source 1..9: note = Seed: VVFLHVTYV
VSFLHVTYV

SEQ ID NO: 71566 - protein, 9 aa, synthetic construct
  source 1..9: note = Seed: VVFLHVTYV
VSFLHVTYY

SEQ ID NO: 71567 - protein, 10 aa, synthetic construct
  source 1..10: note = Seed: VEFLRDGWEI
VSFLRDGWEF

SEQ ID NO: 71568 - protein, 8 aa, synthetic construct
  source 1..8: note = Seed: VVFNGVSF
VSFNGVSF

SEQ ID NO: 71569 - protein, 11 aa, synthetic construct
  source 1..11: note = Seed: VVFNGVSFSTF
VSFNGVSFSTF

SEQ ID NO: 71570 - protein, 11 aa, synthetic construct
  source 1..11: note = Seed: VVFNGVSFSTF
VSFNGVSFSTL

SEQ ID NO: 71571 - protein, 11 aa, synthetic construct
  source 1..11: note = Seed: VVFNGVSFSTF
VSFNGVSFSTM

SEQ ID NO: 71572 - protein, 11 aa, synthetic construct
  source 1..11: note = Seed: VVFNGVSFSTF
VSFNGVSFSTW

SEQ ID NO: 71573 - protein, 11 aa, synthetic construct
  source 1..11: note = Seed: VVFNGVSFSTF
VSFNGVSFSTY

SEQ ID NO: 71574 - protein, 8 aa, synthetic construct
  source 1..8: note = Seed: VVFNGVSF
VSFNGVSW

SEQ ID NO: 71575 - protein, 8 aa, synthetic construct
  source 1..8: note = Seed: VVFNGVSF
VSFNGVSY

SEQ ID NO: 71576 - protein, 11 aa, synthetic construct
  source 1..11: note = Seed: VSFSTFEEAAL
VSFSTFEEAAF

SEQ ID NO: 71577 - protein, 11 aa, synthetic construct
  source 1..11: note = Seed: VSFSTFEEAAL
VSFSTFEEAAW

SEQ ID NO: 71578 - protein, 11 aa, synthetic construct
  source 1..11: note = Seed: VSFSTFEEAAL
VSFSTFEEAAY

SEQ ID NO: 71579 - protein, 10 aa, synthetic construct
  source 1..10: note = Seed: VVFVLWAHGF
VSFVLWAHGF

SEQ ID NO: 71580 - protein, 10 aa, synthetic construct
  source 1..10: note = Seed: VVFVLWAHGF
VSFVLWAHGW

SEQ ID NO: 71581 - protein, 10 aa, synthetic construct
  source 1..10: note = Seed: VVFVLWAHGF
VSFVLWAHGY

SEQ ID NO: 71582 - protein, 9 aa, synthetic construct
  source 1..9: note = Seed: VPFVVSTGY
VSFVVSTGF

SEQ ID NO: 71583 - protein, 9 aa, synthetic construct
  source 1..9: note = Seed: VPFVVSTGY
VSFVVSTGY

SEQ ID NO: 71584 - protein, 10 aa, synthetic construct
  source 1..10: note = Seed: VAGDSGFAAY
VSGDSGFAAY

SEQ ID NO: 71585 - protein, 9 aa, synthetic construct
  source 1..9: note = Seed: VIGFLFLTW
VSGFLFLTF

SEQ ID NO: 71586 - protein, 9 aa, synthetic construct
  source 1..9: note = Seed: VIGFLFLTW
VSGFLFLTL

SEQ ID NO: 71587 - protein, 9 aa, synthetic construct
  source 1..9: note = Seed: VIGFLFLTW
VSGFLFLTM

SEQ ID NO: 71588 - protein, 9 aa, synthetic construct
  source 1..9: note = Seed: VIGFLFLTW
VSGFLFLTW

SEQ ID NO: 71589 - protein, 9 aa, synthetic construct
  source 1..9: note = Seed: VIGFLFLTW
VSGFLFLTY

SEQ ID NO: 71590 - protein, 9 aa, synthetic construct
  source 1..9: note = Seed: VGGNYNYLY
VSGNYNYLY

SEQ ID NO: 71591 - protein, 10 aa, synthetic construct
  source 1..10: note = Seed: VGGNYNYLYR
VSGNYNYLYR

SEQ ID NO: 71592 - protein, 9 aa, synthetic construct
  source 1..9: note = Seed: VMHANYIFW
VSHANYIFF

SEQ ID NO: 71593 - protein, 9 aa, synthetic construct
  source 1..9: note = Seed: VMHANYIFW
VSHANYIFL

SEQ ID NO: 71594 - protein, 9 aa, synthetic construct
  source 1..9: note = Seed: VMHANYIFW
VSHANYIFM

SEQ ID NO: 71595 - protein, 9 aa, synthetic construct
  source 1..9: note = Seed: VMHANYIFW
VSHANYIFW

SEQ ID NO: 71596 - protein, 9 aa, synthetic construct
  source 1..9: note = Seed: VMHANYIFW
VSHANYIFY

SEQ ID NO: 71597 - protein, 9 aa, synthetic construct
  source 1..9: note = Seed: VLHDIGNPK
VSHDIGNPK

SEQ ID NO: 71598 - protein, 9 aa, synthetic construct
  source 1..9: note = Seed: VLHDIGNPK
VSHDIGNPR

SEQ ID NO: 71599 - protein, 10 aa, synthetic construct
  source 1..10: note = Seed: VFHLYLQYIR
VSHLYLQYIR

SEQ ID NO: 71600 - protein, 9 aa, synthetic construct
  source 1..9: note = Seed: VTHSKGLYR
VSHSKGLYA

SEQ ID NO: 71601 - protein, 9 aa, synthetic construct
  source 1..9: note = Seed: VTHSKGLYR
VSHSKGLYK

SEQ ID NO: 71602 - protein, 9 aa, synthetic construct
  source 1..9: note = Seed: VTHSKGLYR
VSHSKGLYR

SEQ ID NO: 71603 - protein, 10 aa, synthetic construct
  source 1..10: note = Seed: VTHSKGLYRK
VSHSKGLYRR

SEQ ID NO: 71604 - protein, 10 aa, synthetic construct
  source 1..10: note = Seed: VLHSYFTSDY
VSHSYFTSDF

SEQ ID NO: 71605 - protein, 10 aa, synthetic construct
  source 1..10: note = Seed: VLHSYFTSDY
VSHSYFTSDY

SEQ ID NO: 71606 - protein, 11 aa, synthetic construct
  source 1..11: note = Seed: VLHSYFTSDYY
VSHSYFTSDYF

SEQ ID NO: 71607 - protein, 11 aa, synthetic construct
  source 1..11: note = Seed: VLHSYFTSDYY
VSHSYFTSDYW

SEQ ID NO: 71608 - protein, 11 aa, synthetic construct
  source 1..11: note = Seed: VLHSYFTSDYY
VSHSYFTSDYY

SEQ ID NO: 71609 - protein, 9 aa, synthetic construct
  source 1..9: note = Seed: VEHVTFFIY
VSHVTFFIF

SEQ ID NO: 71610 - protein, 9 aa, synthetic construct
  source 1..9: note = Seed: VEHVTFFIY
VSHVTFFIY

SEQ ID NO: 71611 - protein, 9 aa, synthetic construct
  source 1..9: note = Seed: VTIAEILLI
VSIAEILLF

SEQ ID NO: 71612 - protein, 9 aa, synthetic construct
  source 1..9: note = Seed: VTIAEILLI
VSIAEILLI

SEQ ID NO: 71613 - protein, 10 aa, synthetic construct
  source 1..10: note = Seed: VTIAEILLII
VSIAEILLIF

SEQ ID NO: 71614 - protein, 11 aa, synthetic construct
  source 1..11: note = Seed: VTIAEILLIIM
VSIAEILLIIF

SEQ ID NO: 71615 - protein, 10 aa, synthetic construct
  source 1..10: note = Seed: VTIAEILLII
VSIAEILLIM

SEQ ID NO: 71616 - protein, 10 aa, synthetic construct
  source 1..10: note = Seed: VTIAEILLII
VSIAEILLIV

SEQ ID NO: 71617 - protein, 10 aa, synthetic construct
  source 1..10: note = Seed: VTIAEILLII
VSIAEILLIW

SEQ ID NO: 71618 - protein, 10 aa, synthetic construct
  source 1..10: note = Seed: VTIAEILLII
VSIAEILLIY

SEQ ID NO: 71619 - protein, 9 aa, synthetic construct
  source 1..9: note = Seed: VTIAEILLI
VSIAEILLL

SEQ ID NO: 71620 - protein, 9 aa, synthetic construct
  source 1..9: note = Seed: VTIAEILLI
VSIAEILLM

SEQ ID NO: 71621 - protein, 9 aa, synthetic construct
  source 1..9: note = Seed: VTIAEILLI
VSIAEILLV

SEQ ID NO: 71622 - protein, 9 aa, synthetic construct
  source 1..9: note = Seed: VTIAEILLI
VSIAEILLW

SEQ ID NO: 71623 - protein, 9 aa, synthetic construct
  source 1..9: note = Seed: VTIAEILLI
VSIAEILLY

SEQ ID NO: 71624 - protein, 10 aa, synthetic construct
  source 1..10: note = Seed: VSICSTMTNR
VSICSTMTNK

SEQ ID NO: 71625 - protein, 9 aa, synthetic construct
  source 1..9: note = Seed: VQIDRLITG
VSIDRLITF

SEQ ID NO: 71626 - protein, 9 aa, synthetic construct
  source 1..9: note = Seed: VQIDRLITG
VSIDRLITY

SEQ ID NO: 71627 - protein, 9 aa, synthetic construct
  source 1..9: note = Seed: VSIINNTVY
VSIINNTVF

SEQ ID NO: 71628 - protein, 9 aa, synthetic construct
  source 1..9: note = Seed: VSIINNTVY
VSIINNTVI

SEQ ID NO: 71629 - protein, 9 aa, synthetic construct
  source 1..9: note = Seed: VSIINNTVY
VSIINNTVL

SEQ ID NO: 71630 - protein, 9 aa, synthetic construct
  source 1..9: note = Seed: VSIINNTVY
VSIINNTVM

SEQ ID NO: 71631 - protein, 9 aa, synthetic construct
  source 1..9: note = Seed: VSIINNTVY
VSIINNTVW

SEQ ID NO: 71632 - protein, 10 aa, synthetic construct
  source 1..10: note = Seed: VAIKITEHSW
VSIKITEHSF

SEQ ID NO: 71633 - protein, 10 aa, synthetic construct
  source 1..10: note = Seed: VAIKITEHSW
VSIKITEHSM

SEQ ID NO: 71634 - protein, 10 aa, synthetic construct
  source 1..10: note = Seed: VAIKITEHSW
VSIKITEHSW

SEQ ID NO: 71635 - protein, 11 aa, synthetic construct
  source 1..11: note = Seed: VAIKITEHSWN
VSIKITEHSWW

SEQ ID NO: 71636 - protein, 10 aa, synthetic construct
  source 1..10: note = Seed: VAIKITEHSW
VSIKITEHSY

SEQ ID NO: 71637 - protein, 10 aa, synthetic construct
  source 1..10: note = Seed: VNINIVGDFK
VSINIVGDFK

SEQ ID NO: 71638 - protein, 10 aa, synthetic construct
  source 1..10: note = Seed: VNINIVGDFK
VSINIVGDFR

SEQ ID NO: 71639 - protein, 9 aa, synthetic construct
  source 1..9: note = Seed: VVIPDYNTY
VSIPDYNTF

SEQ ID NO: 71640 - protein, 9 aa, synthetic construct
  source 1..9: note = Seed: VVIPDYNTY
VSIPDYNTI

SEQ ID NO: 71641 - protein, 9 aa, synthetic construct
  source 1..9: note = Seed: VVIPDYNTY
VSIPDYNTL

SEQ ID NO: 71642 - protein, 9 aa, synthetic construct
  source 1..9: note = Seed: VVIPDYNTY
VSIPDYNTM

SEQ ID NO: 71643 - protein, 9 aa, synthetic construct
  source 1..9: note = Seed: VVIPDYNTY
VSIPDYNTW

SEQ ID NO: 71644 - protein, 9 aa, synthetic construct
  source 1..9: note = Seed: VVIPDYNTY
VSIPDYNTY

SEQ ID NO: 71645 - protein, 10 aa, synthetic construct
  source 1..10: note = Seed: VVIPDYNTYK
VSIPDYNTYK

SEQ ID NO: 71646 - protein, 10 aa, synthetic construct
  source 1..10: note = Seed: VVIPDYNTYK
VSIPDYNTYR

SEQ ID NO: 71647 - protein, 10 aa, synthetic construct
  source 1..10: note = Seed: VFKNIDGYFK
VSKNIDGYFR

SEQ ID NO: 71648 - protein, 9 aa, synthetic construct
  source 1..9: note = Seed: VVKRHTFSN
VSKRHTFSA

SEQ ID NO: 71649 - protein, 9 aa, synthetic construct
  source 1..9: note = Seed: VVKRHTFSN
VSKRHTFSI

SEQ ID NO: 71650 - protein, 9 aa, synthetic construct
  source 1..9: note = Seed: VVKRHTFSN
VSKRHTFSK

SEQ ID NO: 71651 - protein, 9 aa, synthetic construct
  source 1..9: note = Seed: VVKRHTFSN
VSKRHTFSL

SEQ ID NO: 71652 - protein, 9 aa, synthetic construct
  source 1..9: note = Seed: VVKRHTFSN
VSKRHTFSM

SEQ ID NO: 71653 - protein, 10 aa, synthetic construct
  source 1..10: note = Seed: VVKRHTFSNY
VSKRHTFSNK

SEQ ID NO: 71654 - protein, 9 aa, synthetic construct
  source 1..9: note = Seed: VVKRHTFSN
VSKRHTFSS

SEQ ID NO: 71655 - protein, 9 aa, synthetic construct
  source 1..9: note = Seed: VVKRHTFSN
VSKRHTFSV

SEQ ID NO: 71656 - protein, 10 aa, synthetic construct
  source 1..10: note = Seed: VAKYTQLCQY
VSKYTQLCQF

SEQ ID NO: 71657 - protein, 10 aa, synthetic construct
  source 1..10: note = Seed: VAKYTQLCQY
VSKYTQLCQW

SEQ ID NO: 71658 - protein, 10 aa, synthetic construct
  source 1..10: note = Seed: VAKYTQLCQY
VSKYTQLCQY

SEQ ID NO: 71659 - protein, 11 aa, synthetic construct
  source 1..11: note = Seed: VAKYTQLCQYL
VSKYTQLCQYF

SEQ ID NO: 71660 - protein, 10 aa, synthetic construct
  source 1..10: note = Seed: VELFENKTTL
VSLFENKTTV

SEQ ID NO: 71661 - protein, 10 aa, synthetic construct
  source 1..10: note = Seed: VQLHNDILLA
VSLHNDILLV

SEQ ID NO: 71662 - protein, 10 aa, synthetic construct
  source 1..10: note = Seed: VNLHSSRLSF
VSLHSSRLSF

SEQ ID NO: 71663 - protein, 10 aa, synthetic construct
  source 1..10: note = Seed: VNLHSSRLSF
VSLHSSRLSY

SEQ ID NO: 71664 - protein, 10 aa, synthetic construct
  source 1..10: note = Seed: VNLKQLPFFY
VSLKQLPFFY

SEQ ID NO: 71665 - protein, 10 aa, synthetic construct
  source 1..10: note = Seed: VVLLSVLQQL
VSLLSVLQQI

SEQ ID NO: 71666 - protein, 10 aa, synthetic construct
  source 1..10: note = Seed: VVLLSVLQQL
VSLLSVLQQL

SEQ ID NO: 71667 - protein, 10 aa, synthetic construct
  source 1..10: note = Seed: VVLLSVLQQL
VSLLSVLQQV

SEQ ID NO: 71668 - protein, 9 aa, synthetic construct
  source 1..9: note = Seed: VGLMWLSYF
VSLMWLSYF

SEQ ID NO: 71669 - protein, 10 aa, synthetic construct
  source 1..10: note = Seed: VGLMWLSYFI
VSLMWLSYFA

SEQ ID NO: 71670 - protein, 10 aa, synthetic construct
  source 1..10: note = Seed: VGLMWLSYFI
VSLMWLSYFI

SEQ ID NO: 71671 - protein, 11 aa, synthetic construct
  source 1..11: note = Seed: VGLMWLSYFIA
VSLMWLSYFIV

SEQ ID NO: 71672 - protein, 10 aa, synthetic construct
  source 1..10: note = Seed: VGLMWLSYFI
VSLMWLSYFL

SEQ ID NO: 71673 - protein, 10 aa, synthetic construct
  source 1..10: note = Seed: VGLMWLSYFI
VSLMWLSYFM

SEQ ID NO: 71674 - protein, 10 aa, synthetic construct
  source 1..10: note = Seed: VGLMWLSYFI
VSLMWLSYFT

SEQ ID NO: 71675 - protein, 10 aa, synthetic construct
  source 1..10: note = Seed: VGLMWLSYFI
VSLMWLSYFV

SEQ ID NO: 71676 - protein, 9 aa, synthetic construct
  source 1..9: note = Seed: VGLMWLSYF
VSLMWLSYI

SEQ ID NO: 71677 - protein, 9 aa, synthetic construct
  source 1..9: note = Seed: VGLMWLSYF
VSLMWLSYL

SEQ ID NO: 71678 - protein, 9 aa, synthetic construct
  source 1..9: note = Seed: VGLMWLSYF
VSLMWLSYM

SEQ ID NO: 71679 - protein, 9 aa, synthetic construct
  source 1..9: note = Seed: VGLMWLSYF
VSLMWLSYW

SEQ ID NO: 71680 - protein, 9 aa, synthetic construct
  source 1..9: note = Seed: VGLMWLSYF
VSLMWLSYY

SEQ ID NO: 71681 - protein, 9 aa, synthetic construct
  source 1..9: note = Seed: VVLSFELLH
VSLSFELLK

SEQ ID NO: 71682 - protein, 9 aa, synthetic construct
  source 1..9: note = Seed: VVLSFELLH
VSLSFELLY

SEQ ID NO: 71683 - protein, 10 aa, synthetic construct
  source 1..10: note = Seed: VELVAELEGI
VSLVAELEGV

SEQ ID NO: 71684 - protein, 10 aa, synthetic construct
  source 1..10: note = Seed: VVMAYITGGV
VSMAYITGGI

SEQ ID NO: 71685 - protein, 10 aa, synthetic construct
  source 1..10: note = Seed: VVMAYITGGV
VSMAYITGGL

SEQ ID NO: 71686 - protein, 10 aa, synthetic construct
  source 1..10: note = Seed: VVMAYITGGV
VSMAYITGGV

SEQ ID NO: 71687 - protein, 9 aa, synthetic construct
  source 1..9: note = Seed: VQMLSDTLK
VSMLSDTLK

SEQ ID NO: 71688 - protein, 10 aa, synthetic construct
  source 1..10: note = Seed: VRMYIFFASF
VSMYIFFASF

SEQ ID NO: 71689 - protein, 11 aa, synthetic construct
  source 1..11: note = Seed: VRMYIFFASFY
VSMYIFFASFK

SEQ ID NO: 71690 - protein, 10 aa, synthetic construct
  source 1..10: note = Seed: VRMYIFFASF
VSMYIFFASY

SEQ ID NO: 71691 - protein, 10 aa, synthetic construct
  source 1..10: note = Seed: VFNGVSFSTF
VSNGVSFSTY

SEQ ID NO: 71692 - protein, 9 aa, synthetic construct
  source 1..9: note = Seed: VVNQNAQAL
VSNQNAQAF

SEQ ID NO: 71693 - protein, 9 aa, synthetic construct
  source 1..9: note = Seed: VVNQNAQAL
VSNQNAQAL

SEQ ID NO: 71694 - protein, 9 aa, synthetic construct
  source 1..9: note = Seed: VVNQNAQAL
VSNQNAQAM

SEQ ID NO: 71695 - protein, 9 aa, synthetic construct
  source 1..9: note = Seed: VVNQNAQAL
VSNQNAQAV

SEQ ID NO: 71696 - protein, 9 aa, synthetic construct
  source 1..9: note = Seed: VVNQNAQAL
VSNQNAQAY

SEQ ID NO: 71697 - protein, 10 aa, synthetic construct
  source 1..10: note = Seed: VLPFNDGVYF
VSPFNDGVYW

SEQ ID NO: 71698 - protein, 10 aa, synthetic construct
  source 1..10: note = Seed: VLPFNDGVYF
VSPFNDGVYY

SEQ ID NO: 71699 - protein, 11 aa, synthetic construct
  source 1..11: note = Seed: VAPGTAVLRQW
VSPGTAVLRQW

SEQ ID NO: 71700 - protein, 9 aa, synthetic construct
  source 1..9: note = Seed: VRQCSGVTF
VSQCSGVTF

SEQ ID NO: 71701 - protein, 9 aa, synthetic construct
  source 1..9: note = Seed: VRQCSGVTF
VSQCSGVTY

SEQ ID NO: 71702 - protein, 10 aa, synthetic construct
  source 1..10: note = Seed: VLQLPQGTTL
VSQLPQGTTF

SEQ ID NO: 71703 - protein, 10 aa, synthetic construct
  source 1..10: note = Seed: VLQLPQGTTL
VSQLPQGTTM

SEQ ID NO: 71704 - protein, 10 aa, synthetic construct
  source 1..10: note = Seed: VLQLPQGTTL
VSQLPQGTTY

SEQ ID NO: 71705 - protein, 9 aa, synthetic construct
  source 1..9: note = Seed: VTRCLNRVC
VSRCLNRVA

SEQ ID NO: 71706 - protein, 9 aa, synthetic construct
  source 1..9: note = Seed: VTRCLNRVC
VSRCLNRVK

SEQ ID NO: 71707 - protein, 9 aa, synthetic construct
  source 1..9: note = Seed: VARDLSLQF
VSRDLSLQF

SEQ ID NO: 71708 - protein, 10 aa, synthetic construct
  source 1..10: note = Seed: VARDLSLQFK
VSRDLSLQFK

SEQ ID NO: 71709 - protein, 10 aa, synthetic construct
  source 1..10: note = Seed: VARDLSLQFK
VSRDLSLQFR

SEQ ID NO: 71710 - protein, 9 aa, synthetic construct
  source 1..9: note = Seed: VARDLSLQF
VSRDLSLQI

SEQ ID NO: 71711 - protein, 9 aa, synthetic construct
  source 1..9: note = Seed: VARDLSLQF
VSRDLSLQL

SEQ ID NO: 71712 - protein, 9 aa, synthetic construct
  source 1..9: note = Seed: VARDLSLQF
VSRDLSLQM

SEQ ID NO: 71713 - protein, 9 aa, synthetic construct
  source 1..9: note = Seed: VARDLSLQF
VSRDLSLQW

SEQ ID NO: 71714 - protein, 9 aa, synthetic construct
  source 1..9: note = Seed: VARDLSLQF
VSRDLSLQY

SEQ ID NO: 71715 - protein, 9 aa, synthetic construct
  source 1..9: note = Seed: VTRELMREL
VSRELMREF

SEQ ID NO: 71716 - protein, 9 aa, synthetic construct
  source 1..9: note = Seed: VTRELMREL
VSRELMREK

SEQ ID NO: 71717 - protein, 9 aa, synthetic construct
  source 1..9: note = Seed: VTRELMREL
VSRELMREM

SEQ ID NO: 71718 - protein, 9 aa, synthetic construct
  source 1..9: note = Seed: VTRELMREL
VSRELMREW

SEQ ID NO: 71719 - protein, 9 aa, synthetic construct
  source 1..9: note = Seed: VTRELMREL
VSRELMREY

SEQ ID NO: 71720 - protein, 10 aa, synthetic construct
  source 1..10: note = Seed: VNRFNVAITR
VSRFNVAITR

SEQ ID NO: 71721 - protein, 9 aa, synthetic construct
  source 1..9: note = Seed: VYRGTTTYK
VSRGTTTYA

SEQ ID NO: 71722 - protein, 9 aa, synthetic construct
  source 1..9: note = Seed: VYRGTTTYK
VSRGTTTYI

SEQ ID NO: 71723 - protein, 9 aa, synthetic construct
  source 1..9: note = Seed: VYRGTTTYK
VSRGTTTYK

SEQ ID NO: 71724 - protein, 10 aa, synthetic construct
  source 1..10: note = Seed: VYRGTTTYKL
VSRGTTTYKK

SEQ ID NO: 71725 - protein, 9 aa, synthetic construct
  source 1..9: note = Seed: VYRGTTTYK
VSRGTTTYL

SEQ ID NO: 71726 - protein, 9 aa, synthetic construct
  source 1..9: note = Seed: VYRGTTTYK
VSRGTTTYM

SEQ ID NO: 71727 - protein, 9 aa, synthetic construct
  source 1..9: note = Seed: VYRGTTTYK
VSRGTTTYR

SEQ ID NO: 71728 - protein, 9 aa, synthetic construct
  source 1..9: note = Seed: VYRGTTTYK
VSRGTTTYV

SEQ ID NO: 71729 - protein, 9 aa, synthetic construct
  source 1..9: note = Seed: VKRHTFSNY
VSRHTFSNF

SEQ ID NO: 71730 - protein, 10 aa, synthetic construct
  source 1..10: note = Seed: VVRQCSGVTF
VSRQCSGVTF

SEQ ID NO: 71731 - protein, 10 aa, synthetic construct
  source 1..10: note = Seed: VVRQCSGVTF
VSRQCSGVTM

SEQ ID NO: 71732 - protein, 10 aa, synthetic construct
  source 1..10: note = Seed: VVRQCSGVTF
VSRQCSGVTW

SEQ ID NO: 71733 - protein, 10 aa, synthetic construct
  source 1..10: note = Seed: VVRQCSGVTF
VSRQCSGVTY

SEQ ID NO: 71734 - protein, 11 aa, synthetic construct
  source 1..11: note = Seed: VKRTIKGTHHW
VSRTIKGTHHW

SEQ ID NO: 71735 - protein, 9 aa, synthetic construct
  source 1..9: note = Seed: VTSAMQTML
VSSAMQTMF

SEQ ID NO: 71736 - protein, 9 aa, synthetic construct
  source 1..9: note = Seed: VTSAMQTML
VSSAMQTMI

SEQ ID NO: 71737 - protein, 9 aa, synthetic construct
  source 1..9: note = Seed: VTSAMQTML
VSSAMQTML

SEQ ID NO: 71738 - protein, 10 aa, synthetic construct
  source 1..10: note = Seed: VTSAMQTMLF
VSSAMQTMLF

SEQ ID NO: 71739 - protein, 10 aa, synthetic construct
  source 1..10: note = Seed: VTSAMQTMLF
VSSAMQTMLL

SEQ ID NO: 71740 - protein, 10 aa, synthetic construct
  source 1..10: note = Seed: VTSAMQTMLF
VSSAMQTMLM

SEQ ID NO: 71741 - protein, 10 aa, synthetic construct
  source 1..10: note = Seed: VTSAMQTMLF
VSSAMQTMLW

SEQ ID NO: 71742 - protein, 10 aa, synthetic construct
  source 1..10: note = Seed: VTSAMQTMLF
VSSAMQTMLY

SEQ ID NO: 71743 - protein, 9 aa, synthetic construct
  source 1..9: note = Seed: VTSAMQTML
VSSAMQTMM

SEQ ID NO: 71744 - protein, 9 aa, synthetic construct
  source 1..9: note = Seed: VTSAMQTML
VSSAMQTMW

SEQ ID NO: 71745 - protein, 9 aa, synthetic construct
  source 1..9: note = Seed: VTSAMQTML
VSSAMQTMY

SEQ ID NO: 71746 - protein, 10 aa, synthetic construct
  source 1..10: note = Seed: VVSDIDYVPL
VSSDIDYVPV

SEQ ID NO: 71747 - protein, 9 aa, synthetic construct
  source 1..9: note = Seed: VYSFLPGVY
VSSFLPGVF

SEQ ID NO: 71748 - protein, 9 aa, synthetic construct
  source 1..9: note = Seed: VYSFLPGVY
VSSFLPGVY

SEQ ID NO: 71749 - protein, 11 aa, synthetic construct
  source 1..11: note = Seed: VYSFLPGVYSV
VSSFLPGVYSF

SEQ ID NO: 71750 - protein, 9 aa, synthetic construct
  source 1..9: note = Seed: VNSFSGYLK
VSSFSGYLK

SEQ ID NO: 71751 - protein, 10 aa, synthetic construct
  source 1..10: note = Seed: VNSFSGYLKL
VSSFSGYLKF

SEQ ID NO: 71752 - protein, 10 aa, synthetic construct
  source 1..10: note = Seed: VNSFSGYLKL
VSSFSGYLKL

SEQ ID NO: 71753 - protein, 10 aa, synthetic construct
  source 1..10: note = Seed: VNSFSGYLKL
VSSFSGYLKM

SEQ ID NO: 71754 - protein, 10 aa, synthetic construct
  source 1..10: note = Seed: VNSFSGYLKL
VSSFSGYLKW

SEQ ID NO: 71755 - protein, 10 aa, synthetic construct
  source 1..10: note = Seed: VNSFSGYLKL
VSSFSGYLKY

SEQ ID NO: 71756 - protein, 9 aa, synthetic construct
  source 1..9: note = Seed: VNSFSGYLK
VSSFSGYLR

SEQ ID NO: 71757 - protein, 9 aa, synthetic construct
  source 1..9: note = Seed: VLSGHNLAK
VSSGHNLAK

SEQ ID NO: 71758 - protein, 9 aa, synthetic construct
  source 1..9: note = Seed: VTSNYSGVV
VSSNYSGVF

SEQ ID NO: 71759 - protein, 9 aa, synthetic construct
  source 1..9: note = Seed: VTSNYSGVV
VSSNYSGVL

SEQ ID NO: 71760 - protein, 9 aa, synthetic construct
  source 1..9: note = Seed: VTSNYSGVV
VSSNYSGVM

SEQ ID NO: 71761 - protein, 9 aa, synthetic construct
  source 1..9: note = Seed: VTSNYSGVV
VSSNYSGVY

SEQ ID NO: 71762 - protein, 10 aa, synthetic construct
  source 1..10: note = Seed: VYSSANNCTF
VSSSANNCTF

SEQ ID NO: 71763 - protein, 10 aa, synthetic construct
  source 1..10: note = Seed: VYSSANNCTF
VSSSANNCTW

SEQ ID NO: 71764 - protein, 9 aa, synthetic construct
  source 1..9: note = Seed: VYSTGSNVF
VSSTGSNVF

SEQ ID NO: 71765 - protein, 9 aa, synthetic construct
  source 1..9: note = Seed: VYSTGSNVF
VSSTGSNVY

SEQ ID NO: 71766 - protein, 9 aa, synthetic construct
  source 1..9: note = Seed: VVSTGYHFR
VSSTGYHFK

SEQ ID NO: 71767 - protein, 9 aa, synthetic construct
  source 1..9: note = Seed: VVSTGYHFR
VSSTGYHFR

SEQ ID NO: 71768 - protein, 10 aa, synthetic construct
  source 1..10: note = Seed: VVSTGYHFRE
VSSTGYHFRR

SEQ ID NO: 71769 - protein, 10 aa, synthetic construct
  source 1..10: note = Seed: VNSVLLFLAF
VSSVLLFLAF

SEQ ID NO: 71770 - protein, 10 aa, synthetic construct
  source 1..10: note = Seed: VNSVLLFLAF
VSSVLLFLAW

SEQ ID NO: 71771 - protein, 10 aa, synthetic construct
  source 1..10: note = Seed: VNSVLLFLAF
VSSVLLFLAY

SEQ ID NO: 71772 - protein, 11 aa, synthetic construct
  source 1..11: note = Seed: VDSYYSLLMPI
VSSYYSLLMPF

SEQ ID NO: 71773 - protein, 10 aa, synthetic construct
  source 1..10: note = Seed: VSTGYHFREL
VSTGYHFREF

SEQ ID NO: 71774 - protein, 10 aa, synthetic construct
  source 1..10: note = Seed: VSTGYHFREL
VSTGYHFREW

SEQ ID NO: 71775 - protein, 10 aa, synthetic construct
  source 1..10: note = Seed: VSTGYHFREL
VSTGYHFREY

SEQ ID NO: 71776 - protein, 9 aa, synthetic construct
  source 1..9: note = Seed: VFTGYRVTK
VSTGYRVTR

SEQ ID NO: 71777 - protein, 9 aa, synthetic construct
  source 1..9: note = Seed: VSTQEFRYM
VSTQEFRYF

SEQ ID NO: 71778 - protein, 9 aa, synthetic construct
  source 1..9: note = Seed: VSTQEFRYM
VSTQEFRYW

SEQ ID NO: 71779 - protein, 9 aa, synthetic construct
  source 1..9: note = Seed: VSTQEFRYM
VSTQEFRYY

SEQ ID NO: 71780 - protein, 9 aa, synthetic construct
  source 1..9: note = Seed: VSTSGRWVL
VSTSGRWVF

SEQ ID NO: 71781 - protein, 9 aa, synthetic construct
  source 1..9: note = Seed: VSTSGRWVL
VSTSGRWVM

SEQ ID NO: 71782 - protein, 9 aa, synthetic construct
  source 1..9: note = Seed: VSTSGRWVL
VSTSGRWVW

SEQ ID NO: 71783 - protein, 9 aa, synthetic construct
  source 1..9: note = Seed: VSTSGRWVL
VSTSGRWVY

SEQ ID NO: 71784 - protein, 10 aa, synthetic construct
  source 1..10: note = Seed: VNVAFELWAK
VSVAFELWAK

SEQ ID NO: 71785 - protein, 10 aa, synthetic construct
  source 1..10: note = Seed: VNVAFELWAK
VSVAFELWAR

SEQ ID NO: 71786 - protein, 10 aa, synthetic construct
  source 1..10: note = Seed: VNVLAWLYAA
VSVLAWLYAI

SEQ ID NO: 71787 - protein, 10 aa, synthetic construct
  source 1..10: note = Seed: VNVLAWLYAA
VSVLAWLYAL

SEQ ID NO: 71788 - protein, 10 aa, synthetic construct
  source 1..10: note = Seed: VNVLAWLYAA
VSVLAWLYAV

SEQ ID NO: 71789 - protein, 11 aa, synthetic construct
  source 1..11: note = Seed: VFVLWAHGFEL
VSVLWAHGFEI

SEQ ID NO: 71790 - protein, 11 aa, synthetic construct
  source 1..11: note = Seed: VFVLWAHGFEL
VSVLWAHGFEL

SEQ ID NO: 71791 - protein, 11 aa, synthetic construct
  source 1..11: note = Seed: VFVLWAHGFEL
VSVLWAHGFEV

SEQ ID NO: 71792 - protein, 9 aa, synthetic construct
  source 1..9: note = Seed: VFVLWAHGF
VSVLWAHGY

SEQ ID NO: 71793 - protein, 9 aa, synthetic construct
  source 1..9: note = Seed: VCVSTSGRW
VSVSTSGRF

SEQ ID NO: 71794 - protein, 9 aa, synthetic construct
  source 1..9: note = Seed: VCVSTSGRW
VSVSTSGRL

SEQ ID NO: 71795 - protein, 9 aa, synthetic construct
  source 1..9: note = Seed: VCVSTSGRW
VSVSTSGRM

SEQ ID NO: 71796 - protein, 9 aa, synthetic construct
  source 1..9: note = Seed: VCVSTSGRW
VSVSTSGRW

SEQ ID NO: 71797 - protein, 9 aa, synthetic construct
  source 1..9: note = Seed: VCVSTSGRW
VSVSTSGRY

SEQ ID NO: 71798 - protein, 9 aa, synthetic construct
  source 1..9: note = Seed: VQVTCGTTT
VSVTCGTTF

SEQ ID NO: 71799 - protein, 9 aa, synthetic construct
  source 1..9: note = Seed: VQVTCGTTT
VSVTCGTTM

SEQ ID NO: 71800 - protein, 10 aa, synthetic construct
  source 1..10: note = Seed: VQVTCGTTTL
VSVTCGTTTY

SEQ ID NO: 71801 - protein, 9 aa, synthetic construct
  source 1..9: note = Seed: VQVTCGTTT
VSVTCGTTY

SEQ ID NO: 71802 - protein, 9 aa, synthetic construct
  source 1..9: note = Seed: VLWAHGFEL
VSWAHGFEF

SEQ ID NO: 71803 - protein, 9 aa, synthetic construct
  source 1..9: note = Seed: VLWAHGFEL
VSWAHGFEL

SEQ ID NO: 71804 - protein, 9 aa, synthetic construct
  source 1..9: note = Seed: VLWAHGFEL
VSWAHGFEM

SEQ ID NO: 71805 - protein, 9 aa, synthetic construct
  source 1..9: note = Seed: VLWAHGFEL
VSWAHGFEV

SEQ ID NO: 71806 - protein, 9 aa, synthetic construct
  source 1..9: note = Seed: VLWAHGFEL
VSWAHGFEW

SEQ ID NO: 71807 - protein, 9 aa, synthetic construct
  source 1..9: note = Seed: VLWAHGFEL
VSWAHGFEY

SEQ ID NO: 71808 - protein, 8 aa, synthetic construct
  source 1..8: note = Seed: VMYASAVV
VSYASAVF

SEQ ID NO: 71809 - protein, 9 aa, synthetic construct
  source 1..9: note = Seed: VMYASAVVL
VSYASAVVF

SEQ ID NO: 71810 - protein, 9 aa, synthetic construct
  source 1..9: note = Seed: VMYASAVVL
VSYASAVVI

SEQ ID NO: 71811 - protein, 9 aa, synthetic construct
  source 1..9: note = Seed: VMYASAVVL
VSYASAVVL

SEQ ID NO: 71812 - protein, 10 aa, synthetic construct
  source 1..10: note = Seed: VMYASAVVLL
VSYASAVVLF

SEQ ID NO: 71813 - protein, 10 aa, synthetic construct
  source 1..10: note = Seed: VMYASAVVLL
VSYASAVVLI

SEQ ID NO: 71814 - protein, 10 aa, synthetic construct
  source 1..10: note = Seed: VMYASAVVLL
VSYASAVVLL

SEQ ID NO: 71815 - protein, 11 aa, synthetic construct
  source 1..11: note = Seed: VMYASAVVLLI
VSYASAVVLLF

SEQ ID NO: 71816 - protein, 10 aa, synthetic construct
  source 1..10: note = Seed: VMYASAVVLL
VSYASAVVLM

SEQ ID NO: 71817 - protein, 10 aa, synthetic construct
  source 1..10: note = Seed: VMYASAVVLL
VSYASAVVLW

SEQ ID NO: 71818 - protein, 10 aa, synthetic construct
  source 1..10: note = Seed: VMYASAVVLL
VSYASAVVLY

SEQ ID NO: 71819 - protein, 9 aa, synthetic construct
  source 1..9: note = Seed: VMYASAVVL
VSYASAVVM

SEQ ID NO: 71820 - protein, 9 aa, synthetic construct
  source 1..9: note = Seed: VMYASAVVL
VSYASAVVV

SEQ ID NO: 71821 - protein, 9 aa, synthetic construct
  source 1..9: note = Seed: VMYASAVVL
VSYASAVVW

SEQ ID NO: 71822 - protein, 9 aa, synthetic construct
  source 1..9: note = Seed: VMYASAVVL
VSYASAVVY

SEQ ID NO: 71823 - protein, 8 aa, synthetic construct
  source 1..8: note = Seed: VMYASAVV
VSYASAVY

SEQ ID NO: 71824 - protein, 10 aa, synthetic construct
  source 1..10: note = Seed: VPYCYDTNVL
VSYCYDTNVF

SEQ ID NO: 71825 - protein, 8 aa, synthetic construct
  source 1..8: note = Seed: VAYFNMVY
VSYFNMVF

SEQ ID NO: 71826 - protein, 8 aa, synthetic construct
  source 1..8: note = Seed: VAYFNMVY
VSYFNMVW

SEQ ID NO: 71827 - protein, 8 aa, synthetic construct
  source 1..8: note = Seed: VAYFNMVY
VSYFNMVY

SEQ ID NO: 71828 - protein, 9 aa, synthetic construct
  source 1..9: note = Seed: VAYFNMVYM
VSYFNMVYF

SEQ ID NO: 71829 - protein, 9 aa, synthetic construct
  source 1..9: note = Seed: VAYFNMVYM
VSYFNMVYI

SEQ ID NO: 71830 - protein, 9 aa, synthetic construct
  source 1..9: note = Seed: VAYFNMVYM
VSYFNMVYL

SEQ ID NO: 71831 - protein, 9 aa, synthetic construct
  source 1..9: note = Seed: VAYFNMVYM
VSYFNMVYM

SEQ ID NO: 71832 - protein, 9 aa, synthetic construct
  source 1..9: note = Seed: VAYFNMVYM
VSYFNMVYV

SEQ ID NO: 71833 - protein, 9 aa, synthetic construct
  source 1..9: note = Seed: VAYFNMVYM
VSYFNMVYW

SEQ ID NO: 71834 - protein, 9 aa, synthetic construct
  source 1..9: note = Seed: VAYFNMVYM
VSYFNMVYY

SEQ ID NO: 71835 - protein, 9 aa, synthetic construct
  source 1..9: note = Seed: VTYKLDGVV
VSYKLDGVF

SEQ ID NO: 71836 - protein, 9 aa, synthetic construct
  source 1..9: note = Seed: VTYKLDGVV
VSYKLDGVI

SEQ ID NO: 71837 - protein, 9 aa, synthetic construct
  source 1..9: note = Seed: VTYKLDGVV
VSYKLDGVL

SEQ ID NO: 71838 - protein, 9 aa, synthetic construct
  source 1..9: note = Seed: VTYKLDGVV
VSYKLDGVM

SEQ ID NO: 71839 - protein, 9 aa, synthetic construct
  source 1..9: note = Seed: VTYKLDGVV
VSYKLDGVW

SEQ ID NO: 71840 - protein, 9 aa, synthetic construct
  source 1..9: note = Seed: VTYKLDGVV
VSYKLDGVY

SEQ ID NO: 71841 - protein, 9 aa, synthetic construct
  source 1..9: note = Seed: VGYLQPRTF
VSYLQPRTF

SEQ ID NO: 71842 - protein, 10 aa, synthetic construct
  source 1..10: note = Seed: VGYLQPRTFL
VSYLQPRTFF

SEQ ID NO: 71843 - protein, 11 aa, synthetic construct
  source 1..11: note = Seed: VGYLQPRTFLL
VSYLQPRTFLV

SEQ ID NO: 71844 - protein, 9 aa, synthetic construct
  source 1..9: note = Seed: VGYLQPRTF
VSYLQPRTI

SEQ ID NO: 71845 - protein, 9 aa, synthetic construct
  source 1..9: note = Seed: VGYLQPRTF
VSYLQPRTL

SEQ ID NO: 71846 - protein, 9 aa, synthetic construct
  source 1..9: note = Seed: VGYLQPRTF
VSYLQPRTM

SEQ ID NO: 71847 - protein, 9 aa, synthetic construct
  source 1..9: note = Seed: VGYLQPRTF
VSYLQPRTV

SEQ ID NO: 71848 - protein, 9 aa, synthetic construct
  source 1..9: note = Seed: VGYLQPRTF
VSYLQPRTW

SEQ ID NO: 71849 - protein, 9 aa, synthetic construct
  source 1..9: note = Seed: VGYLQPRTF
VSYLQPRTY

SEQ ID NO: 71850 - protein, 10 aa, synthetic construct
  source 1..10: note = Seed: VLYQPPQTSI
VSYQPPQTSF

SEQ ID NO: 71851 - protein, 10 aa, synthetic construct
  source 1..10: note = Seed: VLYQPPQTSI
VSYQPPQTSM

SEQ ID NO: 71852 - protein, 10 aa, synthetic construct
  source 1..10: note = Seed: VLYQPPQTSI
VSYQPPQTSW

SEQ ID NO: 71853 - protein, 9 aa, synthetic construct
  source 1..9: note = Seed: VGYQPYRVV
VSYQPYRVF

SEQ ID NO: 71854 - protein, 9 aa, synthetic construct
  source 1..9: note = Seed: VGYQPYRVV
VSYQPYRVL

SEQ ID NO: 71855 - protein, 9 aa, synthetic construct
  source 1..9: note = Seed: VGYQPYRVV
VSYQPYRVM

SEQ ID NO: 71856 - protein, 9 aa, synthetic construct
  source 1..9: note = Seed: VGYQPYRVV
VSYQPYRVV

SEQ ID NO: 71857 - protein, 10 aa, synthetic construct
  source 1..10: note = Seed: VGYQPYRVVV
VSYQPYRVVF

SEQ ID NO: 71858 - protein, 10 aa, synthetic construct
  source 1..10: note = Seed: VGYQPYRVVV
VSYQPYRVVI

SEQ ID NO: 71859 - protein, 10 aa, synthetic construct
  source 1..10: note = Seed: VGYQPYRVVV
VSYQPYRVVL

SEQ ID NO: 71860 - protein, 10 aa, synthetic construct
  source 1..10: note = Seed: VGYQPYRVVV
VSYQPYRVVM

SEQ ID NO: 71861 - protein, 10 aa, synthetic construct
  source 1..10: note = Seed: VGYQPYRVVV
VSYQPYRVVW

SEQ ID NO: 71862 - protein, 10 aa, synthetic construct
  source 1..10: note = Seed: VGYQPYRVVV
VSYQPYRVVY

SEQ ID NO: 71863 - protein, 9 aa, synthetic construct
  source 1..9: note = Seed: VGYQPYRVV
VSYQPYRVY

SEQ ID NO: 71864 - protein, 9 aa, synthetic construct
  source 1..9: note = Seed: VVYRGTTTY
VSYRGTTTF

SEQ ID NO: 71865 - protein, 9 aa, synthetic construct
  source 1..9: note = Seed: VVYRGTTTY
VSYRGTTTI

SEQ ID NO: 71866 - protein, 9 aa, synthetic construct
  source 1..9: note = Seed: VVYRGTTTY
VSYRGTTTK

SEQ ID NO: 71867 - protein, 9 aa, synthetic construct
  source 1..9: note = Seed: VVYRGTTTY
VSYRGTTTL

SEQ ID NO: 71868 - protein, 9 aa, synthetic construct
  source 1..9: note = Seed: VVYRGTTTY
VSYRGTTTM

SEQ ID NO: 71869 - protein, 9 aa, synthetic construct
  source 1..9: note = Seed: VVYRGTTTY
VSYRGTTTV

SEQ ID NO: 71870 - protein, 9 aa, synthetic construct
  source 1..9: note = Seed: VVYRGTTTY
VSYRGTTTW

SEQ ID NO: 71871 - protein, 9 aa, synthetic construct
  source 1..9: note = Seed: VVYRGTTTY
VSYRGTTTY

SEQ ID NO: 71872 - protein, 10 aa, synthetic construct
  source 1..10: note = Seed: VVYRGTTTYK
VSYRGTTTYF

SEQ ID NO: 71873 - protein, 10 aa, synthetic construct
  source 1..10: note = Seed: VVYRGTTTYK
VSYRGTTTYK

SEQ ID NO: 71874 - protein, 10 aa, synthetic construct
  source 1..10: note = Seed: VVYRGTTTYK
VSYRGTTTYR

SEQ ID NO: 71875 - protein, 10 aa, synthetic construct
  source 1..10: note = Seed: VVYRGTTTYK
VSYRGTTTYY

SEQ ID NO: 71876 - protein, 10 aa, synthetic construct
  source 1..10: note = Seed: VYYTSNPTTF
VSYTSNPTTF

SEQ ID NO: 71877 - protein, 10 aa, synthetic construct
  source 1..10: note = Seed: VYYTSNPTTF
VSYTSNPTTY

SEQ ID NO: 71878 - protein, 9 aa, synthetic construct
  source 1..9: note = Seed: VLYYQNNVF
VSYYQNNVF

SEQ ID NO: 71879 - protein, 10 aa, synthetic construct
  source 1..10: note = Seed: VLYYQNNVFM
VSYYQNNVFF

SEQ ID NO: 71880 - protein, 10 aa, synthetic construct
  source 1..10: note = Seed: VLYYQNNVFM
VSYYQNNVFI

SEQ ID NO: 71881 - protein, 10 aa, synthetic construct
  source 1..10: note = Seed: VLYYQNNVFM
VSYYQNNVFL

SEQ ID NO: 71882 - protein, 10 aa, synthetic construct
  source 1..10: note = Seed: VLYYQNNVFM
VSYYQNNVFW

SEQ ID NO: 71883 - protein, 9 aa, synthetic construct
  source 1..9: note = Seed: VLYYQNNVF
VSYYQNNVI

SEQ ID NO: 71884 - protein, 9 aa, synthetic construct
  source 1..9: note = Seed: VLYYQNNVF
VSYYQNNVL

SEQ ID NO: 71885 - protein, 9 aa, synthetic construct
  source 1..9: note = Seed: VLYYQNNVF
VSYYQNNVM

SEQ ID NO: 71886 - protein, 9 aa, synthetic construct
  source 1..9: note = Seed: VLYYQNNVF
VSYYQNNVW

SEQ ID NO: 71887 - protein, 9 aa, synthetic construct
  source 1..9: note = Seed: VLYYQNNVF
VSYYQNNVY

SEQ ID NO: 71888 - protein, 10 aa, synthetic construct
  source 1..10: note = Seed: VLAAECTIFK
VTAAECTIFK

SEQ ID NO: 71889 - protein, 10 aa, synthetic construct
  source 1..10: note = Seed: VLAAECTIFK
VTAAECTIFR

SEQ ID NO: 71890 - protein, 9 aa, synthetic construct
  source 1..9: note = Seed: VVAIDYKHY
VTAIDYKHF

SEQ ID NO: 71891 - protein, 9 aa, synthetic construct
  source 1..9: note = Seed: VVAIDYKHY
VTAIDYKHW

SEQ ID NO: 71892 - protein, 9 aa, synthetic construct
  source 1..9: note = Seed: VVAIDYKHY
VTAIDYKHY

SEQ ID NO: 71893 - protein, 9 aa, synthetic construct
  source 1..9: note = Seed: VTANVNALL
VTANVNALA

SEQ ID NO: 71894 - protein, 9 aa, synthetic construct
  source 1..9: note = Seed: VTANVNALL
VTANVNALF

SEQ ID NO: 71895 - protein, 9 aa, synthetic construct
  source 1..9: note = Seed: VTANVNALL
VTANVNALI

SEQ ID NO: 71896 - protein, 9 aa, synthetic construct
  source 1..9: note = Seed: VTANVNALL
VTANVNALM

SEQ ID NO: 71897 - protein, 9 aa, synthetic construct
  source 1..9: note = Seed: VTANVNALL
VTANVNALV

SEQ ID NO: 71898 - protein, 9 aa, synthetic construct
  source 1..9: note = Seed: VTANVNALL
VTANVNALW

SEQ ID NO: 71899 - protein, 9 aa, synthetic construct
  source 1..9: note = Seed: VTANVNALL
VTANVNALY

SEQ ID NO: 71900 - protein, 10 aa, synthetic construct
  source 1..10: note = Seed: VFAQVKQIYK
VTAQVKQIYK

SEQ ID NO: 71901 - protein, 10 aa, synthetic construct
  source 1..10: note = Seed: VFAQVKQIYK
VTAQVKQIYR

SEQ ID NO: 71902 - protein, 9 aa, synthetic construct
  source 1..9: note = Seed: VNASSSEAF
VTASSSEAF

SEQ ID NO: 71903 - protein, 9 aa, synthetic construct
  source 1..9: note = Seed: VLAWLYAAV
VTAWLYAAA

SEQ ID NO: 71904 - protein, 9 aa, synthetic construct
  source 1..9: note = Seed: VLAWLYAAV
VTAWLYAAI

SEQ ID NO: 71905 - protein, 9 aa, synthetic construct
  source 1..9: note = Seed: VLAWLYAAV
VTAWLYAAL

SEQ ID NO: 71906 - protein, 9 aa, synthetic construct
  source 1..9: note = Seed: VLAWLYAAV
VTAWLYAAM

SEQ ID NO: 71907 - protein, 9 aa, synthetic construct
  source 1..9: note = Seed: VLAWLYAAV
VTAWLYAAT

SEQ ID NO: 71908 - protein, 9 aa, synthetic construct
  source 1..9: note = Seed: VLAWLYAAV
VTAWLYAAV

SEQ ID NO: 71909 - protein, 9 aa, synthetic construct
  source 1..9: note = Seed: VMAYITGGV
VTAYITGGA

SEQ ID NO: 71910 - protein, 9 aa, synthetic construct
  source 1..9: note = Seed: VMAYITGGV
VTAYITGGI

SEQ ID NO: 71911 - protein, 9 aa, synthetic construct
  source 1..9: note = Seed: VMAYITGGV
VTAYITGGL

SEQ ID NO: 71912 - protein, 9 aa, synthetic construct
  source 1..9: note = Seed: VMAYITGGV
VTAYITGGM

SEQ ID NO: 71913 - protein, 9 aa, synthetic construct
  source 1..9: note = Seed: VMAYITGGV
VTAYITGGV

SEQ ID NO: 71914 - protein, 9 aa, synthetic construct
  source 1..9: note = Seed: VSDIDITFL
VTDIDITFF

SEQ ID NO: 71915 - protein, 9 aa, synthetic construct
  source 1..9: note = Seed: VSDIDITFL
VTDIDITFL

SEQ ID NO: 71916 - protein, 10 aa, synthetic construct
  source 1..10: note = Seed: VSDIDITFLK
VTDIDITFLK

SEQ ID NO: 71917 - protein, 10 aa, synthetic construct
  source 1..10: note = Seed: VSDIDITFLK
VTDIDITFLR

SEQ ID NO: 71918 - protein, 9 aa, synthetic construct
  source 1..9: note = Seed: VSDIDITFL
VTDIDITFM

SEQ ID NO: 71919 - protein, 9 aa, synthetic construct
  source 1..9: note = Seed: VSDIDYVPL
VTDIDYVPL

SEQ ID NO: 71920 - protein, 10 aa, synthetic construct
  source 1..10: note = Seed: VSDIDYVPLK
VTDIDYVPLK

SEQ ID NO: 71921 - protein, 9 aa, synthetic construct
  source 1..9: note = Seed: VVDKYFDCY
VTDKYFDCY

SEQ ID NO: 71922 - protein, 9 aa, synthetic construct
  source 1..9: note = Seed: VVDSYYSLL
VTDSYYSLF

SEQ ID NO: 71923 - protein, 9 aa, synthetic construct
  source 1..9: note = Seed: VVDSYYSLL
VTDSYYSLI

SEQ ID NO: 71924 - protein, 9 aa, synthetic construct
  source 1..9: note = Seed: VVDSYYSLL
VTDSYYSLL

SEQ ID NO: 71925 - protein, 10 aa, synthetic construct
  source 1..10: note = Seed: VVDSYYSLLM
VTDSYYSLLF

SEQ ID NO: 71926 - protein, 10 aa, synthetic construct
  source 1..10: note = Seed: VVDSYYSLLM
VTDSYYSLLM

SEQ ID NO: 71927 - protein, 10 aa, synthetic construct
  source 1..10: note = Seed: VVDSYYSLLM
VTDSYYSLLY

SEQ ID NO: 71928 - protein, 9 aa, synthetic construct
  source 1..9: note = Seed: VVDSYYSLL
VTDSYYSLM

SEQ ID NO: 71929 - protein, 9 aa, synthetic construct
  source 1..9: note = Seed: VVDSYYSLL
VTDSYYSLV

SEQ ID NO: 71930 - protein, 11 aa, synthetic construct
  source 1..11: note = Seed: VYDYLVSTQEF
VTDYLVSTQEF

SEQ ID NO: 71931 - protein, 11 aa, synthetic construct
  source 1..11: note = Seed: VYDYLVSTQEF
VTDYLVSTQEW

SEQ ID NO: 71932 - protein, 9 aa, synthetic construct
  source 1..9: note = Seed: VAEWFLAYI
VTEWFLAYV

SEQ ID NO: 71933 - protein, 9 aa, synthetic construct
  source 1..9: note = Seed: VAFELWAKR
VTFELWAKK

SEQ ID NO: 71934 - protein, 9 aa, synthetic construct
  source 1..9: note = Seed: VAFELWAKR
VTFELWAKR

SEQ ID NO: 71935 - protein, 9 aa, synthetic construct
  source 1..9: note = Seed: VTFFIYNKI
VTFFIYNKF

SEQ ID NO: 71936 - protein, 9 aa, synthetic construct
  source 1..9: note = Seed: VTFFIYNKI
VTFFIYNKM

SEQ ID NO: 71937 - protein, 9 aa, synthetic construct
  source 1..9: note = Seed: VTFFIYNKI
VTFFIYNKV

SEQ ID NO: 71938 - protein, 9 aa, synthetic construct
  source 1..9: note = Seed: VTFFIYNKI
VTFFIYNKW

SEQ ID NO: 71939 - protein, 9 aa, synthetic construct
  source 1..9: note = Seed: VTFFIYNKI
VTFFIYNKY

SEQ ID NO: 71940 - protein, 9 aa, synthetic construct
  source 1..9: note = Seed: VTFGDDTVI
VTFGDDTVF

SEQ ID NO: 71941 - protein, 9 aa, synthetic construct
  source 1..9: note = Seed: VTFGDDTVI
VTFGDDTVL

SEQ ID NO: 71942 - protein, 9 aa, synthetic construct
  source 1..9: note = Seed: VTFGDDTVI
VTFGDDTVM

SEQ ID NO: 71943 - protein, 9 aa, synthetic construct
  source 1..9: note = Seed: VTFGDDTVI
VTFGDDTVW

SEQ ID NO: 71944 - protein, 9 aa, synthetic construct
  source 1..9: note = Seed: VTFGDDTVI
VTFGDDTVY

SEQ ID NO: 71945 - protein, 9 aa, synthetic construct
  source 1..9: note = Seed: VSFLAHIQW
VTFLAHIQF

SEQ ID NO: 71946 - protein, 9 aa, synthetic construct
  source 1..9: note = Seed: VSFLAHIQW
VTFLAHIQI

SEQ ID NO: 71947 - protein, 9 aa, synthetic construct
  source 1..9: note = Seed: VSFLAHIQW
VTFLAHIQL

SEQ ID NO: 71948 - protein, 9 aa, synthetic construct
  source 1..9: note = Seed: VSFLAHIQW
VTFLAHIQM

SEQ ID NO: 71949 - protein, 9 aa, synthetic construct
  source 1..9: note = Seed: VSFLAHIQW
VTFLAHIQW

SEQ ID NO: 71950 - protein, 10 aa, synthetic construct
  source 1..10: note = Seed: VSFLAHIQWM
VTFLAHIQWF

SEQ ID NO: 71951 - protein, 11 aa, synthetic construct
  source 1..11: note = Seed: VSFLAHIQWMV
VTFLAHIQWMV

SEQ ID NO: 71952 - protein, 10 aa, synthetic construct
  source 1..10: note = Seed: VSFLAHIQWM
VTFLAHIQWW

SEQ ID NO: 71953 - protein, 10 aa, synthetic construct
  source 1..10: note = Seed: VSFLAHIQWM
VTFLAHIQWY

SEQ ID NO: 71954 - protein, 9 aa, synthetic construct
  source 1..9: note = Seed: VSFLAHIQW
VTFLAHIQY

SEQ ID NO: 71955 - protein, 9 aa, synthetic construct
  source 1..9: note = Seed: VVFLHVTYV
VTFLHVTYA

SEQ ID NO: 71956 - protein, 9 aa, synthetic construct
  source 1..9: note = Seed: VVFLHVTYV
VTFLHVTYF

SEQ ID NO: 71957 - protein, 9 aa, synthetic construct
  source 1..9: note = Seed: VVFLHVTYV
VTFLHVTYI

SEQ ID NO: 71958 - protein, 9 aa, synthetic construct
  source 1..9: note = Seed: VVFLHVTYV
VTFLHVTYK

SEQ ID NO: 71959 - protein, 9 aa, synthetic construct
  source 1..9: note = Seed: VVFLHVTYV
VTFLHVTYL

SEQ ID NO: 71960 - protein, 9 aa, synthetic construct
  source 1..9: note = Seed: VVFLHVTYV
VTFLHVTYM

SEQ ID NO: 71961 - protein, 9 aa, synthetic construct
  source 1..9: note = Seed: VVFLHVTYV
VTFLHVTYY

SEQ ID NO: 71962 - protein, 10 aa, synthetic construct
  source 1..10: note = Seed: VEFLRDGWEI
VTFLRDGWEF

SEQ ID NO: 71963 - protein, 8 aa, synthetic construct
  source 1..8: note = Seed: VVFNGVSF
VTFNGVSF

SEQ ID NO: 71964 - protein, 11 aa, synthetic construct
  source 1..11: note = Seed: VVFNGVSFSTF
VTFNGVSFSTF

SEQ ID NO: 71965 - protein, 11 aa, synthetic construct
  source 1..11: note = Seed: VVFNGVSFSTF
VTFNGVSFSTM

SEQ ID NO: 71966 - protein, 11 aa, synthetic construct
  source 1..11: note = Seed: VVFNGVSFSTF
VTFNGVSFSTW

SEQ ID NO: 71967 - protein, 11 aa, synthetic construct
  source 1..11: note = Seed: VVFNGVSFSTF
VTFNGVSFSTY

SEQ ID NO: 71968 - protein, 10 aa, synthetic construct
  source 1..10: note = Seed: VVFNGVSFST
VTFNGVSFSV

SEQ ID NO: 71969 - protein, 8 aa, synthetic construct
  source 1..8: note = Seed: VVFNGVSF
VTFNGVSW

SEQ ID NO: 71970 - protein, 8 aa, synthetic construct
  source 1..8: note = Seed: VVFNGVSF
VTFNGVSY

SEQ ID NO: 71971 - protein, 11 aa, synthetic construct
  source 1..11: note = Seed: VSFSTFEEAAL
VTFSTFEEAAF

SEQ ID NO: 71972 - protein, 11 aa, synthetic construct
  source 1..11: note = Seed: VSFSTFEEAAL
VTFSTFEEAAW

SEQ ID NO: 71973 - protein, 11 aa, synthetic construct
  source 1..11: note = Seed: VSFSTFEEAAL
VTFSTFEEAAY

SEQ ID NO: 71974 - protein, 10 aa, synthetic construct
  source 1..10: note = Seed: VVFVLWAHGF
VTFVLWAHGF

SEQ ID NO: 71975 - protein, 10 aa, synthetic construct
  source 1..10: note = Seed: VVFVLWAHGF
VTFVLWAHGW

SEQ ID NO: 71976 - protein, 10 aa, synthetic construct
  source 1..10: note = Seed: VVFVLWAHGF
VTFVLWAHGY

SEQ ID NO: 71977 - protein, 9 aa, synthetic construct
  source 1..9: note = Seed: VPFVVSTGY
VTFVVSTGF

SEQ ID NO: 71978 - protein, 9 aa, synthetic construct
  source 1..9: note = Seed: VPFVVSTGY
VTFVVSTGY

SEQ ID NO: 71979 - protein, 10 aa, synthetic construct
  source 1..10: note = Seed: VAGDSGFAAY
VTGDSGFAAY

SEQ ID NO: 71980 - protein, 9 aa, synthetic construct
  source 1..9: note = Seed: VIGFLFLTW
VTGFLFLTF

SEQ ID NO: 71981 - protein, 9 aa, synthetic construct
  source 1..9: note = Seed: VIGFLFLTW
VTGFLFLTM

SEQ ID NO: 71982 - protein, 9 aa, synthetic construct
  source 1..9: note = Seed: VIGFLFLTW
VTGFLFLTW

SEQ ID NO: 71983 - protein, 9 aa, synthetic construct
  source 1..9: note = Seed: VIGFLFLTW
VTGFLFLTY

SEQ ID NO: 71984 - protein, 9 aa, synthetic construct
  source 1..9: note = Seed: VGGNYNYLY
VTGNYNYLY

SEQ ID NO: 71985 - protein, 10 aa, synthetic construct
  source 1..10: note = Seed: VGGNYNYLYR
VTGNYNYLYR

SEQ ID NO: 71986 - protein, 9 aa, synthetic construct
  source 1..9: note = Seed: VMHANYIFW
VTHANYIFF

SEQ ID NO: 71987 - protein, 9 aa, synthetic construct
  source 1..9: note = Seed: VMHANYIFW
VTHANYIFL

SEQ ID NO: 71988 - protein, 9 aa, synthetic construct
  source 1..9: note = Seed: VMHANYIFW
VTHANYIFM

SEQ ID NO: 71989 - protein, 9 aa, synthetic construct
  source 1..9: note = Seed: VMHANYIFW
VTHANYIFW

SEQ ID NO: 71990 - protein, 9 aa, synthetic construct
  source 1..9: note = Seed: VMHANYIFW
VTHANYIFY

SEQ ID NO: 71991 - protein, 9 aa, synthetic construct
  source 1..9: note = Seed: VLHDIGNPK
VTHDIGNPK

SEQ ID NO: 71992 - protein, 9 aa, synthetic construct
  source 1..9: note = Seed: VLHDIGNPK
VTHDIGNPR

SEQ ID NO: 71993 - protein, 10 aa, synthetic construct
  source 1..10: note = Seed: VFHLYLQYIR
VTHLYLQYIR

SEQ ID NO: 71994 - protein, 9 aa, synthetic construct
  source 1..9: note = Seed: VTHSKGLYR
VTHSKGLYA

SEQ ID NO: 71995 - protein, 9 aa, synthetic construct
  source 1..9: note = Seed: VTHSKGLYR
VTHSKGLYK

SEQ ID NO: 71996 - protein, 10 aa, synthetic construct
  source 1..10: note = Seed: VTHSKGLYRK
VTHSKGLYRR

SEQ ID NO: 71997 - protein, 10 aa, synthetic construct
  source 1..10: note = Seed: VLHSYFTSDY
VTHSYFTSDY

SEQ ID NO: 71998 - protein, 11 aa, synthetic construct
  source 1..11: note = Seed: VLHSYFTSDYY
VTHSYFTSDYF

SEQ ID NO: 71999 - protein, 11 aa, synthetic construct
  source 1..11: note = Seed: VLHSYFTSDYY
VTHSYFTSDYW

SEQ ID NO: 72000 - protein, 11 aa, synthetic construct
  source 1..11: note = Seed: VLHSYFTSDYY
VTHSYFTSDYY

SEQ ID NO: 72001 - protein, 9 aa, synthetic construct
  source 1..9: note = Seed: VEHVTFFIY
VTHVTFFIY

SEQ ID NO: 72002 - protein, 9 aa, synthetic construct
  source 1..9: note = Seed: VTIAEILLI
VTIAEILLF

SEQ ID NO: 72003 - protein, 10 aa, synthetic construct
  source 1..10: note = Seed: VTIAEILLII
VTIAEILLIF

SEQ ID NO: 72004 - protein, 10 aa, synthetic construct
  source 1..10: note = Seed: VTIAEILLII
VTIAEILLIM

SEQ ID NO: 72005 - protein, 10 aa, synthetic construct
  source 1..10: note = Seed: VTIAEILLII
VTIAEILLIW

SEQ ID NO: 72006 - protein, 10 aa, synthetic construct
  source 1..10: note = Seed: VTIAEILLII
VTIAEILLIY

SEQ ID NO: 72007 - protein, 9 aa, synthetic construct
  source 1..9: note = Seed: VTIAEILLI
VTIAEILLL

SEQ ID NO: 72008 - protein, 9 aa, synthetic construct
  source 1..9: note = Seed: VTIAEILLI
VTIAEILLM

SEQ ID NO: 72009 - protein, 9 aa, synthetic construct
  source 1..9: note = Seed: VTIAEILLI
VTIAEILLV

SEQ ID NO: 72010 - protein, 9 aa, synthetic construct
  source 1..9: note = Seed: VTIAEILLI
VTIAEILLW

SEQ ID NO: 72011 - protein, 9 aa, synthetic construct
  source 1..9: note = Seed: VTIAEILLI
VTIAEILLY

SEQ ID NO: 72012 - protein, 10 aa, synthetic construct
  source 1..10: note = Seed: VSICSTMTNR
VTICSTMTNK

SEQ ID NO: 72013 - protein, 10 aa, synthetic construct
  source 1..10: note = Seed: VSICSTMTNR
VTICSTMTNR

SEQ ID NO: 72014 - protein, 10 aa, synthetic construct
  source 1..10: note = Seed: VQIDRLITGR
VTIDRLITGR

SEQ ID NO: 72015 - protein, 9 aa, synthetic construct
  source 1..9: note = Seed: VSIINNTVY
VTIINNTVF

SEQ ID NO: 72016 - protein, 9 aa, synthetic construct
  source 1..9: note = Seed: VSIINNTVY
VTIINNTVI

SEQ ID NO: 72017 - protein, 9 aa, synthetic construct
  source 1..9: note = Seed: VSIINNTVY
VTIINNTVL

SEQ ID NO: 72018 - protein, 9 aa, synthetic construct
  source 1..9: note = Seed: VSIINNTVY
VTIINNTVM

SEQ ID NO: 72019 - protein, 9 aa, synthetic construct
  source 1..9: note = Seed: VSIINNTVY
VTIINNTVW

SEQ ID NO: 72020 - protein, 9 aa, synthetic construct
  source 1..9: note = Seed: VSIINNTVY
VTIINNTVY

SEQ ID NO: 72021 - protein, 10 aa, synthetic construct
  source 1..10: note = Seed: VAIKITEHSW
VTIKITEHSF

SEQ ID NO: 72022 - protein, 10 aa, synthetic construct
  source 1..10: note = Seed: VAIKITEHSW
VTIKITEHSW

SEQ ID NO: 72023 - protein, 11 aa, synthetic construct
  source 1..11: note = Seed: VAIKITEHSWN
VTIKITEHSWW

SEQ ID NO: 72024 - protein, 10 aa, synthetic construct
  source 1..10: note = Seed: VAIKITEHSW
VTIKITEHSY

SEQ ID NO: 72025 - protein, 10 aa, synthetic construct
  source 1..10: note = Seed: VNINIVGDFK
VTINIVGDFK

SEQ ID NO: 72026 - protein, 10 aa, synthetic construct
  source 1..10: note = Seed: VNINIVGDFK
VTINIVGDFR

SEQ ID NO: 72027 - protein, 9 aa, synthetic construct
  source 1..9: note = Seed: VVIPDYNTY
VTIPDYNTF

SEQ ID NO: 72028 - protein, 9 aa, synthetic construct
  source 1..9: note = Seed: VVIPDYNTY
VTIPDYNTI

SEQ ID NO: 72029 - protein, 9 aa, synthetic construct
  source 1..9: note = Seed: VVIPDYNTY
VTIPDYNTL

SEQ ID NO: 72030 - protein, 9 aa, synthetic construct
  source 1..9: note = Seed: VVIPDYNTY
VTIPDYNTM

SEQ ID NO: 72031 - protein, 9 aa, synthetic construct
  source 1..9: note = Seed: VVIPDYNTY
VTIPDYNTW

SEQ ID NO: 72032 - protein, 9 aa, synthetic construct
  source 1..9: note = Seed: VVIPDYNTY
VTIPDYNTY

SEQ ID NO: 72033 - protein, 10 aa, synthetic construct
  source 1..10: note = Seed: VVIPDYNTYK
VTIPDYNTYK

SEQ ID NO: 72034 - protein, 10 aa, synthetic construct
  source 1..10: note = Seed: VVIPDYNTYK
VTIPDYNTYR

SEQ ID NO: 72035 - protein, 10 aa, synthetic construct
  source 1..10: note = Seed: VFKNIDGYFK
VTKNIDGYFK

SEQ ID NO: 72036 - protein, 10 aa, synthetic construct
  source 1..10: note = Seed: VFKNIDGYFK
VTKNIDGYFR

SEQ ID NO: 72037 - protein, 9 aa, synthetic construct
  source 1..9: note = Seed: VVKRHTFSN
VTKRHTFSA

SEQ ID NO: 72038 - protein, 9 aa, synthetic construct
  source 1..9: note = Seed: VVKRHTFSN
VTKRHTFSG

SEQ ID NO: 72039 - protein, 9 aa, synthetic construct
  source 1..9: note = Seed: VVKRHTFSN
VTKRHTFSI

SEQ ID NO: 72040 - protein, 9 aa, synthetic construct
  source 1..9: note = Seed: VVKRHTFSN
VTKRHTFSK

SEQ ID NO: 72041 - protein, 9 aa, synthetic construct
  source 1..9: note = Seed: VVKRHTFSN
VTKRHTFSL

SEQ ID NO: 72042 - protein, 9 aa, synthetic construct
  source 1..9: note = Seed: VVKRHTFSN
VTKRHTFSM

SEQ ID NO: 72043 - protein, 10 aa, synthetic construct
  source 1..10: note = Seed: VVKRHTFSNY
VTKRHTFSNA

SEQ ID NO: 72044 - protein, 10 aa, synthetic construct
  source 1..10: note = Seed: VVKRHTFSNY
VTKRHTFSNK

SEQ ID NO: 72045 - protein, 9 aa, synthetic construct
  source 1..9: note = Seed: VVKRHTFSN
VTKRHTFSS

SEQ ID NO: 72046 - protein, 9 aa, synthetic construct
  source 1..9: note = Seed: VVKRHTFSN
VTKRHTFST

SEQ ID NO: 72047 - protein, 9 aa, synthetic construct
  source 1..9: note = Seed: VVKRHTFSN
VTKRHTFSV

SEQ ID NO: 72048 - protein, 9 aa, synthetic construct
  source 1..9: note = Seed: VVKRHTFSN
VTKRHTFSY

SEQ ID NO: 72049 - protein, 10 aa, synthetic construct
  source 1..10: note = Seed: VAKYTQLCQY
VTKYTQLCQF

SEQ ID NO: 72050 - protein, 10 aa, synthetic construct
  source 1..10: note = Seed: VAKYTQLCQY
VTKYTQLCQW

SEQ ID NO: 72051 - protein, 10 aa, synthetic construct
  source 1..10: note = Seed: VAKYTQLCQY
VTKYTQLCQY

SEQ ID NO: 72052 - protein, 11 aa, synthetic construct
  source 1..11: note = Seed: VAKYTQLCQYL
VTKYTQLCQYF

SEQ ID NO: 72053 - protein, 10 aa, synthetic construct
  source 1..10: note = Seed: VELFENKTTL
VTLFENKTTV

SEQ ID NO: 72054 - protein, 9 aa, synthetic construct
  source 1..9: note = Seed: VLLFLAFVV
VTLFLAFVV

SEQ ID NO: 72055 - protein, 11 aa, synthetic construct
  source 1..11: note = Seed: VQLHNDILLAK
VTLHNDILLAK

SEQ ID NO: 72056 - protein, 10 aa, synthetic construct
  source 1..10: note = Seed: VQLHNDILLA
VTLHNDILLV

SEQ ID NO: 72057 - protein, 10 aa, synthetic construct
  source 1..10: note = Seed: VNLHSSRLSF
VTLHSSRLSF

SEQ ID NO: 72058 - protein, 10 aa, synthetic construct
  source 1..10: note = Seed: VNLHSSRLSF
VTLHSSRLSY

SEQ ID NO: 72059 - protein, 10 aa, synthetic construct
  source 1..10: note = Seed: VFLHVTYVPA
VTLHVTYVPV

SEQ ID NO: 72060 - protein, 10 aa, synthetic construct
  source 1..10: note = Seed: VNLKQLPFFY
VTLKQLPFFY

SEQ ID NO: 72061 - protein, 10 aa, synthetic construct
  source 1..10: note = Seed: VVLLSVLQQL
VTLLSVLQQI

SEQ ID NO: 72062 - protein, 10 aa, synthetic construct
  source 1..10: note = Seed: VVLLSVLQQL
VTLLSVLQQL

SEQ ID NO: 72063 - protein, 10 aa, synthetic construct
  source 1..10: note = Seed: VVLLSVLQQL
VTLLSVLQQV

SEQ ID NO: 72064 - protein, 9 aa, synthetic construct
  source 1..9: note = Seed: VGLMWLSYF
VTLMWLSYF

SEQ ID NO: 72065 - protein, 10 aa, synthetic construct
  source 1..10: note = Seed: VGLMWLSYFI
VTLMWLSYFA

SEQ ID NO: 72066 - protein, 10 aa, synthetic construct
  source 1..10: note = Seed: VGLMWLSYFI
VTLMWLSYFI

SEQ ID NO: 72067 - protein, 10 aa, synthetic construct
  source 1..10: note = Seed: VGLMWLSYFI
VTLMWLSYFL

SEQ ID NO: 72068 - protein, 10 aa, synthetic construct
  source 1..10: note = Seed: VGLMWLSYFI
VTLMWLSYFM

SEQ ID NO: 72069 - protein, 10 aa, synthetic construct
  source 1..10: note = Seed: VGLMWLSYFI
VTLMWLSYFV

SEQ ID NO: 72070 - protein, 9 aa, synthetic construct
  source 1..9: note = Seed: VGLMWLSYF
VTLMWLSYL

SEQ ID NO: 72071 - protein, 9 aa, synthetic construct
  source 1..9: note = Seed: VGLMWLSYF
VTLMWLSYM

SEQ ID NO: 72072 - protein, 9 aa, synthetic construct
  source 1..9: note = Seed: VGLMWLSYF
VTLMWLSYW

SEQ ID NO: 72073 - protein, 9 aa, synthetic construct
  source 1..9: note = Seed: VGLMWLSYF
VTLMWLSYY

SEQ ID NO: 72074 - protein, 9 aa, synthetic construct
  source 1..9: note = Seed: VVLSFELLH
VTLSFELLK

SEQ ID NO: 72075 - protein, 9 aa, synthetic construct
  source 1..9: note = Seed: VVLSFELLH
VTLSFELLR

SEQ ID NO: 72076 - protein, 9 aa, synthetic construct
  source 1..9: note = Seed: VVLSFELLH
VTLSFELLY

SEQ ID NO: 72077 - protein, 9 aa, synthetic construct
  source 1..9: note = Seed: VLLSVLQQL
VTLSVLQQV

SEQ ID NO: 72078 - protein, 10 aa, synthetic construct
  source 1..10: note = Seed: VELVAELEGI
VTLVAELEGV

SEQ ID NO: 72079 - protein, 10 aa, synthetic construct
  source 1..10: note = Seed: VVMAYITGGV
VTMAYITGGI

SEQ ID NO: 72080 - protein, 10 aa, synthetic construct
  source 1..10: note = Seed: VVMAYITGGV
VTMAYITGGL

SEQ ID NO: 72081 - protein, 10 aa, synthetic construct
  source 1..10: note = Seed: VVMAYITGGV
VTMAYITGGV

SEQ ID NO: 72082 - protein, 10 aa, synthetic construct
  source 1..10: note = Seed: VFMCVEYCPI
VTMCVEYCPV

SEQ ID NO: 72083 - protein, 9 aa, synthetic construct
  source 1..9: note = Seed: VQMLSDTLK
VTMLSDTLK

SEQ ID NO: 72084 - protein, 9 aa, synthetic construct
  source 1..9: note = Seed: VQMLSDTLK
VTMLSDTLR

SEQ ID NO: 72085 - protein, 10 aa, synthetic construct
  source 1..10: note = Seed: VRMYIFFASF
VTMYIFFASF

SEQ ID NO: 72086 - protein, 11 aa, synthetic construct
  source 1..11: note = Seed: VRMYIFFASFY
VTMYIFFASFK

SEQ ID NO: 72087 - protein, 11 aa, synthetic construct
  source 1..11: note = Seed: VRMYIFFASFY
VTMYIFFASFY

SEQ ID NO: 72088 - protein, 10 aa, synthetic construct
  source 1..10: note = Seed: VRMYIFFASF
VTMYIFFASW

SEQ ID NO: 72089 - protein, 10 aa, synthetic construct
  source 1..10: note = Seed: VRMYIFFASF
VTMYIFFASY

SEQ ID NO: 72090 - protein, 9 aa, synthetic construct
  source 1..9: note = Seed: VLNDILSRL
VTNDILSRV

SEQ ID NO: 72091 - protein, 10 aa, synthetic construct
  source 1..10: note = Seed: VFNGVSFSTF
VTNGVSFSTY

SEQ ID NO: 72092 - protein, 9 aa, synthetic construct
  source 1..9: note = Seed: VVNQNAQAL
VTNQNAQAF

SEQ ID NO: 72093 - protein, 9 aa, synthetic construct
  source 1..9: note = Seed: VVNQNAQAL
VTNQNAQAL

SEQ ID NO: 72094 - protein, 9 aa, synthetic construct
  source 1..9: note = Seed: VVNQNAQAL
VTNQNAQAM

SEQ ID NO: 72095 - protein, 9 aa, synthetic construct
  source 1..9: note = Seed: VVNQNAQAL
VTNQNAQAY

SEQ ID NO: 72096 - protein, 9 aa, synthetic construct
  source 1..9: note = Seed: VIPDYNTYK
VTPDYNTYK

SEQ ID NO: 72097 - protein, 9 aa, synthetic construct
  source 1..9: note = Seed: VIPDYNTYK
VTPDYNTYR

SEQ ID NO: 72098 - protein, 10 aa, synthetic construct
  source 1..10: note = Seed: VLPFNDGVYF
VTPFNDGVYW

SEQ ID NO: 72099 - protein, 10 aa, synthetic construct
  source 1..10: note = Seed: VLPFNDGVYF
VTPFNDGVYY

SEQ ID NO: 72100 - protein, 9 aa, synthetic construct
  source 1..9: note = Seed: VAPGTAVLR
VTPGTAVLR

SEQ ID NO: 72101 - protein, 11 aa, synthetic construct
  source 1..11: note = Seed: VAPGTAVLRQW
VTPGTAVLRQW

SEQ ID NO: 72102 - protein, 9 aa, synthetic construct
  source 1..9: note = Seed: VRQCSGVTF
VTQCSGVTF

SEQ ID NO: 72103 - protein, 10 aa, synthetic construct
  source 1..10: note = Seed: VLQLPQGTTL
VTQLPQGTTF

SEQ ID NO: 72104 - protein, 10 aa, synthetic construct
  source 1..10: note = Seed: VLQLPQGTTL
VTQLPQGTTM

SEQ ID NO: 72105 - protein, 10 aa, synthetic construct
  source 1..10: note = Seed: VLQLPQGTTL
VTQLPQGTTY

SEQ ID NO: 72106 - protein, 9 aa, synthetic construct
  source 1..9: note = Seed: VTRCLNRVC
VTRCLNRVA

SEQ ID NO: 72107 - protein, 9 aa, synthetic construct
  source 1..9: note = Seed: VTRCLNRVC
VTRCLNRVK

SEQ ID NO: 72108 - protein, 9 aa, synthetic construct
  source 1..9: note = Seed: VTRCLNRVC
VTRCLNRVV

SEQ ID NO: 72109 - protein, 9 aa, synthetic construct
  source 1..9: note = Seed: VARDLSLQF
VTRDLSLQF

SEQ ID NO: 72110 - protein, 10 aa, synthetic construct
  source 1..10: note = Seed: VARDLSLQFK
VTRDLSLQFA

SEQ ID NO: 72111 - protein, 10 aa, synthetic construct
  source 1..10: note = Seed: VARDLSLQFK
VTRDLSLQFK

SEQ ID NO: 72112 - protein, 10 aa, synthetic construct
  source 1..10: note = Seed: VARDLSLQFK
VTRDLSLQFR

SEQ ID NO: 72113 - protein, 9 aa, synthetic construct
  source 1..9: note = Seed: VARDLSLQF
VTRDLSLQI

SEQ ID NO: 72114 - protein, 9 aa, synthetic construct
  source 1..9: note = Seed: VARDLSLQF
VTRDLSLQL

SEQ ID NO: 72115 - protein, 9 aa, synthetic construct
  source 1..9: note = Seed: VARDLSLQF
VTRDLSLQM

SEQ ID NO: 72116 - protein, 9 aa, synthetic construct
  source 1..9: note = Seed: VARDLSLQF
VTRDLSLQW

SEQ ID NO: 72117 - protein, 9 aa, synthetic construct
  source 1..9: note = Seed: VARDLSLQF
VTRDLSLQY

SEQ ID NO: 72118 - protein, 9 aa, synthetic construct
  source 1..9: note = Seed: VTRELMREL
VTRELMREA

SEQ ID NO: 72119 - protein, 9 aa, synthetic construct
  source 1..9: note = Seed: VTRELMREL
VTRELMREF

SEQ ID NO: 72120 - protein, 9 aa, synthetic construct
  source 1..9: note = Seed: VTRELMREL
VTRELMREK

SEQ ID NO: 72121 - protein, 9 aa, synthetic construct
  source 1..9: note = Seed: VTRELMREL
VTRELMREM

SEQ ID NO: 72122 - protein, 9 aa, synthetic construct
  source 1..9: note = Seed: VTRELMREL
VTRELMREW

SEQ ID NO: 72123 - protein, 9 aa, synthetic construct
  source 1..9: note = Seed: VTRELMREL
VTRELMREY

SEQ ID NO: 72124 - protein, 10 aa, synthetic construct
  source 1..10: note = Seed: VNRFNVAITR
VTRFNVAITK

SEQ ID NO: 72125 - protein, 10 aa, synthetic construct
  source 1..10: note = Seed: VNRFNVAITR
VTRFNVAITR

SEQ ID NO: 72126 - protein, 9 aa, synthetic construct
  source 1..9: note = Seed: VYRGTTTYK
VTRGTTTYA

SEQ ID NO: 72127 - protein, 9 aa, synthetic construct
  source 1..9: note = Seed: VYRGTTTYK
VTRGTTTYG

SEQ ID NO: 72128 - protein, 9 aa, synthetic construct
  source 1..9: note = Seed: VYRGTTTYK
VTRGTTTYI

SEQ ID NO: 72129 - protein, 9 aa, synthetic construct
  source 1..9: note = Seed: VYRGTTTYK
VTRGTTTYK

SEQ ID NO: 72130 - protein, 10 aa, synthetic construct
  source 1..10: note = Seed: VYRGTTTYKL
VTRGTTTYKA

SEQ ID NO: 72131 - protein, 10 aa, synthetic construct
  source 1..10: note = Seed: VYRGTTTYKL
VTRGTTTYKK

SEQ ID NO: 72132 - protein, 9 aa, synthetic construct
  source 1..9: note = Seed: VYRGTTTYK
VTRGTTTYL

SEQ ID NO: 72133 - protein, 9 aa, synthetic construct
  source 1..9: note = Seed: VYRGTTTYK
VTRGTTTYM

SEQ ID NO: 72134 - protein, 9 aa, synthetic construct
  source 1..9: note = Seed: VYRGTTTYK
VTRGTTTYR

SEQ ID NO: 72135 - protein, 9 aa, synthetic construct
  source 1..9: note = Seed: VYRGTTTYK
VTRGTTTYS

SEQ ID NO: 72136 - protein, 9 aa, synthetic construct
  source 1..9: note = Seed: VYRGTTTYK
VTRGTTTYV

SEQ ID NO: 72137 - protein, 10 aa, synthetic construct
  source 1..10: note = Seed: VVRQCSGVTF
VTRQCSGVTF

SEQ ID NO: 72138 - protein, 10 aa, synthetic construct
  source 1..10: note = Seed: VVRQCSGVTF
VTRQCSGVTM

SEQ ID NO: 72139 - protein, 10 aa, synthetic construct
  source 1..10: note = Seed: VVRQCSGVTF
VTRQCSGVTW

SEQ ID NO: 72140 - protein, 10 aa, synthetic construct
  source 1..10: note = Seed: VVRQCSGVTF
VTRQCSGVTY

SEQ ID NO: 72141 - protein, 11 aa, synthetic construct
  source 1..11: note = Seed: VKRTIKGTHHW
VTRTIKGTHHW

SEQ ID NO: 72142 - protein, 9 aa, synthetic construct
  source 1..9: note = Seed: VTSAMQTML
VTSAMQTMF

SEQ ID NO: 72143 - protein, 9 aa, synthetic construct
  source 1..9: note = Seed: VTSAMQTML
VTSAMQTMI

SEQ ID NO: 72144 - protein, 10 aa, synthetic construct
  source 1..10: note = Seed: VTSAMQTMLF
VTSAMQTMLM

SEQ ID NO: 72145 - protein, 10 aa, synthetic construct
  source 1..10: note = Seed: VTSAMQTMLF
VTSAMQTMLW

SEQ ID NO: 72146 - protein, 10 aa, synthetic construct
  source 1..10: note = Seed: VTSAMQTMLF
VTSAMQTMLY

SEQ ID NO: 72147 - protein, 9 aa, synthetic construct
  source 1..9: note = Seed: VTSAMQTML
VTSAMQTMM

SEQ ID NO: 72148 - protein, 9 aa, synthetic construct
  source 1..9: note = Seed: VTSAMQTML
VTSAMQTMW

SEQ ID NO: 72149 - protein, 9 aa, synthetic construct
  source 1..9: note = Seed: VTSAMQTML
VTSAMQTMY

SEQ ID NO: 72150 - protein, 8 aa, synthetic construct
  source 1..8: note = Seed: VTSAMQTM
VTSAMQTW

SEQ ID NO: 72151 - protein, 10 aa, synthetic construct
  source 1..10: note = Seed: VVSDIDYVPL
VTSDIDYVPI

SEQ ID NO: 72152 - protein, 10 aa, synthetic construct
  source 1..10: note = Seed: VVSDIDYVPL
VTSDIDYVPV

SEQ ID NO: 72153 - protein, 9 aa, synthetic construct
  source 1..9: note = Seed: VLSFCAFAV
VTSFCAFAI

SEQ ID NO: 72154 - protein, 9 aa, synthetic construct
  source 1..9: note = Seed: VLSFCAFAV
VTSFCAFAV

SEQ ID NO: 72155 - protein, 9 aa, synthetic construct
  source 1..9: note = Seed: VYSFLPGVY
VTSFLPGVY

SEQ ID NO: 72156 - protein, 11 aa, synthetic construct
  source 1..11: note = Seed: VYSFLPGVYSV
VTSFLPGVYSF

SEQ ID NO: 72157 - protein, 9 aa, synthetic construct
  source 1..9: note = Seed: VNSFSGYLK
VTSFSGYLK

SEQ ID NO: 72158 - protein, 10 aa, synthetic construct
  source 1..10: note = Seed: VNSFSGYLKL
VTSFSGYLKF

SEQ ID NO: 72159 - protein, 10 aa, synthetic construct
  source 1..10: note = Seed: VNSFSGYLKL
VTSFSGYLKL

SEQ ID NO: 72160 - protein, 10 aa, synthetic construct
  source 1..10: note = Seed: VNSFSGYLKL
VTSFSGYLKM

SEQ ID NO: 72161 - protein, 10 aa, synthetic construct
  source 1..10: note = Seed: VNSFSGYLKL
VTSFSGYLKW

SEQ ID NO: 72162 - protein, 10 aa, synthetic construct
  source 1..10: note = Seed: VNSFSGYLKL
VTSFSGYLKY

SEQ ID NO: 72163 - protein, 9 aa, synthetic construct
  source 1..9: note = Seed: VNSFSGYLK
VTSFSGYLR

SEQ ID NO: 72164 - protein, 9 aa, synthetic construct
  source 1..9: note = Seed: VLSGHNLAK
VTSGHNLAK

SEQ ID NO: 72165 - protein, 9 aa, synthetic construct
  source 1..9: note = Seed: VLSGHNLAK
VTSGHNLAR

SEQ ID NO: 72166 - protein, 9 aa, synthetic construct
  source 1..9: note = Seed: VTSNYSGVV
VTSNYSGVF

SEQ ID NO: 72167 - protein, 9 aa, synthetic construct
  source 1..9: note = Seed: VTSNYSGVV
VTSNYSGVM

SEQ ID NO: 72168 - protein, 9 aa, synthetic construct
  source 1..9: note = Seed: VTSNYSGVV
VTSNYSGVY

SEQ ID NO: 72169 - protein, 10 aa, synthetic construct
  source 1..10: note = Seed: VYSSANNCTF
VTSSANNCTF

SEQ ID NO: 72170 - protein, 10 aa, synthetic construct
  source 1..10: note = Seed: VYSSANNCTF
VTSSANNCTW

SEQ ID NO: 72171 - protein, 10 aa, synthetic construct
  source 1..10: note = Seed: VYSSANNCTF
VTSSANNCTY

SEQ ID NO: 72172 - protein, 9 aa, synthetic construct
  source 1..9: note = Seed: VVSTGYHFR
VTSTGYHFK

SEQ ID NO: 72173 - protein, 9 aa, synthetic construct
  source 1..9: note = Seed: VVSTGYHFR
VTSTGYHFR

SEQ ID NO: 72174 - protein, 10 aa, synthetic construct
  source 1..10: note = Seed: VVSTGYHFRE
VTSTGYHFRR

SEQ ID NO: 72175 - protein, 11 aa, synthetic construct
  source 1..11: note = Seed: VDSYYSLLMPI
VTSYYSLLMPF

SEQ ID NO: 72176 - protein, 10 aa, synthetic construct
  source 1..10: note = Seed: VSTGYHFREL
VTTGYHFREF

SEQ ID NO: 72177 - protein, 10 aa, synthetic construct
  source 1..10: note = Seed: VSTGYHFREL
VTTGYHFREW

SEQ ID NO: 72178 - protein, 9 aa, synthetic construct
  source 1..9: note = Seed: VFTGYRVTK
VTTGYRVTR

SEQ ID NO: 72179 - protein, 9 aa, synthetic construct
  source 1..9: note = Seed: VSTQEFRYM
VTTQEFRYF

SEQ ID NO: 72180 - protein, 9 aa, synthetic construct
  source 1..9: note = Seed: VSTQEFRYM
VTTQEFRYM

SEQ ID NO: 72181 - protein, 9 aa, synthetic construct
  source 1..9: note = Seed: VSTQEFRYM
VTTQEFRYW

SEQ ID NO: 72182 - protein, 9 aa, synthetic construct
  source 1..9: note = Seed: VSTQEFRYM
VTTQEFRYY

SEQ ID NO: 72183 - protein, 9 aa, synthetic construct
  source 1..9: note = Seed: VSTSGRWVL
VTTSGRWVF

SEQ ID NO: 72184 - protein, 9 aa, synthetic construct
  source 1..9: note = Seed: VSTSGRWVL
VTTSGRWVL

SEQ ID NO: 72185 - protein, 9 aa, synthetic construct
  source 1..9: note = Seed: VSTSGRWVL
VTTSGRWVM

SEQ ID NO: 72186 - protein, 9 aa, synthetic construct
  source 1..9: note = Seed: VSTSGRWVL
VTTSGRWVW

SEQ ID NO: 72187 - protein, 9 aa, synthetic construct
  source 1..9: note = Seed: VSTSGRWVL
VTTSGRWVY

SEQ ID NO: 72188 - protein, 9 aa, synthetic construct
  source 1..9: note = Seed: VVTTKIALK
VTTTKIALK

SEQ ID NO: 72189 - protein, 9 aa, synthetic construct
  source 1..9: note = Seed: VVTTKIALK
VTTTKIALR

SEQ ID NO: 72190 - protein, 10 aa, synthetic construct
  source 1..10: note = Seed: VETVKGLDYK
VTTVKGLDYK

SEQ ID NO: 72191 - protein, 10 aa, synthetic construct
  source 1..10: note = Seed: VNVAFELWAK
VTVAFELWAK

SEQ ID NO: 72192 - protein, 10 aa, synthetic construct
  source 1..10: note = Seed: VNVAFELWAK
VTVAFELWAR

SEQ ID NO: 72193 - protein, 10 aa, synthetic construct
  source 1..10: note = Seed: VNVLAWLYAA
VTVLAWLYAI

SEQ ID NO: 72194 - protein, 10 aa, synthetic construct
  source 1..10: note = Seed: VNVLAWLYAA
VTVLAWLYAL

SEQ ID NO: 72195 - protein, 10 aa, synthetic construct
  source 1..10: note = Seed: VNVLAWLYAA
VTVLAWLYAV

SEQ ID NO: 72196 - protein, 11 aa, synthetic construct
  source 1..11: note = Seed: VFVLWAHGFEL
VTVLWAHGFEI

SEQ ID NO: 72197 - protein, 11 aa, synthetic construct
  source 1..11: note = Seed: VFVLWAHGFEL
VTVLWAHGFEL

SEQ ID NO: 72198 - protein, 11 aa, synthetic construct
  source 1..11: note = Seed: VFVLWAHGFEL
VTVLWAHGFEV

SEQ ID NO: 72199 - protein, 9 aa, synthetic construct
  source 1..9: note = Seed: VFVLWAHGF
VTVLWAHGY

SEQ ID NO: 72200 - protein, 9 aa, synthetic construct
  source 1..9: note = Seed: VCVSTSGRW
VTVSTSGRF

SEQ ID NO: 72201 - protein, 9 aa, synthetic construct
  source 1..9: note = Seed: VCVSTSGRW
VTVSTSGRL

SEQ ID NO: 72202 - protein, 9 aa, synthetic construct
  source 1..9: note = Seed: VCVSTSGRW
VTVSTSGRM

SEQ ID NO: 72203 - protein, 9 aa, synthetic construct
  source 1..9: note = Seed: VCVSTSGRW
VTVSTSGRW

SEQ ID NO: 72204 - protein, 9 aa, synthetic construct
  source 1..9: note = Seed: VCVSTSGRW
VTVSTSGRY

SEQ ID NO: 72205 - protein, 9 aa, synthetic construct
  source 1..9: note = Seed: VQVTCGTTT
VTVTCGTTF

SEQ ID NO: 72206 - protein, 9 aa, synthetic construct
  source 1..9: note = Seed: VLWAHGFEL
VTWAHGFEA

SEQ ID NO: 72207 - protein, 9 aa, synthetic construct
  source 1..9: note = Seed: VLWAHGFEL
VTWAHGFEF

SEQ ID NO: 72208 - protein, 9 aa, synthetic construct
  source 1..9: note = Seed: VLWAHGFEL
VTWAHGFEI

SEQ ID NO: 72209 - protein, 9 aa, synthetic construct
  source 1..9: note = Seed: VLWAHGFEL
VTWAHGFEL

SEQ ID NO: 72210 - protein, 10 aa, synthetic construct
  source 1..10: note = Seed: VLWAHGFELT
VTWAHGFELV

SEQ ID NO: 72211 - protein, 9 aa, synthetic construct
  source 1..9: note = Seed: VLWAHGFEL
VTWAHGFEV

SEQ ID NO: 72212 - protein, 9 aa, synthetic construct
  source 1..9: note = Seed: VLWAHGFEL
VTWAHGFEW

SEQ ID NO: 72213 - protein, 9 aa, synthetic construct
  source 1..9: note = Seed: VLWAHGFEL
VTWAHGFEY

SEQ ID NO: 72214 - protein, 9 aa, synthetic construct
  source 1..9: note = Seed: VMYASAVVL
VTYASAVVF

SEQ ID NO: 72215 - protein, 9 aa, synthetic construct
  source 1..9: note = Seed: VMYASAVVL
VTYASAVVI

SEQ ID NO: 72216 - protein, 9 aa, synthetic construct
  source 1..9: note = Seed: VMYASAVVL
VTYASAVVL

SEQ ID NO: 72217 - protein, 10 aa, synthetic construct
  source 1..10: note = Seed: VMYASAVVLL
VTYASAVVLF

SEQ ID NO: 72218 - protein, 10 aa, synthetic construct
  source 1..10: note = Seed: VMYASAVVLL
VTYASAVVLI

SEQ ID NO: 72219 - protein, 10 aa, synthetic construct
  source 1..10: note = Seed: VMYASAVVLL
VTYASAVVLL

SEQ ID NO: 72220 - protein, 10 aa, synthetic construct
  source 1..10: note = Seed: VMYASAVVLL
VTYASAVVLM

SEQ ID NO: 72221 - protein, 10 aa, synthetic construct
  source 1..10: note = Seed: VMYASAVVLL
VTYASAVVLW

SEQ ID NO: 72222 - protein, 10 aa, synthetic construct
  source 1..10: note = Seed: VMYASAVVLL
VTYASAVVLY

SEQ ID NO: 72223 - protein, 9 aa, synthetic construct
  source 1..9: note = Seed: VMYASAVVL
VTYASAVVM

SEQ ID NO: 72224 - protein, 9 aa, synthetic construct
  source 1..9: note = Seed: VMYASAVVL
VTYASAVVV

SEQ ID NO: 72225 - protein, 9 aa, synthetic construct
  source 1..9: note = Seed: VMYASAVVL
VTYASAVVW

SEQ ID NO: 72226 - protein, 9 aa, synthetic construct
  source 1..9: note = Seed: VMYASAVVL
VTYASAVVY

SEQ ID NO: 72227 - protein, 10 aa, synthetic construct
  source 1..10: note = Seed: VPYCYDTNVL
VTYCYDTNVF

SEQ ID NO: 72228 - protein, 8 aa, synthetic construct
  source 1..8: note = Seed: VAYFNMVY
VTYFNMVF

SEQ ID NO: 72229 - protein, 8 aa, synthetic construct
  source 1..8: note = Seed: VAYFNMVY
VTYFNMVW

SEQ ID NO: 72230 - protein, 8 aa, synthetic construct
  source 1..8: note = Seed: VAYFNMVY
VTYFNMVY

SEQ ID NO: 72231 - protein, 9 aa, synthetic construct
  source 1..9: note = Seed: VAYFNMVYM
VTYFNMVYF

SEQ ID NO: 72232 - protein, 9 aa, synthetic construct
  source 1..9: note = Seed: VAYFNMVYM
VTYFNMVYI

SEQ ID NO: 72233 - protein, 9 aa, synthetic construct
  source 1..9: note = Seed: VAYFNMVYM
VTYFNMVYL

SEQ ID NO: 72234 - protein, 9 aa, synthetic construct
  source 1..9: note = Seed: VAYFNMVYM
VTYFNMVYM

SEQ ID NO: 72235 - protein, 9 aa, synthetic construct
  source 1..9: note = Seed: VAYFNMVYM
VTYFNMVYV

SEQ ID NO: 72236 - protein, 9 aa, synthetic construct
  source 1..9: note = Seed: VAYFNMVYM
VTYFNMVYW

SEQ ID NO: 72237 - protein, 9 aa, synthetic construct
  source 1..9: note = Seed: VAYFNMVYM
VTYFNMVYY

SEQ ID NO: 72238 - protein, 9 aa, synthetic construct
  source 1..9: note = Seed: VTYKLDGVV
VTYKLDGVF

SEQ ID NO: 72239 - protein, 9 aa, synthetic construct
  source 1..9: note = Seed: VTYKLDGVV
VTYKLDGVI

SEQ ID NO: 72240 - protein, 9 aa, synthetic construct
  source 1..9: note = Seed: VTYKLDGVV
VTYKLDGVL

SEQ ID NO: 72241 - protein, 9 aa, synthetic construct
  source 1..9: note = Seed: VTYKLDGVV
VTYKLDGVM

SEQ ID NO: 72242 - protein, 9 aa, synthetic construct
  source 1..9: note = Seed: VTYKLDGVV
VTYKLDGVW

SEQ ID NO: 72243 - protein, 9 aa, synthetic construct
  source 1..9: note = Seed: VTYKLDGVV
VTYKLDGVY

SEQ ID NO: 72244 - protein, 9 aa, synthetic construct
  source 1..9: note = Seed: VGYLQPRTF
VTYLQPRTF

SEQ ID NO: 72245 - protein, 10 aa, synthetic construct
  source 1..10: note = Seed: VGYLQPRTFL
VTYLQPRTFF

SEQ ID NO: 72246 - protein, 11 aa, synthetic construct
  source 1..11: note = Seed: VGYLQPRTFLL
VTYLQPRTFLV

SEQ ID NO: 72247 - protein, 9 aa, synthetic construct
  source 1..9: note = Seed: VGYLQPRTF
VTYLQPRTI

SEQ ID NO: 72248 - protein, 9 aa, synthetic construct
  source 1..9: note = Seed: VGYLQPRTF
VTYLQPRTL

SEQ ID NO: 72249 - protein, 9 aa, synthetic construct
  source 1..9: note = Seed: VGYLQPRTF
VTYLQPRTM

SEQ ID NO: 72250 - protein, 9 aa, synthetic construct
  source 1..9: note = Seed: VGYLQPRTF
VTYLQPRTV

SEQ ID NO: 72251 - protein, 9 aa, synthetic construct
  source 1..9: note = Seed: VGYLQPRTF
VTYLQPRTW

SEQ ID NO: 72252 - protein, 9 aa, synthetic construct
  source 1..9: note = Seed: VGYLQPRTF
VTYLQPRTY

SEQ ID NO: 72253 - protein, 10 aa, synthetic construct
  source 1..10: note = Seed: VLYQPPQTSI
VTYQPPQTSF

SEQ ID NO: 72254 - protein, 10 aa, synthetic construct
  source 1..10: note = Seed: VLYQPPQTSI
VTYQPPQTSM

SEQ ID NO: 72255 - protein, 10 aa, synthetic construct
  source 1..10: note = Seed: VLYQPPQTSI
VTYQPPQTSW

SEQ ID NO: 72256 - protein, 9 aa, synthetic construct
  source 1..9: note = Seed: VGYQPYRVV
VTYQPYRVF

SEQ ID NO: 72257 - protein, 9 aa, synthetic construct
  source 1..9: note = Seed: VGYQPYRVV
VTYQPYRVL

SEQ ID NO: 72258 - protein, 9 aa, synthetic construct
  source 1..9: note = Seed: VGYQPYRVV
VTYQPYRVM

SEQ ID NO: 72259 - protein, 9 aa, synthetic construct
  source 1..9: note = Seed: VGYQPYRVV
VTYQPYRVV

SEQ ID NO: 72260 - protein, 10 aa, synthetic construct
  source 1..10: note = Seed: VGYQPYRVVV
VTYQPYRVVF

SEQ ID NO: 72261 - protein, 10 aa, synthetic construct
  source 1..10: note = Seed: VGYQPYRVVV
VTYQPYRVVI

SEQ ID NO: 72262 - protein, 10 aa, synthetic construct
  source 1..10: note = Seed: VGYQPYRVVV
VTYQPYRVVL

SEQ ID NO: 72263 - protein, 10 aa, synthetic construct
  source 1..10: note = Seed: VGYQPYRVVV
VTYQPYRVVM

SEQ ID NO: 72264 - protein, 10 aa, synthetic construct
  source 1..10: note = Seed: VGYQPYRVVV
VTYQPYRVVW

SEQ ID NO: 72265 - protein, 9 aa, synthetic construct
  source 1..9: note = Seed: VGYQPYRVV
VTYQPYRVY

SEQ ID NO: 72266 - protein, 9 aa, synthetic construct
  source 1..9: note = Seed: VVYRGTTTY
VTYRGTTTF

SEQ ID NO: 72267 - protein, 9 aa, synthetic construct
  source 1..9: note = Seed: VVYRGTTTY
VTYRGTTTI

SEQ ID NO: 72268 - protein, 9 aa, synthetic construct
  source 1..9: note = Seed: VVYRGTTTY
VTYRGTTTK

SEQ ID NO: 72269 - protein, 9 aa, synthetic construct
  source 1..9: note = Seed: VVYRGTTTY
VTYRGTTTL

SEQ ID NO: 72270 - protein, 9 aa, synthetic construct
  source 1..9: note = Seed: VVYRGTTTY
VTYRGTTTM

SEQ ID NO: 72271 - protein, 9 aa, synthetic construct
  source 1..9: note = Seed: VVYRGTTTY
VTYRGTTTR

SEQ ID NO: 72272 - protein, 9 aa, synthetic construct
  source 1..9: note = Seed: VVYRGTTTY
VTYRGTTTV

SEQ ID NO: 72273 - protein, 9 aa, synthetic construct
  source 1..9: note = Seed: VVYRGTTTY
VTYRGTTTW

SEQ ID NO: 72274 - protein, 9 aa, synthetic construct
  source 1..9: note = Seed: VVYRGTTTY
VTYRGTTTY

SEQ ID NO: 72275 - protein, 10 aa, synthetic construct
  source 1..10: note = Seed: VVYRGTTTYK
VTYRGTTTYA

SEQ ID NO: 72276 - protein, 10 aa, synthetic construct
  source 1..10: note = Seed: VVYRGTTTYK
VTYRGTTTYF

SEQ ID NO: 72277 - protein, 10 aa, synthetic construct
  source 1..10: note = Seed: VVYRGTTTYK
VTYRGTTTYK

SEQ ID NO: 72278 - protein, 11 aa, synthetic construct
  source 1..11: note = Seed: VVYRGTTTYKL
VTYRGTTTYKK

SEQ ID NO: 72279 - protein, 10 aa, synthetic construct
  source 1..10: note = Seed: VVYRGTTTYK
VTYRGTTTYR

SEQ ID NO: 72280 - protein, 10 aa, synthetic construct
  source 1..10: note = Seed: VVYRGTTTYK
VTYRGTTTYY

SEQ ID NO: 72281 - protein, 10 aa, synthetic construct
  source 1..10: note = Seed: VYYTSNPTTF
VTYTSNPTTF

SEQ ID NO: 72282 - protein, 9 aa, synthetic construct
  source 1..9: note = Seed: VLYYQNNVF
VTYYQNNVF

SEQ ID NO: 72283 - protein, 10 aa, synthetic construct
  source 1..10: note = Seed: VLYYQNNVFM
VTYYQNNVFF

SEQ ID NO: 72284 - protein, 10 aa, synthetic construct
  source 1..10: note = Seed: VLYYQNNVFM
VTYYQNNVFI

SEQ ID NO: 72285 - protein, 10 aa, synthetic construct
  source 1..10: note = Seed: VLYYQNNVFM
VTYYQNNVFL

SEQ ID NO: 72286 - protein, 10 aa, synthetic construct
  source 1..10: note = Seed: VLYYQNNVFM
VTYYQNNVFW

SEQ ID NO: 72287 - protein, 9 aa, synthetic construct
  source 1..9: note = Seed: VLYYQNNVF
VTYYQNNVI

SEQ ID NO: 72288 - protein, 9 aa, synthetic construct
  source 1..9: note = Seed: VLYYQNNVF
VTYYQNNVL

SEQ ID NO: 72289 - protein, 9 aa, synthetic construct
  source 1..9: note = Seed: VLYYQNNVF
VTYYQNNVM

SEQ ID NO: 72290 - protein, 9 aa, synthetic construct
  source 1..9: note = Seed: VLYYQNNVF
VTYYQNNVW

SEQ ID NO: 72291 - protein, 9 aa, synthetic construct
  source 1..9: note = Seed: VLYYQNNVF
VTYYQNNVY

SEQ ID NO: 72292 - protein, 10 aa, synthetic construct
  source 1..10: note = Seed: VLAAECTIFK
VVAAECTIFK

SEQ ID NO: 72293 - protein, 10 aa, synthetic construct
  source 1..10: note = Seed: VLAAECTIFK
VVAAECTIFR

SEQ ID NO: 72294 - protein, 9 aa, synthetic construct
  source 1..9: note = Seed: VLAAECTIF
VVAAECTIY

SEQ ID NO: 72295 - protein, 9 aa, synthetic construct
  source 1..9: note = Seed: VYADSFVIR
VVADSFVIR

SEQ ID NO: 72296 - protein, 9 aa, synthetic construct
  source 1..9: note = Seed: VTANVNALL
VVANVNALA

SEQ ID NO: 72297 - protein, 9 aa, synthetic construct
  source 1..9: note = Seed: VTANVNALL
VVANVNALF

SEQ ID NO: 72298 - protein, 9 aa, synthetic construct
  source 1..9: note = Seed: VTANVNALL
VVANVNALI

SEQ ID NO: 72299 - protein, 9 aa, synthetic construct
  source 1..9: note = Seed: VTANVNALL
VVANVNALL

SEQ ID NO: 72300 - protein, 9 aa, synthetic construct
  source 1..9: note = Seed: VTANVNALL
VVANVNALV

SEQ ID NO: 72301 - protein, 9 aa, synthetic construct
  source 1..9: note = Seed: VTANVNALL
VVANVNALW

SEQ ID NO: 72302 - protein, 9 aa, synthetic construct
  source 1..9: note = Seed: VTANVNALL
VVANVNALY

SEQ ID NO: 72303 - protein, 10 aa, synthetic construct
  source 1..10: note = Seed: VFAQVKQIYK
VVAQVKQIYK

SEQ ID NO: 72304 - protein, 10 aa, synthetic construct
  source 1..10: note = Seed: VFAQVKQIYK
VVAQVKQIYR

SEQ ID NO: 72305 - protein, 9 aa, synthetic construct
  source 1..9: note = Seed: VNASSSEAF
VVASSSEAF

SEQ ID NO: 72306 - protein, 9 aa, synthetic construct
  source 1..9: note = Seed: VNASSSEAF
VVASSSEAY

SEQ ID NO: 72307 - protein, 9 aa, synthetic construct
  source 1..9: note = Seed: VLAWLYAAV
VVAWLYAAA

SEQ ID NO: 72308 - protein, 9 aa, synthetic construct
  source 1..9: note = Seed: VLAWLYAAV
VVAWLYAAI

SEQ ID NO: 72309 - protein, 9 aa, synthetic construct
  source 1..9: note = Seed: VLAWLYAAV
VVAWLYAAL

SEQ ID NO: 72310 - protein, 9 aa, synthetic construct
  source 1..9: note = Seed: VLAWLYAAV
VVAWLYAAV

SEQ ID NO: 72311 - protein, 9 aa, synthetic construct
  source 1..9: note = Seed: VMAYITGGV
VVAYITGGA

SEQ ID NO: 72312 - protein, 9 aa, synthetic construct
  source 1..9: note = Seed: VMAYITGGV
VVAYITGGI

SEQ ID NO: 72313 - protein, 9 aa, synthetic construct
  source 1..9: note = Seed: VMAYITGGV
VVAYITGGL

SEQ ID NO: 72314 - protein, 9 aa, synthetic construct
  source 1..9: note = Seed: VMAYITGGV
VVAYITGGM

SEQ ID NO: 72315 - protein, 9 aa, synthetic construct
  source 1..9: note = Seed: VMAYITGGV
VVAYITGGV

SEQ ID NO: 72316 - protein, 9 aa, synthetic construct
  source 1..9: note = Seed: VSDIDITFL
VVDIDITFL

SEQ ID NO: 72317 - protein, 10 aa, synthetic construct
  source 1..10: note = Seed: VSDIDITFLK
VVDIDITFLK

SEQ ID NO: 72318 - protein, 10 aa, synthetic construct
  source 1..10: note = Seed: VSDIDITFLK
VVDIDITFLR

SEQ ID NO: 72319 - protein, 10 aa, synthetic construct
  source 1..10: note = Seed: VSDIDYVPLK
VVDIDYVPLK

SEQ ID NO: 72320 - protein, 9 aa, synthetic construct
  source 1..9: note = Seed: VVDSYYSLL
VVDSYYSLF

SEQ ID NO: 72321 - protein, 9 aa, synthetic construct
  source 1..9: note = Seed: VVDSYYSLL
VVDSYYSLI

SEQ ID NO: 72322 - protein, 10 aa, synthetic construct
  source 1..10: note = Seed: VVDSYYSLLM
VVDSYYSLLY

SEQ ID NO: 72323 - protein, 9 aa, synthetic construct
  source 1..9: note = Seed: VVDSYYSLL
VVDSYYSLM

SEQ ID NO: 72324 - protein, 9 aa, synthetic construct
  source 1..9: note = Seed: VVDSYYSLL
VVDSYYSLV

SEQ ID NO: 72325 - protein, 11 aa, synthetic construct
  source 1..11: note = Seed: VYDYLVSTQEF
VVDYLVSTQEF

SEQ ID NO: 72326 - protein, 11 aa, synthetic construct
  source 1..11: note = Seed: VYDYLVSTQEF
VVDYLVSTQEW

SEQ ID NO: 72327 - protein, 9 aa, synthetic construct
  source 1..9: note = Seed: VAEWFLAYI
VVEWFLAYI

SEQ ID NO: 72328 - protein, 9 aa, synthetic construct
  source 1..9: note = Seed: VAEWFLAYI
VVEWFLAYV

SEQ ID NO: 72329 - protein, 9 aa, synthetic construct
  source 1..9: note = Seed: VAFELWAKR
VVFELWAKK

SEQ ID NO: 72330 - protein, 9 aa, synthetic construct
  source 1..9: note = Seed: VAFELWAKR
VVFELWAKR

SEQ ID NO: 72331 - protein, 9 aa, synthetic construct
  source 1..9: note = Seed: VTFFIYNKI
VVFFIYNKV

SEQ ID NO: 72332 - protein, 9 aa, synthetic construct
  source 1..9: note = Seed: VTFGDDTVI
VVFGDDTVF

SEQ ID NO: 72333 - protein, 9 aa, synthetic construct
  source 1..9: note = Seed: VTFGDDTVI
VVFGDDTVW

SEQ ID NO: 72334 - protein, 9 aa, synthetic construct
  source 1..9: note = Seed: VTFGDDTVI
VVFGDDTVY

SEQ ID NO: 72335 - protein, 9 aa, synthetic construct
  source 1..9: note = Seed: VSFLAHIQW
VVFLAHIQW

SEQ ID NO: 72336 - protein, 11 aa, synthetic construct
  source 1..11: note = Seed: VSFLAHIQWMV
VVFLAHIQWMV

SEQ ID NO: 72337 - protein, 9 aa, synthetic construct
  source 1..9: note = Seed: VVFLHVTYV
VVFLHVTYA

SEQ ID NO: 72338 - protein, 9 aa, synthetic construct
  source 1..9: note = Seed: VVFLHVTYV
VVFLHVTYI

SEQ ID NO: 72339 - protein, 9 aa, synthetic construct
  source 1..9: note = Seed: VVFLHVTYV
VVFLHVTYK

SEQ ID NO: 72340 - protein, 9 aa, synthetic construct
  source 1..9: note = Seed: VVFLHVTYV
VVFLHVTYL

SEQ ID NO: 72341 - protein, 9 aa, synthetic construct
  source 1..9: note = Seed: VVFLHVTYV
VVFLHVTYM

SEQ ID NO: 72342 - protein, 10 aa, synthetic construct
  source 1..10: note = Seed: VVFLHVTYVP
VVFLHVTYVV

SEQ ID NO: 72343 - protein, 10 aa, synthetic construct
  source 1..10: note = Seed: VEFLRDGWEI
VVFLRDGWEF

SEQ ID NO: 72344 - protein, 11 aa, synthetic construct
  source 1..11: note = Seed: VVFNGVSFSTF
VVFNGVSFSTW

SEQ ID NO: 72345 - protein, 11 aa, synthetic construct
  source 1..11: note = Seed: VVFNGVSFSTF
VVFNGVSFSTY

SEQ ID NO: 72346 - protein, 10 aa, synthetic construct
  source 1..10: note = Seed: VVFNGVSFST
VVFNGVSFSV

SEQ ID NO: 72347 - protein, 9 aa, synthetic construct
  source 1..9: note = Seed: VPFVVSTGY
VVFVVSTGF

SEQ ID NO: 72348 - protein, 9 aa, synthetic construct
  source 1..9: note = Seed: VPFVVSTGY
VVFVVSTGY

SEQ ID NO: 72349 - protein, 9 aa, synthetic construct
  source 1..9: note = Seed: VGGNYNYLY
VVGNYNYLY

SEQ ID NO: 72350 - protein, 10 aa, synthetic construct
  source 1..10: note = Seed: VGGNYNYLYR
VVGNYNYLYK

SEQ ID NO: 72351 - protein, 10 aa, synthetic construct
  source 1..10: note = Seed: VGGNYNYLYR
VVGNYNYLYR

SEQ ID NO: 72352 - protein, 9 aa, synthetic construct
  source 1..9: note = Seed: VMHANYIFW
VVHANYIFW

SEQ ID NO: 72353 - protein, 9 aa, synthetic construct
  source 1..9: note = Seed: VLHDIGNPK
VVHDIGNPK

SEQ ID NO: 72354 - protein, 9 aa, synthetic construct
  source 1..9: note = Seed: VLHDIGNPK
VVHDIGNPR

SEQ ID NO: 72355 - protein, 10 aa, synthetic construct
  source 1..10: note = Seed: VFHLYLQYIR
VVHLYLQYIR

SEQ ID NO: 72356 - protein, 9 aa, synthetic construct
  source 1..9: note = Seed: VTHSKGLYR
VVHSKGLYK

SEQ ID NO: 72357 - protein, 9 aa, synthetic construct
  source 1..9: note = Seed: VTHSKGLYR
VVHSKGLYR

SEQ ID NO: 72358 - protein, 10 aa, synthetic construct
  source 1..10: note = Seed: VTHSKGLYRK
VVHSKGLYRK

SEQ ID NO: 72359 - protein, 10 aa, synthetic construct
  source 1..10: note = Seed: VTHSKGLYRK
VVHSKGLYRR

SEQ ID NO: 72360 - protein, 10 aa, synthetic construct
  source 1..10: note = Seed: VLHSYFTSDY
VVHSYFTSDY

SEQ ID NO: 72361 - protein, 11 aa, synthetic construct
  source 1..11: note = Seed: VLHSYFTSDYY
VVHSYFTSDYW

SEQ ID NO: 72362 - protein, 9 aa, synthetic construct
  source 1..9: note = Seed: VEHVTFFIY
VVHVTFFIY

SEQ ID NO: 72363 - protein, 9 aa, synthetic construct
  source 1..9: note = Seed: VTIAEILLI
VVIAEILLF

SEQ ID NO: 72364 - protein, 10 aa, synthetic construct
  source 1..10: note = Seed: VTIAEILLII
VVIAEILLIW

SEQ ID NO: 72365 - protein, 9 aa, synthetic construct
  source 1..9: note = Seed: VTIAEILLI
VVIAEILLM

SEQ ID NO: 72366 - protein, 9 aa, synthetic construct
  source 1..9: note = Seed: VTIAEILLI
VVIAEILLV

SEQ ID NO: 72367 - protein, 9 aa, synthetic construct
  source 1..9: note = Seed: VTIAEILLI
VVIAEILLW

SEQ ID NO: 72368 - protein, 9 aa, synthetic construct
  source 1..9: note = Seed: VTIAEILLI
VVIAEILLY

SEQ ID NO: 72369 - protein, 10 aa, synthetic construct
  source 1..10: note = Seed: VSICSTMTNR
VVICSTMTNK

SEQ ID NO: 72370 - protein, 10 aa, synthetic construct
  source 1..10: note = Seed: VSICSTMTNR
VVICSTMTNR

SEQ ID NO: 72371 - protein, 9 aa, synthetic construct
  source 1..9: note = Seed: VQIDRLITG
VVIDRLITF

SEQ ID NO: 72372 - protein, 9 aa, synthetic construct
  source 1..9: note = Seed: VQIDRLITG
VVIDRLITY

SEQ ID NO: 72373 - protein, 9 aa, synthetic construct
  source 1..9: note = Seed: VSIINNTVY
VVIINNTVF

SEQ ID NO: 72374 - protein, 9 aa, synthetic construct
  source 1..9: note = Seed: VSIINNTVY
VVIINNTVM

SEQ ID NO: 72375 - protein, 9 aa, synthetic construct
  source 1..9: note = Seed: VSIINNTVY
VVIINNTVW

SEQ ID NO: 72376 - protein, 9 aa, synthetic construct
  source 1..9: note = Seed: VSIINNTVY
VVIINNTVY

SEQ ID NO: 72377 - protein, 10 aa, synthetic construct
  source 1..10: note = Seed: VAIKITEHSW
VVIKITEHSW

SEQ ID NO: 72378 - protein, 10 aa, synthetic construct
  source 1..10: note = Seed: VNINIVGDFK
VVINIVGDFK

SEQ ID NO: 72379 - protein, 10 aa, synthetic construct
  source 1..10: note = Seed: VNINIVGDFK
VVINIVGDFR

SEQ ID NO: 72380 - protein, 9 aa, synthetic construct
  source 1..9: note = Seed: VVIPDYNTY
VVIPDYNTF

SEQ ID NO: 72381 - protein, 9 aa, synthetic construct
  source 1..9: note = Seed: VVIPDYNTY
VVIPDYNTM

SEQ ID NO: 72382 - protein, 9 aa, synthetic construct
  source 1..9: note = Seed: VVIPDYNTY
VVIPDYNTW

SEQ ID NO: 72383 - protein, 10 aa, synthetic construct
  source 1..10: note = Seed: VVIPDYNTYK
VVIPDYNTYR

SEQ ID NO: 72384 - protein, 10 aa, synthetic construct
  source 1..10: note = Seed: VFKNIDGYFK
VVKNIDGYFK

SEQ ID NO: 72385 - protein, 10 aa, synthetic construct
  source 1..10: note = Seed: VFKNIDGYFK
VVKNIDGYFR

SEQ ID NO: 72386 - protein, 9 aa, synthetic construct
  source 1..9: note = Seed: VVKRHTFSN
VVKRHTFSA

SEQ ID NO: 72387 - protein, 9 aa, synthetic construct
  source 1..9: note = Seed: VVKRHTFSN
VVKRHTFSI

SEQ ID NO: 72388 - protein, 9 aa, synthetic construct
  source 1..9: note = Seed: VVKRHTFSN
VVKRHTFSK

SEQ ID NO: 72389 - protein, 9 aa, synthetic construct
  source 1..9: note = Seed: VVKRHTFSN
VVKRHTFSL

SEQ ID NO: 72390 - protein, 9 aa, synthetic construct
  source 1..9: note = Seed: VVKRHTFSN
VVKRHTFSM

SEQ ID NO: 72391 - protein, 10 aa, synthetic construct
  source 1..10: note = Seed: VVKRHTFSNY
VVKRHTFSNK

SEQ ID NO: 72392 - protein, 9 aa, synthetic construct
  source 1..9: note = Seed: VVKRHTFSN
VVKRHTFSS

SEQ ID NO: 72393 - protein, 9 aa, synthetic construct
  source 1..9: note = Seed: VVKRHTFSN
VVKRHTFSV

SEQ ID NO: 72394 - protein, 11 aa, synthetic construct
  source 1..11: note = Seed: VAKYTQLCQYL
VVKYTQLCQYF

SEQ ID NO: 72395 - protein, 10 aa, synthetic construct
  source 1..10: note = Seed: VELFENKTTL
VVLFENKTTV

SEQ ID NO: 72396 - protein, 9 aa, synthetic construct
  source 1..9: note = Seed: VLLFLAFVV
VVLFLAFVV

SEQ ID NO: 72397 - protein, 10 aa, synthetic construct
  source 1..10: note = Seed: VQLHNDILLA
VVLHNDILLV

SEQ ID NO: 72398 - protein, 10 aa, synthetic construct
  source 1..10: note = Seed: VNLHSSRLSF
VVLHSSRLSF

SEQ ID NO: 72399 - protein, 10 aa, synthetic construct
  source 1..10: note = Seed: VNLHSSRLSF
VVLHSSRLSY

SEQ ID NO: 72400 - protein, 10 aa, synthetic construct
  source 1..10: note = Seed: VFLHVTYVPA
VVLHVTYVPV

SEQ ID NO: 72401 - protein, 10 aa, synthetic construct
  source 1..10: note = Seed: VNLKQLPFFY
VVLKQLPFFY

SEQ ID NO: 72402 - protein, 10 aa, synthetic construct
  source 1..10: note = Seed: VVLLSVLQQL
VVLLSVLQQI

SEQ ID NO: 72403 - protein, 10 aa, synthetic construct
  source 1..10: note = Seed: VVLLSVLQQL
VVLLSVLQQV

SEQ ID NO: 72404 - protein, 10 aa, synthetic construct
  source 1..10: note = Seed: VGLMWLSYFI
VVLMWLSYFA

SEQ ID NO: 72405 - protein, 10 aa, synthetic construct
  source 1..10: note = Seed: VGLMWLSYFI
VVLMWLSYFI

SEQ ID NO: 72406 - protein, 10 aa, synthetic construct
  source 1..10: note = Seed: VGLMWLSYFI
VVLMWLSYFL

SEQ ID NO: 72407 - protein, 10 aa, synthetic construct
  source 1..10: note = Seed: VGLMWLSYFI
VVLMWLSYFM

SEQ ID NO: 72408 - protein, 10 aa, synthetic construct
  source 1..10: note = Seed: VGLMWLSYFI
VVLMWLSYFV

SEQ ID NO: 72409 - protein, 9 aa, synthetic construct
  source 1..9: note = Seed: VGLMWLSYF
VVLMWLSYW

SEQ ID NO: 72410 - protein, 9 aa, synthetic construct
  source 1..9: note = Seed: VVLSFELLH
VVLSFELLK

SEQ ID NO: 72411 - protein, 9 aa, synthetic construct
  source 1..9: note = Seed: VVLSFELLH
VVLSFELLR

SEQ ID NO: 72412 - protein, 9 aa, synthetic construct
  source 1..9: note = Seed: VVLSFELLH
VVLSFELLY

SEQ ID NO: 72413 - protein, 9 aa, synthetic construct
  source 1..9: note = Seed: VLLSVLQQL
VVLSVLQQI

SEQ ID NO: 72414 - protein, 9 aa, synthetic construct
  source 1..9: note = Seed: VLLSVLQQL
VVLSVLQQL

SEQ ID NO: 72415 - protein, 9 aa, synthetic construct
  source 1..9: note = Seed: VLLSVLQQL
VVLSVLQQV

SEQ ID NO: 72416 - protein, 10 aa, synthetic construct
  source 1..10: note = Seed: VELVAELEGI
VVLVAELEGV

SEQ ID NO: 72417 - protein, 10 aa, synthetic construct
  source 1..10: note = Seed: VVMAYITGGV
VVMAYITGGA

SEQ ID NO: 72418 - protein, 10 aa, synthetic construct
  source 1..10: note = Seed: VVMAYITGGV
VVMAYITGGI

SEQ ID NO: 72419 - protein, 10 aa, synthetic construct
  source 1..10: note = Seed: VVMAYITGGV
VVMAYITGGL

SEQ ID NO: 72420 - protein, 10 aa, synthetic construct
  source 1..10: note = Seed: VFMCVEYCPI
VVMCVEYCPV

SEQ ID NO: 72421 - protein, 9 aa, synthetic construct
  source 1..9: note = Seed: VQMLSDTLK
VVMLSDTLK

SEQ ID NO: 72422 - protein, 9 aa, synthetic construct
  source 1..9: note = Seed: VQMLSDTLK
VVMLSDTLR

SEQ ID NO: 72423 - protein, 10 aa, synthetic construct
  source 1..10: note = Seed: VRMYIFFASF
VVMYIFFASF

SEQ ID NO: 72424 - protein, 11 aa, synthetic construct
  source 1..11: note = Seed: VRMYIFFASFY
VVMYIFFASFK

SEQ ID NO: 72425 - protein, 11 aa, synthetic construct
  source 1..11: note = Seed: VRMYIFFASFY
VVMYIFFASFY

SEQ ID NO: 72426 - protein, 10 aa, synthetic construct
  source 1..10: note = Seed: VRMYIFFASF
VVMYIFFASY

SEQ ID NO: 72427 - protein, 9 aa, synthetic construct
  source 1..9: note = Seed: VLNDILSRL
VVNDILSRI

SEQ ID NO: 72428 - protein, 9 aa, synthetic construct
  source 1..9: note = Seed: VLNDILSRL
VVNDILSRL

SEQ ID NO: 72429 - protein, 10 aa, synthetic construct
  source 1..10: note = Seed: VLNDILSRLD
VVNDILSRLV

SEQ ID NO: 72430 - protein, 9 aa, synthetic construct
  source 1..9: note = Seed: VLNDILSRL
VVNDILSRV

SEQ ID NO: 72431 - protein, 10 aa, synthetic construct
  source 1..10: note = Seed: VFNGVSFSTF
VVNGVSFSTF

SEQ ID NO: 72432 - protein, 10 aa, synthetic construct
  source 1..10: note = Seed: VFNGVSFSTF
VVNGVSFSTY

SEQ ID NO: 72433 - protein, 9 aa, synthetic construct
  source 1..9: note = Seed: VVNQNAQAL
VVNQNAQAF

SEQ ID NO: 72434 - protein, 9 aa, synthetic construct
  source 1..9: note = Seed: VVNQNAQAL
VVNQNAQAM

SEQ ID NO: 72435 - protein, 9 aa, synthetic construct
  source 1..9: note = Seed: VVNQNAQAL
VVNQNAQAY

SEQ ID NO: 72436 - protein, 9 aa, synthetic construct
  source 1..9: note = Seed: VIPDYNTYK
VVPDYNTYK

SEQ ID NO: 72437 - protein, 9 aa, synthetic construct
  source 1..9: note = Seed: VIPDYNTYK
VVPDYNTYR

SEQ ID NO: 72438 - protein, 10 aa, synthetic construct
  source 1..10: note = Seed: VLPFNDGVYF
VVPFNDGVYW

SEQ ID NO: 72439 - protein, 10 aa, synthetic construct
  source 1..10: note = Seed: VLPFNDGVYF
VVPFNDGVYY

SEQ ID NO: 72440 - protein, 9 aa, synthetic construct
  source 1..9: note = Seed: VAPGTAVLR
VVPGTAVLR

SEQ ID NO: 72441 - protein, 9 aa, synthetic construct
  source 1..9: note = Seed: VRQCSGVTF
VVQCSGVTF

SEQ ID NO: 72442 - protein, 9 aa, synthetic construct
  source 1..9: note = Seed: VRQCSGVTF
VVQCSGVTY

SEQ ID NO: 72443 - protein, 10 aa, synthetic construct
  source 1..10: note = Seed: VLQLPQGTTL
VVQLPQGTTF

SEQ ID NO: 72444 - protein, 10 aa, synthetic construct
  source 1..10: note = Seed: VLQLPQGTTL
VVQLPQGTTM

SEQ ID NO: 72445 - protein, 10 aa, synthetic construct
  source 1..10: note = Seed: VLQLPQGTTL
VVQLPQGTTY

SEQ ID NO: 72446 - protein, 9 aa, synthetic construct
  source 1..9: note = Seed: VTRCLNRVC
VVRCLNRVA

SEQ ID NO: 72447 - protein, 9 aa, synthetic construct
  source 1..9: note = Seed: VTRCLNRVC
VVRCLNRVK

SEQ ID NO: 72448 - protein, 9 aa, synthetic construct
  source 1..9: note = Seed: VARDLSLQF
VVRDLSLQF

SEQ ID NO: 72449 - protein, 10 aa, synthetic construct
  source 1..10: note = Seed: VARDLSLQFK
VVRDLSLQFK

SEQ ID NO: 72450 - protein, 10 aa, synthetic construct
  source 1..10: note = Seed: VARDLSLQFK
VVRDLSLQFR

SEQ ID NO: 72451 - protein, 9 aa, synthetic construct
  source 1..9: note = Seed: VARDLSLQF
VVRDLSLQW

SEQ ID NO: 72452 - protein, 9 aa, synthetic construct
  source 1..9: note = Seed: VARDLSLQF
VVRDLSLQY

SEQ ID NO: 72453 - protein, 9 aa, synthetic construct
  source 1..9: note = Seed: VTRELMREL
VVRELMREK

SEQ ID NO: 72454 - protein, 9 aa, synthetic construct
  source 1..9: note = Seed: VTRELMREL
VVRELMREW

SEQ ID NO: 72455 - protein, 10 aa, synthetic construct
  source 1..10: note = Seed: VNRFNVAITR
VVRFNVAITR

SEQ ID NO: 72456 - protein, 9 aa, synthetic construct
  source 1..9: note = Seed: VYRGTTTYK
VVRGTTTYA

SEQ ID NO: 72457 - protein, 9 aa, synthetic construct
  source 1..9: note = Seed: VYRGTTTYK
VVRGTTTYI

SEQ ID NO: 72458 - protein, 9 aa, synthetic construct
  source 1..9: note = Seed: VYRGTTTYK
VVRGTTTYK

SEQ ID NO: 72459 - protein, 10 aa, synthetic construct
  source 1..10: note = Seed: VYRGTTTYKL
VVRGTTTYKK

SEQ ID NO: 72460 - protein, 9 aa, synthetic construct
  source 1..9: note = Seed: VYRGTTTYK
VVRGTTTYL

SEQ ID NO: 72461 - protein, 9 aa, synthetic construct
  source 1..9: note = Seed: VYRGTTTYK
VVRGTTTYR

SEQ ID NO: 72462 - protein, 9 aa, synthetic construct
  source 1..9: note = Seed: VYRGTTTYK
VVRGTTTYV

SEQ ID NO: 72463 - protein, 10 aa, synthetic construct
  source 1..10: note = Seed: VVRQCSGVTF
VVRQCSGVTW

SEQ ID NO: 72464 - protein, 10 aa, synthetic construct
  source 1..10: note = Seed: VVRQCSGVTF
VVRQCSGVTY

SEQ ID NO: 72465 - protein, 11 aa, synthetic construct
  source 1..11: note = Seed: VKRTIKGTHHW
VVRTIKGTHHW

SEQ ID NO: 72466 - protein, 9 aa, synthetic construct
  source 1..9: note = Seed: VTSAMQTML
VVSAMQTMF

SEQ ID NO: 72467 - protein, 10 aa, synthetic construct
  source 1..10: note = Seed: VTSAMQTMLF
VVSAMQTMLF

SEQ ID NO: 72468 - protein, 10 aa, synthetic construct
  source 1..10: note = Seed: VTSAMQTMLF
VVSAMQTMLW

SEQ ID NO: 72469 - protein, 10 aa, synthetic construct
  source 1..10: note = Seed: VTSAMQTMLF
VVSAMQTMLY

SEQ ID NO: 72470 - protein, 9 aa, synthetic construct
  source 1..9: note = Seed: VTSAMQTML
VVSAMQTMW

SEQ ID NO: 72471 - protein, 9 aa, synthetic construct
  source 1..9: note = Seed: VTSAMQTML
VVSAMQTMY

SEQ ID NO: 72472 - protein, 10 aa, synthetic construct
  source 1..10: note = Seed: VVSDIDYVPL
VVSDIDYVPI

SEQ ID NO: 72473 - protein, 10 aa, synthetic construct
  source 1..10: note = Seed: VVSDIDYVPL
VVSDIDYVPV

SEQ ID NO: 72474 - protein, 9 aa, synthetic construct
  source 1..9: note = Seed: VLSFCAFAV
VVSFCAFAL

SEQ ID NO: 72475 - protein, 9 aa, synthetic construct
  source 1..9: note = Seed: VLSFCAFAV
VVSFCAFAV

SEQ ID NO: 72476 - protein, 9 aa, synthetic construct
  source 1..9: note = Seed: VYSFLPGVY
VVSFLPGVY

SEQ ID NO: 72477 - protein, 11 aa, synthetic construct
  source 1..11: note = Seed: VYSFLPGVYSV
VVSFLPGVYSF

SEQ ID NO: 72478 - protein, 9 aa, synthetic construct
  source 1..9: note = Seed: VNSFSGYLK
VVSFSGYLK

SEQ ID NO: 72479 - protein, 10 aa, synthetic construct
  source 1..10: note = Seed: VNSFSGYLKL
VVSFSGYLKF

SEQ ID NO: 72480 - protein, 10 aa, synthetic construct
  source 1..10: note = Seed: VNSFSGYLKL
VVSFSGYLKM

SEQ ID NO: 72481 - protein, 10 aa, synthetic construct
  source 1..10: note = Seed: VNSFSGYLKL
VVSFSGYLKW

SEQ ID NO: 72482 - protein, 10 aa, synthetic construct
  source 1..10: note = Seed: VNSFSGYLKL
VVSFSGYLKY

SEQ ID NO: 72483 - protein, 9 aa, synthetic construct
  source 1..9: note = Seed: VNSFSGYLK
VVSFSGYLR

SEQ ID NO: 72484 - protein, 9 aa, synthetic construct
  source 1..9: note = Seed: VLSGHNLAK
VVSGHNLAK

SEQ ID NO: 72485 - protein, 9 aa, synthetic construct
  source 1..9: note = Seed: VLSGHNLAK
VVSGHNLAR

SEQ ID NO: 72486 - protein, 10 aa, synthetic construct
  source 1..10: note = Seed: VYSSANNCTF
VVSSANNCTW

SEQ ID NO: 72487 - protein, 9 aa, synthetic construct
  source 1..9: note = Seed: VYSTGSNVF
VVSTGSNVF

SEQ ID NO: 72488 - protein, 9 aa, synthetic construct
  source 1..9: note = Seed: VVSTGYHFR
VVSTGYHFK

SEQ ID NO: 72489 - protein, 10 aa, synthetic construct
  source 1..10: note = Seed: VVSTGYHFRE
VVSTGYHFRR

SEQ ID NO: 72490 - protein, 11 aa, synthetic construct
  source 1..11: note = Seed: VDSYYSLLMPI
VVSYYSLLMPF

SEQ ID NO: 72491 - protein, 9 aa, synthetic construct
  source 1..9: note = Seed: VFTGYRVTK
VVTGYRVTR

SEQ ID NO: 72492 - protein, 9 aa, synthetic construct
  source 1..9: note = Seed: VSTQEFRYM
VVTQEFRYW

SEQ ID NO: 72493 - protein, 9 aa, synthetic construct
  source 1..9: note = Seed: VSTSGRWVL
VVTSGRWVW

SEQ ID NO: 72494 - protein, 9 aa, synthetic construct
  source 1..9: note = Seed: VVTTKIALK
VVTTKIALR

SEQ ID NO: 72495 - protein, 10 aa, synthetic construct
  source 1..10: note = Seed: VETVKGLDYK
VVTVKGLDYK

SEQ ID NO: 72496 - protein, 10 aa, synthetic construct
  source 1..10: note = Seed: VNVAFELWAK
VVVAFELWAK

SEQ ID NO: 72497 - protein, 10 aa, synthetic construct
  source 1..10: note = Seed: VNVAFELWAK
VVVAFELWAR

SEQ ID NO: 72498 - protein, 10 aa, synthetic construct
  source 1..10: note = Seed: VNVLAWLYAA
VVVLAWLYAI

SEQ ID NO: 72499 - protein, 10 aa, synthetic construct
  source 1..10: note = Seed: VNVLAWLYAA
VVVLAWLYAL

SEQ ID NO: 72500 - protein, 10 aa, synthetic construct
  source 1..10: note = Seed: VNVLAWLYAA
VVVLAWLYAV

SEQ ID NO: 72501 - protein, 11 aa, synthetic construct
  source 1..11: note = Seed: VFVLWAHGFEL
VVVLWAHGFEI

SEQ ID NO: 72502 - protein, 11 aa, synthetic construct
  source 1..11: note = Seed: VFVLWAHGFEL
VVVLWAHGFEL

SEQ ID NO: 72503 - protein, 11 aa, synthetic construct
  source 1..11: note = Seed: VFVLWAHGFEL
VVVLWAHGFEV

SEQ ID NO: 72504 - protein, 9 aa, synthetic construct
  source 1..9: note = Seed: VFVLWAHGF
VVVLWAHGY

SEQ ID NO: 72505 - protein, 9 aa, synthetic construct
  source 1..9: note = Seed: VCVSTSGRW
VVVSTSGRF

SEQ ID NO: 72506 - protein, 9 aa, synthetic construct
  source 1..9: note = Seed: VCVSTSGRW
VVVSTSGRW

SEQ ID NO: 72507 - protein, 9 aa, synthetic construct
  source 1..9: note = Seed: VQVTCGTTT
VVVTCGTTF

SEQ ID NO: 72508 - protein, 10 aa, synthetic construct
  source 1..10: note = Seed: VQVTCGTTTL
VVVTCGTTTY

SEQ ID NO: 72509 - protein, 9 aa, synthetic construct
  source 1..9: note = Seed: VQVTCGTTT
VVVTCGTTY

SEQ ID NO: 72510 - protein, 9 aa, synthetic construct
  source 1..9: note = Seed: VLWAHGFEL
VVWAHGFEA

SEQ ID NO: 72511 - protein, 9 aa, synthetic construct
  source 1..9: note = Seed: VLWAHGFEL
VVWAHGFEF

SEQ ID NO: 72512 - protein, 9 aa, synthetic construct
  source 1..9: note = Seed: VLWAHGFEL
VVWAHGFEI

SEQ ID NO: 72513 - protein, 9 aa, synthetic construct
  source 1..9: note = Seed: VLWAHGFEL
VVWAHGFEL

SEQ ID NO: 72514 - protein, 10 aa, synthetic construct
  source 1..10: note = Seed: VLWAHGFELT
VVWAHGFELV

SEQ ID NO: 72515 - protein, 9 aa, synthetic construct
  source 1..9: note = Seed: VLWAHGFEL
VVWAHGFEM

SEQ ID NO: 72516 - protein, 9 aa, synthetic construct
  source 1..9: note = Seed: VLWAHGFEL
VVWAHGFEV

SEQ ID NO: 72517 - protein, 9 aa, synthetic construct
  source 1..9: note = Seed: VLWAHGFEL
VVWAHGFEW

SEQ ID NO: 72518 - protein, 9 aa, synthetic construct
  source 1..9: note = Seed: VLWAHGFEL
VVWAHGFEY

SEQ ID NO: 72519 - protein, 9 aa, synthetic construct
  source 1..9: note = Seed: VMYASAVVL
VVYASAVVF

SEQ ID NO: 72520 - protein, 9 aa, synthetic construct
  source 1..9: note = Seed: VMYASAVVL
VVYASAVVL

SEQ ID NO: 72521 - protein, 10 aa, synthetic construct
  source 1..10: note = Seed: VMYASAVVLL
VVYASAVVLF

SEQ ID NO: 72522 - protein, 10 aa, synthetic construct
  source 1..10: note = Seed: VMYASAVVLL
VVYASAVVLI

SEQ ID NO: 72523 - protein, 10 aa, synthetic construct
  source 1..10: note = Seed: VMYASAVVLL
VVYASAVVLL

SEQ ID NO: 72524 - protein, 11 aa, synthetic construct
  source 1..11: note = Seed: VMYASAVVLLI
VVYASAVVLLF

SEQ ID NO: 72525 - protein, 10 aa, synthetic construct
  source 1..10: note = Seed: VMYASAVVLL
VVYASAVVLM

SEQ ID NO: 72526 - protein, 10 aa, synthetic construct
  source 1..10: note = Seed: VMYASAVVLL
VVYASAVVLW

SEQ ID NO: 72527 - protein, 10 aa, synthetic construct
  source 1..10: note = Seed: VMYASAVVLL
VVYASAVVLY

SEQ ID NO: 72528 - protein, 9 aa, synthetic construct
  source 1..9: note = Seed: VMYASAVVL
VVYASAVVM

SEQ ID NO: 72529 - protein, 9 aa, synthetic construct
  source 1..9: note = Seed: VMYASAVVL
VVYASAVVV

SEQ ID NO: 72530 - protein, 9 aa, synthetic construct
  source 1..9: note = Seed: VMYASAVVL
VVYASAVVW

SEQ ID NO: 72531 - protein, 9 aa, synthetic construct
  source 1..9: note = Seed: VMYASAVVL
VVYASAVVY

SEQ ID NO: 72532 - protein, 10 aa, synthetic construct
  source 1..10: note = Seed: VPYCYDTNVL
VVYCYDTNVF

SEQ ID NO: 72533 - protein, 9 aa, synthetic construct
  source 1..9: note = Seed: VAYFNMVYM
VVYFNMVYW

SEQ ID NO: 72534 - protein, 9 aa, synthetic construct
  source 1..9: note = Seed: VTYKLDGVV
VVYKLDGVF

SEQ ID NO: 72535 - protein, 9 aa, synthetic construct
  source 1..9: note = Seed: VTYKLDGVV
VVYKLDGVW

SEQ ID NO: 72536 - protein, 9 aa, synthetic construct
  source 1..9: note = Seed: VTYKLDGVV
VVYKLDGVY

SEQ ID NO: 72537 - protein, 9 aa, synthetic construct
  source 1..9: note = Seed: VGYLQPRTF
VVYLQPRTF

SEQ ID NO: 72538 - protein, 10 aa, synthetic construct
  source 1..10: note = Seed: VGYLQPRTFL
VVYLQPRTFF

SEQ ID NO: 72539 - protein, 11 aa, synthetic construct
  source 1..11: note = Seed: VGYLQPRTFLL
VVYLQPRTFLV

SEQ ID NO: 72540 - protein, 9 aa, synthetic construct
  source 1..9: note = Seed: VGYLQPRTF
VVYLQPRTM

SEQ ID NO: 72541 - protein, 9 aa, synthetic construct
  source 1..9: note = Seed: VGYLQPRTF
VVYLQPRTV

SEQ ID NO: 72542 - protein, 9 aa, synthetic construct
  source 1..9: note = Seed: VGYLQPRTF
VVYLQPRTW

SEQ ID NO: 72543 - protein, 9 aa, synthetic construct
  source 1..9: note = Seed: VGYLQPRTF
VVYLQPRTY

SEQ ID NO: 72544 - protein, 10 aa, synthetic construct
  source 1..10: note = Seed: VLYQPPQTSI
VVYQPPQTSF

SEQ ID NO: 72545 - protein, 10 aa, synthetic construct
  source 1..10: note = Seed: VLYQPPQTSI
VVYQPPQTSM

SEQ ID NO: 72546 - protein, 10 aa, synthetic construct
  source 1..10: note = Seed: VLYQPPQTSI
VVYQPPQTSW

SEQ ID NO: 72547 - protein, 9 aa, synthetic construct
  source 1..9: note = Seed: VGYQPYRVV
VVYQPYRVM

SEQ ID NO: 72548 - protein, 10 aa, synthetic construct
  source 1..10: note = Seed: VGYQPYRVVV
VVYQPYRVVF

SEQ ID NO: 72549 - protein, 10 aa, synthetic construct
  source 1..10: note = Seed: VGYQPYRVVV
VVYQPYRVVI

SEQ ID NO: 72550 - protein, 10 aa, synthetic construct
  source 1..10: note = Seed: VGYQPYRVVV
VVYQPYRVVL

SEQ ID NO: 72551 - protein, 10 aa, synthetic construct
  source 1..10: note = Seed: VGYQPYRVVV
VVYQPYRVVM

SEQ ID NO: 72552 - protein, 10 aa, synthetic construct
  source 1..10: note = Seed: VGYQPYRVVV
VVYQPYRVVW

SEQ ID NO: 72553 - protein, 9 aa, synthetic construct
  source 1..9: note = Seed: VVYRGTTTY
VVYRGTTTF

SEQ ID NO: 72554 - protein, 9 aa, synthetic construct
  source 1..9: note = Seed: VVYRGTTTY
VVYRGTTTI

SEQ ID NO: 72555 - protein, 9 aa, synthetic construct
  source 1..9: note = Seed: VVYRGTTTY
VVYRGTTTK

SEQ ID NO: 72556 - protein, 9 aa, synthetic construct
  source 1..9: note = Seed: VVYRGTTTY
VVYRGTTTL

SEQ ID NO: 72557 - protein, 9 aa, synthetic construct
  source 1..9: note = Seed: VVYRGTTTY
VVYRGTTTM

SEQ ID NO: 72558 - protein, 9 aa, synthetic construct
  source 1..9: note = Seed: VVYRGTTTY
VVYRGTTTR

SEQ ID NO: 72559 - protein, 9 aa, synthetic construct
  source 1..9: note = Seed: VVYRGTTTY
VVYRGTTTV

SEQ ID NO: 72560 - protein, 9 aa, synthetic construct
  source 1..9: note = Seed: VVYRGTTTY
VVYRGTTTW

SEQ ID NO: 72561 - protein, 10 aa, synthetic construct
  source 1..10: note = Seed: VVYRGTTTYK
VVYRGTTTYF

SEQ ID NO: 72562 - protein, 11 aa, synthetic construct
  source 1..11: note = Seed: VVYRGTTTYKL
VVYRGTTTYKK

SEQ ID NO: 72563 - protein, 10 aa, synthetic construct
  source 1..10: note = Seed: VVYRGTTTYK
VVYRGTTTYR

SEQ ID NO: 72564 - protein, 10 aa, synthetic construct
  source 1..10: note = Seed: VVYRGTTTYK
VVYRGTTTYY

SEQ ID NO: 72565 - protein, 10 aa, synthetic construct
  source 1..10: note = Seed: VYYTSNPTTF
VVYTSNPTTF

SEQ ID NO: 72566 - protein, 9 aa, synthetic construct
  source 1..9: note = Seed: VLYYQNNVF
VVYYQNNVF

SEQ ID NO: 72567 - protein, 10 aa, synthetic construct
  source 1..10: note = Seed: VLYYQNNVFM
VVYYQNNVFF

SEQ ID NO: 72568 - protein, 10 aa, synthetic construct
  source 1..10: note = Seed: VLYYQNNVFM
VVYYQNNVFI

SEQ ID NO: 72569 - protein, 10 aa, synthetic construct
  source 1..10: note = Seed: VLYYQNNVFM
VVYYQNNVFL

SEQ ID NO: 72570 - protein, 10 aa, synthetic construct
  source 1..10: note = Seed: VLYYQNNVFM
VVYYQNNVFW

SEQ ID NO: 72571 - protein, 9 aa, synthetic construct
  source 1..9: note = Seed: VLYYQNNVF
VVYYQNNVM

SEQ ID NO: 72572 - protein, 9 aa, synthetic construct
  source 1..9: note = Seed: VLYYQNNVF
VVYYQNNVW

SEQ ID NO: 72573 - protein, 9 aa, synthetic construct
  source 1..9: note = Seed: VLYYQNNVF
VVYYQNNVY

SEQ ID NO: 72574 - protein, 10 aa, synthetic construct
  source 1..10: note = Seed: VLAAECTIFK
VWAAECTIFR

SEQ ID NO: 72575 - protein, 10 aa, synthetic construct
  source 1..10: note = Seed: VFAQVKQIYK
VWAQVKQIYR

SEQ ID NO: 72576 - protein, 10 aa, synthetic construct
  source 1..10: note = Seed: VLCLTPVYSF
VWCLTPVYSF

SEQ ID NO: 72577 - protein, 10 aa, synthetic construct
  source 1..10: note = Seed: VLCLTPVYSF
VWCLTPVYSW

SEQ ID NO: 72578 - protein, 10 aa, synthetic construct
  source 1..10: note = Seed: VSDIDITFLK
VWDIDITFLR

SEQ ID NO: 72579 - protein, 11 aa, synthetic construct
  source 1..11: note = Seed: VYDYLVSTQEF
VWDYLVSTQEF

SEQ ID NO: 72580 - protein, 11 aa, synthetic construct
  source 1..11: note = Seed: VYDYLVSTQEF
VWDYLVSTQEI

SEQ ID NO: 72581 - protein, 11 aa, synthetic construct
  source 1..11: note = Seed: VYDYLVSTQEF
VWDYLVSTQEL

SEQ ID NO: 72582 - protein, 11 aa, synthetic construct
  source 1..11: note = Seed: VYDYLVSTQEF
VWDYLVSTQEW

SEQ ID NO: 72583 - protein, 9 aa, synthetic construct
  source 1..9: note = Seed: VYEKLKPVL
VWEKLKPVF

SEQ ID NO: 72584 - protein, 10 aa, synthetic construct
  source 1..10: note = Seed: VAEWFLAYIL
VWEWFLAYIL

SEQ ID NO: 72585 - protein, 9 aa, synthetic construct
  source 1..9: note = Seed: VAFELWAKR
VWFELWAKR

SEQ ID NO: 72586 - protein, 11 aa, synthetic construct
  source 1..11: note = Seed: VSFLAHIQWMV
VWFLAHIQWMV

SEQ ID NO: 72587 - protein, 10 aa, synthetic construct
  source 1..10: note = Seed: VEFLRDGWEI
VWFLRDGWEF

SEQ ID NO: 72588 - protein, 10 aa, synthetic construct
  source 1..10: note = Seed: VEFLRDGWEI
VWFLRDGWEI

SEQ ID NO: 72589 - protein, 10 aa, synthetic construct
  source 1..10: note = Seed: VEFLRDGWEI
VWFLRDGWEL

SEQ ID NO: 72590 - protein, 10 aa, synthetic construct
  source 1..10: note = Seed: VEFLRDGWEI
VWFLRDGWEW

SEQ ID NO: 72591 - protein, 11 aa, synthetic construct
  source 1..11: note = Seed: VVFNGVSFSTF
VWFNGVSFSTF

SEQ ID NO: 72592 - protein, 11 aa, synthetic construct
  source 1..11: note = Seed: VVFNGVSFSTF
VWFNGVSFSTI

SEQ ID NO: 72593 - protein, 11 aa, synthetic construct
  source 1..11: note = Seed: VVFNGVSFSTF
VWFNGVSFSTL

SEQ ID NO: 72594 - protein, 11 aa, synthetic construct
  source 1..11: note = Seed: VVFNGVSFSTF
VWFNGVSFSTW

SEQ ID NO: 72595 - protein, 10 aa, synthetic construct
  source 1..10: note = Seed: VVFVLWAHGF
VWFVLWAHGF

SEQ ID NO: 72596 - protein, 10 aa, synthetic construct
  source 1..10: note = Seed: VVFVLWAHGF
VWFVLWAHGW

SEQ ID NO: 72597 - protein, 9 aa, synthetic construct
  source 1..9: note = Seed: VPFVVSTGY
VWFVVSTGY

SEQ ID NO: 72598 - protein, 9 aa, synthetic construct
  source 1..9: note = Seed: VGGNYNYLY
VWGNYNYLF

SEQ ID NO: 72599 - protein, 9 aa, synthetic construct
  source 1..9: note = Seed: VGGNYNYLY
VWGNYNYLY

SEQ ID NO: 72600 - protein, 10 aa, synthetic construct
  source 1..10: note = Seed: VGGNYNYLYR
VWGNYNYLYK

SEQ ID NO: 72601 - protein, 10 aa, synthetic construct
  source 1..10: note = Seed: VGGNYNYLYR
VWGNYNYLYR

SEQ ID NO: 72602 - protein, 9 aa, synthetic construct
  source 1..9: note = Seed: VMHANYIFW
VWHANYIFF

SEQ ID NO: 72603 - protein, 9 aa, synthetic construct
  source 1..9: note = Seed: VMHANYIFW
VWHANYIFI

SEQ ID NO: 72604 - protein, 9 aa, synthetic construct
  source 1..9: note = Seed: VMHANYIFW
VWHANYIFL

SEQ ID NO: 72605 - protein, 9 aa, synthetic construct
  source 1..9: note = Seed: VMHANYIFW
VWHANYIFM

SEQ ID NO: 72606 - protein, 9 aa, synthetic construct
  source 1..9: note = Seed: VMHANYIFW
VWHANYIFW

SEQ ID NO: 72607 - protein, 9 aa, synthetic construct
  source 1..9: note = Seed: VFHLYLQYI
VWHLYLQYF

SEQ ID NO: 72608 - protein, 9 aa, synthetic construct
  source 1..9: note = Seed: VFHLYLQYI
VWHLYLQYI

SEQ ID NO: 72609 - protein, 9 aa, synthetic construct
  source 1..9: note = Seed: VFHLYLQYI
VWHLYLQYL

SEQ ID NO: 72610 - protein, 9 aa, synthetic construct
  source 1..9: note = Seed: VFHLYLQYI
VWHLYLQYM

SEQ ID NO: 72611 - protein, 9 aa, synthetic construct
  source 1..9: note = Seed: VFHLYLQYI
VWHLYLQYW

SEQ ID NO: 72612 - protein, 9 aa, synthetic construct
  source 1..9: note = Seed: VTHSKGLYR
VWHSKGLYR

SEQ ID NO: 72613 - protein, 11 aa, synthetic construct
  source 1..11: note = Seed: VLHSYFTSDYY
VWHSYFTSDYW

SEQ ID NO: 72614 - protein, 9 aa, synthetic construct
  source 1..9: note = Seed: VEHVTFFIY
VWHVTFFIY

SEQ ID NO: 72615 - protein, 9 aa, synthetic construct
  source 1..9: note = Seed: VYIKNADIV
VWIKNADIF

SEQ ID NO: 72616 - protein, 9 aa, synthetic construct
  source 1..9: note = Seed: VYIKNADIV
VWIKNADII

SEQ ID NO: 72617 - protein, 9 aa, synthetic construct
  source 1..9: note = Seed: VYIKNADIV
VWIKNADIL

SEQ ID NO: 72618 - protein, 9 aa, synthetic construct
  source 1..9: note = Seed: VYIKNADIV
VWIKNADIW

SEQ ID NO: 72619 - protein, 10 aa, synthetic construct
  source 1..10: note = Seed: VNINIVGDFK
VWINIVGDFR

SEQ ID NO: 72620 - protein, 10 aa, synthetic construct
  source 1..10: note = Seed: VVIPDYNTYK
VWIPDYNTYR

SEQ ID NO: 72621 - protein, 9 aa, synthetic construct
  source 1..9: note = Seed: VFKNIDGYF
VWKNIDGYF

SEQ ID NO: 72622 - protein, 10 aa, synthetic construct
  source 1..10: note = Seed: VFKNIDGYFK
VWKNIDGYFK

SEQ ID NO: 72623 - protein, 11 aa, synthetic construct
  source 1..11: note = Seed: VFKNIDGYFKI
VWKNIDGYFKF

SEQ ID NO: 72624 - protein, 10 aa, synthetic construct
  source 1..10: note = Seed: VFKNIDGYFK
VWKNIDGYFR

SEQ ID NO: 72625 - protein, 10 aa, synthetic construct
  source 1..10: note = Seed: VYKQFDTYNL
VWKQFDTYNF

SEQ ID NO: 72626 - protein, 11 aa, synthetic construct
  source 1..11: note = Seed: VYKQFDTYNLW
VWKQFDTYNLF

SEQ ID NO: 72627 - protein, 10 aa, synthetic construct
  source 1..10: note = Seed: VYKQFDTYNL
VWKQFDTYNW

SEQ ID NO: 72628 - protein, 9 aa, synthetic construct
  source 1..9: note = Seed: VVKRHTFSN
VWKRHTFSK

SEQ ID NO: 72629 - protein, 9 aa, synthetic construct
  source 1..9: note = Seed: VWKSYVHVV
VWKSYVHVF

SEQ ID NO: 72630 - protein, 9 aa, synthetic construct
  source 1..9: note = Seed: VWKSYVHVV
VWKSYVHVI

SEQ ID NO: 72631 - protein, 9 aa, synthetic construct
  source 1..9: note = Seed: VWKSYVHVV
VWKSYVHVL

SEQ ID NO: 72632 - protein, 9 aa, synthetic construct
  source 1..9: note = Seed: VWKSYVHVV
VWKSYVHVM

SEQ ID NO: 72633 - protein, 9 aa, synthetic construct
  source 1..9: note = Seed: VWKSYVHVV
VWKSYVHVW

SEQ ID NO: 72634 - protein, 11 aa, synthetic construct
  source 1..11: note = Seed: VAKYTQLCQYL
VWKYTQLCQYF

SEQ ID NO: 72635 - protein, 10 aa, synthetic construct
  source 1..10: note = Seed: VELFENKTTL
VWLFENKTTV

SEQ ID NO: 72636 - protein, 10 aa, synthetic construct
  source 1..10: note = Seed: VQLHNDILLA
VWLHNDILLV

SEQ ID NO: 72637 - protein, 10 aa, synthetic construct
  source 1..10: note = Seed: VNLHSSRLSF
VWLHSSRLSF

SEQ ID NO: 72638 - protein, 10 aa, synthetic construct
  source 1..10: note = Seed: VNLHSSRLSF
VWLHSSRLSY

SEQ ID NO: 72639 - protein, 10 aa, synthetic construct
  source 1..10: note = Seed: VNLKQLPFFY
VWLKQLPFFY

SEQ ID NO: 72640 - protein, 10 aa, synthetic construct
  source 1..10: note = Seed: VVLLSVLQQL
VWLLSVLQQI

SEQ ID NO: 72641 - protein, 10 aa, synthetic construct
  source 1..10: note = Seed: VVLLSVLQQL
VWLLSVLQQL

SEQ ID NO: 72642 - protein, 10 aa, synthetic construct
  source 1..10: note = Seed: VVLLSVLQQL
VWLLSVLQQV

SEQ ID NO: 72643 - protein, 10 aa, synthetic construct
  source 1..10: note = Seed: VGLMWLSYFI
VWLMWLSYFA

SEQ ID NO: 72644 - protein, 10 aa, synthetic construct
  source 1..10: note = Seed: VGLMWLSYFI
VWLMWLSYFI

SEQ ID NO: 72645 - protein, 10 aa, synthetic construct
  source 1..10: note = Seed: VGLMWLSYFI
VWLMWLSYFL

SEQ ID NO: 72646 - protein, 10 aa, synthetic construct
  source 1..10: note = Seed: VGLMWLSYFI
VWLMWLSYFM

SEQ ID NO: 72647 - protein, 10 aa, synthetic construct
  source 1..10: note = Seed: VGLMWLSYFI
VWLMWLSYFV

SEQ ID NO: 72648 - protein, 9 aa, synthetic construct
  source 1..9: note = Seed: VVLSFELLH
VWLSFELLF

SEQ ID NO: 72649 - protein, 9 aa, synthetic construct
  source 1..9: note = Seed: VVLSFELLH
VWLSFELLY

SEQ ID NO: 72650 - protein, 10 aa, synthetic construct
  source 1..10: note = Seed: VLLSVLQQLR
VWLSVLQQLL

SEQ ID NO: 72651 - protein, 10 aa, synthetic construct
  source 1..10: note = Seed: VELVAELEGI
VWLVAELEGV

SEQ ID NO: 72652 - protein, 10 aa, synthetic construct
  source 1..10: note = Seed: VVMAYITGGV
VWMAYITGGI

SEQ ID NO: 72653 - protein, 10 aa, synthetic construct
  source 1..10: note = Seed: VVMAYITGGV
VWMAYITGGL

SEQ ID NO: 72654 - protein, 10 aa, synthetic construct
  source 1..10: note = Seed: VVMAYITGGV
VWMAYITGGV

SEQ ID NO: 72655 - protein, 10 aa, synthetic construct
  source 1..10: note = Seed: VFMCVEYCPI
VWMCVEYCPF

SEQ ID NO: 72656 - protein, 11 aa, synthetic construct
  source 1..11: note = Seed: VFMCVEYCPIF
VWMCVEYCPIF

SEQ ID NO: 72657 - protein, 10 aa, synthetic construct
  source 1..10: note = Seed: VFMCVEYCPI
VWMCVEYCPW

SEQ ID NO: 72658 - protein, 9 aa, synthetic construct
  source 1..9: note = Seed: VFMSEAKCW
VWMSEAKCF

SEQ ID NO: 72659 - protein, 10 aa, synthetic construct
  source 1..10: note = Seed: VRMYIFFASF
VWMYIFFASF

SEQ ID NO: 72660 - protein, 10 aa, synthetic construct
  source 1..10: note = Seed: VRMYIFFASF
VWMYIFFASI

SEQ ID NO: 72661 - protein, 10 aa, synthetic construct
  source 1..10: note = Seed: VRMYIFFASF
VWMYIFFASW

SEQ ID NO: 72662 - protein, 10 aa, synthetic construct
  source 1..10: note = Seed: VRMYIFFASF
VWMYIFFASY

SEQ ID NO: 72663 - protein, 10 aa, synthetic construct
  source 1..10: note = Seed: VFNGVSFSTF
VWNGVSFSTF

SEQ ID NO: 72664 - protein, 11 aa, synthetic construct
  source 1..11: note = Seed: VFNGVSFSTFE
VWNGVSFSTFF

SEQ ID NO: 72665 - protein, 10 aa, synthetic construct
  source 1..10: note = Seed: VFNGVSFSTF
VWNGVSFSTI

SEQ ID NO: 72666 - protein, 10 aa, synthetic construct
  source 1..10: note = Seed: VFNGVSFSTF
VWNGVSFSTL

SEQ ID NO: 72667 - protein, 10 aa, synthetic construct
  source 1..10: note = Seed: VFNGVSFSTF
VWNGVSFSTM

SEQ ID NO: 72668 - protein, 10 aa, synthetic construct
  source 1..10: note = Seed: VFNGVSFSTF
VWNGVSFSTW

SEQ ID NO: 72669 - protein, 10 aa, synthetic construct
  source 1..10: note = Seed: VFNGVSFSTF
VWNGVSFSTY

SEQ ID NO: 72670 - protein, 9 aa, synthetic construct
  source 1..9: note = Seed: VYNPFMIDV
VWNPFMIDF

SEQ ID NO: 72671 - protein, 9 aa, synthetic construct
  source 1..9: note = Seed: VYNPFMIDV
VWNPFMIDW

SEQ ID NO: 72672 - protein, 9 aa, synthetic construct
  source 1..9: note = Seed: VVNQNAQAL
VWNQNAQAF

SEQ ID NO: 72673 - protein, 9 aa, synthetic construct
  source 1..9: note = Seed: VVNQNAQAL
VWNQNAQAL

SEQ ID NO: 72674 - protein, 9 aa, synthetic construct
  source 1..9: note = Seed: VVNQNAQAL
VWNQNAQAM

SEQ ID NO: 72675 - protein, 9 aa, synthetic construct
  source 1..9: note = Seed: VVNQNAQAL
VWNQNAQAY

SEQ ID NO: 72676 - protein, 10 aa, synthetic construct
  source 1..10: note = Seed: VLPFNDGVYF
VWPFNDGVYF

SEQ ID NO: 72677 - protein, 10 aa, synthetic construct
  source 1..10: note = Seed: VLPFNDGVYF
VWPFNDGVYW

SEQ ID NO: 72678 - protein, 10 aa, synthetic construct
  source 1..10: note = Seed: VLPFNDGVYF
VWPFNDGVYY

SEQ ID NO: 72679 - protein, 9 aa, synthetic construct
  source 1..9: note = Seed: VRQCSGVTF
VWQCSGVTF

SEQ ID NO: 72680 - protein, 9 aa, synthetic construct
  source 1..9: note = Seed: VRQCSGVTF
VWQCSGVTL

SEQ ID NO: 72681 - protein, 9 aa, synthetic construct
  source 1..9: note = Seed: VRQCSGVTF
VWQCSGVTM

SEQ ID NO: 72682 - protein, 9 aa, synthetic construct
  source 1..9: note = Seed: VRQCSGVTF
VWQCSGVTY

SEQ ID NO: 72683 - protein, 10 aa, synthetic construct
  source 1..10: note = Seed: VLQLPQGTTL
VWQLPQGTTF

SEQ ID NO: 72684 - protein, 10 aa, synthetic construct
  source 1..10: note = Seed: VLQLPQGTTL
VWQLPQGTTM

SEQ ID NO: 72685 - protein, 10 aa, synthetic construct
  source 1..10: note = Seed: VLQLPQGTTL
VWQLPQGTTY

SEQ ID NO: 72686 - protein, 10 aa, synthetic construct
  source 1..10: note = Seed: VARDLSLQFK
VWRDLSLQFR

SEQ ID NO: 72687 - protein, 10 aa, synthetic construct
  source 1..10: note = Seed: VNRFNVAITR
VWRFNVAITR

SEQ ID NO: 72688 - protein, 10 aa, synthetic construct
  source 1..10: note = Seed: VYRGTTTYKL
VWRGTTTYKF

SEQ ID NO: 72689 - protein, 9 aa, synthetic construct
  source 1..9: note = Seed: VYRGTTTYK
VWRGTTTYR

SEQ ID NO: 72690 - protein, 11 aa, synthetic construct
  source 1..11: note = Seed: VKRTIKGTHHW
VWRTIKGTHHW

SEQ ID NO: 72691 - protein, 10 aa, synthetic construct
  source 1..10: note = Seed: VTSAMQTMLF
VWSAMQTMLF

SEQ ID NO: 72692 - protein, 10 aa, synthetic construct
  source 1..10: note = Seed: VTSAMQTMLF
VWSAMQTMLW

SEQ ID NO: 72693 - protein, 10 aa, synthetic construct
  source 1..10: note = Seed: VTSAMQTMLF
VWSAMQTMLY

SEQ ID NO: 72694 - protein, 9 aa, synthetic construct
  source 1..9: note = Seed: VYSFLPGVY
VWSFLPGVF

SEQ ID NO: 72695 - protein, 9 aa, synthetic construct
  source 1..9: note = Seed: VYSFLPGVY
VWSFLPGVI

SEQ ID NO: 72696 - protein, 9 aa, synthetic construct
  source 1..9: note = Seed: VYSFLPGVY
VWSFLPGVM

SEQ ID NO: 72697 - protein, 9 aa, synthetic construct
  source 1..9: note = Seed: VYSFLPGVY
VWSFLPGVW

SEQ ID NO: 72698 - protein, 9 aa, synthetic construct
  source 1..9: note = Seed: VYSFLPGVY
VWSFLPGVY

SEQ ID NO: 72699 - protein, 11 aa, synthetic construct
  source 1..11: note = Seed: VYSFLPGVYSV
VWSFLPGVYSF

SEQ ID NO: 72700 - protein, 11 aa, synthetic construct
  source 1..11: note = Seed: VYSFLPGVYSV
VWSFLPGVYSI

SEQ ID NO: 72701 - protein, 11 aa, synthetic construct
  source 1..11: note = Seed: VYSFLPGVYSV
VWSFLPGVYSW

SEQ ID NO: 72702 - protein, 10 aa, synthetic construct
  source 1..10: note = Seed: VNSFSGYLKL
VWSFSGYLKF

SEQ ID NO: 72703 - protein, 10 aa, synthetic construct
  source 1..10: note = Seed: VNSFSGYLKL
VWSFSGYLKM

SEQ ID NO: 72704 - protein, 10 aa, synthetic construct
  source 1..10: note = Seed: VNSFSGYLKL
VWSFSGYLKW

SEQ ID NO: 72705 - protein, 10 aa, synthetic construct
  source 1..10: note = Seed: VNSFSGYLKL
VWSFSGYLKY

SEQ ID NO: 72706 - protein, 9 aa, synthetic construct
  source 1..9: note = Seed: VNSFSGYLK
VWSFSGYLR

SEQ ID NO: 72707 - protein, 10 aa, synthetic construct
  source 1..10: note = Seed: VYSSANNCTF
VWSSANNCTF

SEQ ID NO: 72708 - protein, 11 aa, synthetic construct
  source 1..11: note = Seed: VYSSANNCTFE
VWSSANNCTFF

SEQ ID NO: 72709 - protein, 10 aa, synthetic construct
  source 1..10: note = Seed: VYSSANNCTF
VWSSANNCTW

SEQ ID NO: 72710 - protein, 9 aa, synthetic construct
  source 1..9: note = Seed: VYSTGSNVF
VWSTGSNVF

SEQ ID NO: 72711 - protein, 9 aa, synthetic construct
  source 1..9: note = Seed: VYSTGSNVF
VWSTGSNVL

SEQ ID NO: 72712 - protein, 9 aa, synthetic construct
  source 1..9: note = Seed: VYSTGSNVF
VWSTGSNVM

SEQ ID NO: 72713 - protein, 9 aa, synthetic construct
  source 1..9: note = Seed: VYSTGSNVF
VWSTGSNVW

SEQ ID NO: 72714 - protein, 9 aa, synthetic construct
  source 1..9: note = Seed: VVSTGYHFR
VWSTGYHFR

SEQ ID NO: 72715 - protein, 10 aa, synthetic construct
  source 1..10: note = Seed: VVSTGYHFRE
VWSTGYHFRR

SEQ ID NO: 72716 - protein, 9 aa, synthetic construct
  source 1..9: note = Seed: VQSTQWSLF
VWSTQWSLF

SEQ ID NO: 72717 - protein, 9 aa, synthetic construct
  source 1..9: note = Seed: VQSTQWSLF
VWSTQWSLI

SEQ ID NO: 72718 - protein, 9 aa, synthetic construct
  source 1..9: note = Seed: VQSTQWSLF
VWSTQWSLL

SEQ ID NO: 72719 - protein, 9 aa, synthetic construct
  source 1..9: note = Seed: VQSTQWSLF
VWSTQWSLM

SEQ ID NO: 72720 - protein, 9 aa, synthetic construct
  source 1..9: note = Seed: VQSTQWSLF
VWSTQWSLW

SEQ ID NO: 72721 - protein, 11 aa, synthetic construct
  source 1..11: note = Seed: VDSYYSLLMPI
VWSYYSLLMPF

SEQ ID NO: 72722 - protein, 11 aa, synthetic construct
  source 1..11: note = Seed: VDSYYSLLMPI
VWSYYSLLMPW

SEQ ID NO: 72723 - protein, 10 aa, synthetic construct
  source 1..10: note = Seed: VNVAFELWAK
VWVAFELWAR

SEQ ID NO: 72724 - protein, 10 aa, synthetic construct
  source 1..10: note = Seed: VNVLAWLYAA
VWVLAWLYAI

SEQ ID NO: 72725 - protein, 10 aa, synthetic construct
  source 1..10: note = Seed: VNVLAWLYAA
VWVLAWLYAL

SEQ ID NO: 72726 - protein, 10 aa, synthetic construct
  source 1..10: note = Seed: VNVLAWLYAA
VWVLAWLYAV

SEQ ID NO: 72727 - protein, 9 aa, synthetic construct
  source 1..9: note = Seed: VFVLWAHGF
VWVLWAHGF

SEQ ID NO: 72728 - protein, 11 aa, synthetic construct
  source 1..11: note = Seed: VFVLWAHGFEL
VWVLWAHGFEI

SEQ ID NO: 72729 - protein, 11 aa, synthetic construct
  source 1..11: note = Seed: VFVLWAHGFEL
VWVLWAHGFEL

SEQ ID NO: 72730 - protein, 11 aa, synthetic construct
  source 1..11: note = Seed: VFVLWAHGFEL
VWVLWAHGFEV

SEQ ID NO: 72731 - protein, 9 aa, synthetic construct
  source 1..9: note = Seed: VFVLWAHGF
VWVLWAHGI

SEQ ID NO: 72732 - protein, 9 aa, synthetic construct
  source 1..9: note = Seed: VFVLWAHGF
VWVLWAHGW

SEQ ID NO: 72733 - protein, 9 aa, synthetic construct
  source 1..9: note = Seed: VFVLWAHGF
VWVLWAHGY

SEQ ID NO: 72734 - protein, 9 aa, synthetic construct
  source 1..9: note = Seed: VFVSNGTHW
VWVSNGTHF

SEQ ID NO: 72735 - protein, 9 aa, synthetic construct
  source 1..9: note = Seed: VFVSNGTHW
VWVSNGTHL

SEQ ID NO: 72736 - protein, 9 aa, synthetic construct
  source 1..9: note = Seed: VFVSNGTHW
VWVSNGTHM

SEQ ID NO: 72737 - protein, 9 aa, synthetic construct
  source 1..9: note = Seed: VFVSNGTHW
VWVSNGTHW

SEQ ID NO: 72738 - protein, 10 aa, synthetic construct
  source 1..10: note = Seed: VFVSNGTHWF
VWVSNGTHWF

SEQ ID NO: 72739 - protein, 10 aa, synthetic construct
  source 1..10: note = Seed: VFVSNGTHWF
VWVSNGTHWW

SEQ ID NO: 72740 - protein, 9 aa, synthetic construct
  source 1..9: note = Seed: VMYASAVVL
VWYASAVVF

SEQ ID NO: 72741 - protein, 9 aa, synthetic construct
  source 1..9: note = Seed: VMYASAVVL
VWYASAVVL

SEQ ID NO: 72742 - protein, 10 aa, synthetic construct
  source 1..10: note = Seed: VMYASAVVLL
VWYASAVVLF

SEQ ID NO: 72743 - protein, 10 aa, synthetic construct
  source 1..10: note = Seed: VMYASAVVLL
VWYASAVVLI

SEQ ID NO: 72744 - protein, 10 aa, synthetic construct
  source 1..10: note = Seed: VMYASAVVLL
VWYASAVVLL

SEQ ID NO: 72745 - protein, 11 aa, synthetic construct
  source 1..11: note = Seed: VMYASAVVLLI
VWYASAVVLLF

SEQ ID NO: 72746 - protein, 10 aa, synthetic construct
  source 1..10: note = Seed: VMYASAVVLL
VWYASAVVLM

SEQ ID NO: 72747 - protein, 10 aa, synthetic construct
  source 1..10: note = Seed: VMYASAVVLL
VWYASAVVLW

SEQ ID NO: 72748 - protein, 9 aa, synthetic construct
  source 1..9: note = Seed: VMYASAVVL
VWYASAVVM

SEQ ID NO: 72749 - protein, 9 aa, synthetic construct
  source 1..9: note = Seed: VMYASAVVL
VWYASAVVY

SEQ ID NO: 72750 - protein, 10 aa, synthetic construct
  source 1..10: note = Seed: VPYCYDTNVL
VWYCYDTNVF

SEQ ID NO: 72751 - protein, 10 aa, synthetic construct
  source 1..10: note = Seed: VPYCYDTNVL
VWYCYDTNVW

SEQ ID NO: 72752 - protein, 10 aa, synthetic construct
  source 1..10: note = Seed: VGYLQPRTFL
VWYLQPRTFF

SEQ ID NO: 72753 - protein, 10 aa, synthetic construct
  source 1..10: note = Seed: VGYLQPRTFL
VWYLQPRTFL

SEQ ID NO: 72754 - protein, 11 aa, synthetic construct
  source 1..11: note = Seed: VGYLQPRTFLL
VWYLQPRTFLV

SEQ ID NO: 72755 - protein, 10 aa, synthetic construct
  source 1..10: note = Seed: VGYLQPRTFL
VWYLQPRTFW

SEQ ID NO: 72756 - protein, 10 aa, synthetic construct
  source 1..10: note = Seed: VLYQPPQTSI
VWYQPPQTSF

SEQ ID NO: 72757 - protein, 10 aa, synthetic construct
  source 1..10: note = Seed: VLYQPPQTSI
VWYQPPQTSI

SEQ ID NO: 72758 - protein, 10 aa, synthetic construct
  source 1..10: note = Seed: VLYQPPQTSI
VWYQPPQTSL

SEQ ID NO: 72759 - protein, 10 aa, synthetic construct
  source 1..10: note = Seed: VLYQPPQTSI
VWYQPPQTSM

SEQ ID NO: 72760 - protein, 10 aa, synthetic construct
  source 1..10: note = Seed: VLYQPPQTSI
VWYQPPQTSW

SEQ ID NO: 72761 - protein, 10 aa, synthetic construct
  source 1..10: note = Seed: VLYQPPQTSI
VWYQPPQTSY

SEQ ID NO: 72762 - protein, 10 aa, synthetic construct
  source 1..10: note = Seed: VGYQPYRVVV
VWYQPYRVVF

SEQ ID NO: 72763 - protein, 10 aa, synthetic construct
  source 1..10: note = Seed: VGYQPYRVVV
VWYQPYRVVI

SEQ ID NO: 72764 - protein, 10 aa, synthetic construct
  source 1..10: note = Seed: VGYQPYRVVV
VWYQPYRVVL

SEQ ID NO: 72765 - protein, 10 aa, synthetic construct
  source 1..10: note = Seed: VGYQPYRVVV
VWYQPYRVVM

SEQ ID NO: 72766 - protein, 10 aa, synthetic construct
  source 1..10: note = Seed: VGYQPYRVVV
VWYQPYRVVW

SEQ ID NO: 72767 - protein, 10 aa, synthetic construct
  source 1..10: note = Seed: VGYQPYRVVV
VWYQPYRVVY

SEQ ID NO: 72768 - protein, 9 aa, synthetic construct
  source 1..9: note = Seed: VVYRGTTTY
VWYRGTTTF

SEQ ID NO: 72769 - protein, 9 aa, synthetic construct
  source 1..9: note = Seed: VVYRGTTTY
VWYRGTTTI

SEQ ID NO: 72770 - protein, 9 aa, synthetic construct
  source 1..9: note = Seed: VVYRGTTTY
VWYRGTTTL

SEQ ID NO: 72771 - protein, 9 aa, synthetic construct
  source 1..9: note = Seed: VVYRGTTTY
VWYRGTTTM

SEQ ID NO: 72772 - protein, 9 aa, synthetic construct
  source 1..9: note = Seed: VVYRGTTTY
VWYRGTTTV

SEQ ID NO: 72773 - protein, 9 aa, synthetic construct
  source 1..9: note = Seed: VVYRGTTTY
VWYRGTTTY

SEQ ID NO: 72774 - protein, 10 aa, synthetic construct
  source 1..10: note = Seed: VVYRGTTTYK
VWYRGTTTYR

SEQ ID NO: 72775 - protein, 11 aa, synthetic construct
  source 1..11: note = Seed: VYYSQLMCQPI
VWYSQLMCQPF

SEQ ID NO: 72776 - protein, 9 aa, synthetic construct
  source 1..9: note = Seed: VYYTSNPTT
VWYTSNPTF

SEQ ID NO: 72777 - protein, 9 aa, synthetic construct
  source 1..9: note = Seed: VYYTSNPTT
VWYTSNPTL

SEQ ID NO: 72778 - protein, 9 aa, synthetic construct
  source 1..9: note = Seed: VYYTSNPTT
VWYTSNPTM

SEQ ID NO: 72779 - protein, 10 aa, synthetic construct
  source 1..10: note = Seed: VYYTSNPTTF
VWYTSNPTTF

SEQ ID NO: 72780 - protein, 11 aa, synthetic construct
  source 1..11: note = Seed: VYYTSNPTTFH
VWYTSNPTTFF

SEQ ID NO: 72781 - protein, 11 aa, synthetic construct
  source 1..11: note = Seed: VYYTSNPTTFH
VWYTSNPTTFW

SEQ ID NO: 72782 - protein, 10 aa, synthetic construct
  source 1..10: note = Seed: VYYTSNPTTF
VWYTSNPTTI

SEQ ID NO: 72783 - protein, 10 aa, synthetic construct
  source 1..10: note = Seed: VYYTSNPTTF
VWYTSNPTTL

SEQ ID NO: 72784 - protein, 10 aa, synthetic construct
  source 1..10: note = Seed: VYYTSNPTTF
VWYTSNPTTM

SEQ ID NO: 72785 - protein, 10 aa, synthetic construct
  source 1..10: note = Seed: VYYTSNPTTF
VWYTSNPTTW

SEQ ID NO: 72786 - protein, 10 aa, synthetic construct
  source 1..10: note = Seed: VYYTSNPTTF
VWYTSNPTTY

SEQ ID NO: 72787 - protein, 9 aa, synthetic construct
  source 1..9: note = Seed: VYYTSNPTT
VWYTSNPTY

SEQ ID NO: 72788 - protein, 9 aa, synthetic construct
  source 1..9: note = Seed: VLYYQNNVF
VWYYQNNVF

SEQ ID NO: 72789 - protein, 10 aa, synthetic construct
  source 1..10: note = Seed: VLYYQNNVFM
VWYYQNNVFF

SEQ ID NO: 72790 - protein, 10 aa, synthetic construct
  source 1..10: note = Seed: VLYYQNNVFM
VWYYQNNVFI

SEQ ID NO: 72791 - protein, 10 aa, synthetic construct
  source 1..10: note = Seed: VLYYQNNVFM
VWYYQNNVFL

SEQ ID NO: 72792 - protein, 10 aa, synthetic construct
  source 1..10: note = Seed: VLYYQNNVFM
VWYYQNNVFM

SEQ ID NO: 72793 - protein, 10 aa, synthetic construct
  source 1..10: note = Seed: VLYYQNNVFM
VWYYQNNVFW

SEQ ID NO: 72794 - protein, 9 aa, synthetic construct
  source 1..9: note = Seed: VLYYQNNVF
VWYYQNNVL

SEQ ID NO: 72795 - protein, 9 aa, synthetic construct
  source 1..9: note = Seed: VLYYQNNVF
VWYYQNNVM

SEQ ID NO: 72796 - protein, 9 aa, synthetic construct
  source 1..9: note = Seed: VLYYQNNVF
VWYYQNNVY

SEQ ID NO: 72797 - protein, 10 aa, synthetic construct
  source 1..10: note = Seed: VLAAECTIFK
VYAAECTIFR

SEQ ID NO: 72798 - protein, 8 aa, synthetic construct
  source 1..8: note = Seed: VYADSFVI
VYADSFVF

SEQ ID NO: 72799 - protein, 8 aa, synthetic construct
  source 1..8: note = Seed: VYADSFVI
VYADSFVL

SEQ ID NO: 72800 - protein, 8 aa, synthetic construct
  source 1..8: note = Seed: VYADSFVI
VYADSFVM

SEQ ID NO: 72801 - protein, 8 aa, synthetic construct
  source 1..8: note = Seed: VYADSFVI
VYADSFVW

SEQ ID NO: 72802 - protein, 9 aa, synthetic construct
  source 1..9: note = Seed: VYANGGKGF
VYANGGKGL

SEQ ID NO: 72803 - protein, 9 aa, synthetic construct
  source 1..9: note = Seed: VYANGGKGF
VYANGGKGM

SEQ ID NO: 72804 - protein, 9 aa, synthetic construct
  source 1..9: note = Seed: VYANGGKGF
VYANGGKGY

SEQ ID NO: 72805 - protein, 9 aa, synthetic construct
  source 1..9: note = Seed: VFAQVKQIY
VYAQVKQIF

SEQ ID NO: 72806 - protein, 9 aa, synthetic construct
  source 1..9: note = Seed: VFAQVKQIY
VYAQVKQIL

SEQ ID NO: 72807 - protein, 9 aa, synthetic construct
  source 1..9: note = Seed: VFAQVKQIY
VYAQVKQIM

SEQ ID NO: 72808 - protein, 9 aa, synthetic construct
  source 1..9: note = Seed: VFAQVKQIY
VYAQVKQIY

SEQ ID NO: 72809 - protein, 10 aa, synthetic construct
  source 1..10: note = Seed: VFAQVKQIYK
VYAQVKQIYR

SEQ ID NO: 72810 - protein, 10 aa, synthetic construct
  source 1..10: note = Seed: VLCLTPVYSF
VYCLTPVYSF

SEQ ID NO: 72811 - protein, 11 aa, synthetic construct
  source 1..11: note = Seed: VLCLTPVYSFL
VYCLTPVYSFV

SEQ ID NO: 72812 - protein, 10 aa, synthetic construct
  source 1..10: note = Seed: VLCLTPVYSF
VYCLTPVYSI

SEQ ID NO: 72813 - protein, 10 aa, synthetic construct
  source 1..10: note = Seed: VLCLTPVYSF
VYCLTPVYSL

SEQ ID NO: 72814 - protein, 10 aa, synthetic construct
  source 1..10: note = Seed: VLCLTPVYSF
VYCLTPVYSW

SEQ ID NO: 72815 - protein, 10 aa, synthetic construct
  source 1..10: note = Seed: VSDIDITFLK
VYDIDITFLK

SEQ ID NO: 72816 - protein, 10 aa, synthetic construct
  source 1..10: note = Seed: VSDIDITFLK
VYDIDITFLR

SEQ ID NO: 72817 - protein, 11 aa, synthetic construct
  source 1..11: note = Seed: VYDYLVSTQEF
VYDYLVSTQEI

SEQ ID NO: 72818 - protein, 11 aa, synthetic construct
  source 1..11: note = Seed: VYDYLVSTQEF
VYDYLVSTQEL

SEQ ID NO: 72819 - protein, 11 aa, synthetic construct
  source 1..11: note = Seed: VYDYLVSTQEF
VYDYLVSTQEW

SEQ ID NO: 72820 - protein, 9 aa, synthetic construct
  source 1..9: note = Seed: VYEKLKPVL
VYEKLKPVF

SEQ ID NO: 72821 - protein, 9 aa, synthetic construct
  source 1..9: note = Seed: VYEKLKPVL
VYEKLKPVM

SEQ ID NO: 72822 - protein, 9 aa, synthetic construct
  source 1..9: note = Seed: VYEKLKPVL
VYEKLKPVW

SEQ ID NO: 72823 - protein, 10 aa, synthetic construct
  source 1..10: note = Seed: VAEWFLAYIL
VYEWFLAYIL

SEQ ID NO: 72824 - protein, 11 aa, synthetic construct
  source 1..11: note = Seed: VAEWFLAYILF
VYEWFLAYILF

SEQ ID NO: 72825 - protein, 9 aa, synthetic construct
  source 1..9: note = Seed: VAFELWAKR
VYFELWAKR

SEQ ID NO: 72826 - protein, 11 aa, synthetic construct
  source 1..11: note = Seed: VSFLAHIQWMV
VYFLAHIQWMI

SEQ ID NO: 72827 - protein, 11 aa, synthetic construct
  source 1..11: note = Seed: VSFLAHIQWMV
VYFLAHIQWML

SEQ ID NO: 72828 - protein, 11 aa, synthetic construct
  source 1..11: note = Seed: VSFLAHIQWMV
VYFLAHIQWMV

SEQ ID NO: 72829 - protein, 9 aa, synthetic construct
  source 1..9: note = Seed: VVFLHVTYV
VYFLHVTYK

SEQ ID NO: 72830 - protein, 10 aa, synthetic construct
  source 1..10: note = Seed: VEFLRDGWEI
VYFLRDGWEF

SEQ ID NO: 72831 - protein, 10 aa, synthetic construct
  source 1..10: note = Seed: VEFLRDGWEI
VYFLRDGWEI

SEQ ID NO: 72832 - protein, 10 aa, synthetic construct
  source 1..10: note = Seed: VEFLRDGWEI
VYFLRDGWEL

SEQ ID NO: 72833 - protein, 10 aa, synthetic construct
  source 1..10: note = Seed: VEFLRDGWEI
VYFLRDGWEM

SEQ ID NO: 72834 - protein, 10 aa, synthetic construct
  source 1..10: note = Seed: VEFLRDGWEI
VYFLRDGWEW

SEQ ID NO: 72835 - protein, 11 aa, synthetic construct
  source 1..11: note = Seed: VVFNGVSFSTF
VYFNGVSFSTF

SEQ ID NO: 72836 - protein, 11 aa, synthetic construct
  source 1..11: note = Seed: VVFNGVSFSTF
VYFNGVSFSTI

SEQ ID NO: 72837 - protein, 11 aa, synthetic construct
  source 1..11: note = Seed: VVFNGVSFSTF
VYFNGVSFSTL

SEQ ID NO: 72838 - protein, 11 aa, synthetic construct
  source 1..11: note = Seed: VVFNGVSFSTF
VYFNGVSFSTM

SEQ ID NO: 72839 - protein, 11 aa, synthetic construct
  source 1..11: note = Seed: VVFNGVSFSTF
VYFNGVSFSTV

SEQ ID NO: 72840 - protein, 11 aa, synthetic construct
  source 1..11: note = Seed: VVFNGVSFSTF
VYFNGVSFSTW

SEQ ID NO: 72841 - protein, 10 aa, synthetic construct
  source 1..10: note = Seed: VVFVLWAHGF
VYFVLWAHGF

SEQ ID NO: 72842 - protein, 10 aa, synthetic construct
  source 1..10: note = Seed: VVFVLWAHGF
VYFVLWAHGI

SEQ ID NO: 72843 - protein, 10 aa, synthetic construct
  source 1..10: note = Seed: VVFVLWAHGF
VYFVLWAHGL

SEQ ID NO: 72844 - protein, 10 aa, synthetic construct
  source 1..10: note = Seed: VVFVLWAHGF
VYFVLWAHGM

SEQ ID NO: 72845 - protein, 10 aa, synthetic construct
  source 1..10: note = Seed: VVFVLWAHGF
VYFVLWAHGW

SEQ ID NO: 72846 - protein, 9 aa, synthetic construct
  source 1..9: note = Seed: VPFVVSTGY
VYFVVSTGY

SEQ ID NO: 72847 - protein, 9 aa, synthetic construct
  source 1..9: note = Seed: VGGNYNYLY
VYGNYNYLY

SEQ ID NO: 72848 - protein, 10 aa, synthetic construct
  source 1..10: note = Seed: VGGNYNYLYR
VYGNYNYLYK

SEQ ID NO: 72849 - protein, 10 aa, synthetic construct
  source 1..10: note = Seed: VGGNYNYLYR
VYGNYNYLYR

SEQ ID NO: 72850 - protein, 9 aa, synthetic construct
  source 1..9: note = Seed: VMHANYIFW
VYHANYIFF

SEQ ID NO: 72851 - protein, 9 aa, synthetic construct
  source 1..9: note = Seed: VMHANYIFW
VYHANYIFI

SEQ ID NO: 72852 - protein, 9 aa, synthetic construct
  source 1..9: note = Seed: VMHANYIFW
VYHANYIFL

SEQ ID NO: 72853 - protein, 9 aa, synthetic construct
  source 1..9: note = Seed: VMHANYIFW
VYHANYIFM

SEQ ID NO: 72854 - protein, 9 aa, synthetic construct
  source 1..9: note = Seed: VMHANYIFW
VYHANYIFV

SEQ ID NO: 72855 - protein, 9 aa, synthetic construct
  source 1..9: note = Seed: VMHANYIFW
VYHANYIFW

SEQ ID NO: 72856 - protein, 9 aa, synthetic construct
  source 1..9: note = Seed: VMHANYIFW
VYHANYIFY

SEQ ID NO: 72857 - protein, 9 aa, synthetic construct
  source 1..9: note = Seed: VFHLYLQYI
VYHLYLQYF

SEQ ID NO: 72858 - protein, 9 aa, synthetic construct
  source 1..9: note = Seed: VFHLYLQYI
VYHLYLQYI

SEQ ID NO: 72859 - protein, 10 aa, synthetic construct
  source 1..10: note = Seed: VFHLYLQYIR
VYHLYLQYIR

SEQ ID NO: 72860 - protein, 9 aa, synthetic construct
  source 1..9: note = Seed: VFHLYLQYI
VYHLYLQYL

SEQ ID NO: 72861 - protein, 9 aa, synthetic construct
  source 1..9: note = Seed: VFHLYLQYI
VYHLYLQYM

SEQ ID NO: 72862 - protein, 9 aa, synthetic construct
  source 1..9: note = Seed: VFHLYLQYI
VYHLYLQYV

SEQ ID NO: 72863 - protein, 9 aa, synthetic construct
  source 1..9: note = Seed: VFHLYLQYI
VYHLYLQYW

SEQ ID NO: 72864 - protein, 9 aa, synthetic construct
  source 1..9: note = Seed: VFHLYLQYI
VYHLYLQYY

SEQ ID NO: 72865 - protein, 9 aa, synthetic construct
  source 1..9: note = Seed: VTHSKGLYR
VYHSKGLYK

SEQ ID NO: 72866 - protein, 9 aa, synthetic construct
  source 1..9: note = Seed: VTHSKGLYR
VYHSKGLYR

SEQ ID NO: 72867 - protein, 10 aa, synthetic construct
  source 1..10: note = Seed: VTHSKGLYRK
VYHSKGLYRR

SEQ ID NO: 72868 - protein, 11 aa, synthetic construct
  source 1..11: note = Seed: VLHSYFTSDYY
VYHSYFTSDYW

SEQ ID NO: 72869 - protein, 9 aa, synthetic construct
  source 1..9: note = Seed: VEHVTFFIY
VYHVTFFIY

SEQ ID NO: 72870 - protein, 10 aa, synthetic construct
  source 1..10: note = Seed: VTIAEILLII
VYIAEILLIV

SEQ ID NO: 72871 - protein, 10 aa, synthetic construct
  source 1..10: note = Seed: VSICSTMTNR
VYICSTMTNR

SEQ ID NO: 72872 - protein, 10 aa, synthetic construct
  source 1..10: note = Seed: VQIDRLITGR
VYIDRLITGR

SEQ ID NO: 72873 - protein, 9 aa, synthetic construct
  source 1..9: note = Seed: VYIKNADIV
VYIKNADIF

SEQ ID NO: 72874 - protein, 9 aa, synthetic construct
  source 1..9: note = Seed: VYIKNADIV
VYIKNADII

SEQ ID NO: 72875 - protein, 9 aa, synthetic construct
  source 1..9: note = Seed: VYIKNADIV
VYIKNADIL

SEQ ID NO: 72876 - protein, 9 aa, synthetic construct
  source 1..9: note = Seed: VYIKNADIV
VYIKNADIM

SEQ ID NO: 72877 - protein, 9 aa, synthetic construct
  source 1..9: note = Seed: VYIKNADIV
VYIKNADIW

SEQ ID NO: 72878 - protein, 9 aa, synthetic construct
  source 1..9: note = Seed: VYIKNADIV
VYIKNADIY

SEQ ID NO: 72879 - protein, 10 aa, synthetic construct
  source 1..10: note = Seed: VNINIVGDFK
VYINIVGDFR

SEQ ID NO: 72880 - protein, 10 aa, synthetic construct
  source 1..10: note = Seed: VVIPDYNTYK
VYIPDYNTYK

SEQ ID NO: 72881 - protein, 10 aa, synthetic construct
  source 1..10: note = Seed: VVIPDYNTYK
VYIPDYNTYR

SEQ ID NO: 72882 - protein, 9 aa, synthetic construct
  source 1..9: note = Seed: VFKNIDGYF
VYKNIDGYF

SEQ ID NO: 72883 - protein, 10 aa, synthetic construct
  source 1..10: note = Seed: VFKNIDGYFK
VYKNIDGYFK

SEQ ID NO: 72884 - protein, 11 aa, synthetic construct
  source 1..11: note = Seed: VFKNIDGYFKI
VYKNIDGYFKF

SEQ ID NO: 72885 - protein, 11 aa, synthetic construct
  source 1..11: note = Seed: VFKNIDGYFKI
VYKNIDGYFKI

SEQ ID NO: 72886 - protein, 11 aa, synthetic construct
  source 1..11: note = Seed: VFKNIDGYFKI
VYKNIDGYFKL

SEQ ID NO: 72887 - protein, 11 aa, synthetic construct
  source 1..11: note = Seed: VFKNIDGYFKI
VYKNIDGYFKW

SEQ ID NO: 72888 - protein, 10 aa, synthetic construct
  source 1..10: note = Seed: VFKNIDGYFK
VYKNIDGYFR

SEQ ID NO: 72889 - protein, 9 aa, synthetic construct
  source 1..9: note = Seed: VFKNIDGYF
VYKNIDGYI

SEQ ID NO: 72890 - protein, 9 aa, synthetic construct
  source 1..9: note = Seed: VFKNIDGYF
VYKNIDGYL

SEQ ID NO: 72891 - protein, 9 aa, synthetic construct
  source 1..9: note = Seed: VFKNIDGYF
VYKNIDGYM

SEQ ID NO: 72892 - protein, 9 aa, synthetic construct
  source 1..9: note = Seed: VFKNIDGYF
VYKNIDGYW

SEQ ID NO: 72893 - protein, 9 aa, synthetic construct
  source 1..9: note = Seed: VFKNIDGYF
VYKNIDGYY

SEQ ID NO: 72894 - protein, 10 aa, synthetic construct
  source 1..10: note = Seed: VYKQFDTYNL
VYKQFDTYNF

SEQ ID NO: 72895 - protein, 10 aa, synthetic construct
  source 1..10: note = Seed: VYKQFDTYNL
VYKQFDTYNI

SEQ ID NO: 72896 - protein, 11 aa, synthetic construct
  source 1..11: note = Seed: VYKQFDTYNLW
VYKQFDTYNLF

SEQ ID NO: 72897 - protein, 11 aa, synthetic construct
  source 1..11: note = Seed: VYKQFDTYNLW
VYKQFDTYNLI

SEQ ID NO: 72898 - protein, 11 aa, synthetic construct
  source 1..11: note = Seed: VYKQFDTYNLW
VYKQFDTYNLL

SEQ ID NO: 72899 - protein, 10 aa, synthetic construct
  source 1..10: note = Seed: VYKQFDTYNL
VYKQFDTYNM

SEQ ID NO: 72900 - protein, 10 aa, synthetic construct
  source 1..10: note = Seed: VYKQFDTYNL
VYKQFDTYNW

SEQ ID NO: 72901 - protein, 9 aa, synthetic construct
  source 1..9: note = Seed: VVKRHTFSN
VYKRHTFSA

SEQ ID NO: 72902 - protein, 9 aa, synthetic construct
  source 1..9: note = Seed: VVKRHTFSN
VYKRHTFSK

SEQ ID NO: 72903 - protein, 10 aa, synthetic construct
  source 1..10: note = Seed: VVKRHTFSNY
VYKRHTFSNK

SEQ ID NO: 72904 - protein, 9 aa, synthetic construct
  source 1..9: note = Seed: VWKSYVHVV
VYKSYVHVF

SEQ ID NO: 72905 - protein, 9 aa, synthetic construct
  source 1..9: note = Seed: VWKSYVHVV
VYKSYVHVI

SEQ ID NO: 72906 - protein, 9 aa, synthetic construct
  source 1..9: note = Seed: VWKSYVHVV
VYKSYVHVL

SEQ ID NO: 72907 - protein, 9 aa, synthetic construct
  source 1..9: note = Seed: VWKSYVHVV
VYKSYVHVM

SEQ ID NO: 72908 - protein, 9 aa, synthetic construct
  source 1..9: note = Seed: VWKSYVHVV
VYKSYVHVV

SEQ ID NO: 72909 - protein, 9 aa, synthetic construct
  source 1..9: note = Seed: VWKSYVHVV
VYKSYVHVW

SEQ ID NO: 72910 - protein, 9 aa, synthetic construct
  source 1..9: note = Seed: VWKSYVHVV
VYKSYVHVY

SEQ ID NO: 72911 - protein, 11 aa, synthetic construct
  source 1..11: note = Seed: VAKYTQLCQYL
VYKYTQLCQYF

SEQ ID NO: 72912 - protein, 10 aa, synthetic construct
  source 1..10: note = Seed: VELFENKTTL
VYLFENKTTI

SEQ ID NO: 72913 - protein, 10 aa, synthetic construct
  source 1..10: note = Seed: VELFENKTTL
VYLFENKTTL

SEQ ID NO: 72914 - protein, 10 aa, synthetic construct
  source 1..10: note = Seed: VELFENKTTL
VYLFENKTTV

SEQ ID NO: 72915 - protein, 11 aa, synthetic construct
  source 1..11: note = Seed: VLLFLAFVVFL
VYLFLAFVVFV

SEQ ID NO: 72916 - protein, 10 aa, synthetic construct
  source 1..10: note = Seed: VQLHNDILLA
VYLHNDILLI

SEQ ID NO: 72917 - protein, 10 aa, synthetic construct
  source 1..10: note = Seed: VQLHNDILLA
VYLHNDILLL

SEQ ID NO: 72918 - protein, 10 aa, synthetic construct
  source 1..10: note = Seed: VQLHNDILLA
VYLHNDILLV

SEQ ID NO: 72919 - protein, 10 aa, synthetic construct
  source 1..10: note = Seed: VNLHSSRLSF
VYLHSSRLSF

SEQ ID NO: 72920 - protein, 10 aa, synthetic construct
  source 1..10: note = Seed: VNLHSSRLSF
VYLHSSRLSY

SEQ ID NO: 72921 - protein, 10 aa, synthetic construct
  source 1..10: note = Seed: VFLHVTYVPA
VYLHVTYVPV

SEQ ID NO: 72922 - protein, 10 aa, synthetic construct
  source 1..10: note = Seed: VNLKQLPFFY
VYLKQLPFFY

SEQ ID NO: 72923 - protein, 10 aa, synthetic construct
  source 1..10: note = Seed: VVLLSVLQQL
VYLLSVLQQA

SEQ ID NO: 72924 - protein, 10 aa, synthetic construct
  source 1..10: note = Seed: VVLLSVLQQL
VYLLSVLQQI

SEQ ID NO: 72925 - protein, 10 aa, synthetic construct
  source 1..10: note = Seed: VVLLSVLQQL
VYLLSVLQQL

SEQ ID NO: 72926 - protein, 10 aa, synthetic construct
  source 1..10: note = Seed: VVLLSVLQQL
VYLLSVLQQV

SEQ ID NO: 72927 - protein, 10 aa, synthetic construct
  source 1..10: note = Seed: VGLMWLSYFI
VYLMWLSYFA

SEQ ID NO: 72928 - protein, 10 aa, synthetic construct
  source 1..10: note = Seed: VGLMWLSYFI
VYLMWLSYFI

SEQ ID NO: 72929 - protein, 11 aa, synthetic construct
  source 1..11: note = Seed: VGLMWLSYFIA
VYLMWLSYFIL

SEQ ID NO: 72930 - protein, 11 aa, synthetic construct
  source 1..11: note = Seed: VGLMWLSYFIA
VYLMWLSYFIV

SEQ ID NO: 72931 - protein, 10 aa, synthetic construct
  source 1..10: note = Seed: VGLMWLSYFI
VYLMWLSYFL

SEQ ID NO: 72932 - protein, 10 aa, synthetic construct
  source 1..10: note = Seed: VGLMWLSYFI
VYLMWLSYFM

SEQ ID NO: 72933 - protein, 10 aa, synthetic construct
  source 1..10: note = Seed: VGLMWLSYFI
VYLMWLSYFT

SEQ ID NO: 72934 - protein, 10 aa, synthetic construct
  source 1..10: note = Seed: VGLMWLSYFI
VYLMWLSYFV

SEQ ID NO: 72935 - protein, 9 aa, synthetic construct
  source 1..9: note = Seed: VVLSFELLH
VYLSFELLY

SEQ ID NO: 72936 - protein, 10 aa, synthetic construct
  source 1..10: note = Seed: VQLSLPVLQV
VYLSLPVLQV

SEQ ID NO: 72937 - protein, 10 aa, synthetic construct
  source 1..10: note = Seed: VLLSVLQQLR
VYLSVLQQLI

SEQ ID NO: 72938 - protein, 10 aa, synthetic construct
  source 1..10: note = Seed: VLLSVLQQLR
VYLSVLQQLL

SEQ ID NO: 72939 - protein, 10 aa, synthetic construct
  source 1..10: note = Seed: VLLSVLQQLR
VYLSVLQQLR

SEQ ID NO: 72940 - protein, 10 aa, synthetic construct
  source 1..10: note = Seed: VLLSVLQQLR
VYLSVLQQLV

SEQ ID NO: 72941 - protein, 10 aa, synthetic construct
  source 1..10: note = Seed: VELVAELEGI
VYLVAELEGI

SEQ ID NO: 72942 - protein, 10 aa, synthetic construct
  source 1..10: note = Seed: VELVAELEGI
VYLVAELEGL

SEQ ID NO: 72943 - protein, 10 aa, synthetic construct
  source 1..10: note = Seed: VELVAELEGI
VYLVAELEGV

SEQ ID NO: 72944 - protein, 10 aa, synthetic construct
  source 1..10: note = Seed: VVMAYITGGV
VYMAYITGGA

SEQ ID NO: 72945 - protein, 10 aa, synthetic construct
  source 1..10: note = Seed: VVMAYITGGV
VYMAYITGGI

SEQ ID NO: 72946 - protein, 10 aa, synthetic construct
  source 1..10: note = Seed: VVMAYITGGV
VYMAYITGGL

SEQ ID NO: 72947 - protein, 10 aa, synthetic construct
  source 1..10: note = Seed: VVMAYITGGV
VYMAYITGGV

SEQ ID NO: 72948 - protein, 10 aa, synthetic construct
  source 1..10: note = Seed: VFMCVEYCPI
VYMCVEYCPF

SEQ ID NO: 72949 - protein, 10 aa, synthetic construct
  source 1..10: note = Seed: VFMCVEYCPI
VYMCVEYCPI

SEQ ID NO: 72950 - protein, 11 aa, synthetic construct
  source 1..11: note = Seed: VFMCVEYCPIF
VYMCVEYCPIF

SEQ ID NO: 72951 - protein, 11 aa, synthetic construct
  source 1..11: note = Seed: VFMCVEYCPIF
VYMCVEYCPII

SEQ ID NO: 72952 - protein, 11 aa, synthetic construct
  source 1..11: note = Seed: VFMCVEYCPIF
VYMCVEYCPIL

SEQ ID NO: 72953 - protein, 11 aa, synthetic construct
  source 1..11: note = Seed: VFMCVEYCPIF
VYMCVEYCPIW

SEQ ID NO: 72954 - protein, 10 aa, synthetic construct
  source 1..10: note = Seed: VFMCVEYCPI
VYMCVEYCPL

SEQ ID NO: 72955 - protein, 10 aa, synthetic construct
  source 1..10: note = Seed: VFMCVEYCPI
VYMCVEYCPM

SEQ ID NO: 72956 - protein, 10 aa, synthetic construct
  source 1..10: note = Seed: VFMCVEYCPI
VYMCVEYCPW

SEQ ID NO: 72957 - protein, 9 aa, synthetic construct
  source 1..9: note = Seed: VQMLSDTLK
VYMLSDTLR

SEQ ID NO: 72958 - protein, 9 aa, synthetic construct
  source 1..9: note = Seed: VFMSEAKCW
VYMSEAKCF

SEQ ID NO: 72959 - protein, 9 aa, synthetic construct
  source 1..9: note = Seed: VFMSEAKCW
VYMSEAKCI

SEQ ID NO: 72960 - protein, 9 aa, synthetic construct
  source 1..9: note = Seed: VFMSEAKCW
VYMSEAKCL

SEQ ID NO: 72961 - protein, 9 aa, synthetic construct
  source 1..9: note = Seed: VFMSEAKCW
VYMSEAKCW

SEQ ID NO: 72962 - protein, 10 aa, synthetic construct
  source 1..10: note = Seed: VRMYIFFASF
VYMYIFFASF

SEQ ID NO: 72963 - protein, 11 aa, synthetic construct
  source 1..11: note = Seed: VRMYIFFASFY
VYMYIFFASFY

SEQ ID NO: 72964 - protein, 10 aa, synthetic construct
  source 1..10: note = Seed: VRMYIFFASF
VYMYIFFASI

SEQ ID NO: 72965 - protein, 10 aa, synthetic construct
  source 1..10: note = Seed: VRMYIFFASF
VYMYIFFASL

SEQ ID NO: 72966 - protein, 10 aa, synthetic construct
  source 1..10: note = Seed: VRMYIFFASF
VYMYIFFASM

SEQ ID NO: 72967 - protein, 10 aa, synthetic construct
  source 1..10: note = Seed: VRMYIFFASF
VYMYIFFASW

SEQ ID NO: 72968 - protein, 10 aa, synthetic construct
  source 1..10: note = Seed: VRMYIFFASF
VYMYIFFASY

SEQ ID NO: 72969 - protein, 10 aa, synthetic construct
  source 1..10: note = Seed: VFNGVSFSTF
VYNGVSFSTF

SEQ ID NO: 72970 - protein, 11 aa, synthetic construct
  source 1..11: note = Seed: VFNGVSFSTFE
VYNGVSFSTFA

SEQ ID NO: 72971 - protein, 11 aa, synthetic construct
  source 1..11: note = Seed: VFNGVSFSTFE
VYNGVSFSTFC

SEQ ID NO: 72972 - protein, 11 aa, synthetic construct
  source 1..11: note = Seed: VFNGVSFSTFE
VYNGVSFSTFD

SEQ ID NO: 72973 - protein, 11 aa, synthetic construct
  source 1..11: note = Seed: VFNGVSFSTFE
VYNGVSFSTFE

SEQ ID NO: 72974 - protein, 11 aa, synthetic construct
  source 1..11: note = Seed: VFNGVSFSTFE
VYNGVSFSTFF

SEQ ID NO: 72975 - protein, 11 aa, synthetic construct
  source 1..11: note = Seed: VFNGVSFSTFE
VYNGVSFSTFG

SEQ ID NO: 72976 - protein, 11 aa, synthetic construct
  source 1..11: note = Seed: VFNGVSFSTFE
VYNGVSFSTFH

SEQ ID NO: 72977 - protein, 11 aa, synthetic construct
  source 1..11: note = Seed: VFNGVSFSTFE
VYNGVSFSTFI

SEQ ID NO: 72978 - protein, 11 aa, synthetic construct
  source 1..11: note = Seed: VFNGVSFSTFE
VYNGVSFSTFK

SEQ ID NO: 72979 - protein, 11 aa, synthetic construct
  source 1..11: note = Seed: VFNGVSFSTFE
VYNGVSFSTFL

SEQ ID NO: 72980 - protein, 11 aa, synthetic construct
  source 1..11: note = Seed: VFNGVSFSTFE
VYNGVSFSTFM

SEQ ID NO: 72981 - protein, 11 aa, synthetic construct
  source 1..11: note = Seed: VFNGVSFSTFE
VYNGVSFSTFN

SEQ ID NO: 72982 - protein, 11 aa, synthetic construct
  source 1..11: note = Seed: VFNGVSFSTFE
VYNGVSFSTFP

SEQ ID NO: 72983 - protein, 11 aa, synthetic construct
  source 1..11: note = Seed: VFNGVSFSTFE
VYNGVSFSTFQ

SEQ ID NO: 72984 - protein, 11 aa, synthetic construct
  source 1..11: note = Seed: VFNGVSFSTFE
VYNGVSFSTFR

SEQ ID NO: 72985 - protein, 11 aa, synthetic construct
  source 1..11: note = Seed: VFNGVSFSTFE
VYNGVSFSTFS

SEQ ID NO: 72986 - protein, 11 aa, synthetic construct
  source 1..11: note = Seed: VFNGVSFSTFE
VYNGVSFSTFT

SEQ ID NO: 72987 - protein, 11 aa, synthetic construct
  source 1..11: note = Seed: VFNGVSFSTFE
VYNGVSFSTFV

SEQ ID NO: 72988 - protein, 11 aa, synthetic construct
  source 1..11: note = Seed: VFNGVSFSTFE
VYNGVSFSTFW

SEQ ID NO: 72989 - protein, 11 aa, synthetic construct
  source 1..11: note = Seed: VFNGVSFSTFE
VYNGVSFSTFY

SEQ ID NO: 72990 - protein, 10 aa, synthetic construct
  source 1..10: note = Seed: VFNGVSFSTF
VYNGVSFSTI

SEQ ID NO: 72991 - protein, 10 aa, synthetic construct
  source 1..10: note = Seed: VFNGVSFSTF
VYNGVSFSTL

SEQ ID NO: 72992 - protein, 10 aa, synthetic construct
  source 1..10: note = Seed: VFNGVSFSTF
VYNGVSFSTM

SEQ ID NO: 72993 - protein, 10 aa, synthetic construct
  source 1..10: note = Seed: VFNGVSFSTF
VYNGVSFSTV

SEQ ID NO: 72994 - protein, 10 aa, synthetic construct
  source 1..10: note = Seed: VFNGVSFSTF
VYNGVSFSTW

SEQ ID NO: 72995 - protein, 10 aa, synthetic construct
  source 1..10: note = Seed: VFNGVSFSTF
VYNGVSFSTY

SEQ ID NO: 72996 - protein, 9 aa, synthetic construct
  source 1..9: note = Seed: VYNPFMIDV
VYNPFMIDF

SEQ ID NO: 72997 - protein, 9 aa, synthetic construct
  source 1..9: note = Seed: VYNPFMIDV
VYNPFMIDI

SEQ ID NO: 72998 - protein, 9 aa, synthetic construct
  source 1..9: note = Seed: VYNPFMIDV
VYNPFMIDL

SEQ ID NO: 72999 - protein, 9 aa, synthetic construct
  source 1..9: note = Seed: VYNPFMIDV
VYNPFMIDM

SEQ ID NO: 73000 - protein, 9 aa, synthetic construct
  source 1..9: note = Seed: VYNPFMIDV
VYNPFMIDW

SEQ ID NO: 73001 - protein, 9 aa, synthetic construct
  source 1..9: note = Seed: VYNPFMIDV
VYNPFMIDY

SEQ ID NO: 73002 - protein, 9 aa, synthetic construct
  source 1..9: note = Seed: VVNQNAQAL
VYNQNAQAF

SEQ ID NO: 73003 - protein, 9 aa, synthetic construct
  source 1..9: note = Seed: VVNQNAQAL
VYNQNAQAI

SEQ ID NO: 73004 - protein, 9 aa, synthetic construct
  source 1..9: note = Seed: VVNQNAQAL
VYNQNAQAL

SEQ ID NO: 73005 - protein, 9 aa, synthetic construct
  source 1..9: note = Seed: VVNQNAQAL
VYNQNAQAM

SEQ ID NO: 73006 - protein, 9 aa, synthetic construct
  source 1..9: note = Seed: VVNQNAQAL
VYNQNAQAV

SEQ ID NO: 73007 - protein, 9 aa, synthetic construct
  source 1..9: note = Seed: VVNQNAQAL
VYNQNAQAY

SEQ ID NO: 73008 - protein, 10 aa, synthetic construct
  source 1..10: note = Seed: VLPFNDGVYF
VYPFNDGVYF

SEQ ID NO: 73009 - protein, 10 aa, synthetic construct
  source 1..10: note = Seed: VLPFNDGVYF
VYPFNDGVYI

SEQ ID NO: 73010 - protein, 10 aa, synthetic construct
  source 1..10: note = Seed: VLPFNDGVYF
VYPFNDGVYL

SEQ ID NO: 73011 - protein, 10 aa, synthetic construct
  source 1..10: note = Seed: VLPFNDGVYF
VYPFNDGVYM

SEQ ID NO: 73012 - protein, 10 aa, synthetic construct
  source 1..10: note = Seed: VLPFNDGVYF
VYPFNDGVYW

SEQ ID NO: 73013 - protein, 10 aa, synthetic construct
  source 1..10: note = Seed: VLPFNDGVYF
VYPFNDGVYY

SEQ ID NO: 73014 - protein, 8 aa, synthetic construct
  source 1..8: note = Seed: VYPIILRL
VYPIILRF

SEQ ID NO: 73015 - protein, 9 aa, synthetic construct
  source 1..9: note = Seed: VRQCSGVTF
VYQCSGVTF

SEQ ID NO: 73016 - protein, 9 aa, synthetic construct
  source 1..9: note = Seed: VRQCSGVTF
VYQCSGVTI

SEQ ID NO: 73017 - protein, 9 aa, synthetic construct
  source 1..9: note = Seed: VRQCSGVTF
VYQCSGVTL

SEQ ID NO: 73018 - protein, 9 aa, synthetic construct
  source 1..9: note = Seed: VRQCSGVTF
VYQCSGVTM

SEQ ID NO: 73019 - protein, 9 aa, synthetic construct
  source 1..9: note = Seed: VRQCSGVTF
VYQCSGVTV

SEQ ID NO: 73020 - protein, 9 aa, synthetic construct
  source 1..9: note = Seed: VRQCSGVTF
VYQCSGVTY

SEQ ID NO: 73021 - protein, 10 aa, synthetic construct
  source 1..10: note = Seed: VLQLPQGTTL
VYQLPQGTTF

SEQ ID NO: 73022 - protein, 10 aa, synthetic construct
  source 1..10: note = Seed: VLQLPQGTTL
VYQLPQGTTM

SEQ ID NO: 73023 - protein, 10 aa, synthetic construct
  source 1..10: note = Seed: VLQLPQGTTL
VYQLPQGTTY

SEQ ID NO: 73024 - protein, 9 aa, synthetic construct
  source 1..9: note = Seed: VFQTRAGCL
VYQTRAGCF

SEQ ID NO: 73025 - protein, 9 aa, synthetic construct
  source 1..9: note = Seed: VFQTRAGCL
VYQTRAGCL

SEQ ID NO: 73026 - protein, 9 aa, synthetic construct
  source 1..9: note = Seed: VFQTRAGCL
VYQTRAGCM

SEQ ID NO: 73027 - protein, 9 aa, synthetic construct
  source 1..9: note = Seed: VFQTRAGCL
VYQTRAGCY

SEQ ID NO: 73028 - protein, 9 aa, synthetic construct
  source 1..9: note = Seed: VTRCLNRVC
VYRCLNRVK

SEQ ID NO: 73029 - protein, 10 aa, synthetic construct
  source 1..10: note = Seed: VARDLSLQFK
VYRDLSLQFK

SEQ ID NO: 73030 - protein, 10 aa, synthetic construct
  source 1..10: note = Seed: VARDLSLQFK
VYRDLSLQFR

SEQ ID NO: 73031 - protein, 9 aa, synthetic construct
  source 1..9: note = Seed: VTRELMREL
VYRELMREK

SEQ ID NO: 73032 - protein, 10 aa, synthetic construct
  source 1..10: note = Seed: VNRFNVAITR
VYRFNVAITR

SEQ ID NO: 73033 - protein, 8 aa, synthetic construct
  source 1..8: note = Seed: VYRGTTTY
VYRGTTTF

SEQ ID NO: 73034 - protein, 8 aa, synthetic construct
  source 1..8: note = Seed: VYRGTTTY
VYRGTTTL

SEQ ID NO: 73035 - protein, 8 aa, synthetic construct
  source 1..8: note = Seed: VYRGTTTY
VYRGTTTM

SEQ ID NO: 73036 - protein, 9 aa, synthetic construct
  source 1..9: note = Seed: VYRGTTTYK
VYRGTTTYA

SEQ ID NO: 73037 - protein, 10 aa, synthetic construct
  source 1..10: note = Seed: VYRGTTTYKL
VYRGTTTYKF

SEQ ID NO: 73038 - protein, 10 aa, synthetic construct
  source 1..10: note = Seed: VYRGTTTYKL
VYRGTTTYKI

SEQ ID NO: 73039 - protein, 10 aa, synthetic construct
  source 1..10: note = Seed: VYRGTTTYKL
VYRGTTTYKM

SEQ ID NO: 73040 - protein, 10 aa, synthetic construct
  source 1..10: note = Seed: VYRGTTTYKL
VYRGTTTYKW

SEQ ID NO: 73041 - protein, 9 aa, synthetic construct
  source 1..9: note = Seed: VYRGTTTYK
VYRGTTTYR

SEQ ID NO: 73042 - protein, 11 aa, synthetic construct
  source 1..11: note = Seed: VKRTIKGTHHW
VYRTIKGTHHW

SEQ ID NO: 73043 - protein, 10 aa, synthetic construct
  source 1..10: note = Seed: VTSAMQTMLF
VYSAMQTMLF

SEQ ID NO: 73044 - protein, 10 aa, synthetic construct
  source 1..10: note = Seed: VTSAMQTMLF
VYSAMQTMLW

SEQ ID NO: 73045 - protein, 10 aa, synthetic construct
  source 1..10: note = Seed: VTSAMQTMLF
VYSAMQTMLY

SEQ ID NO: 73046 - protein, 9 aa, synthetic construct
  source 1..9: note = Seed: VYSFLPGVY
VYSFLPGVF

SEQ ID NO: 73047 - protein, 9 aa, synthetic construct
  source 1..9: note = Seed: VYSFLPGVY
VYSFLPGVI

SEQ ID NO: 73048 - protein, 9 aa, synthetic construct
  source 1..9: note = Seed: VYSFLPGVY
VYSFLPGVL

SEQ ID NO: 73049 - protein, 9 aa, synthetic construct
  source 1..9: note = Seed: VYSFLPGVY
VYSFLPGVM

SEQ ID NO: 73050 - protein, 9 aa, synthetic construct
  source 1..9: note = Seed: VYSFLPGVY
VYSFLPGVW

SEQ ID NO: 73051 - protein, 11 aa, synthetic construct
  source 1..11: note = Seed: VYSFLPGVYSV
VYSFLPGVYSF

SEQ ID NO: 73052 - protein, 11 aa, synthetic construct
  source 1..11: note = Seed: VYSFLPGVYSV
VYSFLPGVYSI

SEQ ID NO: 73053 - protein, 11 aa, synthetic construct
  source 1..11: note = Seed: VYSFLPGVYSV
VYSFLPGVYSL

SEQ ID NO: 73054 - protein, 11 aa, synthetic construct
  source 1..11: note = Seed: VYSFLPGVYSV
VYSFLPGVYSM

SEQ ID NO: 73055 - protein, 11 aa, synthetic construct
  source 1..11: note = Seed: VYSFLPGVYSV
VYSFLPGVYSW

SEQ ID NO: 73056 - protein, 9 aa, synthetic construct
  source 1..9: note = Seed: VNSFSGYLK
VYSFSGYLK

SEQ ID NO: 73057 - protein, 10 aa, synthetic construct
  source 1..10: note = Seed: VNSFSGYLKL
VYSFSGYLKF

SEQ ID NO: 73058 - protein, 10 aa, synthetic construct
  source 1..10: note = Seed: VNSFSGYLKL
VYSFSGYLKM

SEQ ID NO: 73059 - protein, 10 aa, synthetic construct
  source 1..10: note = Seed: VNSFSGYLKL
VYSFSGYLKW

SEQ ID NO: 73060 - protein, 10 aa, synthetic construct
  source 1..10: note = Seed: VNSFSGYLKL
VYSFSGYLKY

SEQ ID NO: 73061 - protein, 9 aa, synthetic construct
  source 1..9: note = Seed: VNSFSGYLK
VYSFSGYLR

SEQ ID NO: 73062 - protein, 11 aa, synthetic construct
  source 1..11: note = Seed: VYSSANNCTFE
VYSSANNCTFF

SEQ ID NO: 73063 - protein, 11 aa, synthetic construct
  source 1..11: note = Seed: VYSSANNCTFE
VYSSANNCTFI

SEQ ID NO: 73064 - protein, 11 aa, synthetic construct
  source 1..11: note = Seed: VYSSANNCTFE
VYSSANNCTFL

SEQ ID NO: 73065 - protein, 11 aa, synthetic construct
  source 1..11: note = Seed: VYSSANNCTFE
VYSSANNCTFW

SEQ ID NO: 73066 - protein, 10 aa, synthetic construct
  source 1..10: note = Seed: VYSSANNCTF
VYSSANNCTI

SEQ ID NO: 73067 - protein, 10 aa, synthetic construct
  source 1..10: note = Seed: VYSSANNCTF
VYSSANNCTL

SEQ ID NO: 73068 - protein, 10 aa, synthetic construct
  source 1..10: note = Seed: VYSSANNCTF
VYSSANNCTM

SEQ ID NO: 73069 - protein, 10 aa, synthetic construct
  source 1..10: note = Seed: VYSSANNCTF
VYSSANNCTW

SEQ ID NO: 73070 - protein, 9 aa, synthetic construct
  source 1..9: note = Seed: VYSTGSNVF
VYSTGSNVI

SEQ ID NO: 73071 - protein, 9 aa, synthetic construct
  source 1..9: note = Seed: VYSTGSNVF
VYSTGSNVL

SEQ ID NO: 73072 - protein, 9 aa, synthetic construct
  source 1..9: note = Seed: VYSTGSNVF
VYSTGSNVM

SEQ ID NO: 73073 - protein, 9 aa, synthetic construct
  source 1..9: note = Seed: VYSTGSNVF
VYSTGSNVV

SEQ ID NO: 73074 - protein, 9 aa, synthetic construct
  source 1..9: note = Seed: VYSTGSNVF
VYSTGSNVW

SEQ ID NO: 73075 - protein, 9 aa, synthetic construct
  source 1..9: note = Seed: VYSTGSNVF
VYSTGSNVY

SEQ ID NO: 73076 - protein, 9 aa, synthetic construct
  source 1..9: note = Seed: VVSTGYHFR
VYSTGYHFK

SEQ ID NO: 73077 - protein, 9 aa, synthetic construct
  source 1..9: note = Seed: VVSTGYHFR
VYSTGYHFR

SEQ ID NO: 73078 - protein, 10 aa, synthetic construct
  source 1..10: note = Seed: VVSTGYHFRE
VYSTGYHFRR

SEQ ID NO: 73079 - protein, 9 aa, synthetic construct
  source 1..9: note = Seed: VQSTQWSLF
VYSTQWSLF

SEQ ID NO: 73080 - protein, 9 aa, synthetic construct
  source 1..9: note = Seed: VQSTQWSLF
VYSTQWSLI

SEQ ID NO: 73081 - protein, 9 aa, synthetic construct
  source 1..9: note = Seed: VQSTQWSLF
VYSTQWSLL

SEQ ID NO: 73082 - protein, 9 aa, synthetic construct
  source 1..9: note = Seed: VQSTQWSLF
VYSTQWSLM

SEQ ID NO: 73083 - protein, 9 aa, synthetic construct
  source 1..9: note = Seed: VQSTQWSLF
VYSTQWSLV

SEQ ID NO: 73084 - protein, 9 aa, synthetic construct
  source 1..9: note = Seed: VQSTQWSLF
VYSTQWSLW

SEQ ID NO: 73085 - protein, 11 aa, synthetic construct
  source 1..11: note = Seed: VDSYYSLLMPI
VYSYYSLLMPF

SEQ ID NO: 73086 - protein, 11 aa, synthetic construct
  source 1..11: note = Seed: VDSYYSLLMPI
VYSYYSLLMPI

SEQ ID NO: 73087 - protein, 11 aa, synthetic construct
  source 1..11: note = Seed: VDSYYSLLMPI
VYSYYSLLMPL

SEQ ID NO: 73088 - protein, 11 aa, synthetic construct
  source 1..11: note = Seed: VDSYYSLLMPI
VYSYYSLLMPW

SEQ ID NO: 73089 - protein, 9 aa, synthetic construct
  source 1..9: note = Seed: VFTGYRVTK
VYTGYRVTR

SEQ ID NO: 73090 - protein, 10 aa, synthetic construct
  source 1..10: note = Seed: VNVAFELWAK
VYVAFELWAR

SEQ ID NO: 73091 - protein, 11 aa, synthetic construct
  source 1..11: note = Seed: VNVLAWLYAAV
VYVLAWLYAAV

SEQ ID NO: 73092 - protein, 10 aa, synthetic construct
  source 1..10: note = Seed: VNVLAWLYAA
VYVLAWLYAI

SEQ ID NO: 73093 - protein, 10 aa, synthetic construct
  source 1..10: note = Seed: VNVLAWLYAA
VYVLAWLYAL

SEQ ID NO: 73094 - protein, 10 aa, synthetic construct
  source 1..10: note = Seed: VNVLAWLYAA
VYVLAWLYAV

SEQ ID NO: 73095 - protein, 9 aa, synthetic construct
  source 1..9: note = Seed: VFVLWAHGF
VYVLWAHGF

SEQ ID NO: 73096 - protein, 11 aa, synthetic construct
  source 1..11: note = Seed: VFVLWAHGFEL
VYVLWAHGFEA

SEQ ID NO: 73097 - protein, 11 aa, synthetic construct
  source 1..11: note = Seed: VFVLWAHGFEL
VYVLWAHGFEI

SEQ ID NO: 73098 - protein, 11 aa, synthetic construct
  source 1..11: note = Seed: VFVLWAHGFEL
VYVLWAHGFEL

SEQ ID NO: 73099 - protein, 11 aa, synthetic construct
  source 1..11: note = Seed: VFVLWAHGFEL
VYVLWAHGFEV

SEQ ID NO: 73100 - protein, 9 aa, synthetic construct
  source 1..9: note = Seed: VFVLWAHGF
VYVLWAHGI

SEQ ID NO: 73101 - protein, 9 aa, synthetic construct
  source 1..9: note = Seed: VFVLWAHGF
VYVLWAHGL

SEQ ID NO: 73102 - protein, 9 aa, synthetic construct
  source 1..9: note = Seed: VFVLWAHGF
VYVLWAHGM

SEQ ID NO: 73103 - protein, 9 aa, synthetic construct
  source 1..9: note = Seed: VFVLWAHGF
VYVLWAHGV

SEQ ID NO: 73104 - protein, 9 aa, synthetic construct
  source 1..9: note = Seed: VFVLWAHGF
VYVLWAHGW

SEQ ID NO: 73105 - protein, 9 aa, synthetic construct
  source 1..9: note = Seed: VFVLWAHGF
VYVLWAHGY

SEQ ID NO: 73106 - protein, 9 aa, synthetic construct
  source 1..9: note = Seed: VFVSNGTHW
VYVSNGTHF

SEQ ID NO: 73107 - protein, 9 aa, synthetic construct
  source 1..9: note = Seed: VFVSNGTHW
VYVSNGTHI

SEQ ID NO: 73108 - protein, 9 aa, synthetic construct
  source 1..9: note = Seed: VFVSNGTHW
VYVSNGTHL

SEQ ID NO: 73109 - protein, 9 aa, synthetic construct
  source 1..9: note = Seed: VFVSNGTHW
VYVSNGTHM

SEQ ID NO: 73110 - protein, 9 aa, synthetic construct
  source 1..9: note = Seed: VFVSNGTHW
VYVSNGTHV

SEQ ID NO: 73111 - protein, 9 aa, synthetic construct
  source 1..9: note = Seed: VFVSNGTHW
VYVSNGTHW

SEQ ID NO: 73112 - protein, 10 aa, synthetic construct
  source 1..10: note = Seed: VFVSNGTHWF
VYVSNGTHWF

SEQ ID NO: 73113 - protein, 10 aa, synthetic construct
  source 1..10: note = Seed: VFVSNGTHWF
VYVSNGTHWI

SEQ ID NO: 73114 - protein, 10 aa, synthetic construct
  source 1..10: note = Seed: VFVSNGTHWF
VYVSNGTHWL

SEQ ID NO: 73115 - protein, 10 aa, synthetic construct
  source 1..10: note = Seed: VFVSNGTHWF
VYVSNGTHWM

SEQ ID NO: 73116 - protein, 10 aa, synthetic construct
  source 1..10: note = Seed: VFVSNGTHWF
VYVSNGTHWW

SEQ ID NO: 73117 - protein, 9 aa, synthetic construct
  source 1..9: note = Seed: VFVSNGTHW
VYVSNGTHY

SEQ ID NO: 73118 - protein, 10 aa, synthetic construct
  source 1..10: note = Seed: VPVVDSYYSL
VYVVDSYYSV

SEQ ID NO: 73119 - protein, 9 aa, synthetic construct
  source 1..9: note = Seed: VMYASAVVL
VYYASAVVF

SEQ ID NO: 73120 - protein, 9 aa, synthetic construct
  source 1..9: note = Seed: VMYASAVVL
VYYASAVVI

SEQ ID NO: 73121 - protein, 9 aa, synthetic construct
  source 1..9: note = Seed: VMYASAVVL
VYYASAVVL

SEQ ID NO: 73122 - protein, 10 aa, synthetic construct
  source 1..10: note = Seed: VMYASAVVLL
VYYASAVVLF

SEQ ID NO: 73123 - protein, 10 aa, synthetic construct
  source 1..10: note = Seed: VMYASAVVLL
VYYASAVVLI

SEQ ID NO: 73124 - protein, 10 aa, synthetic construct
  source 1..10: note = Seed: VMYASAVVLL
VYYASAVVLL

SEQ ID NO: 73125 - protein, 11 aa, synthetic construct
  source 1..11: note = Seed: VMYASAVVLLI
VYYASAVVLLF

SEQ ID NO: 73126 - protein, 11 aa, synthetic construct
  source 1..11: note = Seed: VMYASAVVLLI
VYYASAVVLLI

SEQ ID NO: 73127 - protein, 11 aa, synthetic construct
  source 1..11: note = Seed: VMYASAVVLLI
VYYASAVVLLL

SEQ ID NO: 73128 - protein, 11 aa, synthetic construct
  source 1..11: note = Seed: VMYASAVVLLI
VYYASAVVLLW

SEQ ID NO: 73129 - protein, 10 aa, synthetic construct
  source 1..10: note = Seed: VMYASAVVLL
VYYASAVVLM

SEQ ID NO: 73130 - protein, 10 aa, synthetic construct
  source 1..10: note = Seed: VMYASAVVLL
VYYASAVVLW

SEQ ID NO: 73131 - protein, 10 aa, synthetic construct
  source 1..10: note = Seed: VMYASAVVLL
VYYASAVVLY

SEQ ID NO: 73132 - protein, 9 aa, synthetic construct
  source 1..9: note = Seed: VMYASAVVL
VYYASAVVM

SEQ ID NO: 73133 - protein, 9 aa, synthetic construct
  source 1..9: note = Seed: VMYASAVVL
VYYASAVVV

SEQ ID NO: 73134 - protein, 9 aa, synthetic construct
  source 1..9: note = Seed: VMYASAVVL
VYYASAVVY

SEQ ID NO: 73135 - protein, 10 aa, synthetic construct
  source 1..10: note = Seed: VPYCYDTNVL
VYYCYDTNVF

SEQ ID NO: 73136 - protein, 10 aa, synthetic construct
  source 1..10: note = Seed: VPYCYDTNVL
VYYCYDTNVI

SEQ ID NO: 73137 - protein, 10 aa, synthetic construct
  source 1..10: note = Seed: VPYCYDTNVL
VYYCYDTNVL

SEQ ID NO: 73138 - protein, 10 aa, synthetic construct
  source 1..10: note = Seed: VPYCYDTNVL
VYYCYDTNVW

SEQ ID NO: 73139 - protein, 9 aa, synthetic construct
  source 1..9: note = Seed: VAYFNMVYM
VYYFNMVYF

SEQ ID NO: 73140 - protein, 9 aa, synthetic construct
  source 1..9: note = Seed: VAYFNMVYM
VYYFNMVYL

SEQ ID NO: 73141 - protein, 9 aa, synthetic construct
  source 1..9: note = Seed: VAYFNMVYM
VYYFNMVYM

SEQ ID NO: 73142 - protein, 9 aa, synthetic construct
  source 1..9: note = Seed: VAYFNMVYM
VYYFNMVYY

SEQ ID NO: 73143 - protein, 8 aa, synthetic construct
  source 1..8: note = Seed: VFYKENSY
VYYKENSM

SEQ ID NO: 73144 - protein, 10 aa, synthetic construct
  source 1..10: note = Seed: VGYLQPRTFL
VYYLQPRTFF

SEQ ID NO: 73145 - protein, 10 aa, synthetic construct
  source 1..10: note = Seed: VGYLQPRTFL
VYYLQPRTFI

SEQ ID NO: 73146 - protein, 10 aa, synthetic construct
  source 1..10: note = Seed: VGYLQPRTFL
VYYLQPRTFL

SEQ ID NO: 73147 - protein, 11 aa, synthetic construct
  source 1..11: note = Seed: VGYLQPRTFLL
VYYLQPRTFLV

SEQ ID NO: 73148 - protein, 10 aa, synthetic construct
  source 1..10: note = Seed: VGYLQPRTFL
VYYLQPRTFM

SEQ ID NO: 73149 - protein, 10 aa, synthetic construct
  source 1..10: note = Seed: VGYLQPRTFL
VYYLQPRTFW

SEQ ID NO: 73150 - protein, 10 aa, synthetic construct
  source 1..10: note = Seed: VGYLQPRTFL
VYYLQPRTFY

SEQ ID NO: 73151 - protein, 10 aa, synthetic construct
  source 1..10: note = Seed: VLYQPPQTSI
VYYQPPQTSF

SEQ ID NO: 73152 - protein, 10 aa, synthetic construct
  source 1..10: note = Seed: VLYQPPQTSI
VYYQPPQTSI

SEQ ID NO: 73153 - protein, 10 aa, synthetic construct
  source 1..10: note = Seed: VLYQPPQTSI
VYYQPPQTSL

SEQ ID NO: 73154 - protein, 10 aa, synthetic construct
  source 1..10: note = Seed: VLYQPPQTSI
VYYQPPQTSM

SEQ ID NO: 73155 - protein, 10 aa, synthetic construct
  source 1..10: note = Seed: VLYQPPQTSI
VYYQPPQTSW

SEQ ID NO: 73156 - protein, 10 aa, synthetic construct
  source 1..10: note = Seed: VLYQPPQTSI
VYYQPPQTSY

SEQ ID NO: 73157 - protein, 10 aa, synthetic construct
  source 1..10: note = Seed: VGYQPYRVVV
VYYQPYRVVF

SEQ ID NO: 73158 - protein, 10 aa, synthetic construct
  source 1..10: note = Seed: VGYQPYRVVV
VYYQPYRVVI

SEQ ID NO: 73159 - protein, 10 aa, synthetic construct
  source 1..10: note = Seed: VGYQPYRVVV
VYYQPYRVVL

SEQ ID NO: 73160 - protein, 10 aa, synthetic construct
  source 1..10: note = Seed: VGYQPYRVVV
VYYQPYRVVM

SEQ ID NO: 73161 - protein, 10 aa, synthetic construct
  source 1..10: note = Seed: VGYQPYRVVV
VYYQPYRVVW

SEQ ID NO: 73162 - protein, 10 aa, synthetic construct
  source 1..10: note = Seed: VGYQPYRVVV
VYYQPYRVVY

SEQ ID NO: 73163 - protein, 9 aa, synthetic construct
  source 1..9: note = Seed: VVYRGTTTY
VYYRGTTTA

SEQ ID NO: 73164 - protein, 9 aa, synthetic construct
  source 1..9: note = Seed: VVYRGTTTY
VYYRGTTTC

SEQ ID NO: 73165 - protein, 9 aa, synthetic construct
  source 1..9: note = Seed: VVYRGTTTY
VYYRGTTTF

SEQ ID NO: 73166 - protein, 9 aa, synthetic construct
  source 1..9: note = Seed: VVYRGTTTY
VYYRGTTTH

SEQ ID NO: 73167 - protein, 9 aa, synthetic construct
  source 1..9: note = Seed: VVYRGTTTY
VYYRGTTTI

SEQ ID NO: 73168 - protein, 9 aa, synthetic construct
  source 1..9: note = Seed: VVYRGTTTY
VYYRGTTTL

SEQ ID NO: 73169 - protein, 9 aa, synthetic construct
  source 1..9: note = Seed: VVYRGTTTY
VYYRGTTTM

SEQ ID NO: 73170 - protein, 9 aa, synthetic construct
  source 1..9: note = Seed: VVYRGTTTY
VYYRGTTTV

SEQ ID NO: 73171 - protein, 9 aa, synthetic construct
  source 1..9: note = Seed: VVYRGTTTY
VYYRGTTTW

SEQ ID NO: 73172 - protein, 9 aa, synthetic construct
  source 1..9: note = Seed: VVYRGTTTY
VYYRGTTTY

SEQ ID NO: 73173 - protein, 10 aa, synthetic construct
  source 1..10: note = Seed: VVYRGTTTYK
VYYRGTTTYK

SEQ ID NO: 73174 - protein, 10 aa, synthetic construct
  source 1..10: note = Seed: VVYRGTTTYK
VYYRGTTTYR

SEQ ID NO: 73175 - protein, 11 aa, synthetic construct
  source 1..11: note = Seed: VYYSQLMCQPI
VYYSQLMCQPF

SEQ ID NO: 73176 - protein, 11 aa, synthetic construct
  source 1..11: note = Seed: VYYSQLMCQPI
VYYSQLMCQPL

SEQ ID NO: 73177 - protein, 11 aa, synthetic construct
  source 1..11: note = Seed: VYYSQLMCQPI
VYYSQLMCQPM

SEQ ID NO: 73178 - protein, 11 aa, synthetic construct
  source 1..11: note = Seed: VYYSQLMCQPI
VYYSQLMCQPW

SEQ ID NO: 73179 - protein, 9 aa, synthetic construct
  source 1..9: note = Seed: VYYTSNPTT
VYYTSNPTF

SEQ ID NO: 73180 - protein, 9 aa, synthetic construct
  source 1..9: note = Seed: VYYTSNPTT
VYYTSNPTI

SEQ ID NO: 73181 - protein, 9 aa, synthetic construct
  source 1..9: note = Seed: VYYTSNPTT
VYYTSNPTL

SEQ ID NO: 73182 - protein, 9 aa, synthetic construct
  source 1..9: note = Seed: VYYTSNPTT
VYYTSNPTM

SEQ ID NO: 73183 - protein, 11 aa, synthetic construct
  source 1..11: note = Seed: VYYTSNPTTFH
VYYTSNPTTFF

SEQ ID NO: 73184 - protein, 11 aa, synthetic construct
  source 1..11: note = Seed: VYYTSNPTTFH
VYYTSNPTTFI

SEQ ID NO: 73185 - protein, 11 aa, synthetic construct
  source 1..11: note = Seed: VYYTSNPTTFH
VYYTSNPTTFL

SEQ ID NO: 73186 - protein, 11 aa, synthetic construct
  source 1..11: note = Seed: VYYTSNPTTFH
VYYTSNPTTFM

SEQ ID NO: 73187 - protein, 11 aa, synthetic construct
  source 1..11: note = Seed: VYYTSNPTTFH
VYYTSNPTTFV

SEQ ID NO: 73188 - protein, 11 aa, synthetic construct
  source 1..11: note = Seed: VYYTSNPTTFH
VYYTSNPTTFW

SEQ ID NO: 73189 - protein, 10 aa, synthetic construct
  source 1..10: note = Seed: VYYTSNPTTF
VYYTSNPTTI

SEQ ID NO: 73190 - protein, 10 aa, synthetic construct
  source 1..10: note = Seed: VYYTSNPTTF
VYYTSNPTTL

SEQ ID NO: 73191 - protein, 10 aa, synthetic construct
  source 1..10: note = Seed: VYYTSNPTTF
VYYTSNPTTM

SEQ ID NO: 73192 - protein, 10 aa, synthetic construct
  source 1..10: note = Seed: VYYTSNPTTF
VYYTSNPTTW

SEQ ID NO: 73193 - protein, 10 aa, synthetic construct
  source 1..10: note = Seed: VYYTSNPTTF
VYYTSNPTTY

SEQ ID NO: 73194 - protein, 9 aa, synthetic construct
  source 1..9: note = Seed: VYYTSNPTT
VYYTSNPTV

SEQ ID NO: 73195 - protein, 9 aa, synthetic construct
  source 1..9: note = Seed: VYYTSNPTT
VYYTSNPTY

SEQ ID NO: 73196 - protein, 9 aa, synthetic construct
  source 1..9: note = Seed: VLYYQNNVF
VYYYQNNVF

SEQ ID NO: 73197 - protein, 10 aa, synthetic construct
  source 1..10: note = Seed: VLYYQNNVFM
VYYYQNNVFF

SEQ ID NO: 73198 - protein, 10 aa, synthetic construct
  source 1..10: note = Seed: VLYYQNNVFM
VYYYQNNVFI

SEQ ID NO: 73199 - protein, 10 aa, synthetic construct
  source 1..10: note = Seed: VLYYQNNVFM
VYYYQNNVFL

SEQ ID NO: 73200 - protein, 10 aa, synthetic construct
  source 1..10: note = Seed: VLYYQNNVFM
VYYYQNNVFM

SEQ ID NO: 73201 - protein, 10 aa, synthetic construct
  source 1..10: note = Seed: VLYYQNNVFM
VYYYQNNVFW

SEQ ID NO: 73202 - protein, 10 aa, synthetic construct
  source 1..10: note = Seed: VLYYQNNVFM
VYYYQNNVFY

SEQ ID NO: 73203 - protein, 9 aa, synthetic construct
  source 1..9: note = Seed: VLYYQNNVF
VYYYQNNVI

SEQ ID NO: 73204 - protein, 9 aa, synthetic construct
  source 1..9: note = Seed: VLYYQNNVF
VYYYQNNVL

SEQ ID NO: 73205 - protein, 9 aa, synthetic construct
  source 1..9: note = Seed: VLYYQNNVF
VYYYQNNVM

SEQ ID NO: 73206 - protein, 9 aa, synthetic construct
  source 1..9: note = Seed: VLYYQNNVF
VYYYQNNVV

SEQ ID NO: 73207 - protein, 9 aa, synthetic construct
  source 1..9: note = Seed: VLYYQNNVF
VYYYQNNVY

SEQ ID NO: 73208 - protein, 10 aa, synthetic construct
  source 1..10: note = Seed: WTAFVTNVNA
WAAFVTNVNI

SEQ ID NO: 73209 - protein, 10 aa, synthetic construct
  source 1..10: note = Seed: WTAFVTNVNA
WAAFVTNVNL

SEQ ID NO: 73210 - protein, 10 aa, synthetic construct
  source 1..10: note = Seed: WTAFVTNVNA
WAAFVTNVNV

SEQ ID NO: 73211 - protein, 9 aa, synthetic construct
  source 1..9: note = Seed: WICLLQFAY
WACLLQFAF

SEQ ID NO: 73212 - protein, 9 aa, synthetic construct
  source 1..9: note = Seed: WICLLQFAY
WACLLQFAM

SEQ ID NO: 73213 - protein, 9 aa, synthetic construct
  source 1..9: note = Seed: WICLLQFAY
WACLLQFAY

SEQ ID NO: 73214 - protein, 10 aa, synthetic construct
  source 1..10: note = Seed: WIFGTTLDSK
WAFGTTLDSK

SEQ ID NO: 73215 - protein, 10 aa, synthetic construct
  source 1..10: note = Seed: WIFGTTLDSK
WAFGTTLDSR

SEQ ID NO: 73216 - protein, 9 aa, synthetic construct
  source 1..9: note = Seed: WSFNPETNI
WAFNPETNF

SEQ ID NO: 73217 - protein, 10 aa, synthetic construct
  source 1..10: note = Seed: WSFNPETNIL
WAFNPETNIW

SEQ ID NO: 73218 - protein, 9 aa, synthetic construct
  source 1..9: note = Seed: WSFNPETNI
WAFNPETNL

SEQ ID NO: 73219 - protein, 9 aa, synthetic construct
  source 1..9: note = Seed: WSFNPETNI
WAFNPETNM

SEQ ID NO: 73220 - protein, 9 aa, synthetic construct
  source 1..9: note = Seed: WSFNPETNI
WAFNPETNW

SEQ ID NO: 73221 - protein, 9 aa, synthetic construct
  source 1..9: note = Seed: WSFNPETNI
WAFNPETNY

SEQ ID NO: 73222 - protein, 9 aa, synthetic construct
  source 1..9: note = Seed: WFFSNYLKR
WAFSNYLKK

SEQ ID NO: 73223 - protein, 9 aa, synthetic construct
  source 1..9: note = Seed: WFFSNYLKR
WAFSNYLKR

SEQ ID NO: 73224 - protein, 10 aa, synthetic construct
  source 1..10: note = Seed: WFFSNYLKRR
WAFSNYLKRR

SEQ ID NO: 73225 - protein, 10 aa, synthetic construct
  source 1..10: note = Seed: WAHGFELTSM
WAHGFELTSF

SEQ ID NO: 73226 - protein, 10 aa, synthetic construct
  source 1..10: note = Seed: WAHGFELTSM
WAHGFELTSY

SEQ ID NO: 73227 - protein, 9 aa, synthetic construct
  source 1..9: note = Seed: WLIINLVQM
WAIINLVQV

SEQ ID NO: 73228 - protein, 10 aa, synthetic construct
  source 1..10: note = Seed: WRKAVFISPY
WAKAVFISPF

SEQ ID NO: 73229 - protein, 10 aa, synthetic construct
  source 1..10: note = Seed: WRKAVFISPY
WAKAVFISPY

SEQ ID NO: 73230 - protein, 9 aa, synthetic construct
  source 1..9: note = Seed: WAKRNIKPV
WAKRNIKPL

SEQ ID NO: 73231 - protein, 10 aa, synthetic construct
  source 1..10: note = Seed: WFLAYILFTR
WALAYILFTK

SEQ ID NO: 73232 - protein, 10 aa, synthetic construct
  source 1..10: note = Seed: WFLAYILFTR
WALAYILFTR

SEQ ID NO: 73233 - protein, 10 aa, synthetic construct
  source 1..10: note = Seed: WLLLTILTSL
WALLTILTSI

SEQ ID NO: 73234 - protein, 10 aa, synthetic construct
  source 1..10: note = Seed: WLLLTILTSL
WALLTILTSL

SEQ ID NO: 73235 - protein, 10 aa, synthetic construct
  source 1..10: note = Seed: WLLLTILTSL
WALLTILTSV

SEQ ID NO: 73236 - protein, 9 aa, synthetic construct
  source 1..9: note = Seed: WVLNNDYYR
WALNNDYYK

SEQ ID NO: 73237 - protein, 9 aa, synthetic construct
  source 1..9: note = Seed: WVLNNDYYR
WALNNDYYR

SEQ ID NO: 73238 - protein, 10 aa, synthetic construct
  source 1..10: note = Seed: WVLNNDYYRS
WALNNDYYRR

SEQ ID NO: 73239 - protein, 8 aa, synthetic construct
  source 1..8: note = Seed: WVMRIMTW
WAMRIMTW

SEQ ID NO: 73240 - protein, 9 aa, synthetic construct
  source 1..9: note = Seed: WVMRIMTWL
WAMRIMTWV

SEQ ID NO: 73241 - protein, 10 aa, synthetic construct
  source 1..10: note = Seed: WLMWLIINLV
WAMWLIINLV

SEQ ID NO: 73242 - protein, 9 aa, synthetic construct
  source 1..9: note = Seed: WLMWLIINL
WAMWLIINV

SEQ ID NO: 73243 - protein, 9 aa, synthetic construct
  source 1..9: note = Seed: WTNAGDYIL
WANAGDYIF

SEQ ID NO: 73244 - protein, 9 aa, synthetic construct
  source 1..9: note = Seed: WTNAGDYIL
WANAGDYIL

SEQ ID NO: 73245 - protein, 9 aa, synthetic construct
  source 1..9: note = Seed: WTNAGDYIL
WANAGDYIM

SEQ ID NO: 73246 - protein, 9 aa, synthetic construct
  source 1..9: note = Seed: WTNAGDYIL
WANAGDYIW

SEQ ID NO: 73247 - protein, 9 aa, synthetic construct
  source 1..9: note = Seed: WTNAGDYIL
WANAGDYIY

SEQ ID NO: 73248 - protein, 9 aa, synthetic construct
  source 1..9: note = Seed: WLPTGTLLV
WAPTGTLLL

SEQ ID NO: 73249 - protein, 9 aa, synthetic construct
  source 1..9: note = Seed: WFSQRGGSY
WASQRGGSF

SEQ ID NO: 73250 - protein, 9 aa, synthetic construct
  source 1..9: note = Seed: WFSQRGGSY
WASQRGGSY

SEQ ID NO: 73251 - protein, 9 aa, synthetic construct
  source 1..9: note = Seed: WLSYFIASF
WASYFIASF

SEQ ID NO: 73252 - protein, 10 aa, synthetic construct
  source 1..10: note = Seed: WLSYFIASFR
WASYFIASFK

SEQ ID NO: 73253 - protein, 10 aa, synthetic construct
  source 1..10: note = Seed: WLSYFIASFR
WASYFIASFR

SEQ ID NO: 73254 - protein, 9 aa, synthetic construct
  source 1..9: note = Seed: WLSYFIASF
WASYFIASI

SEQ ID NO: 73255 - protein, 9 aa, synthetic construct
  source 1..9: note = Seed: WLSYFIASF
WASYFIASL

SEQ ID NO: 73256 - protein, 9 aa, synthetic construct
  source 1..9: note = Seed: WLSYFIASF
WASYFIASM

SEQ ID NO: 73257 - protein, 9 aa, synthetic construct
  source 1..9: note = Seed: WLSYFIASF
WASYFIASV

SEQ ID NO: 73258 - protein, 9 aa, synthetic construct
  source 1..9: note = Seed: WLSYFIASF
WASYFIASY

SEQ ID NO: 73259 - protein, 10 aa, synthetic construct
  source 1..10: note = Seed: WFTALTQHGK
WATALTQHGK

SEQ ID NO: 73260 - protein, 10 aa, synthetic construct
  source 1..10: note = Seed: WFTALTQHGK
WATALTQHGR

SEQ ID NO: 73261 - protein, 9 aa, synthetic construct
  source 1..9: note = Seed: WVYKQFDTY
WAYKQFDTF

SEQ ID NO: 73262 - protein, 9 aa, synthetic construct
  source 1..9: note = Seed: WVYKQFDTY
WAYKQFDTI

SEQ ID NO: 73263 - protein, 9 aa, synthetic construct
  source 1..9: note = Seed: WVYKQFDTY
WAYKQFDTL

SEQ ID NO: 73264 - protein, 9 aa, synthetic construct
  source 1..9: note = Seed: WVYKQFDTY
WAYKQFDTM

SEQ ID NO: 73265 - protein, 9 aa, synthetic construct
  source 1..9: note = Seed: WVYKQFDTY
WAYKQFDTV

SEQ ID NO: 73266 - protein, 9 aa, synthetic construct
  source 1..9: note = Seed: WVYKQFDTY
WAYKQFDTW

SEQ ID NO: 73267 - protein, 9 aa, synthetic construct
  source 1..9: note = Seed: WVYKQFDTY
WAYKQFDTY

SEQ ID NO: 73268 - protein, 9 aa, synthetic construct
  source 1..9: note = Seed: WKYPQVNGL
WAYPQVNGF

SEQ ID NO: 73269 - protein, 9 aa, synthetic construct
  source 1..9: note = Seed: WKYPQVNGL
WAYPQVNGY

SEQ ID NO: 73270 - protein, 10 aa, synthetic construct
  source 1..10: note = Seed: WRKAVFISPY
WCKAVFISPF

SEQ ID NO: 73271 - protein, 10 aa, synthetic construct
  source 1..10: note = Seed: WRKAVFISPY
WCKAVFISPY

SEQ ID NO: 73272 - protein, 10 aa, synthetic construct
  source 1..10: note = Seed: WLLLTILTSL
WCLLTILTSI

SEQ ID NO: 73273 - protein, 10 aa, synthetic construct
  source 1..10: note = Seed: WLLLTILTSL
WCLLTILTSL

SEQ ID NO: 73274 - protein, 10 aa, synthetic construct
  source 1..10: note = Seed: WLLLTILTSL
WCLLTILTSV

SEQ ID NO: 73275 - protein, 10 aa, synthetic construct
  source 1..10: note = Seed: WLSYFIASFR
WCSYFIASFK

SEQ ID NO: 73276 - protein, 10 aa, synthetic construct
  source 1..10: note = Seed: WLSYFIASFR
WCSYFIASFR

SEQ ID NO: 73277 - protein, 10 aa, synthetic construct
  source 1..10: note = Seed: WFTALTQHGK
WCTALTQHGR

SEQ ID NO: 73278 - protein, 10 aa, synthetic construct
  source 1..10: note = Seed: WRKAVFISPY
WDKAVFISPF

SEQ ID NO: 73279 - protein, 10 aa, synthetic construct
  source 1..10: note = Seed: WRKAVFISPY
WDKAVFISPY

SEQ ID NO: 73280 - protein, 10 aa, synthetic construct
  source 1..10: note = Seed: WFLAYILFTR
WDLAYILFTR

SEQ ID NO: 73281 - protein, 10 aa, synthetic construct
  source 1..10: note = Seed: WLLLTILTSL
WDLLTILTSI

SEQ ID NO: 73282 - protein, 10 aa, synthetic construct
  source 1..10: note = Seed: WLLLTILTSL
WDLLTILTSL

SEQ ID NO: 73283 - protein, 10 aa, synthetic construct
  source 1..10: note = Seed: WLLLTILTSL
WDLLTILTSV

SEQ ID NO: 73284 - protein, 10 aa, synthetic construct
  source 1..10: note = Seed: WLSYFIASFR
WDSYFIASFK

SEQ ID NO: 73285 - protein, 10 aa, synthetic construct
  source 1..10: note = Seed: WLSYFIASFR
WDSYFIASFR

SEQ ID NO: 73286 - protein, 10 aa, synthetic construct
  source 1..10: note = Seed: WFTALTQHGK
WDTALTQHGR

SEQ ID NO: 73287 - protein, 10 aa, synthetic construct
  source 1..10: note = Seed: WRKAVFISPY
WEKAVFISPF

SEQ ID NO: 73288 - protein, 10 aa, synthetic construct
  source 1..10: note = Seed: WRKAVFISPY
WEKAVFISPY

SEQ ID NO: 73289 - protein, 10 aa, synthetic construct
  source 1..10: note = Seed: WFLAYILFTR
WELAYILFTR

SEQ ID NO: 73290 - protein, 10 aa, synthetic construct
  source 1..10: note = Seed: WLLLTILTSL
WELLTILTSI

SEQ ID NO: 73291 - protein, 10 aa, synthetic construct
  source 1..10: note = Seed: WLLLTILTSL
WELLTILTSL

SEQ ID NO: 73292 - protein, 10 aa, synthetic construct
  source 1..10: note = Seed: WLLLTILTSL
WELLTILTSV

SEQ ID NO: 73293 - protein, 9 aa, synthetic construct
  source 1..9: note = Seed: WESGVKDCV
WESGVKDCI

SEQ ID NO: 73294 - protein, 9 aa, synthetic construct
  source 1..9: note = Seed: WESGVKDCV
WESGVKDCL

SEQ ID NO: 73295 - protein, 9 aa, synthetic construct
  source 1..9: note = Seed: WESGVKDCV
WESGVKDCM

SEQ ID NO: 73296 - protein, 10 aa, synthetic construct
  source 1..10: note = Seed: WESGVKDCVV
WESGVKDCVL

SEQ ID NO: 73297 - protein, 10 aa, synthetic construct
  source 1..10: note = Seed: WESGVKDCVV
WESGVKDCVM

SEQ ID NO: 73298 - protein, 9 aa, synthetic construct
  source 1..9: note = Seed: WFSQRGGSY
WESQRGGSF

SEQ ID NO: 73299 - protein, 9 aa, synthetic construct
  source 1..9: note = Seed: WFSQRGGSY
WESQRGGSY

SEQ ID NO: 73300 - protein, 9 aa, synthetic construct
  source 1..9: note = Seed: WLSYFIASF
WESYFIASF

SEQ ID NO: 73301 - protein, 10 aa, synthetic construct
  source 1..10: note = Seed: WLSYFIASFR
WESYFIASFK

SEQ ID NO: 73302 - protein, 10 aa, synthetic construct
  source 1..10: note = Seed: WLSYFIASFR
WESYFIASFR

SEQ ID NO: 73303 - protein, 9 aa, synthetic construct
  source 1..9: note = Seed: WLSYFIASF
WESYFIASM

SEQ ID NO: 73304 - protein, 9 aa, synthetic construct
  source 1..9: note = Seed: WLSYFIASF
WESYFIASY

SEQ ID NO: 73305 - protein, 10 aa, synthetic construct
  source 1..10: note = Seed: WFTALTQHGK
WETALTQHGR

SEQ ID NO: 73306 - protein, 9 aa, synthetic construct
  source 1..9: note = Seed: WVYKQFDTY
WEYKQFDTF

SEQ ID NO: 73307 - protein, 9 aa, synthetic construct
  source 1..9: note = Seed: WVYKQFDTY
WEYKQFDTY

SEQ ID NO: 73308 - protein, 9 aa, synthetic construct
  source 1..9: note = Seed: WDYKRDAPA
WEYKRDAPA

SEQ ID NO: 73309 - protein, 9 aa, synthetic construct
  source 1..9: note = Seed: WDYKRDAPA
WEYKRDAPF

SEQ ID NO: 73310 - protein, 9 aa, synthetic construct
  source 1..9: note = Seed: WDYKRDAPA
WEYKRDAPI

SEQ ID NO: 73311 - protein, 9 aa, synthetic construct
  source 1..9: note = Seed: WDYKRDAPA
WEYKRDAPL

SEQ ID NO: 73312 - protein, 9 aa, synthetic construct
  source 1..9: note = Seed: WDYKRDAPA
WEYKRDAPM

SEQ ID NO: 73313 - protein, 9 aa, synthetic construct
  source 1..9: note = Seed: WDYKRDAPA
WEYKRDAPP

SEQ ID NO: 73314 - protein, 9 aa, synthetic construct
  source 1..9: note = Seed: WDYKRDAPA
WEYKRDAPV

SEQ ID NO: 73315 - protein, 9 aa, synthetic construct
  source 1..9: note = Seed: WICLLQFAY
WFCLLQFAY

SEQ ID NO: 73316 - protein, 10 aa, synthetic construct
  source 1..10: note = Seed: WRKAVFISPY
WFKAVFISPF

SEQ ID NO: 73317 - protein, 10 aa, synthetic construct
  source 1..10: note = Seed: WRKAVFISPY
WFKAVFISPY

SEQ ID NO: 73318 - protein, 9 aa, synthetic construct
  source 1..9: note = Seed: WAKRNIKPV
WFKRNIKPL

SEQ ID NO: 73319 - protein, 10 aa, synthetic construct
  source 1..10: note = Seed: WLLLTILTSL
WFLLTILTSA

SEQ ID NO: 73320 - protein, 10 aa, synthetic construct
  source 1..10: note = Seed: WLLLTILTSL
WFLLTILTSI

SEQ ID NO: 73321 - protein, 10 aa, synthetic construct
  source 1..10: note = Seed: WLLLTILTSL
WFLLTILTSL

SEQ ID NO: 73322 - protein, 11 aa, synthetic construct
  source 1..11: note = Seed: WLLLTILTSLL
WFLLTILTSLV

SEQ ID NO: 73323 - protein, 10 aa, synthetic construct
  source 1..10: note = Seed: WLLLTILTSL
WFLLTILTSV

SEQ ID NO: 73324 - protein, 9 aa, synthetic construct
  source 1..9: note = Seed: WVLNNDYYR
WFLNNDYYK

SEQ ID NO: 73325 - protein, 9 aa, synthetic construct
  source 1..9: note = Seed: WVLNNDYYR
WFLNNDYYR

SEQ ID NO: 73326 - protein, 10 aa, synthetic construct
  source 1..10: note = Seed: WLMWLIINLV
WFMWLIINLV

SEQ ID NO: 73327 - protein, 9 aa, synthetic construct
  source 1..9: note = Seed: WFSQRGGSY
WFSQRGGSF

SEQ ID NO: 73328 - protein, 9 aa, synthetic construct
  source 1..9: note = Seed: WFSQRGGSY
WFSQRGGSL

SEQ ID NO: 73329 - protein, 9 aa, synthetic construct
  source 1..9: note = Seed: WFSQRGGSY
WFSQRGGSM

SEQ ID NO: 73330 - protein, 10 aa, synthetic construct
  source 1..10: note = Seed: WLSYFIASFR
WFSYFIASFK

SEQ ID NO: 73331 - protein, 10 aa, synthetic construct
  source 1..10: note = Seed: WLSYFIASFR
WFSYFIASFR

SEQ ID NO: 73332 - protein, 10 aa, synthetic construct
  source 1..10: note = Seed: WFTALTQHGK
WFTALTQHGR

SEQ ID NO: 73333 - protein, 9 aa, synthetic construct
  source 1..9: note = Seed: WVYKQFDTY
WFYKQFDTY

SEQ ID NO: 73334 - protein, 10 aa, synthetic construct
  source 1..10: note = Seed: WDYPKCDRAM
WFYPKCDRAF

SEQ ID NO: 73335 - protein, 10 aa, synthetic construct
  source 1..10: note = Seed: WDYPKCDRAM
WFYPKCDRAL

SEQ ID NO: 73336 - protein, 10 aa, synthetic construct
  source 1..10: note = Seed: WDYPKCDRAM
WFYPKCDRAM

SEQ ID NO: 73337 - protein, 10 aa, synthetic construct
  source 1..10: note = Seed: WDYPKCDRAM
WFYPKCDRAY

SEQ ID NO: 73338 - protein, 10 aa, synthetic construct
  source 1..10: note = Seed: WRKAVFISPY
WGKAVFISPF

SEQ ID NO: 73339 - protein, 10 aa, synthetic construct
  source 1..10: note = Seed: WRKAVFISPY
WGKAVFISPY

SEQ ID NO: 73340 - protein, 10 aa, synthetic construct
  source 1..10: note = Seed: WFLAYILFTR
WGLAYILFTR

SEQ ID NO: 73341 - protein, 10 aa, synthetic construct
  source 1..10: note = Seed: WLLLTILTSL
WGLLTILTSI

SEQ ID NO: 73342 - protein, 10 aa, synthetic construct
  source 1..10: note = Seed: WLLLTILTSL
WGLLTILTSL

SEQ ID NO: 73343 - protein, 10 aa, synthetic construct
  source 1..10: note = Seed: WLLLTILTSL
WGLLTILTSV

SEQ ID NO: 73344 - protein, 9 aa, synthetic construct
  source 1..9: note = Seed: WLSYFIASF
WGSYFIASF

SEQ ID NO: 73345 - protein, 10 aa, synthetic construct
  source 1..10: note = Seed: WLSYFIASFR
WGSYFIASFK

SEQ ID NO: 73346 - protein, 10 aa, synthetic construct
  source 1..10: note = Seed: WLSYFIASFR
WGSYFIASFR

SEQ ID NO: 73347 - protein, 9 aa, synthetic construct
  source 1..9: note = Seed: WLSYFIASF
WGSYFIASY

SEQ ID NO: 73348 - protein, 10 aa, synthetic construct
  source 1..10: note = Seed: WFTALTQHGK
WGTALTQHGR

SEQ ID NO: 73349 - protein, 9 aa, synthetic construct
  source 1..9: note = Seed: WVYKQFDTY
WGYKQFDTY

SEQ ID NO: 73350 - protein, 10 aa, synthetic construct
  source 1..10: note = Seed: WAHGFELTSM
WHHGFELTSY

SEQ ID NO: 73351 - protein, 10 aa, synthetic construct
  source 1..10: note = Seed: WRKAVFISPY
WHKAVFISPF

SEQ ID NO: 73352 - protein, 10 aa, synthetic construct
  source 1..10: note = Seed: WRKAVFISPY
WHKAVFISPM

SEQ ID NO: 73353 - protein, 10 aa, synthetic construct
  source 1..10: note = Seed: WRKAVFISPY
WHKAVFISPY

SEQ ID NO: 73354 - protein, 10 aa, synthetic construct
  source 1..10: note = Seed: WFLAYILFTR
WHLAYILFTR

SEQ ID NO: 73355 - protein, 10 aa, synthetic construct
  source 1..10: note = Seed: WLLLTILTSL
WHLLTILTSI

SEQ ID NO: 73356 - protein, 10 aa, synthetic construct
  source 1..10: note = Seed: WLLLTILTSL
WHLLTILTSL

SEQ ID NO: 73357 - protein, 10 aa, synthetic construct
  source 1..10: note = Seed: WLLLTILTSL
WHLLTILTSV

SEQ ID NO: 73358 - protein, 10 aa, synthetic construct
  source 1..10: note = Seed: WLMWLIINLV
WHMWLIINLV

SEQ ID NO: 73359 - protein, 9 aa, synthetic construct
  source 1..9: note = Seed: WFSQRGGSY
WHSQRGGSF

SEQ ID NO: 73360 - protein, 9 aa, synthetic construct
  source 1..9: note = Seed: WFSQRGGSY
WHSQRGGSY

SEQ ID NO: 73361 - protein, 9 aa, synthetic construct
  source 1..9: note = Seed: WLSYFIASF
WHSYFIASF

SEQ ID NO: 73362 - protein, 10 aa, synthetic construct
  source 1..10: note = Seed: WLSYFIASFR
WHSYFIASFK

SEQ ID NO: 73363 - protein, 10 aa, synthetic construct
  source 1..10: note = Seed: WLSYFIASFR
WHSYFIASFR

SEQ ID NO: 73364 - protein, 9 aa, synthetic construct
  source 1..9: note = Seed: WLSYFIASF
WHSYFIASM

SEQ ID NO: 73365 - protein, 9 aa, synthetic construct
  source 1..9: note = Seed: WLSYFIASF
WHSYFIASY

SEQ ID NO: 73366 - protein, 10 aa, synthetic construct
  source 1..10: note = Seed: WFTALTQHGK
WHTALTQHGR

SEQ ID NO: 73367 - protein, 9 aa, synthetic construct
  source 1..9: note = Seed: WVYKQFDTY
WHYKQFDTF

SEQ ID NO: 73368 - protein, 9 aa, synthetic construct
  source 1..9: note = Seed: WVYKQFDTY
WHYKQFDTY

SEQ ID NO: 73369 - protein, 9 aa, synthetic construct
  source 1..9: note = Seed: WKYPQVNGL
WHYPQVNGF

SEQ ID NO: 73370 - protein, 9 aa, synthetic construct
  source 1..9: note = Seed: WKYPQVNGL
WHYPQVNGL

SEQ ID NO: 73371 - protein, 9 aa, synthetic construct
  source 1..9: note = Seed: WKYPQVNGL
WHYPQVNGY

SEQ ID NO: 73372 - protein, 10 aa, synthetic construct
  source 1..10: note = Seed: WTAFVTNVNA
WIAFVTNVNI

SEQ ID NO: 73373 - protein, 10 aa, synthetic construct
  source 1..10: note = Seed: WTAFVTNVNA
WIAFVTNVNV

SEQ ID NO: 73374 - protein, 10 aa, synthetic construct
  source 1..10: note = Seed: WIFGTTLDSK
WIFGTTLDSR

SEQ ID NO: 73375 - protein, 9 aa, synthetic construct
  source 1..9: note = Seed: WFFSNYLKR
WIFSNYLKK

SEQ ID NO: 73376 - protein, 9 aa, synthetic construct
  source 1..9: note = Seed: WFFSNYLKR
WIFSNYLKR

SEQ ID NO: 73377 - protein, 10 aa, synthetic construct
  source 1..10: note = Seed: WFFSNYLKRR
WIFSNYLKRR

SEQ ID NO: 73378 - protein, 10 aa, synthetic construct
  source 1..10: note = Seed: WAHGFELTSM
WIHGFELTSY

SEQ ID NO: 73379 - protein, 9 aa, synthetic construct
  source 1..9: note = Seed: WLIINLVQM
WIIINLVQV

SEQ ID NO: 73380 - protein, 10 aa, synthetic construct
  source 1..10: note = Seed: WRKAVFISPY
WIKAVFISPF

SEQ ID NO: 73381 - protein, 10 aa, synthetic construct
  source 1..10: note = Seed: WRKAVFISPY
WIKAVFISPY

SEQ ID NO: 73382 - protein, 9 aa, synthetic construct
  source 1..9: note = Seed: WAKRNIKPV
WIKRNIKPL

SEQ ID NO: 73383 - protein, 9 aa, synthetic construct
  source 1..9: note = Seed: WAKRNIKPV
WIKRNIKPM

SEQ ID NO: 73384 - protein, 10 aa, synthetic construct
  source 1..10: note = Seed: WFLAYILFTR
WILAYILFTK

SEQ ID NO: 73385 - protein, 10 aa, synthetic construct
  source 1..10: note = Seed: WFLAYILFTR
WILAYILFTR

SEQ ID NO: 73386 - protein, 10 aa, synthetic construct
  source 1..10: note = Seed: WLLLTILTSL
WILLTILTSI

SEQ ID NO: 73387 - protein, 10 aa, synthetic construct
  source 1..10: note = Seed: WLLLTILTSL
WILLTILTSL

SEQ ID NO: 73388 - protein, 10 aa, synthetic construct
  source 1..10: note = Seed: WLLLTILTSL
WILLTILTSV

SEQ ID NO: 73389 - protein, 9 aa, synthetic construct
  source 1..9: note = Seed: WLLLTILTS
WILLTILTV

SEQ ID NO: 73390 - protein, 9 aa, synthetic construct
  source 1..9: note = Seed: WVLNNDYYR
WILNNDYYK

SEQ ID NO: 73391 - protein, 9 aa, synthetic construct
  source 1..9: note = Seed: WVLNNDYYR
WILNNDYYR

SEQ ID NO: 73392 - protein, 10 aa, synthetic construct
  source 1..10: note = Seed: WVLNNDYYRS
WILNNDYYRR

SEQ ID NO: 73393 - protein, 9 aa, synthetic construct
  source 1..9: note = Seed: WLLWPVTLA
WILWPVTLI

SEQ ID NO: 73394 - protein, 9 aa, synthetic construct
  source 1..9: note = Seed: WLLWPVTLA
WILWPVTLL

SEQ ID NO: 73395 - protein, 9 aa, synthetic construct
  source 1..9: note = Seed: WLLWPVTLA
WILWPVTLV

SEQ ID NO: 73396 - protein, 9 aa, synthetic construct
  source 1..9: note = Seed: WVMRIMTWL
WIMRIMTWA

SEQ ID NO: 73397 - protein, 9 aa, synthetic construct
  source 1..9: note = Seed: WVMRIMTWL
WIMRIMTWI

SEQ ID NO: 73398 - protein, 9 aa, synthetic construct
  source 1..9: note = Seed: WVMRIMTWL
WIMRIMTWL

SEQ ID NO: 73399 - protein, 9 aa, synthetic construct
  source 1..9: note = Seed: WVMRIMTWL
WIMRIMTWV

SEQ ID NO: 73400 - protein, 9 aa, synthetic construct
  source 1..9: note = Seed: WLMWLIINL
WIMWLIINA

SEQ ID NO: 73401 - protein, 9 aa, synthetic construct
  source 1..9: note = Seed: WLMWLIINL
WIMWLIINI

SEQ ID NO: 73402 - protein, 9 aa, synthetic construct
  source 1..9: note = Seed: WLMWLIINL
WIMWLIINL

SEQ ID NO: 73403 - protein, 10 aa, synthetic construct
  source 1..10: note = Seed: WLMWLIINLV
WIMWLIINLL

SEQ ID NO: 73404 - protein, 10 aa, synthetic construct
  source 1..10: note = Seed: WLMWLIINLV
WIMWLIINLV

SEQ ID NO: 73405 - protein, 9 aa, synthetic construct
  source 1..9: note = Seed: WLMWLIINL
WIMWLIINM

SEQ ID NO: 73406 - protein, 9 aa, synthetic construct
  source 1..9: note = Seed: WLMWLIINL
WIMWLIINV

SEQ ID NO: 73407 - protein, 9 aa, synthetic construct
  source 1..9: note = Seed: WTNAGDYIL
WINAGDYIL

SEQ ID NO: 73408 - protein, 9 aa, synthetic construct
  source 1..9: note = Seed: WTNAGDYIL
WINAGDYIV

SEQ ID NO: 73409 - protein, 9 aa, synthetic construct
  source 1..9: note = Seed: WFSQRGGSY
WISQRGGSY

SEQ ID NO: 73410 - protein, 9 aa, synthetic construct
  source 1..9: note = Seed: WLSYFIASF
WISYFIASA

SEQ ID NO: 73411 - protein, 9 aa, synthetic construct
  source 1..9: note = Seed: WLSYFIASF
WISYFIASF

SEQ ID NO: 73412 - protein, 10 aa, synthetic construct
  source 1..10: note = Seed: WLSYFIASFR
WISYFIASFK

SEQ ID NO: 73413 - protein, 10 aa, synthetic construct
  source 1..10: note = Seed: WLSYFIASFR
WISYFIASFR

SEQ ID NO: 73414 - protein, 9 aa, synthetic construct
  source 1..9: note = Seed: WLSYFIASF
WISYFIASI

SEQ ID NO: 73415 - protein, 9 aa, synthetic construct
  source 1..9: note = Seed: WLSYFIASF
WISYFIASL

SEQ ID NO: 73416 - protein, 9 aa, synthetic construct
  source 1..9: note = Seed: WLSYFIASF
WISYFIASM

SEQ ID NO: 73417 - protein, 9 aa, synthetic construct
  source 1..9: note = Seed: WLSYFIASF
WISYFIASV

SEQ ID NO: 73418 - protein, 9 aa, synthetic construct
  source 1..9: note = Seed: WLSYFIASF
WISYFIASY

SEQ ID NO: 73419 - protein, 10 aa, synthetic construct
  source 1..10: note = Seed: WFTALTQHGK
WITALTQHGR

SEQ ID NO: 73420 - protein, 9 aa, synthetic construct
  source 1..9: note = Seed: WLYAAVING
WIYAAVINL

SEQ ID NO: 73421 - protein, 9 aa, synthetic construct
  source 1..9: note = Seed: WLYAAVING
WIYAAVINV

SEQ ID NO: 73422 - protein, 9 aa, synthetic construct
  source 1..9: note = Seed: WVYKQFDTY
WIYKQFDTF

SEQ ID NO: 73423 - protein, 9 aa, synthetic construct
  source 1..9: note = Seed: WVYKQFDTY
WIYKQFDTY

SEQ ID NO: 73424 - protein, 9 aa, synthetic construct
  source 1..9: note = Seed: WKYPQVNGL
WIYPQVNGF

SEQ ID NO: 73425 - protein, 10 aa, synthetic construct
  source 1..10: note = Seed: WAHGFELTSM
WKHGFELTSF

SEQ ID NO: 73426 - protein, 10 aa, synthetic construct
  source 1..10: note = Seed: WAHGFELTSM
WKHGFELTSM

SEQ ID NO: 73427 - protein, 10 aa, synthetic construct
  source 1..10: note = Seed: WAHGFELTSM
WKHGFELTSY

SEQ ID NO: 73428 - protein, 10 aa, synthetic construct
  source 1..10: note = Seed: WRKAVFISPY
WKKAVFISPF

SEQ ID NO: 73429 - protein, 10 aa, synthetic construct
  source 1..10: note = Seed: WRKAVFISPY
WKKAVFISPM

SEQ ID NO: 73430 - protein, 10 aa, synthetic construct
  source 1..10: note = Seed: WRKAVFISPY
WKKAVFISPY

SEQ ID NO: 73431 - protein, 10 aa, synthetic construct
  source 1..10: note = Seed: WFLAYILFTR
WKLAYILFTR

SEQ ID NO: 73432 - protein, 10 aa, synthetic construct
  source 1..10: note = Seed: WLLLTILTSL
WKLLTILTSI

SEQ ID NO: 73433 - protein, 10 aa, synthetic construct
  source 1..10: note = Seed: WLLLTILTSL
WKLLTILTSL

SEQ ID NO: 73434 - protein, 10 aa, synthetic construct
  source 1..10: note = Seed: WLLLTILTSL
WKLLTILTSV

SEQ ID NO: 73435 - protein, 10 aa, synthetic construct
  source 1..10: note = Seed: WLMWLIINLV
WKMWLIINLV

SEQ ID NO: 73436 - protein, 9 aa, synthetic construct
  source 1..9: note = Seed: WFSQRGGSY
WKSQRGGSF

SEQ ID NO: 73437 - protein, 9 aa, synthetic construct
  source 1..9: note = Seed: WFSQRGGSY
WKSQRGGSM

SEQ ID NO: 73438 - protein, 9 aa, synthetic construct
  source 1..9: note = Seed: WFSQRGGSY
WKSQRGGSY

SEQ ID NO: 73439 - protein, 9 aa, synthetic construct
  source 1..9: note = Seed: WLSYFIASF
WKSYFIASF

SEQ ID NO: 73440 - protein, 10 aa, synthetic construct
  source 1..10: note = Seed: WLSYFIASFR
WKSYFIASFK

SEQ ID NO: 73441 - protein, 10 aa, synthetic construct
  source 1..10: note = Seed: WLSYFIASFR
WKSYFIASFR

SEQ ID NO: 73442 - protein, 11 aa, synthetic construct
  source 1..11: note = Seed: WLSYFIASFRL
WKSYFIASFRF

SEQ ID NO: 73443 - protein, 9 aa, synthetic construct
  source 1..9: note = Seed: WLSYFIASF
WKSYFIASI

SEQ ID NO: 73444 - protein, 9 aa, synthetic construct
  source 1..9: note = Seed: WLSYFIASF
WKSYFIASL

SEQ ID NO: 73445 - protein, 9 aa, synthetic construct
  source 1..9: note = Seed: WLSYFIASF
WKSYFIASM

SEQ ID NO: 73446 - protein, 9 aa, synthetic construct
  source 1..9: note = Seed: WLSYFIASF
WKSYFIASY

SEQ ID NO: 73447 - protein, 10 aa, synthetic construct
  source 1..10: note = Seed: WFTALTQHGK
WKTALTQHGR

SEQ ID NO: 73448 - protein, 11 aa, synthetic construct
  source 1..11: note = Seed: WRVYSTGSNVF
WKVYSTGSNVF

SEQ ID NO: 73449 - protein, 11 aa, synthetic construct
  source 1..11: note = Seed: WRVYSTGSNVF
WKVYSTGSNVY

SEQ ID NO: 73450 - protein, 9 aa, synthetic construct
  source 1..9: note = Seed: WVYKQFDTY
WKYKQFDTF

SEQ ID NO: 73451 - protein, 9 aa, synthetic construct
  source 1..9: note = Seed: WVYKQFDTY
WKYKQFDTL

SEQ ID NO: 73452 - protein, 9 aa, synthetic construct
  source 1..9: note = Seed: WVYKQFDTY
WKYKQFDTM

SEQ ID NO: 73453 - protein, 9 aa, synthetic construct
  source 1..9: note = Seed: WVYKQFDTY
WKYKQFDTY

SEQ ID NO: 73454 - protein, 9 aa, synthetic construct
  source 1..9: note = Seed: WKYPQVNGL
WKYPQVNGF

SEQ ID NO: 73455 - protein, 9 aa, synthetic construct
  source 1..9: note = Seed: WKYPQVNGL
WKYPQVNGM

SEQ ID NO: 73456 - protein, 9 aa, synthetic construct
  source 1..9: note = Seed: WKYPQVNGL
WKYPQVNGY

SEQ ID NO: 73457 - protein, 9 aa, synthetic construct
  source 1..9: note = Seed: WICLLQFAY
WLCLLQFAY

SEQ ID NO: 73458 - protein, 10 aa, synthetic construct
  source 1..10: note = Seed: WIFGTTLDSK
WLFGTTLDSK

SEQ ID NO: 73459 - protein, 9 aa, synthetic construct
  source 1..9: note = Seed: WFFSNYLKR
WLFSNYLKR

SEQ ID NO: 73460 - protein, 10 aa, synthetic construct
  source 1..10: note = Seed: WAHGFELTSM
WLHGFELTSF

SEQ ID NO: 73461 - protein, 10 aa, synthetic construct
  source 1..10: note = Seed: WAHGFELTSM
WLHGFELTSY

SEQ ID NO: 73462 - protein, 9 aa, synthetic construct
  source 1..9: note = Seed: WLIINLVQM
WLIINLVQA

SEQ ID NO: 73463 - protein, 9 aa, synthetic construct
  source 1..9: note = Seed: WLIINLVQM
WLIINLVQI

SEQ ID NO: 73464 - protein, 9 aa, synthetic construct
  source 1..9: note = Seed: WLIINLVQM
WLIINLVQL

SEQ ID NO: 73465 - protein, 10 aa, synthetic construct
  source 1..10: note = Seed: WLIINLVQMA
WLIINLVQMI

SEQ ID NO: 73466 - protein, 10 aa, synthetic construct
  source 1..10: note = Seed: WLIINLVQMA
WLIINLVQML

SEQ ID NO: 73467 - protein, 10 aa, synthetic construct
  source 1..10: note = Seed: WLIINLVQMA
WLIINLVQMV

SEQ ID NO: 73468 - protein, 9 aa, synthetic construct
  source 1..9: note = Seed: WLIINLVQM
WLIINLVQV

SEQ ID NO: 73469 - protein, 10 aa, synthetic construct
  source 1..10: note = Seed: WRKAVFISPY
WLKAVFISPF

SEQ ID NO: 73470 - protein, 10 aa, synthetic construct
  source 1..10: note = Seed: WRKAVFISPY
WLKAVFISPY

SEQ ID NO: 73471 - protein, 10 aa, synthetic construct
  source 1..10: note = Seed: WLKQLIKVTL
WLKQLIKVTV

SEQ ID NO: 73472 - protein, 9 aa, synthetic construct
  source 1..9: note = Seed: WAKRNIKPV
WLKRNIKPF

SEQ ID NO: 73473 - protein, 9 aa, synthetic construct
  source 1..9: note = Seed: WAKRNIKPV
WLKRNIKPI

SEQ ID NO: 73474 - protein, 9 aa, synthetic construct
  source 1..9: note = Seed: WAKRNIKPV
WLKRNIKPL

SEQ ID NO: 73475 - protein, 9 aa, synthetic construct
  source 1..9: note = Seed: WAKRNIKPV
WLKRNIKPM

SEQ ID NO: 73476 - protein, 9 aa, synthetic construct
  source 1..9: note = Seed: WAKRNIKPV
WLKRNIKPV

SEQ ID NO: 73477 - protein, 10 aa, synthetic construct
  source 1..10: note = Seed: WFLAYILFTR
WLLAYILFTR

SEQ ID NO: 73478 - protein, 9 aa, synthetic construct
  source 1..9: note = Seed: WLLLTILTS
WLLLTILTA

SEQ ID NO: 73479 - protein, 9 aa, synthetic construct
  source 1..9: note = Seed: WLLLTILTS
WLLLTILTI

SEQ ID NO: 73480 - protein, 9 aa, synthetic construct
  source 1..9: note = Seed: WLLLTILTS
WLLLTILTL

SEQ ID NO: 73481 - protein, 9 aa, synthetic construct
  source 1..9: note = Seed: WLLLTILTS
WLLLTILTM

SEQ ID NO: 73482 - protein, 10 aa, synthetic construct
  source 1..10: note = Seed: WLLLTILTSL
WLLLTILTSI

SEQ ID NO: 73483 - protein, 10 aa, synthetic construct
  source 1..10: note = Seed: WLLLTILTSL
WLLLTILTSV

SEQ ID NO: 73484 - protein, 9 aa, synthetic construct
  source 1..9: note = Seed: WLLLTILTS
WLLLTILTV

SEQ ID NO: 73485 - protein, 9 aa, synthetic construct
  source 1..9: note = Seed: WVLNNDYYR
WLLNNDYYR

SEQ ID NO: 73486 - protein, 9 aa, synthetic construct
  source 1..9: note = Seed: WLLWPVTLA
WLLWPVTLI

SEQ ID NO: 73487 - protein, 9 aa, synthetic construct
  source 1..9: note = Seed: WLLWPVTLA
WLLWPVTLL

SEQ ID NO: 73488 - protein, 9 aa, synthetic construct
  source 1..9: note = Seed: WLLWPVTLA
WLLWPVTLM

SEQ ID NO: 73489 - protein, 9 aa, synthetic construct
  source 1..9: note = Seed: WLLWPVTLA
WLLWPVTLT

SEQ ID NO: 73490 - protein, 9 aa, synthetic construct
  source 1..9: note = Seed: WLLWPVTLA
WLLWPVTLV

SEQ ID NO: 73491 - protein, 8 aa, synthetic construct
  source 1..8: note = Seed: WLLWPVTL
WLLWPVTV

SEQ ID NO: 73492 - protein, 9 aa, synthetic construct
  source 1..9: note = Seed: WVMRIMTWL
WLMRIMTWA

SEQ ID NO: 73493 - protein, 9 aa, synthetic construct
  source 1..9: note = Seed: WVMRIMTWL
WLMRIMTWI

SEQ ID NO: 73494 - protein, 9 aa, synthetic construct
  source 1..9: note = Seed: WVMRIMTWL
WLMRIMTWL

SEQ ID NO: 73495 - protein, 9 aa, synthetic construct
  source 1..9: note = Seed: WVMRIMTWL
WLMRIMTWM

SEQ ID NO: 73496 - protein, 9 aa, synthetic construct
  source 1..9: note = Seed: WVMRIMTWL
WLMRIMTWT

SEQ ID NO: 73497 - protein, 9 aa, synthetic construct
  source 1..9: note = Seed: WVMRIMTWL
WLMRIMTWV

SEQ ID NO: 73498 - protein, 9 aa, synthetic construct
  source 1..9: note = Seed: WLMWLIINL
WLMWLIINA

SEQ ID NO: 73499 - protein, 9 aa, synthetic construct
  source 1..9: note = Seed: WLMWLIINL
WLMWLIINC

SEQ ID NO: 73500 - protein, 9 aa, synthetic construct
  source 1..9: note = Seed: WLMWLIINL
WLMWLIINI

SEQ ID NO: 73501 - protein, 10 aa, synthetic construct
  source 1..10: note = Seed: WLMWLIINLV
WLMWLIINLA

SEQ ID NO: 73502 - protein, 10 aa, synthetic construct
  source 1..10: note = Seed: WLMWLIINLV
WLMWLIINLI

SEQ ID NO: 73503 - protein, 10 aa, synthetic construct
  source 1..10: note = Seed: WLMWLIINLV
WLMWLIINLL

SEQ ID NO: 73504 - protein, 10 aa, synthetic construct
  source 1..10: note = Seed: WLMWLIINLV
WLMWLIINLM

SEQ ID NO: 73505 - protein, 11 aa, synthetic construct
  source 1..11: note = Seed: WLMWLIINLVQ
WLMWLIINLVL

SEQ ID NO: 73506 - protein, 11 aa, synthetic construct
  source 1..11: note = Seed: WLMWLIINLVQ
WLMWLIINLVV

SEQ ID NO: 73507 - protein, 9 aa, synthetic construct
  source 1..9: note = Seed: WLMWLIINL
WLMWLIINM

SEQ ID NO: 73508 - protein, 9 aa, synthetic construct
  source 1..9: note = Seed: WLMWLIINL
WLMWLIINS

SEQ ID NO: 73509 - protein, 9 aa, synthetic construct
  source 1..9: note = Seed: WLMWLIINL
WLMWLIINT

SEQ ID NO: 73510 - protein, 9 aa, synthetic construct
  source 1..9: note = Seed: WLMWLIINL
WLMWLIINV

SEQ ID NO: 73511 - protein, 9 aa, synthetic construct
  source 1..9: note = Seed: WTNAGDYIL
WLNAGDYIA

SEQ ID NO: 73512 - protein, 9 aa, synthetic construct
  source 1..9: note = Seed: WTNAGDYIL
WLNAGDYII

SEQ ID NO: 73513 - protein, 9 aa, synthetic construct
  source 1..9: note = Seed: WTNAGDYIL
WLNAGDYIL

SEQ ID NO: 73514 - protein, 9 aa, synthetic construct
  source 1..9: note = Seed: WTNAGDYIL
WLNAGDYIM

SEQ ID NO: 73515 - protein, 9 aa, synthetic construct
  source 1..9: note = Seed: WTNAGDYIL
WLNAGDYIV

SEQ ID NO: 73516 - protein, 9 aa, synthetic construct
  source 1..9: note = Seed: WLPTGTLLV
WLPTGTLLI

SEQ ID NO: 73517 - protein, 9 aa, synthetic construct
  source 1..9: note = Seed: WLPTGTLLV
WLPTGTLLL

SEQ ID NO: 73518 - protein, 9 aa, synthetic construct
  source 1..9: note = Seed: WFSQRGGSY
WLSQRGGSF

SEQ ID NO: 73519 - protein, 9 aa, synthetic construct
  source 1..9: note = Seed: WFSQRGGSY
WLSQRGGSY

SEQ ID NO: 73520 - protein, 9 aa, synthetic construct
  source 1..9: note = Seed: WLSYFIASF
WLSYFIASA

SEQ ID NO: 73521 - protein, 10 aa, synthetic construct
  source 1..10: note = Seed: WLSYFIASFR
WLSYFIASFK

SEQ ID NO: 73522 - protein, 11 aa, synthetic construct
  source 1..11: note = Seed: WLSYFIASFRL
WLSYFIASFRV

SEQ ID NO: 73523 - protein, 9 aa, synthetic construct
  source 1..9: note = Seed: WLSYFIASF
WLSYFIASI

SEQ ID NO: 73524 - protein, 9 aa, synthetic construct
  source 1..9: note = Seed: WLSYFIASF
WLSYFIASL

SEQ ID NO: 73525 - protein, 9 aa, synthetic construct
  source 1..9: note = Seed: WLSYFIASF
WLSYFIASM

SEQ ID NO: 73526 - protein, 9 aa, synthetic construct
  source 1..9: note = Seed: WLSYFIASF
WLSYFIASS

SEQ ID NO: 73527 - protein, 9 aa, synthetic construct
  source 1..9: note = Seed: WLSYFIASF
WLSYFIAST

SEQ ID NO: 73528 - protein, 9 aa, synthetic construct
  source 1..9: note = Seed: WLSYFIASF
WLSYFIASV

SEQ ID NO: 73529 - protein, 9 aa, synthetic construct
  source 1..9: note = Seed: WLSYFIASF
WLSYFIASY

SEQ ID NO: 73530 - protein, 10 aa, synthetic construct
  source 1..10: note = Seed: WFTALTQHGK
WLTALTQHGR

SEQ ID NO: 73531 - protein, 10 aa, synthetic construct
  source 1..10: note = Seed: WRVYSTGSNV
WLVYSTGSNI

SEQ ID NO: 73532 - protein, 10 aa, synthetic construct
  source 1..10: note = Seed: WRVYSTGSNV
WLVYSTGSNL

SEQ ID NO: 73533 - protein, 10 aa, synthetic construct
  source 1..10: note = Seed: WRVYSTGSNV
WLVYSTGSNV

SEQ ID NO: 73534 - protein, 11 aa, synthetic construct
  source 1..11: note = Seed: WRVYSTGSNVF
WLVYSTGSNVY

SEQ ID NO: 73535 - protein, 9 aa, synthetic construct
  source 1..9: note = Seed: WLYAAVING
WLYAAVINA

SEQ ID NO: 73536 - protein, 9 aa, synthetic construct
  source 1..9: note = Seed: WLYAAVING
WLYAAVINI

SEQ ID NO: 73537 - protein, 9 aa, synthetic construct
  source 1..9: note = Seed: WLYAAVING
WLYAAVINL

SEQ ID NO: 73538 - protein, 9 aa, synthetic construct
  source 1..9: note = Seed: WLYAAVING
WLYAAVINM

SEQ ID NO: 73539 - protein, 9 aa, synthetic construct
  source 1..9: note = Seed: WLYAAVING
WLYAAVINV

SEQ ID NO: 73540 - protein, 9 aa, synthetic construct
  source 1..9: note = Seed: WVYKQFDTY
WLYKQFDTF

SEQ ID NO: 73541 - protein, 9 aa, synthetic construct
  source 1..9: note = Seed: WVYKQFDTY
WLYKQFDTM

SEQ ID NO: 73542 - protein, 9 aa, synthetic construct
  source 1..9: note = Seed: WVYKQFDTY
WLYKQFDTY

SEQ ID NO: 73543 - protein, 9 aa, synthetic construct
  source 1..9: note = Seed: WKYPQVNGL
WLYPQVNGF

SEQ ID NO: 73544 - protein, 9 aa, synthetic construct
  source 1..9: note = Seed: WKYPQVNGL
WLYPQVNGY

SEQ ID NO: 73545 - protein, 9 aa, synthetic construct
  source 1..9: note = Seed: WICLLQFAY
WMCLLQFAY

SEQ ID NO: 73546 - protein, 10 aa, synthetic construct
  source 1..10: note = Seed: WLDDDSQQTV
WMDDDSQQTV

SEQ ID NO: 73547 - protein, 10 aa, synthetic construct
  source 1..10: note = Seed: WIFGTTLDSK
WMFGTTLDSK

SEQ ID NO: 73548 - protein, 10 aa, synthetic construct
  source 1..10: note = Seed: WIFGTTLDSK
WMFGTTLDSR

SEQ ID NO: 73549 - protein, 9 aa, synthetic construct
  source 1..9: note = Seed: WSFNPETNI
WMFNPETNW

SEQ ID NO: 73550 - protein, 9 aa, synthetic construct
  source 1..9: note = Seed: WFFSNYLKR
WMFSNYLKR

SEQ ID NO: 73551 - protein, 10 aa, synthetic construct
  source 1..10: note = Seed: WFFSNYLKRR
WMFSNYLKRR

SEQ ID NO: 73552 - protein, 8 aa, synthetic construct
  source 1..8: note = Seed: WFFSNYLK
WMFSNYLR

SEQ ID NO: 73553 - protein, 10 aa, synthetic construct
  source 1..10: note = Seed: WAHGFELTSM
WMHGFELTSF

SEQ ID NO: 73554 - protein, 10 aa, synthetic construct
  source 1..10: note = Seed: WAHGFELTSM
WMHGFELTSM

SEQ ID NO: 73555 - protein, 10 aa, synthetic construct
  source 1..10: note = Seed: WAHGFELTSM
WMHGFELTSY

SEQ ID NO: 73556 - protein, 9 aa, synthetic construct
  source 1..9: note = Seed: WLIINLVQM
WMIINLVQA

SEQ ID NO: 73557 - protein, 9 aa, synthetic construct
  source 1..9: note = Seed: WLIINLVQM
WMIINLVQF

SEQ ID NO: 73558 - protein, 9 aa, synthetic construct
  source 1..9: note = Seed: WLIINLVQM
WMIINLVQI

SEQ ID NO: 73559 - protein, 9 aa, synthetic construct
  source 1..9: note = Seed: WLIINLVQM
WMIINLVQL

SEQ ID NO: 73560 - protein, 9 aa, synthetic construct
  source 1..9: note = Seed: WLIINLVQM
WMIINLVQM

SEQ ID NO: 73561 - protein, 10 aa, synthetic construct
  source 1..10: note = Seed: WLIINLVQMA
WMIINLVQMI

SEQ ID NO: 73562 - protein, 10 aa, synthetic construct
  source 1..10: note = Seed: WLIINLVQMA
WMIINLVQML

SEQ ID NO: 73563 - protein, 10 aa, synthetic construct
  source 1..10: note = Seed: WLIINLVQMA
WMIINLVQMV

SEQ ID NO: 73564 - protein, 9 aa, synthetic construct
  source 1..9: note = Seed: WLIINLVQM
WMIINLVQV

SEQ ID NO: 73565 - protein, 9 aa, synthetic construct
  source 1..9: note = Seed: WLIINLVQM
WMIINLVQY

SEQ ID NO: 73566 - protein, 10 aa, synthetic construct
  source 1..10: note = Seed: WRKAVFISPY
WMKAVFISPF

SEQ ID NO: 73567 - protein, 10 aa, synthetic construct
  source 1..10: note = Seed: WRKAVFISPY
WMKAVFISPM

SEQ ID NO: 73568 - protein, 10 aa, synthetic construct
  source 1..10: note = Seed: WRKAVFISPY
WMKAVFISPY

SEQ ID NO: 73569 - protein, 10 aa, synthetic construct
  source 1..10: note = Seed: WLKQLIKVTL
WMKQLIKVTV

SEQ ID NO: 73570 - protein, 9 aa, synthetic construct
  source 1..9: note = Seed: WAKRNIKPV
WMKRNIKPA

SEQ ID NO: 73571 - protein, 9 aa, synthetic construct
  source 1..9: note = Seed: WAKRNIKPV
WMKRNIKPF

SEQ ID NO: 73572 - protein, 9 aa, synthetic construct
  source 1..9: note = Seed: WAKRNIKPV
WMKRNIKPI

SEQ ID NO: 73573 - protein, 9 aa, synthetic construct
  source 1..9: note = Seed: WAKRNIKPV
WMKRNIKPL

SEQ ID NO: 73574 - protein, 9 aa, synthetic construct
  source 1..9: note = Seed: WAKRNIKPV
WMKRNIKPM

SEQ ID NO: 73575 - protein, 9 aa, synthetic construct
  source 1..9: note = Seed: WAKRNIKPV
WMKRNIKPV

SEQ ID NO: 73576 - protein, 10 aa, synthetic construct
  source 1..10: note = Seed: WFLAYILFTR
WMLAYILFTR

SEQ ID NO: 73577 - protein, 11 aa, synthetic construct
  source 1..11: note = Seed: WALIISVTSNY
WMLIISVTSNY

SEQ ID NO: 73578 - protein, 9 aa, synthetic construct
  source 1..9: note = Seed: WLLLTILTS
WMLLTILTA

SEQ ID NO: 73579 - protein, 9 aa, synthetic construct
  source 1..9: note = Seed: WLLLTILTS
WMLLTILTI

SEQ ID NO: 73580 - protein, 9 aa, synthetic construct
  source 1..9: note = Seed: WLLLTILTS
WMLLTILTL

SEQ ID NO: 73581 - protein, 9 aa, synthetic construct
  source 1..9: note = Seed: WLLLTILTS
WMLLTILTM

SEQ ID NO: 73582 - protein, 10 aa, synthetic construct
  source 1..10: note = Seed: WLLLTILTSL
WMLLTILTSA

SEQ ID NO: 73583 - protein, 10 aa, synthetic construct
  source 1..10: note = Seed: WLLLTILTSL
WMLLTILTSI

SEQ ID NO: 73584 - protein, 10 aa, synthetic construct
  source 1..10: note = Seed: WLLLTILTSL
WMLLTILTSL

SEQ ID NO: 73585 - protein, 11 aa, synthetic construct
  source 1..11: note = Seed: WLLLTILTSLL
WMLLTILTSLV

SEQ ID NO: 73586 - protein, 10 aa, synthetic construct
  source 1..10: note = Seed: WLLLTILTSL
WMLLTILTSV

SEQ ID NO: 73587 - protein, 9 aa, synthetic construct
  source 1..9: note = Seed: WLLLTILTS
WMLLTILTT

SEQ ID NO: 73588 - protein, 9 aa, synthetic construct
  source 1..9: note = Seed: WLLLTILTS
WMLLTILTV

SEQ ID NO: 73589 - protein, 9 aa, synthetic construct
  source 1..9: note = Seed: WVLNNDYYR
WMLNNDYYK

SEQ ID NO: 73590 - protein, 9 aa, synthetic construct
  source 1..9: note = Seed: WVLNNDYYR
WMLNNDYYR

SEQ ID NO: 73591 - protein, 9 aa, synthetic construct
  source 1..9: note = Seed: WLLWPVTLA
WMLWPVTLA

SEQ ID NO: 73592 - protein, 9 aa, synthetic construct
  source 1..9: note = Seed: WLLWPVTLA
WMLWPVTLI

SEQ ID NO: 73593 - protein, 9 aa, synthetic construct
  source 1..9: note = Seed: WLLWPVTLA
WMLWPVTLL

SEQ ID NO: 73594 - protein, 9 aa, synthetic construct
  source 1..9: note = Seed: WLLWPVTLA
WMLWPVTLM

SEQ ID NO: 73595 - protein, 9 aa, synthetic construct
  source 1..9: note = Seed: WLLWPVTLA
WMLWPVTLT

SEQ ID NO: 73596 - protein, 9 aa, synthetic construct
  source 1..9: note = Seed: WLLWPVTLA
WMLWPVTLV

SEQ ID NO: 73597 - protein, 8 aa, synthetic construct
  source 1..8: note = Seed: WLLWPVTL
WMLWPVTV

SEQ ID NO: 73598 - protein, 9 aa, synthetic construct
  source 1..9: note = Seed: WVMRIMTWL
WMMRIMTWA

SEQ ID NO: 73599 - protein, 9 aa, synthetic construct
  source 1..9: note = Seed: WVMRIMTWL
WMMRIMTWI

SEQ ID NO: 73600 - protein, 9 aa, synthetic construct
  source 1..9: note = Seed: WVMRIMTWL
WMMRIMTWL

SEQ ID NO: 73601 - protein, 9 aa, synthetic construct
  source 1..9: note = Seed: WVMRIMTWL
WMMRIMTWM

SEQ ID NO: 73602 - protein, 9 aa, synthetic construct
  source 1..9: note = Seed: WVMRIMTWL
WMMRIMTWT

SEQ ID NO: 73603 - protein, 9 aa, synthetic construct
  source 1..9: note = Seed: WVMRIMTWL
WMMRIMTWV

SEQ ID NO: 73604 - protein, 9 aa, synthetic construct
  source 1..9: note = Seed: WLMWLIINL
WMMWLIINA

SEQ ID NO: 73605 - protein, 9 aa, synthetic construct
  source 1..9: note = Seed: WLMWLIINL
WMMWLIINC

SEQ ID NO: 73606 - protein, 9 aa, synthetic construct
  source 1..9: note = Seed: WLMWLIINL
WMMWLIINI

SEQ ID NO: 73607 - protein, 9 aa, synthetic construct
  source 1..9: note = Seed: WLMWLIINL
WMMWLIINL

SEQ ID NO: 73608 - protein, 10 aa, synthetic construct
  source 1..10: note = Seed: WLMWLIINLV
WMMWLIINLA

SEQ ID NO: 73609 - protein, 10 aa, synthetic construct
  source 1..10: note = Seed: WLMWLIINLV
WMMWLIINLI

SEQ ID NO: 73610 - protein, 10 aa, synthetic construct
  source 1..10: note = Seed: WLMWLIINLV
WMMWLIINLL

SEQ ID NO: 73611 - protein, 10 aa, synthetic construct
  source 1..10: note = Seed: WLMWLIINLV
WMMWLIINLM

SEQ ID NO: 73612 - protein, 10 aa, synthetic construct
  source 1..10: note = Seed: WLMWLIINLV
WMMWLIINLV

SEQ ID NO: 73613 - protein, 11 aa, synthetic construct
  source 1..11: note = Seed: WLMWLIINLVQ
WMMWLIINLVL

SEQ ID NO: 73614 - protein, 11 aa, synthetic construct
  source 1..11: note = Seed: WLMWLIINLVQ
WMMWLIINLVV

SEQ ID NO: 73615 - protein, 9 aa, synthetic construct
  source 1..9: note = Seed: WLMWLIINL
WMMWLIINM

SEQ ID NO: 73616 - protein, 9 aa, synthetic construct
  source 1..9: note = Seed: WLMWLIINL
WMMWLIINS

SEQ ID NO: 73617 - protein, 9 aa, synthetic construct
  source 1..9: note = Seed: WLMWLIINL
WMMWLIINT

SEQ ID NO: 73618 - protein, 9 aa, synthetic construct
  source 1..9: note = Seed: WLMWLIINL
WMMWLIINV

SEQ ID NO: 73619 - protein, 9 aa, synthetic construct
  source 1..9: note = Seed: WTNAGDYIL
WMNAGDYIA

SEQ ID NO: 73620 - protein, 9 aa, synthetic construct
  source 1..9: note = Seed: WTNAGDYIL
WMNAGDYII

SEQ ID NO: 73621 - protein, 9 aa, synthetic construct
  source 1..9: note = Seed: WTNAGDYIL
WMNAGDYIL

SEQ ID NO: 73622 - protein, 9 aa, synthetic construct
  source 1..9: note = Seed: WTNAGDYIL
WMNAGDYIM

SEQ ID NO: 73623 - protein, 9 aa, synthetic construct
  source 1..9: note = Seed: WTNAGDYIL
WMNAGDYIV

SEQ ID NO: 73624 - protein, 9 aa, synthetic construct
  source 1..9: note = Seed: WLPTGTLLV
WMPTGTLLI

SEQ ID NO: 73625 - protein, 9 aa, synthetic construct
  source 1..9: note = Seed: WLPTGTLLV
WMPTGTLLL

SEQ ID NO: 73626 - protein, 9 aa, synthetic construct
  source 1..9: note = Seed: WLPTGTLLV
WMPTGTLLV

SEQ ID NO: 73627 - protein, 9 aa, synthetic construct
  source 1..9: note = Seed: WFSQRGGSY
WMSQRGGSF

SEQ ID NO: 73628 - protein, 9 aa, synthetic construct
  source 1..9: note = Seed: WFSQRGGSY
WMSQRGGSM

SEQ ID NO: 73629 - protein, 9 aa, synthetic construct
  source 1..9: note = Seed: WFSQRGGSY
WMSQRGGSY

SEQ ID NO: 73630 - protein, 9 aa, synthetic construct
  source 1..9: note = Seed: WLSYFIASF
WMSYFIASA

SEQ ID NO: 73631 - protein, 9 aa, synthetic construct
  source 1..9: note = Seed: WLSYFIASF
WMSYFIASF

SEQ ID NO: 73632 - protein, 10 aa, synthetic construct
  source 1..10: note = Seed: WLSYFIASFR
WMSYFIASFK

SEQ ID NO: 73633 - protein, 10 aa, synthetic construct
  source 1..10: note = Seed: WLSYFIASFR
WMSYFIASFR

SEQ ID NO: 73634 - protein, 11 aa, synthetic construct
  source 1..11: note = Seed: WLSYFIASFRL
WMSYFIASFRL

SEQ ID NO: 73635 - protein, 11 aa, synthetic construct
  source 1..11: note = Seed: WLSYFIASFRL
WMSYFIASFRV

SEQ ID NO: 73636 - protein, 9 aa, synthetic construct
  source 1..9: note = Seed: WLSYFIASF
WMSYFIASI

SEQ ID NO: 73637 - protein, 9 aa, synthetic construct
  source 1..9: note = Seed: WLSYFIASF
WMSYFIASL

SEQ ID NO: 73638 - protein, 9 aa, synthetic construct
  source 1..9: note = Seed: WLSYFIASF
WMSYFIASM

SEQ ID NO: 73639 - protein, 9 aa, synthetic construct
  source 1..9: note = Seed: WLSYFIASF
WMSYFIASS

SEQ ID NO: 73640 - protein, 9 aa, synthetic construct
  source 1..9: note = Seed: WLSYFIASF
WMSYFIAST

SEQ ID NO: 73641 - protein, 9 aa, synthetic construct
  source 1..9: note = Seed: WLSYFIASF
WMSYFIASV

SEQ ID NO: 73642 - protein, 9 aa, synthetic construct
  source 1..9: note = Seed: WLSYFIASF
WMSYFIASW

SEQ ID NO: 73643 - protein, 9 aa, synthetic construct
  source 1..9: note = Seed: WLSYFIASF
WMSYFIASY

SEQ ID NO: 73644 - protein, 10 aa, synthetic construct
  source 1..10: note = Seed: WFTALTQHGK
WMTALTQHGK

SEQ ID NO: 73645 - protein, 10 aa, synthetic construct
  source 1..10: note = Seed: WFTALTQHGK
WMTALTQHGR

SEQ ID NO: 73646 - protein, 10 aa, synthetic construct
  source 1..10: note = Seed: WRVYSTGSNV
WMVYSTGSNI

SEQ ID NO: 73647 - protein, 10 aa, synthetic construct
  source 1..10: note = Seed: WRVYSTGSNV
WMVYSTGSNL

SEQ ID NO: 73648 - protein, 10 aa, synthetic construct
  source 1..10: note = Seed: WRVYSTGSNV
WMVYSTGSNV

SEQ ID NO: 73649 - protein, 11 aa, synthetic construct
  source 1..11: note = Seed: WRVYSTGSNVF
WMVYSTGSNVF

SEQ ID NO: 73650 - protein, 11 aa, synthetic construct
  source 1..11: note = Seed: WRVYSTGSNVF
WMVYSTGSNVY

SEQ ID NO: 73651 - protein, 9 aa, synthetic construct
  source 1..9: note = Seed: WLYAAVING
WMYAAVINA

SEQ ID NO: 73652 - protein, 9 aa, synthetic construct
  source 1..9: note = Seed: WLYAAVING
WMYAAVINI

SEQ ID NO: 73653 - protein, 9 aa, synthetic construct
  source 1..9: note = Seed: WLYAAVING
WMYAAVINL

SEQ ID NO: 73654 - protein, 9 aa, synthetic construct
  source 1..9: note = Seed: WLYAAVING
WMYAAVINM

SEQ ID NO: 73655 - protein, 9 aa, synthetic construct
  source 1..9: note = Seed: WLYAAVING
WMYAAVINV

SEQ ID NO: 73656 - protein, 9 aa, synthetic construct
  source 1..9: note = Seed: WVYKQFDTY
WMYKQFDTF

SEQ ID NO: 73657 - protein, 9 aa, synthetic construct
  source 1..9: note = Seed: WVYKQFDTY
WMYKQFDTI

SEQ ID NO: 73658 - protein, 9 aa, synthetic construct
  source 1..9: note = Seed: WVYKQFDTY
WMYKQFDTL

SEQ ID NO: 73659 - protein, 9 aa, synthetic construct
  source 1..9: note = Seed: WVYKQFDTY
WMYKQFDTM

SEQ ID NO: 73660 - protein, 9 aa, synthetic construct
  source 1..9: note = Seed: WVYKQFDTY
WMYKQFDTW

SEQ ID NO: 73661 - protein, 9 aa, synthetic construct
  source 1..9: note = Seed: WVYKQFDTY
WMYKQFDTY

SEQ ID NO: 73662 - protein, 9 aa, synthetic construct
  source 1..9: note = Seed: WKYPQVNGL
WMYPQVNGF

SEQ ID NO: 73663 - protein, 9 aa, synthetic construct
  source 1..9: note = Seed: WKYPQVNGL
WMYPQVNGL

SEQ ID NO: 73664 - protein, 9 aa, synthetic construct
  source 1..9: note = Seed: WKYPQVNGL
WMYPQVNGM

SEQ ID NO: 73665 - protein, 9 aa, synthetic construct
  source 1..9: note = Seed: WKYPQVNGL
WMYPQVNGY

SEQ ID NO: 73666 - protein, 10 aa, synthetic construct
  source 1..10: note = Seed: WRKAVFISPY
WNKAVFISPF

SEQ ID NO: 73667 - protein, 10 aa, synthetic construct
  source 1..10: note = Seed: WRKAVFISPY
WNKAVFISPY

SEQ ID NO: 73668 - protein, 10 aa, synthetic construct
  source 1..10: note = Seed: WFLAYILFTR
WNLAYILFTR

SEQ ID NO: 73669 - protein, 10 aa, synthetic construct
  source 1..10: note = Seed: WLLLTILTSL
WNLLTILTSI

SEQ ID NO: 73670 - protein, 10 aa, synthetic construct
  source 1..10: note = Seed: WLLLTILTSL
WNLLTILTSL

SEQ ID NO: 73671 - protein, 10 aa, synthetic construct
  source 1..10: note = Seed: WLLLTILTSL
WNLLTILTSV

SEQ ID NO: 73672 - protein, 9 aa, synthetic construct
  source 1..9: note = Seed: WLSYFIASF
WNSYFIASF

SEQ ID NO: 73673 - protein, 10 aa, synthetic construct
  source 1..10: note = Seed: WLSYFIASFR
WNSYFIASFK

SEQ ID NO: 73674 - protein, 10 aa, synthetic construct
  source 1..10: note = Seed: WLSYFIASFR
WNSYFIASFR

SEQ ID NO: 73675 - protein, 9 aa, synthetic construct
  source 1..9: note = Seed: WLSYFIASF
WNSYFIASY

SEQ ID NO: 73676 - protein, 10 aa, synthetic construct
  source 1..10: note = Seed: WFTALTQHGK
WNTALTQHGR

SEQ ID NO: 73677 - protein, 9 aa, synthetic construct
  source 1..9: note = Seed: WVYKQFDTY
WNYKQFDTY

SEQ ID NO: 73678 - protein, 9 aa, synthetic construct
  source 1..9: note = Seed: WICLLQFAY
WPCLLQFAF

SEQ ID NO: 73679 - protein, 9 aa, synthetic construct
  source 1..9: note = Seed: WICLLQFAY
WPCLLQFAL

SEQ ID NO: 73680 - protein, 9 aa, synthetic construct
  source 1..9: note = Seed: WICLLQFAY
WPCLLQFAM

SEQ ID NO: 73681 - protein, 9 aa, synthetic construct
  source 1..9: note = Seed: WICLLQFAY
WPCLLQFAY

SEQ ID NO: 73682 - protein, 10 aa, synthetic construct
  source 1..10: note = Seed: WAHGFELTSM
WPHGFELTSF

SEQ ID NO: 73683 - protein, 10 aa, synthetic construct
  source 1..10: note = Seed: WAHGFELTSM
WPHGFELTSM

SEQ ID NO: 73684 - protein, 10 aa, synthetic construct
  source 1..10: note = Seed: WAHGFELTSM
WPHGFELTSY

SEQ ID NO: 73685 - protein, 10 aa, synthetic construct
  source 1..10: note = Seed: WRKAVFISPY
WPKAVFISPF

SEQ ID NO: 73686 - protein, 10 aa, synthetic construct
  source 1..10: note = Seed: WRKAVFISPY
WPKAVFISPY

SEQ ID NO: 73687 - protein, 9 aa, synthetic construct
  source 1..9: note = Seed: WAKRNIKPV
WPKRNIKPF

SEQ ID NO: 73688 - protein, 9 aa, synthetic construct
  source 1..9: note = Seed: WAKRNIKPV
WPKRNIKPI

SEQ ID NO: 73689 - protein, 9 aa, synthetic construct
  source 1..9: note = Seed: WAKRNIKPV
WPKRNIKPL

SEQ ID NO: 73690 - protein, 9 aa, synthetic construct
  source 1..9: note = Seed: WAKRNIKPV
WPKRNIKPM

SEQ ID NO: 73691 - protein, 9 aa, synthetic construct
  source 1..9: note = Seed: WAKRNIKPV
WPKRNIKPV

SEQ ID NO: 73692 - protein, 10 aa, synthetic construct
  source 1..10: note = Seed: WFLAYILFTR
WPLAYILFTR

SEQ ID NO: 73693 - protein, 10 aa, synthetic construct
  source 1..10: note = Seed: WLLLTILTSL
WPLLTILTSI

SEQ ID NO: 73694 - protein, 10 aa, synthetic construct
  source 1..10: note = Seed: WLLLTILTSL
WPLLTILTSL

SEQ ID NO: 73695 - protein, 10 aa, synthetic construct
  source 1..10: note = Seed: WLLLTILTSL
WPLLTILTSV

SEQ ID NO: 73696 - protein, 9 aa, synthetic construct
  source 1..9: note = Seed: WTNAGDYIL
WPNAGDYIF

SEQ ID NO: 73697 - protein, 9 aa, synthetic construct
  source 1..9: note = Seed: WTNAGDYIL
WPNAGDYII

SEQ ID NO: 73698 - protein, 9 aa, synthetic construct
  source 1..9: note = Seed: WTNAGDYIL
WPNAGDYIL

SEQ ID NO: 73699 - protein, 9 aa, synthetic construct
  source 1..9: note = Seed: WTNAGDYIL
WPNAGDYIM

SEQ ID NO: 73700 - protein, 9 aa, synthetic construct
  source 1..9: note = Seed: WTNAGDYIL
WPNAGDYIV

SEQ ID NO: 73701 - protein, 9 aa, synthetic construct
  source 1..9: note = Seed: WPQIAQFAP
WPQIAQFAA

SEQ ID NO: 73702 - protein, 9 aa, synthetic construct
  source 1..9: note = Seed: WPQIAQFAP
WPQIAQFAF

SEQ ID NO: 73703 - protein, 9 aa, synthetic construct
  source 1..9: note = Seed: WPQIAQFAP
WPQIAQFAI

SEQ ID NO: 73704 - protein, 9 aa, synthetic construct
  source 1..9: note = Seed: WPQIAQFAP
WPQIAQFAL

SEQ ID NO: 73705 - protein, 9 aa, synthetic construct
  source 1..9: note = Seed: WPQIAQFAP
WPQIAQFAM

SEQ ID NO: 73706 - protein, 10 aa, synthetic construct
  source 1..10: note = Seed: WPQIAQFAPS
WPQIAQFAPA

SEQ ID NO: 73707 - protein, 10 aa, synthetic construct
  source 1..10: note = Seed: WPQIAQFAPS
WPQIAQFAPF

SEQ ID NO: 73708 - protein, 10 aa, synthetic construct
  source 1..10: note = Seed: WPQIAQFAPS
WPQIAQFAPI

SEQ ID NO: 73709 - protein, 10 aa, synthetic construct
  source 1..10: note = Seed: WPQIAQFAPS
WPQIAQFAPL

SEQ ID NO: 73710 - protein, 10 aa, synthetic construct
  source 1..10: note = Seed: WPQIAQFAPS
WPQIAQFAPM

SEQ ID NO: 73711 - protein, 10 aa, synthetic construct
  source 1..10: note = Seed: WPQIAQFAPS
WPQIAQFAPV

SEQ ID NO: 73712 - protein, 9 aa, synthetic construct
  source 1..9: note = Seed: WPQIAQFAP
WPQIAQFAV

SEQ ID NO: 73713 - protein, 9 aa, synthetic construct
  source 1..9: note = Seed: WLSYFIASF
WPSYFIASA

SEQ ID NO: 73714 - protein, 9 aa, synthetic construct
  source 1..9: note = Seed: WLSYFIASF
WPSYFIASF

SEQ ID NO: 73715 - protein, 10 aa, synthetic construct
  source 1..10: note = Seed: WLSYFIASFR
WPSYFIASFK

SEQ ID NO: 73716 - protein, 10 aa, synthetic construct
  source 1..10: note = Seed: WLSYFIASFR
WPSYFIASFR

SEQ ID NO: 73717 - protein, 9 aa, synthetic construct
  source 1..9: note = Seed: WLSYFIASF
WPSYFIASH

SEQ ID NO: 73718 - protein, 9 aa, synthetic construct
  source 1..9: note = Seed: WLSYFIASF
WPSYFIASI

SEQ ID NO: 73719 - protein, 9 aa, synthetic construct
  source 1..9: note = Seed: WLSYFIASF
WPSYFIASL

SEQ ID NO: 73720 - protein, 9 aa, synthetic construct
  source 1..9: note = Seed: WLSYFIASF
WPSYFIASM

SEQ ID NO: 73721 - protein, 9 aa, synthetic construct
  source 1..9: note = Seed: WLSYFIASF
WPSYFIASV

SEQ ID NO: 73722 - protein, 9 aa, synthetic construct
  source 1..9: note = Seed: WLSYFIASF
WPSYFIASW

SEQ ID NO: 73723 - protein, 9 aa, synthetic construct
  source 1..9: note = Seed: WLSYFIASF
WPSYFIASY

SEQ ID NO: 73724 - protein, 10 aa, synthetic construct
  source 1..10: note = Seed: WFTALTQHGK
WPTALTQHGR

SEQ ID NO: 73725 - protein, 9 aa, synthetic construct
  source 1..9: note = Seed: WVYKQFDTY
WPYKQFDTF

SEQ ID NO: 73726 - protein, 9 aa, synthetic construct
  source 1..9: note = Seed: WVYKQFDTY
WPYKQFDTH

SEQ ID NO: 73727 - protein, 9 aa, synthetic construct
  source 1..9: note = Seed: WVYKQFDTY
WPYKQFDTL

SEQ ID NO: 73728 - protein, 9 aa, synthetic construct
  source 1..9: note = Seed: WVYKQFDTY
WPYKQFDTM

SEQ ID NO: 73729 - protein, 9 aa, synthetic construct
  source 1..9: note = Seed: WVYKQFDTY
WPYKQFDTY

SEQ ID NO: 73730 - protein, 9 aa, synthetic construct
  source 1..9: note = Seed: WICLLQFAY
WQCLLQFAF

SEQ ID NO: 73731 - protein, 9 aa, synthetic construct
  source 1..9: note = Seed: WICLLQFAY
WQCLLQFAY

SEQ ID NO: 73732 - protein, 10 aa, synthetic construct
  source 1..10: note = Seed: WAHGFELTSM
WQHGFELTSF

SEQ ID NO: 73733 - protein, 10 aa, synthetic construct
  source 1..10: note = Seed: WAHGFELTSM
WQHGFELTSL

SEQ ID NO: 73734 - protein, 10 aa, synthetic construct
  source 1..10: note = Seed: WAHGFELTSM
WQHGFELTSM

SEQ ID NO: 73735 - protein, 10 aa, synthetic construct
  source 1..10: note = Seed: WAHGFELTSM
WQHGFELTSY

SEQ ID NO: 73736 - protein, 9 aa, synthetic construct
  source 1..9: note = Seed: WLIINLVQM
WQIINLVQA

SEQ ID NO: 73737 - protein, 9 aa, synthetic construct
  source 1..9: note = Seed: WLIINLVQM
WQIINLVQF

SEQ ID NO: 73738 - protein, 9 aa, synthetic construct
  source 1..9: note = Seed: WLIINLVQM
WQIINLVQI

SEQ ID NO: 73739 - protein, 9 aa, synthetic construct
  source 1..9: note = Seed: WLIINLVQM
WQIINLVQL

SEQ ID NO: 73740 - protein, 10 aa, synthetic construct
  source 1..10: note = Seed: WLIINLVQMA
WQIINLVQMV

SEQ ID NO: 73741 - protein, 9 aa, synthetic construct
  source 1..9: note = Seed: WLIINLVQM
WQIINLVQV

SEQ ID NO: 73742 - protein, 9 aa, synthetic construct
  source 1..9: note = Seed: WLIINLVQM
WQIINLVQY

SEQ ID NO: 73743 - protein, 10 aa, synthetic construct
  source 1..10: note = Seed: WRKAVFISPY
WQKAVFISPF

SEQ ID NO: 73744 - protein, 10 aa, synthetic construct
  source 1..10: note = Seed: WRKAVFISPY
WQKAVFISPL

SEQ ID NO: 73745 - protein, 10 aa, synthetic construct
  source 1..10: note = Seed: WRKAVFISPY
WQKAVFISPM

SEQ ID NO: 73746 - protein, 10 aa, synthetic construct
  source 1..10: note = Seed: WRKAVFISPY
WQKAVFISPY

SEQ ID NO: 73747 - protein, 10 aa, synthetic construct
  source 1..10: note = Seed: WFLAYILFTR
WQLAYILFTR

SEQ ID NO: 73748 - protein, 11 aa, synthetic construct
  source 1..11: note = Seed: WALIISVTSNY
WQLIISVTSNY

SEQ ID NO: 73749 - protein, 10 aa, synthetic construct
  source 1..10: note = Seed: WLLLTILTSL
WQLLTILTSI

SEQ ID NO: 73750 - protein, 10 aa, synthetic construct
  source 1..10: note = Seed: WLLLTILTSL
WQLLTILTSL

SEQ ID NO: 73751 - protein, 10 aa, synthetic construct
  source 1..10: note = Seed: WLLLTILTSL
WQLLTILTSV

SEQ ID NO: 73752 - protein, 9 aa, synthetic construct
  source 1..9: note = Seed: WLLLTILTS
WQLLTILTV

SEQ ID NO: 73753 - protein, 9 aa, synthetic construct
  source 1..9: note = Seed: WVLNNDYYR
WQLNNDYYR

SEQ ID NO: 73754 - protein, 9 aa, synthetic construct
  source 1..9: note = Seed: WLLWPVTLA
WQLWPVTLA

SEQ ID NO: 73755 - protein, 9 aa, synthetic construct
  source 1..9: note = Seed: WLLWPVTLA
WQLWPVTLI

SEQ ID NO: 73756 - protein, 9 aa, synthetic construct
  source 1..9: note = Seed: WLLWPVTLA
WQLWPVTLL

SEQ ID NO: 73757 - protein, 9 aa, synthetic construct
  source 1..9: note = Seed: WLLWPVTLA
WQLWPVTLM

SEQ ID NO: 73758 - protein, 9 aa, synthetic construct
  source 1..9: note = Seed: WLLWPVTLA
WQLWPVTLV

SEQ ID NO: 73759 - protein, 9 aa, synthetic construct
  source 1..9: note = Seed: WVMRIMTWL
WQMRIMTWA

SEQ ID NO: 73760 - protein, 9 aa, synthetic construct
  source 1..9: note = Seed: WVMRIMTWL
WQMRIMTWI

SEQ ID NO: 73761 - protein, 9 aa, synthetic construct
  source 1..9: note = Seed: WVMRIMTWL
WQMRIMTWL

SEQ ID NO: 73762 - protein, 9 aa, synthetic construct
  source 1..9: note = Seed: WVMRIMTWL
WQMRIMTWM

SEQ ID NO: 73763 - protein, 9 aa, synthetic construct
  source 1..9: note = Seed: WVMRIMTWL
WQMRIMTWV

SEQ ID NO: 73764 - protein, 9 aa, synthetic construct
  source 1..9: note = Seed: WLMWLIINL
WQMWLIINA

SEQ ID NO: 73765 - protein, 9 aa, synthetic construct
  source 1..9: note = Seed: WLMWLIINL
WQMWLIINI

SEQ ID NO: 73766 - protein, 9 aa, synthetic construct
  source 1..9: note = Seed: WLMWLIINL
WQMWLIINL

SEQ ID NO: 73767 - protein, 10 aa, synthetic construct
  source 1..10: note = Seed: WLMWLIINLV
WQMWLIINLI

SEQ ID NO: 73768 - protein, 10 aa, synthetic construct
  source 1..10: note = Seed: WLMWLIINLV
WQMWLIINLL

SEQ ID NO: 73769 - protein, 10 aa, synthetic construct
  source 1..10: note = Seed: WLMWLIINLV
WQMWLIINLV

SEQ ID NO: 73770 - protein, 9 aa, synthetic construct
  source 1..9: note = Seed: WLMWLIINL
WQMWLIINM

SEQ ID NO: 73771 - protein, 9 aa, synthetic construct
  source 1..9: note = Seed: WLMWLIINL
WQMWLIINT

SEQ ID NO: 73772 - protein, 9 aa, synthetic construct
  source 1..9: note = Seed: WLMWLIINL
WQMWLIINV

SEQ ID NO: 73773 - protein, 9 aa, synthetic construct
  source 1..9: note = Seed: WTNAGDYIL
WQNAGDYIL

SEQ ID NO: 73774 - protein, 9 aa, synthetic construct
  source 1..9: note = Seed: WTNAGDYIL
WQNAGDYIV

SEQ ID NO: 73775 - protein, 9 aa, synthetic construct
  source 1..9: note = Seed: WFSQRGGSY
WQSQRGGSF

SEQ ID NO: 73776 - protein, 9 aa, synthetic construct
  source 1..9: note = Seed: WFSQRGGSY
WQSQRGGSL

SEQ ID NO: 73777 - protein, 9 aa, synthetic construct
  source 1..9: note = Seed: WFSQRGGSY
WQSQRGGSM

SEQ ID NO: 73778 - protein, 9 aa, synthetic construct
  source 1..9: note = Seed: WFSQRGGSY
WQSQRGGSY

SEQ ID NO: 73779 - protein, 9 aa, synthetic construct
  source 1..9: note = Seed: WLSYFIASF
WQSYFIASA

SEQ ID NO: 73780 - protein, 9 aa, synthetic construct
  source 1..9: note = Seed: WLSYFIASF
WQSYFIASF

SEQ ID NO: 73781 - protein, 10 aa, synthetic construct
  source 1..10: note = Seed: WLSYFIASFR
WQSYFIASFK

SEQ ID NO: 73782 - protein, 10 aa, synthetic construct
  source 1..10: note = Seed: WLSYFIASFR
WQSYFIASFR

SEQ ID NO: 73783 - protein, 9 aa, synthetic construct
  source 1..9: note = Seed: WLSYFIASF
WQSYFIASH

SEQ ID NO: 73784 - protein, 9 aa, synthetic construct
  source 1..9: note = Seed: WLSYFIASF
WQSYFIASI

SEQ ID NO: 73785 - protein, 9 aa, synthetic construct
  source 1..9: note = Seed: WLSYFIASF
WQSYFIASL

SEQ ID NO: 73786 - protein, 9 aa, synthetic construct
  source 1..9: note = Seed: WLSYFIASF
WQSYFIASM

SEQ ID NO: 73787 - protein, 9 aa, synthetic construct
  source 1..9: note = Seed: WLSYFIASF
WQSYFIASV

SEQ ID NO: 73788 - protein, 9 aa, synthetic construct
  source 1..9: note = Seed: WLSYFIASF
WQSYFIASW

SEQ ID NO: 73789 - protein, 9 aa, synthetic construct
  source 1..9: note = Seed: WLSYFIASF
WQSYFIASY

SEQ ID NO: 73790 - protein, 10 aa, synthetic construct
  source 1..10: note = Seed: WFTALTQHGK
WQTALTQHGR

SEQ ID NO: 73791 - protein, 11 aa, synthetic construct
  source 1..11: note = Seed: WRVYSTGSNVF
WQVYSTGSNVF

SEQ ID NO: 73792 - protein, 11 aa, synthetic construct
  source 1..11: note = Seed: WRVYSTGSNVF
WQVYSTGSNVM

SEQ ID NO: 73793 - protein, 11 aa, synthetic construct
  source 1..11: note = Seed: WRVYSTGSNVF
WQVYSTGSNVY

SEQ ID NO: 73794 - protein, 9 aa, synthetic construct
  source 1..9: note = Seed: WLYAAVING
WQYAAVINL

SEQ ID NO: 73795 - protein, 9 aa, synthetic construct
  source 1..9: note = Seed: WLYAAVING
WQYAAVINV

SEQ ID NO: 73796 - protein, 9 aa, synthetic construct
  source 1..9: note = Seed: WVYKQFDTY
WQYKQFDTF

SEQ ID NO: 73797 - protein, 9 aa, synthetic construct
  source 1..9: note = Seed: WVYKQFDTY
WQYKQFDTH

SEQ ID NO: 73798 - protein, 9 aa, synthetic construct
  source 1..9: note = Seed: WVYKQFDTY
WQYKQFDTI

SEQ ID NO: 73799 - protein, 9 aa, synthetic construct
  source 1..9: note = Seed: WVYKQFDTY
WQYKQFDTL

SEQ ID NO: 73800 - protein, 9 aa, synthetic construct
  source 1..9: note = Seed: WVYKQFDTY
WQYKQFDTM

SEQ ID NO: 73801 - protein, 9 aa, synthetic construct
  source 1..9: note = Seed: WVYKQFDTY
WQYKQFDTV

SEQ ID NO: 73802 - protein, 9 aa, synthetic construct
  source 1..9: note = Seed: WVYKQFDTY
WQYKQFDTW

SEQ ID NO: 73803 - protein, 9 aa, synthetic construct
  source 1..9: note = Seed: WVYKQFDTY
WQYKQFDTY

SEQ ID NO: 73804 - protein, 9 aa, synthetic construct
  source 1..9: note = Seed: WKYPQVNGL
WQYPQVNGF

SEQ ID NO: 73805 - protein, 9 aa, synthetic construct
  source 1..9: note = Seed: WKYPQVNGL
WQYPQVNGL

SEQ ID NO: 73806 - protein, 9 aa, synthetic construct
  source 1..9: note = Seed: WKYPQVNGL
WQYPQVNGM

SEQ ID NO: 73807 - protein, 9 aa, synthetic construct
  source 1..9: note = Seed: WKYPQVNGL
WQYPQVNGY

SEQ ID NO: 73808 - protein, 10 aa, synthetic construct
  source 1..10: note = Seed: WRKAVFISPY
WRKAVFISPF

SEQ ID NO: 73809 - protein, 10 aa, synthetic construct
  source 1..10: note = Seed: WRKAVFISPY
WRKAVFISPK

SEQ ID NO: 73810 - protein, 10 aa, synthetic construct
  source 1..10: note = Seed: WRKAVFISPY
WRKAVFISPL

SEQ ID NO: 73811 - protein, 10 aa, synthetic construct
  source 1..10: note = Seed: WRKAVFISPY
WRKAVFISPM

SEQ ID NO: 73812 - protein, 10 aa, synthetic construct
  source 1..10: note = Seed: WFLAYILFTR
WRLAYILFTR

SEQ ID NO: 73813 - protein, 10 aa, synthetic construct
  source 1..10: note = Seed: WLLLTILTSL
WRLLTILTSI

SEQ ID NO: 73814 - protein, 10 aa, synthetic construct
  source 1..10: note = Seed: WLLLTILTSL
WRLLTILTSL

SEQ ID NO: 73815 - protein, 10 aa, synthetic construct
  source 1..10: note = Seed: WLLLTILTSL
WRLLTILTSV

SEQ ID NO: 73816 - protein, 10 aa, synthetic construct
  source 1..10: note = Seed: WLMWLIINLV
WRMWLIINLV

SEQ ID NO: 73817 - protein, 9 aa, synthetic construct
  source 1..9: note = Seed: WLSYFIASF
WRSYFIASF

SEQ ID NO: 73818 - protein, 10 aa, synthetic construct
  source 1..10: note = Seed: WLSYFIASFR
WRSYFIASFK

SEQ ID NO: 73819 - protein, 10 aa, synthetic construct
  source 1..10: note = Seed: WLSYFIASFR
WRSYFIASFR

SEQ ID NO: 73820 - protein, 11 aa, synthetic construct
  source 1..11: note = Seed: WLSYFIASFRL
WRSYFIASFRF

SEQ ID NO: 73821 - protein, 9 aa, synthetic construct
  source 1..9: note = Seed: WLSYFIASF
WRSYFIASM

SEQ ID NO: 73822 - protein, 9 aa, synthetic construct
  source 1..9: note = Seed: WLSYFIASF
WRSYFIASY

SEQ ID NO: 73823 - protein, 10 aa, synthetic construct
  source 1..10: note = Seed: WFTALTQHGK
WRTALTQHGR

SEQ ID NO: 73824 - protein, 10 aa, synthetic construct
  source 1..10: note = Seed: WRVYSTGSNV
WRVYSTGSNL

SEQ ID NO: 73825 - protein, 9 aa, synthetic construct
  source 1..9: note = Seed: WVYKQFDTY
WRYKQFDTF

SEQ ID NO: 73826 - protein, 9 aa, synthetic construct
  source 1..9: note = Seed: WVYKQFDTY
WRYKQFDTY

SEQ ID NO: 73827 - protein, 9 aa, synthetic construct
  source 1..9: note = Seed: WKYPQVNGL
WRYPQVNGF

SEQ ID NO: 73828 - protein, 9 aa, synthetic construct
  source 1..9: note = Seed: WKYPQVNGL
WRYPQVNGI

SEQ ID NO: 73829 - protein, 9 aa, synthetic construct
  source 1..9: note = Seed: WKYPQVNGL
WRYPQVNGL

SEQ ID NO: 73830 - protein, 9 aa, synthetic construct
  source 1..9: note = Seed: WKYPQVNGL
WRYPQVNGM

SEQ ID NO: 73831 - protein, 9 aa, synthetic construct
  source 1..9: note = Seed: WKYPQVNGL
WRYPQVNGV

SEQ ID NO: 73832 - protein, 10 aa, synthetic construct
  source 1..10: note = Seed: WTAFVTNVNA
WSAFVTNVNI

SEQ ID NO: 73833 - protein, 10 aa, synthetic construct
  source 1..10: note = Seed: WTAFVTNVNA
WSAFVTNVNL

SEQ ID NO: 73834 - protein, 10 aa, synthetic construct
  source 1..10: note = Seed: WTAFVTNVNA
WSAFVTNVNV

SEQ ID NO: 73835 - protein, 9 aa, synthetic construct
  source 1..9: note = Seed: WICLLQFAY
WSCLLQFAY

SEQ ID NO: 73836 - protein, 8 aa, synthetic construct
  source 1..8: note = Seed: WADNNCYL
WSDNNCYL

SEQ ID NO: 73837 - protein, 10 aa, synthetic construct
  source 1..10: note = Seed: WIFGTTLDSK
WSFGTTLDSR

SEQ ID NO: 73838 - protein, 9 aa, synthetic construct
  source 1..9: note = Seed: WSFNPETNI
WSFNPETNF

SEQ ID NO: 73839 - protein, 10 aa, synthetic construct
  source 1..10: note = Seed: WSFNPETNIL
WSFNPETNIF

SEQ ID NO: 73840 - protein, 11 aa, synthetic construct
  source 1..11: note = Seed: WSFNPETNILL
WSFNPETNILF

SEQ ID NO: 73841 - protein, 11 aa, synthetic construct
  source 1..11: note = Seed: WSFNPETNILL
WSFNPETNILW

SEQ ID NO: 73842 - protein, 11 aa, synthetic construct
  source 1..11: note = Seed: WSFNPETNILL
WSFNPETNILY

SEQ ID NO: 73843 - protein, 10 aa, synthetic construct
  source 1..10: note = Seed: WSFNPETNIL
WSFNPETNIW

SEQ ID NO: 73844 - protein, 10 aa, synthetic construct
  source 1..10: note = Seed: WSFNPETNIL
WSFNPETNIY

SEQ ID NO: 73845 - protein, 9 aa, synthetic construct
  source 1..9: note = Seed: WSFNPETNI
WSFNPETNL

SEQ ID NO: 73846 - protein, 9 aa, synthetic construct
  source 1..9: note = Seed: WSFNPETNI
WSFNPETNM

SEQ ID NO: 73847 - protein, 9 aa, synthetic construct
  source 1..9: note = Seed: WSFNPETNI
WSFNPETNW

SEQ ID NO: 73848 - protein, 9 aa, synthetic construct
  source 1..9: note = Seed: WSFNPETNI
WSFNPETNY

SEQ ID NO: 73849 - protein, 9 aa, synthetic construct
  source 1..9: note = Seed: WFFSNYLKR
WSFSNYLKK

SEQ ID NO: 73850 - protein, 9 aa, synthetic construct
  source 1..9: note = Seed: WFFSNYLKR
WSFSNYLKR

SEQ ID NO: 73851 - protein, 10 aa, synthetic construct
  source 1..10: note = Seed: WFFSNYLKRR
WSFSNYLKRR

SEQ ID NO: 73852 - protein, 10 aa, synthetic construct
  source 1..10: note = Seed: WAHGFELTSM
WSHGFELTSY

SEQ ID NO: 73853 - protein, 10 aa, synthetic construct
  source 1..10: note = Seed: WRKAVFISPY
WSKAVFISPF

SEQ ID NO: 73854 - protein, 10 aa, synthetic construct
  source 1..10: note = Seed: WRKAVFISPY
WSKAVFISPY

SEQ ID NO: 73855 - protein, 10 aa, synthetic construct
  source 1..10: note = Seed: WFLAYILFTR
WSLAYILFTK

SEQ ID NO: 73856 - protein, 10 aa, synthetic construct
  source 1..10: note = Seed: WFLAYILFTR
WSLAYILFTR

SEQ ID NO: 73857 - protein, 10 aa, synthetic construct
  source 1..10: note = Seed: WLLLTILTSL
WSLLTILTSA

SEQ ID NO: 73858 - protein, 10 aa, synthetic construct
  source 1..10: note = Seed: WLLLTILTSL
WSLLTILTSI

SEQ ID NO: 73859 - protein, 10 aa, synthetic construct
  source 1..10: note = Seed: WLLLTILTSL
WSLLTILTSL

SEQ ID NO: 73860 - protein, 10 aa, synthetic construct
  source 1..10: note = Seed: WLLLTILTSL
WSLLTILTSV

SEQ ID NO: 73861 - protein, 9 aa, synthetic construct
  source 1..9: note = Seed: WVLNNDYYR
WSLNNDYYK

SEQ ID NO: 73862 - protein, 9 aa, synthetic construct
  source 1..9: note = Seed: WVLNNDYYR
WSLNNDYYR

SEQ ID NO: 73863 - protein, 10 aa, synthetic construct
  source 1..10: note = Seed: WVLNNDYYRS
WSLNNDYYRR

SEQ ID NO: 73864 - protein, 8 aa, synthetic construct
  source 1..8: note = Seed: WVMRIMTW
WSMRIMTF

SEQ ID NO: 73865 - protein, 8 aa, synthetic construct
  source 1..8: note = Seed: WVMRIMTW
WSMRIMTW

SEQ ID NO: 73866 - protein, 9 aa, synthetic construct
  source 1..9: note = Seed: WVMRIMTWL
WSMRIMTWV

SEQ ID NO: 73867 - protein, 10 aa, synthetic construct
  source 1..10: note = Seed: WLMWLIINLV
WSMWLIINLV

SEQ ID NO: 73868 - protein, 9 aa, synthetic construct
  source 1..9: note = Seed: WLMWLIINL
WSMWLIINV

SEQ ID NO: 73869 - protein, 9 aa, synthetic construct
  source 1..9: note = Seed: WTNAGDYIL
WSNAGDYIF

SEQ ID NO: 73870 - protein, 9 aa, synthetic construct
  source 1..9: note = Seed: WTNAGDYIL
WSNAGDYIW

SEQ ID NO: 73871 - protein, 9 aa, synthetic construct
  source 1..9: note = Seed: WTNAGDYIL
WSNAGDYIY

SEQ ID NO: 73872 - protein, 9 aa, synthetic construct
  source 1..9: note = Seed: WLPTGTLLV
WSPTGTLLL

SEQ ID NO: 73873 - protein, 9 aa, synthetic construct
  source 1..9: note = Seed: WFSQRGGSY
WSSQRGGSF

SEQ ID NO: 73874 - protein, 9 aa, synthetic construct
  source 1..9: note = Seed: WFSQRGGSY
WSSQRGGSY

SEQ ID NO: 73875 - protein, 9 aa, synthetic construct
  source 1..9: note = Seed: WLSYFIASF
WSSYFIASF

SEQ ID NO: 73876 - protein, 10 aa, synthetic construct
  source 1..10: note = Seed: WLSYFIASFR
WSSYFIASFK

SEQ ID NO: 73877 - protein, 10 aa, synthetic construct
  source 1..10: note = Seed: WLSYFIASFR
WSSYFIASFR

SEQ ID NO: 73878 - protein, 9 aa, synthetic construct
  source 1..9: note = Seed: WLSYFIASF
WSSYFIASI

SEQ ID NO: 73879 - protein, 9 aa, synthetic construct
  source 1..9: note = Seed: WLSYFIASF
WSSYFIASL

SEQ ID NO: 73880 - protein, 9 aa, synthetic construct
  source 1..9: note = Seed: WLSYFIASF
WSSYFIASM

SEQ ID NO: 73881 - protein, 9 aa, synthetic construct
  source 1..9: note = Seed: WLSYFIASF
WSSYFIASV

SEQ ID NO: 73882 - protein, 9 aa, synthetic construct
  source 1..9: note = Seed: WLSYFIASF
WSSYFIASY

SEQ ID NO: 73883 - protein, 10 aa, synthetic construct
  source 1..10: note = Seed: WFTALTQHGK
WSTALTQHGR

SEQ ID NO: 73884 - protein, 9 aa, synthetic construct
  source 1..9: note = Seed: WVYKQFDTY
WSYKQFDTF

SEQ ID NO: 73885 - protein, 9 aa, synthetic construct
  source 1..9: note = Seed: WVYKQFDTY
WSYKQFDTL

SEQ ID NO: 73886 - protein, 9 aa, synthetic construct
  source 1..9: note = Seed: WVYKQFDTY
WSYKQFDTM

SEQ ID NO: 73887 - protein, 9 aa, synthetic construct
  source 1..9: note = Seed: WVYKQFDTY
WSYKQFDTW

SEQ ID NO: 73888 - protein, 9 aa, synthetic construct
  source 1..9: note = Seed: WVYKQFDTY
WSYKQFDTY

SEQ ID NO: 73889 - protein, 9 aa, synthetic construct
  source 1..9: note = Seed: WKYPQVNGL
WSYPQVNGF

SEQ ID NO: 73890 - protein, 9 aa, synthetic construct
  source 1..9: note = Seed: WKYPQVNGL
WSYPQVNGY

SEQ ID NO: 73891 - protein, 10 aa, synthetic construct
  source 1..10: note = Seed: WTAFVTNVNA
WTAFVTNVNI

SEQ ID NO: 73892 - protein, 10 aa, synthetic construct
  source 1..10: note = Seed: WTAFVTNVNA
WTAFVTNVNL

SEQ ID NO: 73893 - protein, 10 aa, synthetic construct
  source 1..10: note = Seed: WTAFVTNVNA
WTAFVTNVNM

SEQ ID NO: 73894 - protein, 10 aa, synthetic construct
  source 1..10: note = Seed: WTAFVTNVNA
WTAFVTNVNV

SEQ ID NO: 73895 - protein, 9 aa, synthetic construct
  source 1..9: note = Seed: WICLLQFAY
WTCLLQFAY

SEQ ID NO: 73896 - protein, 10 aa, synthetic construct
  source 1..10: note = Seed: WIFGTTLDSK
WTFGTTLDSR

SEQ ID NO: 73897 - protein, 9 aa, synthetic construct
  source 1..9: note = Seed: WSFNPETNI
WTFNPETNF

SEQ ID NO: 73898 - protein, 9 aa, synthetic construct
  source 1..9: note = Seed: WSFNPETNI
WTFNPETNI

SEQ ID NO: 73899 - protein, 10 aa, synthetic construct
  source 1..10: note = Seed: WSFNPETNIL
WTFNPETNIF

SEQ ID NO: 73900 - protein, 11 aa, synthetic construct
  source 1..11: note = Seed: WSFNPETNILL
WTFNPETNILF

SEQ ID NO: 73901 - protein, 11 aa, synthetic construct
  source 1..11: note = Seed: WSFNPETNILL
WTFNPETNILW

SEQ ID NO: 73902 - protein, 11 aa, synthetic construct
  source 1..11: note = Seed: WSFNPETNILL
WTFNPETNILY

SEQ ID NO: 73903 - protein, 10 aa, synthetic construct
  source 1..10: note = Seed: WSFNPETNIL
WTFNPETNIW

SEQ ID NO: 73904 - protein, 10 aa, synthetic construct
  source 1..10: note = Seed: WSFNPETNIL
WTFNPETNIY

SEQ ID NO: 73905 - protein, 9 aa, synthetic construct
  source 1..9: note = Seed: WSFNPETNI
WTFNPETNM

SEQ ID NO: 73906 - protein, 9 aa, synthetic construct
  source 1..9: note = Seed: WSFNPETNI
WTFNPETNV

SEQ ID NO: 73907 - protein, 9 aa, synthetic construct
  source 1..9: note = Seed: WSFNPETNI
WTFNPETNW

SEQ ID NO: 73908 - protein, 9 aa, synthetic construct
  source 1..9: note = Seed: WSFNPETNI
WTFNPETNY

SEQ ID NO: 73909 - protein, 9 aa, synthetic construct
  source 1..9: note = Seed: WFFSNYLKR
WTFSNYLKK

SEQ ID NO: 73910 - protein, 9 aa, synthetic construct
  source 1..9: note = Seed: WFFSNYLKR
WTFSNYLKR

SEQ ID NO: 73911 - protein, 10 aa, synthetic construct
  source 1..10: note = Seed: WFFSNYLKRR
WTFSNYLKRK

SEQ ID NO: 73912 - protein, 10 aa, synthetic construct
  source 1..10: note = Seed: WFFSNYLKRR
WTFSNYLKRR

SEQ ID NO: 73913 - protein, 11 aa, synthetic construct
  source 1..11: note = Seed: WAHGFELTSMK
WTHGFELTSMR

SEQ ID NO: 73914 - protein, 10 aa, synthetic construct
  source 1..10: note = Seed: WAHGFELTSM
WTHGFELTSY

SEQ ID NO: 73915 - protein, 9 aa, synthetic construct
  source 1..9: note = Seed: WLIINLVQM
WTIINLVQV

SEQ ID NO: 73916 - protein, 10 aa, synthetic construct
  source 1..10: note = Seed: WRKAVFISPY
WTKAVFISPF

SEQ ID NO: 73917 - protein, 10 aa, synthetic construct
  source 1..10: note = Seed: WRKAVFISPY
WTKAVFISPY

SEQ ID NO: 73918 - protein, 10 aa, synthetic construct
  source 1..10: note = Seed: WFLAYILFTR
WTLAYILFTK

SEQ ID NO: 73919 - protein, 10 aa, synthetic construct
  source 1..10: note = Seed: WFLAYILFTR
WTLAYILFTR

SEQ ID NO: 73920 - protein, 10 aa, synthetic construct
  source 1..10: note = Seed: WLLLTILTSL
WTLLTILTSI

SEQ ID NO: 73921 - protein, 10 aa, synthetic construct
  source 1..10: note = Seed: WLLLTILTSL
WTLLTILTSL

SEQ ID NO: 73922 - protein, 10 aa, synthetic construct
  source 1..10: note = Seed: WLLLTILTSL
WTLLTILTSV

SEQ ID NO: 73923 - protein, 9 aa, synthetic construct
  source 1..9: note = Seed: WLLLTILTS
WTLLTILTV

SEQ ID NO: 73924 - protein, 9 aa, synthetic construct
  source 1..9: note = Seed: WVLNNDYYR
WTLNNDYYK

SEQ ID NO: 73925 - protein, 9 aa, synthetic construct
  source 1..9: note = Seed: WVLNNDYYR
WTLNNDYYR

SEQ ID NO: 73926 - protein, 10 aa, synthetic construct
  source 1..10: note = Seed: WVLNNDYYRS
WTLNNDYYRK

SEQ ID NO: 73927 - protein, 10 aa, synthetic construct
  source 1..10: note = Seed: WVLNNDYYRS
WTLNNDYYRR

SEQ ID NO: 73928 - protein, 9 aa, synthetic construct
  source 1..9: note = Seed: WLLWPVTLA
WTLWPVTLV

SEQ ID NO: 73929 - protein, 8 aa, synthetic construct
  source 1..8: note = Seed: WVMRIMTW
WTMRIMTW

SEQ ID NO: 73930 - protein, 9 aa, synthetic construct
  source 1..9: note = Seed: WVMRIMTWL
WTMRIMTWA

SEQ ID NO: 73931 - protein, 9 aa, synthetic construct
  source 1..9: note = Seed: WVMRIMTWL
WTMRIMTWI

SEQ ID NO: 73932 - protein, 9 aa, synthetic construct
  source 1..9: note = Seed: WVMRIMTWL
WTMRIMTWL

SEQ ID NO: 73933 - protein, 9 aa, synthetic construct
  source 1..9: note = Seed: WVMRIMTWL
WTMRIMTWV

SEQ ID NO: 73934 - protein, 9 aa, synthetic construct
  source 1..9: note = Seed: WLMWLIINL
WTMWLIINI

SEQ ID NO: 73935 - protein, 9 aa, synthetic construct
  source 1..9: note = Seed: WLMWLIINL
WTMWLIINL

SEQ ID NO: 73936 - protein, 10 aa, synthetic construct
  source 1..10: note = Seed: WLMWLIINLV
WTMWLIINLV

SEQ ID NO: 73937 - protein, 9 aa, synthetic construct
  source 1..9: note = Seed: WLMWLIINL
WTMWLIINV

SEQ ID NO: 73938 - protein, 9 aa, synthetic construct
  source 1..9: note = Seed: WTNAGDYIL
WTNAGDYIF

SEQ ID NO: 73939 - protein, 10 aa, synthetic construct
  source 1..10: note = Seed: WTNAGDYILA
WTNAGDYILV

SEQ ID NO: 73940 - protein, 9 aa, synthetic construct
  source 1..9: note = Seed: WTNAGDYIL
WTNAGDYIV

SEQ ID NO: 73941 - protein, 9 aa, synthetic construct
  source 1..9: note = Seed: WTNAGDYIL
WTNAGDYIW

SEQ ID NO: 73942 - protein, 9 aa, synthetic construct
  source 1..9: note = Seed: WTNAGDYIL
WTNAGDYIY

SEQ ID NO: 73943 - protein, 9 aa, synthetic construct
  source 1..9: note = Seed: WLSYFIASF
WTSYFIASA

SEQ ID NO: 73944 - protein, 9 aa, synthetic construct
  source 1..9: note = Seed: WLSYFIASF
WTSYFIASF

SEQ ID NO: 73945 - protein, 10 aa, synthetic construct
  source 1..10: note = Seed: WLSYFIASFR
WTSYFIASFK

SEQ ID NO: 73946 - protein, 10 aa, synthetic construct
  source 1..10: note = Seed: WLSYFIASFR
WTSYFIASFR

SEQ ID NO: 73947 - protein, 10 aa, synthetic construct
  source 1..10: note = Seed: WLSYFIASFR
WTSYFIASFY

SEQ ID NO: 73948 - protein, 9 aa, synthetic construct
  source 1..9: note = Seed: WLSYFIASF
WTSYFIASI

SEQ ID NO: 73949 - protein, 9 aa, synthetic construct
  source 1..9: note = Seed: WLSYFIASF
WTSYFIASL

SEQ ID NO: 73950 - protein, 9 aa, synthetic construct
  source 1..9: note = Seed: WLSYFIASF
WTSYFIASM

SEQ ID NO: 73951 - protein, 9 aa, synthetic construct
  source 1..9: note = Seed: WLSYFIASF
WTSYFIASV

SEQ ID NO: 73952 - protein, 9 aa, synthetic construct
  source 1..9: note = Seed: WLSYFIASF
WTSYFIASY

SEQ ID NO: 73953 - protein, 10 aa, synthetic construct
  source 1..10: note = Seed: WFTALTQHGK
WTTALTQHGK

SEQ ID NO: 73954 - protein, 10 aa, synthetic construct
  source 1..10: note = Seed: WFTALTQHGK
WTTALTQHGR

SEQ ID NO: 73955 - protein, 10 aa, synthetic construct
  source 1..10: note = Seed: WRVYSTGSNV
WTVYSTGSNV

SEQ ID NO: 73956 - protein, 9 aa, synthetic construct
  source 1..9: note = Seed: WVYKQFDTY
WTYKQFDTF

SEQ ID NO: 73957 - protein, 9 aa, synthetic construct
  source 1..9: note = Seed: WVYKQFDTY
WTYKQFDTL

SEQ ID NO: 73958 - protein, 9 aa, synthetic construct
  source 1..9: note = Seed: WVYKQFDTY
WTYKQFDTM

SEQ ID NO: 73959 - protein, 9 aa, synthetic construct
  source 1..9: note = Seed: WVYKQFDTY
WTYKQFDTW

SEQ ID NO: 73960 - protein, 9 aa, synthetic construct
  source 1..9: note = Seed: WVYKQFDTY
WTYKQFDTY

SEQ ID NO: 73961 - protein, 9 aa, synthetic construct
  source 1..9: note = Seed: WKYPQVNGL
WTYPQVNGF

SEQ ID NO: 73962 - protein, 10 aa, synthetic construct
  source 1..10: note = Seed: WTAFVTNVNA
WVAFVTNVNA

SEQ ID NO: 73963 - protein, 10 aa, synthetic construct
  source 1..10: note = Seed: WTAFVTNVNA
WVAFVTNVNI

SEQ ID NO: 73964 - protein, 10 aa, synthetic construct
  source 1..10: note = Seed: WTAFVTNVNA
WVAFVTNVNL

SEQ ID NO: 73965 - protein, 10 aa, synthetic construct
  source 1..10: note = Seed: WTAFVTNVNA
WVAFVTNVNV

SEQ ID NO: 73966 - protein, 9 aa, synthetic construct
  source 1..9: note = Seed: WICLLQFAY
WVCLLQFAY

SEQ ID NO: 73967 - protein, 10 aa, synthetic construct
  source 1..10: note = Seed: WIFGTTLDSK
WVFGTTLDSR

SEQ ID NO: 73968 - protein, 9 aa, synthetic construct
  source 1..9: note = Seed: WSFNPETNI
WVFNPETNV

SEQ ID NO: 73969 - protein, 9 aa, synthetic construct
  source 1..9: note = Seed: WSFNPETNI
WVFNPETNW

SEQ ID NO: 73970 - protein, 9 aa, synthetic construct
  source 1..9: note = Seed: WFFSNYLKR
WVFSNYLKK

SEQ ID NO: 73971 - protein, 9 aa, synthetic construct
  source 1..9: note = Seed: WFFSNYLKR
WVFSNYLKR

SEQ ID NO: 73972 - protein, 10 aa, synthetic construct
  source 1..10: note = Seed: WFFSNYLKRR
WVFSNYLKRR

SEQ ID NO: 73973 - protein, 11 aa, synthetic construct
  source 1..11: note = Seed: WAHGFELTSMK
WVHGFELTSMR

SEQ ID NO: 73974 - protein, 10 aa, synthetic construct
  source 1..10: note = Seed: WAHGFELTSM
WVHGFELTSY

SEQ ID NO: 73975 - protein, 9 aa, synthetic construct
  source 1..9: note = Seed: WLIINLVQM
WVIINLVQV

SEQ ID NO: 73976 - protein, 10 aa, synthetic construct
  source 1..10: note = Seed: WRKAVFISPY
WVKAVFISPF

SEQ ID NO: 73977 - protein, 10 aa, synthetic construct
  source 1..10: note = Seed: WRKAVFISPY
WVKAVFISPY

SEQ ID NO: 73978 - protein, 9 aa, synthetic construct
  source 1..9: note = Seed: WAKRNIKPV
WVKRNIKPL

SEQ ID NO: 73979 - protein, 10 aa, synthetic construct
  source 1..10: note = Seed: WFLAYILFTR
WVLAYILFTK

SEQ ID NO: 73980 - protein, 10 aa, synthetic construct
  source 1..10: note = Seed: WFLAYILFTR
WVLAYILFTR

SEQ ID NO: 73981 - protein, 10 aa, synthetic construct
  source 1..10: note = Seed: WLLLTILTSL
WVLLTILTSI

SEQ ID NO: 73982 - protein, 10 aa, synthetic construct
  source 1..10: note = Seed: WLLLTILTSL
WVLLTILTSL

SEQ ID NO: 73983 - protein, 10 aa, synthetic construct
  source 1..10: note = Seed: WLLLTILTSL
WVLLTILTSV

SEQ ID NO: 73984 - protein, 9 aa, synthetic construct
  source 1..9: note = Seed: WLLLTILTS
WVLLTILTV

SEQ ID NO: 73985 - protein, 9 aa, synthetic construct
  source 1..9: note = Seed: WVLNNDYYR
WVLNNDYYK

SEQ ID NO: 73986 - protein, 10 aa, synthetic construct
  source 1..10: note = Seed: WVLNNDYYRS
WVLNNDYYRR

SEQ ID NO: 73987 - protein, 9 aa, synthetic construct
  source 1..9: note = Seed: WLLWPVTLA
WVLWPVTLL

SEQ ID NO: 73988 - protein, 9 aa, synthetic construct
  source 1..9: note = Seed: WLLWPVTLA
WVLWPVTLV

SEQ ID NO: 73989 - protein, 9 aa, synthetic construct
  source 1..9: note = Seed: WVMRIMTWL
WVMRIMTWI

SEQ ID NO: 73990 - protein, 9 aa, synthetic construct
  source 1..9: note = Seed: WVMRIMTWL
WVMRIMTWV

SEQ ID NO: 73991 - protein, 9 aa, synthetic construct
  source 1..9: note = Seed: WLMWLIINL
WVMWLIINA

SEQ ID NO: 73992 - protein, 9 aa, synthetic construct
  source 1..9: note = Seed: WLMWLIINL
WVMWLIINI

SEQ ID NO: 73993 - protein, 9 aa, synthetic construct
  source 1..9: note = Seed: WLMWLIINL
WVMWLIINL

SEQ ID NO: 73994 - protein, 10 aa, synthetic construct
  source 1..10: note = Seed: WLMWLIINLV
WVMWLIINLV

SEQ ID NO: 73995 - protein, 9 aa, synthetic construct
  source 1..9: note = Seed: WLMWLIINL
WVMWLIINV

SEQ ID NO: 73996 - protein, 10 aa, synthetic construct
  source 1..10: note = Seed: WTNAGDYILA
WVNAGDYILV

SEQ ID NO: 73997 - protein, 9 aa, synthetic construct
  source 1..9: note = Seed: WFSQRGGSY
WVSQRGGSF

SEQ ID NO: 73998 - protein, 9 aa, synthetic construct
  source 1..9: note = Seed: WFSQRGGSY
WVSQRGGSY

SEQ ID NO: 73999 - protein, 9 aa, synthetic construct
  source 1..9: note = Seed: WLSYFIASF
WVSYFIASA

SEQ ID NO: 74000 - protein, 9 aa, synthetic construct
  source 1..9: note = Seed: WLSYFIASF
WVSYFIASF

SEQ ID NO: 74001 - protein, 10 aa, synthetic construct
  source 1..10: note = Seed: WLSYFIASFR
WVSYFIASFK

SEQ ID NO: 74002 - protein, 10 aa, synthetic construct
  source 1..10: note = Seed: WLSYFIASFR
WVSYFIASFR

SEQ ID NO: 74003 - protein, 9 aa, synthetic construct
  source 1..9: note = Seed: WLSYFIASF
WVSYFIASI

SEQ ID NO: 74004 - protein, 9 aa, synthetic construct
  source 1..9: note = Seed: WLSYFIASF
WVSYFIASL

SEQ ID NO: 74005 - protein, 9 aa, synthetic construct
  source 1..9: note = Seed: WLSYFIASF
WVSYFIASM

SEQ ID NO: 74006 - protein, 9 aa, synthetic construct
  source 1..9: note = Seed: WLSYFIASF
WVSYFIASV

SEQ ID NO: 74007 - protein, 9 aa, synthetic construct
  source 1..9: note = Seed: WLSYFIASF
WVSYFIASY

SEQ ID NO: 74008 - protein, 10 aa, synthetic construct
  source 1..10: note = Seed: WFTALTQHGK
WVTALTQHGK

SEQ ID NO: 74009 - protein, 10 aa, synthetic construct
  source 1..10: note = Seed: WFTALTQHGK
WVTALTQHGR

SEQ ID NO: 74010 - protein, 10 aa, synthetic construct
  source 1..10: note = Seed: WRVYSTGSNV
WVVYSTGSNV

SEQ ID NO: 74011 - protein, 9 aa, synthetic construct
  source 1..9: note = Seed: WLYAAVING
WVYAAVINV

SEQ ID NO: 74012 - protein, 9 aa, synthetic construct
  source 1..9: note = Seed: WVYKQFDTY
WVYKQFDTF

SEQ ID NO: 74013 - protein, 9 aa, synthetic construct
  source 1..9: note = Seed: WVYKQFDTY
WVYKQFDTM

SEQ ID NO: 74014 - protein, 9 aa, synthetic construct
  source 1..9: note = Seed: WVYKQFDTY
WVYKQFDTW

SEQ ID NO: 74015 - protein, 9 aa, synthetic construct
  source 1..9: note = Seed: WKYPQVNGL
WVYPQVNGF

SEQ ID NO: 74016 - protein, 9 aa, synthetic construct
  source 1..9: note = Seed: WKYPQVNGL
WVYPQVNGY

SEQ ID NO: 74017 - protein, 9 aa, synthetic construct
  source 1..9: note = Seed: WICLLQFAY
WWCLLQFAY

SEQ ID NO: 74018 - protein, 10 aa, synthetic construct
  source 1..10: note = Seed: WRKAVFISPY
WWKAVFISPF

SEQ ID NO: 74019 - protein, 10 aa, synthetic construct
  source 1..10: note = Seed: WRKAVFISPY
WWKAVFISPY

SEQ ID NO: 74020 - protein, 10 aa, synthetic construct
  source 1..10: note = Seed: WFLAYILFTR
WWLAYILFTR

SEQ ID NO: 74021 - protein, 10 aa, synthetic construct
  source 1..10: note = Seed: WLLLTILTSL
WWLLTILTSI

SEQ ID NO: 74022 - protein, 10 aa, synthetic construct
  source 1..10: note = Seed: WLLLTILTSL
WWLLTILTSL

SEQ ID NO: 74023 - protein, 10 aa, synthetic construct
  source 1..10: note = Seed: WLLLTILTSL
WWLLTILTSV

SEQ ID NO: 74024 - protein, 9 aa, synthetic construct
  source 1..9: note = Seed: WVLNNDYYR
WWLNNDYYR

SEQ ID NO: 74025 - protein, 9 aa, synthetic construct
  source 1..9: note = Seed: WFSQRGGSY
WWSQRGGSF

SEQ ID NO: 74026 - protein, 9 aa, synthetic construct
  source 1..9: note = Seed: WFSQRGGSY
WWSQRGGSL

SEQ ID NO: 74027 - protein, 9 aa, synthetic construct
  source 1..9: note = Seed: WFSQRGGSY
WWSQRGGSM

SEQ ID NO: 74028 - protein, 10 aa, synthetic construct
  source 1..10: note = Seed: WLSYFIASFR
WWSYFIASFK

SEQ ID NO: 74029 - protein, 10 aa, synthetic construct
  source 1..10: note = Seed: WLSYFIASFR
WWSYFIASFR

SEQ ID NO: 74030 - protein, 11 aa, synthetic construct
  source 1..11: note = Seed: WLSYFIASFRL
WWSYFIASFRF

SEQ ID NO: 74031 - protein, 10 aa, synthetic construct
  source 1..10: note = Seed: WFTALTQHGK
WWTALTQHGR

SEQ ID NO: 74032 - protein, 9 aa, synthetic construct
  source 1..9: note = Seed: WVYKQFDTY
WWYKQFDTY

SEQ ID NO: 74033 - protein, 9 aa, synthetic construct
  source 1..9: note = Seed: WICLLQFAY
WYCLLQFAY

SEQ ID NO: 74034 - protein, 9 aa, synthetic construct
  source 1..9: note = Seed: WFFSNYLKR
WYFSNYLKR

SEQ ID NO: 74035 - protein, 10 aa, synthetic construct
  source 1..10: note = Seed: WFFSNYLKRR
WYFSNYLKRR

SEQ ID NO: 74036 - protein, 10 aa, synthetic construct
  source 1..10: note = Seed: WRKAVFISPY
WYKAVFISPF

SEQ ID NO: 74037 - protein, 10 aa, synthetic construct
  source 1..10: note = Seed: WRKAVFISPY
WYKAVFISPY

SEQ ID NO: 74038 - protein, 10 aa, synthetic construct
  source 1..10: note = Seed: WFLAYILFTR
WYLAYILFTR

SEQ ID NO: 74039 - protein, 10 aa, synthetic construct
  source 1..10: note = Seed: WLLLTILTSL
WYLLTILTSA

SEQ ID NO: 74040 - protein, 10 aa, synthetic construct
  source 1..10: note = Seed: WLLLTILTSL
WYLLTILTSI

SEQ ID NO: 74041 - protein, 10 aa, synthetic construct
  source 1..10: note = Seed: WLLLTILTSL
WYLLTILTSL

SEQ ID NO: 74042 - protein, 11 aa, synthetic construct
  source 1..11: note = Seed: WLLLTILTSLL
WYLLTILTSLV

SEQ ID NO: 74043 - protein, 10 aa, synthetic construct
  source 1..10: note = Seed: WLLLTILTSL
WYLLTILTSV

SEQ ID NO: 74044 - protein, 9 aa, synthetic construct
  source 1..9: note = Seed: WVLNNDYYR
WYLNNDYYK

SEQ ID NO: 74045 - protein, 9 aa, synthetic construct
  source 1..9: note = Seed: WVLNNDYYR
WYLNNDYYR

SEQ ID NO: 74046 - protein, 10 aa, synthetic construct
  source 1..10: note = Seed: WLMWLIINLV
WYMWLIINLV

SEQ ID NO: 74047 - protein, 9 aa, synthetic construct
  source 1..9: note = Seed: WFSQRGGSY
WYSQRGGSF

SEQ ID NO: 74048 - protein, 9 aa, synthetic construct
  source 1..9: note = Seed: WFSQRGGSY
WYSQRGGSI

SEQ ID NO: 74049 - protein, 9 aa, synthetic construct
  source 1..9: note = Seed: WFSQRGGSY
WYSQRGGSL

SEQ ID NO: 74050 - protein, 9 aa, synthetic construct
  source 1..9: note = Seed: WFSQRGGSY
WYSQRGGSM

SEQ ID NO: 74051 - protein, 9 aa, synthetic construct
  source 1..9: note = Seed: WFSQRGGSY
WYSQRGGSV

SEQ ID NO: 74052 - protein, 9 aa, synthetic construct
  source 1..9: note = Seed: WFSQRGGSY
WYSQRGGSY

SEQ ID NO: 74053 - protein, 10 aa, synthetic construct
  source 1..10: note = Seed: WLSYFIASFR
WYSYFIASFK

SEQ ID NO: 74054 - protein, 10 aa, synthetic construct
  source 1..10: note = Seed: WLSYFIASFR
WYSYFIASFR

SEQ ID NO: 74055 - protein, 11 aa, synthetic construct
  source 1..11: note = Seed: WLSYFIASFRL
WYSYFIASFRF

SEQ ID NO: 74056 - protein, 10 aa, synthetic construct
  source 1..10: note = Seed: WFTALTQHGK
WYTALTQHGR

SEQ ID NO: 74057 - protein, 11 aa, synthetic construct
  source 1..11: note = Seed: WRVYSTGSNVF
WYVYSTGSNVF

SEQ ID NO: 74058 - protein, 9 aa, synthetic construct
  source 1..9: note = Seed: WVYKQFDTY
WYYKQFDTY

SEQ ID NO: 74059 - protein, 10 aa, synthetic construct
  source 1..10: note = Seed: WDYPKCDRAM
WYYPKCDRAF

SEQ ID NO: 74060 - protein, 10 aa, synthetic construct
  source 1..10: note = Seed: WDYPKCDRAM
WYYPKCDRAL

SEQ ID NO: 74061 - protein, 10 aa, synthetic construct
  source 1..10: note = Seed: WDYPKCDRAM
WYYPKCDRAM

SEQ ID NO: 74062 - protein, 10 aa, synthetic construct
  source 1..10: note = Seed: WDYPKCDRAM
WYYPKCDRAY

SEQ ID NO: 74063 - protein, 10 aa, synthetic construct
  source 1..10: note = Seed: YGANKDGIIW
YAANKDGIIW

SEQ ID NO: 74064 - protein, 9 aa, synthetic construct
  source 1..9: note = Seed: YPANSIVCR
YAANSIVCK

SEQ ID NO: 74065 - protein, 9 aa, synthetic construct
  source 1..9: note = Seed: YPANSIVCR
YAANSIVCR

SEQ ID NO: 74066 - protein, 10 aa, synthetic construct
  source 1..10: note = Seed: YPANSIVCRF
YAANSIVCRF

SEQ ID NO: 74067 - protein, 10 aa, synthetic construct
  source 1..10: note = Seed: YPANSIVCRF
YAANSIVCRM

SEQ ID NO: 74068 - protein, 10 aa, synthetic construct
  source 1..10: note = Seed: YPANSIVCRF
YAANSIVCRW

SEQ ID NO: 74069 - protein, 10 aa, synthetic construct
  source 1..10: note = Seed: YPANSIVCRF
YAANSIVCRY

SEQ ID NO: 74070 - protein, 9 aa, synthetic construct
  source 1..9: note = Seed: YIATNGPLK
YAATNGPLR

SEQ ID NO: 74071 - protein, 9 aa, synthetic construct
  source 1..9: note = Seed: YAAVINGDR
YAAVINGDK

SEQ ID NO: 74072 - protein, 10 aa, synthetic construct
  source 1..10: note = Seed: YFCTCYFGLF
YACTCYFGLY

SEQ ID NO: 74073 - protein, 8 aa, synthetic construct
  source 1..8: note = Seed: YACWHHSI
YACWHHSF

SEQ ID NO: 74074 - protein, 8 aa, synthetic construct
  source 1..8: note = Seed: YACWHHSI
YACWHHSL

SEQ ID NO: 74075 - protein, 8 aa, synthetic construct
  source 1..8: note = Seed: YACWHHSI
YACWHHSM

SEQ ID NO: 74076 - protein, 8 aa, synthetic construct
  source 1..8: note = Seed: YACWHHSI
YACWHHSY

SEQ ID NO: 74077 - protein, 10 aa, synthetic construct
  source 1..10: note = Seed: YVDTPNNTDF
YADTPNNTDF

SEQ ID NO: 74078 - protein, 10 aa, synthetic construct
  source 1..10: note = Seed: YVDTPNNTDF
YADTPNNTDL

SEQ ID NO: 74079 - protein, 10 aa, synthetic construct
  source 1..10: note = Seed: YVDTPNNTDF
YADTPNNTDM

SEQ ID NO: 74080 - protein, 10 aa, synthetic construct
  source 1..10: note = Seed: YKENSYTTTI
YAENSYTTTA

SEQ ID NO: 74081 - protein, 10 aa, synthetic construct
  source 1..10: note = Seed: YKENSYTTTI
YAENSYTTTF

SEQ ID NO: 74082 - protein, 10 aa, synthetic construct
  source 1..10: note = Seed: YKENSYTTTI
YAENSYTTTL

SEQ ID NO: 74083 - protein, 10 aa, synthetic construct
  source 1..10: note = Seed: YKENSYTTTI
YAENSYTTTM

SEQ ID NO: 74084 - protein, 10 aa, synthetic construct
  source 1..10: note = Seed: YKENSYTTTI
YAENSYTTTY

SEQ ID NO: 74085 - protein, 9 aa, synthetic construct
  source 1..9: note = Seed: YTERSEKSY
YAERSEKSY

SEQ ID NO: 74086 - protein, 9 aa, synthetic construct
  source 1..9: note = Seed: YVFCTVNAL
YAFCTVNAA

SEQ ID NO: 74087 - protein, 9 aa, synthetic construct
  source 1..9: note = Seed: YVFCTVNAL
YAFCTVNAF

SEQ ID NO: 74088 - protein, 9 aa, synthetic construct
  source 1..9: note = Seed: YVFCTVNAL
YAFCTVNAH

SEQ ID NO: 74089 - protein, 9 aa, synthetic construct
  source 1..9: note = Seed: YVFCTVNAL
YAFCTVNAI

SEQ ID NO: 74090 - protein, 9 aa, synthetic construct
  source 1..9: note = Seed: YVFCTVNAL
YAFCTVNAM

SEQ ID NO: 74091 - protein, 9 aa, synthetic construct
  source 1..9: note = Seed: YVFCTVNAL
YAFCTVNAV

SEQ ID NO: 74092 - protein, 9 aa, synthetic construct
  source 1..9: note = Seed: YVFCTVNAL
YAFCTVNAW

SEQ ID NO: 74093 - protein, 9 aa, synthetic construct
  source 1..9: note = Seed: YVFCTVNAL
YAFCTVNAY

SEQ ID NO: 74094 - protein, 9 aa, synthetic construct
  source 1..9: note = Seed: YIFFASFYY
YAFFASFYA

SEQ ID NO: 74095 - protein, 9 aa, synthetic construct
  source 1..9: note = Seed: YIFFASFYY
YAFFASFYF

SEQ ID NO: 74096 - protein, 9 aa, synthetic construct
  source 1..9: note = Seed: YIFFASFYY
YAFFASFYH

SEQ ID NO: 74097 - protein, 9 aa, synthetic construct
  source 1..9: note = Seed: YIFFASFYY
YAFFASFYI

SEQ ID NO: 74098 - protein, 9 aa, synthetic construct
  source 1..9: note = Seed: YIFFASFYY
YAFFASFYK

SEQ ID NO: 74099 - protein, 9 aa, synthetic construct
  source 1..9: note = Seed: YIFFASFYY
YAFFASFYL

SEQ ID NO: 74100 - protein, 9 aa, synthetic construct
  source 1..9: note = Seed: YIFFASFYY
YAFFASFYM

SEQ ID NO: 74101 - protein, 9 aa, synthetic construct
  source 1..9: note = Seed: YIFFASFYY
YAFFASFYQ

SEQ ID NO: 74102 - protein, 9 aa, synthetic construct
  source 1..9: note = Seed: YIFFASFYY
YAFFASFYR

SEQ ID NO: 74103 - protein, 9 aa, synthetic construct
  source 1..9: note = Seed: YIFFASFYY
YAFFASFYV

SEQ ID NO: 74104 - protein, 9 aa, synthetic construct
  source 1..9: note = Seed: YIFFASFYY
YAFFASFYW

SEQ ID NO: 74105 - protein, 9 aa, synthetic construct
  source 1..9: note = Seed: YIFFASFYY
YAFFASFYY

SEQ ID NO: 74106 - protein, 10 aa, synthetic construct
  source 1..10: note = Seed: YIFFASFYYV
YAFFASFYYA

SEQ ID NO: 74107 - protein, 10 aa, synthetic construct
  source 1..10: note = Seed: YIFFASFYYV
YAFFASFYYC

SEQ ID NO: 74108 - protein, 10 aa, synthetic construct
  source 1..10: note = Seed: YIFFASFYYV
YAFFASFYYD

SEQ ID NO: 74109 - protein, 10 aa, synthetic construct
  source 1..10: note = Seed: YIFFASFYYV
YAFFASFYYE

SEQ ID NO: 74110 - protein, 10 aa, synthetic construct
  source 1..10: note = Seed: YIFFASFYYV
YAFFASFYYF

SEQ ID NO: 74111 - protein, 10 aa, synthetic construct
  source 1..10: note = Seed: YIFFASFYYV
YAFFASFYYG

SEQ ID NO: 74112 - protein, 10 aa, synthetic construct
  source 1..10: note = Seed: YIFFASFYYV
YAFFASFYYH

SEQ ID NO: 74113 - protein, 10 aa, synthetic construct
  source 1..10: note = Seed: YIFFASFYYV
YAFFASFYYI

SEQ ID NO: 74114 - protein, 10 aa, synthetic construct
  source 1..10: note = Seed: YIFFASFYYV
YAFFASFYYK

SEQ ID NO: 74115 - protein, 10 aa, synthetic construct
  source 1..10: note = Seed: YIFFASFYYV
YAFFASFYYL

SEQ ID NO: 74116 - protein, 10 aa, synthetic construct
  source 1..10: note = Seed: YIFFASFYYV
YAFFASFYYM

SEQ ID NO: 74117 - protein, 10 aa, synthetic construct
  source 1..10: note = Seed: YIFFASFYYV
YAFFASFYYN

SEQ ID NO: 74118 - protein, 10 aa, synthetic construct
  source 1..10: note = Seed: YIFFASFYYV
YAFFASFYYP

SEQ ID NO: 74119 - protein, 10 aa, synthetic construct
  source 1..10: note = Seed: YIFFASFYYV
YAFFASFYYQ

SEQ ID NO: 74120 - protein, 10 aa, synthetic construct
  source 1..10: note = Seed: YIFFASFYYV
YAFFASFYYR

SEQ ID NO: 74121 - protein, 10 aa, synthetic construct
  source 1..10: note = Seed: YIFFASFYYV
YAFFASFYYS

SEQ ID NO: 74122 - protein, 10 aa, synthetic construct
  source 1..10: note = Seed: YIFFASFYYV
YAFFASFYYT

SEQ ID NO: 74123 - protein, 10 aa, synthetic construct
  source 1..10: note = Seed: YIFFASFYYV
YAFFASFYYV

SEQ ID NO: 74124 - protein, 11 aa, synthetic construct
  source 1..11: note = Seed: YIFFASFYYVW
YAFFASFYYVW

SEQ ID NO: 74125 - protein, 11 aa, synthetic construct
  source 1..11: note = Seed: YIFFASFYYVW
YAFFASFYYVY

SEQ ID NO: 74126 - protein, 10 aa, synthetic construct
  source 1..10: note = Seed: YIFFASFYYV
YAFFASFYYW

SEQ ID NO: 74127 - protein, 10 aa, synthetic construct
  source 1..10: note = Seed: YIFFASFYYV
YAFFASFYYY

SEQ ID NO: 74128 - protein, 9 aa, synthetic construct
  source 1..9: note = Seed: YWFFSNYLK
YAFFSNYLF

SEQ ID NO: 74129 - protein, 9 aa, synthetic construct
  source 1..9: note = Seed: YWFFSNYLK
YAFFSNYLH

SEQ ID NO: 74130 - protein, 9 aa, synthetic construct
  source 1..9: note = Seed: YWFFSNYLK
YAFFSNYLK

SEQ ID NO: 74131 - protein, 10 aa, synthetic construct
  source 1..10: note = Seed: YWFFSNYLKR
YAFFSNYLKA

SEQ ID NO: 74132 - protein, 10 aa, synthetic construct
  source 1..10: note = Seed: YWFFSNYLKR
YAFFSNYLKC

SEQ ID NO: 74133 - protein, 10 aa, synthetic construct
  source 1..10: note = Seed: YWFFSNYLKR
YAFFSNYLKD

SEQ ID NO: 74134 - protein, 10 aa, synthetic construct
  source 1..10: note = Seed: YWFFSNYLKR
YAFFSNYLKE

SEQ ID NO: 74135 - protein, 10 aa, synthetic construct
  source 1..10: note = Seed: YWFFSNYLKR
YAFFSNYLKF

SEQ ID NO: 74136 - protein, 10 aa, synthetic construct
  source 1..10: note = Seed: YWFFSNYLKR
YAFFSNYLKG

SEQ ID NO: 74137 - protein, 10 aa, synthetic construct
  source 1..10: note = Seed: YWFFSNYLKR
YAFFSNYLKH

SEQ ID NO: 74138 - protein, 10 aa, synthetic construct
  source 1..10: note = Seed: YWFFSNYLKR
YAFFSNYLKI

SEQ ID NO: 74139 - protein, 10 aa, synthetic construct
  source 1..10: note = Seed: YWFFSNYLKR
YAFFSNYLKK

SEQ ID NO: 74140 - protein, 10 aa, synthetic construct
  source 1..10: note = Seed: YWFFSNYLKR
YAFFSNYLKL

SEQ ID NO: 74141 - protein, 10 aa, synthetic construct
  source 1..10: note = Seed: YWFFSNYLKR
YAFFSNYLKM

SEQ ID NO: 74142 - protein, 10 aa, synthetic construct
  source 1..10: note = Seed: YWFFSNYLKR
YAFFSNYLKN

SEQ ID NO: 74143 - protein, 10 aa, synthetic construct
  source 1..10: note = Seed: YWFFSNYLKR
YAFFSNYLKP

SEQ ID NO: 74144 - protein, 10 aa, synthetic construct
  source 1..10: note = Seed: YWFFSNYLKR
YAFFSNYLKQ

SEQ ID NO: 74145 - protein, 10 aa, synthetic construct
  source 1..10: note = Seed: YWFFSNYLKR
YAFFSNYLKR

SEQ ID NO: 74146 - protein, 11 aa, synthetic construct
  source 1..11: note = Seed: YWFFSNYLKRR
YAFFSNYLKRR

SEQ ID NO: 74147 - protein, 10 aa, synthetic construct
  source 1..10: note = Seed: YWFFSNYLKR
YAFFSNYLKS

SEQ ID NO: 74148 - protein, 10 aa, synthetic construct
  source 1..10: note = Seed: YWFFSNYLKR
YAFFSNYLKT

SEQ ID NO: 74149 - protein, 10 aa, synthetic construct
  source 1..10: note = Seed: YWFFSNYLKR
YAFFSNYLKV

SEQ ID NO: 74150 - protein, 10 aa, synthetic construct
  source 1..10: note = Seed: YWFFSNYLKR
YAFFSNYLKW

SEQ ID NO: 74151 - protein, 10 aa, synthetic construct
  source 1..10: note = Seed: YWFFSNYLKR
YAFFSNYLKY

SEQ ID NO: 74152 - protein, 9 aa, synthetic construct
  source 1..9: note = Seed: YWFFSNYLK
YAFFSNYLR

SEQ ID NO: 74153 - protein, 9 aa, synthetic construct
  source 1..9: note = Seed: YWFFSNYLK
YAFFSNYLY

SEQ ID NO: 74154 - protein, 8 aa, synthetic construct
  source 1..8: note = Seed: YSFLPGVY
YAFLPGVF

SEQ ID NO: 74155 - protein, 8 aa, synthetic construct
  source 1..8: note = Seed: YSFLPGVY
YAFLPGVL

SEQ ID NO: 74156 - protein, 8 aa, synthetic construct
  source 1..8: note = Seed: YSFLPGVY
YAFLPGVM

SEQ ID NO: 74157 - protein, 8 aa, synthetic construct
  source 1..8: note = Seed: YSFLPGVY
YAFLPGVY

SEQ ID NO: 74158 - protein, 9 aa, synthetic construct
  source 1..9: note = Seed: YSFLPGVYS
YAFLPGVYA

SEQ ID NO: 74159 - protein, 9 aa, synthetic construct
  source 1..9: note = Seed: YSFLPGVYS
YAFLPGVYI

SEQ ID NO: 74160 - protein, 10 aa, synthetic construct
  source 1..10: note = Seed: YSFLPGVYSV
YAFLPGVYSF

SEQ ID NO: 74161 - protein, 10 aa, synthetic construct
  source 1..10: note = Seed: YSFLPGVYSV
YAFLPGVYSI

SEQ ID NO: 74162 - protein, 10 aa, synthetic construct
  source 1..10: note = Seed: YSFLPGVYSV
YAFLPGVYSL

SEQ ID NO: 74163 - protein, 10 aa, synthetic construct
  source 1..10: note = Seed: YSFLPGVYSV
YAFLPGVYSM

SEQ ID NO: 74164 - protein, 10 aa, synthetic construct
  source 1..10: note = Seed: YSFLPGVYSV
YAFLPGVYSV

SEQ ID NO: 74165 - protein, 10 aa, synthetic construct
  source 1..10: note = Seed: YSFLPGVYSV
YAFLPGVYSW

SEQ ID NO: 74166 - protein, 10 aa, synthetic construct
  source 1..10: note = Seed: YSFLPGVYSV
YAFLPGVYSY

SEQ ID NO: 74167 - protein, 9 aa, synthetic construct
  source 1..9: note = Seed: YSFLPGVYS
YAFLPGVYV

SEQ ID NO: 74168 - protein, 9 aa, synthetic construct
  source 1..9: note = Seed: YGFQPTNGV
YAFQPTNGA

SEQ ID NO: 74169 - protein, 9 aa, synthetic construct
  source 1..9: note = Seed: YGFQPTNGV
YAFQPTNGF

SEQ ID NO: 74170 - protein, 9 aa, synthetic construct
  source 1..9: note = Seed: YGFQPTNGV
YAFQPTNGI

SEQ ID NO: 74171 - protein, 9 aa, synthetic construct
  source 1..9: note = Seed: YGFQPTNGV
YAFQPTNGL

SEQ ID NO: 74172 - protein, 9 aa, synthetic construct
  source 1..9: note = Seed: YGFQPTNGV
YAFQPTNGM

SEQ ID NO: 74173 - protein, 9 aa, synthetic construct
  source 1..9: note = Seed: YGFQPTNGV
YAFQPTNGV

SEQ ID NO: 74174 - protein, 9 aa, synthetic construct
  source 1..9: note = Seed: YGFQPTNGV
YAFQPTNGY

SEQ ID NO: 74175 - protein, 10 aa, synthetic construct
  source 1..10: note = Seed: YHFRELGVVH
YAFRELGVVF

SEQ ID NO: 74176 - protein, 10 aa, synthetic construct
  source 1..10: note = Seed: YHFRELGVVH
YAFRELGVVM

SEQ ID NO: 74177 - protein, 10 aa, synthetic construct
  source 1..10: note = Seed: YHFRELGVVH
YAFRELGVVY

SEQ ID NO: 74178 - protein, 9 aa, synthetic construct
  source 1..9: note = Seed: YVFTGYRVT
YAFTGYRVA

SEQ ID NO: 74179 - protein, 9 aa, synthetic construct
  source 1..9: note = Seed: YVFTGYRVT
YAFTGYRVC

SEQ ID NO: 74180 - protein, 9 aa, synthetic construct
  source 1..9: note = Seed: YVFTGYRVT
YAFTGYRVF

SEQ ID NO: 74181 - protein, 9 aa, synthetic construct
  source 1..9: note = Seed: YVFTGYRVT
YAFTGYRVH

SEQ ID NO: 74182 - protein, 9 aa, synthetic construct
  source 1..9: note = Seed: YVFTGYRVT
YAFTGYRVI

SEQ ID NO: 74183 - protein, 9 aa, synthetic construct
  source 1..9: note = Seed: YVFTGYRVT
YAFTGYRVL

SEQ ID NO: 74184 - protein, 9 aa, synthetic construct
  source 1..9: note = Seed: YVFTGYRVT
YAFTGYRVM

SEQ ID NO: 74185 - protein, 9 aa, synthetic construct
  source 1..9: note = Seed: YVFTGYRVT
YAFTGYRVT

SEQ ID NO: 74186 - protein, 10 aa, synthetic construct
  source 1..10: note = Seed: YVFTGYRVTK
YAFTGYRVTK

SEQ ID NO: 74187 - protein, 10 aa, synthetic construct
  source 1..10: note = Seed: YVFTGYRVTK
YAFTGYRVTR

SEQ ID NO: 74188 - protein, 9 aa, synthetic construct
  source 1..9: note = Seed: YVFTGYRVT
YAFTGYRVV

SEQ ID NO: 74189 - protein, 9 aa, synthetic construct
  source 1..9: note = Seed: YVFTGYRVT
YAFTGYRVW

SEQ ID NO: 74190 - protein, 9 aa, synthetic construct
  source 1..9: note = Seed: YVFTGYRVT
YAFTGYRVY

SEQ ID NO: 74191 - protein, 9 aa, synthetic construct
  source 1..9: note = Seed: YFFTLLLQL
YAFTLLLQI

SEQ ID NO: 74192 - protein, 9 aa, synthetic construct
  source 1..9: note = Seed: YFFTLLLQL
YAFTLLLQL

SEQ ID NO: 74193 - protein, 9 aa, synthetic construct
  source 1..9: note = Seed: YFFTLLLQL
YAFTLLLQV

SEQ ID NO: 74194 - protein, 9 aa, synthetic construct
  source 1..9: note = Seed: YFFTLLLQL
YAFTLLLQY

SEQ ID NO: 74195 - protein, 10 aa, synthetic construct
  source 1..10: note = Seed: YLGGMSYYCK
YAGGMSYYCK

SEQ ID NO: 74196 - protein, 10 aa, synthetic construct
  source 1..10: note = Seed: YLGGMSYYCK
YAGGMSYYCR

SEQ ID NO: 74197 - protein, 9 aa, synthetic construct
  source 1..9: note = Seed: YLGGMSYYC
YAGGMSYYI

SEQ ID NO: 74198 - protein, 9 aa, synthetic construct
  source 1..9: note = Seed: YLGGMSYYC
YAGGMSYYL

SEQ ID NO: 74199 - protein, 9 aa, synthetic construct
  source 1..9: note = Seed: YLGGMSYYC
YAGGMSYYV

SEQ ID NO: 74200 - protein, 9 aa, synthetic construct
  source 1..9: note = Seed: YPGQGLNGY
YAGQGLNGY

SEQ ID NO: 74201 - protein, 10 aa, synthetic construct
  source 1..10: note = Seed: YVGYLQPRTF
YAGYLQPRTF

SEQ ID NO: 74202 - protein, 11 aa, synthetic construct
  source 1..11: note = Seed: YVGYLQPRTFL
YAGYLQPRTFF

SEQ ID NO: 74203 - protein, 11 aa, synthetic construct
  source 1..11: note = Seed: YVGYLQPRTFL
YAGYLQPRTFW

SEQ ID NO: 74204 - protein, 10 aa, synthetic construct
  source 1..10: note = Seed: YVGYLQPRTF
YAGYLQPRTL

SEQ ID NO: 74205 - protein, 10 aa, synthetic construct
  source 1..10: note = Seed: YVGYLQPRTF
YAGYLQPRTM

SEQ ID NO: 74206 - protein, 10 aa, synthetic construct
  source 1..10: note = Seed: YVGYLQPRTF
YAGYLQPRTW

SEQ ID NO: 74207 - protein, 10 aa, synthetic construct
  source 1..10: note = Seed: YVGYLQPRTF
YAGYLQPRTY

SEQ ID NO: 74208 - protein, 9 aa, synthetic construct
  source 1..9: note = Seed: YMHHMELPT
YAHHMELPF

SEQ ID NO: 74209 - protein, 9 aa, synthetic construct
  source 1..9: note = Seed: YMHHMELPT
YAHHMELPM

SEQ ID NO: 74210 - protein, 9 aa, synthetic construct
  source 1..9: note = Seed: YMHHMELPT
YAHHMELPV

SEQ ID NO: 74211 - protein, 9 aa, synthetic construct
  source 1..9: note = Seed: YMHHMELPT
YAHHMELPY

SEQ ID NO: 74212 - protein, 9 aa, synthetic construct
  source 1..9: note = Seed: YFIASFRLF
YAIASFRLA

SEQ ID NO: 74213 - protein, 9 aa, synthetic construct
  source 1..9: note = Seed: YFIASFRLF
YAIASFRLF

SEQ ID NO: 74214 - protein, 11 aa, synthetic construct
  source 1..11: note = Seed: YFIASFRLFAR
YAIASFRLFAR

SEQ ID NO: 74215 - protein, 10 aa, synthetic construct
  source 1..10: note = Seed: YFIASFRLFA
YAIASFRLFI

SEQ ID NO: 74216 - protein, 10 aa, synthetic construct
  source 1..10: note = Seed: YFIASFRLFA
YAIASFRLFL

SEQ ID NO: 74217 - protein, 10 aa, synthetic construct
  source 1..10: note = Seed: YFIASFRLFA
YAIASFRLFV

SEQ ID NO: 74218 - protein, 9 aa, synthetic construct
  source 1..9: note = Seed: YFIASFRLF
YAIASFRLH

SEQ ID NO: 74219 - protein, 9 aa, synthetic construct
  source 1..9: note = Seed: YFIASFRLF
YAIASFRLI

SEQ ID NO: 74220 - protein, 9 aa, synthetic construct
  source 1..9: note = Seed: YFIASFRLF
YAIASFRLL

SEQ ID NO: 74221 - protein, 9 aa, synthetic construct
  source 1..9: note = Seed: YFIASFRLF
YAIASFRLM

SEQ ID NO: 74222 - protein, 9 aa, synthetic construct
  source 1..9: note = Seed: YFIASFRLF
YAIASFRLV

SEQ ID NO: 74223 - protein, 9 aa, synthetic construct
  source 1..9: note = Seed: YFIASFRLF
YAIASFRLW

SEQ ID NO: 74224 - protein, 9 aa, synthetic construct
  source 1..9: note = Seed: YFIASFRLF
YAIASFRLY

SEQ ID NO: 74225 - protein, 9 aa, synthetic construct
  source 1..9: note = Seed: YGIATVREV
YAIATVREA

SEQ ID NO: 74226 - protein, 9 aa, synthetic construct
  source 1..9: note = Seed: YGIATVREV
YAIATVREF

SEQ ID NO: 74227 - protein, 9 aa, synthetic construct
  source 1..9: note = Seed: YGIATVREV
YAIATVREH

SEQ ID NO: 74228 - protein, 9 aa, synthetic construct
  source 1..9: note = Seed: YGIATVREV
YAIATVREI

SEQ ID NO: 74229 - protein, 9 aa, synthetic construct
  source 1..9: note = Seed: YGIATVREV
YAIATVREL

SEQ ID NO: 74230 - protein, 9 aa, synthetic construct
  source 1..9: note = Seed: YGIATVREV
YAIATVREM

SEQ ID NO: 74231 - protein, 9 aa, synthetic construct
  source 1..9: note = Seed: YGIATVREV
YAIATVRET

SEQ ID NO: 74232 - protein, 9 aa, synthetic construct
  source 1..9: note = Seed: YGIATVREV
YAIATVREV

SEQ ID NO: 74233 - protein, 9 aa, synthetic construct
  source 1..9: note = Seed: YGIATVREV
YAIATVREW

SEQ ID NO: 74234 - protein, 9 aa, synthetic construct
  source 1..9: note = Seed: YGIATVREV
YAIATVREY

SEQ ID NO: 74235 - protein, 10 aa, synthetic construct
  source 1..10: note = Seed: YIICISTKHF
YAICISTKHF

SEQ ID NO: 74236 - protein, 10 aa, synthetic construct
  source 1..10: note = Seed: YIICISTKHF
YAICISTKHM

SEQ ID NO: 74237 - protein, 10 aa, synthetic construct
  source 1..10: note = Seed: YIICISTKHF
YAICISTKHY

SEQ ID NO: 74238 - protein, 9 aa, synthetic construct
  source 1..9: note = Seed: YFIKGLNNL
YAIKGLNNA

SEQ ID NO: 74239 - protein, 9 aa, synthetic construct
  source 1..9: note = Seed: YFIKGLNNL
YAIKGLNNI

SEQ ID NO: 74240 - protein, 9 aa, synthetic construct
  source 1..9: note = Seed: YFIKGLNNL
YAIKGLNNL

SEQ ID NO: 74241 - protein, 9 aa, synthetic construct
  source 1..9: note = Seed: YFIKGLNNL
YAIKGLNNV

SEQ ID NO: 74242 - protein, 9 aa, synthetic construct
  source 1..9: note = Seed: YAISAKNRA
YAISAKNRF

SEQ ID NO: 74243 - protein, 9 aa, synthetic construct
  source 1..9: note = Seed: YAISAKNRA
YAISAKNRI

SEQ ID NO: 74244 - protein, 9 aa, synthetic construct
  source 1..9: note = Seed: YAISAKNRA
YAISAKNRL

SEQ ID NO: 74245 - protein, 9 aa, synthetic construct
  source 1..9: note = Seed: YAISAKNRA
YAISAKNRM

SEQ ID NO: 74246 - protein, 9 aa, synthetic construct
  source 1..9: note = Seed: YAISAKNRA
YAISAKNRV

SEQ ID NO: 74247 - protein, 9 aa, synthetic construct
  source 1..9: note = Seed: YAISAKNRA
YAISAKNRY

SEQ ID NO: 74248 - protein, 9 aa, synthetic construct
  source 1..9: note = Seed: YSKHTPINL
YAKHTPINF

SEQ ID NO: 74249 - protein, 9 aa, synthetic construct
  source 1..9: note = Seed: YSKHTPINL
YAKHTPINI

SEQ ID NO: 74250 - protein, 9 aa, synthetic construct
  source 1..9: note = Seed: YSKHTPINL
YAKHTPINL

SEQ ID NO: 74251 - protein, 9 aa, synthetic construct
  source 1..9: note = Seed: YSKHTPINL
YAKHTPINM

SEQ ID NO: 74252 - protein, 9 aa, synthetic construct
  source 1..9: note = Seed: YSKHTPINL
YAKHTPINV

SEQ ID NO: 74253 - protein, 9 aa, synthetic construct
  source 1..9: note = Seed: YSKHTPINL
YAKHTPINW

SEQ ID NO: 74254 - protein, 9 aa, synthetic construct
  source 1..9: note = Seed: YSKHTPINL
YAKHTPINY

SEQ ID NO: 74255 - protein, 11 aa, synthetic construct
  source 1..11: note = Seed: YFKIYSKHTPI
YAKIYSKHTPL

SEQ ID NO: 74256 - protein, 9 aa, synthetic construct
  source 1..9: note = Seed: YYKKDNSYF
YAKKDNSYF

SEQ ID NO: 74257 - protein, 9 aa, synthetic construct
  source 1..9: note = Seed: YYKKDNSYF
YAKKDNSYY

SEQ ID NO: 74258 - protein, 9 aa, synthetic construct
  source 1..9: note = Seed: YDKLQFTSL
YAKLQFTSA

SEQ ID NO: 74259 - protein, 9 aa, synthetic construct
  source 1..9: note = Seed: YDKLQFTSL
YAKLQFTSF

SEQ ID NO: 74260 - protein, 9 aa, synthetic construct
  source 1..9: note = Seed: YDKLQFTSL
YAKLQFTSI

SEQ ID NO: 74261 - protein, 9 aa, synthetic construct
  source 1..9: note = Seed: YDKLQFTSL
YAKLQFTSL

SEQ ID NO: 74262 - protein, 11 aa, synthetic construct
  source 1..11: note = Seed: YDKLQFTSLEI
YAKLQFTSLEV

SEQ ID NO: 74263 - protein, 9 aa, synthetic construct
  source 1..9: note = Seed: YDKLQFTSL
YAKLQFTSM

SEQ ID NO: 74264 - protein, 9 aa, synthetic construct
  source 1..9: note = Seed: YDKLQFTSL
YAKLQFTSV

SEQ ID NO: 74265 - protein, 8 aa, synthetic construct
  source 1..8: note = Seed: YLKLRSDV
YAKLRSDL

SEQ ID NO: 74266 - protein, 9 aa, synthetic construct
  source 1..9: note = Seed: YLKLRSDVL
YAKLRSDVF

SEQ ID NO: 74267 - protein, 9 aa, synthetic construct
  source 1..9: note = Seed: YLKLRSDVL
YAKLRSDVI

SEQ ID NO: 74268 - protein, 9 aa, synthetic construct
  source 1..9: note = Seed: YLKLRSDVL
YAKLRSDVL

SEQ ID NO: 74269 - protein, 10 aa, synthetic construct
  source 1..10: note = Seed: YLKLRSDVLL
YAKLRSDVLL

SEQ ID NO: 74270 - protein, 9 aa, synthetic construct
  source 1..9: note = Seed: YLKLRSDVL
YAKLRSDVM

SEQ ID NO: 74271 - protein, 9 aa, synthetic construct
  source 1..9: note = Seed: YLKLRSDVL
YAKLRSDVV

SEQ ID NO: 74272 - protein, 9 aa, synthetic construct
  source 1..9: note = Seed: YLKLRSDVL
YAKLRSDVY

SEQ ID NO: 74273 - protein, 8 aa, synthetic construct
  source 1..8: note = Seed: YLKRRVVF
YAKRRVVF

SEQ ID NO: 74274 - protein, 8 aa, synthetic construct
  source 1..8: note = Seed: YLKRRVVF
YAKRRVVI

SEQ ID NO: 74275 - protein, 8 aa, synthetic construct
  source 1..8: note = Seed: YLKRRVVF
YAKRRVVL

SEQ ID NO: 74276 - protein, 8 aa, synthetic construct
  source 1..8: note = Seed: YLKRRVVF
YAKRRVVM

SEQ ID NO: 74277 - protein, 8 aa, synthetic construct
  source 1..8: note = Seed: YLKRRVVF
YAKRRVVV

SEQ ID NO: 74278 - protein, 9 aa, synthetic construct
  source 1..9: note = Seed: YLKSPNFSK
YAKSPNFSK

SEQ ID NO: 74279 - protein, 9 aa, synthetic construct
  source 1..9: note = Seed: YLKSPNFSK
YAKSPNFSR

SEQ ID NO: 74280 - protein, 9 aa, synthetic construct
  source 1..9: note = Seed: YIKWDLLKY
YAKWDLLKF

SEQ ID NO: 74281 - protein, 9 aa, synthetic construct
  source 1..9: note = Seed: YIKWDLLKY
YAKWDLLKL

SEQ ID NO: 74282 - protein, 9 aa, synthetic construct
  source 1..9: note = Seed: YIKWDLLKY
YAKWDLLKM

SEQ ID NO: 74283 - protein, 9 aa, synthetic construct
  source 1..9: note = Seed: YIKWDLLKY
YAKWDLLKW

SEQ ID NO: 74284 - protein, 9 aa, synthetic construct
  source 1..9: note = Seed: YIKWDLLKY
YAKWDLLKY

SEQ ID NO: 74285 - protein, 9 aa, synthetic construct
  source 1..9: note = Seed: YIKWPWYIW
YAKWPWYIW

SEQ ID NO: 74286 - protein, 9 aa, synthetic construct
  source 1..9: note = Seed: YNKYKYFSG
YAKYKYFSA

SEQ ID NO: 74287 - protein, 9 aa, synthetic construct
  source 1..9: note = Seed: YNKYKYFSG
YAKYKYFSC

SEQ ID NO: 74288 - protein, 9 aa, synthetic construct
  source 1..9: note = Seed: YNKYKYFSG
YAKYKYFSF

SEQ ID NO: 74289 - protein, 9 aa, synthetic construct
  source 1..9: note = Seed: YNKYKYFSG
YAKYKYFSI

SEQ ID NO: 74290 - protein, 9 aa, synthetic construct
  source 1..9: note = Seed: YNKYKYFSG
YAKYKYFSL

SEQ ID NO: 74291 - protein, 9 aa, synthetic construct
  source 1..9: note = Seed: YNKYKYFSG
YAKYKYFSM

SEQ ID NO: 74292 - protein, 9 aa, synthetic construct
  source 1..9: note = Seed: YNKYKYFSG
YAKYKYFST

SEQ ID NO: 74293 - protein, 9 aa, synthetic construct
  source 1..9: note = Seed: YNKYKYFSG
YAKYKYFSV

SEQ ID NO: 74294 - protein, 10 aa, synthetic construct
  source 1..10: note = Seed: YFLCWHTNCY
YALCWHTNCY

SEQ ID NO: 74295 - protein, 10 aa, synthetic construct
  source 1..10: note = Seed: YPLECIKDLL
YALECIKDLW

SEQ ID NO: 74296 - protein, 9 aa, synthetic construct
  source 1..9: note = Seed: YPLECIKDL
YALECIKDY

SEQ ID NO: 74297 - protein, 9 aa, synthetic construct
  source 1..9: note = Seed: YRLFRKSNL
YALFRKSNL

SEQ ID NO: 74298 - protein, 10 aa, synthetic construct
  source 1..10: note = Seed: YRLFRKSNLK
YALFRKSNLK

SEQ ID NO: 74299 - protein, 10 aa, synthetic construct
  source 1..10: note = Seed: YRLFRKSNLK
YALFRKSNLR

SEQ ID NO: 74300 - protein, 9 aa, synthetic construct
  source 1..9: note = Seed: YILFTRFFY
YALFTRFFF

SEQ ID NO: 74301 - protein, 9 aa, synthetic construct
  source 1..9: note = Seed: YILFTRFFY
YALFTRFFK

SEQ ID NO: 74302 - protein, 9 aa, synthetic construct
  source 1..9: note = Seed: YILFTRFFY
YALFTRFFL

SEQ ID NO: 74303 - protein, 9 aa, synthetic construct
  source 1..9: note = Seed: YILFTRFFY
YALFTRFFM

SEQ ID NO: 74304 - protein, 9 aa, synthetic construct
  source 1..9: note = Seed: YILFTRFFY
YALFTRFFR

SEQ ID NO: 74305 - protein, 9 aa, synthetic construct
  source 1..9: note = Seed: YILFTRFFY
YALFTRFFW

SEQ ID NO: 74306 - protein, 9 aa, synthetic construct
  source 1..9: note = Seed: YILFTRFFY
YALFTRFFY

SEQ ID NO: 74307 - protein, 10 aa, synthetic construct
  source 1..10: note = Seed: YILFTRFFYV
YALFTRFFYA

SEQ ID NO: 74308 - protein, 10 aa, synthetic construct
  source 1..10: note = Seed: YILFTRFFYV
YALFTRFFYC

SEQ ID NO: 74309 - protein, 10 aa, synthetic construct
  source 1..10: note = Seed: YILFTRFFYV
YALFTRFFYF

SEQ ID NO: 74310 - protein, 10 aa, synthetic construct
  source 1..10: note = Seed: YILFTRFFYV
YALFTRFFYI

SEQ ID NO: 74311 - protein, 10 aa, synthetic construct
  source 1..10: note = Seed: YILFTRFFYV
YALFTRFFYK

SEQ ID NO: 74312 - protein, 10 aa, synthetic construct
  source 1..10: note = Seed: YILFTRFFYV
YALFTRFFYL

SEQ ID NO: 74313 - protein, 10 aa, synthetic construct
  source 1..10: note = Seed: YILFTRFFYV
YALFTRFFYM

SEQ ID NO: 74314 - protein, 10 aa, synthetic construct
  source 1..10: note = Seed: YILFTRFFYV
YALFTRFFYR

SEQ ID NO: 74315 - protein, 10 aa, synthetic construct
  source 1..10: note = Seed: YILFTRFFYV
YALFTRFFYS

SEQ ID NO: 74316 - protein, 10 aa, synthetic construct
  source 1..10: note = Seed: YILFTRFFYV
YALFTRFFYT

SEQ ID NO: 74317 - protein, 10 aa, synthetic construct
  source 1..10: note = Seed: YILFTRFFYV
YALFTRFFYV

SEQ ID NO: 74318 - protein, 11 aa, synthetic construct
  source 1..11: note = Seed: YILFTRFFYVL
YALFTRFFYVA

SEQ ID NO: 74319 - protein, 11 aa, synthetic construct
  source 1..11: note = Seed: YILFTRFFYVL
YALFTRFFYVC

SEQ ID NO: 74320 - protein, 11 aa, synthetic construct
  source 1..11: note = Seed: YILFTRFFYVL
YALFTRFFYVD

SEQ ID NO: 74321 - protein, 11 aa, synthetic construct
  source 1..11: note = Seed: YILFTRFFYVL
YALFTRFFYVE

SEQ ID NO: 74322 - protein, 11 aa, synthetic construct
  source 1..11: note = Seed: YILFTRFFYVL
YALFTRFFYVF

SEQ ID NO: 74323 - protein, 11 aa, synthetic construct
  source 1..11: note = Seed: YILFTRFFYVL
YALFTRFFYVG

SEQ ID NO: 74324 - protein, 11 aa, synthetic construct
  source 1..11: note = Seed: YILFTRFFYVL
YALFTRFFYVH

SEQ ID NO: 74325 - protein, 11 aa, synthetic construct
  source 1..11: note = Seed: YILFTRFFYVL
YALFTRFFYVI

SEQ ID NO: 74326 - protein, 11 aa, synthetic construct
  source 1..11: note = Seed: YILFTRFFYVL
YALFTRFFYVK

SEQ ID NO: 74327 - protein, 11 aa, synthetic construct
  source 1..11: note = Seed: YILFTRFFYVL
YALFTRFFYVL

SEQ ID NO: 74328 - protein, 11 aa, synthetic construct
  source 1..11: note = Seed: YILFTRFFYVL
YALFTRFFYVM

SEQ ID NO: 74329 - protein, 11 aa, synthetic construct
  source 1..11: note = Seed: YILFTRFFYVL
YALFTRFFYVN

SEQ ID NO: 74330 - protein, 11 aa, synthetic construct
  source 1..11: note = Seed: YILFTRFFYVL
YALFTRFFYVP

SEQ ID NO: 74331 - protein, 11 aa, synthetic construct
  source 1..11: note = Seed: YILFTRFFYVL
YALFTRFFYVQ

SEQ ID NO: 74332 - protein, 11 aa, synthetic construct
  source 1..11: note = Seed: YILFTRFFYVL
YALFTRFFYVR

SEQ ID NO: 74333 - protein, 11 aa, synthetic construct
  source 1..11: note = Seed: YILFTRFFYVL
YALFTRFFYVS

SEQ ID NO: 74334 - protein, 11 aa, synthetic construct
  source 1..11: note = Seed: YILFTRFFYVL
YALFTRFFYVT

SEQ ID NO: 74335 - protein, 11 aa, synthetic construct
  source 1..11: note = Seed: YILFTRFFYVL
YALFTRFFYVV

SEQ ID NO: 74336 - protein, 11 aa, synthetic construct
  source 1..11: note = Seed: YILFTRFFYVL
YALFTRFFYVW

SEQ ID NO: 74337 - protein, 11 aa, synthetic construct
  source 1..11: note = Seed: YILFTRFFYVL
YALFTRFFYVY

SEQ ID NO: 74338 - protein, 10 aa, synthetic construct
  source 1..10: note = Seed: YILFTRFFYV
YALFTRFFYY

SEQ ID NO: 74339 - protein, 9 aa, synthetic construct
  source 1..9: note = Seed: YKLGASQRV
YALGASQRF

SEQ ID NO: 74340 - protein, 9 aa, synthetic construct
  source 1..9: note = Seed: YKLGASQRV
YALGASQRY

SEQ ID NO: 74341 - protein, 10 aa, synthetic construct
  source 1..10: note = Seed: YSLLMPILTL
YALLMPILTA

SEQ ID NO: 74342 - protein, 10 aa, synthetic construct
  source 1..10: note = Seed: YSLLMPILTL
YALLMPILTF

SEQ ID NO: 74343 - protein, 10 aa, synthetic construct
  source 1..10: note = Seed: YSLLMPILTL
YALLMPILTI

SEQ ID NO: 74344 - protein, 10 aa, synthetic construct
  source 1..10: note = Seed: YSLLMPILTL
YALLMPILTL

SEQ ID NO: 74345 - protein, 10 aa, synthetic construct
  source 1..10: note = Seed: YSLLMPILTL
YALLMPILTM

SEQ ID NO: 74346 - protein, 10 aa, synthetic construct
  source 1..10: note = Seed: YSLLMPILTL
YALLMPILTV

SEQ ID NO: 74347 - protein, 10 aa, synthetic construct
  source 1..10: note = Seed: YSLLMPILTL
YALLMPILTW

SEQ ID NO: 74348 - protein, 10 aa, synthetic construct
  source 1..10: note = Seed: YSLLMPILTL
YALLMPILTY

SEQ ID NO: 74349 - protein, 10 aa, synthetic construct
  source 1..10: note = Seed: YHLMSFPQSA
YALMSFPQSA

SEQ ID NO: 74350 - protein, 11 aa, synthetic construct
  source 1..11: note = Seed: YHLMSFPQSAP
YALMSFPQSAV

SEQ ID NO: 74351 - protein, 10 aa, synthetic construct
  source 1..10: note = Seed: YHLMSFPQSA
YALMSFPQSI

SEQ ID NO: 74352 - protein, 10 aa, synthetic construct
  source 1..10: note = Seed: YHLMSFPQSA
YALMSFPQSL

SEQ ID NO: 74353 - protein, 10 aa, synthetic construct
  source 1..10: note = Seed: YHLMSFPQSA
YALMSFPQSM

SEQ ID NO: 74354 - protein, 10 aa, synthetic construct
  source 1..10: note = Seed: YHLMSFPQSA
YALMSFPQST

SEQ ID NO: 74355 - protein, 10 aa, synthetic construct
  source 1..10: note = Seed: YHLMSFPQSA
YALMSFPQSV

SEQ ID NO: 74356 - protein, 9 aa, synthetic construct
  source 1..9: note = Seed: YELQTPFEI
YALQTPFEI

SEQ ID NO: 74357 - protein, 9 aa, synthetic construct
  source 1..9: note = Seed: YELQTPFEI
YALQTPFEL

SEQ ID NO: 74358 - protein, 9 aa, synthetic construct
  source 1..9: note = Seed: YELQTPFEI
YALQTPFEV

SEQ ID NO: 74359 - protein, 10 aa, synthetic construct
  source 1..10: note = Seed: YDLSVVNARL
YALSVVNARA

SEQ ID NO: 74360 - protein, 10 aa, synthetic construct
  source 1..10: note = Seed: YDLSVVNARL
YALSVVNARI

SEQ ID NO: 74361 - protein, 10 aa, synthetic construct
  source 1..10: note = Seed: YDLSVVNARL
YALSVVNARL

SEQ ID NO: 74362 - protein, 10 aa, synthetic construct
  source 1..10: note = Seed: YDLSVVNARL
YALSVVNARM

SEQ ID NO: 74363 - protein, 10 aa, synthetic construct
  source 1..10: note = Seed: YDLSVVNARL
YALSVVNARV

SEQ ID NO: 74364 - protein, 8 aa, synthetic construct
  source 1..8: note = Seed: YTMADLVY
YAMADLVF

SEQ ID NO: 74365 - protein, 8 aa, synthetic construct
  source 1..8: note = Seed: YTMADLVY
YAMADLVL

SEQ ID NO: 74366 - protein, 8 aa, synthetic construct
  source 1..8: note = Seed: YTMADLVY
YAMADLVM

SEQ ID NO: 74367 - protein, 8 aa, synthetic construct
  source 1..8: note = Seed: YTMADLVY
YAMADLVY

SEQ ID NO: 74368 - protein, 9 aa, synthetic construct
  source 1..9: note = Seed: YTMADLVYA
YAMADLVYA

SEQ ID NO: 74369 - protein, 10 aa, synthetic construct
  source 1..10: note = Seed: YTMADLVYAL
YAMADLVYAA

SEQ ID NO: 74370 - protein, 10 aa, synthetic construct
  source 1..10: note = Seed: YTMADLVYAL
YAMADLVYAC

SEQ ID NO: 74371 - protein, 10 aa, synthetic construct
  source 1..10: note = Seed: YTMADLVYAL
YAMADLVYAF

SEQ ID NO: 74372 - protein, 10 aa, synthetic construct
  source 1..10: note = Seed: YTMADLVYAL
YAMADLVYAG

SEQ ID NO: 74373 - protein, 10 aa, synthetic construct
  source 1..10: note = Seed: YTMADLVYAL
YAMADLVYAI

SEQ ID NO: 74374 - protein, 10 aa, synthetic construct
  source 1..10: note = Seed: YTMADLVYAL
YAMADLVYAL

SEQ ID NO: 74375 - protein, 11 aa, synthetic construct
  source 1..11: note = Seed: YTMADLVYALR
YAMADLVYALA

SEQ ID NO: 74376 - protein, 11 aa, synthetic construct
  source 1..11: note = Seed: YTMADLVYALR
YAMADLVYALC

SEQ ID NO: 74377 - protein, 11 aa, synthetic construct
  source 1..11: note = Seed: YTMADLVYALR
YAMADLVYALD

SEQ ID NO: 74378 - protein, 11 aa, synthetic construct
  source 1..11: note = Seed: YTMADLVYALR
YAMADLVYALE

SEQ ID NO: 74379 - protein, 11 aa, synthetic construct
  source 1..11: note = Seed: YTMADLVYALR
YAMADLVYALF

SEQ ID NO: 74380 - protein, 11 aa, synthetic construct
  source 1..11: note = Seed: YTMADLVYALR
YAMADLVYALG

SEQ ID NO: 74381 - protein, 11 aa, synthetic construct
  source 1..11: note = Seed: YTMADLVYALR
YAMADLVYALH

SEQ ID NO: 74382 - protein, 11 aa, synthetic construct
  source 1..11: note = Seed: YTMADLVYALR
YAMADLVYALI

SEQ ID NO: 74383 - protein, 11 aa, synthetic construct
  source 1..11: note = Seed: YTMADLVYALR
YAMADLVYALK

SEQ ID NO: 74384 - protein, 11 aa, synthetic construct
  source 1..11: note = Seed: YTMADLVYALR
YAMADLVYALL

SEQ ID NO: 74385 - protein, 11 aa, synthetic construct
  source 1..11: note = Seed: YTMADLVYALR
YAMADLVYALM

SEQ ID NO: 74386 - protein, 11 aa, synthetic construct
  source 1..11: note = Seed: YTMADLVYALR
YAMADLVYALN

SEQ ID NO: 74387 - protein, 11 aa, synthetic construct
  source 1..11: note = Seed: YTMADLVYALR
YAMADLVYALP

SEQ ID NO: 74388 - protein, 11 aa, synthetic construct
  source 1..11: note = Seed: YTMADLVYALR
YAMADLVYALQ

SEQ ID NO: 74389 - protein, 11 aa, synthetic construct
  source 1..11: note = Seed: YTMADLVYALR
YAMADLVYALR

SEQ ID NO: 74390 - protein, 11 aa, synthetic construct
  source 1..11: note = Seed: YTMADLVYALR
YAMADLVYALS

SEQ ID NO: 74391 - protein, 11 aa, synthetic construct
  source 1..11: note = Seed: YTMADLVYALR
YAMADLVYALT

SEQ ID NO: 74392 - protein, 11 aa, synthetic construct
  source 1..11: note = Seed: YTMADLVYALR
YAMADLVYALV

SEQ ID NO: 74393 - protein, 11 aa, synthetic construct
  source 1..11: note = Seed: YTMADLVYALR
YAMADLVYALW

SEQ ID NO: 74394 - protein, 11 aa, synthetic construct
  source 1..11: note = Seed: YTMADLVYALR
YAMADLVYALY

SEQ ID NO: 74395 - protein, 10 aa, synthetic construct
  source 1..10: note = Seed: YTMADLVYAL
YAMADLVYAM

SEQ ID NO: 74396 - protein, 10 aa, synthetic construct
  source 1..10: note = Seed: YTMADLVYAL
YAMADLVYAS

SEQ ID NO: 74397 - protein, 10 aa, synthetic construct
  source 1..10: note = Seed: YTMADLVYAL
YAMADLVYAT

SEQ ID NO: 74398 - protein, 10 aa, synthetic construct
  source 1..10: note = Seed: YTMADLVYAL
YAMADLVYAV

SEQ ID NO: 74399 - protein, 10 aa, synthetic construct
  source 1..10: note = Seed: YTMADLVYAL
YAMADLVYAW

SEQ ID NO: 74400 - protein, 10 aa, synthetic construct
  source 1..10: note = Seed: YTMADLVYAL
YAMADLVYAY

SEQ ID NO: 74401 - protein, 9 aa, synthetic construct
  source 1..9: note = Seed: YTMADLVYA
YAMADLVYC

SEQ ID NO: 74402 - protein, 9 aa, synthetic construct
  source 1..9: note = Seed: YTMADLVYA
YAMADLVYF

SEQ ID NO: 74403 - protein, 9 aa, synthetic construct
  source 1..9: note = Seed: YTMADLVYA
YAMADLVYH

SEQ ID NO: 74404 - protein, 9 aa, synthetic construct
  source 1..9: note = Seed: YTMADLVYA
YAMADLVYI

SEQ ID NO: 74405 - protein, 9 aa, synthetic construct
  source 1..9: note = Seed: YTMADLVYA
YAMADLVYK

SEQ ID NO: 74406 - protein, 9 aa, synthetic construct
  source 1..9: note = Seed: YTMADLVYA
YAMADLVYL

SEQ ID NO: 74407 - protein, 9 aa, synthetic construct
  source 1..9: note = Seed: YTMADLVYA
YAMADLVYM

SEQ ID NO: 74408 - protein, 9 aa, synthetic construct
  source 1..9: note = Seed: YTMADLVYA
YAMADLVYR

SEQ ID NO: 74409 - protein, 9 aa, synthetic construct
  source 1..9: note = Seed: YTMADLVYA
YAMADLVYS

SEQ ID NO: 74410 - protein, 9 aa, synthetic construct
  source 1..9: note = Seed: YTMADLVYA
YAMADLVYT

SEQ ID NO: 74411 - protein, 9 aa, synthetic construct
  source 1..9: note = Seed: YTMADLVYA
YAMADLVYV

SEQ ID NO: 74412 - protein, 9 aa, synthetic construct
  source 1..9: note = Seed: YTMADLVYA
YAMADLVYW

SEQ ID NO: 74413 - protein, 9 aa, synthetic construct
  source 1..9: note = Seed: YTMADLVYA
YAMADLVYY

SEQ ID NO: 74414 - protein, 9 aa, synthetic construct
  source 1..9: note = Seed: YVMHANYIF
YAMHANYIF

SEQ ID NO: 74415 - protein, 10 aa, synthetic construct
  source 1..10: note = Seed: YVMHANYIFW
YAMHANYIFF

SEQ ID NO: 74416 - protein, 10 aa, synthetic construct
  source 1..10: note = Seed: YVMHANYIFW
YAMHANYIFW

SEQ ID NO: 74417 - protein, 10 aa, synthetic construct
  source 1..10: note = Seed: YVMHANYIFW
YAMHANYIFY

SEQ ID NO: 74418 - protein, 9 aa, synthetic construct
  source 1..9: note = Seed: YVMHANYIF
YAMHANYIH

SEQ ID NO: 74419 - protein, 9 aa, synthetic construct
  source 1..9: note = Seed: YVMHANYIF
YAMHANYII

SEQ ID NO: 74420 - protein, 9 aa, synthetic construct
  source 1..9: note = Seed: YVMHANYIF
YAMHANYIL

SEQ ID NO: 74421 - protein, 9 aa, synthetic construct
  source 1..9: note = Seed: YVMHANYIF
YAMHANYIM

SEQ ID NO: 74422 - protein, 9 aa, synthetic construct
  source 1..9: note = Seed: YVMHANYIF
YAMHANYIV

SEQ ID NO: 74423 - protein, 9 aa, synthetic construct
  source 1..9: note = Seed: YVMHANYIF
YAMHANYIW

SEQ ID NO: 74424 - protein, 9 aa, synthetic construct
  source 1..9: note = Seed: YVMHANYIF
YAMHANYIY

SEQ ID NO: 74425 - protein, 9 aa, synthetic construct
  source 1..9: note = Seed: YTNDKACPL
YANDKACPF

SEQ ID NO: 74426 - protein, 9 aa, synthetic construct
  source 1..9: note = Seed: YTNDKACPL
YANDKACPI

SEQ ID NO: 74427 - protein, 9 aa, synthetic construct
  source 1..9: note = Seed: YTNDKACPL
YANDKACPL

SEQ ID NO: 74428 - protein, 9 aa, synthetic construct
  source 1..9: note = Seed: YTNDKACPL
YANDKACPM

SEQ ID NO: 74429 - protein, 9 aa, synthetic construct
  source 1..9: note = Seed: YTNDKACPL
YANDKACPV

SEQ ID NO: 74430 - protein, 9 aa, synthetic construct
  source 1..9: note = Seed: YTNDKACPL
YANDKACPW

SEQ ID NO: 74431 - protein, 9 aa, synthetic construct
  source 1..9: note = Seed: YTNDKACPL
YANDKACPY

SEQ ID NO: 74432 - protein, 9 aa, synthetic construct
  source 1..9: note = Seed: YFNMVYMPA
YANMVYMPL

SEQ ID NO: 74433 - protein, 9 aa, synthetic construct
  source 1..9: note = Seed: YFNMVYMPA
YANMVYMPM

SEQ ID NO: 74434 - protein, 9 aa, synthetic construct
  source 1..9: note = Seed: YFNMVYMPA
YANMVYMPY

SEQ ID NO: 74435 - protein, 8 aa, synthetic construct
  source 1..8: note = Seed: YSNNSIAI
YANNSIAF

SEQ ID NO: 74436 - protein, 8 aa, synthetic construct
  source 1..8: note = Seed: YSNNSIAI
YANNSIAI

SEQ ID NO: 74437 - protein, 8 aa, synthetic construct
  source 1..8: note = Seed: YSNNSIAI
YANNSIAL

SEQ ID NO: 74438 - protein, 8 aa, synthetic construct
  source 1..8: note = Seed: YSNNSIAI
YANNSIAM

SEQ ID NO: 74439 - protein, 8 aa, synthetic construct
  source 1..8: note = Seed: YSNNSIAI
YANNSIAV

SEQ ID NO: 74440 - protein, 8 aa, synthetic construct
  source 1..8: note = Seed: YSNNSIAI
YANNSIAY

SEQ ID NO: 74441 - protein, 10 aa, synthetic construct
  source 1..10: note = Seed: YQNNVFMSEA
YANNVFMSEF

SEQ ID NO: 74442 - protein, 10 aa, synthetic construct
  source 1..10: note = Seed: YQNNVFMSEA
YANNVFMSEV

SEQ ID NO: 74443 - protein, 10 aa, synthetic construct
  source 1..10: note = Seed: YQNNVFMSEA
YANNVFMSEY

SEQ ID NO: 74444 - protein, 9 aa, synthetic construct
  source 1..9: note = Seed: YQNNVFMSE
YANNVFMSF

SEQ ID NO: 74445 - protein, 9 aa, synthetic construct
  source 1..9: note = Seed: YQNNVFMSE
YANNVFMSI

SEQ ID NO: 74446 - protein, 9 aa, synthetic construct
  source 1..9: note = Seed: YQNNVFMSE
YANNVFMSL

SEQ ID NO: 74447 - protein, 9 aa, synthetic construct
  source 1..9: note = Seed: YQNNVFMSE
YANNVFMSM

SEQ ID NO: 74448 - protein, 9 aa, synthetic construct
  source 1..9: note = Seed: YQNNVFMSE
YANNVFMSY

SEQ ID NO: 74449 - protein, 9 aa, synthetic construct
  source 1..9: note = Seed: YANSVFNIC
YANSVFNIA

SEQ ID NO: 74450 - protein, 9 aa, synthetic construct
  source 1..9: note = Seed: YANSVFNIC
YANSVFNIF

SEQ ID NO: 74451 - protein, 9 aa, synthetic construct
  source 1..9: note = Seed: YANSVFNIC
YANSVFNIH

SEQ ID NO: 74452 - protein, 9 aa, synthetic construct
  source 1..9: note = Seed: YANSVFNIC
YANSVFNII

SEQ ID NO: 74453 - protein, 9 aa, synthetic construct
  source 1..9: note = Seed: YANSVFNIC
YANSVFNIL

SEQ ID NO: 74454 - protein, 9 aa, synthetic construct
  source 1..9: note = Seed: YANSVFNIC
YANSVFNIM

SEQ ID NO: 74455 - protein, 9 aa, synthetic construct
  source 1..9: note = Seed: YANSVFNIC
YANSVFNIV

SEQ ID NO: 74456 - protein, 9 aa, synthetic construct
  source 1..9: note = Seed: YANSVFNIC
YANSVFNIW

SEQ ID NO: 74457 - protein, 9 aa, synthetic construct
  source 1..9: note = Seed: YANSVFNIC
YANSVFNIY

SEQ ID NO: 74458 - protein, 8 aa, synthetic construct
  source 1..8: note = Seed: YANSVFNI
YANSVFNL

SEQ ID NO: 74459 - protein, 8 aa, synthetic construct
  source 1..8: note = Seed: YANSVFNI
YANSVFNM

SEQ ID NO: 74460 - protein, 8 aa, synthetic construct
  source 1..8: note = Seed: YANSVFNI
YANSVFNY

SEQ ID NO: 74461 - protein, 9 aa, synthetic construct
  source 1..9: note = Seed: YVNTFSSTF
YANTFSSTA

SEQ ID NO: 74462 - protein, 9 aa, synthetic construct
  source 1..9: note = Seed: YVNTFSSTF
YANTFSSTF

SEQ ID NO: 74463 - protein, 9 aa, synthetic construct
  source 1..9: note = Seed: YVNTFSSTF
YANTFSSTH

SEQ ID NO: 74464 - protein, 9 aa, synthetic construct
  source 1..9: note = Seed: YVNTFSSTF
YANTFSSTI

SEQ ID NO: 74465 - protein, 9 aa, synthetic construct
  source 1..9: note = Seed: YVNTFSSTF
YANTFSSTL

SEQ ID NO: 74466 - protein, 9 aa, synthetic construct
  source 1..9: note = Seed: YVNTFSSTF
YANTFSSTM

SEQ ID NO: 74467 - protein, 9 aa, synthetic construct
  source 1..9: note = Seed: YVNTFSSTF
YANTFSSTV

SEQ ID NO: 74468 - protein, 9 aa, synthetic construct
  source 1..9: note = Seed: YVNTFSSTF
YANTFSSTW

SEQ ID NO: 74469 - protein, 9 aa, synthetic construct
  source 1..9: note = Seed: YVNTFSSTF
YANTFSSTY

SEQ ID NO: 74470 - protein, 10 aa, synthetic construct
  source 1..10: note = Seed: YTPHTVLQAV
YAPHTVLQAA

SEQ ID NO: 74471 - protein, 10 aa, synthetic construct
  source 1..10: note = Seed: YTPHTVLQAV
YAPHTVLQAI

SEQ ID NO: 74472 - protein, 10 aa, synthetic construct
  source 1..10: note = Seed: YTPHTVLQAV
YAPHTVLQAL

SEQ ID NO: 74473 - protein, 10 aa, synthetic construct
  source 1..10: note = Seed: YTPHTVLQAV
YAPHTVLQAM

SEQ ID NO: 74474 - protein, 10 aa, synthetic construct
  source 1..10: note = Seed: YTPHTVLQAV
YAPHTVLQAV

SEQ ID NO: 74475 - protein, 9 aa, synthetic construct
  source 1..9: note = Seed: YTPHTVLQA
YAPHTVLQV

SEQ ID NO: 74476 - protein, 10 aa, synthetic construct
  source 1..10: note = Seed: YVPLKSATCI
YAPLKSATCL

SEQ ID NO: 74477 - protein, 9 aa, synthetic construct
  source 1..9: note = Seed: YVPLKSATC
YAPLKSATF

SEQ ID NO: 74478 - protein, 9 aa, synthetic construct
  source 1..9: note = Seed: YVPLKSATC
YAPLKSATI

SEQ ID NO: 74479 - protein, 9 aa, synthetic construct
  source 1..9: note = Seed: YVPLKSATC
YAPLKSATL

SEQ ID NO: 74480 - protein, 9 aa, synthetic construct
  source 1..9: note = Seed: YVPLKSATC
YAPLKSATM

SEQ ID NO: 74481 - protein, 9 aa, synthetic construct
  source 1..9: note = Seed: YVPLKSATC
YAPLKSATV

SEQ ID NO: 74482 - protein, 8 aa, synthetic construct
  source 1..8: note = Seed: YMPYFFTL
YAPYFFTF

SEQ ID NO: 74483 - protein, 8 aa, synthetic construct
  source 1..8: note = Seed: YMPYFFTL
YAPYFFTI

SEQ ID NO: 74484 - protein, 8 aa, synthetic construct
  source 1..8: note = Seed: YMPYFFTL
YAPYFFTL

SEQ ID NO: 74485 - protein, 9 aa, synthetic construct
  source 1..9: note = Seed: YMPYFFTLL
YAPYFFTLA

SEQ ID NO: 74486 - protein, 9 aa, synthetic construct
  source 1..9: note = Seed: YMPYFFTLL
YAPYFFTLF

SEQ ID NO: 74487 - protein, 9 aa, synthetic construct
  source 1..9: note = Seed: YMPYFFTLL
YAPYFFTLI

SEQ ID NO: 74488 - protein, 9 aa, synthetic construct
  source 1..9: note = Seed: YMPYFFTLL
YAPYFFTLL

SEQ ID NO: 74489 - protein, 10 aa, synthetic construct
  source 1..10: note = Seed: YMPYFFTLLL
YAPYFFTLLA

SEQ ID NO: 74490 - protein, 10 aa, synthetic construct
  source 1..10: note = Seed: YMPYFFTLLL
YAPYFFTLLF

SEQ ID NO: 74491 - protein, 10 aa, synthetic construct
  source 1..10: note = Seed: YMPYFFTLLL
YAPYFFTLLL

SEQ ID NO: 74492 - protein, 10 aa, synthetic construct
  source 1..10: note = Seed: YMPYFFTLLL
YAPYFFTLLM

SEQ ID NO: 74493 - protein, 10 aa, synthetic construct
  source 1..10: note = Seed: YMPYFFTLLL
YAPYFFTLLT

SEQ ID NO: 74494 - protein, 10 aa, synthetic construct
  source 1..10: note = Seed: YMPYFFTLLL
YAPYFFTLLV

SEQ ID NO: 74495 - protein, 10 aa, synthetic construct
  source 1..10: note = Seed: YMPYFFTLLL
YAPYFFTLLW

SEQ ID NO: 74496 - protein, 10 aa, synthetic construct
  source 1..10: note = Seed: YMPYFFTLLL
YAPYFFTLLY

SEQ ID NO: 74497 - protein, 9 aa, synthetic construct
  source 1..9: note = Seed: YMPYFFTLL
YAPYFFTLM

SEQ ID NO: 74498 - protein, 9 aa, synthetic construct
  source 1..9: note = Seed: YMPYFFTLL
YAPYFFTLV

SEQ ID NO: 74499 - protein, 9 aa, synthetic construct
  source 1..9: note = Seed: YMPYFFTLL
YAPYFFTLY

SEQ ID NO: 74500 - protein, 9 aa, synthetic construct
  source 1..9: note = Seed: YQPYRVVVL
YAPYRVVVF

SEQ ID NO: 74501 - protein, 9 aa, synthetic construct
  source 1..9: note = Seed: YQPYRVVVL
YAPYRVVVI

SEQ ID NO: 74502 - protein, 9 aa, synthetic construct
  source 1..9: note = Seed: YQPYRVVVL
YAPYRVVVL

SEQ ID NO: 74503 - protein, 10 aa, synthetic construct
  source 1..10: note = Seed: YQPYRVVVLS
YAPYRVVVLA

SEQ ID NO: 74504 - protein, 9 aa, synthetic construct
  source 1..9: note = Seed: YQPYRVVVL
YAPYRVVVM

SEQ ID NO: 74505 - protein, 9 aa, synthetic construct
  source 1..9: note = Seed: YQPYRVVVL
YAPYRVVVV

SEQ ID NO: 74506 - protein, 9 aa, synthetic construct
  source 1..9: note = Seed: YQPYRVVVL
YAPYRVVVY

SEQ ID NO: 74507 - protein, 9 aa, synthetic construct
  source 1..9: note = Seed: YKQFDTYNL
YAQFDTYNF

SEQ ID NO: 74508 - protein, 10 aa, synthetic construct
  source 1..10: note = Seed: YKQFDTYNLW
YAQFDTYNLF

SEQ ID NO: 74509 - protein, 10 aa, synthetic construct
  source 1..10: note = Seed: YKQFDTYNLW
YAQFDTYNLM

SEQ ID NO: 74510 - protein, 10 aa, synthetic construct
  source 1..10: note = Seed: YKQFDTYNLW
YAQFDTYNLW

SEQ ID NO: 74511 - protein, 10 aa, synthetic construct
  source 1..10: note = Seed: YKQFDTYNLW
YAQFDTYNLY

SEQ ID NO: 74512 - protein, 9 aa, synthetic construct
  source 1..9: note = Seed: YSQLMCQPI
YAQLMCQPF

SEQ ID NO: 74513 - protein, 9 aa, synthetic construct
  source 1..9: note = Seed: YSQLMCQPI
YAQLMCQPI

SEQ ID NO: 74514 - protein, 10 aa, synthetic construct
  source 1..10: note = Seed: YSQLMCQPIL
YAQLMCQPIF

SEQ ID NO: 74515 - protein, 11 aa, synthetic construct
  source 1..11: note = Seed: YSQLMCQPILL
YAQLMCQPILA

SEQ ID NO: 74516 - protein, 11 aa, synthetic construct
  source 1..11: note = Seed: YSQLMCQPILL
YAQLMCQPILI

SEQ ID NO: 74517 - protein, 11 aa, synthetic construct
  source 1..11: note = Seed: YSQLMCQPILL
YAQLMCQPILL

SEQ ID NO: 74518 - protein, 11 aa, synthetic construct
  source 1..11: note = Seed: YSQLMCQPILL
YAQLMCQPILM

SEQ ID NO: 74519 - protein, 11 aa, synthetic construct
  source 1..11: note = Seed: YSQLMCQPILL
YAQLMCQPILV

SEQ ID NO: 74520 - protein, 10 aa, synthetic construct
  source 1..10: note = Seed: YSQLMCQPIL
YAQLMCQPIY

SEQ ID NO: 74521 - protein, 9 aa, synthetic construct
  source 1..9: note = Seed: YSQLMCQPI
YAQLMCQPL

SEQ ID NO: 74522 - protein, 9 aa, synthetic construct
  source 1..9: note = Seed: YSQLMCQPI
YAQLMCQPM

SEQ ID NO: 74523 - protein, 9 aa, synthetic construct
  source 1..9: note = Seed: YSQLMCQPI
YAQLMCQPY

SEQ ID NO: 74524 - protein, 9 aa, synthetic construct
  source 1..9: note = Seed: YYQNNVFMS
YAQNNVFMF

SEQ ID NO: 74525 - protein, 9 aa, synthetic construct
  source 1..9: note = Seed: YLQPRTFLL
YAQPRTFLA

SEQ ID NO: 74526 - protein, 9 aa, synthetic construct
  source 1..9: note = Seed: YLQPRTFLL
YAQPRTFLF

SEQ ID NO: 74527 - protein, 9 aa, synthetic construct
  source 1..9: note = Seed: YLQPRTFLL
YAQPRTFLH

SEQ ID NO: 74528 - protein, 9 aa, synthetic construct
  source 1..9: note = Seed: YLQPRTFLL
YAQPRTFLI

SEQ ID NO: 74529 - protein, 9 aa, synthetic construct
  source 1..9: note = Seed: YLQPRTFLL
YAQPRTFLL

SEQ ID NO: 74530 - protein, 10 aa, synthetic construct
  source 1..10: note = Seed: YLQPRTFLLK
YAQPRTFLLK

SEQ ID NO: 74531 - protein, 10 aa, synthetic construct
  source 1..10: note = Seed: YLQPRTFLLK
YAQPRTFLLR

SEQ ID NO: 74532 - protein, 9 aa, synthetic construct
  source 1..9: note = Seed: YLQPRTFLL
YAQPRTFLM

SEQ ID NO: 74533 - protein, 9 aa, synthetic construct
  source 1..9: note = Seed: YLQPRTFLL
YAQPRTFLV

SEQ ID NO: 74534 - protein, 9 aa, synthetic construct
  source 1..9: note = Seed: YLQPRTFLL
YAQPRTFLY

SEQ ID NO: 74535 - protein, 9 aa, synthetic construct
  source 1..9: note = Seed: YPQVNGLTS
YAQVNGLTF

SEQ ID NO: 74536 - protein, 9 aa, synthetic construct
  source 1..9: note = Seed: YPQVNGLTS
YAQVNGLTM

SEQ ID NO: 74537 - protein, 10 aa, synthetic construct
  source 1..10: note = Seed: YPQVNGLTSI
YAQVNGLTSF

SEQ ID NO: 74538 - protein, 10 aa, synthetic construct
  source 1..10: note = Seed: YPQVNGLTSI
YAQVNGLTSI

SEQ ID NO: 74539 - protein, 10 aa, synthetic construct
  source 1..10: note = Seed: YPQVNGLTSI
YAQVNGLTSL

SEQ ID NO: 74540 - protein, 10 aa, synthetic construct
  source 1..10: note = Seed: YPQVNGLTSI
YAQVNGLTSM

SEQ ID NO: 74541 - protein, 10 aa, synthetic construct
  source 1..10: note = Seed: YPQVNGLTSI
YAQVNGLTSV

SEQ ID NO: 74542 - protein, 10 aa, synthetic construct
  source 1..10: note = Seed: YPQVNGLTSI
YAQVNGLTSY

SEQ ID NO: 74543 - protein, 9 aa, synthetic construct
  source 1..9: note = Seed: YPQVNGLTS
YAQVNGLTY

SEQ ID NO: 74544 - protein, 9 aa, synthetic construct
  source 1..9: note = Seed: YKRDAPAHI
YARDAPAHF

SEQ ID NO: 74545 - protein, 9 aa, synthetic construct
  source 1..9: note = Seed: YKRDAPAHI
YARDAPAHY

SEQ ID NO: 74546 - protein, 10 aa, synthetic construct
  source 1..10: note = Seed: YRRLISMMGF
YARLISMMGF

SEQ ID NO: 74547 - protein, 10 aa, synthetic construct
  source 1..10: note = Seed: YRRLISMMGF
YARLISMMGI

SEQ ID NO: 74548 - protein, 10 aa, synthetic construct
  source 1..10: note = Seed: YRRLISMMGF
YARLISMMGL

SEQ ID NO: 74549 - protein, 10 aa, synthetic construct
  source 1..10: note = Seed: YRRLISMMGF
YARLISMMGM

SEQ ID NO: 74550 - protein, 9 aa, synthetic construct
  source 1..9: note = Seed: YFRLTLGVY
YARLTLGVF

SEQ ID NO: 74551 - protein, 9 aa, synthetic construct
  source 1..9: note = Seed: YFRLTLGVY
YARLTLGVM

SEQ ID NO: 74552 - protein, 9 aa, synthetic construct
  source 1..9: note = Seed: YFRLTLGVY
YARLTLGVY

SEQ ID NO: 74553 - protein, 9 aa, synthetic construct
  source 1..9: note = Seed: YVRNLQHRL
YARNLQHRF

SEQ ID NO: 74554 - protein, 9 aa, synthetic construct
  source 1..9: note = Seed: YVRNLQHRL
YARNLQHRI

SEQ ID NO: 74555 - protein, 9 aa, synthetic construct
  source 1..9: note = Seed: YVRNLQHRL
YARNLQHRL

SEQ ID NO: 74556 - protein, 9 aa, synthetic construct
  source 1..9: note = Seed: YVRNLQHRL
YARNLQHRM

SEQ ID NO: 74557 - protein, 9 aa, synthetic construct
  source 1..9: note = Seed: YVRNLQHRL
YARNLQHRV

SEQ ID NO: 74558 - protein, 9 aa, synthetic construct
  source 1..9: note = Seed: YVRNLQHRL
YARNLQHRY

SEQ ID NO: 74559 - protein, 9 aa, synthetic construct
  source 1..9: note = Seed: YKRNRATRV
YARNRATRL

SEQ ID NO: 74560 - protein, 9 aa, synthetic construct
  source 1..9: note = Seed: YKRNRATRV
YARNRATRM

SEQ ID NO: 74561 - protein, 9 aa, synthetic construct
  source 1..9: note = Seed: YYRSLPGVF
YARSLPGVF

SEQ ID NO: 74562 - protein, 9 aa, synthetic construct
  source 1..9: note = Seed: YYRSLPGVF
YARSLPGVM

SEQ ID NO: 74563 - protein, 9 aa, synthetic construct
  source 1..9: note = Seed: YYRSLPGVF
YARSLPGVY

SEQ ID NO: 74564 - protein, 9 aa, synthetic construct
  source 1..9: note = Seed: YYRYNLPTM
YARYNLPTA

SEQ ID NO: 74565 - protein, 9 aa, synthetic construct
  source 1..9: note = Seed: YYRYNLPTM
YARYNLPTF

SEQ ID NO: 74566 - protein, 9 aa, synthetic construct
  source 1..9: note = Seed: YYRYNLPTM
YARYNLPTI

SEQ ID NO: 74567 - protein, 9 aa, synthetic construct
  source 1..9: note = Seed: YYRYNLPTM
YARYNLPTK

SEQ ID NO: 74568 - protein, 9 aa, synthetic construct
  source 1..9: note = Seed: YYRYNLPTM
YARYNLPTL

SEQ ID NO: 74569 - protein, 9 aa, synthetic construct
  source 1..9: note = Seed: YYRYNLPTM
YARYNLPTM

SEQ ID NO: 74570 - protein, 10 aa, synthetic construct
  source 1..10: note = Seed: YYRYNLPTMC
YARYNLPTMF

SEQ ID NO: 74571 - protein, 10 aa, synthetic construct
  source 1..10: note = Seed: YYRYNLPTMC
YARYNLPTMI

SEQ ID NO: 74572 - protein, 10 aa, synthetic construct
  source 1..10: note = Seed: YYRYNLPTMC
YARYNLPTML

SEQ ID NO: 74573 - protein, 10 aa, synthetic construct
  source 1..10: note = Seed: YYRYNLPTMC
YARYNLPTMM

SEQ ID NO: 74574 - protein, 10 aa, synthetic construct
  source 1..10: note = Seed: YYRYNLPTMC
YARYNLPTMV

SEQ ID NO: 74575 - protein, 9 aa, synthetic construct
  source 1..9: note = Seed: YYRYNLPTM
YARYNLPTV

SEQ ID NO: 74576 - protein, 9 aa, synthetic construct
  source 1..9: note = Seed: YYRYNLPTM
YARYNLPTW

SEQ ID NO: 74577 - protein, 9 aa, synthetic construct
  source 1..9: note = Seed: YYRYNLPTM
YARYNLPTY

SEQ ID NO: 74578 - protein, 9 aa, synthetic construct
  source 1..9: note = Seed: YSRYRIGNY
YARYRIGNF

SEQ ID NO: 74579 - protein, 9 aa, synthetic construct
  source 1..9: note = Seed: YSRYRIGNY
YARYRIGNI

SEQ ID NO: 74580 - protein, 9 aa, synthetic construct
  source 1..9: note = Seed: YSRYRIGNY
YARYRIGNK

SEQ ID NO: 74581 - protein, 9 aa, synthetic construct
  source 1..9: note = Seed: YSRYRIGNY
YARYRIGNL

SEQ ID NO: 74582 - protein, 9 aa, synthetic construct
  source 1..9: note = Seed: YSRYRIGNY
YARYRIGNM

SEQ ID NO: 74583 - protein, 9 aa, synthetic construct
  source 1..9: note = Seed: YSRYRIGNY
YARYRIGNV

SEQ ID NO: 74584 - protein, 9 aa, synthetic construct
  source 1..9: note = Seed: YSRYRIGNY
YARYRIGNW

SEQ ID NO: 74585 - protein, 9 aa, synthetic construct
  source 1..9: note = Seed: YSRYRIGNY
YARYRIGNY

SEQ ID NO: 74586 - protein, 10 aa, synthetic construct
  source 1..10: note = Seed: YSRYRIGNYK
YARYRIGNYF

SEQ ID NO: 74587 - protein, 10 aa, synthetic construct
  source 1..10: note = Seed: YSRYRIGNYK
YARYRIGNYK

SEQ ID NO: 74588 - protein, 11 aa, synthetic construct
  source 1..11: note = Seed: YSRYRIGNYKL
YARYRIGNYKF

SEQ ID NO: 74589 - protein, 10 aa, synthetic construct
  source 1..10: note = Seed: YSRYRIGNYK
YARYRIGNYL

SEQ ID NO: 74590 - protein, 10 aa, synthetic construct
  source 1..10: note = Seed: YSRYRIGNYK
YARYRIGNYM

SEQ ID NO: 74591 - protein, 10 aa, synthetic construct
  source 1..10: note = Seed: YSRYRIGNYK
YARYRIGNYR

SEQ ID NO: 74592 - protein, 9 aa, synthetic construct
  source 1..9: note = Seed: YSSANNCTF
YASANNCTF

SEQ ID NO: 74593 - protein, 11 aa, synthetic construct
  source 1..11: note = Seed: YSSANNCTFEY
YASANNCTFEW

SEQ ID NO: 74594 - protein, 11 aa, synthetic construct
  source 1..11: note = Seed: YSSANNCTFEY
YASANNCTFEY

SEQ ID NO: 74595 - protein, 9 aa, synthetic construct
  source 1..9: note = Seed: YSSANNCTF
YASANNCTI

SEQ ID NO: 74596 - protein, 9 aa, synthetic construct
  source 1..9: note = Seed: YSSANNCTF
YASANNCTL

SEQ ID NO: 74597 - protein, 9 aa, synthetic construct
  source 1..9: note = Seed: YSSANNCTF
YASANNCTM

SEQ ID NO: 74598 - protein, 9 aa, synthetic construct
  source 1..9: note = Seed: YSSANNCTF
YASANNCTV

SEQ ID NO: 74599 - protein, 9 aa, synthetic construct
  source 1..9: note = Seed: YSSANNCTF
YASANNCTW

SEQ ID NO: 74600 - protein, 9 aa, synthetic construct
  source 1..9: note = Seed: YSSANNCTF
YASANNCTY

SEQ ID NO: 74601 - protein, 9 aa, synthetic construct
  source 1..9: note = Seed: YNSASFSTF
YASASFSTA

SEQ ID NO: 74602 - protein, 9 aa, synthetic construct
  source 1..9: note = Seed: YNSASFSTF
YASASFSTC

SEQ ID NO: 74603 - protein, 9 aa, synthetic construct
  source 1..9: note = Seed: YNSASFSTF
YASASFSTF

SEQ ID NO: 74604 - protein, 10 aa, synthetic construct
  source 1..10: note = Seed: YNSASFSTFK
YASASFSTFK

SEQ ID NO: 74605 - protein, 10 aa, synthetic construct
  source 1..10: note = Seed: YNSASFSTFK
YASASFSTFR

SEQ ID NO: 74606 - protein, 9 aa, synthetic construct
  source 1..9: note = Seed: YNSASFSTF
YASASFSTH

SEQ ID NO: 74607 - protein, 9 aa, synthetic construct
  source 1..9: note = Seed: YNSASFSTF
YASASFSTI

SEQ ID NO: 74608 - protein, 9 aa, synthetic construct
  source 1..9: note = Seed: YNSASFSTF
YASASFSTL

SEQ ID NO: 74609 - protein, 9 aa, synthetic construct
  source 1..9: note = Seed: YNSASFSTF
YASASFSTM

SEQ ID NO: 74610 - protein, 9 aa, synthetic construct
  source 1..9: note = Seed: YNSASFSTF
YASASFSTV

SEQ ID NO: 74611 - protein, 9 aa, synthetic construct
  source 1..9: note = Seed: YNSASFSTF
YASASFSTW

SEQ ID NO: 74612 - protein, 9 aa, synthetic construct
  source 1..9: note = Seed: YNSASFSTF
YASASFSTY

SEQ ID NO: 74613 - protein, 9 aa, synthetic construct
  source 1..9: note = Seed: YASAVVLLI
YASAVVLLA

SEQ ID NO: 74614 - protein, 9 aa, synthetic construct
  source 1..9: note = Seed: YASAVVLLI
YASAVVLLF

SEQ ID NO: 74615 - protein, 9 aa, synthetic construct
  source 1..9: note = Seed: YASAVVLLI
YASAVVLLH

SEQ ID NO: 74616 - protein, 10 aa, synthetic construct
  source 1..10: note = Seed: YASAVVLLIL
YASAVVLLIF

SEQ ID NO: 74617 - protein, 10 aa, synthetic construct
  source 1..10: note = Seed: YASAVVLLIL
YASAVVLLIM

SEQ ID NO: 74618 - protein, 10 aa, synthetic construct
  source 1..10: note = Seed: YASAVVLLIL
YASAVVLLIV

SEQ ID NO: 74619 - protein, 10 aa, synthetic construct
  source 1..10: note = Seed: YASAVVLLIL
YASAVVLLIW

SEQ ID NO: 74620 - protein, 10 aa, synthetic construct
  source 1..10: note = Seed: YASAVVLLIL
YASAVVLLIY

SEQ ID NO: 74621 - protein, 9 aa, synthetic construct
  source 1..9: note = Seed: YASAVVLLI
YASAVVLLL

SEQ ID NO: 74622 - protein, 9 aa, synthetic construct
  source 1..9: note = Seed: YASAVVLLI
YASAVVLLM

SEQ ID NO: 74623 - protein, 9 aa, synthetic construct
  source 1..9: note = Seed: YASAVVLLI
YASAVVLLV

SEQ ID NO: 74624 - protein, 9 aa, synthetic construct
  source 1..9: note = Seed: YASAVVLLI
YASAVVLLW

SEQ ID NO: 74625 - protein, 9 aa, synthetic construct
  source 1..9: note = Seed: YASAVVLLI
YASAVVLLY

SEQ ID NO: 74626 - protein, 8 aa, synthetic construct
  source 1..8: note = Seed: YASAVVLL
YASAVVLM

SEQ ID NO: 74627 - protein, 8 aa, synthetic construct
  source 1..8: note = Seed: YASAVVLL
YASAVVLY

SEQ ID NO: 74628 - protein, 11 aa, synthetic construct
  source 1..11: note = Seed: YYSLLMPILTL
YASLLMPILTV

SEQ ID NO: 74629 - protein, 11 aa, synthetic construct
  source 1..11: note = Seed: YRSLPGVFCGV
YASLPGVFCGI

SEQ ID NO: 74630 - protein, 11 aa, synthetic construct
  source 1..11: note = Seed: YRSLPGVFCGV
YASLPGVFCGV

SEQ ID NO: 74631 - protein, 10 aa, synthetic construct
  source 1..10: note = Seed: YESLRPDTRY
YASLRPDTRF

SEQ ID NO: 74632 - protein, 10 aa, synthetic construct
  source 1..10: note = Seed: YESLRPDTRY
YASLRPDTRW

SEQ ID NO: 74633 - protein, 8 aa, synthetic construct
  source 1..8: note = Seed: YTSNPTTF
YASNPTTF

SEQ ID NO: 74634 - protein, 9 aa, synthetic construct
  source 1..9: note = Seed: YTSNPTTFH
YASNPTTFF

SEQ ID NO: 74635 - protein, 10 aa, synthetic construct
  source 1..10: note = Seed: YTSNPTTFHL
YASNPTTFHF

SEQ ID NO: 74636 - protein, 10 aa, synthetic construct
  source 1..10: note = Seed: YTSNPTTFHL
YASNPTTFHL

SEQ ID NO: 74637 - protein, 10 aa, synthetic construct
  source 1..10: note = Seed: YTSNPTTFHL
YASNPTTFHM

SEQ ID NO: 74638 - protein, 10 aa, synthetic construct
  source 1..10: note = Seed: YTSNPTTFHL
YASNPTTFHV

SEQ ID NO: 74639 - protein, 10 aa, synthetic construct
  source 1..10: note = Seed: YTSNPTTFHL
YASNPTTFHW

SEQ ID NO: 74640 - protein, 10 aa, synthetic construct
  source 1..10: note = Seed: YTSNPTTFHL
YASNPTTFHY

SEQ ID NO: 74641 - protein, 9 aa, synthetic construct
  source 1..9: note = Seed: YTSNPTTFH
YASNPTTFI

SEQ ID NO: 74642 - protein, 9 aa, synthetic construct
  source 1..9: note = Seed: YTSNPTTFH
YASNPTTFK

SEQ ID NO: 74643 - protein, 9 aa, synthetic construct
  source 1..9: note = Seed: YTSNPTTFH
YASNPTTFL

SEQ ID NO: 74644 - protein, 9 aa, synthetic construct
  source 1..9: note = Seed: YTSNPTTFH
YASNPTTFM

SEQ ID NO: 74645 - protein, 9 aa, synthetic construct
  source 1..9: note = Seed: YTSNPTTFH
YASNPTTFR

SEQ ID NO: 74646 - protein, 9 aa, synthetic construct
  source 1..9: note = Seed: YTSNPTTFH
YASNPTTFV

SEQ ID NO: 74647 - protein, 9 aa, synthetic construct
  source 1..9: note = Seed: YTSNPTTFH
YASNPTTFY

SEQ ID NO: 74648 - protein, 8 aa, synthetic construct
  source 1..8: note = Seed: YTSNPTTF
YASNPTTL

SEQ ID NO: 74649 - protein, 8 aa, synthetic construct
  source 1..8: note = Seed: YTSNPTTF
YASNPTTM

SEQ ID NO: 74650 - protein, 8 aa, synthetic construct
  source 1..8: note = Seed: YTSNPTTF
YASNPTTY

SEQ ID NO: 74651 - protein, 10 aa, synthetic construct
  source 1..10: note = Seed: YLTFYLTNDV
YATFYLTNDI

SEQ ID NO: 74652 - protein, 10 aa, synthetic construct
  source 1..10: note = Seed: YLTFYLTNDV
YATFYLTNDV

SEQ ID NO: 74653 - protein, 9 aa, synthetic construct
  source 1..9: note = Seed: YITGGVVQL
YATGGVVQF

SEQ ID NO: 74654 - protein, 9 aa, synthetic construct
  source 1..9: note = Seed: YITGGVVQL
YATGGVVQI

SEQ ID NO: 74655 - protein, 9 aa, synthetic construct
  source 1..9: note = Seed: YITGGVVQL
YATGGVVQL

SEQ ID NO: 74656 - protein, 9 aa, synthetic construct
  source 1..9: note = Seed: YITGGVVQL
YATGGVVQM

SEQ ID NO: 74657 - protein, 9 aa, synthetic construct
  source 1..9: note = Seed: YITGGVVQL
YATGGVVQV

SEQ ID NO: 74658 - protein, 9 aa, synthetic construct
  source 1..9: note = Seed: YITGGVVQL
YATGGVVQY

SEQ ID NO: 74659 - protein, 8 aa, synthetic construct
  source 1..8: note = Seed: YSTGSNVF
YATGSNVF

SEQ ID NO: 74660 - protein, 8 aa, synthetic construct
  source 1..8: note = Seed: YSTGSNVF
YATGSNVM

SEQ ID NO: 74661 - protein, 8 aa, synthetic construct
  source 1..8: note = Seed: YSTGSNVF
YATGSNVY

SEQ ID NO: 74662 - protein, 9 aa, synthetic construct
  source 1..9: note = Seed: YLTNDVSFL
YATNDVSFF

SEQ ID NO: 74663 - protein, 9 aa, synthetic construct
  source 1..9: note = Seed: YLTNDVSFL
YATNDVSFI

SEQ ID NO: 74664 - protein, 9 aa, synthetic construct
  source 1..9: note = Seed: YLTNDVSFL
YATNDVSFL

SEQ ID NO: 74665 - protein, 10 aa, synthetic construct
  source 1..10: note = Seed: YLTNDVSFLA
YATNDVSFLA

SEQ ID NO: 74666 - protein, 10 aa, synthetic construct
  source 1..10: note = Seed: YLTNDVSFLA
YATNDVSFLI

SEQ ID NO: 74667 - protein, 10 aa, synthetic construct
  source 1..10: note = Seed: YLTNDVSFLA
YATNDVSFLL

SEQ ID NO: 74668 - protein, 10 aa, synthetic construct
  source 1..10: note = Seed: YLTNDVSFLA
YATNDVSFLM

SEQ ID NO: 74669 - protein, 10 aa, synthetic construct
  source 1..10: note = Seed: YLTNDVSFLA
YATNDVSFLV

SEQ ID NO: 74670 - protein, 9 aa, synthetic construct
  source 1..9: note = Seed: YLTNDVSFL
YATNDVSFM

SEQ ID NO: 74671 - protein, 9 aa, synthetic construct
  source 1..9: note = Seed: YLTNDVSFL
YATNDVSFV

SEQ ID NO: 74672 - protein, 9 aa, synthetic construct
  source 1..9: note = Seed: YLTNDVSFL
YATNDVSFY

SEQ ID NO: 74673 - protein, 10 aa, synthetic construct
  source 1..10: note = Seed: YFTSDYYQLY
YATSDYYQLF

SEQ ID NO: 74674 - protein, 10 aa, synthetic construct
  source 1..10: note = Seed: YFTSDYYQLY
YATSDYYQLK

SEQ ID NO: 74675 - protein, 10 aa, synthetic construct
  source 1..10: note = Seed: YFTSDYYQLY
YATSDYYQLM

SEQ ID NO: 74676 - protein, 10 aa, synthetic construct
  source 1..10: note = Seed: YFTSDYYQLY
YATSDYYQLR

SEQ ID NO: 74677 - protein, 10 aa, synthetic construct
  source 1..10: note = Seed: YFTSDYYQLY
YATSDYYQLW

SEQ ID NO: 74678 - protein, 10 aa, synthetic construct
  source 1..10: note = Seed: YFTSDYYQLY
YATSDYYQLY

SEQ ID NO: 74679 - protein, 11 aa, synthetic construct
  source 1..11: note = Seed: YFTSDYYQLYS
YATSDYYQLYY

SEQ ID NO: 74680 - protein, 9 aa, synthetic construct
  source 1..9: note = Seed: YYTSNPTTF
YATSNPTTF

SEQ ID NO: 74681 - protein, 11 aa, synthetic construct
  source 1..11: note = Seed: YYTSNPTTFHL
YATSNPTTFHF

SEQ ID NO: 74682 - protein, 11 aa, synthetic construct
  source 1..11: note = Seed: YYTSNPTTFHL
YATSNPTTFHW

SEQ ID NO: 74683 - protein, 9 aa, synthetic construct
  source 1..9: note = Seed: YYTSNPTTF
YATSNPTTI

SEQ ID NO: 74684 - protein, 9 aa, synthetic construct
  source 1..9: note = Seed: YYTSNPTTF
YATSNPTTL

SEQ ID NO: 74685 - protein, 9 aa, synthetic construct
  source 1..9: note = Seed: YYTSNPTTF
YATSNPTTM

SEQ ID NO: 74686 - protein, 9 aa, synthetic construct
  source 1..9: note = Seed: YYTSNPTTF
YATSNPTTV

SEQ ID NO: 74687 - protein, 9 aa, synthetic construct
  source 1..9: note = Seed: YYTSNPTTF
YATSNPTTW

SEQ ID NO: 74688 - protein, 9 aa, synthetic construct
  source 1..9: note = Seed: YYTSNPTTF
YATSNPTTY

SEQ ID NO: 74689 - protein, 10 aa, synthetic construct
  source 1..10: note = Seed: YTTTIKPVTY
YATTIKPVTF

SEQ ID NO: 74690 - protein, 10 aa, synthetic construct
  source 1..10: note = Seed: YTTTIKPVTY
YATTIKPVTL

SEQ ID NO: 74691 - protein, 10 aa, synthetic construct
  source 1..10: note = Seed: YTTTIKPVTY
YATTIKPVTM

SEQ ID NO: 74692 - protein, 10 aa, synthetic construct
  source 1..10: note = Seed: YTTTIKPVTY
YATTIKPVTW

SEQ ID NO: 74693 - protein, 10 aa, synthetic construct
  source 1..10: note = Seed: YTTTIKPVTY
YATTIKPVTY

SEQ ID NO: 74694 - protein, 11 aa, synthetic construct
  source 1..11: note = Seed: YTTTIKPVTYK
YATTIKPVTYR

SEQ ID NO: 74695 - protein, 9 aa, synthetic construct
  source 1..9: note = Seed: YIVDSVTVK
YAVDSVTVR

SEQ ID NO: 74696 - protein, 9 aa, synthetic construct
  source 1..9: note = Seed: YTVEEAKTV
YAVEEAKTF

SEQ ID NO: 74697 - protein, 9 aa, synthetic construct
  source 1..9: note = Seed: YTVEEAKTV
YAVEEAKTI

SEQ ID NO: 74698 - protein, 9 aa, synthetic construct
  source 1..9: note = Seed: YTVEEAKTV
YAVEEAKTL

SEQ ID NO: 74699 - protein, 9 aa, synthetic construct
  source 1..9: note = Seed: YTVEEAKTV
YAVEEAKTM

SEQ ID NO: 74700 - protein, 9 aa, synthetic construct
  source 1..9: note = Seed: YTVEEAKTV
YAVEEAKTV

SEQ ID NO: 74701 - protein, 10 aa, synthetic construct
  source 1..10: note = Seed: YTVEEAKTVL
YAVEEAKTVF

SEQ ID NO: 74702 - protein, 10 aa, synthetic construct
  source 1..10: note = Seed: YTVEEAKTVL
YAVEEAKTVL

SEQ ID NO: 74703 - protein, 10 aa, synthetic construct
  source 1..10: note = Seed: YTVEEAKTVL
YAVEEAKTVM

SEQ ID NO: 74704 - protein, 10 aa, synthetic construct
  source 1..10: note = Seed: YTVEEAKTVL
YAVEEAKTVY

SEQ ID NO: 74705 - protein, 9 aa, synthetic construct
  source 1..9: note = Seed: YTVEEAKTV
YAVEEAKTY

SEQ ID NO: 74706 - protein, 9 aa, synthetic construct
  source 1..9: note = Seed: YTVELGTEV
YAVELGTEF

SEQ ID NO: 74707 - protein, 9 aa, synthetic construct
  source 1..9: note = Seed: YTVELGTEV
YAVELGTEH

SEQ ID NO: 74708 - protein, 9 aa, synthetic construct
  source 1..9: note = Seed: YTVELGTEV
YAVELGTEI

SEQ ID NO: 74709 - protein, 9 aa, synthetic construct
  source 1..9: note = Seed: YTVELGTEV
YAVELGTEL

SEQ ID NO: 74710 - protein, 9 aa, synthetic construct
  source 1..9: note = Seed: YTVELGTEV
YAVELGTEM

SEQ ID NO: 74711 - protein, 9 aa, synthetic construct
  source 1..9: note = Seed: YTVELGTEV
YAVELGTEV

SEQ ID NO: 74712 - protein, 9 aa, synthetic construct
  source 1..9: note = Seed: YTVELGTEV
YAVELGTEW

SEQ ID NO: 74713 - protein, 9 aa, synthetic construct
  source 1..9: note = Seed: YTVELGTEV
YAVELGTEY

SEQ ID NO: 74714 - protein, 9 aa, synthetic construct
  source 1..9: note = Seed: YYVGYLQPR
YAVGYLQPF

SEQ ID NO: 74715 - protein, 9 aa, synthetic construct
  source 1..9: note = Seed: YYVGYLQPR
YAVGYLQPK

SEQ ID NO: 74716 - protein, 9 aa, synthetic construct
  source 1..9: note = Seed: YYVGYLQPR
YAVGYLQPL

SEQ ID NO: 74717 - protein, 9 aa, synthetic construct
  source 1..9: note = Seed: YYVGYLQPR
YAVGYLQPM

SEQ ID NO: 74718 - protein, 9 aa, synthetic construct
  source 1..9: note = Seed: YYVGYLQPR
YAVGYLQPR

SEQ ID NO: 74719 - protein, 9 aa, synthetic construct
  source 1..9: note = Seed: YYVGYLQPR
YAVGYLQPY

SEQ ID NO: 74720 - protein, 9 aa, synthetic construct
  source 1..9: note = Seed: YFVKIGPER
YAVKIGPER

SEQ ID NO: 74721 - protein, 9 aa, synthetic construct
  source 1..9: note = Seed: YFVLTSHTV
YAVLTSHTM

SEQ ID NO: 74722 - protein, 9 aa, synthetic construct
  source 1..9: note = Seed: YQVNGYPNM
YAVNGYPNF

SEQ ID NO: 74723 - protein, 9 aa, synthetic construct
  source 1..9: note = Seed: YQVNGYPNM
YAVNGYPNI

SEQ ID NO: 74724 - protein, 9 aa, synthetic construct
  source 1..9: note = Seed: YQVNGYPNM
YAVNGYPNL

SEQ ID NO: 74725 - protein, 9 aa, synthetic construct
  source 1..9: note = Seed: YQVNGYPNM
YAVNGYPNM

SEQ ID NO: 74726 - protein, 10 aa, synthetic construct
  source 1..10: note = Seed: YQVNGYPNMF
YAVNGYPNMF

SEQ ID NO: 74727 - protein, 10 aa, synthetic construct
  source 1..10: note = Seed: YQVNGYPNMF
YAVNGYPNMM

SEQ ID NO: 74728 - protein, 10 aa, synthetic construct
  source 1..10: note = Seed: YQVNGYPNMF
YAVNGYPNMY

SEQ ID NO: 74729 - protein, 9 aa, synthetic construct
  source 1..9: note = Seed: YQVNGYPNM
YAVNGYPNV

SEQ ID NO: 74730 - protein, 9 aa, synthetic construct
  source 1..9: note = Seed: YQVNGYPNM
YAVNGYPNY

SEQ ID NO: 74731 - protein, 8 aa, synthetic construct
  source 1..8: note = Seed: YLVSTQEF
YAVSTQEF

SEQ ID NO: 74732 - protein, 9 aa, synthetic construct
  source 1..9: note = Seed: YLVSTQEFR
YAVSTQEFK

SEQ ID NO: 74733 - protein, 9 aa, synthetic construct
  source 1..9: note = Seed: YLVSTQEFR
YAVSTQEFR

SEQ ID NO: 74734 - protein, 10 aa, synthetic construct
  source 1..10: note = Seed: YLVSTQEFRY
YAVSTQEFRY

SEQ ID NO: 74735 - protein, 8 aa, synthetic construct
  source 1..8: note = Seed: YLVSTQEF
YAVSTQEM

SEQ ID NO: 74736 - protein, 8 aa, synthetic construct
  source 1..8: note = Seed: YLVSTQEF
YAVSTQEY

SEQ ID NO: 74737 - protein, 9 aa, synthetic construct
  source 1..9: note = Seed: YNVTQAFGR
YAVTQAFGK

SEQ ID NO: 74738 - protein, 9 aa, synthetic construct
  source 1..9: note = Seed: YNVTQAFGR
YAVTQAFGR

SEQ ID NO: 74739 - protein, 10 aa, synthetic construct
  source 1..10: note = Seed: YNVTQAFGRR
YAVTQAFGRR

SEQ ID NO: 74740 - protein, 9 aa, synthetic construct
  source 1..9: note = Seed: YFVVKRHTF
YAVVKRHTF

SEQ ID NO: 74741 - protein, 9 aa, synthetic construct
  source 1..9: note = Seed: YFVVKRHTF
YAVVKRHTI

SEQ ID NO: 74742 - protein, 9 aa, synthetic construct
  source 1..9: note = Seed: YFVVKRHTF
YAVVKRHTL

SEQ ID NO: 74743 - protein, 9 aa, synthetic construct
  source 1..9: note = Seed: YFVVKRHTF
YAVVKRHTM

SEQ ID NO: 74744 - protein, 9 aa, synthetic construct
  source 1..9: note = Seed: YFVVKRHTF
YAVVKRHTV

SEQ ID NO: 74745 - protein, 9 aa, synthetic construct
  source 1..9: note = Seed: YFVVKRHTF
YAVVKRHTY

SEQ ID NO: 74746 - protein, 10 aa, synthetic construct
  source 1..10: note = Seed: YRVVVLSFEL
YAVVVLSFEV

SEQ ID NO: 74747 - protein, 10 aa, synthetic construct
  source 1..10: note = Seed: YYVWKSYVHV
YAVWKSYVHV

SEQ ID NO: 74748 - protein, 9 aa, synthetic construct
  source 1..9: note = Seed: YYVWKSYVH
YAVWKSYVM

SEQ ID NO: 74749 - protein, 9 aa, synthetic construct
  source 1..9: note = Seed: YYVWKSYVH
YAVWKSYVY

SEQ ID NO: 74750 - protein, 9 aa, synthetic construct
  source 1..9: note = Seed: YVWKSYVHV
YAWKSYVHF

SEQ ID NO: 74751 - protein, 9 aa, synthetic construct
  source 1..9: note = Seed: YVWKSYVHV
YAWKSYVHI

SEQ ID NO: 74752 - protein, 9 aa, synthetic construct
  source 1..9: note = Seed: YVWKSYVHV
YAWKSYVHL

SEQ ID NO: 74753 - protein, 9 aa, synthetic construct
  source 1..9: note = Seed: YVWKSYVHV
YAWKSYVHM

SEQ ID NO: 74754 - protein, 9 aa, synthetic construct
  source 1..9: note = Seed: YVWKSYVHV
YAWKSYVHV

SEQ ID NO: 74755 - protein, 10 aa, synthetic construct
  source 1..10: note = Seed: YVWKSYVHVV
YAWKSYVHVV

SEQ ID NO: 74756 - protein, 9 aa, synthetic construct
  source 1..9: note = Seed: YVWKSYVHV
YAWKSYVHY

SEQ ID NO: 74757 - protein, 10 aa, synthetic construct
  source 1..10: note = Seed: YVYANGGKGF
YAYANGGKGF

SEQ ID NO: 74758 - protein, 10 aa, synthetic construct
  source 1..10: note = Seed: YVYANGGKGF
YAYANGGKGM

SEQ ID NO: 74759 - protein, 10 aa, synthetic construct
  source 1..10: note = Seed: YVYANGGKGF
YAYANGGKGW

SEQ ID NO: 74760 - protein, 10 aa, synthetic construct
  source 1..10: note = Seed: YVYANGGKGF
YAYANGGKGY

SEQ ID NO: 74761 - protein, 11 aa, synthetic construct
  source 1..11: note = Seed: YLYFIKGLNNL
YAYFIKGLNNF

SEQ ID NO: 74762 - protein, 9 aa, synthetic construct
  source 1..9: note = Seed: YNYKLPDDF
YAYKLPDDF

SEQ ID NO: 74763 - protein, 9 aa, synthetic construct
  source 1..9: note = Seed: YNYKLPDDF
YAYKLPDDY

SEQ ID NO: 74764 - protein, 9 aa, synthetic construct
  source 1..9: note = Seed: YLYLTFYLT
YAYLTFYLA

SEQ ID NO: 74765 - protein, 9 aa, synthetic construct
  source 1..9: note = Seed: YLYLTFYLT
YAYLTFYLI

SEQ ID NO: 74766 - protein, 9 aa, synthetic construct
  source 1..9: note = Seed: YLYLTFYLT
YAYLTFYLL

SEQ ID NO: 74767 - protein, 9 aa, synthetic construct
  source 1..9: note = Seed: YLYLTFYLT
YAYLTFYLV

SEQ ID NO: 74768 - protein, 10 aa, synthetic construct
  source 1..10: note = Seed: YDYLVSTQEF
YAYLVSTQEF

SEQ ID NO: 74769 - protein, 11 aa, synthetic construct
  source 1..11: note = Seed: YDYLVSTQEFR
YAYLVSTQEFF

SEQ ID NO: 74770 - protein, 11 aa, synthetic construct
  source 1..11: note = Seed: YDYLVSTQEFR
YAYLVSTQEFR

SEQ ID NO: 74771 - protein, 10 aa, synthetic construct
  source 1..10: note = Seed: YDYLVSTQEF
YAYLVSTQEI

SEQ ID NO: 74772 - protein, 10 aa, synthetic construct
  source 1..10: note = Seed: YDYLVSTQEF
YAYLVSTQEL

SEQ ID NO: 74773 - protein, 10 aa, synthetic construct
  source 1..10: note = Seed: YDYLVSTQEF
YAYLVSTQEM

SEQ ID NO: 74774 - protein, 10 aa, synthetic construct
  source 1..10: note = Seed: YDYLVSTQEF
YAYLVSTQEW

SEQ ID NO: 74775 - protein, 10 aa, synthetic construct
  source 1..10: note = Seed: YDYLVSTQEF
YAYLVSTQEY

SEQ ID NO: 74776 - protein, 9 aa, synthetic construct
  source 1..9: note = Seed: YNYLYRLFR
YAYLYRLFK

SEQ ID NO: 74777 - protein, 9 aa, synthetic construct
  source 1..9: note = Seed: YNYLYRLFR
YAYLYRLFR

SEQ ID NO: 74778 - protein, 10 aa, synthetic construct
  source 1..10: note = Seed: YNYLYRLFRK
YAYLYRLFRK

SEQ ID NO: 74779 - protein, 10 aa, synthetic construct
  source 1..10: note = Seed: YNYLYRLFRK
YAYLYRLFRR

SEQ ID NO: 74780 - protein, 8 aa, synthetic construct
  source 1..8: note = Seed: YRYNLPTM
YAYNLPTF

SEQ ID NO: 74781 - protein, 8 aa, synthetic construct
  source 1..8: note = Seed: YRYNLPTM
YAYNLPTY

SEQ ID NO: 74782 - protein, 10 aa, synthetic construct
  source 1..10: note = Seed: YVYNPFMIDV
YAYNPFMIDF

SEQ ID NO: 74783 - protein, 10 aa, synthetic construct
  source 1..10: note = Seed: YVYNPFMIDV
YAYNPFMIDI

SEQ ID NO: 74784 - protein, 10 aa, synthetic construct
  source 1..10: note = Seed: YVYNPFMIDV
YAYNPFMIDL

SEQ ID NO: 74785 - protein, 10 aa, synthetic construct
  source 1..10: note = Seed: YVYNPFMIDV
YAYNPFMIDM

SEQ ID NO: 74786 - protein, 10 aa, synthetic construct
  source 1..10: note = Seed: YVYNPFMIDV
YAYNPFMIDV

SEQ ID NO: 74787 - protein, 10 aa, synthetic construct
  source 1..10: note = Seed: YVYNPFMIDV
YAYNPFMIDY

SEQ ID NO: 74788 - protein, 11 aa, synthetic construct
  source 1..11: note = Seed: YDYYRYNLPTM
YAYYRYNLPTF

SEQ ID NO: 74789 - protein, 11 aa, synthetic construct
  source 1..11: note = Seed: YDYYRYNLPTM
YAYYRYNLPTM

SEQ ID NO: 74790 - protein, 11 aa, synthetic construct
  source 1..11: note = Seed: YDYYRYNLPTM
YAYYRYNLPTW

SEQ ID NO: 74791 - protein, 10 aa, synthetic construct
  source 1..10: note = Seed: YGANKDGIIW
YCANKDGIIW

SEQ ID NO: 74792 - protein, 10 aa, synthetic construct
  source 1..10: note = Seed: YPANSIVCRF
YCANSIVCRW

SEQ ID NO: 74793 - protein, 10 aa, synthetic construct
  source 1..10: note = Seed: YKENSYTTTI
YCENSYTTTA

SEQ ID NO: 74794 - protein, 10 aa, synthetic construct
  source 1..10: note = Seed: YKENSYTTTI
YCENSYTTTL

SEQ ID NO: 74795 - protein, 10 aa, synthetic construct
  source 1..10: note = Seed: YKENSYTTTI
YCENSYTTTM

SEQ ID NO: 74796 - protein, 9 aa, synthetic construct
  source 1..9: note = Seed: YVFCTVNAL
YCFCTVNAF

SEQ ID NO: 74797 - protein, 9 aa, synthetic construct
  source 1..9: note = Seed: YVFCTVNAL
YCFCTVNAM

SEQ ID NO: 74798 - protein, 9 aa, synthetic construct
  source 1..9: note = Seed: YVFCTVNAL
YCFCTVNAY

SEQ ID NO: 74799 - protein, 9 aa, synthetic construct
  source 1..9: note = Seed: YIFFASFYY
YCFFASFYI

SEQ ID NO: 74800 - protein, 9 aa, synthetic construct
  source 1..9: note = Seed: YIFFASFYY
YCFFASFYK

SEQ ID NO: 74801 - protein, 9 aa, synthetic construct
  source 1..9: note = Seed: YIFFASFYY
YCFFASFYL

SEQ ID NO: 74802 - protein, 9 aa, synthetic construct
  source 1..9: note = Seed: YIFFASFYY
YCFFASFYR

SEQ ID NO: 74803 - protein, 9 aa, synthetic construct
  source 1..9: note = Seed: YIFFASFYY
YCFFASFYV

SEQ ID NO: 74804 - protein, 9 aa, synthetic construct
  source 1..9: note = Seed: YIFFASFYY
YCFFASFYY

SEQ ID NO: 74805 - protein, 10 aa, synthetic construct
  source 1..10: note = Seed: YIFFASFYYV
YCFFASFYYF

SEQ ID NO: 74806 - protein, 10 aa, synthetic construct
  source 1..10: note = Seed: YIFFASFYYV
YCFFASFYYI

SEQ ID NO: 74807 - protein, 10 aa, synthetic construct
  source 1..10: note = Seed: YIFFASFYYV
YCFFASFYYK

SEQ ID NO: 74808 - protein, 10 aa, synthetic construct
  source 1..10: note = Seed: YIFFASFYYV
YCFFASFYYL

SEQ ID NO: 74809 - protein, 10 aa, synthetic construct
  source 1..10: note = Seed: YIFFASFYYV
YCFFASFYYM

SEQ ID NO: 74810 - protein, 10 aa, synthetic construct
  source 1..10: note = Seed: YIFFASFYYV
YCFFASFYYR

SEQ ID NO: 74811 - protein, 10 aa, synthetic construct
  source 1..10: note = Seed: YIFFASFYYV
YCFFASFYYV

SEQ ID NO: 74812 - protein, 11 aa, synthetic construct
  source 1..11: note = Seed: YIFFASFYYVW
YCFFASFYYVY

SEQ ID NO: 74813 - protein, 10 aa, synthetic construct
  source 1..10: note = Seed: YIFFASFYYV
YCFFASFYYW

SEQ ID NO: 74814 - protein, 10 aa, synthetic construct
  source 1..10: note = Seed: YIFFASFYYV
YCFFASFYYY

SEQ ID NO: 74815 - protein, 9 aa, synthetic construct
  source 1..9: note = Seed: YWFFSNYLK
YCFFSNYLK

SEQ ID NO: 74816 - protein, 10 aa, synthetic construct
  source 1..10: note = Seed: YWFFSNYLKR
YCFFSNYLKR

SEQ ID NO: 74817 - protein, 9 aa, synthetic construct
  source 1..9: note = Seed: YWFFSNYLK
YCFFSNYLR

SEQ ID NO: 74818 - protein, 9 aa, synthetic construct
  source 1..9: note = Seed: YWFFSNYLK
YCFFSNYLY

SEQ ID NO: 74819 - protein, 10 aa, synthetic construct
  source 1..10: note = Seed: YSFLPGVYSV
YCFLPGVYSF

SEQ ID NO: 74820 - protein, 10 aa, synthetic construct
  source 1..10: note = Seed: YSFLPGVYSV
YCFLPGVYSI

SEQ ID NO: 74821 - protein, 10 aa, synthetic construct
  source 1..10: note = Seed: YSFLPGVYSV
YCFLPGVYSL

SEQ ID NO: 74822 - protein, 10 aa, synthetic construct
  source 1..10: note = Seed: YSFLPGVYSV
YCFLPGVYSM

SEQ ID NO: 74823 - protein, 10 aa, synthetic construct
  source 1..10: note = Seed: YSFLPGVYSV
YCFLPGVYSW

SEQ ID NO: 74824 - protein, 10 aa, synthetic construct
  source 1..10: note = Seed: YVFTGYRVTK
YCFTGYRVTR

SEQ ID NO: 74825 - protein, 9 aa, synthetic construct
  source 1..9: note = Seed: YFFTLLLQL
YCFTLLLQY

SEQ ID NO: 74826 - protein, 11 aa, synthetic construct
  source 1..11: note = Seed: YVGYLQPRTFL
YCGYLQPRTFF

SEQ ID NO: 74827 - protein, 11 aa, synthetic construct
  source 1..11: note = Seed: YVGYLQPRTFL
YCGYLQPRTFW

SEQ ID NO: 74828 - protein, 10 aa, synthetic construct
  source 1..10: note = Seed: YFIASFRLFA
YCIASFRLFI

SEQ ID NO: 74829 - protein, 10 aa, synthetic construct
  source 1..10: note = Seed: YFIASFRLFA
YCIASFRLFL

SEQ ID NO: 74830 - protein, 10 aa, synthetic construct
  source 1..10: note = Seed: YFIASFRLFA
YCIASFRLFV

SEQ ID NO: 74831 - protein, 9 aa, synthetic construct
  source 1..9: note = Seed: YFIASFRLF
YCIASFRLY

SEQ ID NO: 74832 - protein, 9 aa, synthetic construct
  source 1..9: note = Seed: YGIATVREV
YCIATVREF

SEQ ID NO: 74833 - protein, 9 aa, synthetic construct
  source 1..9: note = Seed: YGIATVREV
YCIATVREL

SEQ ID NO: 74834 - protein, 9 aa, synthetic construct
  source 1..9: note = Seed: YGIATVREV
YCIATVREM

SEQ ID NO: 74835 - protein, 9 aa, synthetic construct
  source 1..9: note = Seed: YGIATVREV
YCIATVREY

SEQ ID NO: 74836 - protein, 9 aa, synthetic construct
  source 1..9: note = Seed: YDKLQFTSL
YCKLQFTSL

SEQ ID NO: 74837 - protein, 11 aa, synthetic construct
  source 1..11: note = Seed: YDKLQFTSLEI
YCKLQFTSLEV

SEQ ID NO: 74838 - protein, 9 aa, synthetic construct
  source 1..9: note = Seed: YNKYKYFSG
YCKYKYFSI

SEQ ID NO: 74839 - protein, 9 aa, synthetic construct
  source 1..9: note = Seed: YNKYKYFSG
YCKYKYFSL

SEQ ID NO: 74840 - protein, 9 aa, synthetic construct
  source 1..9: note = Seed: YNKYKYFSG
YCKYKYFSM

SEQ ID NO: 74841 - protein, 10 aa, synthetic construct
  source 1..10: note = Seed: YRLFRKSNLK
YCLFRKSNLK

SEQ ID NO: 74842 - protein, 10 aa, synthetic construct
  source 1..10: note = Seed: YRLFRKSNLK
YCLFRKSNLR

SEQ ID NO: 74843 - protein, 9 aa, synthetic construct
  source 1..9: note = Seed: YILFTRFFY
YCLFTRFFR

SEQ ID NO: 74844 - protein, 9 aa, synthetic construct
  source 1..9: note = Seed: YILFTRFFY
YCLFTRFFY

SEQ ID NO: 74845 - protein, 10 aa, synthetic construct
  source 1..10: note = Seed: YILFTRFFYV
YCLFTRFFYA

SEQ ID NO: 74846 - protein, 10 aa, synthetic construct
  source 1..10: note = Seed: YILFTRFFYV
YCLFTRFFYC

SEQ ID NO: 74847 - protein, 10 aa, synthetic construct
  source 1..10: note = Seed: YILFTRFFYV
YCLFTRFFYF

SEQ ID NO: 74848 - protein, 10 aa, synthetic construct
  source 1..10: note = Seed: YILFTRFFYV
YCLFTRFFYI

SEQ ID NO: 74849 - protein, 10 aa, synthetic construct
  source 1..10: note = Seed: YILFTRFFYV
YCLFTRFFYK

SEQ ID NO: 74850 - protein, 10 aa, synthetic construct
  source 1..10: note = Seed: YILFTRFFYV
YCLFTRFFYL

SEQ ID NO: 74851 - protein, 10 aa, synthetic construct
  source 1..10: note = Seed: YILFTRFFYV
YCLFTRFFYM

SEQ ID NO: 74852 - protein, 10 aa, synthetic construct
  source 1..10: note = Seed: YILFTRFFYV
YCLFTRFFYR

SEQ ID NO: 74853 - protein, 10 aa, synthetic construct
  source 1..10: note = Seed: YILFTRFFYV
YCLFTRFFYS

SEQ ID NO: 74854 - protein, 10 aa, synthetic construct
  source 1..10: note = Seed: YILFTRFFYV
YCLFTRFFYT

SEQ ID NO: 74855 - protein, 10 aa, synthetic construct
  source 1..10: note = Seed: YILFTRFFYV
YCLFTRFFYV

SEQ ID NO: 74856 - protein, 11 aa, synthetic construct
  source 1..11: note = Seed: YILFTRFFYVL
YCLFTRFFYVA

SEQ ID NO: 74857 - protein, 11 aa, synthetic construct
  source 1..11: note = Seed: YILFTRFFYVL
YCLFTRFFYVC

SEQ ID NO: 74858 - protein, 11 aa, synthetic construct
  source 1..11: note = Seed: YILFTRFFYVL
YCLFTRFFYVD

SEQ ID NO: 74859 - protein, 11 aa, synthetic construct
  source 1..11: note = Seed: YILFTRFFYVL
YCLFTRFFYVE

SEQ ID NO: 74860 - protein, 11 aa, synthetic construct
  source 1..11: note = Seed: YILFTRFFYVL
YCLFTRFFYVF

SEQ ID NO: 74861 - protein, 11 aa, synthetic construct
  source 1..11: note = Seed: YILFTRFFYVL
YCLFTRFFYVG

SEQ ID NO: 74862 - protein, 11 aa, synthetic construct
  source 1..11: note = Seed: YILFTRFFYVL
YCLFTRFFYVH

SEQ ID NO: 74863 - protein, 11 aa, synthetic construct
  source 1..11: note = Seed: YILFTRFFYVL
YCLFTRFFYVI

SEQ ID NO: 74864 - protein, 11 aa, synthetic construct
  source 1..11: note = Seed: YILFTRFFYVL
YCLFTRFFYVK

SEQ ID NO: 74865 - protein, 11 aa, synthetic construct
  source 1..11: note = Seed: YILFTRFFYVL
YCLFTRFFYVL

SEQ ID NO: 74866 - protein, 11 aa, synthetic construct
  source 1..11: note = Seed: YILFTRFFYVL
YCLFTRFFYVM

SEQ ID NO: 74867 - protein, 11 aa, synthetic construct
  source 1..11: note = Seed: YILFTRFFYVL
YCLFTRFFYVN

SEQ ID NO: 74868 - protein, 11 aa, synthetic construct
  source 1..11: note = Seed: YILFTRFFYVL
YCLFTRFFYVP

SEQ ID NO: 74869 - protein, 11 aa, synthetic construct
  source 1..11: note = Seed: YILFTRFFYVL
YCLFTRFFYVQ

SEQ ID NO: 74870 - protein, 11 aa, synthetic construct
  source 1..11: note = Seed: YILFTRFFYVL
YCLFTRFFYVR

SEQ ID NO: 74871 - protein, 11 aa, synthetic construct
  source 1..11: note = Seed: YILFTRFFYVL
YCLFTRFFYVS

SEQ ID NO: 74872 - protein, 11 aa, synthetic construct
  source 1..11: note = Seed: YILFTRFFYVL
YCLFTRFFYVT

SEQ ID NO: 74873 - protein, 11 aa, synthetic construct
  source 1..11: note = Seed: YILFTRFFYVL
YCLFTRFFYVV

SEQ ID NO: 74874 - protein, 11 aa, synthetic construct
  source 1..11: note = Seed: YILFTRFFYVL
YCLFTRFFYVW

SEQ ID NO: 74875 - protein, 11 aa, synthetic construct
  source 1..11: note = Seed: YILFTRFFYVL
YCLFTRFFYVY

SEQ ID NO: 74876 - protein, 10 aa, synthetic construct
  source 1..10: note = Seed: YILFTRFFYV
YCLFTRFFYY

SEQ ID NO: 74877 - protein, 10 aa, synthetic construct
  source 1..10: note = Seed: YSLLMPILTL
YCLLMPILTA

SEQ ID NO: 74878 - protein, 10 aa, synthetic construct
  source 1..10: note = Seed: YSLLMPILTL
YCLLMPILTI

SEQ ID NO: 74879 - protein, 10 aa, synthetic construct
  source 1..10: note = Seed: YSLLMPILTL
YCLLMPILTL

SEQ ID NO: 74880 - protein, 10 aa, synthetic construct
  source 1..10: note = Seed: YSLLMPILTL
YCLLMPILTV

SEQ ID NO: 74881 - protein, 10 aa, synthetic construct
  source 1..10: note = Seed: YHLMSFPQSA
YCLMSFPQSA

SEQ ID NO: 74882 - protein, 11 aa, synthetic construct
  source 1..11: note = Seed: YHLMSFPQSAP
YCLMSFPQSAV

SEQ ID NO: 74883 - protein, 10 aa, synthetic construct
  source 1..10: note = Seed: YHLMSFPQSA
YCLMSFPQSI

SEQ ID NO: 74884 - protein, 10 aa, synthetic construct
  source 1..10: note = Seed: YHLMSFPQSA
YCLMSFPQSL

SEQ ID NO: 74885 - protein, 10 aa, synthetic construct
  source 1..10: note = Seed: YHLMSFPQSA
YCLMSFPQSM

SEQ ID NO: 74886 - protein, 10 aa, synthetic construct
  source 1..10: note = Seed: YHLMSFPQSA
YCLMSFPQST

SEQ ID NO: 74887 - protein, 10 aa, synthetic construct
  source 1..10: note = Seed: YHLMSFPQSA
YCLMSFPQSV

SEQ ID NO: 74888 - protein, 10 aa, synthetic construct
  source 1..10: note = Seed: YDLSVVNARL
YCLSVVNARA

SEQ ID NO: 74889 - protein, 10 aa, synthetic construct
  source 1..10: note = Seed: YDLSVVNARL
YCLSVVNARI

SEQ ID NO: 74890 - protein, 10 aa, synthetic construct
  source 1..10: note = Seed: YDLSVVNARL
YCLSVVNARL

SEQ ID NO: 74891 - protein, 10 aa, synthetic construct
  source 1..10: note = Seed: YDLSVVNARL
YCLSVVNARM

SEQ ID NO: 74892 - protein, 10 aa, synthetic construct
  source 1..10: note = Seed: YDLSVVNARL
YCLSVVNARV

SEQ ID NO: 74893 - protein, 9 aa, synthetic construct
  source 1..9: note = Seed: YTMADLVYA
YCMADLVYA

SEQ ID NO: 74894 - protein, 10 aa, synthetic construct
  source 1..10: note = Seed: YTMADLVYAL
YCMADLVYAA

SEQ ID NO: 74895 - protein, 10 aa, synthetic construct
  source 1..10: note = Seed: YTMADLVYAL
YCMADLVYAC

SEQ ID NO: 74896 - protein, 10 aa, synthetic construct
  source 1..10: note = Seed: YTMADLVYAL
YCMADLVYAF

SEQ ID NO: 74897 - protein, 10 aa, synthetic construct
  source 1..10: note = Seed: YTMADLVYAL
YCMADLVYAG

SEQ ID NO: 74898 - protein, 10 aa, synthetic construct
  source 1..10: note = Seed: YTMADLVYAL
YCMADLVYAI

SEQ ID NO: 74899 - protein, 10 aa, synthetic construct
  source 1..10: note = Seed: YTMADLVYAL
YCMADLVYAL

SEQ ID NO: 74900 - protein, 11 aa, synthetic construct
  source 1..11: note = Seed: YTMADLVYALR
YCMADLVYALA

SEQ ID NO: 74901 - protein, 11 aa, synthetic construct
  source 1..11: note = Seed: YTMADLVYALR
YCMADLVYALC

SEQ ID NO: 74902 - protein, 11 aa, synthetic construct
  source 1..11: note = Seed: YTMADLVYALR
YCMADLVYALD

SEQ ID NO: 74903 - protein, 11 aa, synthetic construct
  source 1..11: note = Seed: YTMADLVYALR
YCMADLVYALE

SEQ ID NO: 74904 - protein, 11 aa, synthetic construct
  source 1..11: note = Seed: YTMADLVYALR
YCMADLVYALF

SEQ ID NO: 74905 - protein, 11 aa, synthetic construct
  source 1..11: note = Seed: YTMADLVYALR
YCMADLVYALG

SEQ ID NO: 74906 - protein, 11 aa, synthetic construct
  source 1..11: note = Seed: YTMADLVYALR
YCMADLVYALH

SEQ ID NO: 74907 - protein, 11 aa, synthetic construct
  source 1..11: note = Seed: YTMADLVYALR
YCMADLVYALI

SEQ ID NO: 74908 - protein, 11 aa, synthetic construct
  source 1..11: note = Seed: YTMADLVYALR
YCMADLVYALK

SEQ ID NO: 74909 - protein, 11 aa, synthetic construct
  source 1..11: note = Seed: YTMADLVYALR
YCMADLVYALL

SEQ ID NO: 74910 - protein, 11 aa, synthetic construct
  source 1..11: note = Seed: YTMADLVYALR
YCMADLVYALM

SEQ ID NO: 74911 - protein, 11 aa, synthetic construct
  source 1..11: note = Seed: YTMADLVYALR
YCMADLVYALN

SEQ ID NO: 74912 - protein, 11 aa, synthetic construct
  source 1..11: note = Seed: YTMADLVYALR
YCMADLVYALP

SEQ ID NO: 74913 - protein, 11 aa, synthetic construct
  source 1..11: note = Seed: YTMADLVYALR
YCMADLVYALQ

SEQ ID NO: 74914 - protein, 11 aa, synthetic construct
  source 1..11: note = Seed: YTMADLVYALR
YCMADLVYALR

SEQ ID NO: 74915 - protein, 11 aa, synthetic construct
  source 1..11: note = Seed: YTMADLVYALR
YCMADLVYALS

SEQ ID NO: 74916 - protein, 11 aa, synthetic construct
  source 1..11: note = Seed: YTMADLVYALR
YCMADLVYALT

SEQ ID NO: 74917 - protein, 11 aa, synthetic construct
  source 1..11: note = Seed: YTMADLVYALR
YCMADLVYALV

SEQ ID NO: 74918 - protein, 11 aa, synthetic construct
  source 1..11: note = Seed: YTMADLVYALR
YCMADLVYALW

SEQ ID NO: 74919 - protein, 11 aa, synthetic construct
  source 1..11: note = Seed: YTMADLVYALR
YCMADLVYALY

SEQ ID NO: 74920 - protein, 10 aa, synthetic construct
  source 1..10: note = Seed: YTMADLVYAL
YCMADLVYAM

SEQ ID NO: 74921 - protein, 10 aa, synthetic construct
  source 1..10: note = Seed: YTMADLVYAL
YCMADLVYAS

SEQ ID NO: 74922 - protein, 10 aa, synthetic construct
  source 1..10: note = Seed: YTMADLVYAL
YCMADLVYAT

SEQ ID NO: 74923 - protein, 10 aa, synthetic construct
  source 1..10: note = Seed: YTMADLVYAL
YCMADLVYAV

SEQ ID NO: 74924 - protein, 10 aa, synthetic construct
  source 1..10: note = Seed: YTMADLVYAL
YCMADLVYAW

SEQ ID NO: 74925 - protein, 10 aa, synthetic construct
  source 1..10: note = Seed: YTMADLVYAL
YCMADLVYAY

SEQ ID NO: 74926 - protein, 9 aa, synthetic construct
  source 1..9: note = Seed: YTMADLVYA
YCMADLVYI

SEQ ID NO: 74927 - protein, 9 aa, synthetic construct
  source 1..9: note = Seed: YTMADLVYA
YCMADLVYL

SEQ ID NO: 74928 - protein, 9 aa, synthetic construct
  source 1..9: note = Seed: YTMADLVYA
YCMADLVYV

SEQ ID NO: 74929 - protein, 10 aa, synthetic construct
  source 1..10: note = Seed: YVMHANYIFW
YCMHANYIFF

SEQ ID NO: 74930 - protein, 10 aa, synthetic construct
  source 1..10: note = Seed: YVMHANYIFW
YCMHANYIFW

SEQ ID NO: 74931 - protein, 10 aa, synthetic construct
  source 1..10: note = Seed: YVMHANYIFW
YCMHANYIFY

SEQ ID NO: 74932 - protein, 9 aa, synthetic construct
  source 1..9: note = Seed: YVMHANYIF
YCMHANYIW

SEQ ID NO: 74933 - protein, 9 aa, synthetic construct
  source 1..9: note = Seed: YVMHANYIF
YCMHANYIY

SEQ ID NO: 74934 - protein, 9 aa, synthetic construct
  source 1..9: note = Seed: YQNNVFMSE
YCNNVFMSF

SEQ ID NO: 74935 - protein, 9 aa, synthetic construct
  source 1..9: note = Seed: YQNNVFMSE
YCNNVFMSY

SEQ ID NO: 74936 - protein, 9 aa, synthetic construct
  source 1..9: note = Seed: YVNTFSSTF
YCNTFSSTF

SEQ ID NO: 74937 - protein, 9 aa, synthetic construct
  source 1..9: note = Seed: YVNTFSSTF
YCNTFSSTL

SEQ ID NO: 74938 - protein, 9 aa, synthetic construct
  source 1..9: note = Seed: YVNTFSSTF
YCNTFSSTM

SEQ ID NO: 74939 - protein, 9 aa, synthetic construct
  source 1..9: note = Seed: YVNTFSSTF
YCNTFSSTY

SEQ ID NO: 74940 - protein, 10 aa, synthetic construct
  source 1..10: note = Seed: YTPHTVLQAV
YCPHTVLQAA

SEQ ID NO: 74941 - protein, 10 aa, synthetic construct
  source 1..10: note = Seed: YTPHTVLQAV
YCPHTVLQAI

SEQ ID NO: 74942 - protein, 10 aa, synthetic construct
  source 1..10: note = Seed: YTPHTVLQAV
YCPHTVLQAL

SEQ ID NO: 74943 - protein, 10 aa, synthetic construct
  source 1..10: note = Seed: YTPHTVLQAV
YCPHTVLQAM

SEQ ID NO: 74944 - protein, 10 aa, synthetic construct
  source 1..10: note = Seed: YTPHTVLQAV
YCPHTVLQAV

SEQ ID NO: 74945 - protein, 9 aa, synthetic construct
  source 1..9: note = Seed: YVPLKSATC
YCPLKSATL

SEQ ID NO: 74946 - protein, 9 aa, synthetic construct
  source 1..9: note = Seed: YVPLKSATC
YCPLKSATM

SEQ ID NO: 74947 - protein, 10 aa, synthetic construct
  source 1..10: note = Seed: YMPYFFTLLL
YCPYFFTLLA

SEQ ID NO: 74948 - protein, 10 aa, synthetic construct
  source 1..10: note = Seed: YMPYFFTLLL
YCPYFFTLLF

SEQ ID NO: 74949 - protein, 10 aa, synthetic construct
  source 1..10: note = Seed: YMPYFFTLLL
YCPYFFTLLL

SEQ ID NO: 74950 - protein, 10 aa, synthetic construct
  source 1..10: note = Seed: YMPYFFTLLL
YCPYFFTLLM

SEQ ID NO: 74951 - protein, 10 aa, synthetic construct
  source 1..10: note = Seed: YMPYFFTLLL
YCPYFFTLLT

SEQ ID NO: 74952 - protein, 10 aa, synthetic construct
  source 1..10: note = Seed: YMPYFFTLLL
YCPYFFTLLV

SEQ ID NO: 74953 - protein, 10 aa, synthetic construct
  source 1..10: note = Seed: YMPYFFTLLL
YCPYFFTLLW

SEQ ID NO: 74954 - protein, 10 aa, synthetic construct
  source 1..10: note = Seed: YMPYFFTLLL
YCPYFFTLLY

SEQ ID NO: 74955 - protein, 10 aa, synthetic construct
  source 1..10: note = Seed: YQPYRVVVLS
YCPYRVVVLA

SEQ ID NO: 74956 - protein, 10 aa, synthetic construct
  source 1..10: note = Seed: YKQFDTYNLW
YCQFDTYNLF

SEQ ID NO: 74957 - protein, 10 aa, synthetic construct
  source 1..10: note = Seed: YKQFDTYNLW
YCQFDTYNLM

SEQ ID NO: 74958 - protein, 10 aa, synthetic construct
  source 1..10: note = Seed: YKQFDTYNLW
YCQFDTYNLY

SEQ ID NO: 74959 - protein, 10 aa, synthetic construct
  source 1..10: note = Seed: YSQLMCQPIL
YCQLMCQPIF

SEQ ID NO: 74960 - protein, 11 aa, synthetic construct
  source 1..11: note = Seed: YSQLMCQPILL
YCQLMCQPILA

SEQ ID NO: 74961 - protein, 11 aa, synthetic construct
  source 1..11: note = Seed: YSQLMCQPILL
YCQLMCQPILI

SEQ ID NO: 74962 - protein, 11 aa, synthetic construct
  source 1..11: note = Seed: YSQLMCQPILL
YCQLMCQPILL

SEQ ID NO: 74963 - protein, 11 aa, synthetic construct
  source 1..11: note = Seed: YSQLMCQPILL
YCQLMCQPILM

SEQ ID NO: 74964 - protein, 11 aa, synthetic construct
  source 1..11: note = Seed: YSQLMCQPILL
YCQLMCQPILV

SEQ ID NO: 74965 - protein, 10 aa, synthetic construct
  source 1..10: note = Seed: YSQLMCQPIL
YCQLMCQPIY

SEQ ID NO: 74966 - protein, 9 aa, synthetic construct
  source 1..9: note = Seed: YLQPRTFLL
YCQPRTFLY

SEQ ID NO: 74967 - protein, 10 aa, synthetic construct
  source 1..10: note = Seed: YPQVNGLTSI
YCQVNGLTSF

SEQ ID NO: 74968 - protein, 10 aa, synthetic construct
  source 1..10: note = Seed: YPQVNGLTSI
YCQVNGLTSI

SEQ ID NO: 74969 - protein, 10 aa, synthetic construct
  source 1..10: note = Seed: YPQVNGLTSI
YCQVNGLTSL

SEQ ID NO: 74970 - protein, 10 aa, synthetic construct
  source 1..10: note = Seed: YPQVNGLTSI
YCQVNGLTSM

SEQ ID NO: 74971 - protein, 10 aa, synthetic construct
  source 1..10: note = Seed: YPQVNGLTSI
YCQVNGLTSV

SEQ ID NO: 74972 - protein, 10 aa, synthetic construct
  source 1..10: note = Seed: YPQVNGLTSI
YCQVNGLTSY

SEQ ID NO: 74973 - protein, 10 aa, synthetic construct
  source 1..10: note = Seed: YRRLISMMGF
YCRLISMMGF

SEQ ID NO: 74974 - protein, 10 aa, synthetic construct
  source 1..10: note = Seed: YRRLISMMGF
YCRLISMMGI

SEQ ID NO: 74975 - protein, 10 aa, synthetic construct
  source 1..10: note = Seed: YRRLISMMGF
YCRLISMMGL

SEQ ID NO: 74976 - protein, 10 aa, synthetic construct
  source 1..10: note = Seed: YRRLISMMGF
YCRLISMMGM

SEQ ID NO: 74977 - protein, 10 aa, synthetic construct
  source 1..10: note = Seed: YYRYNLPTMC
YCRYNLPTMF

SEQ ID NO: 74978 - protein, 10 aa, synthetic construct
  source 1..10: note = Seed: YYRYNLPTMC
YCRYNLPTMI

SEQ ID NO: 74979 - protein, 10 aa, synthetic construct
  source 1..10: note = Seed: YYRYNLPTMC
YCRYNLPTML

SEQ ID NO: 74980 - protein, 10 aa, synthetic construct
  source 1..10: note = Seed: YYRYNLPTMC
YCRYNLPTMM

SEQ ID NO: 74981 - protein, 10 aa, synthetic construct
  source 1..10: note = Seed: YYRYNLPTMC
YCRYNLPTMV

SEQ ID NO: 74982 - protein, 10 aa, synthetic construct
  source 1..10: note = Seed: YSRYRIGNYK
YCRYRIGNYF

SEQ ID NO: 74983 - protein, 10 aa, synthetic construct
  source 1..10: note = Seed: YSRYRIGNYK
YCRYRIGNYK

SEQ ID NO: 74984 - protein, 11 aa, synthetic construct
  source 1..11: note = Seed: YSRYRIGNYKL
YCRYRIGNYKF

SEQ ID NO: 74985 - protein, 10 aa, synthetic construct
  source 1..10: note = Seed: YSRYRIGNYK
YCRYRIGNYL

SEQ ID NO: 74986 - protein, 10 aa, synthetic construct
  source 1..10: note = Seed: YSRYRIGNYK
YCRYRIGNYM

SEQ ID NO: 74987 - protein, 10 aa, synthetic construct
  source 1..10: note = Seed: YSRYRIGNYK
YCRYRIGNYR

SEQ ID NO: 74988 - protein, 11 aa, synthetic construct
  source 1..11: note = Seed: YSSANNCTFEY
YCSANNCTFEW

SEQ ID NO: 74989 - protein, 9 aa, synthetic construct
  source 1..9: note = Seed: YSSANNCTF
YCSANNCTW

SEQ ID NO: 74990 - protein, 9 aa, synthetic construct
  source 1..9: note = Seed: YSSANNCTF
YCSANNCTY

SEQ ID NO: 74991 - protein, 9 aa, synthetic construct
  source 1..9: note = Seed: YNSASFSTF
YCSASFSTF

SEQ ID NO: 74992 - protein, 10 aa, synthetic construct
  source 1..10: note = Seed: YNSASFSTFK
YCSASFSTFK

SEQ ID NO: 74993 - protein, 10 aa, synthetic construct
  source 1..10: note = Seed: YNSASFSTFK
YCSASFSTFR

SEQ ID NO: 74994 - protein, 9 aa, synthetic construct
  source 1..9: note = Seed: YNSASFSTF
YCSASFSTL

SEQ ID NO: 74995 - protein, 9 aa, synthetic construct
  source 1..9: note = Seed: YNSASFSTF
YCSASFSTM

SEQ ID NO: 74996 - protein, 9 aa, synthetic construct
  source 1..9: note = Seed: YNSASFSTF
YCSASFSTW

SEQ ID NO: 74997 - protein, 9 aa, synthetic construct
  source 1..9: note = Seed: YNSASFSTF
YCSASFSTY

SEQ ID NO: 74998 - protein, 10 aa, synthetic construct
  source 1..10: note = Seed: YASAVVLLIL
YCSAVVLLIW

SEQ ID NO: 74999 - protein, 9 aa, synthetic construct
  source 1..9: note = Seed: YASAVVLLI
YCSAVVLLW

SEQ ID NO: 75000 - protein, 9 aa, synthetic construct
  source 1..9: note = Seed: YASAVVLLI
YCSAVVLLY

SEQ ID NO: 75001 - protein, 11 aa, synthetic construct
  source 1..11: note = Seed: YYSLLMPILTL
YCSLLMPILTV

SEQ ID NO: 75002 - protein, 11 aa, synthetic construct
  source 1..11: note = Seed: YRSLPGVFCGV
YCSLPGVFCGI

SEQ ID NO: 75003 - protein, 11 aa, synthetic construct
  source 1..11: note = Seed: YRSLPGVFCGV
YCSLPGVFCGV

SEQ ID NO: 75004 - protein, 10 aa, synthetic construct
  source 1..10: note = Seed: YESLRPDTRY
YCSLRPDTRF

SEQ ID NO: 75005 - protein, 10 aa, synthetic construct
  source 1..10: note = Seed: YESLRPDTRY
YCSLRPDTRW

SEQ ID NO: 75006 - protein, 10 aa, synthetic construct
  source 1..10: note = Seed: YTSNPTTFHL
YCSNPTTFHF

SEQ ID NO: 75007 - protein, 10 aa, synthetic construct
  source 1..10: note = Seed: YTSNPTTFHL
YCSNPTTFHW

SEQ ID NO: 75008 - protein, 10 aa, synthetic construct
  source 1..10: note = Seed: YTSNPTTFHL
YCSNPTTFHY

SEQ ID NO: 75009 - protein, 10 aa, synthetic construct
  source 1..10: note = Seed: YLTFYLTNDV
YCTFYLTNDV

SEQ ID NO: 75010 - protein, 10 aa, synthetic construct
  source 1..10: note = Seed: YLTNDVSFLA
YCTNDVSFLA

SEQ ID NO: 75011 - protein, 10 aa, synthetic construct
  source 1..10: note = Seed: YLTNDVSFLA
YCTNDVSFLI

SEQ ID NO: 75012 - protein, 10 aa, synthetic construct
  source 1..10: note = Seed: YLTNDVSFLA
YCTNDVSFLL

SEQ ID NO: 75013 - protein, 10 aa, synthetic construct
  source 1..10: note = Seed: YLTNDVSFLA
YCTNDVSFLM

SEQ ID NO: 75014 - protein, 10 aa, synthetic construct
  source 1..10: note = Seed: YLTNDVSFLA
YCTNDVSFLV

SEQ ID NO: 75015 - protein, 10 aa, synthetic construct
  source 1..10: note = Seed: YFTSDYYQLY
YCTSDYYQLK

SEQ ID NO: 75016 - protein, 10 aa, synthetic construct
  source 1..10: note = Seed: YFTSDYYQLY
YCTSDYYQLR

SEQ ID NO: 75017 - protein, 10 aa, synthetic construct
  source 1..10: note = Seed: YFTSDYYQLY
YCTSDYYQLW

SEQ ID NO: 75018 - protein, 10 aa, synthetic construct
  source 1..10: note = Seed: YFTSDYYQLY
YCTSDYYQLY

SEQ ID NO: 75019 - protein, 11 aa, synthetic construct
  source 1..11: note = Seed: YYTSNPTTFHL
YCTSNPTTFHF

SEQ ID NO: 75020 - protein, 11 aa, synthetic construct
  source 1..11: note = Seed: YYTSNPTTFHL
YCTSNPTTFHW

SEQ ID NO: 75021 - protein, 10 aa, synthetic construct
  source 1..10: note = Seed: YTTTIKPVTY
YCTTIKPVTW

SEQ ID NO: 75022 - protein, 11 aa, synthetic construct
  source 1..11: note = Seed: YTTTIKPVTYK
YCTTIKPVTYR

SEQ ID NO: 75023 - protein, 9 aa, synthetic construct
  source 1..9: note = Seed: YTVELGTEV
YCVELGTEF

SEQ ID NO: 75024 - protein, 9 aa, synthetic construct
  source 1..9: note = Seed: YTVELGTEV
YCVELGTEL

SEQ ID NO: 75025 - protein, 9 aa, synthetic construct
  source 1..9: note = Seed: YTVELGTEV
YCVELGTEM

SEQ ID NO: 75026 - protein, 9 aa, synthetic construct
  source 1..9: note = Seed: YTVELGTEV
YCVELGTEY

SEQ ID NO: 75027 - protein, 10 aa, synthetic construct
  source 1..10: note = Seed: YYVWKSYVHV
YCVWKSYVHV

SEQ ID NO: 75028 - protein, 10 aa, synthetic construct
  source 1..10: note = Seed: YVYANGGKGF
YCYANGGKGF

SEQ ID NO: 75029 - protein, 10 aa, synthetic construct
  source 1..10: note = Seed: YVYANGGKGF
YCYANGGKGM

SEQ ID NO: 75030 - protein, 11 aa, synthetic construct
  source 1..11: note = Seed: YLYFIKGLNNL
YCYFIKGLNNF

SEQ ID NO: 75031 - protein, 10 aa, synthetic construct
  source 1..10: note = Seed: YDYLVSTQEF
YCYLVSTQEF

SEQ ID NO: 75032 - protein, 11 aa, synthetic construct
  source 1..11: note = Seed: YDYLVSTQEFR
YCYLVSTQEFF

SEQ ID NO: 75033 - protein, 10 aa, synthetic construct
  source 1..10: note = Seed: YDYLVSTQEF
YCYLVSTQEI

SEQ ID NO: 75034 - protein, 10 aa, synthetic construct
  source 1..10: note = Seed: YDYLVSTQEF
YCYLVSTQEL

SEQ ID NO: 75035 - protein, 10 aa, synthetic construct
  source 1..10: note = Seed: YDYLVSTQEF
YCYLVSTQEM

SEQ ID NO: 75036 - protein, 10 aa, synthetic construct
  source 1..10: note = Seed: YDYLVSTQEF
YCYLVSTQEW

SEQ ID NO: 75037 - protein, 10 aa, synthetic construct
  source 1..10: note = Seed: YDYLVSTQEF
YCYLVSTQEY

SEQ ID NO: 75038 - protein, 9 aa, synthetic construct
  source 1..9: note = Seed: YNYLYRLFR
YCYLYRLFR

SEQ ID NO: 75039 - protein, 10 aa, synthetic construct
  source 1..10: note = Seed: YNYLYRLFRK
YCYLYRLFRR

SEQ ID NO: 75040 - protein, 11 aa, synthetic construct
  source 1..11: note = Seed: YDYYRYNLPTM
YCYYRYNLPTF

SEQ ID NO: 75041 - protein, 11 aa, synthetic construct
  source 1..11: note = Seed: YDYYRYNLPTM
YCYYRYNLPTW

SEQ ID NO: 75042 - protein, 10 aa, synthetic construct
  source 1..10: note = Seed: YGANKDGIIW
YDANKDGIIW

SEQ ID NO: 75043 - protein, 10 aa, synthetic construct
  source 1..10: note = Seed: YPANSIVCRF
YDANSIVCRW

SEQ ID NO: 75044 - protein, 10 aa, synthetic construct
  source 1..10: note = Seed: YKENSYTTTI
YDENSYTTTA

SEQ ID NO: 75045 - protein, 10 aa, synthetic construct
  source 1..10: note = Seed: YKENSYTTTI
YDENSYTTTL

SEQ ID NO: 75046 - protein, 10 aa, synthetic construct
  source 1..10: note = Seed: YKENSYTTTI
YDENSYTTTM

SEQ ID NO: 75047 - protein, 9 aa, synthetic construct
  source 1..9: note = Seed: YIFFASFYY
YDFFASFYK

SEQ ID NO: 75048 - protein, 9 aa, synthetic construct
  source 1..9: note = Seed: YIFFASFYY
YDFFASFYR

SEQ ID NO: 75049 - protein, 9 aa, synthetic construct
  source 1..9: note = Seed: YIFFASFYY
YDFFASFYY

SEQ ID NO: 75050 - protein, 10 aa, synthetic construct
  source 1..10: note = Seed: YIFFASFYYV
YDFFASFYYF

SEQ ID NO: 75051 - protein, 10 aa, synthetic construct
  source 1..10: note = Seed: YIFFASFYYV
YDFFASFYYI

SEQ ID NO: 75052 - protein, 10 aa, synthetic construct
  source 1..10: note = Seed: YIFFASFYYV
YDFFASFYYK

SEQ ID NO: 75053 - protein, 10 aa, synthetic construct
  source 1..10: note = Seed: YIFFASFYYV
YDFFASFYYL

SEQ ID NO: 75054 - protein, 10 aa, synthetic construct
  source 1..10: note = Seed: YIFFASFYYV
YDFFASFYYM

SEQ ID NO: 75055 - protein, 10 aa, synthetic construct
  source 1..10: note = Seed: YIFFASFYYV
YDFFASFYYR

SEQ ID NO: 75056 - protein, 10 aa, synthetic construct
  source 1..10: note = Seed: YIFFASFYYV
YDFFASFYYV

SEQ ID NO: 75057 - protein, 11 aa, synthetic construct
  source 1..11: note = Seed: YIFFASFYYVW
YDFFASFYYVY

SEQ ID NO: 75058 - protein, 10 aa, synthetic construct
  source 1..10: note = Seed: YIFFASFYYV
YDFFASFYYW

SEQ ID NO: 75059 - protein, 10 aa, synthetic construct
  source 1..10: note = Seed: YIFFASFYYV
YDFFASFYYY

SEQ ID NO: 75060 - protein, 9 aa, synthetic construct
  source 1..9: note = Seed: YWFFSNYLK
YDFFSNYLR

SEQ ID NO: 75061 - protein, 9 aa, synthetic construct
  source 1..9: note = Seed: YWFFSNYLK
YDFFSNYLY

SEQ ID NO: 75062 - protein, 10 aa, synthetic construct
  source 1..10: note = Seed: YSFLPGVYSV
YDFLPGVYSF

SEQ ID NO: 75063 - protein, 10 aa, synthetic construct
  source 1..10: note = Seed: YSFLPGVYSV
YDFLPGVYSI

SEQ ID NO: 75064 - protein, 10 aa, synthetic construct
  source 1..10: note = Seed: YSFLPGVYSV
YDFLPGVYSL

SEQ ID NO: 75065 - protein, 10 aa, synthetic construct
  source 1..10: note = Seed: YSFLPGVYSV
YDFLPGVYSM

SEQ ID NO: 75066 - protein, 10 aa, synthetic construct
  source 1..10: note = Seed: YSFLPGVYSV
YDFLPGVYSW

SEQ ID NO: 75067 - protein, 10 aa, synthetic construct
  source 1..10: note = Seed: YVFTGYRVTK
YDFTGYRVTR

SEQ ID NO: 75068 - protein, 9 aa, synthetic construct
  source 1..9: note = Seed: YFFTLLLQL
YDFTLLLQY

SEQ ID NO: 75069 - protein, 11 aa, synthetic construct
  source 1..11: note = Seed: YVGYLQPRTFL
YDGYLQPRTFF

SEQ ID NO: 75070 - protein, 11 aa, synthetic construct
  source 1..11: note = Seed: YVGYLQPRTFL
YDGYLQPRTFW

SEQ ID NO: 75071 - protein, 10 aa, synthetic construct
  source 1..10: note = Seed: YFIASFRLFA
YDIASFRLFI

SEQ ID NO: 75072 - protein, 10 aa, synthetic construct
  source 1..10: note = Seed: YFIASFRLFA
YDIASFRLFL

SEQ ID NO: 75073 - protein, 10 aa, synthetic construct
  source 1..10: note = Seed: YFIASFRLFA
YDIASFRLFV

SEQ ID NO: 75074 - protein, 11 aa, synthetic construct
  source 1..11: note = Seed: YDKLQFTSLEI
YDKLQFTSLEV

SEQ ID NO: 75075 - protein, 10 aa, synthetic construct
  source 1..10: note = Seed: YRLFRKSNLK
YDLFRKSNLK

SEQ ID NO: 75076 - protein, 10 aa, synthetic construct
  source 1..10: note = Seed: YRLFRKSNLK
YDLFRKSNLR

SEQ ID NO: 75077 - protein, 9 aa, synthetic construct
  source 1..9: note = Seed: YILFTRFFY
YDLFTRFFY

SEQ ID NO: 75078 - protein, 10 aa, synthetic construct
  source 1..10: note = Seed: YILFTRFFYV
YDLFTRFFYA

SEQ ID NO: 75079 - protein, 10 aa, synthetic construct
  source 1..10: note = Seed: YILFTRFFYV
YDLFTRFFYC

SEQ ID NO: 75080 - protein, 10 aa, synthetic construct
  source 1..10: note = Seed: YILFTRFFYV
YDLFTRFFYF

SEQ ID NO: 75081 - protein, 10 aa, synthetic construct
  source 1..10: note = Seed: YILFTRFFYV
YDLFTRFFYI

SEQ ID NO: 75082 - protein, 10 aa, synthetic construct
  source 1..10: note = Seed: YILFTRFFYV
YDLFTRFFYK

SEQ ID NO: 75083 - protein, 10 aa, synthetic construct
  source 1..10: note = Seed: YILFTRFFYV
YDLFTRFFYL

SEQ ID NO: 75084 - protein, 10 aa, synthetic construct
  source 1..10: note = Seed: YILFTRFFYV
YDLFTRFFYM

SEQ ID NO: 75085 - protein, 10 aa, synthetic construct
  source 1..10: note = Seed: YILFTRFFYV
YDLFTRFFYR

SEQ ID NO: 75086 - protein, 10 aa, synthetic construct
  source 1..10: note = Seed: YILFTRFFYV
YDLFTRFFYS

SEQ ID NO: 75087 - protein, 10 aa, synthetic construct
  source 1..10: note = Seed: YILFTRFFYV
YDLFTRFFYT

SEQ ID NO: 75088 - protein, 10 aa, synthetic construct
  source 1..10: note = Seed: YILFTRFFYV
YDLFTRFFYV

SEQ ID NO: 75089 - protein, 11 aa, synthetic construct
  source 1..11: note = Seed: YILFTRFFYVL
YDLFTRFFYVA

SEQ ID NO: 75090 - protein, 11 aa, synthetic construct
  source 1..11: note = Seed: YILFTRFFYVL
YDLFTRFFYVC

SEQ ID NO: 75091 - protein, 11 aa, synthetic construct
  source 1..11: note = Seed: YILFTRFFYVL
YDLFTRFFYVD

SEQ ID NO: 75092 - protein, 11 aa, synthetic construct
  source 1..11: note = Seed: YILFTRFFYVL
YDLFTRFFYVE

SEQ ID NO: 75093 - protein, 11 aa, synthetic construct
  source 1..11: note = Seed: YILFTRFFYVL
YDLFTRFFYVF

SEQ ID NO: 75094 - protein, 11 aa, synthetic construct
  source 1..11: note = Seed: YILFTRFFYVL
YDLFTRFFYVG

SEQ ID NO: 75095 - protein, 11 aa, synthetic construct
  source 1..11: note = Seed: YILFTRFFYVL
YDLFTRFFYVH

SEQ ID NO: 75096 - protein, 11 aa, synthetic construct
  source 1..11: note = Seed: YILFTRFFYVL
YDLFTRFFYVI

SEQ ID NO: 75097 - protein, 11 aa, synthetic construct
  source 1..11: note = Seed: YILFTRFFYVL
YDLFTRFFYVK

SEQ ID NO: 75098 - protein, 11 aa, synthetic construct
  source 1..11: note = Seed: YILFTRFFYVL
YDLFTRFFYVL

SEQ ID NO: 75099 - protein, 11 aa, synthetic construct
  source 1..11: note = Seed: YILFTRFFYVL
YDLFTRFFYVM

SEQ ID NO: 75100 - protein, 11 aa, synthetic construct
  source 1..11: note = Seed: YILFTRFFYVL
YDLFTRFFYVN

SEQ ID NO: 75101 - protein, 11 aa, synthetic construct
  source 1..11: note = Seed: YILFTRFFYVL
YDLFTRFFYVP

SEQ ID NO: 75102 - protein, 11 aa, synthetic construct
  source 1..11: note = Seed: YILFTRFFYVL
YDLFTRFFYVQ

SEQ ID NO: 75103 - protein, 11 aa, synthetic construct
  source 1..11: note = Seed: YILFTRFFYVL
YDLFTRFFYVR

SEQ ID NO: 75104 - protein, 11 aa, synthetic construct
  source 1..11: note = Seed: YILFTRFFYVL
YDLFTRFFYVS

SEQ ID NO: 75105 - protein, 11 aa, synthetic construct
  source 1..11: note = Seed: YILFTRFFYVL
YDLFTRFFYVT

SEQ ID NO: 75106 - protein, 11 aa, synthetic construct
  source 1..11: note = Seed: YILFTRFFYVL
YDLFTRFFYVV

SEQ ID NO: 75107 - protein, 11 aa, synthetic construct
  source 1..11: note = Seed: YILFTRFFYVL
YDLFTRFFYVW

SEQ ID NO: 75108 - protein, 11 aa, synthetic construct
  source 1..11: note = Seed: YILFTRFFYVL
YDLFTRFFYVY

SEQ ID NO: 75109 - protein, 10 aa, synthetic construct
  source 1..10: note = Seed: YILFTRFFYV
YDLFTRFFYY

SEQ ID NO: 75110 - protein, 10 aa, synthetic construct
  source 1..10: note = Seed: YSLLMPILTL
YDLLMPILTA

SEQ ID NO: 75111 - protein, 10 aa, synthetic construct
  source 1..10: note = Seed: YSLLMPILTL
YDLLMPILTI

SEQ ID NO: 75112 - protein, 10 aa, synthetic construct
  source 1..10: note = Seed: YSLLMPILTL
YDLLMPILTL

SEQ ID NO: 75113 - protein, 10 aa, synthetic construct
  source 1..10: note = Seed: YSLLMPILTL
YDLLMPILTV

SEQ ID NO: 75114 - protein, 10 aa, synthetic construct
  source 1..10: note = Seed: YHLMSFPQSA
YDLMSFPQSA

SEQ ID NO: 75115 - protein, 11 aa, synthetic construct
  source 1..11: note = Seed: YHLMSFPQSAP
YDLMSFPQSAV

SEQ ID NO: 75116 - protein, 10 aa, synthetic construct
  source 1..10: note = Seed: YHLMSFPQSA
YDLMSFPQSI

SEQ ID NO: 75117 - protein, 10 aa, synthetic construct
  source 1..10: note = Seed: YHLMSFPQSA
YDLMSFPQSL

SEQ ID NO: 75118 - protein, 10 aa, synthetic construct
  source 1..10: note = Seed: YHLMSFPQSA
YDLMSFPQSM

SEQ ID NO: 75119 - protein, 10 aa, synthetic construct
  source 1..10: note = Seed: YHLMSFPQSA
YDLMSFPQST

SEQ ID NO: 75120 - protein, 10 aa, synthetic construct
  source 1..10: note = Seed: YHLMSFPQSA
YDLMSFPQSV

SEQ ID NO: 75121 - protein, 10 aa, synthetic construct
  source 1..10: note = Seed: YDLSVVNARL
YDLSVVNARA

SEQ ID NO: 75122 - protein, 10 aa, synthetic construct
  source 1..10: note = Seed: YDLSVVNARL
YDLSVVNARI

SEQ ID NO: 75123 - protein, 10 aa, synthetic construct
  source 1..10: note = Seed: YDLSVVNARL
YDLSVVNARM

SEQ ID NO: 75124 - protein, 10 aa, synthetic construct
  source 1..10: note = Seed: YDLSVVNARL
YDLSVVNARV

SEQ ID NO: 75125 - protein, 10 aa, synthetic construct
  source 1..10: note = Seed: YTMADLVYAL
YDMADLVYAA

SEQ ID NO: 75126 - protein, 10 aa, synthetic construct
  source 1..10: note = Seed: YTMADLVYAL
YDMADLVYAC

SEQ ID NO: 75127 - protein, 10 aa, synthetic construct
  source 1..10: note = Seed: YTMADLVYAL
YDMADLVYAF

SEQ ID NO: 75128 - protein, 10 aa, synthetic construct
  source 1..10: note = Seed: YTMADLVYAL
YDMADLVYAG

SEQ ID NO: 75129 - protein, 10 aa, synthetic construct
  source 1..10: note = Seed: YTMADLVYAL
YDMADLVYAI

SEQ ID NO: 75130 - protein, 10 aa, synthetic construct
  source 1..10: note = Seed: YTMADLVYAL
YDMADLVYAL

SEQ ID NO: 75131 - protein, 11 aa, synthetic construct
  source 1..11: note = Seed: YTMADLVYALR
YDMADLVYALA

SEQ ID NO: 75132 - protein, 11 aa, synthetic construct
  source 1..11: note = Seed: YTMADLVYALR
YDMADLVYALC

SEQ ID NO: 75133 - protein, 11 aa, synthetic construct
  source 1..11: note = Seed: YTMADLVYALR
YDMADLVYALD

SEQ ID NO: 75134 - protein, 11 aa, synthetic construct
  source 1..11: note = Seed: YTMADLVYALR
YDMADLVYALE

SEQ ID NO: 75135 - protein, 11 aa, synthetic construct
  source 1..11: note = Seed: YTMADLVYALR
YDMADLVYALF

SEQ ID NO: 75136 - protein, 11 aa, synthetic construct
  source 1..11: note = Seed: YTMADLVYALR
YDMADLVYALG

SEQ ID NO: 75137 - protein, 11 aa, synthetic construct
  source 1..11: note = Seed: YTMADLVYALR
YDMADLVYALH

SEQ ID NO: 75138 - protein, 11 aa, synthetic construct
  source 1..11: note = Seed: YTMADLVYALR
YDMADLVYALI

SEQ ID NO: 75139 - protein, 11 aa, synthetic construct
  source 1..11: note = Seed: YTMADLVYALR
YDMADLVYALK

SEQ ID NO: 75140 - protein, 11 aa, synthetic construct
  source 1..11: note = Seed: YTMADLVYALR
YDMADLVYALL

SEQ ID NO: 75141 - protein, 11 aa, synthetic construct
  source 1..11: note = Seed: YTMADLVYALR
YDMADLVYALM

SEQ ID NO: 75142 - protein, 11 aa, synthetic construct
  source 1..11: note = Seed: YTMADLVYALR
YDMADLVYALN

SEQ ID NO: 75143 - protein, 11 aa, synthetic construct
  source 1..11: note = Seed: YTMADLVYALR
YDMADLVYALP

SEQ ID NO: 75144 - protein, 11 aa, synthetic construct
  source 1..11: note = Seed: YTMADLVYALR
YDMADLVYALQ

SEQ ID NO: 75145 - protein, 11 aa, synthetic construct
  source 1..11: note = Seed: YTMADLVYALR
YDMADLVYALR

SEQ ID NO: 75146 - protein, 11 aa, synthetic construct
  source 1..11: note = Seed: YTMADLVYALR
YDMADLVYALS

SEQ ID NO: 75147 - protein, 11 aa, synthetic construct
  source 1..11: note = Seed: YTMADLVYALR
YDMADLVYALT

SEQ ID NO: 75148 - protein, 11 aa, synthetic construct
  source 1..11: note = Seed: YTMADLVYALR
YDMADLVYALV

SEQ ID NO: 75149 - protein, 11 aa, synthetic construct
  source 1..11: note = Seed: YTMADLVYALR
YDMADLVYALW

SEQ ID NO: 75150 - protein, 11 aa, synthetic construct
  source 1..11: note = Seed: YTMADLVYALR
YDMADLVYALY

SEQ ID NO: 75151 - protein, 10 aa, synthetic construct
  source 1..10: note = Seed: YTMADLVYAL
YDMADLVYAM

SEQ ID NO: 75152 - protein, 10 aa, synthetic construct
  source 1..10: note = Seed: YTMADLVYAL
YDMADLVYAS

SEQ ID NO: 75153 - protein, 10 aa, synthetic construct
  source 1..10: note = Seed: YTMADLVYAL
YDMADLVYAT

SEQ ID NO: 75154 - protein, 10 aa, synthetic construct
  source 1..10: note = Seed: YTMADLVYAL
YDMADLVYAV

SEQ ID NO: 75155 - protein, 10 aa, synthetic construct
  source 1..10: note = Seed: YTMADLVYAL
YDMADLVYAY

SEQ ID NO: 75156 - protein, 9 aa, synthetic construct
  source 1..9: note = Seed: YTMADLVYA
YDMADLVYV

SEQ ID NO: 75157 - protein, 10 aa, synthetic construct
  source 1..10: note = Seed: YVMHANYIFW
YDMHANYIFF

SEQ ID NO: 75158 - protein, 10 aa, synthetic construct
  source 1..10: note = Seed: YVMHANYIFW
YDMHANYIFY

SEQ ID NO: 75159 - protein, 10 aa, synthetic construct
  source 1..10: note = Seed: YTPHTVLQAV
YDPHTVLQAA

SEQ ID NO: 75160 - protein, 10 aa, synthetic construct
  source 1..10: note = Seed: YTPHTVLQAV
YDPHTVLQAI

SEQ ID NO: 75161 - protein, 10 aa, synthetic construct
  source 1..10: note = Seed: YTPHTVLQAV
YDPHTVLQAL

SEQ ID NO: 75162 - protein, 10 aa, synthetic construct
  source 1..10: note = Seed: YTPHTVLQAV
YDPHTVLQAM

SEQ ID NO: 75163 - protein, 10 aa, synthetic construct
  source 1..10: note = Seed: YTPHTVLQAV
YDPHTVLQAV

SEQ ID NO: 75164 - protein, 10 aa, synthetic construct
  source 1..10: note = Seed: YMPYFFTLLL
YDPYFFTLLA

SEQ ID NO: 75165 - protein, 10 aa, synthetic construct
  source 1..10: note = Seed: YMPYFFTLLL
YDPYFFTLLF

SEQ ID NO: 75166 - protein, 10 aa, synthetic construct
  source 1..10: note = Seed: YMPYFFTLLL
YDPYFFTLLL

SEQ ID NO: 75167 - protein, 10 aa, synthetic construct
  source 1..10: note = Seed: YMPYFFTLLL
YDPYFFTLLM

SEQ ID NO: 75168 - protein, 10 aa, synthetic construct
  source 1..10: note = Seed: YMPYFFTLLL
YDPYFFTLLT

SEQ ID NO: 75169 - protein, 10 aa, synthetic construct
  source 1..10: note = Seed: YMPYFFTLLL
YDPYFFTLLV

SEQ ID NO: 75170 - protein, 10 aa, synthetic construct
  source 1..10: note = Seed: YMPYFFTLLL
YDPYFFTLLW

SEQ ID NO: 75171 - protein, 10 aa, synthetic construct
  source 1..10: note = Seed: YMPYFFTLLL
YDPYFFTLLY

SEQ ID NO: 75172 - protein, 10 aa, synthetic construct
  source 1..10: note = Seed: YQPYRVVVLS
YDPYRVVVLA

SEQ ID NO: 75173 - protein, 10 aa, synthetic construct
  source 1..10: note = Seed: YKQFDTYNLW
YDQFDTYNLF

SEQ ID NO: 75174 - protein, 10 aa, synthetic construct
  source 1..10: note = Seed: YKQFDTYNLW
YDQFDTYNLM

SEQ ID NO: 75175 - protein, 10 aa, synthetic construct
  source 1..10: note = Seed: YKQFDTYNLW
YDQFDTYNLY

SEQ ID NO: 75176 - protein, 10 aa, synthetic construct
  source 1..10: note = Seed: YSQLMCQPIL
YDQLMCQPIF

SEQ ID NO: 75177 - protein, 11 aa, synthetic construct
  source 1..11: note = Seed: YSQLMCQPILL
YDQLMCQPILA

SEQ ID NO: 75178 - protein, 11 aa, synthetic construct
  source 1..11: note = Seed: YSQLMCQPILL
YDQLMCQPILI

SEQ ID NO: 75179 - protein, 11 aa, synthetic construct
  source 1..11: note = Seed: YSQLMCQPILL
YDQLMCQPILL

SEQ ID NO: 75180 - protein, 11 aa, synthetic construct
  source 1..11: note = Seed: YSQLMCQPILL
YDQLMCQPILM

SEQ ID NO: 75181 - protein, 11 aa, synthetic construct
  source 1..11: note = Seed: YSQLMCQPILL
YDQLMCQPILV

SEQ ID NO: 75182 - protein, 10 aa, synthetic construct
  source 1..10: note = Seed: YSQLMCQPIL
YDQLMCQPIY

SEQ ID NO: 75183 - protein, 9 aa, synthetic construct
  source 1..9: note = Seed: YLQPRTFLL
YDQPRTFLY

SEQ ID NO: 75184 - protein, 10 aa, synthetic construct
  source 1..10: note = Seed: YPQVNGLTSI
YDQVNGLTSF

SEQ ID NO: 75185 - protein, 10 aa, synthetic construct
  source 1..10: note = Seed: YPQVNGLTSI
YDQVNGLTSI

SEQ ID NO: 75186 - protein, 10 aa, synthetic construct
  source 1..10: note = Seed: YPQVNGLTSI
YDQVNGLTSL

SEQ ID NO: 75187 - protein, 10 aa, synthetic construct
  source 1..10: note = Seed: YPQVNGLTSI
YDQVNGLTSM

SEQ ID NO: 75188 - protein, 10 aa, synthetic construct
  source 1..10: note = Seed: YPQVNGLTSI
YDQVNGLTSV

SEQ ID NO: 75189 - protein, 10 aa, synthetic construct
  source 1..10: note = Seed: YPQVNGLTSI
YDQVNGLTSY

SEQ ID NO: 75190 - protein, 10 aa, synthetic construct
  source 1..10: note = Seed: YRRLISMMGF
YDRLISMMGF

SEQ ID NO: 75191 - protein, 10 aa, synthetic construct
  source 1..10: note = Seed: YRRLISMMGF
YDRLISMMGI

SEQ ID NO: 75192 - protein, 10 aa, synthetic construct
  source 1..10: note = Seed: YRRLISMMGF
YDRLISMMGL

SEQ ID NO: 75193 - protein, 10 aa, synthetic construct
  source 1..10: note = Seed: YRRLISMMGF
YDRLISMMGM

SEQ ID NO: 75194 - protein, 10 aa, synthetic construct
  source 1..10: note = Seed: YYRYNLPTMC
YDRYNLPTMF

SEQ ID NO: 75195 - protein, 10 aa, synthetic construct
  source 1..10: note = Seed: YYRYNLPTMC
YDRYNLPTMI

SEQ ID NO: 75196 - protein, 10 aa, synthetic construct
  source 1..10: note = Seed: YYRYNLPTMC
YDRYNLPTML

SEQ ID NO: 75197 - protein, 10 aa, synthetic construct
  source 1..10: note = Seed: YYRYNLPTMC
YDRYNLPTMM

SEQ ID NO: 75198 - protein, 10 aa, synthetic construct
  source 1..10: note = Seed: YYRYNLPTMC
YDRYNLPTMV

SEQ ID NO: 75199 - protein, 10 aa, synthetic construct
  source 1..10: note = Seed: YSRYRIGNYK
YDRYRIGNYF

SEQ ID NO: 75200 - protein, 10 aa, synthetic construct
  source 1..10: note = Seed: YSRYRIGNYK
YDRYRIGNYK

SEQ ID NO: 75201 - protein, 11 aa, synthetic construct
  source 1..11: note = Seed: YSRYRIGNYKL
YDRYRIGNYKF

SEQ ID NO: 75202 - protein, 10 aa, synthetic construct
  source 1..10: note = Seed: YSRYRIGNYK
YDRYRIGNYL

SEQ ID NO: 75203 - protein, 10 aa, synthetic construct
  source 1..10: note = Seed: YSRYRIGNYK
YDRYRIGNYM

SEQ ID NO: 75204 - protein, 10 aa, synthetic construct
  source 1..10: note = Seed: YSRYRIGNYK
YDRYRIGNYR

SEQ ID NO: 75205 - protein, 11 aa, synthetic construct
  source 1..11: note = Seed: YSSANNCTFEY
YDSANNCTFEW

SEQ ID NO: 75206 - protein, 10 aa, synthetic construct
  source 1..10: note = Seed: YNSASFSTFK
YDSASFSTFK

SEQ ID NO: 75207 - protein, 10 aa, synthetic construct
  source 1..10: note = Seed: YNSASFSTFK
YDSASFSTFR

SEQ ID NO: 75208 - protein, 10 aa, synthetic construct
  source 1..10: note = Seed: YASAVVLLIL
YDSAVVLLIW

SEQ ID NO: 75209 - protein, 11 aa, synthetic construct
  source 1..11: note = Seed: YYSLLMPILTL
YDSLLMPILTV

SEQ ID NO: 75210 - protein, 11 aa, synthetic construct
  source 1..11: note = Seed: YRSLPGVFCGV
YDSLPGVFCGI

SEQ ID NO: 75211 - protein, 11 aa, synthetic construct
  source 1..11: note = Seed: YRSLPGVFCGV
YDSLPGVFCGV

SEQ ID NO: 75212 - protein, 10 aa, synthetic construct
  source 1..10: note = Seed: YESLRPDTRY
YDSLRPDTRF

SEQ ID NO: 75213 - protein, 10 aa, synthetic construct
  source 1..10: note = Seed: YESLRPDTRY
YDSLRPDTRW

SEQ ID NO: 75214 - protein, 10 aa, synthetic construct
  source 1..10: note = Seed: YTSNPTTFHL
YDSNPTTFHF

SEQ ID NO: 75215 - protein, 10 aa, synthetic construct
  source 1..10: note = Seed: YTSNPTTFHL
YDSNPTTFHW

SEQ ID NO: 75216 - protein, 10 aa, synthetic construct
  source 1..10: note = Seed: YTSNPTTFHL
YDSNPTTFHY

SEQ ID NO: 75217 - protein, 10 aa, synthetic construct
  source 1..10: note = Seed: YLTFYLTNDV
YDTFYLTNDV

SEQ ID NO: 75218 - protein, 10 aa, synthetic construct
  source 1..10: note = Seed: YLTNDVSFLA
YDTNDVSFLA

SEQ ID NO: 75219 - protein, 10 aa, synthetic construct
  source 1..10: note = Seed: YLTNDVSFLA
YDTNDVSFLI

SEQ ID NO: 75220 - protein, 10 aa, synthetic construct
  source 1..10: note = Seed: YLTNDVSFLA
YDTNDVSFLL

SEQ ID NO: 75221 - protein, 10 aa, synthetic construct
  source 1..10: note = Seed: YLTNDVSFLA
YDTNDVSFLM

SEQ ID NO: 75222 - protein, 10 aa, synthetic construct
  source 1..10: note = Seed: YLTNDVSFLA
YDTNDVSFLV

SEQ ID NO: 75223 - protein, 10 aa, synthetic construct
  source 1..10: note = Seed: YFTSDYYQLY
YDTSDYYQLK

SEQ ID NO: 75224 - protein, 10 aa, synthetic construct
  source 1..10: note = Seed: YFTSDYYQLY
YDTSDYYQLR

SEQ ID NO: 75225 - protein, 10 aa, synthetic construct
  source 1..10: note = Seed: YFTSDYYQLY
YDTSDYYQLW

SEQ ID NO: 75226 - protein, 10 aa, synthetic construct
  source 1..10: note = Seed: YFTSDYYQLY
YDTSDYYQLY

SEQ ID NO: 75227 - protein, 11 aa, synthetic construct
  source 1..11: note = Seed: YYTSNPTTFHL
YDTSNPTTFHF

SEQ ID NO: 75228 - protein, 11 aa, synthetic construct
  source 1..11: note = Seed: YYTSNPTTFHL
YDTSNPTTFHW

SEQ ID NO: 75229 - protein, 10 aa, synthetic construct
  source 1..10: note = Seed: YTTTIKPVTY
YDTTIKPVTW

SEQ ID NO: 75230 - protein, 11 aa, synthetic construct
  source 1..11: note = Seed: YTTTIKPVTYK
YDTTIKPVTYR

SEQ ID NO: 75231 - protein, 10 aa, synthetic construct
  source 1..10: note = Seed: YYVWKSYVHV
YDVWKSYVHV

SEQ ID NO: 75232 - protein, 10 aa, synthetic construct
  source 1..10: note = Seed: YVYANGGKGF
YDYANGGKGF

SEQ ID NO: 75233 - protein, 10 aa, synthetic construct
  source 1..10: note = Seed: YVYANGGKGF
YDYANGGKGM

SEQ ID NO: 75234 - protein, 11 aa, synthetic construct
  source 1..11: note = Seed: YLYFIKGLNNL
YDYFIKGLNNF

SEQ ID NO: 75235 - protein, 10 aa, synthetic construct
  source 1..10: note = Seed: YDYLVSTQEF
YDYLVSTQEI

SEQ ID NO: 75236 - protein, 10 aa, synthetic construct
  source 1..10: note = Seed: YDYLVSTQEF
YDYLVSTQEL

SEQ ID NO: 75237 - protein, 10 aa, synthetic construct
  source 1..10: note = Seed: YDYLVSTQEF
YDYLVSTQEM

SEQ ID NO: 75238 - protein, 10 aa, synthetic construct
  source 1..10: note = Seed: YDYLVSTQEF
YDYLVSTQEW

SEQ ID NO: 75239 - protein, 10 aa, synthetic construct
  source 1..10: note = Seed: YDYLVSTQEF
YDYLVSTQEY

SEQ ID NO: 75240 - protein, 10 aa, synthetic construct
  source 1..10: note = Seed: YNYLYRLFRK
YDYLYRLFRR

SEQ ID NO: 75241 - protein, 11 aa, synthetic construct
  source 1..11: note = Seed: YDYYRYNLPTM
YDYYRYNLPTF

SEQ ID NO: 75242 - protein, 11 aa, synthetic construct
  source 1..11: note = Seed: YDYYRYNLPTM
YDYYRYNLPTW

SEQ ID NO: 75243 - protein, 10 aa, synthetic construct
  source 1..10: note = Seed: YGANKDGIIW
YEANKDGIIW

SEQ ID NO: 75244 - protein, 10 aa, synthetic construct
  source 1..10: note = Seed: YPANSIVCRF
YEANSIVCRW

SEQ ID NO: 75245 - protein, 9 aa, synthetic construct
  source 1..9: note = Seed: YECDIPIGA
YECDIPIGI

SEQ ID NO: 75246 - protein, 9 aa, synthetic construct
  source 1..9: note = Seed: YECDIPIGA
YECDIPIGL

SEQ ID NO: 75247 - protein, 9 aa, synthetic construct
  source 1..9: note = Seed: YECDIPIGA
YECDIPIGM

SEQ ID NO: 75248 - protein, 10 aa, synthetic construct
  source 1..10: note = Seed: YKENSYTTTI
YEENSYTTTA

SEQ ID NO: 75249 - protein, 10 aa, synthetic construct
  source 1..10: note = Seed: YKENSYTTTI
YEENSYTTTL

SEQ ID NO: 75250 - protein, 10 aa, synthetic construct
  source 1..10: note = Seed: YKENSYTTTI
YEENSYTTTM

SEQ ID NO: 75251 - protein, 9 aa, synthetic construct
  source 1..9: note = Seed: YVFCTVNAL
YEFCTVNAF

SEQ ID NO: 75252 - protein, 9 aa, synthetic construct
  source 1..9: note = Seed: YVFCTVNAL
YEFCTVNAL

SEQ ID NO: 75253 - protein, 9 aa, synthetic construct
  source 1..9: note = Seed: YVFCTVNAL
YEFCTVNAM

SEQ ID NO: 75254 - protein, 9 aa, synthetic construct
  source 1..9: note = Seed: YVFCTVNAL
YEFCTVNAY

SEQ ID NO: 75255 - protein, 9 aa, synthetic construct
  source 1..9: note = Seed: YIFFASFYY
YEFFASFYF

SEQ ID NO: 75256 - protein, 9 aa, synthetic construct
  source 1..9: note = Seed: YIFFASFYY
YEFFASFYK

SEQ ID NO: 75257 - protein, 9 aa, synthetic construct
  source 1..9: note = Seed: YIFFASFYY
YEFFASFYM

SEQ ID NO: 75258 - protein, 9 aa, synthetic construct
  source 1..9: note = Seed: YIFFASFYY
YEFFASFYR

SEQ ID NO: 75259 - protein, 9 aa, synthetic construct
  source 1..9: note = Seed: YIFFASFYY
YEFFASFYV

SEQ ID NO: 75260 - protein, 9 aa, synthetic construct
  source 1..9: note = Seed: YIFFASFYY
YEFFASFYY

SEQ ID NO: 75261 - protein, 10 aa, synthetic construct
  source 1..10: note = Seed: YIFFASFYYV
YEFFASFYYF

SEQ ID NO: 75262 - protein, 10 aa, synthetic construct
  source 1..10: note = Seed: YIFFASFYYV
YEFFASFYYH

SEQ ID NO: 75263 - protein, 10 aa, synthetic construct
  source 1..10: note = Seed: YIFFASFYYV
YEFFASFYYI

SEQ ID NO: 75264 - protein, 10 aa, synthetic construct
  source 1..10: note = Seed: YIFFASFYYV
YEFFASFYYK

SEQ ID NO: 75265 - protein, 10 aa, synthetic construct
  source 1..10: note = Seed: YIFFASFYYV
YEFFASFYYL

SEQ ID NO: 75266 - protein, 10 aa, synthetic construct
  source 1..10: note = Seed: YIFFASFYYV
YEFFASFYYM

SEQ ID NO: 75267 - protein, 10 aa, synthetic construct
  source 1..10: note = Seed: YIFFASFYYV
YEFFASFYYR

SEQ ID NO: 75268 - protein, 10 aa, synthetic construct
  source 1..10: note = Seed: YIFFASFYYV
YEFFASFYYV

SEQ ID NO: 75269 - protein, 11 aa, synthetic construct
  source 1..11: note = Seed: YIFFASFYYVW
YEFFASFYYVY

SEQ ID NO: 75270 - protein, 10 aa, synthetic construct
  source 1..10: note = Seed: YIFFASFYYV
YEFFASFYYW

SEQ ID NO: 75271 - protein, 10 aa, synthetic construct
  source 1..10: note = Seed: YIFFASFYYV
YEFFASFYYY

SEQ ID NO: 75272 - protein, 9 aa, synthetic construct
  source 1..9: note = Seed: YWFFSNYLK
YEFFSNYLR

SEQ ID NO: 75273 - protein, 9 aa, synthetic construct
  source 1..9: note = Seed: YWFFSNYLK
YEFFSNYLY

SEQ ID NO: 75274 - protein, 10 aa, synthetic construct
  source 1..10: note = Seed: YSFLPGVYSV
YEFLPGVYSF

SEQ ID NO: 75275 - protein, 10 aa, synthetic construct
  source 1..10: note = Seed: YSFLPGVYSV
YEFLPGVYSI

SEQ ID NO: 75276 - protein, 10 aa, synthetic construct
  source 1..10: note = Seed: YSFLPGVYSV
YEFLPGVYSL

SEQ ID NO: 75277 - protein, 10 aa, synthetic construct
  source 1..10: note = Seed: YSFLPGVYSV
YEFLPGVYSM

SEQ ID NO: 75278 - protein, 10 aa, synthetic construct
  source 1..10: note = Seed: YSFLPGVYSV
YEFLPGVYSW

SEQ ID NO: 75279 - protein, 10 aa, synthetic construct
  source 1..10: note = Seed: YHFRELGVVH
YEFRELGVVF

SEQ ID NO: 75280 - protein, 10 aa, synthetic construct
  source 1..10: note = Seed: YHFRELGVVH
YEFRELGVVY

SEQ ID NO: 75281 - protein, 10 aa, synthetic construct
  source 1..10: note = Seed: YVFTGYRVTK
YEFTGYRVTR

SEQ ID NO: 75282 - protein, 9 aa, synthetic construct
  source 1..9: note = Seed: YFFTLLLQL
YEFTLLLQY

SEQ ID NO: 75283 - protein, 10 aa, synthetic construct
  source 1..10: note = Seed: YEGNSPFHPL
YEGNSPFHPA

SEQ ID NO: 75284 - protein, 10 aa, synthetic construct
  source 1..10: note = Seed: YEGNSPFHPL
YEGNSPFHPI

SEQ ID NO: 75285 - protein, 10 aa, synthetic construct
  source 1..10: note = Seed: YEGNSPFHPL
YEGNSPFHPM

SEQ ID NO: 75286 - protein, 11 aa, synthetic construct
  source 1..11: note = Seed: YVGYLQPRTFL
YEGYLQPRTFF

SEQ ID NO: 75287 - protein, 11 aa, synthetic construct
  source 1..11: note = Seed: YVGYLQPRTFL
YEGYLQPRTFW

SEQ ID NO: 75288 - protein, 9 aa, synthetic construct
  source 1..9: note = Seed: YMHHMELPT
YEHHMELPF

SEQ ID NO: 75289 - protein, 9 aa, synthetic construct
  source 1..9: note = Seed: YMHHMELPT
YEHHMELPM

SEQ ID NO: 75290 - protein, 9 aa, synthetic construct
  source 1..9: note = Seed: YMHHMELPT
YEHHMELPY

SEQ ID NO: 75291 - protein, 9 aa, synthetic construct
  source 1..9: note = Seed: YFIASFRLF
YEIASFRLF

SEQ ID NO: 75292 - protein, 10 aa, synthetic construct
  source 1..10: note = Seed: YFIASFRLFA
YEIASFRLFI

SEQ ID NO: 75293 - protein, 10 aa, synthetic construct
  source 1..10: note = Seed: YFIASFRLFA
YEIASFRLFL

SEQ ID NO: 75294 - protein, 10 aa, synthetic construct
  source 1..10: note = Seed: YFIASFRLFA
YEIASFRLFV

SEQ ID NO: 75295 - protein, 9 aa, synthetic construct
  source 1..9: note = Seed: YFIASFRLF
YEIASFRLM

SEQ ID NO: 75296 - protein, 9 aa, synthetic construct
  source 1..9: note = Seed: YFIASFRLF
YEIASFRLY

SEQ ID NO: 75297 - protein, 9 aa, synthetic construct
  source 1..9: note = Seed: YDKLQFTSL
YEKLQFTSA

SEQ ID NO: 75298 - protein, 9 aa, synthetic construct
  source 1..9: note = Seed: YDKLQFTSL
YEKLQFTSF

SEQ ID NO: 75299 - protein, 9 aa, synthetic construct
  source 1..9: note = Seed: YDKLQFTSL
YEKLQFTSI

SEQ ID NO: 75300 - protein, 9 aa, synthetic construct
  source 1..9: note = Seed: YDKLQFTSL
YEKLQFTSL

SEQ ID NO: 75301 - protein, 11 aa, synthetic construct
  source 1..11: note = Seed: YDKLQFTSLEI
YEKLQFTSLEV

SEQ ID NO: 75302 - protein, 9 aa, synthetic construct
  source 1..9: note = Seed: YDKLQFTSL
YEKLQFTSM

SEQ ID NO: 75303 - protein, 9 aa, synthetic construct
  source 1..9: note = Seed: YDKLQFTSL
YEKLQFTSV

SEQ ID NO: 75304 - protein, 9 aa, synthetic construct
  source 1..9: note = Seed: YNKYKYFSG
YEKYKYFSL

SEQ ID NO: 75305 - protein, 10 aa, synthetic construct
  source 1..10: note = Seed: YRLFRKSNLK
YELFRKSNLK

SEQ ID NO: 75306 - protein, 10 aa, synthetic construct
  source 1..10: note = Seed: YRLFRKSNLK
YELFRKSNLR

SEQ ID NO: 75307 - protein, 9 aa, synthetic construct
  source 1..9: note = Seed: YILFTRFFY
YELFTRFFF

SEQ ID NO: 75308 - protein, 9 aa, synthetic construct
  source 1..9: note = Seed: YILFTRFFY
YELFTRFFR

SEQ ID NO: 75309 - protein, 9 aa, synthetic construct
  source 1..9: note = Seed: YILFTRFFY
YELFTRFFY

SEQ ID NO: 75310 - protein, 10 aa, synthetic construct
  source 1..10: note = Seed: YILFTRFFYV
YELFTRFFYA

SEQ ID NO: 75311 - protein, 10 aa, synthetic construct
  source 1..10: note = Seed: YILFTRFFYV
YELFTRFFYC

SEQ ID NO: 75312 - protein, 10 aa, synthetic construct
  source 1..10: note = Seed: YILFTRFFYV
YELFTRFFYF

SEQ ID NO: 75313 - protein, 10 aa, synthetic construct
  source 1..10: note = Seed: YILFTRFFYV
YELFTRFFYI

SEQ ID NO: 75314 - protein, 10 aa, synthetic construct
  source 1..10: note = Seed: YILFTRFFYV
YELFTRFFYK

SEQ ID NO: 75315 - protein, 10 aa, synthetic construct
  source 1..10: note = Seed: YILFTRFFYV
YELFTRFFYL

SEQ ID NO: 75316 - protein, 10 aa, synthetic construct
  source 1..10: note = Seed: YILFTRFFYV
YELFTRFFYM

SEQ ID NO: 75317 - protein, 10 aa, synthetic construct
  source 1..10: note = Seed: YILFTRFFYV
YELFTRFFYR

SEQ ID NO: 75318 - protein, 10 aa, synthetic construct
  source 1..10: note = Seed: YILFTRFFYV
YELFTRFFYS

SEQ ID NO: 75319 - protein, 10 aa, synthetic construct
  source 1..10: note = Seed: YILFTRFFYV
YELFTRFFYT

SEQ ID NO: 75320 - protein, 10 aa, synthetic construct
  source 1..10: note = Seed: YILFTRFFYV
YELFTRFFYV

SEQ ID NO: 75321 - protein, 11 aa, synthetic construct
  source 1..11: note = Seed: YILFTRFFYVL
YELFTRFFYVA

SEQ ID NO: 75322 - protein, 11 aa, synthetic construct
  source 1..11: note = Seed: YILFTRFFYVL
YELFTRFFYVC

SEQ ID NO: 75323 - protein, 11 aa, synthetic construct
  source 1..11: note = Seed: YILFTRFFYVL
YELFTRFFYVD

SEQ ID NO: 75324 - protein, 11 aa, synthetic construct
  source 1..11: note = Seed: YILFTRFFYVL
YELFTRFFYVE

SEQ ID NO: 75325 - protein, 11 aa, synthetic construct
  source 1..11: note = Seed: YILFTRFFYVL
YELFTRFFYVF

SEQ ID NO: 75326 - protein, 11 aa, synthetic construct
  source 1..11: note = Seed: YILFTRFFYVL
YELFTRFFYVG

SEQ ID NO: 75327 - protein, 11 aa, synthetic construct
  source 1..11: note = Seed: YILFTRFFYVL
YELFTRFFYVH

SEQ ID NO: 75328 - protein, 11 aa, synthetic construct
  source 1..11: note = Seed: YILFTRFFYVL
YELFTRFFYVI

SEQ ID NO: 75329 - protein, 11 aa, synthetic construct
  source 1..11: note = Seed: YILFTRFFYVL
YELFTRFFYVK

SEQ ID NO: 75330 - protein, 11 aa, synthetic construct
  source 1..11: note = Seed: YILFTRFFYVL
YELFTRFFYVL

SEQ ID NO: 75331 - protein, 11 aa, synthetic construct
  source 1..11: note = Seed: YILFTRFFYVL
YELFTRFFYVM

SEQ ID NO: 75332 - protein, 11 aa, synthetic construct
  source 1..11: note = Seed: YILFTRFFYVL
YELFTRFFYVN

SEQ ID NO: 75333 - protein, 11 aa, synthetic construct
  source 1..11: note = Seed: YILFTRFFYVL
YELFTRFFYVP

SEQ ID NO: 75334 - protein, 11 aa, synthetic construct
  source 1..11: note = Seed: YILFTRFFYVL
YELFTRFFYVQ

SEQ ID NO: 75335 - protein, 11 aa, synthetic construct
  source 1..11: note = Seed: YILFTRFFYVL
YELFTRFFYVR

SEQ ID NO: 75336 - protein, 11 aa, synthetic construct
  source 1..11: note = Seed: YILFTRFFYVL
YELFTRFFYVS

SEQ ID NO: 75337 - protein, 11 aa, synthetic construct
  source 1..11: note = Seed: YILFTRFFYVL
YELFTRFFYVT

SEQ ID NO: 75338 - protein, 11 aa, synthetic construct
  source 1..11: note = Seed: YILFTRFFYVL
YELFTRFFYVV

SEQ ID NO: 75339 - protein, 11 aa, synthetic construct
  source 1..11: note = Seed: YILFTRFFYVL
YELFTRFFYVW

SEQ ID NO: 75340 - protein, 11 aa, synthetic construct
  source 1..11: note = Seed: YILFTRFFYVL
YELFTRFFYVY

SEQ ID NO: 75341 - protein, 10 aa, synthetic construct
  source 1..10: note = Seed: YILFTRFFYV
YELFTRFFYY

SEQ ID NO: 75342 - protein, 10 aa, synthetic construct
  source 1..10: note = Seed: YSLLMPILTL
YELLMPILTA

SEQ ID NO: 75343 - protein, 10 aa, synthetic construct
  source 1..10: note = Seed: YSLLMPILTL
YELLMPILTI

SEQ ID NO: 75344 - protein, 10 aa, synthetic construct
  source 1..10: note = Seed: YSLLMPILTL
YELLMPILTL

SEQ ID NO: 75345 - protein, 10 aa, synthetic construct
  source 1..10: note = Seed: YSLLMPILTL
YELLMPILTV

SEQ ID NO: 75346 - protein, 10 aa, synthetic construct
  source 1..10: note = Seed: YHLMSFPQSA
YELMSFPQSA

SEQ ID NO: 75347 - protein, 11 aa, synthetic construct
  source 1..11: note = Seed: YHLMSFPQSAP
YELMSFPQSAV

SEQ ID NO: 75348 - protein, 10 aa, synthetic construct
  source 1..10: note = Seed: YHLMSFPQSA
YELMSFPQSI

SEQ ID NO: 75349 - protein, 10 aa, synthetic construct
  source 1..10: note = Seed: YHLMSFPQSA
YELMSFPQSL

SEQ ID NO: 75350 - protein, 10 aa, synthetic construct
  source 1..10: note = Seed: YHLMSFPQSA
YELMSFPQSM

SEQ ID NO: 75351 - protein, 10 aa, synthetic construct
  source 1..10: note = Seed: YHLMSFPQSA
YELMSFPQST

SEQ ID NO: 75352 - protein, 10 aa, synthetic construct
  source 1..10: note = Seed: YHLMSFPQSA
YELMSFPQSV

SEQ ID NO: 75353 - protein, 9 aa, synthetic construct
  source 1..9: note = Seed: YELQTPFEI
YELQTPFEA

SEQ ID NO: 75354 - protein, 9 aa, synthetic construct
  source 1..9: note = Seed: YELQTPFEI
YELQTPFEF

SEQ ID NO: 75355 - protein, 9 aa, synthetic construct
  source 1..9: note = Seed: YELQTPFEI
YELQTPFEL

SEQ ID NO: 75356 - protein, 9 aa, synthetic construct
  source 1..9: note = Seed: YELQTPFEI
YELQTPFEM

SEQ ID NO: 75357 - protein, 9 aa, synthetic construct
  source 1..9: note = Seed: YELQTPFEI
YELQTPFEV

SEQ ID NO: 75358 - protein, 9 aa, synthetic construct
  source 1..9: note = Seed: YELQTPFEI
YELQTPFEW

SEQ ID NO: 75359 - protein, 9 aa, synthetic construct
  source 1..9: note = Seed: YELQTPFEI
YELQTPFEY

SEQ ID NO: 75360 - protein, 10 aa, synthetic construct
  source 1..10: note = Seed: YDLSVVNARL
YELSVVNARA

SEQ ID NO: 75361 - protein, 10 aa, synthetic construct
  source 1..10: note = Seed: YDLSVVNARL
YELSVVNARI

SEQ ID NO: 75362 - protein, 10 aa, synthetic construct
  source 1..10: note = Seed: YDLSVVNARL
YELSVVNARL

SEQ ID NO: 75363 - protein, 10 aa, synthetic construct
  source 1..10: note = Seed: YDLSVVNARL
YELSVVNARM

SEQ ID NO: 75364 - protein, 10 aa, synthetic construct
  source 1..10: note = Seed: YDLSVVNARL
YELSVVNARV

SEQ ID NO: 75365 - protein, 10 aa, synthetic construct
  source 1..10: note = Seed: YTMADLVYAL
YEMADLVYAA

SEQ ID NO: 75366 - protein, 10 aa, synthetic construct
  source 1..10: note = Seed: YTMADLVYAL
YEMADLVYAC

SEQ ID NO: 75367 - protein, 10 aa, synthetic construct
  source 1..10: note = Seed: YTMADLVYAL
YEMADLVYAF

SEQ ID NO: 75368 - protein, 10 aa, synthetic construct
  source 1..10: note = Seed: YTMADLVYAL
YEMADLVYAG

SEQ ID NO: 75369 - protein, 10 aa, synthetic construct
  source 1..10: note = Seed: YTMADLVYAL
YEMADLVYAI

SEQ ID NO: 75370 - protein, 10 aa, synthetic construct
  source 1..10: note = Seed: YTMADLVYAL
YEMADLVYAL

SEQ ID NO: 75371 - protein, 11 aa, synthetic construct
  source 1..11: note = Seed: YTMADLVYALR
YEMADLVYALA

SEQ ID NO: 75372 - protein, 11 aa, synthetic construct
  source 1..11: note = Seed: YTMADLVYALR
YEMADLVYALC

SEQ ID NO: 75373 - protein, 11 aa, synthetic construct
  source 1..11: note = Seed: YTMADLVYALR
YEMADLVYALD

SEQ ID NO: 75374 - protein, 11 aa, synthetic construct
  source 1..11: note = Seed: YTMADLVYALR
YEMADLVYALE

SEQ ID NO: 75375 - protein, 11 aa, synthetic construct
  source 1..11: note = Seed: YTMADLVYALR
YEMADLVYALF

SEQ ID NO: 75376 - protein, 11 aa, synthetic construct
  source 1..11: note = Seed: YTMADLVYALR
YEMADLVYALG

SEQ ID NO: 75377 - protein, 11 aa, synthetic construct
  source 1..11: note = Seed: YTMADLVYALR
YEMADLVYALH

SEQ ID NO: 75378 - protein, 11 aa, synthetic construct
  source 1..11: note = Seed: YTMADLVYALR
YEMADLVYALI

SEQ ID NO: 75379 - protein, 11 aa, synthetic construct
  source 1..11: note = Seed: YTMADLVYALR
YEMADLVYALK

SEQ ID NO: 75380 - protein, 11 aa, synthetic construct
  source 1..11: note = Seed: YTMADLVYALR
YEMADLVYALL

SEQ ID NO: 75381 - protein, 11 aa, synthetic construct
  source 1..11: note = Seed: YTMADLVYALR
YEMADLVYALM

SEQ ID NO: 75382 - protein, 11 aa, synthetic construct
  source 1..11: note = Seed: YTMADLVYALR
YEMADLVYALN

SEQ ID NO: 75383 - protein, 11 aa, synthetic construct
  source 1..11: note = Seed: YTMADLVYALR
YEMADLVYALP

SEQ ID NO: 75384 - protein, 11 aa, synthetic construct
  source 1..11: note = Seed: YTMADLVYALR
YEMADLVYALQ

SEQ ID NO: 75385 - protein, 11 aa, synthetic construct
  source 1..11: note = Seed: YTMADLVYALR
YEMADLVYALR

SEQ ID NO: 75386 - protein, 11 aa, synthetic construct
  source 1..11: note = Seed: YTMADLVYALR
YEMADLVYALS

SEQ ID NO: 75387 - protein, 11 aa, synthetic construct
  source 1..11: note = Seed: YTMADLVYALR
YEMADLVYALT

SEQ ID NO: 75388 - protein, 11 aa, synthetic construct
  source 1..11: note = Seed: YTMADLVYALR
YEMADLVYALV

SEQ ID NO: 75389 - protein, 11 aa, synthetic construct
  source 1..11: note = Seed: YTMADLVYALR
YEMADLVYALW

SEQ ID NO: 75390 - protein, 11 aa, synthetic construct
  source 1..11: note = Seed: YTMADLVYALR
YEMADLVYALY

SEQ ID NO: 75391 - protein, 10 aa, synthetic construct
  source 1..10: note = Seed: YTMADLVYAL
YEMADLVYAM

SEQ ID NO: 75392 - protein, 10 aa, synthetic construct
  source 1..10: note = Seed: YTMADLVYAL
YEMADLVYAS

SEQ ID NO: 75393 - protein, 10 aa, synthetic construct
  source 1..10: note = Seed: YTMADLVYAL
YEMADLVYAT

SEQ ID NO: 75394 - protein, 10 aa, synthetic construct
  source 1..10: note = Seed: YTMADLVYAL
YEMADLVYAV

SEQ ID NO: 75395 - protein, 10 aa, synthetic construct
  source 1..10: note = Seed: YTMADLVYAL
YEMADLVYAY

SEQ ID NO: 75396 - protein, 9 aa, synthetic construct
  source 1..9: note = Seed: YTMADLVYA
YEMADLVYI

SEQ ID NO: 75397 - protein, 9 aa, synthetic construct
  source 1..9: note = Seed: YTMADLVYA
YEMADLVYL

SEQ ID NO: 75398 - protein, 9 aa, synthetic construct
  source 1..9: note = Seed: YTMADLVYA
YEMADLVYM

SEQ ID NO: 75399 - protein, 9 aa, synthetic construct
  source 1..9: note = Seed: YTMADLVYA
YEMADLVYV

SEQ ID NO: 75400 - protein, 9 aa, synthetic construct
  source 1..9: note = Seed: YVMHANYIF
YEMHANYIF

SEQ ID NO: 75401 - protein, 10 aa, synthetic construct
  source 1..10: note = Seed: YVMHANYIFW
YEMHANYIFF

SEQ ID NO: 75402 - protein, 10 aa, synthetic construct
  source 1..10: note = Seed: YVMHANYIFW
YEMHANYIFY

SEQ ID NO: 75403 - protein, 9 aa, synthetic construct
  source 1..9: note = Seed: YVMHANYIF
YEMHANYII

SEQ ID NO: 75404 - protein, 9 aa, synthetic construct
  source 1..9: note = Seed: YVMHANYIF
YEMHANYIM

SEQ ID NO: 75405 - protein, 9 aa, synthetic construct
  source 1..9: note = Seed: YVMHANYIF
YEMHANYIY

SEQ ID NO: 75406 - protein, 9 aa, synthetic construct
  source 1..9: note = Seed: YTNDKACPL
YENDKACPF

SEQ ID NO: 75407 - protein, 9 aa, synthetic construct
  source 1..9: note = Seed: YTNDKACPL
YENDKACPM

SEQ ID NO: 75408 - protein, 9 aa, synthetic construct
  source 1..9: note = Seed: YTNDKACPL
YENDKACPY

SEQ ID NO: 75409 - protein, 10 aa, synthetic construct
  source 1..10: note = Seed: YQNNVFMSEA
YENNVFMSEF

SEQ ID NO: 75410 - protein, 10 aa, synthetic construct
  source 1..10: note = Seed: YQNNVFMSEA
YENNVFMSEY

SEQ ID NO: 75411 - protein, 9 aa, synthetic construct
  source 1..9: note = Seed: YQNNVFMSE
YENNVFMSF

SEQ ID NO: 75412 - protein, 9 aa, synthetic construct
  source 1..9: note = Seed: YQNNVFMSE
YENNVFMSL

SEQ ID NO: 75413 - protein, 9 aa, synthetic construct
  source 1..9: note = Seed: YQNNVFMSE
YENNVFMSM

SEQ ID NO: 75414 - protein, 9 aa, synthetic construct
  source 1..9: note = Seed: YQNNVFMSE
YENNVFMSY

SEQ ID NO: 75415 - protein, 9 aa, synthetic construct
  source 1..9: note = Seed: YVNTFSSTF
YENTFSSTF

SEQ ID NO: 75416 - protein, 9 aa, synthetic construct
  source 1..9: note = Seed: YVNTFSSTF
YENTFSSTL

SEQ ID NO: 75417 - protein, 9 aa, synthetic construct
  source 1..9: note = Seed: YVNTFSSTF
YENTFSSTM

SEQ ID NO: 75418 - protein, 9 aa, synthetic construct
  source 1..9: note = Seed: YVNTFSSTF
YENTFSSTY

SEQ ID NO: 75419 - protein, 10 aa, synthetic construct
  source 1..10: note = Seed: YTPHTVLQAV
YEPHTVLQAA

SEQ ID NO: 75420 - protein, 10 aa, synthetic construct
  source 1..10: note = Seed: YTPHTVLQAV
YEPHTVLQAI

SEQ ID NO: 75421 - protein, 10 aa, synthetic construct
  source 1..10: note = Seed: YTPHTVLQAV
YEPHTVLQAL

SEQ ID NO: 75422 - protein, 10 aa, synthetic construct
  source 1..10: note = Seed: YTPHTVLQAV
YEPHTVLQAM

SEQ ID NO: 75423 - protein, 10 aa, synthetic construct
  source 1..10: note = Seed: YTPHTVLQAV
YEPHTVLQAV

SEQ ID NO: 75424 - protein, 10 aa, synthetic construct
  source 1..10: note = Seed: YMPYFFTLLL
YEPYFFTLLA

SEQ ID NO: 75425 - protein, 10 aa, synthetic construct
  source 1..10: note = Seed: YMPYFFTLLL
YEPYFFTLLF

SEQ ID NO: 75426 - protein, 10 aa, synthetic construct
  source 1..10: note = Seed: YMPYFFTLLL
YEPYFFTLLL

SEQ ID NO: 75427 - protein, 10 aa, synthetic construct
  source 1..10: note = Seed: YMPYFFTLLL
YEPYFFTLLM

SEQ ID NO: 75428 - protein, 10 aa, synthetic construct
  source 1..10: note = Seed: YMPYFFTLLL
YEPYFFTLLT

SEQ ID NO: 75429 - protein, 10 aa, synthetic construct
  source 1..10: note = Seed: YMPYFFTLLL
YEPYFFTLLV

SEQ ID NO: 75430 - protein, 10 aa, synthetic construct
  source 1..10: note = Seed: YMPYFFTLLL
YEPYFFTLLW

SEQ ID NO: 75431 - protein, 10 aa, synthetic construct
  source 1..10: note = Seed: YMPYFFTLLL
YEPYFFTLLY

SEQ ID NO: 75432 - protein, 10 aa, synthetic construct
  source 1..10: note = Seed: YQPYRVVVLS
YEPYRVVVLA

SEQ ID NO: 75433 - protein, 10 aa, synthetic construct
  source 1..10: note = Seed: YKQFDTYNLW
YEQFDTYNLF

SEQ ID NO: 75434 - protein, 10 aa, synthetic construct
  source 1..10: note = Seed: YKQFDTYNLW
YEQFDTYNLM

SEQ ID NO: 75435 - protein, 10 aa, synthetic construct
  source 1..10: note = Seed: YKQFDTYNLW
YEQFDTYNLY

SEQ ID NO: 75436 - protein, 10 aa, synthetic construct
  source 1..10: note = Seed: YEQFKKGVQI
YEQFKKGVQL

SEQ ID NO: 75437 - protein, 10 aa, synthetic construct
  source 1..10: note = Seed: YSQLMCQPIL
YEQLMCQPIF

SEQ ID NO: 75438 - protein, 11 aa, synthetic construct
  source 1..11: note = Seed: YSQLMCQPILL
YEQLMCQPILA

SEQ ID NO: 75439 - protein, 11 aa, synthetic construct
  source 1..11: note = Seed: YSQLMCQPILL
YEQLMCQPILI

SEQ ID NO: 75440 - protein, 11 aa, synthetic construct
  source 1..11: note = Seed: YSQLMCQPILL
YEQLMCQPILL

SEQ ID NO: 75441 - protein, 11 aa, synthetic construct
  source 1..11: note = Seed: YSQLMCQPILL
YEQLMCQPILM

SEQ ID NO: 75442 - protein, 11 aa, synthetic construct
  source 1..11: note = Seed: YSQLMCQPILL
YEQLMCQPILV

SEQ ID NO: 75443 - protein, 10 aa, synthetic construct
  source 1..10: note = Seed: YSQLMCQPIL
YEQLMCQPIY

SEQ ID NO: 75444 - protein, 9 aa, synthetic construct
  source 1..9: note = Seed: YLQPRTFLL
YEQPRTFLF

SEQ ID NO: 75445 - protein, 9 aa, synthetic construct
  source 1..9: note = Seed: YLQPRTFLL
YEQPRTFLY

SEQ ID NO: 75446 - protein, 10 aa, synthetic construct
  source 1..10: note = Seed: YPQVNGLTSI
YEQVNGLTSF

SEQ ID NO: 75447 - protein, 10 aa, synthetic construct
  source 1..10: note = Seed: YPQVNGLTSI
YEQVNGLTSI

SEQ ID NO: 75448 - protein, 10 aa, synthetic construct
  source 1..10: note = Seed: YPQVNGLTSI
YEQVNGLTSL

SEQ ID NO: 75449 - protein, 10 aa, synthetic construct
  source 1..10: note = Seed: YPQVNGLTSI
YEQVNGLTSM

SEQ ID NO: 75450 - protein, 10 aa, synthetic construct
  source 1..10: note = Seed: YPQVNGLTSI
YEQVNGLTSV

SEQ ID NO: 75451 - protein, 10 aa, synthetic construct
  source 1..10: note = Seed: YPQVNGLTSI
YEQVNGLTSY

SEQ ID NO: 75452 - protein, 9 aa, synthetic construct
  source 1..9: note = Seed: YKRDAPAHI
YERDAPAHF

SEQ ID NO: 75453 - protein, 9 aa, synthetic construct
  source 1..9: note = Seed: YKRDAPAHI
YERDAPAHY

SEQ ID NO: 75454 - protein, 10 aa, synthetic construct
  source 1..10: note = Seed: YRRLISMMGF
YERLISMMGF

SEQ ID NO: 75455 - protein, 10 aa, synthetic construct
  source 1..10: note = Seed: YRRLISMMGF
YERLISMMGI

SEQ ID NO: 75456 - protein, 10 aa, synthetic construct
  source 1..10: note = Seed: YRRLISMMGF
YERLISMMGL

SEQ ID NO: 75457 - protein, 10 aa, synthetic construct
  source 1..10: note = Seed: YRRLISMMGF
YERLISMMGM

SEQ ID NO: 75458 - protein, 9 aa, synthetic construct
  source 1..9: note = Seed: YFRLTLGVY
YERLTLGVF

SEQ ID NO: 75459 - protein, 9 aa, synthetic construct
  source 1..9: note = Seed: YFRLTLGVY
YERLTLGVM

SEQ ID NO: 75460 - protein, 9 aa, synthetic construct
  source 1..9: note = Seed: YFRLTLGVY
YERLTLGVY

SEQ ID NO: 75461 - protein, 9 aa, synthetic construct
  source 1..9: note = Seed: YYRSLPGVF
YERSLPGVF

SEQ ID NO: 75462 - protein, 9 aa, synthetic construct
  source 1..9: note = Seed: YYRSLPGVF
YERSLPGVM

SEQ ID NO: 75463 - protein, 9 aa, synthetic construct
  source 1..9: note = Seed: YYRSLPGVF
YERSLPGVY

SEQ ID NO: 75464 - protein, 9 aa, synthetic construct
  source 1..9: note = Seed: YYRYNLPTM
YERYNLPTF

SEQ ID NO: 75465 - protein, 9 aa, synthetic construct
  source 1..9: note = Seed: YYRYNLPTM
YERYNLPTM

SEQ ID NO: 75466 - protein, 10 aa, synthetic construct
  source 1..10: note = Seed: YYRYNLPTMC
YERYNLPTMF

SEQ ID NO: 75467 - protein, 10 aa, synthetic construct
  source 1..10: note = Seed: YYRYNLPTMC
YERYNLPTMI

SEQ ID NO: 75468 - protein, 10 aa, synthetic construct
  source 1..10: note = Seed: YYRYNLPTMC
YERYNLPTML

SEQ ID NO: 75469 - protein, 10 aa, synthetic construct
  source 1..10: note = Seed: YYRYNLPTMC
YERYNLPTMM

SEQ ID NO: 75470 - protein, 10 aa, synthetic construct
  source 1..10: note = Seed: YYRYNLPTMC
YERYNLPTMV

SEQ ID NO: 75471 - protein, 9 aa, synthetic construct
  source 1..9: note = Seed: YYRYNLPTM
YERYNLPTY

SEQ ID NO: 75472 - protein, 10 aa, synthetic construct
  source 1..10: note = Seed: YSRYRIGNYK
YERYRIGNYF

SEQ ID NO: 75473 - protein, 10 aa, synthetic construct
  source 1..10: note = Seed: YSRYRIGNYK
YERYRIGNYK

SEQ ID NO: 75474 - protein, 11 aa, synthetic construct
  source 1..11: note = Seed: YSRYRIGNYKL
YERYRIGNYKF

SEQ ID NO: 75475 - protein, 10 aa, synthetic construct
  source 1..10: note = Seed: YSRYRIGNYK
YERYRIGNYL

SEQ ID NO: 75476 - protein, 10 aa, synthetic construct
  source 1..10: note = Seed: YSRYRIGNYK
YERYRIGNYM

SEQ ID NO: 75477 - protein, 10 aa, synthetic construct
  source 1..10: note = Seed: YSRYRIGNYK
YERYRIGNYR

SEQ ID NO: 75478 - protein, 9 aa, synthetic construct
  source 1..9: note = Seed: YSSANNCTF
YESANNCTF

SEQ ID NO: 75479 - protein, 11 aa, synthetic construct
  source 1..11: note = Seed: YSSANNCTFEY
YESANNCTFEW

SEQ ID NO: 75480 - protein, 9 aa, synthetic construct
  source 1..9: note = Seed: YSSANNCTF
YESANNCTM

SEQ ID NO: 75481 - protein, 9 aa, synthetic construct
  source 1..9: note = Seed: YSSANNCTF
YESANNCTY

SEQ ID NO: 75482 - protein, 9 aa, synthetic construct
  source 1..9: note = Seed: YNSASFSTF
YESASFSTF

SEQ ID NO: 75483 - protein, 10 aa, synthetic construct
  source 1..10: note = Seed: YNSASFSTFK
YESASFSTFK

SEQ ID NO: 75484 - protein, 10 aa, synthetic construct
  source 1..10: note = Seed: YNSASFSTFK
YESASFSTFR

SEQ ID NO: 75485 - protein, 9 aa, synthetic construct
  source 1..9: note = Seed: YNSASFSTF
YESASFSTL

SEQ ID NO: 75486 - protein, 9 aa, synthetic construct
  source 1..9: note = Seed: YNSASFSTF
YESASFSTM

SEQ ID NO: 75487 - protein, 9 aa, synthetic construct
  source 1..9: note = Seed: YNSASFSTF
YESASFSTY

SEQ ID NO: 75488 - protein, 9 aa, synthetic construct
  source 1..9: note = Seed: YASAVVLLI
YESAVVLLF

SEQ ID NO: 75489 - protein, 9 aa, synthetic construct
  source 1..9: note = Seed: YASAVVLLI
YESAVVLLI

SEQ ID NO: 75490 - protein, 10 aa, synthetic construct
  source 1..10: note = Seed: YASAVVLLIL
YESAVVLLIW

SEQ ID NO: 75491 - protein, 9 aa, synthetic construct
  source 1..9: note = Seed: YASAVVLLI
YESAVVLLM

SEQ ID NO: 75492 - protein, 9 aa, synthetic construct
  source 1..9: note = Seed: YASAVVLLI
YESAVVLLY

SEQ ID NO: 75493 - protein, 11 aa, synthetic construct
  source 1..11: note = Seed: YYSLLMPILTL
YESLLMPILTV

SEQ ID NO: 75494 - protein, 11 aa, synthetic construct
  source 1..11: note = Seed: YRSLPGVFCGV
YESLPGVFCGI

SEQ ID NO: 75495 - protein, 11 aa, synthetic construct
  source 1..11: note = Seed: YRSLPGVFCGV
YESLPGVFCGV

SEQ ID NO: 75496 - protein, 10 aa, synthetic construct
  source 1..10: note = Seed: YESLRPDTRY
YESLRPDTRF

SEQ ID NO: 75497 - protein, 10 aa, synthetic construct
  source 1..10: note = Seed: YESLRPDTRY
YESLRPDTRW

SEQ ID NO: 75498 - protein, 10 aa, synthetic construct
  source 1..10: note = Seed: YTSNPTTFHL
YESNPTTFHF

SEQ ID NO: 75499 - protein, 10 aa, synthetic construct
  source 1..10: note = Seed: YTSNPTTFHL
YESNPTTFHW

SEQ ID NO: 75500 - protein, 10 aa, synthetic construct
  source 1..10: note = Seed: YTSNPTTFHL
YESNPTTFHY

SEQ ID NO: 75501 - protein, 10 aa, synthetic construct
  source 1..10: note = Seed: YLTFYLTNDV
YETFYLTNDV

SEQ ID NO: 75502 - protein, 10 aa, synthetic construct
  source 1..10: note = Seed: YLTNDVSFLA
YETNDVSFLA

SEQ ID NO: 75503 - protein, 10 aa, synthetic construct
  source 1..10: note = Seed: YLTNDVSFLA
YETNDVSFLI

SEQ ID NO: 75504 - protein, 10 aa, synthetic construct
  source 1..10: note = Seed: YLTNDVSFLA
YETNDVSFLL

SEQ ID NO: 75505 - protein, 10 aa, synthetic construct
  source 1..10: note = Seed: YLTNDVSFLA
YETNDVSFLM

SEQ ID NO: 75506 - protein, 10 aa, synthetic construct
  source 1..10: note = Seed: YLTNDVSFLA
YETNDVSFLV

SEQ ID NO: 75507 - protein, 10 aa, synthetic construct
  source 1..10: note = Seed: YFTSDYYQLY
YETSDYYQLK

SEQ ID NO: 75508 - protein, 10 aa, synthetic construct
  source 1..10: note = Seed: YFTSDYYQLY
YETSDYYQLR

SEQ ID NO: 75509 - protein, 10 aa, synthetic construct
  source 1..10: note = Seed: YFTSDYYQLY
YETSDYYQLW

SEQ ID NO: 75510 - protein, 10 aa, synthetic construct
  source 1..10: note = Seed: YFTSDYYQLY
YETSDYYQLY

SEQ ID NO: 75511 - protein, 9 aa, synthetic construct
  source 1..9: note = Seed: YYTSNPTTF
YETSNPTTF

SEQ ID NO: 75512 - protein, 11 aa, synthetic construct
  source 1..11: note = Seed: YYTSNPTTFHL
YETSNPTTFHF

SEQ ID NO: 75513 - protein, 11 aa, synthetic construct
  source 1..11: note = Seed: YYTSNPTTFHL
YETSNPTTFHW

SEQ ID NO: 75514 - protein, 10 aa, synthetic construct
  source 1..10: note = Seed: YTTTIKPVTY
YETTIKPVTW

SEQ ID NO: 75515 - protein, 11 aa, synthetic construct
  source 1..11: note = Seed: YTTTIKPVTYK
YETTIKPVTYR

SEQ ID NO: 75516 - protein, 9 aa, synthetic construct
  source 1..9: note = Seed: YQVNGYPNM
YEVNGYPNY

SEQ ID NO: 75517 - protein, 10 aa, synthetic construct
  source 1..10: note = Seed: YYVWKSYVHV
YEVWKSYVHV

SEQ ID NO: 75518 - protein, 10 aa, synthetic construct
  source 1..10: note = Seed: YVYANGGKGF
YEYANGGKGF

SEQ ID NO: 75519 - protein, 10 aa, synthetic construct
  source 1..10: note = Seed: YVYANGGKGF
YEYANGGKGM

SEQ ID NO: 75520 - protein, 11 aa, synthetic construct
  source 1..11: note = Seed: YLYFIKGLNNL
YEYFIKGLNNF

SEQ ID NO: 75521 - protein, 10 aa, synthetic construct
  source 1..10: note = Seed: YDYLVSTQEF
YEYLVSTQEF

SEQ ID NO: 75522 - protein, 10 aa, synthetic construct
  source 1..10: note = Seed: YDYLVSTQEF
YEYLVSTQEI

SEQ ID NO: 75523 - protein, 10 aa, synthetic construct
  source 1..10: note = Seed: YDYLVSTQEF
YEYLVSTQEL

SEQ ID NO: 75524 - protein, 10 aa, synthetic construct
  source 1..10: note = Seed: YDYLVSTQEF
YEYLVSTQEM

SEQ ID NO: 75525 - protein, 10 aa, synthetic construct
  source 1..10: note = Seed: YDYLVSTQEF
YEYLVSTQEW

SEQ ID NO: 75526 - protein, 10 aa, synthetic construct
  source 1..10: note = Seed: YDYLVSTQEF
YEYLVSTQEY

SEQ ID NO: 75527 - protein, 10 aa, synthetic construct
  source 1..10: note = Seed: YNYLYRLFRK
YEYLYRLFRR

SEQ ID NO: 75528 - protein, 8 aa, synthetic construct
  source 1..8: note = Seed: YDYYRYNL
YEYYRYNI

SEQ ID NO: 75529 - protein, 8 aa, synthetic construct
  source 1..8: note = Seed: YDYYRYNL
YEYYRYNL

SEQ ID NO: 75530 - protein, 11 aa, synthetic construct
  source 1..11: note = Seed: YDYYRYNLPTM
YEYYRYNLPTF

SEQ ID NO: 75531 - protein, 11 aa, synthetic construct
  source 1..11: note = Seed: YDYYRYNLPTM
YEYYRYNLPTW

SEQ ID NO: 75532 - protein, 10 aa, synthetic construct
  source 1..10: note = Seed: YGANKDGIIW
YFANKDGIIW

SEQ ID NO: 75533 - protein, 9 aa, synthetic construct
  source 1..9: note = Seed: YPANSIVCR
YFANSIVCR

SEQ ID NO: 75534 - protein, 10 aa, synthetic construct
  source 1..10: note = Seed: YPANSIVCRF
YFANSIVCRW

SEQ ID NO: 75535 - protein, 11 aa, synthetic construct
  source 1..11: note = Seed: YFAVHFISNSW
YFAVHFISNSF

SEQ ID NO: 75536 - protein, 9 aa, synthetic construct
  source 1..9: note = Seed: YFCTCYFGL
YFCTCYFGF

SEQ ID NO: 75537 - protein, 10 aa, synthetic construct
  source 1..10: note = Seed: YFCTCYFGLF
YFCTCYFGLY

SEQ ID NO: 75538 - protein, 10 aa, synthetic construct
  source 1..10: note = Seed: YKENSYTTTI
YFENSYTTTA

SEQ ID NO: 75539 - protein, 10 aa, synthetic construct
  source 1..10: note = Seed: YKENSYTTTI
YFENSYTTTF

SEQ ID NO: 75540 - protein, 10 aa, synthetic construct
  source 1..10: note = Seed: YKENSYTTTI
YFENSYTTTL

SEQ ID NO: 75541 - protein, 10 aa, synthetic construct
  source 1..10: note = Seed: YKENSYTTTI
YFENSYTTTM

SEQ ID NO: 75542 - protein, 9 aa, synthetic construct
  source 1..9: note = Seed: YVFCTVNAL
YFFCTVNAF

SEQ ID NO: 75543 - protein, 9 aa, synthetic construct
  source 1..9: note = Seed: YVFCTVNAL
YFFCTVNAI

SEQ ID NO: 75544 - protein, 9 aa, synthetic construct
  source 1..9: note = Seed: YVFCTVNAL
YFFCTVNAL

SEQ ID NO: 75545 - protein, 9 aa, synthetic construct
  source 1..9: note = Seed: YVFCTVNAL
YFFCTVNAM

SEQ ID NO: 75546 - protein, 9 aa, synthetic construct
  source 1..9: note = Seed: YVFCTVNAL
YFFCTVNAV

SEQ ID NO: 75547 - protein, 9 aa, synthetic construct
  source 1..9: note = Seed: YVFCTVNAL
YFFCTVNAW

SEQ ID NO: 75548 - protein, 9 aa, synthetic construct
  source 1..9: note = Seed: YVFCTVNAL
YFFCTVNAY

SEQ ID NO: 75549 - protein, 8 aa, synthetic construct
  source 1..8: note = Seed: YIFFASFY
YFFFASFY

SEQ ID NO: 75550 - protein, 9 aa, synthetic construct
  source 1..9: note = Seed: YIFFASFYY
YFFFASFYA

SEQ ID NO: 75551 - protein, 9 aa, synthetic construct
  source 1..9: note = Seed: YIFFASFYY
YFFFASFYF

SEQ ID NO: 75552 - protein, 9 aa, synthetic construct
  source 1..9: note = Seed: YIFFASFYY
YFFFASFYH

SEQ ID NO: 75553 - protein, 9 aa, synthetic construct
  source 1..9: note = Seed: YIFFASFYY
YFFFASFYI

SEQ ID NO: 75554 - protein, 9 aa, synthetic construct
  source 1..9: note = Seed: YIFFASFYY
YFFFASFYK

SEQ ID NO: 75555 - protein, 9 aa, synthetic construct
  source 1..9: note = Seed: YIFFASFYY
YFFFASFYL

SEQ ID NO: 75556 - protein, 9 aa, synthetic construct
  source 1..9: note = Seed: YIFFASFYY
YFFFASFYM

SEQ ID NO: 75557 - protein, 9 aa, synthetic construct
  source 1..9: note = Seed: YIFFASFYY
YFFFASFYR

SEQ ID NO: 75558 - protein, 9 aa, synthetic construct
  source 1..9: note = Seed: YIFFASFYY
YFFFASFYV

SEQ ID NO: 75559 - protein, 9 aa, synthetic construct
  source 1..9: note = Seed: YIFFASFYY
YFFFASFYY

SEQ ID NO: 75560 - protein, 10 aa, synthetic construct
  source 1..10: note = Seed: YIFFASFYYV
YFFFASFYYA

SEQ ID NO: 75561 - protein, 10 aa, synthetic construct
  source 1..10: note = Seed: YIFFASFYYV
YFFFASFYYC

SEQ ID NO: 75562 - protein, 10 aa, synthetic construct
  source 1..10: note = Seed: YIFFASFYYV
YFFFASFYYD

SEQ ID NO: 75563 - protein, 10 aa, synthetic construct
  source 1..10: note = Seed: YIFFASFYYV
YFFFASFYYE

SEQ ID NO: 75564 - protein, 10 aa, synthetic construct
  source 1..10: note = Seed: YIFFASFYYV
YFFFASFYYF

SEQ ID NO: 75565 - protein, 10 aa, synthetic construct
  source 1..10: note = Seed: YIFFASFYYV
YFFFASFYYG

SEQ ID NO: 75566 - protein, 10 aa, synthetic construct
  source 1..10: note = Seed: YIFFASFYYV
YFFFASFYYH

SEQ ID NO: 75567 - protein, 10 aa, synthetic construct
  source 1..10: note = Seed: YIFFASFYYV
YFFFASFYYI

SEQ ID NO: 75568 - protein, 10 aa, synthetic construct
  source 1..10: note = Seed: YIFFASFYYV
YFFFASFYYK

SEQ ID NO: 75569 - protein, 10 aa, synthetic construct
  source 1..10: note = Seed: YIFFASFYYV
YFFFASFYYL

SEQ ID NO: 75570 - protein, 10 aa, synthetic construct
  source 1..10: note = Seed: YIFFASFYYV
YFFFASFYYM

SEQ ID NO: 75571 - protein, 10 aa, synthetic construct
  source 1..10: note = Seed: YIFFASFYYV
YFFFASFYYN

SEQ ID NO: 75572 - protein, 10 aa, synthetic construct
  source 1..10: note = Seed: YIFFASFYYV
YFFFASFYYP

SEQ ID NO: 75573 - protein, 10 aa, synthetic construct
  source 1..10: note = Seed: YIFFASFYYV
YFFFASFYYQ

SEQ ID NO: 75574 - protein, 10 aa, synthetic construct
  source 1..10: note = Seed: YIFFASFYYV
YFFFASFYYR

SEQ ID NO: 75575 - protein, 10 aa, synthetic construct
  source 1..10: note = Seed: YIFFASFYYV
YFFFASFYYS

SEQ ID NO: 75576 - protein, 10 aa, synthetic construct
  source 1..10: note = Seed: YIFFASFYYV
YFFFASFYYT

SEQ ID NO: 75577 - protein, 10 aa, synthetic construct
  source 1..10: note = Seed: YIFFASFYYV
YFFFASFYYV

SEQ ID NO: 75578 - protein, 11 aa, synthetic construct
  source 1..11: note = Seed: YIFFASFYYVW
YFFFASFYYVF

SEQ ID NO: 75579 - protein, 11 aa, synthetic construct
  source 1..11: note = Seed: YIFFASFYYVW
YFFFASFYYVY

SEQ ID NO: 75580 - protein, 10 aa, synthetic construct
  source 1..10: note = Seed: YIFFASFYYV
YFFFASFYYW

SEQ ID NO: 75581 - protein, 10 aa, synthetic construct
  source 1..10: note = Seed: YIFFASFYYV
YFFFASFYYY

SEQ ID NO: 75582 - protein, 8 aa, synthetic construct
  source 1..8: note = Seed: YWFFSNYL
YFFFSNYF

SEQ ID NO: 75583 - protein, 8 aa, synthetic construct
  source 1..8: note = Seed: YWFFSNYL
YFFFSNYL

SEQ ID NO: 75584 - protein, 9 aa, synthetic construct
  source 1..9: note = Seed: YWFFSNYLK
YFFFSNYLF

SEQ ID NO: 75585 - protein, 9 aa, synthetic construct
  source 1..9: note = Seed: YWFFSNYLK
YFFFSNYLH

SEQ ID NO: 75586 - protein, 9 aa, synthetic construct
  source 1..9: note = Seed: YWFFSNYLK
YFFFSNYLI

SEQ ID NO: 75587 - protein, 9 aa, synthetic construct
  source 1..9: note = Seed: YWFFSNYLK
YFFFSNYLK

SEQ ID NO: 75588 - protein, 10 aa, synthetic construct
  source 1..10: note = Seed: YWFFSNYLKR
YFFFSNYLKK

SEQ ID NO: 75589 - protein, 10 aa, synthetic construct
  source 1..10: note = Seed: YWFFSNYLKR
YFFFSNYLKR

SEQ ID NO: 75590 - protein, 11 aa, synthetic construct
  source 1..11: note = Seed: YWFFSNYLKRR
YFFFSNYLKRK

SEQ ID NO: 75591 - protein, 11 aa, synthetic construct
  source 1..11: note = Seed: YWFFSNYLKRR
YFFFSNYLKRR

SEQ ID NO: 75592 - protein, 9 aa, synthetic construct
  source 1..9: note = Seed: YWFFSNYLK
YFFFSNYLL

SEQ ID NO: 75593 - protein, 9 aa, synthetic construct
  source 1..9: note = Seed: YWFFSNYLK
YFFFSNYLM

SEQ ID NO: 75594 - protein, 9 aa, synthetic construct
  source 1..9: note = Seed: YWFFSNYLK
YFFFSNYLR

SEQ ID NO: 75595 - protein, 9 aa, synthetic construct
  source 1..9: note = Seed: YWFFSNYLK
YFFFSNYLV

SEQ ID NO: 75596 - protein, 9 aa, synthetic construct
  source 1..9: note = Seed: YWFFSNYLK
YFFFSNYLW

SEQ ID NO: 75597 - protein, 9 aa, synthetic construct
  source 1..9: note = Seed: YWFFSNYLK
YFFFSNYLY

SEQ ID NO: 75598 - protein, 8 aa, synthetic construct
  source 1..8: note = Seed: YWFFSNYL
YFFFSNYM

SEQ ID NO: 75599 - protein, 8 aa, synthetic construct
  source 1..8: note = Seed: YWFFSNYL
YFFFSNYY

SEQ ID NO: 75600 - protein, 10 aa, synthetic construct
  source 1..10: note = Seed: YSFLPGVYSV
YFFLPGVYSF

SEQ ID NO: 75601 - protein, 10 aa, synthetic construct
  source 1..10: note = Seed: YSFLPGVYSV
YFFLPGVYSI

SEQ ID NO: 75602 - protein, 10 aa, synthetic construct
  source 1..10: note = Seed: YSFLPGVYSV
YFFLPGVYSL

SEQ ID NO: 75603 - protein, 10 aa, synthetic construct
  source 1..10: note = Seed: YSFLPGVYSV
YFFLPGVYSM

SEQ ID NO: 75604 - protein, 10 aa, synthetic construct
  source 1..10: note = Seed: YSFLPGVYSV
YFFLPGVYSV

SEQ ID NO: 75605 - protein, 10 aa, synthetic construct
  source 1..10: note = Seed: YSFLPGVYSV
YFFLPGVYSW

SEQ ID NO: 75606 - protein, 10 aa, synthetic construct
  source 1..10: note = Seed: YSFLPGVYSV
YFFLPGVYSY

SEQ ID NO: 75607 - protein, 8 aa, synthetic construct
  source 1..8: note = Seed: YYFMRFRR
YFFMRFRR

SEQ ID NO: 75608 - protein, 10 aa, synthetic construct
  source 1..10: note = Seed: YVFTGYRVTK
YFFTGYRVTK

SEQ ID NO: 75609 - protein, 10 aa, synthetic construct
  source 1..10: note = Seed: YVFTGYRVTK
YFFTGYRVTR

SEQ ID NO: 75610 - protein, 9 aa, synthetic construct
  source 1..9: note = Seed: YFFTLLLQL
YFFTLLLQF

SEQ ID NO: 75611 - protein, 9 aa, synthetic construct
  source 1..9: note = Seed: YFFTLLLQL
YFFTLLLQM

SEQ ID NO: 75612 - protein, 9 aa, synthetic construct
  source 1..9: note = Seed: YFFTLLLQL
YFFTLLLQV

SEQ ID NO: 75613 - protein, 9 aa, synthetic construct
  source 1..9: note = Seed: YFFTLLLQL
YFFTLLLQY

SEQ ID NO: 75614 - protein, 8 aa, synthetic construct
  source 1..8: note = Seed: YLGGMSYY
YFGGMSYY

SEQ ID NO: 75615 - protein, 10 aa, synthetic construct
  source 1..10: note = Seed: YLGGMSYYCK
YFGGMSYYCR

SEQ ID NO: 75616 - protein, 9 aa, synthetic construct
  source 1..9: note = Seed: YLGGMSYYC
YFGGMSYYI

SEQ ID NO: 75617 - protein, 9 aa, synthetic construct
  source 1..9: note = Seed: YLGGMSYYC
YFGGMSYYL

SEQ ID NO: 75618 - protein, 9 aa, synthetic construct
  source 1..9: note = Seed: YLGGMSYYC
YFGGMSYYV

SEQ ID NO: 75619 - protein, 10 aa, synthetic construct
  source 1..10: note = Seed: YTGNYQCGHY
YFGNYQCGHY

SEQ ID NO: 75620 - protein, 11 aa, synthetic construct
  source 1..11: note = Seed: YTGNYQCGHYK
YFGNYQCGHYR

SEQ ID NO: 75621 - protein, 11 aa, synthetic construct
  source 1..11: note = Seed: YVGYLQPRTFL
YFGYLQPRTFF

SEQ ID NO: 75622 - protein, 11 aa, synthetic construct
  source 1..11: note = Seed: YVGYLQPRTFL
YFGYLQPRTFW

SEQ ID NO: 75623 - protein, 9 aa, synthetic construct
  source 1..9: note = Seed: YMHHMELPT
YFHHMELPF

SEQ ID NO: 75624 - protein, 9 aa, synthetic construct
  source 1..9: note = Seed: YMHHMELPT
YFHHMELPY

SEQ ID NO: 75625 - protein, 8 aa, synthetic construct
  source 1..8: note = Seed: YFIASFRL
YFIASFRF

SEQ ID NO: 75626 - protein, 10 aa, synthetic construct
  source 1..10: note = Seed: YFIASFRLFA
YFIASFRLFF

SEQ ID NO: 75627 - protein, 10 aa, synthetic construct
  source 1..10: note = Seed: YFIASFRLFA
YFIASFRLFI

SEQ ID NO: 75628 - protein, 10 aa, synthetic construct
  source 1..10: note = Seed: YFIASFRLFA
YFIASFRLFL

SEQ ID NO: 75629 - protein, 10 aa, synthetic construct
  source 1..10: note = Seed: YFIASFRLFA
YFIASFRLFM

SEQ ID NO: 75630 - protein, 10 aa, synthetic construct
  source 1..10: note = Seed: YFIASFRLFA
YFIASFRLFV

SEQ ID NO: 75631 - protein, 10 aa, synthetic construct
  source 1..10: note = Seed: YFIASFRLFA
YFIASFRLFW

SEQ ID NO: 75632 - protein, 10 aa, synthetic construct
  source 1..10: note = Seed: YFIASFRLFA
YFIASFRLFY

SEQ ID NO: 75633 - protein, 9 aa, synthetic construct
  source 1..9: note = Seed: YFIASFRLF
YFIASFRLI

SEQ ID NO: 75634 - protein, 9 aa, synthetic construct
  source 1..9: note = Seed: YFIASFRLF
YFIASFRLL

SEQ ID NO: 75635 - protein, 9 aa, synthetic construct
  source 1..9: note = Seed: YFIASFRLF
YFIASFRLM

SEQ ID NO: 75636 - protein, 9 aa, synthetic construct
  source 1..9: note = Seed: YFIASFRLF
YFIASFRLV

SEQ ID NO: 75637 - protein, 9 aa, synthetic construct
  source 1..9: note = Seed: YFIASFRLF
YFIASFRLW

SEQ ID NO: 75638 - protein, 9 aa, synthetic construct
  source 1..9: note = Seed: YFIASFRLF
YFIASFRLY

SEQ ID NO: 75639 - protein, 8 aa, synthetic construct
  source 1..8: note = Seed: YFIASFRL
YFIASFRM

SEQ ID NO: 75640 - protein, 9 aa, synthetic construct
  source 1..9: note = Seed: YGIATVREV
YFIATVREF

SEQ ID NO: 75641 - protein, 9 aa, synthetic construct
  source 1..9: note = Seed: YGIATVREV
YFIATVREM

SEQ ID NO: 75642 - protein, 9 aa, synthetic construct
  source 1..9: note = Seed: YGIATVREV
YFIATVREY

SEQ ID NO: 75643 - protein, 11 aa, synthetic construct
  source 1..11: note = Seed: YIICISTKHFY
YFICISTKHFY

SEQ ID NO: 75644 - protein, 9 aa, synthetic construct
  source 1..9: note = Seed: YFIKGLNNL
YFIKGLNNF

SEQ ID NO: 75645 - protein, 9 aa, synthetic construct
  source 1..9: note = Seed: YFIKGLNNL
YFIKGLNNI

SEQ ID NO: 75646 - protein, 9 aa, synthetic construct
  source 1..9: note = Seed: YFIKGLNNL
YFIKGLNNM

SEQ ID NO: 75647 - protein, 9 aa, synthetic construct
  source 1..9: note = Seed: YFIKGLNNL
YFIKGLNNV

SEQ ID NO: 75648 - protein, 9 aa, synthetic construct
  source 1..9: note = Seed: YFIKGLNNL
YFIKGLNNW

SEQ ID NO: 75649 - protein, 9 aa, synthetic construct
  source 1..9: note = Seed: YFIKGLNNL
YFIKGLNNY

SEQ ID NO: 75650 - protein, 10 aa, synthetic construct
  source 1..10: note = Seed: YAISAKNRAR
YFISAKNRAR

SEQ ID NO: 75651 - protein, 11 aa, synthetic construct
  source 1..11: note = Seed: YFKIYSKHTPI
YFKIYSKHTPF

SEQ ID NO: 75652 - protein, 11 aa, synthetic construct
  source 1..11: note = Seed: YFKIYSKHTPI
YFKIYSKHTPL

SEQ ID NO: 75653 - protein, 11 aa, synthetic construct
  source 1..11: note = Seed: YFKIYSKHTPI
YFKIYSKHTPM

SEQ ID NO: 75654 - protein, 11 aa, synthetic construct
  source 1..11: note = Seed: YFKIYSKHTPI
YFKIYSKHTPY

SEQ ID NO: 75655 - protein, 8 aa, synthetic construct
  source 1..8: note = Seed: YYKKDNSY
YFKKDNSM

SEQ ID NO: 75656 - protein, 9 aa, synthetic construct
  source 1..9: note = Seed: YYKKDNSYF
YFKKDNSYF

SEQ ID NO: 75657 - protein, 10 aa, synthetic construct
  source 1..10: note = Seed: YYKKDNSYFT
YFKKDNSYFF

SEQ ID NO: 75658 - protein, 10 aa, synthetic construct
  source 1..10: note = Seed: YYKKDNSYFT
YFKKDNSYFW

SEQ ID NO: 75659 - protein, 9 aa, synthetic construct
  source 1..9: note = Seed: YYKKDNSYF
YFKKDNSYL

SEQ ID NO: 75660 - protein, 9 aa, synthetic construct
  source 1..9: note = Seed: YYKKDNSYF
YFKKDNSYM

SEQ ID NO: 75661 - protein, 9 aa, synthetic construct
  source 1..9: note = Seed: YYKKDNSYF
YFKKDNSYW

SEQ ID NO: 75662 - protein, 9 aa, synthetic construct
  source 1..9: note = Seed: YYKKDNSYF
YFKKDNSYY

SEQ ID NO: 75663 - protein, 9 aa, synthetic construct
  source 1..9: note = Seed: YYKKVDGVV
YFKKVDGVF

SEQ ID NO: 75664 - protein, 9 aa, synthetic construct
  source 1..9: note = Seed: YYKKVDGVV
YFKKVDGVL

SEQ ID NO: 75665 - protein, 9 aa, synthetic construct
  source 1..9: note = Seed: YYKKVDGVV
YFKKVDGVM

SEQ ID NO: 75666 - protein, 9 aa, synthetic construct
  source 1..9: note = Seed: YYKKVDGVV
YFKKVDGVY

SEQ ID NO: 75667 - protein, 9 aa, synthetic construct
  source 1..9: note = Seed: YYKLGASQR
YFKLGASQR

SEQ ID NO: 75668 - protein, 10 aa, synthetic construct
  source 1..10: note = Seed: YYKLGASQRV
YFKLGASQRF

SEQ ID NO: 75669 - protein, 10 aa, synthetic construct
  source 1..10: note = Seed: YYKLGASQRV
YFKLGASQRM

SEQ ID NO: 75670 - protein, 9 aa, synthetic construct
  source 1..9: note = Seed: YDKLQFTSL
YFKLQFTSI

SEQ ID NO: 75671 - protein, 9 aa, synthetic construct
  source 1..9: note = Seed: YDKLQFTSL
YFKLQFTSL

SEQ ID NO: 75672 - protein, 11 aa, synthetic construct
  source 1..11: note = Seed: YDKLQFTSLEI
YFKLQFTSLEV

SEQ ID NO: 75673 - protein, 9 aa, synthetic construct
  source 1..9: note = Seed: YDKLQFTSL
YFKLQFTSM

SEQ ID NO: 75674 - protein, 9 aa, synthetic construct
  source 1..9: note = Seed: YDKLQFTSL
YFKLQFTSV

SEQ ID NO: 75675 - protein, 9 aa, synthetic construct
  source 1..9: note = Seed: YLKLRSDVL
YFKLRSDVL

SEQ ID NO: 75676 - protein, 8 aa, synthetic construct
  source 1..8: note = Seed: YLKRRVVF
YFKRRVVL

SEQ ID NO: 75677 - protein, 8 aa, synthetic construct
  source 1..8: note = Seed: YLKRRVVF
YFKRRVVM

SEQ ID NO: 75678 - protein, 9 aa, synthetic construct
  source 1..9: note = Seed: YLKSPNFSK
YFKSPNFSK

SEQ ID NO: 75679 - protein, 9 aa, synthetic construct
  source 1..9: note = Seed: YLKSPNFSK
YFKSPNFSR

SEQ ID NO: 75680 - protein, 9 aa, synthetic construct
  source 1..9: note = Seed: YIKWDLLKY
YFKWDLLKY

SEQ ID NO: 75681 - protein, 8 aa, synthetic construct
  source 1..8: note = Seed: YIKWPWYI
YFKWPWYF

SEQ ID NO: 75682 - protein, 9 aa, synthetic construct
  source 1..9: note = Seed: YIKWPWYIW
YFKWPWYIF

SEQ ID NO: 75683 - protein, 9 aa, synthetic construct
  source 1..9: note = Seed: YIKWPWYIW
YFKWPWYII

SEQ ID NO: 75684 - protein, 9 aa, synthetic construct
  source 1..9: note = Seed: YIKWPWYIW
YFKWPWYIL

SEQ ID NO: 75685 - protein, 9 aa, synthetic construct
  source 1..9: note = Seed: YIKWPWYIW
YFKWPWYIM

SEQ ID NO: 75686 - protein, 9 aa, synthetic construct
  source 1..9: note = Seed: YIKWPWYIW
YFKWPWYIW

SEQ ID NO: 75687 - protein, 9 aa, synthetic construct
  source 1..9: note = Seed: YNKYKYFSG
YFKYKYFSI

SEQ ID NO: 75688 - protein, 9 aa, synthetic construct
  source 1..9: note = Seed: YNKYKYFSG
YFKYKYFSL

SEQ ID NO: 75689 - protein, 9 aa, synthetic construct
  source 1..9: note = Seed: YNKYKYFSG
YFKYKYFSM

SEQ ID NO: 75690 - protein, 9 aa, synthetic construct
  source 1..9: note = Seed: YNKYKYFSG
YFKYKYFSV

SEQ ID NO: 75691 - protein, 10 aa, synthetic construct
  source 1..10: note = Seed: YFLCWHTNCY
YFLCWHTNCM

SEQ ID NO: 75692 - protein, 9 aa, synthetic construct
  source 1..9: note = Seed: YRLFRKSNL
YFLFRKSNF

SEQ ID NO: 75693 - protein, 9 aa, synthetic construct
  source 1..9: note = Seed: YRLFRKSNL
YFLFRKSNL

SEQ ID NO: 75694 - protein, 10 aa, synthetic construct
  source 1..10: note = Seed: YRLFRKSNLK
YFLFRKSNLK

SEQ ID NO: 75695 - protein, 10 aa, synthetic construct
  source 1..10: note = Seed: YRLFRKSNLK
YFLFRKSNLR

SEQ ID NO: 75696 - protein, 9 aa, synthetic construct
  source 1..9: note = Seed: YRLFRKSNL
YFLFRKSNM

SEQ ID NO: 75697 - protein, 9 aa, synthetic construct
  source 1..9: note = Seed: YRLFRKSNL
YFLFRKSNY

SEQ ID NO: 75698 - protein, 9 aa, synthetic construct
  source 1..9: note = Seed: YILFTRFFY
YFLFTRFFF

SEQ ID NO: 75699 - protein, 9 aa, synthetic construct
  source 1..9: note = Seed: YILFTRFFY
YFLFTRFFK

SEQ ID NO: 75700 - protein, 9 aa, synthetic construct
  source 1..9: note = Seed: YILFTRFFY
YFLFTRFFM

SEQ ID NO: 75701 - protein, 9 aa, synthetic construct
  source 1..9: note = Seed: YILFTRFFY
YFLFTRFFR

SEQ ID NO: 75702 - protein, 9 aa, synthetic construct
  source 1..9: note = Seed: YILFTRFFY
YFLFTRFFY

SEQ ID NO: 75703 - protein, 10 aa, synthetic construct
  source 1..10: note = Seed: YILFTRFFYV
YFLFTRFFYA

SEQ ID NO: 75704 - protein, 10 aa, synthetic construct
  source 1..10: note = Seed: YILFTRFFYV
YFLFTRFFYC

SEQ ID NO: 75705 - protein, 10 aa, synthetic construct
  source 1..10: note = Seed: YILFTRFFYV
YFLFTRFFYD

SEQ ID NO: 75706 - protein, 10 aa, synthetic construct
  source 1..10: note = Seed: YILFTRFFYV
YFLFTRFFYE

SEQ ID NO: 75707 - protein, 10 aa, synthetic construct
  source 1..10: note = Seed: YILFTRFFYV
YFLFTRFFYF

SEQ ID NO: 75708 - protein, 10 aa, synthetic construct
  source 1..10: note = Seed: YILFTRFFYV
YFLFTRFFYG

SEQ ID NO: 75709 - protein, 10 aa, synthetic construct
  source 1..10: note = Seed: YILFTRFFYV
YFLFTRFFYH

SEQ ID NO: 75710 - protein, 10 aa, synthetic construct
  source 1..10: note = Seed: YILFTRFFYV
YFLFTRFFYI

SEQ ID NO: 75711 - protein, 10 aa, synthetic construct
  source 1..10: note = Seed: YILFTRFFYV
YFLFTRFFYK

SEQ ID NO: 75712 - protein, 10 aa, synthetic construct
  source 1..10: note = Seed: YILFTRFFYV
YFLFTRFFYL

SEQ ID NO: 75713 - protein, 10 aa, synthetic construct
  source 1..10: note = Seed: YILFTRFFYV
YFLFTRFFYM

SEQ ID NO: 75714 - protein, 10 aa, synthetic construct
  source 1..10: note = Seed: YILFTRFFYV
YFLFTRFFYN

SEQ ID NO: 75715 - protein, 10 aa, synthetic construct
  source 1..10: note = Seed: YILFTRFFYV
YFLFTRFFYP

SEQ ID NO: 75716 - protein, 10 aa, synthetic construct
  source 1..10: note = Seed: YILFTRFFYV
YFLFTRFFYQ

SEQ ID NO: 75717 - protein, 10 aa, synthetic construct
  source 1..10: note = Seed: YILFTRFFYV
YFLFTRFFYR

SEQ ID NO: 75718 - protein, 10 aa, synthetic construct
  source 1..10: note = Seed: YILFTRFFYV
YFLFTRFFYS

SEQ ID NO: 75719 - protein, 10 aa, synthetic construct
  source 1..10: note = Seed: YILFTRFFYV
YFLFTRFFYT

SEQ ID NO: 75720 - protein, 10 aa, synthetic construct
  source 1..10: note = Seed: YILFTRFFYV
YFLFTRFFYV

SEQ ID NO: 75721 - protein, 11 aa, synthetic construct
  source 1..11: note = Seed: YILFTRFFYVL
YFLFTRFFYVA

SEQ ID NO: 75722 - protein, 11 aa, synthetic construct
  source 1..11: note = Seed: YILFTRFFYVL
YFLFTRFFYVC

SEQ ID NO: 75723 - protein, 11 aa, synthetic construct
  source 1..11: note = Seed: YILFTRFFYVL
YFLFTRFFYVD

SEQ ID NO: 75724 - protein, 11 aa, synthetic construct
  source 1..11: note = Seed: YILFTRFFYVL
YFLFTRFFYVE

SEQ ID NO: 75725 - protein, 11 aa, synthetic construct
  source 1..11: note = Seed: YILFTRFFYVL
YFLFTRFFYVF

SEQ ID NO: 75726 - protein, 11 aa, synthetic construct
  source 1..11: note = Seed: YILFTRFFYVL
YFLFTRFFYVG

SEQ ID NO: 75727 - protein, 11 aa, synthetic construct
  source 1..11: note = Seed: YILFTRFFYVL
YFLFTRFFYVH

SEQ ID NO: 75728 - protein, 11 aa, synthetic construct
  source 1..11: note = Seed: YILFTRFFYVL
YFLFTRFFYVI

SEQ ID NO: 75729 - protein, 11 aa, synthetic construct
  source 1..11: note = Seed: YILFTRFFYVL
YFLFTRFFYVK

SEQ ID NO: 75730 - protein, 11 aa, synthetic construct
  source 1..11: note = Seed: YILFTRFFYVL
YFLFTRFFYVL

SEQ ID NO: 75731 - protein, 11 aa, synthetic construct
  source 1..11: note = Seed: YILFTRFFYVL
YFLFTRFFYVM

SEQ ID NO: 75732 - protein, 11 aa, synthetic construct
  source 1..11: note = Seed: YILFTRFFYVL
YFLFTRFFYVN

SEQ ID NO: 75733 - protein, 11 aa, synthetic construct
  source 1..11: note = Seed: YILFTRFFYVL
YFLFTRFFYVP

SEQ ID NO: 75734 - protein, 11 aa, synthetic construct
  source 1..11: note = Seed: YILFTRFFYVL
YFLFTRFFYVQ

SEQ ID NO: 75735 - protein, 11 aa, synthetic construct
  source 1..11: note = Seed: YILFTRFFYVL
YFLFTRFFYVR

SEQ ID NO: 75736 - protein, 11 aa, synthetic construct
  source 1..11: note = Seed: YILFTRFFYVL
YFLFTRFFYVS

SEQ ID NO: 75737 - protein, 11 aa, synthetic construct
  source 1..11: note = Seed: YILFTRFFYVL
YFLFTRFFYVT

SEQ ID NO: 75738 - protein, 11 aa, synthetic construct
  source 1..11: note = Seed: YILFTRFFYVL
YFLFTRFFYVV

SEQ ID NO: 75739 - protein, 11 aa, synthetic construct
  source 1..11: note = Seed: YILFTRFFYVL
YFLFTRFFYVW

SEQ ID NO: 75740 - protein, 11 aa, synthetic construct
  source 1..11: note = Seed: YILFTRFFYVL
YFLFTRFFYVY

SEQ ID NO: 75741 - protein, 10 aa, synthetic construct
  source 1..10: note = Seed: YILFTRFFYV
YFLFTRFFYW

SEQ ID NO: 75742 - protein, 10 aa, synthetic construct
  source 1..10: note = Seed: YILFTRFFYV
YFLFTRFFYY

SEQ ID NO: 75743 - protein, 10 aa, synthetic construct
  source 1..10: note = Seed: YSLLMPILTL
YFLLMPILTA

SEQ ID NO: 75744 - protein, 10 aa, synthetic construct
  source 1..10: note = Seed: YSLLMPILTL
YFLLMPILTI

SEQ ID NO: 75745 - protein, 10 aa, synthetic construct
  source 1..10: note = Seed: YSLLMPILTL
YFLLMPILTL

SEQ ID NO: 75746 - protein, 10 aa, synthetic construct
  source 1..10: note = Seed: YSLLMPILTL
YFLLMPILTV

SEQ ID NO: 75747 - protein, 10 aa, synthetic construct
  source 1..10: note = Seed: YHLMSFPQSA
YFLMSFPQSA

SEQ ID NO: 75748 - protein, 11 aa, synthetic construct
  source 1..11: note = Seed: YHLMSFPQSAP
YFLMSFPQSAA

SEQ ID NO: 75749 - protein, 11 aa, synthetic construct
  source 1..11: note = Seed: YHLMSFPQSAP
YFLMSFPQSAI

SEQ ID NO: 75750 - protein, 11 aa, synthetic construct
  source 1..11: note = Seed: YHLMSFPQSAP
YFLMSFPQSAL

SEQ ID NO: 75751 - protein, 11 aa, synthetic construct
  source 1..11: note = Seed: YHLMSFPQSAP
YFLMSFPQSAV

SEQ ID NO: 75752 - protein, 10 aa, synthetic construct
  source 1..10: note = Seed: YHLMSFPQSA
YFLMSFPQSI

SEQ ID NO: 75753 - protein, 10 aa, synthetic construct
  source 1..10: note = Seed: YHLMSFPQSA
YFLMSFPQSL

SEQ ID NO: 75754 - protein, 10 aa, synthetic construct
  source 1..10: note = Seed: YHLMSFPQSA
YFLMSFPQSM

SEQ ID NO: 75755 - protein, 10 aa, synthetic construct
  source 1..10: note = Seed: YHLMSFPQSA
YFLMSFPQST

SEQ ID NO: 75756 - protein, 10 aa, synthetic construct
  source 1..10: note = Seed: YHLMSFPQSA
YFLMSFPQSV

SEQ ID NO: 75757 - protein, 8 aa, synthetic construct
  source 1..8: note = Seed: YFLQSINF
YFLQSINL

SEQ ID NO: 75758 - protein, 8 aa, synthetic construct
  source 1..8: note = Seed: YFLQSINF
YFLQSINM

SEQ ID NO: 75759 - protein, 10 aa, synthetic construct
  source 1..10: note = Seed: YDLSVVNARL
YFLSVVNARA

SEQ ID NO: 75760 - protein, 10 aa, synthetic construct
  source 1..10: note = Seed: YDLSVVNARL
YFLSVVNARI

SEQ ID NO: 75761 - protein, 10 aa, synthetic construct
  source 1..10: note = Seed: YDLSVVNARL
YFLSVVNARL

SEQ ID NO: 75762 - protein, 10 aa, synthetic construct
  source 1..10: note = Seed: YDLSVVNARL
YFLSVVNARM

SEQ ID NO: 75763 - protein, 10 aa, synthetic construct
  source 1..10: note = Seed: YDLSVVNARL
YFLSVVNARV

SEQ ID NO: 75764 - protein, 11 aa, synthetic construct
  source 1..11: note = Seed: YMLTYNKVENM
YFLTYNKVENV

SEQ ID NO: 75765 - protein, 8 aa, synthetic construct
  source 1..8: note = Seed: YTMADLVY
YFMADLVY

SEQ ID NO: 75766 - protein, 9 aa, synthetic construct
  source 1..9: note = Seed: YTMADLVYA
YFMADLVYA

SEQ ID NO: 75767 - protein, 10 aa, synthetic construct
  source 1..10: note = Seed: YTMADLVYAL
YFMADLVYAA

SEQ ID NO: 75768 - protein, 10 aa, synthetic construct
  source 1..10: note = Seed: YTMADLVYAL
YFMADLVYAC

SEQ ID NO: 75769 - protein, 10 aa, synthetic construct
  source 1..10: note = Seed: YTMADLVYAL
YFMADLVYAF

SEQ ID NO: 75770 - protein, 10 aa, synthetic construct
  source 1..10: note = Seed: YTMADLVYAL
YFMADLVYAG

SEQ ID NO: 75771 - protein, 10 aa, synthetic construct
  source 1..10: note = Seed: YTMADLVYAL
YFMADLVYAI

SEQ ID NO: 75772 - protein, 10 aa, synthetic construct
  source 1..10: note = Seed: YTMADLVYAL
YFMADLVYAL

SEQ ID NO: 75773 - protein, 11 aa, synthetic construct
  source 1..11: note = Seed: YTMADLVYALR
YFMADLVYALA

SEQ ID NO: 75774 - protein, 11 aa, synthetic construct
  source 1..11: note = Seed: YTMADLVYALR
YFMADLVYALC

SEQ ID NO: 75775 - protein, 11 aa, synthetic construct
  source 1..11: note = Seed: YTMADLVYALR
YFMADLVYALD

SEQ ID NO: 75776 - protein, 11 aa, synthetic construct
  source 1..11: note = Seed: YTMADLVYALR
YFMADLVYALE

SEQ ID NO: 75777 - protein, 11 aa, synthetic construct
  source 1..11: note = Seed: YTMADLVYALR
YFMADLVYALF

SEQ ID NO: 75778 - protein, 11 aa, synthetic construct
  source 1..11: note = Seed: YTMADLVYALR
YFMADLVYALG

SEQ ID NO: 75779 - protein, 11 aa, synthetic construct
  source 1..11: note = Seed: YTMADLVYALR
YFMADLVYALH

SEQ ID NO: 75780 - protein, 11 aa, synthetic construct
  source 1..11: note = Seed: YTMADLVYALR
YFMADLVYALI

SEQ ID NO: 75781 - protein, 11 aa, synthetic construct
  source 1..11: note = Seed: YTMADLVYALR
YFMADLVYALK

SEQ ID NO: 75782 - protein, 11 aa, synthetic construct
  source 1..11: note = Seed: YTMADLVYALR
YFMADLVYALL

SEQ ID NO: 75783 - protein, 11 aa, synthetic construct
  source 1..11: note = Seed: YTMADLVYALR
YFMADLVYALM

SEQ ID NO: 75784 - protein, 11 aa, synthetic construct
  source 1..11: note = Seed: YTMADLVYALR
YFMADLVYALN

SEQ ID NO: 75785 - protein, 11 aa, synthetic construct
  source 1..11: note = Seed: YTMADLVYALR
YFMADLVYALP

SEQ ID NO: 75786 - protein, 11 aa, synthetic construct
  source 1..11: note = Seed: YTMADLVYALR
YFMADLVYALQ

SEQ ID NO: 75787 - protein, 11 aa, synthetic construct
  source 1..11: note = Seed: YTMADLVYALR
YFMADLVYALR

SEQ ID NO: 75788 - protein, 11 aa, synthetic construct
  source 1..11: note = Seed: YTMADLVYALR
YFMADLVYALS

SEQ ID NO: 75789 - protein, 11 aa, synthetic construct
  source 1..11: note = Seed: YTMADLVYALR
YFMADLVYALT

SEQ ID NO: 75790 - protein, 11 aa, synthetic construct
  source 1..11: note = Seed: YTMADLVYALR
YFMADLVYALV

SEQ ID NO: 75791 - protein, 11 aa, synthetic construct
  source 1..11: note = Seed: YTMADLVYALR
YFMADLVYALW

SEQ ID NO: 75792 - protein, 11 aa, synthetic construct
  source 1..11: note = Seed: YTMADLVYALR
YFMADLVYALY

SEQ ID NO: 75793 - protein, 10 aa, synthetic construct
  source 1..10: note = Seed: YTMADLVYAL
YFMADLVYAM

SEQ ID NO: 75794 - protein, 10 aa, synthetic construct
  source 1..10: note = Seed: YTMADLVYAL
YFMADLVYAS

SEQ ID NO: 75795 - protein, 10 aa, synthetic construct
  source 1..10: note = Seed: YTMADLVYAL
YFMADLVYAT

SEQ ID NO: 75796 - protein, 10 aa, synthetic construct
  source 1..10: note = Seed: YTMADLVYAL
YFMADLVYAV

SEQ ID NO: 75797 - protein, 10 aa, synthetic construct
  source 1..10: note = Seed: YTMADLVYAL
YFMADLVYAY

SEQ ID NO: 75798 - protein, 9 aa, synthetic construct
  source 1..9: note = Seed: YTMADLVYA
YFMADLVYI

SEQ ID NO: 75799 - protein, 9 aa, synthetic construct
  source 1..9: note = Seed: YTMADLVYA
YFMADLVYL

SEQ ID NO: 75800 - protein, 9 aa, synthetic construct
  source 1..9: note = Seed: YTMADLVYA
YFMADLVYM

SEQ ID NO: 75801 - protein, 9 aa, synthetic construct
  source 1..9: note = Seed: YTMADLVYA
YFMADLVYR

SEQ ID NO: 75802 - protein, 9 aa, synthetic construct
  source 1..9: note = Seed: YTMADLVYA
YFMADLVYV

SEQ ID NO: 75803 - protein, 9 aa, synthetic construct
  source 1..9: note = Seed: YVMHANYIF
YFMHANYIF

SEQ ID NO: 75804 - protein, 10 aa, synthetic construct
  source 1..10: note = Seed: YVMHANYIFW
YFMHANYIFD

SEQ ID NO: 75805 - protein, 10 aa, synthetic construct
  source 1..10: note = Seed: YVMHANYIFW
YFMHANYIFF

SEQ ID NO: 75806 - protein, 10 aa, synthetic construct
  source 1..10: note = Seed: YVMHANYIFW
YFMHANYIFI

SEQ ID NO: 75807 - protein, 10 aa, synthetic construct
  source 1..10: note = Seed: YVMHANYIFW
YFMHANYIFL

SEQ ID NO: 75808 - protein, 10 aa, synthetic construct
  source 1..10: note = Seed: YVMHANYIFW
YFMHANYIFM

SEQ ID NO: 75809 - protein, 10 aa, synthetic construct
  source 1..10: note = Seed: YVMHANYIFW
YFMHANYIFV

SEQ ID NO: 75810 - protein, 10 aa, synthetic construct
  source 1..10: note = Seed: YVMHANYIFW
YFMHANYIFW

SEQ ID NO: 75811 - protein, 10 aa, synthetic construct
  source 1..10: note = Seed: YVMHANYIFW
YFMHANYIFY

SEQ ID NO: 75812 - protein, 9 aa, synthetic construct
  source 1..9: note = Seed: YVMHANYIF
YFMHANYII

SEQ ID NO: 75813 - protein, 9 aa, synthetic construct
  source 1..9: note = Seed: YVMHANYIF
YFMHANYIL

SEQ ID NO: 75814 - protein, 9 aa, synthetic construct
  source 1..9: note = Seed: YVMHANYIF
YFMHANYIM

SEQ ID NO: 75815 - protein, 9 aa, synthetic construct
  source 1..9: note = Seed: YVMHANYIF
YFMHANYIV

SEQ ID NO: 75816 - protein, 9 aa, synthetic construct
  source 1..9: note = Seed: YVMHANYIF
YFMHANYIW

SEQ ID NO: 75817 - protein, 9 aa, synthetic construct
  source 1..9: note = Seed: YVMHANYIF
YFMHANYIY

SEQ ID NO: 75818 - protein, 9 aa, synthetic construct
  source 1..9: note = Seed: YTNDKACPL
YFNDKACPF

SEQ ID NO: 75819 - protein, 9 aa, synthetic construct
  source 1..9: note = Seed: YTNDKACPL
YFNDKACPI

SEQ ID NO: 75820 - protein, 9 aa, synthetic construct
  source 1..9: note = Seed: YTNDKACPL
YFNDKACPL

SEQ ID NO: 75821 - protein, 9 aa, synthetic construct
  source 1..9: note = Seed: YTNDKACPL
YFNDKACPM

SEQ ID NO: 75822 - protein, 9 aa, synthetic construct
  source 1..9: note = Seed: YTNDKACPL
YFNDKACPV

SEQ ID NO: 75823 - protein, 9 aa, synthetic construct
  source 1..9: note = Seed: YTNDKACPL
YFNDKACPW

SEQ ID NO: 75824 - protein, 9 aa, synthetic construct
  source 1..9: note = Seed: YTNDKACPL
YFNDKACPY

SEQ ID NO: 75825 - protein, 11 aa, synthetic construct
  source 1..11: note = Seed: YFNMVYMPASW
YFNMVYMPASF

SEQ ID NO: 75826 - protein, 9 aa, synthetic construct
  source 1..9: note = Seed: YFNMVYMPA
YFNMVYMPF

SEQ ID NO: 75827 - protein, 9 aa, synthetic construct
  source 1..9: note = Seed: YFNMVYMPA
YFNMVYMPI

SEQ ID NO: 75828 - protein, 9 aa, synthetic construct
  source 1..9: note = Seed: YFNMVYMPA
YFNMVYMPL

SEQ ID NO: 75829 - protein, 9 aa, synthetic construct
  source 1..9: note = Seed: YFNMVYMPA
YFNMVYMPM

SEQ ID NO: 75830 - protein, 9 aa, synthetic construct
  source 1..9: note = Seed: YFNMVYMPA
YFNMVYMPV

SEQ ID NO: 75831 - protein, 9 aa, synthetic construct
  source 1..9: note = Seed: YFNMVYMPA
YFNMVYMPY

SEQ ID NO: 75832 - protein, 9 aa, synthetic construct
  source 1..9: note = Seed: YQNNVFMSE
YFNNVFMSF

SEQ ID NO: 75833 - protein, 9 aa, synthetic construct
  source 1..9: note = Seed: YQNNVFMSE
YFNNVFMSM

SEQ ID NO: 75834 - protein, 9 aa, synthetic construct
  source 1..9: note = Seed: YQNNVFMSE
YFNNVFMSY

SEQ ID NO: 75835 - protein, 9 aa, synthetic construct
  source 1..9: note = Seed: YVNTFSSTF
YFNTFSSTA

SEQ ID NO: 75836 - protein, 9 aa, synthetic construct
  source 1..9: note = Seed: YVNTFSSTF
YFNTFSSTF

SEQ ID NO: 75837 - protein, 9 aa, synthetic construct
  source 1..9: note = Seed: YVNTFSSTF
YFNTFSSTH

SEQ ID NO: 75838 - protein, 9 aa, synthetic construct
  source 1..9: note = Seed: YVNTFSSTF
YFNTFSSTI

SEQ ID NO: 75839 - protein, 9 aa, synthetic construct
  source 1..9: note = Seed: YVNTFSSTF
YFNTFSSTL

SEQ ID NO: 75840 - protein, 9 aa, synthetic construct
  source 1..9: note = Seed: YVNTFSSTF
YFNTFSSTM

SEQ ID NO: 75841 - protein, 9 aa, synthetic construct
  source 1..9: note = Seed: YVNTFSSTF
YFNTFSSTV

SEQ ID NO: 75842 - protein, 9 aa, synthetic construct
  source 1..9: note = Seed: YVNTFSSTF
YFNTFSSTW

SEQ ID NO: 75843 - protein, 9 aa, synthetic construct
  source 1..9: note = Seed: YVNTFSSTF
YFNTFSSTY

SEQ ID NO: 75844 - protein, 11 aa, synthetic construct
  source 1..11: note = Seed: YNPFMIDVQQW
YFPFMIDVQQF

SEQ ID NO: 75845 - protein, 10 aa, synthetic construct
  source 1..10: note = Seed: YTPHTVLQAV
YFPHTVLQAA

SEQ ID NO: 75846 - protein, 10 aa, synthetic construct
  source 1..10: note = Seed: YTPHTVLQAV
YFPHTVLQAI

SEQ ID NO: 75847 - protein, 10 aa, synthetic construct
  source 1..10: note = Seed: YTPHTVLQAV
YFPHTVLQAL

SEQ ID NO: 75848 - protein, 10 aa, synthetic construct
  source 1..10: note = Seed: YTPHTVLQAV
YFPHTVLQAM

SEQ ID NO: 75849 - protein, 10 aa, synthetic construct
  source 1..10: note = Seed: YTPHTVLQAV
YFPHTVLQAV

SEQ ID NO: 75850 - protein, 9 aa, synthetic construct
  source 1..9: note = Seed: YVPLKSATC
YFPLKSATL

SEQ ID NO: 75851 - protein, 8 aa, synthetic construct
  source 1..8: note = Seed: YMPYFFTL
YFPYFFTF

SEQ ID NO: 75852 - protein, 8 aa, synthetic construct
  source 1..8: note = Seed: YMPYFFTL
YFPYFFTI

SEQ ID NO: 75853 - protein, 8 aa, synthetic construct
  source 1..8: note = Seed: YMPYFFTL
YFPYFFTL

SEQ ID NO: 75854 - protein, 9 aa, synthetic construct
  source 1..9: note = Seed: YMPYFFTLL
YFPYFFTLF

SEQ ID NO: 75855 - protein, 9 aa, synthetic construct
  source 1..9: note = Seed: YMPYFFTLL
YFPYFFTLI

SEQ ID NO: 75856 - protein, 9 aa, synthetic construct
  source 1..9: note = Seed: YMPYFFTLL
YFPYFFTLL

SEQ ID NO: 75857 - protein, 10 aa, synthetic construct
  source 1..10: note = Seed: YMPYFFTLLL
YFPYFFTLLA

SEQ ID NO: 75858 - protein, 10 aa, synthetic construct
  source 1..10: note = Seed: YMPYFFTLLL
YFPYFFTLLF

SEQ ID NO: 75859 - protein, 10 aa, synthetic construct
  source 1..10: note = Seed: YMPYFFTLLL
YFPYFFTLLI

SEQ ID NO: 75860 - protein, 10 aa, synthetic construct
  source 1..10: note = Seed: YMPYFFTLLL
YFPYFFTLLL

SEQ ID NO: 75861 - protein, 10 aa, synthetic construct
  source 1..10: note = Seed: YMPYFFTLLL
YFPYFFTLLM

SEQ ID NO: 75862 - protein, 10 aa, synthetic construct
  source 1..10: note = Seed: YMPYFFTLLL
YFPYFFTLLT

SEQ ID NO: 75863 - protein, 10 aa, synthetic construct
  source 1..10: note = Seed: YMPYFFTLLL
YFPYFFTLLV

SEQ ID NO: 75864 - protein, 10 aa, synthetic construct
  source 1..10: note = Seed: YMPYFFTLLL
YFPYFFTLLW

SEQ ID NO: 75865 - protein, 10 aa, synthetic construct
  source 1..10: note = Seed: YMPYFFTLLL
YFPYFFTLLY

SEQ ID NO: 75866 - protein, 9 aa, synthetic construct
  source 1..9: note = Seed: YMPYFFTLL
YFPYFFTLM

SEQ ID NO: 75867 - protein, 9 aa, synthetic construct
  source 1..9: note = Seed: YMPYFFTLL
YFPYFFTLW

SEQ ID NO: 75868 - protein, 9 aa, synthetic construct
  source 1..9: note = Seed: YMPYFFTLL
YFPYFFTLY

SEQ ID NO: 75869 - protein, 8 aa, synthetic construct
  source 1..8: note = Seed: YMPYFFTL
YFPYFFTM

SEQ ID NO: 75870 - protein, 8 aa, synthetic construct
  source 1..8: note = Seed: YMPYFFTL
YFPYFFTW

SEQ ID NO: 75871 - protein, 9 aa, synthetic construct
  source 1..9: note = Seed: YQPYRVVVL
YFPYRVVVF

SEQ ID NO: 75872 - protein, 9 aa, synthetic construct
  source 1..9: note = Seed: YQPYRVVVL
YFPYRVVVI

SEQ ID NO: 75873 - protein, 9 aa, synthetic construct
  source 1..9: note = Seed: YQPYRVVVL
YFPYRVVVL

SEQ ID NO: 75874 - protein, 10 aa, synthetic construct
  source 1..10: note = Seed: YQPYRVVVLS
YFPYRVVVLA

SEQ ID NO: 75875 - protein, 11 aa, synthetic construct
  source 1..11: note = Seed: YQPYRVVVLSF
YFPYRVVVLSF

SEQ ID NO: 75876 - protein, 9 aa, synthetic construct
  source 1..9: note = Seed: YQPYRVVVL
YFPYRVVVM

SEQ ID NO: 75877 - protein, 9 aa, synthetic construct
  source 1..9: note = Seed: YQPYRVVVL
YFPYRVVVV

SEQ ID NO: 75878 - protein, 9 aa, synthetic construct
  source 1..9: note = Seed: YQPYRVVVL
YFPYRVVVY

SEQ ID NO: 75879 - protein, 10 aa, synthetic construct
  source 1..10: note = Seed: YKQFDTYNLW
YFQFDTYNLF

SEQ ID NO: 75880 - protein, 10 aa, synthetic construct
  source 1..10: note = Seed: YKQFDTYNLW
YFQFDTYNLI

SEQ ID NO: 75881 - protein, 10 aa, synthetic construct
  source 1..10: note = Seed: YKQFDTYNLW
YFQFDTYNLL

SEQ ID NO: 75882 - protein, 10 aa, synthetic construct
  source 1..10: note = Seed: YKQFDTYNLW
YFQFDTYNLM

SEQ ID NO: 75883 - protein, 10 aa, synthetic construct
  source 1..10: note = Seed: YKQFDTYNLW
YFQFDTYNLW

SEQ ID NO: 75884 - protein, 10 aa, synthetic construct
  source 1..10: note = Seed: YKQFDTYNLW
YFQFDTYNLY

SEQ ID NO: 75885 - protein, 9 aa, synthetic construct
  source 1..9: note = Seed: YSQLMCQPI
YFQLMCQPF

SEQ ID NO: 75886 - protein, 9 aa, synthetic construct
  source 1..9: note = Seed: YSQLMCQPI
YFQLMCQPI

SEQ ID NO: 75887 - protein, 10 aa, synthetic construct
  source 1..10: note = Seed: YSQLMCQPIL
YFQLMCQPIF

SEQ ID NO: 75888 - protein, 11 aa, synthetic construct
  source 1..11: note = Seed: YSQLMCQPILL
YFQLMCQPILA

SEQ ID NO: 75889 - protein, 11 aa, synthetic construct
  source 1..11: note = Seed: YSQLMCQPILL
YFQLMCQPILI

SEQ ID NO: 75890 - protein, 11 aa, synthetic construct
  source 1..11: note = Seed: YSQLMCQPILL
YFQLMCQPILL

SEQ ID NO: 75891 - protein, 11 aa, synthetic construct
  source 1..11: note = Seed: YSQLMCQPILL
YFQLMCQPILM

SEQ ID NO: 75892 - protein, 11 aa, synthetic construct
  source 1..11: note = Seed: YSQLMCQPILL
YFQLMCQPILV

SEQ ID NO: 75893 - protein, 10 aa, synthetic construct
  source 1..10: note = Seed: YSQLMCQPIL
YFQLMCQPIY

SEQ ID NO: 75894 - protein, 9 aa, synthetic construct
  source 1..9: note = Seed: YSQLMCQPI
YFQLMCQPL

SEQ ID NO: 75895 - protein, 9 aa, synthetic construct
  source 1..9: note = Seed: YSQLMCQPI
YFQLMCQPM

SEQ ID NO: 75896 - protein, 9 aa, synthetic construct
  source 1..9: note = Seed: YSQLMCQPI
YFQLMCQPV

SEQ ID NO: 75897 - protein, 9 aa, synthetic construct
  source 1..9: note = Seed: YSQLMCQPI
YFQLMCQPY

SEQ ID NO: 75898 - protein, 8 aa, synthetic construct
  source 1..8: note = Seed: YYQNNVFM
YFQNNVFF

SEQ ID NO: 75899 - protein, 8 aa, synthetic construct
  source 1..8: note = Seed: YYQNNVFM
YFQNNVFL

SEQ ID NO: 75900 - protein, 8 aa, synthetic construct
  source 1..8: note = Seed: YYQNNVFM
YFQNNVFM

SEQ ID NO: 75901 - protein, 9 aa, synthetic construct
  source 1..9: note = Seed: YYQNNVFMS
YFQNNVFMF

SEQ ID NO: 75902 - protein, 9 aa, synthetic construct
  source 1..9: note = Seed: YYQNNVFMS
YFQNNVFMI

SEQ ID NO: 75903 - protein, 9 aa, synthetic construct
  source 1..9: note = Seed: YYQNNVFMS
YFQNNVFML

SEQ ID NO: 75904 - protein, 9 aa, synthetic construct
  source 1..9: note = Seed: YYQNNVFMS
YFQNNVFMM

SEQ ID NO: 75905 - protein, 9 aa, synthetic construct
  source 1..9: note = Seed: YYQNNVFMS
YFQNNVFMW

SEQ ID NO: 75906 - protein, 9 aa, synthetic construct
  source 1..9: note = Seed: YLQPRTFLL
YFQPRTFLF

SEQ ID NO: 75907 - protein, 9 aa, synthetic construct
  source 1..9: note = Seed: YLQPRTFLL
YFQPRTFLH

SEQ ID NO: 75908 - protein, 9 aa, synthetic construct
  source 1..9: note = Seed: YLQPRTFLL
YFQPRTFLI

SEQ ID NO: 75909 - protein, 9 aa, synthetic construct
  source 1..9: note = Seed: YLQPRTFLL
YFQPRTFLL

SEQ ID NO: 75910 - protein, 10 aa, synthetic construct
  source 1..10: note = Seed: YLQPRTFLLK
YFQPRTFLLK

SEQ ID NO: 75911 - protein, 11 aa, synthetic construct
  source 1..11: note = Seed: YLQPRTFLLKY
YFQPRTFLLKY

SEQ ID NO: 75912 - protein, 10 aa, synthetic construct
  source 1..10: note = Seed: YLQPRTFLLK
YFQPRTFLLR

SEQ ID NO: 75913 - protein, 9 aa, synthetic construct
  source 1..9: note = Seed: YLQPRTFLL
YFQPRTFLM

SEQ ID NO: 75914 - protein, 9 aa, synthetic construct
  source 1..9: note = Seed: YLQPRTFLL
YFQPRTFLV

SEQ ID NO: 75915 - protein, 9 aa, synthetic construct
  source 1..9: note = Seed: YLQPRTFLL
YFQPRTFLW

SEQ ID NO: 75916 - protein, 9 aa, synthetic construct
  source 1..9: note = Seed: YLQPRTFLL
YFQPRTFLY

SEQ ID NO: 75917 - protein, 10 aa, synthetic construct
  source 1..10: note = Seed: YPQVNGLTSI
YFQVNGLTSF

SEQ ID NO: 75918 - protein, 10 aa, synthetic construct
  source 1..10: note = Seed: YPQVNGLTSI
YFQVNGLTSI

SEQ ID NO: 75919 - protein, 10 aa, synthetic construct
  source 1..10: note = Seed: YPQVNGLTSI
YFQVNGLTSL

SEQ ID NO: 75920 - protein, 10 aa, synthetic construct
  source 1..10: note = Seed: YPQVNGLTSI
YFQVNGLTSM

SEQ ID NO: 75921 - protein, 10 aa, synthetic construct
  source 1..10: note = Seed: YPQVNGLTSI
YFQVNGLTSV

SEQ ID NO: 75922 - protein, 10 aa, synthetic construct
  source 1..10: note = Seed: YPQVNGLTSI
YFQVNGLTSY

SEQ ID NO: 75923 - protein, 9 aa, synthetic construct
  source 1..9: note = Seed: YYRARAGEA
YFRARAGEF

SEQ ID NO: 75924 - protein, 9 aa, synthetic construct
  source 1..9: note = Seed: YYRARAGEA
YFRARAGEI

SEQ ID NO: 75925 - protein, 9 aa, synthetic construct
  source 1..9: note = Seed: YYRARAGEA
YFRARAGEL

SEQ ID NO: 75926 - protein, 9 aa, synthetic construct
  source 1..9: note = Seed: YYRARAGEA
YFRARAGEM

SEQ ID NO: 75927 - protein, 9 aa, synthetic construct
  source 1..9: note = Seed: YYRARAGEA
YFRARAGEY

SEQ ID NO: 75928 - protein, 10 aa, synthetic construct
  source 1..10: note = Seed: YRRLISMMGF
YFRLISMMGF

SEQ ID NO: 75929 - protein, 10 aa, synthetic construct
  source 1..10: note = Seed: YRRLISMMGF
YFRLISMMGI

SEQ ID NO: 75930 - protein, 10 aa, synthetic construct
  source 1..10: note = Seed: YRRLISMMGF
YFRLISMMGL

SEQ ID NO: 75931 - protein, 10 aa, synthetic construct
  source 1..10: note = Seed: YRRLISMMGF
YFRLISMMGM

SEQ ID NO: 75932 - protein, 9 aa, synthetic construct
  source 1..9: note = Seed: YFRLTLGVY
YFRLTLGVF

SEQ ID NO: 75933 - protein, 9 aa, synthetic construct
  source 1..9: note = Seed: YFRLTLGVY
YFRLTLGVL

SEQ ID NO: 75934 - protein, 9 aa, synthetic construct
  source 1..9: note = Seed: YFRLTLGVY
YFRLTLGVM

SEQ ID NO: 75935 - protein, 10 aa, synthetic construct
  source 1..10: note = Seed: YVRNLQHRLY
YFRNLQHRLY

SEQ ID NO: 75936 - protein, 9 aa, synthetic construct
  source 1..9: note = Seed: YKRNRATRV
YFRNRATRL

SEQ ID NO: 75937 - protein, 9 aa, synthetic construct
  source 1..9: note = Seed: YYRRATRRI
YFRRATRRF

SEQ ID NO: 75938 - protein, 9 aa, synthetic construct
  source 1..9: note = Seed: YYRRATRRI
YFRRATRRL

SEQ ID NO: 75939 - protein, 9 aa, synthetic construct
  source 1..9: note = Seed: YYRRATRRI
YFRRATRRM

SEQ ID NO: 75940 - protein, 9 aa, synthetic construct
  source 1..9: note = Seed: YYRRATRRI
YFRRATRRY

SEQ ID NO: 75941 - protein, 8 aa, synthetic construct
  source 1..8: note = Seed: YYRSLPGV
YFRSLPGM

SEQ ID NO: 75942 - protein, 9 aa, synthetic construct
  source 1..9: note = Seed: YYRSLPGVF
YFRSLPGVF

SEQ ID NO: 75943 - protein, 10 aa, synthetic construct
  source 1..10: note = Seed: YYRSLPGVFC
YFRSLPGVFF

SEQ ID NO: 75944 - protein, 10 aa, synthetic construct
  source 1..10: note = Seed: YYRSLPGVFC
YFRSLPGVFL

SEQ ID NO: 75945 - protein, 10 aa, synthetic construct
  source 1..10: note = Seed: YYRSLPGVFC
YFRSLPGVFM

SEQ ID NO: 75946 - protein, 9 aa, synthetic construct
  source 1..9: note = Seed: YYRSLPGVF
YFRSLPGVI

SEQ ID NO: 75947 - protein, 9 aa, synthetic construct
  source 1..9: note = Seed: YYRSLPGVF
YFRSLPGVL

SEQ ID NO: 75948 - protein, 9 aa, synthetic construct
  source 1..9: note = Seed: YYRSLPGVF
YFRSLPGVM

SEQ ID NO: 75949 - protein, 9 aa, synthetic construct
  source 1..9: note = Seed: YYRSLPGVF
YFRSLPGVV

SEQ ID NO: 75950 - protein, 9 aa, synthetic construct
  source 1..9: note = Seed: YYRSLPGVF
YFRSLPGVY

SEQ ID NO: 75951 - protein, 8 aa, synthetic construct
  source 1..8: note = Seed: YYRYNLPT
YFRYNLPF

SEQ ID NO: 75952 - protein, 8 aa, synthetic construct
  source 1..8: note = Seed: YYRYNLPT
YFRYNLPI

SEQ ID NO: 75953 - protein, 8 aa, synthetic construct
  source 1..8: note = Seed: YYRYNLPT
YFRYNLPL

SEQ ID NO: 75954 - protein, 8 aa, synthetic construct
  source 1..8: note = Seed: YYRYNLPT
YFRYNLPM

SEQ ID NO: 75955 - protein, 9 aa, synthetic construct
  source 1..9: note = Seed: YYRYNLPTM
YFRYNLPTF

SEQ ID NO: 75956 - protein, 9 aa, synthetic construct
  source 1..9: note = Seed: YYRYNLPTM
YFRYNLPTI

SEQ ID NO: 75957 - protein, 9 aa, synthetic construct
  source 1..9: note = Seed: YYRYNLPTM
YFRYNLPTK

SEQ ID NO: 75958 - protein, 9 aa, synthetic construct
  source 1..9: note = Seed: YYRYNLPTM
YFRYNLPTL

SEQ ID NO: 75959 - protein, 9 aa, synthetic construct
  source 1..9: note = Seed: YYRYNLPTM
YFRYNLPTM

SEQ ID NO: 75960 - protein, 10 aa, synthetic construct
  source 1..10: note = Seed: YYRYNLPTMC
YFRYNLPTMF

SEQ ID NO: 75961 - protein, 10 aa, synthetic construct
  source 1..10: note = Seed: YYRYNLPTMC
YFRYNLPTMI

SEQ ID NO: 75962 - protein, 10 aa, synthetic construct
  source 1..10: note = Seed: YYRYNLPTMC
YFRYNLPTML

SEQ ID NO: 75963 - protein, 10 aa, synthetic construct
  source 1..10: note = Seed: YYRYNLPTMC
YFRYNLPTMM

SEQ ID NO: 75964 - protein, 10 aa, synthetic construct
  source 1..10: note = Seed: YYRYNLPTMC
YFRYNLPTMV

SEQ ID NO: 75965 - protein, 10 aa, synthetic construct
  source 1..10: note = Seed: YYRYNLPTMC
YFRYNLPTMY

SEQ ID NO: 75966 - protein, 9 aa, synthetic construct
  source 1..9: note = Seed: YYRYNLPTM
YFRYNLPTV

SEQ ID NO: 75967 - protein, 9 aa, synthetic construct
  source 1..9: note = Seed: YYRYNLPTM
YFRYNLPTW

SEQ ID NO: 75968 - protein, 9 aa, synthetic construct
  source 1..9: note = Seed: YYRYNLPTM
YFRYNLPTY

SEQ ID NO: 75969 - protein, 8 aa, synthetic construct
  source 1..8: note = Seed: YYRYNLPT
YFRYNLPY

SEQ ID NO: 75970 - protein, 9 aa, synthetic construct
  source 1..9: note = Seed: YSRYRIGNY
YFRYRIGNF

SEQ ID NO: 75971 - protein, 9 aa, synthetic construct
  source 1..9: note = Seed: YSRYRIGNY
YFRYRIGNL

SEQ ID NO: 75972 - protein, 9 aa, synthetic construct
  source 1..9: note = Seed: YSRYRIGNY
YFRYRIGNM

SEQ ID NO: 75973 - protein, 9 aa, synthetic construct
  source 1..9: note = Seed: YSRYRIGNY
YFRYRIGNY

SEQ ID NO: 75974 - protein, 10 aa, synthetic construct
  source 1..10: note = Seed: YSRYRIGNYK
YFRYRIGNYF

SEQ ID NO: 75975 - protein, 10 aa, synthetic construct
  source 1..10: note = Seed: YSRYRIGNYK
YFRYRIGNYK

SEQ ID NO: 75976 - protein, 11 aa, synthetic construct
  source 1..11: note = Seed: YSRYRIGNYKL
YFRYRIGNYKF

SEQ ID NO: 75977 - protein, 10 aa, synthetic construct
  source 1..10: note = Seed: YSRYRIGNYK
YFRYRIGNYL

SEQ ID NO: 75978 - protein, 10 aa, synthetic construct
  source 1..10: note = Seed: YSRYRIGNYK
YFRYRIGNYM

SEQ ID NO: 75979 - protein, 10 aa, synthetic construct
  source 1..10: note = Seed: YSRYRIGNYK
YFRYRIGNYR

SEQ ID NO: 75980 - protein, 9 aa, synthetic construct
  source 1..9: note = Seed: YSSANNCTF
YFSANNCTF

SEQ ID NO: 75981 - protein, 11 aa, synthetic construct
  source 1..11: note = Seed: YSSANNCTFEY
YFSANNCTFEW

SEQ ID NO: 75982 - protein, 11 aa, synthetic construct
  source 1..11: note = Seed: YSSANNCTFEY
YFSANNCTFEY

SEQ ID NO: 75983 - protein, 9 aa, synthetic construct
  source 1..9: note = Seed: YSSANNCTF
YFSANNCTI

SEQ ID NO: 75984 - protein, 9 aa, synthetic construct
  source 1..9: note = Seed: YSSANNCTF
YFSANNCTL

SEQ ID NO: 75985 - protein, 9 aa, synthetic construct
  source 1..9: note = Seed: YSSANNCTF
YFSANNCTM

SEQ ID NO: 75986 - protein, 9 aa, synthetic construct
  source 1..9: note = Seed: YSSANNCTF
YFSANNCTV

SEQ ID NO: 75987 - protein, 9 aa, synthetic construct
  source 1..9: note = Seed: YSSANNCTF
YFSANNCTW

SEQ ID NO: 75988 - protein, 9 aa, synthetic construct
  source 1..9: note = Seed: YSSANNCTF
YFSANNCTY

SEQ ID NO: 75989 - protein, 9 aa, synthetic construct
  source 1..9: note = Seed: YNSASFSTF
YFSASFSTA

SEQ ID NO: 75990 - protein, 9 aa, synthetic construct
  source 1..9: note = Seed: YNSASFSTF
YFSASFSTF

SEQ ID NO: 75991 - protein, 10 aa, synthetic construct
  source 1..10: note = Seed: YNSASFSTFK
YFSASFSTFK

SEQ ID NO: 75992 - protein, 10 aa, synthetic construct
  source 1..10: note = Seed: YNSASFSTFK
YFSASFSTFR

SEQ ID NO: 75993 - protein, 9 aa, synthetic construct
  source 1..9: note = Seed: YNSASFSTF
YFSASFSTH

SEQ ID NO: 75994 - protein, 9 aa, synthetic construct
  source 1..9: note = Seed: YNSASFSTF
YFSASFSTI

SEQ ID NO: 75995 - protein, 9 aa, synthetic construct
  source 1..9: note = Seed: YNSASFSTF
YFSASFSTL

SEQ ID NO: 75996 - protein, 9 aa, synthetic construct
  source 1..9: note = Seed: YNSASFSTF
YFSASFSTM

SEQ ID NO: 75997 - protein, 9 aa, synthetic construct
  source 1..9: note = Seed: YNSASFSTF
YFSASFSTV

SEQ ID NO: 75998 - protein, 9 aa, synthetic construct
  source 1..9: note = Seed: YNSASFSTF
YFSASFSTW

SEQ ID NO: 75999 - protein, 9 aa, synthetic construct
  source 1..9: note = Seed: YNSASFSTF
YFSASFSTY

SEQ ID NO: 76000 - protein, 10 aa, synthetic construct
  source 1..10: note = Seed: YASAVVLLIL
YFSAVVLLIW

SEQ ID NO: 76001 - protein, 9 aa, synthetic construct
  source 1..9: note = Seed: YASAVVLLI
YFSAVVLLV

SEQ ID NO: 76002 - protein, 8 aa, synthetic construct
  source 1..8: note = Seed: YYSLLMPI
YFSLLMPF

SEQ ID NO: 76003 - protein, 9 aa, synthetic construct
  source 1..9: note = Seed: YYSLLMPIL
YFSLLMPIF

SEQ ID NO: 76004 - protein, 9 aa, synthetic construct
  source 1..9: note = Seed: YYSLLMPIL
YFSLLMPIL

SEQ ID NO: 76005 - protein, 11 aa, synthetic construct
  source 1..11: note = Seed: YYSLLMPILTL
YFSLLMPILTV

SEQ ID NO: 76006 - protein, 9 aa, synthetic construct
  source 1..9: note = Seed: YYSLLMPIL
YFSLLMPIM

SEQ ID NO: 76007 - protein, 8 aa, synthetic construct
  source 1..8: note = Seed: YYSLLMPI
YFSLLMPL

SEQ ID NO: 76008 - protein, 8 aa, synthetic construct
  source 1..8: note = Seed: YYSLLMPI
YFSLLMPM

SEQ ID NO: 76009 - protein, 11 aa, synthetic construct
  source 1..11: note = Seed: YRSLPGVFCGV
YFSLPGVFCGI

SEQ ID NO: 76010 - protein, 11 aa, synthetic construct
  source 1..11: note = Seed: YRSLPGVFCGV
YFSLPGVFCGV

SEQ ID NO: 76011 - protein, 10 aa, synthetic construct
  source 1..10: note = Seed: YESLRPDTRY
YFSLRPDTRF

SEQ ID NO: 76012 - protein, 10 aa, synthetic construct
  source 1..10: note = Seed: YESLRPDTRY
YFSLRPDTRW

SEQ ID NO: 76013 - protein, 10 aa, synthetic construct
  source 1..10: note = Seed: YTSNPTTFHL
YFSNPTTFHF

SEQ ID NO: 76014 - protein, 10 aa, synthetic construct
  source 1..10: note = Seed: YTSNPTTFHL
YFSNPTTFHW

SEQ ID NO: 76015 - protein, 10 aa, synthetic construct
  source 1..10: note = Seed: YTSNPTTFHL
YFSNPTTFHY

SEQ ID NO: 76016 - protein, 9 aa, synthetic construct
  source 1..9: note = Seed: YTSNPTTFH
YFSNPTTFR

SEQ ID NO: 76017 - protein, 10 aa, synthetic construct
  source 1..10: note = Seed: YYSQLMCQPI
YFSQLMCQPF

SEQ ID NO: 76018 - protein, 10 aa, synthetic construct
  source 1..10: note = Seed: YYSQLMCQPI
YFSQLMCQPL

SEQ ID NO: 76019 - protein, 10 aa, synthetic construct
  source 1..10: note = Seed: YYSQLMCQPI
YFSQLMCQPM

SEQ ID NO: 76020 - protein, 10 aa, synthetic construct
  source 1..10: note = Seed: YYSQLMCQPI
YFSQLMCQPY

SEQ ID NO: 76021 - protein, 9 aa, synthetic construct
  source 1..9: note = Seed: YFTEQPIDL
YFTEQPIDF

SEQ ID NO: 76022 - protein, 9 aa, synthetic construct
  source 1..9: note = Seed: YFTEQPIDL
YFTEQPIDM

SEQ ID NO: 76023 - protein, 9 aa, synthetic construct
  source 1..9: note = Seed: YFTEQPIDL
YFTEQPIDY

SEQ ID NO: 76024 - protein, 10 aa, synthetic construct
  source 1..10: note = Seed: YLTFYLTNDV
YFTFYLTNDV

SEQ ID NO: 76025 - protein, 9 aa, synthetic construct
  source 1..9: note = Seed: YITGGVVQL
YFTGGVVQF

SEQ ID NO: 76026 - protein, 9 aa, synthetic construct
  source 1..9: note = Seed: YITGGVVQL
YFTGGVVQI

SEQ ID NO: 76027 - protein, 9 aa, synthetic construct
  source 1..9: note = Seed: YITGGVVQL
YFTGGVVQL

SEQ ID NO: 76028 - protein, 9 aa, synthetic construct
  source 1..9: note = Seed: YITGGVVQL
YFTGGVVQM

SEQ ID NO: 76029 - protein, 9 aa, synthetic construct
  source 1..9: note = Seed: YITGGVVQL
YFTGGVVQY

SEQ ID NO: 76030 - protein, 10 aa, synthetic construct
  source 1..10: note = Seed: YLTNDVSFLA
YFTNDVSFLA

SEQ ID NO: 76031 - protein, 10 aa, synthetic construct
  source 1..10: note = Seed: YLTNDVSFLA
YFTNDVSFLI

SEQ ID NO: 76032 - protein, 10 aa, synthetic construct
  source 1..10: note = Seed: YLTNDVSFLA
YFTNDVSFLL

SEQ ID NO: 76033 - protein, 10 aa, synthetic construct
  source 1..10: note = Seed: YLTNDVSFLA
YFTNDVSFLM

SEQ ID NO: 76034 - protein, 10 aa, synthetic construct
  source 1..10: note = Seed: YLTNDVSFLA
YFTNDVSFLV

SEQ ID NO: 76035 - protein, 8 aa, synthetic construct
  source 1..8: note = Seed: YFTQSRNL
YFTQSRNF

SEQ ID NO: 76036 - protein, 8 aa, synthetic construct
  source 1..8: note = Seed: YFTQSRNL
YFTQSRNM

SEQ ID NO: 76037 - protein, 9 aa, synthetic construct
  source 1..9: note = Seed: YFTSDYYQL
YFTSDYYQF

SEQ ID NO: 76038 - protein, 9 aa, synthetic construct
  source 1..9: note = Seed: YFTSDYYQL
YFTSDYYQI

SEQ ID NO: 76039 - protein, 10 aa, synthetic construct
  source 1..10: note = Seed: YFTSDYYQLY
YFTSDYYQLF

SEQ ID NO: 76040 - protein, 10 aa, synthetic construct
  source 1..10: note = Seed: YFTSDYYQLY
YFTSDYYQLK

SEQ ID NO: 76041 - protein, 10 aa, synthetic construct
  source 1..10: note = Seed: YFTSDYYQLY
YFTSDYYQLR

SEQ ID NO: 76042 - protein, 10 aa, synthetic construct
  source 1..10: note = Seed: YFTSDYYQLY
YFTSDYYQLW

SEQ ID NO: 76043 - protein, 11 aa, synthetic construct
  source 1..11: note = Seed: YFTSDYYQLYS
YFTSDYYQLYY

SEQ ID NO: 76044 - protein, 9 aa, synthetic construct
  source 1..9: note = Seed: YFTSDYYQL
YFTSDYYQM

SEQ ID NO: 76045 - protein, 9 aa, synthetic construct
  source 1..9: note = Seed: YFTSDYYQL
YFTSDYYQW

SEQ ID NO: 76046 - protein, 9 aa, synthetic construct
  source 1..9: note = Seed: YFTSDYYQL
YFTSDYYQY

SEQ ID NO: 76047 - protein, 9 aa, synthetic construct
  source 1..9: note = Seed: YYTSNPTTF
YFTSNPTTF

SEQ ID NO: 76048 - protein, 10 aa, synthetic construct
  source 1..10: note = Seed: YYTSNPTTFH
YFTSNPTTFF

SEQ ID NO: 76049 - protein, 11 aa, synthetic construct
  source 1..11: note = Seed: YYTSNPTTFHL
YFTSNPTTFHF

SEQ ID NO: 76050 - protein, 11 aa, synthetic construct
  source 1..11: note = Seed: YYTSNPTTFHL
YFTSNPTTFHW

SEQ ID NO: 76051 - protein, 10 aa, synthetic construct
  source 1..10: note = Seed: YYTSNPTTFH
YFTSNPTTFL

SEQ ID NO: 76052 - protein, 10 aa, synthetic construct
  source 1..10: note = Seed: YYTSNPTTFH
YFTSNPTTFM

SEQ ID NO: 76053 - protein, 10 aa, synthetic construct
  source 1..10: note = Seed: YYTSNPTTFH
YFTSNPTTFW

SEQ ID NO: 76054 - protein, 10 aa, synthetic construct
  source 1..10: note = Seed: YYTSNPTTFH
YFTSNPTTFY

SEQ ID NO: 76055 - protein, 9 aa, synthetic construct
  source 1..9: note = Seed: YYTSNPTTF
YFTSNPTTI

SEQ ID NO: 76056 - protein, 9 aa, synthetic construct
  source 1..9: note = Seed: YYTSNPTTF
YFTSNPTTL

SEQ ID NO: 76057 - protein, 9 aa, synthetic construct
  source 1..9: note = Seed: YYTSNPTTF
YFTSNPTTM

SEQ ID NO: 76058 - protein, 9 aa, synthetic construct
  source 1..9: note = Seed: YYTSNPTTF
YFTSNPTTV

SEQ ID NO: 76059 - protein, 9 aa, synthetic construct
  source 1..9: note = Seed: YYTSNPTTF
YFTSNPTTW

SEQ ID NO: 76060 - protein, 9 aa, synthetic construct
  source 1..9: note = Seed: YYTSNPTTF
YFTSNPTTY

SEQ ID NO: 76061 - protein, 10 aa, synthetic construct
  source 1..10: note = Seed: YTTTIKPVTY
YFTTIKPVTW

SEQ ID NO: 76062 - protein, 10 aa, synthetic construct
  source 1..10: note = Seed: YTTTIKPVTY
YFTTIKPVTY

SEQ ID NO: 76063 - protein, 11 aa, synthetic construct
  source 1..11: note = Seed: YTTTIKPVTYK
YFTTIKPVTYR

SEQ ID NO: 76064 - protein, 9 aa, synthetic construct
  source 1..9: note = Seed: YYVGYLQPR
YFVGYLQPF

SEQ ID NO: 76065 - protein, 9 aa, synthetic construct
  source 1..9: note = Seed: YYVGYLQPR
YFVGYLQPI

SEQ ID NO: 76066 - protein, 9 aa, synthetic construct
  source 1..9: note = Seed: YYVGYLQPR
YFVGYLQPL

SEQ ID NO: 76067 - protein, 9 aa, synthetic construct
  source 1..9: note = Seed: YYVGYLQPR
YFVGYLQPM

SEQ ID NO: 76068 - protein, 9 aa, synthetic construct
  source 1..9: note = Seed: YYVGYLQPR
YFVGYLQPR

SEQ ID NO: 76069 - protein, 11 aa, synthetic construct
  source 1..11: note = Seed: YYVGYLQPRTF
YFVGYLQPRTF

SEQ ID NO: 76070 - protein, 11 aa, synthetic construct
  source 1..11: note = Seed: YYVGYLQPRTF
YFVGYLQPRTM

SEQ ID NO: 76071 - protein, 9 aa, synthetic construct
  source 1..9: note = Seed: YYVGYLQPR
YFVGYLQPV

SEQ ID NO: 76072 - protein, 9 aa, synthetic construct
  source 1..9: note = Seed: YYVGYLQPR
YFVGYLQPY

SEQ ID NO: 76073 - protein, 9 aa, synthetic construct
  source 1..9: note = Seed: YFVLTSHTV
YFVLTSHTF

SEQ ID NO: 76074 - protein, 9 aa, synthetic construct
  source 1..9: note = Seed: YFVLTSHTV
YFVLTSHTI

SEQ ID NO: 76075 - protein, 9 aa, synthetic construct
  source 1..9: note = Seed: YFVLTSHTV
YFVLTSHTL

SEQ ID NO: 76076 - protein, 9 aa, synthetic construct
  source 1..9: note = Seed: YFVLTSHTV
YFVLTSHTM

SEQ ID NO: 76077 - protein, 9 aa, synthetic construct
  source 1..9: note = Seed: YFVLTSHTV
YFVLTSHTW

SEQ ID NO: 76078 - protein, 9 aa, synthetic construct
  source 1..9: note = Seed: YFVLTSHTV
YFVLTSHTY

SEQ ID NO: 76079 - protein, 9 aa, synthetic construct
  source 1..9: note = Seed: YQVNGYPNM
YFVNGYPNF

SEQ ID NO: 76080 - protein, 9 aa, synthetic construct
  source 1..9: note = Seed: YQVNGYPNM
YFVNGYPNI

SEQ ID NO: 76081 - protein, 9 aa, synthetic construct
  source 1..9: note = Seed: YQVNGYPNM
YFVNGYPNL

SEQ ID NO: 76082 - protein, 9 aa, synthetic construct
  source 1..9: note = Seed: YQVNGYPNM
YFVNGYPNM

SEQ ID NO: 76083 - protein, 10 aa, synthetic construct
  source 1..10: note = Seed: YQVNGYPNMF
YFVNGYPNMF

SEQ ID NO: 76084 - protein, 10 aa, synthetic construct
  source 1..10: note = Seed: YQVNGYPNMF
YFVNGYPNMW

SEQ ID NO: 76085 - protein, 9 aa, synthetic construct
  source 1..9: note = Seed: YQVNGYPNM
YFVNGYPNV

SEQ ID NO: 76086 - protein, 9 aa, synthetic construct
  source 1..9: note = Seed: YQVNGYPNM
YFVNGYPNY

SEQ ID NO: 76087 - protein, 8 aa, synthetic construct
  source 1..8: note = Seed: YLVSTQEF
YFVSTQEF

SEQ ID NO: 76088 - protein, 9 aa, synthetic construct
  source 1..9: note = Seed: YLVSTQEFR
YFVSTQEFR

SEQ ID NO: 76089 - protein, 10 aa, synthetic construct
  source 1..10: note = Seed: YLVSTQEFRY
YFVSTQEFRF

SEQ ID NO: 76090 - protein, 10 aa, synthetic construct
  source 1..10: note = Seed: YLVSTQEFRY
YFVSTQEFRY

SEQ ID NO: 76091 - protein, 8 aa, synthetic construct
  source 1..8: note = Seed: YLVSTQEF
YFVSTQEL

SEQ ID NO: 76092 - protein, 8 aa, synthetic construct
  source 1..8: note = Seed: YLVSTQEF
YFVSTQEM

SEQ ID NO: 76093 - protein, 8 aa, synthetic construct
  source 1..8: note = Seed: YLVSTQEF
YFVSTQEY

SEQ ID NO: 76094 - protein, 9 aa, synthetic construct
  source 1..9: note = Seed: YNVTQAFGR
YFVTQAFGR

SEQ ID NO: 76095 - protein, 9 aa, synthetic construct
  source 1..9: note = Seed: YFVVKRHTF
YFVVKRHTI

SEQ ID NO: 76096 - protein, 9 aa, synthetic construct
  source 1..9: note = Seed: YFVVKRHTF
YFVVKRHTL

SEQ ID NO: 76097 - protein, 9 aa, synthetic construct
  source 1..9: note = Seed: YFVVKRHTF
YFVVKRHTM

SEQ ID NO: 76098 - protein, 9 aa, synthetic construct
  source 1..9: note = Seed: YFVVKRHTF
YFVVKRHTV

SEQ ID NO: 76099 - protein, 9 aa, synthetic construct
  source 1..9: note = Seed: YFVVKRHTF
YFVVKRHTW

SEQ ID NO: 76100 - protein, 9 aa, synthetic construct
  source 1..9: note = Seed: YFVVKRHTF
YFVVKRHTY

SEQ ID NO: 76101 - protein, 10 aa, synthetic construct
  source 1..10: note = Seed: YRVVVLSFEL
YFVVVLSFEV

SEQ ID NO: 76102 - protein, 8 aa, synthetic construct
  source 1..8: note = Seed: YYVWKSYV
YFVWKSYF

SEQ ID NO: 76103 - protein, 8 aa, synthetic construct
  source 1..8: note = Seed: YYVWKSYV
YFVWKSYL

SEQ ID NO: 76104 - protein, 8 aa, synthetic construct
  source 1..8: note = Seed: YYVWKSYV
YFVWKSYM

SEQ ID NO: 76105 - protein, 9 aa, synthetic construct
  source 1..9: note = Seed: YYVWKSYVH
YFVWKSYVF

SEQ ID NO: 76106 - protein, 10 aa, synthetic construct
  source 1..10: note = Seed: YYVWKSYVHV
YFVWKSYVHF

SEQ ID NO: 76107 - protein, 10 aa, synthetic construct
  source 1..10: note = Seed: YYVWKSYVHV
YFVWKSYVHM

SEQ ID NO: 76108 - protein, 10 aa, synthetic construct
  source 1..10: note = Seed: YYVWKSYVHV
YFVWKSYVHV

SEQ ID NO: 76109 - protein, 11 aa, synthetic construct
  source 1..11: note = Seed: YYVWKSYVHVV
YFVWKSYVHVF

SEQ ID NO: 76110 - protein, 10 aa, synthetic construct
  source 1..10: note = Seed: YYVWKSYVHV
YFVWKSYVHW

SEQ ID NO: 76111 - protein, 9 aa, synthetic construct
  source 1..9: note = Seed: YYVWKSYVH
YFVWKSYVI

SEQ ID NO: 76112 - protein, 9 aa, synthetic construct
  source 1..9: note = Seed: YYVWKSYVH
YFVWKSYVL

SEQ ID NO: 76113 - protein, 9 aa, synthetic construct
  source 1..9: note = Seed: YYVWKSYVH
YFVWKSYVM

SEQ ID NO: 76114 - protein, 9 aa, synthetic construct
  source 1..9: note = Seed: YYVWKSYVH
YFVWKSYVV

SEQ ID NO: 76115 - protein, 9 aa, synthetic construct
  source 1..9: note = Seed: YYVWKSYVH
YFVWKSYVY

SEQ ID NO: 76116 - protein, 8 aa, synthetic construct
  source 1..8: note = Seed: YYVWKSYV
YFVWKSYY

SEQ ID NO: 76117 - protein, 9 aa, synthetic construct
  source 1..9: note = Seed: YVWKSYVHV
YFWKSYVHV

SEQ ID NO: 76118 - protein, 10 aa, synthetic construct
  source 1..10: note = Seed: YVYANGGKGF
YFYANGGKGF

SEQ ID NO: 76119 - protein, 10 aa, synthetic construct
  source 1..10: note = Seed: YVYANGGKGF
YFYANGGKGL

SEQ ID NO: 76120 - protein, 10 aa, synthetic construct
  source 1..10: note = Seed: YVYANGGKGF
YFYANGGKGM

SEQ ID NO: 76121 - protein, 10 aa, synthetic construct
  source 1..10: note = Seed: YVYANGGKGF
YFYANGGKGY

SEQ ID NO: 76122 - protein, 11 aa, synthetic construct
  source 1..11: note = Seed: YLYFIKGLNNL
YFYFIKGLNNF

SEQ ID NO: 76123 - protein, 10 aa, synthetic construct
  source 1..10: note = Seed: YDYLVSTQEF
YFYLVSTQEF

SEQ ID NO: 76124 - protein, 11 aa, synthetic construct
  source 1..11: note = Seed: YDYLVSTQEFR
YFYLVSTQEFF

SEQ ID NO: 76125 - protein, 11 aa, synthetic construct
  source 1..11: note = Seed: YDYLVSTQEFR
YFYLVSTQEFR

SEQ ID NO: 76126 - protein, 11 aa, synthetic construct
  source 1..11: note = Seed: YDYLVSTQEFR
YFYLVSTQEFW

SEQ ID NO: 76127 - protein, 10 aa, synthetic construct
  source 1..10: note = Seed: YDYLVSTQEF
YFYLVSTQEI

SEQ ID NO: 76128 - protein, 10 aa, synthetic construct
  source 1..10: note = Seed: YDYLVSTQEF
YFYLVSTQEL

SEQ ID NO: 76129 - protein, 10 aa, synthetic construct
  source 1..10: note = Seed: YDYLVSTQEF
YFYLVSTQEM

SEQ ID NO: 76130 - protein, 10 aa, synthetic construct
  source 1..10: note = Seed: YDYLVSTQEF
YFYLVSTQEV

SEQ ID NO: 76131 - protein, 10 aa, synthetic construct
  source 1..10: note = Seed: YDYLVSTQEF
YFYLVSTQEW

SEQ ID NO: 76132 - protein, 10 aa, synthetic construct
  source 1..10: note = Seed: YDYLVSTQEF
YFYLVSTQEY

SEQ ID NO: 76133 - protein, 9 aa, synthetic construct
  source 1..9: note = Seed: YNYLYRLFR
YFYLYRLFK

SEQ ID NO: 76134 - protein, 9 aa, synthetic construct
  source 1..9: note = Seed: YNYLYRLFR
YFYLYRLFR

SEQ ID NO: 76135 - protein, 10 aa, synthetic construct
  source 1..10: note = Seed: YNYLYRLFRK
YFYLYRLFRK

SEQ ID NO: 76136 - protein, 10 aa, synthetic construct
  source 1..10: note = Seed: YNYLYRLFRK
YFYLYRLFRR

SEQ ID NO: 76137 - protein, 8 aa, synthetic construct
  source 1..8: note = Seed: YRYNLPTM
YFYNLPTF

SEQ ID NO: 76138 - protein, 8 aa, synthetic construct
  source 1..8: note = Seed: YRYNLPTM
YFYNLPTI

SEQ ID NO: 76139 - protein, 8 aa, synthetic construct
  source 1..8: note = Seed: YRYNLPTM
YFYNLPTL

SEQ ID NO: 76140 - protein, 8 aa, synthetic construct
  source 1..8: note = Seed: YRYNLPTM
YFYNLPTM

SEQ ID NO: 76141 - protein, 9 aa, synthetic construct
  source 1..9: note = Seed: YRYNLPTMC
YFYNLPTML

SEQ ID NO: 76142 - protein, 9 aa, synthetic construct
  source 1..9: note = Seed: YRYNLPTMC
YFYNLPTMM

SEQ ID NO: 76143 - protein, 8 aa, synthetic construct
  source 1..8: note = Seed: YRYNLPTM
YFYNLPTY

SEQ ID NO: 76144 - protein, 11 aa, synthetic construct
  source 1..11: note = Seed: YDYYRYNLPTM
YFYYRYNLPTF

SEQ ID NO: 76145 - protein, 11 aa, synthetic construct
  source 1..11: note = Seed: YDYYRYNLPTM
YFYYRYNLPTL

SEQ ID NO: 76146 - protein, 11 aa, synthetic construct
  source 1..11: note = Seed: YDYYRYNLPTM
YFYYRYNLPTM

SEQ ID NO: 76147 - protein, 11 aa, synthetic construct
  source 1..11: note = Seed: YDYYRYNLPTM
YFYYRYNLPTW

SEQ ID NO: 76148 - protein, 11 aa, synthetic construct
  source 1..11: note = Seed: YDYYRYNLPTM
YFYYRYNLPTY

SEQ ID NO: 76149 - protein, 10 aa, synthetic construct
  source 1..10: note = Seed: YPANSIVCRF
YGANSIVCRW

SEQ ID NO: 76150 - protein, 10 aa, synthetic construct
  source 1..10: note = Seed: YKENSYTTTI
YGENSYTTTA

SEQ ID NO: 76151 - protein, 10 aa, synthetic construct
  source 1..10: note = Seed: YKENSYTTTI
YGENSYTTTF

SEQ ID NO: 76152 - protein, 10 aa, synthetic construct
  source 1..10: note = Seed: YKENSYTTTI
YGENSYTTTL

SEQ ID NO: 76153 - protein, 10 aa, synthetic construct
  source 1..10: note = Seed: YKENSYTTTI
YGENSYTTTM

SEQ ID NO: 76154 - protein, 10 aa, synthetic construct
  source 1..10: note = Seed: YKENSYTTTI
YGENSYTTTY

SEQ ID NO: 76155 - protein, 9 aa, synthetic construct
  source 1..9: note = Seed: YVFCTVNAL
YGFCTVNAF

SEQ ID NO: 76156 - protein, 9 aa, synthetic construct
  source 1..9: note = Seed: YVFCTVNAL
YGFCTVNAL

SEQ ID NO: 76157 - protein, 9 aa, synthetic construct
  source 1..9: note = Seed: YVFCTVNAL
YGFCTVNAM

SEQ ID NO: 76158 - protein, 9 aa, synthetic construct
  source 1..9: note = Seed: YVFCTVNAL
YGFCTVNAY

SEQ ID NO: 76159 - protein, 9 aa, synthetic construct
  source 1..9: note = Seed: YIFFASFYY
YGFFASFYF

SEQ ID NO: 76160 - protein, 9 aa, synthetic construct
  source 1..9: note = Seed: YIFFASFYY
YGFFASFYI

SEQ ID NO: 76161 - protein, 9 aa, synthetic construct
  source 1..9: note = Seed: YIFFASFYY
YGFFASFYK

SEQ ID NO: 76162 - protein, 9 aa, synthetic construct
  source 1..9: note = Seed: YIFFASFYY
YGFFASFYL

SEQ ID NO: 76163 - protein, 9 aa, synthetic construct
  source 1..9: note = Seed: YIFFASFYY
YGFFASFYM

SEQ ID NO: 76164 - protein, 9 aa, synthetic construct
  source 1..9: note = Seed: YIFFASFYY
YGFFASFYR

SEQ ID NO: 76165 - protein, 9 aa, synthetic construct
  source 1..9: note = Seed: YIFFASFYY
YGFFASFYV

SEQ ID NO: 76166 - protein, 9 aa, synthetic construct
  source 1..9: note = Seed: YIFFASFYY
YGFFASFYW

SEQ ID NO: 76167 - protein, 9 aa, synthetic construct
  source 1..9: note = Seed: YIFFASFYY
YGFFASFYY

SEQ ID NO: 76168 - protein, 10 aa, synthetic construct
  source 1..10: note = Seed: YIFFASFYYV
YGFFASFYYF

SEQ ID NO: 76169 - protein, 10 aa, synthetic construct
  source 1..10: note = Seed: YIFFASFYYV
YGFFASFYYH

SEQ ID NO: 76170 - protein, 10 aa, synthetic construct
  source 1..10: note = Seed: YIFFASFYYV
YGFFASFYYI

SEQ ID NO: 76171 - protein, 10 aa, synthetic construct
  source 1..10: note = Seed: YIFFASFYYV
YGFFASFYYK

SEQ ID NO: 76172 - protein, 10 aa, synthetic construct
  source 1..10: note = Seed: YIFFASFYYV
YGFFASFYYL

SEQ ID NO: 76173 - protein, 10 aa, synthetic construct
  source 1..10: note = Seed: YIFFASFYYV
YGFFASFYYM

SEQ ID NO: 76174 - protein, 10 aa, synthetic construct
  source 1..10: note = Seed: YIFFASFYYV
YGFFASFYYR

SEQ ID NO: 76175 - protein, 10 aa, synthetic construct
  source 1..10: note = Seed: YIFFASFYYV
YGFFASFYYV

SEQ ID NO: 76176 - protein, 11 aa, synthetic construct
  source 1..11: note = Seed: YIFFASFYYVW
YGFFASFYYVY

SEQ ID NO: 76177 - protein, 10 aa, synthetic construct
  source 1..10: note = Seed: YIFFASFYYV
YGFFASFYYW

SEQ ID NO: 76178 - protein, 10 aa, synthetic construct
  source 1..10: note = Seed: YIFFASFYYV
YGFFASFYYY

SEQ ID NO: 76179 - protein, 9 aa, synthetic construct
  source 1..9: note = Seed: YWFFSNYLK
YGFFSNYLK

SEQ ID NO: 76180 - protein, 10 aa, synthetic construct
  source 1..10: note = Seed: YWFFSNYLKR
YGFFSNYLKK

SEQ ID NO: 76181 - protein, 10 aa, synthetic construct
  source 1..10: note = Seed: YWFFSNYLKR
YGFFSNYLKR

SEQ ID NO: 76182 - protein, 9 aa, synthetic construct
  source 1..9: note = Seed: YWFFSNYLK
YGFFSNYLR

SEQ ID NO: 76183 - protein, 9 aa, synthetic construct
  source 1..9: note = Seed: YWFFSNYLK
YGFFSNYLY

SEQ ID NO: 76184 - protein, 10 aa, synthetic construct
  source 1..10: note = Seed: YSFLPGVYSV
YGFLPGVYSF

SEQ ID NO: 76185 - protein, 10 aa, synthetic construct
  source 1..10: note = Seed: YSFLPGVYSV
YGFLPGVYSI

SEQ ID NO: 76186 - protein, 10 aa, synthetic construct
  source 1..10: note = Seed: YSFLPGVYSV
YGFLPGVYSL

SEQ ID NO: 76187 - protein, 10 aa, synthetic construct
  source 1..10: note = Seed: YSFLPGVYSV
YGFLPGVYSM

SEQ ID NO: 76188 - protein, 10 aa, synthetic construct
  source 1..10: note = Seed: YSFLPGVYSV
YGFLPGVYSW

SEQ ID NO: 76189 - protein, 10 aa, synthetic construct
  source 1..10: note = Seed: YHFRELGVVH
YGFRELGVVY

SEQ ID NO: 76190 - protein, 9 aa, synthetic construct
  source 1..9: note = Seed: YVFTGYRVT
YGFTGYRVF

SEQ ID NO: 76191 - protein, 9 aa, synthetic construct
  source 1..9: note = Seed: YVFTGYRVT
YGFTGYRVI

SEQ ID NO: 76192 - protein, 9 aa, synthetic construct
  source 1..9: note = Seed: YVFTGYRVT
YGFTGYRVL

SEQ ID NO: 76193 - protein, 9 aa, synthetic construct
  source 1..9: note = Seed: YVFTGYRVT
YGFTGYRVM

SEQ ID NO: 76194 - protein, 10 aa, synthetic construct
  source 1..10: note = Seed: YVFTGYRVTK
YGFTGYRVTR

SEQ ID NO: 76195 - protein, 9 aa, synthetic construct
  source 1..9: note = Seed: YVFTGYRVT
YGFTGYRVV

SEQ ID NO: 76196 - protein, 9 aa, synthetic construct
  source 1..9: note = Seed: YVFTGYRVT
YGFTGYRVY

SEQ ID NO: 76197 - protein, 9 aa, synthetic construct
  source 1..9: note = Seed: YFFTLLLQL
YGFTLLLQY

SEQ ID NO: 76198 - protein, 9 aa, synthetic construct
  source 1..9: note = Seed: YLGGMSYYC
YGGGMSYYV

SEQ ID NO: 76199 - protein, 11 aa, synthetic construct
  source 1..11: note = Seed: YVGYLQPRTFL
YGGYLQPRTFF

SEQ ID NO: 76200 - protein, 11 aa, synthetic construct
  source 1..11: note = Seed: YVGYLQPRTFL
YGGYLQPRTFW

SEQ ID NO: 76201 - protein, 9 aa, synthetic construct
  source 1..9: note = Seed: YMHHMELPT
YGHHMELPF

SEQ ID NO: 76202 - protein, 9 aa, synthetic construct
  source 1..9: note = Seed: YMHHMELPT
YGHHMELPY

SEQ ID NO: 76203 - protein, 9 aa, synthetic construct
  source 1..9: note = Seed: YFIASFRLF
YGIASFRLF

SEQ ID NO: 76204 - protein, 10 aa, synthetic construct
  source 1..10: note = Seed: YFIASFRLFA
YGIASFRLFI

SEQ ID NO: 76205 - protein, 10 aa, synthetic construct
  source 1..10: note = Seed: YFIASFRLFA
YGIASFRLFL

SEQ ID NO: 76206 - protein, 10 aa, synthetic construct
  source 1..10: note = Seed: YFIASFRLFA
YGIASFRLFV

SEQ ID NO: 76207 - protein, 9 aa, synthetic construct
  source 1..9: note = Seed: YFIASFRLF
YGIASFRLM

SEQ ID NO: 76208 - protein, 9 aa, synthetic construct
  source 1..9: note = Seed: YFIASFRLF
YGIASFRLY

SEQ ID NO: 76209 - protein, 9 aa, synthetic construct
  source 1..9: note = Seed: YGIATVREV
YGIATVREF

SEQ ID NO: 76210 - protein, 9 aa, synthetic construct
  source 1..9: note = Seed: YGIATVREV
YGIATVREI

SEQ ID NO: 76211 - protein, 9 aa, synthetic construct
  source 1..9: note = Seed: YGIATVREV
YGIATVREL

SEQ ID NO: 76212 - protein, 9 aa, synthetic construct
  source 1..9: note = Seed: YGIATVREV
YGIATVREM

SEQ ID NO: 76213 - protein, 9 aa, synthetic construct
  source 1..9: note = Seed: YGIATVREV
YGIATVREY

SEQ ID NO: 76214 - protein, 9 aa, synthetic construct
  source 1..9: note = Seed: YDKLQFTSL
YGKLQFTSI

SEQ ID NO: 76215 - protein, 9 aa, synthetic construct
  source 1..9: note = Seed: YDKLQFTSL
YGKLQFTSL

SEQ ID NO: 76216 - protein, 11 aa, synthetic construct
  source 1..11: note = Seed: YDKLQFTSLEI
YGKLQFTSLEV

SEQ ID NO: 76217 - protein, 9 aa, synthetic construct
  source 1..9: note = Seed: YDKLQFTSL
YGKLQFTSM

SEQ ID NO: 76218 - protein, 9 aa, synthetic construct
  source 1..9: note = Seed: YDKLQFTSL
YGKLQFTSV

SEQ ID NO: 76219 - protein, 9 aa, synthetic construct
  source 1..9: note = Seed: YLKLRSDVL
YGKLRSDVL

SEQ ID NO: 76220 - protein, 9 aa, synthetic construct
  source 1..9: note = Seed: YLKLRSDVL
YGKLRSDVM

SEQ ID NO: 76221 - protein, 8 aa, synthetic construct
  source 1..8: note = Seed: YLKRRVVF
YGKRRVVL

SEQ ID NO: 76222 - protein, 8 aa, synthetic construct
  source 1..8: note = Seed: YLKRRVVF
YGKRRVVM

SEQ ID NO: 76223 - protein, 9 aa, synthetic construct
  source 1..9: note = Seed: YLKSPNFSK
YGKSPNFSR

SEQ ID NO: 76224 - protein, 9 aa, synthetic construct
  source 1..9: note = Seed: YNKYKYFSG
YGKYKYFSA

SEQ ID NO: 76225 - protein, 9 aa, synthetic construct
  source 1..9: note = Seed: YNKYKYFSG
YGKYKYFSF

SEQ ID NO: 76226 - protein, 9 aa, synthetic construct
  source 1..9: note = Seed: YNKYKYFSG
YGKYKYFSI

SEQ ID NO: 76227 - protein, 9 aa, synthetic construct
  source 1..9: note = Seed: YNKYKYFSG
YGKYKYFSL

SEQ ID NO: 76228 - protein, 9 aa, synthetic construct
  source 1..9: note = Seed: YNKYKYFSG
YGKYKYFSM

SEQ ID NO: 76229 - protein, 9 aa, synthetic construct
  source 1..9: note = Seed: YNKYKYFSG
YGKYKYFSV

SEQ ID NO: 76230 - protein, 10 aa, synthetic construct
  source 1..10: note = Seed: YRLFRKSNLK
YGLFRKSNLK

SEQ ID NO: 76231 - protein, 10 aa, synthetic construct
  source 1..10: note = Seed: YRLFRKSNLK
YGLFRKSNLR

SEQ ID NO: 76232 - protein, 9 aa, synthetic construct
  source 1..9: note = Seed: YILFTRFFY
YGLFTRFFK

SEQ ID NO: 76233 - protein, 9 aa, synthetic construct
  source 1..9: note = Seed: YILFTRFFY
YGLFTRFFR

SEQ ID NO: 76234 - protein, 9 aa, synthetic construct
  source 1..9: note = Seed: YILFTRFFY
YGLFTRFFY

SEQ ID NO: 76235 - protein, 10 aa, synthetic construct
  source 1..10: note = Seed: YILFTRFFYV
YGLFTRFFYA

SEQ ID NO: 76236 - protein, 10 aa, synthetic construct
  source 1..10: note = Seed: YILFTRFFYV
YGLFTRFFYC

SEQ ID NO: 76237 - protein, 10 aa, synthetic construct
  source 1..10: note = Seed: YILFTRFFYV
YGLFTRFFYF

SEQ ID NO: 76238 - protein, 10 aa, synthetic construct
  source 1..10: note = Seed: YILFTRFFYV
YGLFTRFFYI

SEQ ID NO: 76239 - protein, 10 aa, synthetic construct
  source 1..10: note = Seed: YILFTRFFYV
YGLFTRFFYK

SEQ ID NO: 76240 - protein, 10 aa, synthetic construct
  source 1..10: note = Seed: YILFTRFFYV
YGLFTRFFYL

SEQ ID NO: 76241 - protein, 10 aa, synthetic construct
  source 1..10: note = Seed: YILFTRFFYV
YGLFTRFFYM

SEQ ID NO: 76242 - protein, 10 aa, synthetic construct
  source 1..10: note = Seed: YILFTRFFYV
YGLFTRFFYR

SEQ ID NO: 76243 - protein, 10 aa, synthetic construct
  source 1..10: note = Seed: YILFTRFFYV
YGLFTRFFYS

SEQ ID NO: 76244 - protein, 10 aa, synthetic construct
  source 1..10: note = Seed: YILFTRFFYV
YGLFTRFFYT

SEQ ID NO: 76245 - protein, 10 aa, synthetic construct
  source 1..10: note = Seed: YILFTRFFYV
YGLFTRFFYV

SEQ ID NO: 76246 - protein, 11 aa, synthetic construct
  source 1..11: note = Seed: YILFTRFFYVL
YGLFTRFFYVA

SEQ ID NO: 76247 - protein, 11 aa, synthetic construct
  source 1..11: note = Seed: YILFTRFFYVL
YGLFTRFFYVC

SEQ ID NO: 76248 - protein, 11 aa, synthetic construct
  source 1..11: note = Seed: YILFTRFFYVL
YGLFTRFFYVD

SEQ ID NO: 76249 - protein, 11 aa, synthetic construct
  source 1..11: note = Seed: YILFTRFFYVL
YGLFTRFFYVE

SEQ ID NO: 76250 - protein, 11 aa, synthetic construct
  source 1..11: note = Seed: YILFTRFFYVL
YGLFTRFFYVF

SEQ ID NO: 76251 - protein, 11 aa, synthetic construct
  source 1..11: note = Seed: YILFTRFFYVL
YGLFTRFFYVG

SEQ ID NO: 76252 - protein, 11 aa, synthetic construct
  source 1..11: note = Seed: YILFTRFFYVL
YGLFTRFFYVH

SEQ ID NO: 76253 - protein, 11 aa, synthetic construct
  source 1..11: note = Seed: YILFTRFFYVL
YGLFTRFFYVI

SEQ ID NO: 76254 - protein, 11 aa, synthetic construct
  source 1..11: note = Seed: YILFTRFFYVL
YGLFTRFFYVK

SEQ ID NO: 76255 - protein, 11 aa, synthetic construct
  source 1..11: note = Seed: YILFTRFFYVL
YGLFTRFFYVL

SEQ ID NO: 76256 - protein, 11 aa, synthetic construct
  source 1..11: note = Seed: YILFTRFFYVL
YGLFTRFFYVM

SEQ ID NO: 76257 - protein, 11 aa, synthetic construct
  source 1..11: note = Seed: YILFTRFFYVL
YGLFTRFFYVN

SEQ ID NO: 76258 - protein, 11 aa, synthetic construct
  source 1..11: note = Seed: YILFTRFFYVL
YGLFTRFFYVP

SEQ ID NO: 76259 - protein, 11 aa, synthetic construct
  source 1..11: note = Seed: YILFTRFFYVL
YGLFTRFFYVQ

SEQ ID NO: 76260 - protein, 11 aa, synthetic construct
  source 1..11: note = Seed: YILFTRFFYVL
YGLFTRFFYVR

SEQ ID NO: 76261 - protein, 11 aa, synthetic construct
  source 1..11: note = Seed: YILFTRFFYVL
YGLFTRFFYVS

SEQ ID NO: 76262 - protein, 11 aa, synthetic construct
  source 1..11: note = Seed: YILFTRFFYVL
YGLFTRFFYVT

SEQ ID NO: 76263 - protein, 11 aa, synthetic construct
  source 1..11: note = Seed: YILFTRFFYVL
YGLFTRFFYVV

SEQ ID NO: 76264 - protein, 11 aa, synthetic construct
  source 1..11: note = Seed: YILFTRFFYVL
YGLFTRFFYVW

SEQ ID NO: 76265 - protein, 11 aa, synthetic construct
  source 1..11: note = Seed: YILFTRFFYVL
YGLFTRFFYVY

SEQ ID NO: 76266 - protein, 10 aa, synthetic construct
  source 1..10: note = Seed: YILFTRFFYV
YGLFTRFFYY

SEQ ID NO: 76267 - protein, 10 aa, synthetic construct
  source 1..10: note = Seed: YSLLMPILTL
YGLLMPILTA

SEQ ID NO: 76268 - protein, 10 aa, synthetic construct
  source 1..10: note = Seed: YSLLMPILTL
YGLLMPILTI

SEQ ID NO: 76269 - protein, 10 aa, synthetic construct
  source 1..10: note = Seed: YSLLMPILTL
YGLLMPILTL

SEQ ID NO: 76270 - protein, 10 aa, synthetic construct
  source 1..10: note = Seed: YSLLMPILTL
YGLLMPILTV

SEQ ID NO: 76271 - protein, 10 aa, synthetic construct
  source 1..10: note = Seed: YSLLMPILTL
YGLLMPILTW

SEQ ID NO: 76272 - protein, 10 aa, synthetic construct
  source 1..10: note = Seed: YHLMSFPQSA
YGLMSFPQSA

SEQ ID NO: 76273 - protein, 11 aa, synthetic construct
  source 1..11: note = Seed: YHLMSFPQSAP
YGLMSFPQSAV

SEQ ID NO: 76274 - protein, 10 aa, synthetic construct
  source 1..10: note = Seed: YHLMSFPQSA
YGLMSFPQSI

SEQ ID NO: 76275 - protein, 10 aa, synthetic construct
  source 1..10: note = Seed: YHLMSFPQSA
YGLMSFPQSL

SEQ ID NO: 76276 - protein, 10 aa, synthetic construct
  source 1..10: note = Seed: YHLMSFPQSA
YGLMSFPQSM

SEQ ID NO: 76277 - protein, 10 aa, synthetic construct
  source 1..10: note = Seed: YHLMSFPQSA
YGLMSFPQST

SEQ ID NO: 76278 - protein, 10 aa, synthetic construct
  source 1..10: note = Seed: YHLMSFPQSA
YGLMSFPQSV

SEQ ID NO: 76279 - protein, 10 aa, synthetic construct
  source 1..10: note = Seed: YDLSVVNARL
YGLSVVNARA

SEQ ID NO: 76280 - protein, 10 aa, synthetic construct
  source 1..10: note = Seed: YDLSVVNARL
YGLSVVNARI

SEQ ID NO: 76281 - protein, 10 aa, synthetic construct
  source 1..10: note = Seed: YDLSVVNARL
YGLSVVNARL

SEQ ID NO: 76282 - protein, 10 aa, synthetic construct
  source 1..10: note = Seed: YDLSVVNARL
YGLSVVNARM

SEQ ID NO: 76283 - protein, 10 aa, synthetic construct
  source 1..10: note = Seed: YDLSVVNARL
YGLSVVNARV

SEQ ID NO: 76284 - protein, 9 aa, synthetic construct
  source 1..9: note = Seed: YTMADLVYA
YGMADLVYA

SEQ ID NO: 76285 - protein, 10 aa, synthetic construct
  source 1..10: note = Seed: YTMADLVYAL
YGMADLVYAA

SEQ ID NO: 76286 - protein, 10 aa, synthetic construct
  source 1..10: note = Seed: YTMADLVYAL
YGMADLVYAC

SEQ ID NO: 76287 - protein, 10 aa, synthetic construct
  source 1..10: note = Seed: YTMADLVYAL
YGMADLVYAF

SEQ ID NO: 76288 - protein, 10 aa, synthetic construct
  source 1..10: note = Seed: YTMADLVYAL
YGMADLVYAG

SEQ ID NO: 76289 - protein, 10 aa, synthetic construct
  source 1..10: note = Seed: YTMADLVYAL
YGMADLVYAI

SEQ ID NO: 76290 - protein, 10 aa, synthetic construct
  source 1..10: note = Seed: YTMADLVYAL
YGMADLVYAL

SEQ ID NO: 76291 - protein, 11 aa, synthetic construct
  source 1..11: note = Seed: YTMADLVYALR
YGMADLVYALA

SEQ ID NO: 76292 - protein, 11 aa, synthetic construct
  source 1..11: note = Seed: YTMADLVYALR
YGMADLVYALC

SEQ ID NO: 76293 - protein, 11 aa, synthetic construct
  source 1..11: note = Seed: YTMADLVYALR
YGMADLVYALD

SEQ ID NO: 76294 - protein, 11 aa, synthetic construct
  source 1..11: note = Seed: YTMADLVYALR
YGMADLVYALE

SEQ ID NO: 76295 - protein, 11 aa, synthetic construct
  source 1..11: note = Seed: YTMADLVYALR
YGMADLVYALF

SEQ ID NO: 76296 - protein, 11 aa, synthetic construct
  source 1..11: note = Seed: YTMADLVYALR
YGMADLVYALG

SEQ ID NO: 76297 - protein, 11 aa, synthetic construct
  source 1..11: note = Seed: YTMADLVYALR
YGMADLVYALH

SEQ ID NO: 76298 - protein, 11 aa, synthetic construct
  source 1..11: note = Seed: YTMADLVYALR
YGMADLVYALI

SEQ ID NO: 76299 - protein, 11 aa, synthetic construct
  source 1..11: note = Seed: YTMADLVYALR
YGMADLVYALK

SEQ ID NO: 76300 - protein, 11 aa, synthetic construct
  source 1..11: note = Seed: YTMADLVYALR
YGMADLVYALL

SEQ ID NO: 76301 - protein, 11 aa, synthetic construct
  source 1..11: note = Seed: YTMADLVYALR
YGMADLVYALM

SEQ ID NO: 76302 - protein, 11 aa, synthetic construct
  source 1..11: note = Seed: YTMADLVYALR
YGMADLVYALN

SEQ ID NO: 76303 - protein, 11 aa, synthetic construct
  source 1..11: note = Seed: YTMADLVYALR
YGMADLVYALP

SEQ ID NO: 76304 - protein, 11 aa, synthetic construct
  source 1..11: note = Seed: YTMADLVYALR
YGMADLVYALQ

SEQ ID NO: 76305 - protein, 11 aa, synthetic construct
  source 1..11: note = Seed: YTMADLVYALR
YGMADLVYALR

SEQ ID NO: 76306 - protein, 11 aa, synthetic construct
  source 1..11: note = Seed: YTMADLVYALR
YGMADLVYALS

SEQ ID NO: 76307 - protein, 11 aa, synthetic construct
  source 1..11: note = Seed: YTMADLVYALR
YGMADLVYALT

SEQ ID NO: 76308 - protein, 11 aa, synthetic construct
  source 1..11: note = Seed: YTMADLVYALR
YGMADLVYALV

SEQ ID NO: 76309 - protein, 11 aa, synthetic construct
  source 1..11: note = Seed: YTMADLVYALR
YGMADLVYALW

SEQ ID NO: 76310 - protein, 11 aa, synthetic construct
  source 1..11: note = Seed: YTMADLVYALR
YGMADLVYALY

SEQ ID NO: 76311 - protein, 10 aa, synthetic construct
  source 1..10: note = Seed: YTMADLVYAL
YGMADLVYAM

SEQ ID NO: 76312 - protein, 10 aa, synthetic construct
  source 1..10: note = Seed: YTMADLVYAL
YGMADLVYAS

SEQ ID NO: 76313 - protein, 10 aa, synthetic construct
  source 1..10: note = Seed: YTMADLVYAL
YGMADLVYAT

SEQ ID NO: 76314 - protein, 10 aa, synthetic construct
  source 1..10: note = Seed: YTMADLVYAL
YGMADLVYAV

SEQ ID NO: 76315 - protein, 10 aa, synthetic construct
  source 1..10: note = Seed: YTMADLVYAL
YGMADLVYAW

SEQ ID NO: 76316 - protein, 10 aa, synthetic construct
  source 1..10: note = Seed: YTMADLVYAL
YGMADLVYAY

SEQ ID NO: 76317 - protein, 9 aa, synthetic construct
  source 1..9: note = Seed: YTMADLVYA
YGMADLVYF

SEQ ID NO: 76318 - protein, 9 aa, synthetic construct
  source 1..9: note = Seed: YTMADLVYA
YGMADLVYI

SEQ ID NO: 76319 - protein, 9 aa, synthetic construct
  source 1..9: note = Seed: YTMADLVYA
YGMADLVYL

SEQ ID NO: 76320 - protein, 9 aa, synthetic construct
  source 1..9: note = Seed: YTMADLVYA
YGMADLVYM

SEQ ID NO: 76321 - protein, 9 aa, synthetic construct
  source 1..9: note = Seed: YTMADLVYA
YGMADLVYR

SEQ ID NO: 76322 - protein, 9 aa, synthetic construct
  source 1..9: note = Seed: YTMADLVYA
YGMADLVYV

SEQ ID NO: 76323 - protein, 9 aa, synthetic construct
  source 1..9: note = Seed: YTMADLVYA
YGMADLVYY

SEQ ID NO: 76324 - protein, 9 aa, synthetic construct
  source 1..9: note = Seed: YVMHANYIF
YGMHANYIF

SEQ ID NO: 76325 - protein, 10 aa, synthetic construct
  source 1..10: note = Seed: YVMHANYIFW
YGMHANYIFF

SEQ ID NO: 76326 - protein, 10 aa, synthetic construct
  source 1..10: note = Seed: YVMHANYIFW
YGMHANYIFW

SEQ ID NO: 76327 - protein, 10 aa, synthetic construct
  source 1..10: note = Seed: YVMHANYIFW
YGMHANYIFY

SEQ ID NO: 76328 - protein, 9 aa, synthetic construct
  source 1..9: note = Seed: YVMHANYIF
YGMHANYIL

SEQ ID NO: 76329 - protein, 9 aa, synthetic construct
  source 1..9: note = Seed: YVMHANYIF
YGMHANYIM

SEQ ID NO: 76330 - protein, 9 aa, synthetic construct
  source 1..9: note = Seed: YVMHANYIF
YGMHANYIW

SEQ ID NO: 76331 - protein, 9 aa, synthetic construct
  source 1..9: note = Seed: YVMHANYIF
YGMHANYIY

SEQ ID NO: 76332 - protein, 9 aa, synthetic construct
  source 1..9: note = Seed: YTNDKACPL
YGNDKACPF

SEQ ID NO: 76333 - protein, 9 aa, synthetic construct
  source 1..9: note = Seed: YTNDKACPL
YGNDKACPM

SEQ ID NO: 76334 - protein, 9 aa, synthetic construct
  source 1..9: note = Seed: YTNDKACPL
YGNDKACPY

SEQ ID NO: 76335 - protein, 9 aa, synthetic construct
  source 1..9: note = Seed: YQNNVFMSE
YGNNVFMSF

SEQ ID NO: 76336 - protein, 9 aa, synthetic construct
  source 1..9: note = Seed: YQNNVFMSE
YGNNVFMSM

SEQ ID NO: 76337 - protein, 9 aa, synthetic construct
  source 1..9: note = Seed: YQNNVFMSE
YGNNVFMSY

SEQ ID NO: 76338 - protein, 9 aa, synthetic construct
  source 1..9: note = Seed: YANSVFNIC
YGNSVFNIF

SEQ ID NO: 76339 - protein, 9 aa, synthetic construct
  source 1..9: note = Seed: YANSVFNIC
YGNSVFNIM

SEQ ID NO: 76340 - protein, 9 aa, synthetic construct
  source 1..9: note = Seed: YANSVFNIC
YGNSVFNIY

SEQ ID NO: 76341 - protein, 9 aa, synthetic construct
  source 1..9: note = Seed: YVNTFSSTF
YGNTFSSTF

SEQ ID NO: 76342 - protein, 9 aa, synthetic construct
  source 1..9: note = Seed: YVNTFSSTF
YGNTFSSTL

SEQ ID NO: 76343 - protein, 9 aa, synthetic construct
  source 1..9: note = Seed: YVNTFSSTF
YGNTFSSTM

SEQ ID NO: 76344 - protein, 9 aa, synthetic construct
  source 1..9: note = Seed: YVNTFSSTF
YGNTFSSTW

SEQ ID NO: 76345 - protein, 9 aa, synthetic construct
  source 1..9: note = Seed: YVNTFSSTF
YGNTFSSTY

SEQ ID NO: 76346 - protein, 10 aa, synthetic construct
  source 1..10: note = Seed: YTPHTVLQAV
YGPHTVLQAA

SEQ ID NO: 76347 - protein, 10 aa, synthetic construct
  source 1..10: note = Seed: YTPHTVLQAV
YGPHTVLQAI

SEQ ID NO: 76348 - protein, 10 aa, synthetic construct
  source 1..10: note = Seed: YTPHTVLQAV
YGPHTVLQAL

SEQ ID NO: 76349 - protein, 10 aa, synthetic construct
  source 1..10: note = Seed: YTPHTVLQAV
YGPHTVLQAM

SEQ ID NO: 76350 - protein, 10 aa, synthetic construct
  source 1..10: note = Seed: YTPHTVLQAV
YGPHTVLQAV

SEQ ID NO: 76351 - protein, 9 aa, synthetic construct
  source 1..9: note = Seed: YVPLKSATC
YGPLKSATI

SEQ ID NO: 76352 - protein, 9 aa, synthetic construct
  source 1..9: note = Seed: YVPLKSATC
YGPLKSATL

SEQ ID NO: 76353 - protein, 9 aa, synthetic construct
  source 1..9: note = Seed: YVPLKSATC
YGPLKSATM

SEQ ID NO: 76354 - protein, 9 aa, synthetic construct
  source 1..9: note = Seed: YVPLKSATC
YGPLKSATV

SEQ ID NO: 76355 - protein, 8 aa, synthetic construct
  source 1..8: note = Seed: YMPYFFTL
YGPYFFTF

SEQ ID NO: 76356 - protein, 9 aa, synthetic construct
  source 1..9: note = Seed: YMPYFFTLL
YGPYFFTLF

SEQ ID NO: 76357 - protein, 9 aa, synthetic construct
  source 1..9: note = Seed: YMPYFFTLL
YGPYFFTLL

SEQ ID NO: 76358 - protein, 10 aa, synthetic construct
  source 1..10: note = Seed: YMPYFFTLLL
YGPYFFTLLA

SEQ ID NO: 76359 - protein, 10 aa, synthetic construct
  source 1..10: note = Seed: YMPYFFTLLL
YGPYFFTLLF

SEQ ID NO: 76360 - protein, 10 aa, synthetic construct
  source 1..10: note = Seed: YMPYFFTLLL
YGPYFFTLLL

SEQ ID NO: 76361 - protein, 10 aa, synthetic construct
  source 1..10: note = Seed: YMPYFFTLLL
YGPYFFTLLM

SEQ ID NO: 76362 - protein, 10 aa, synthetic construct
  source 1..10: note = Seed: YMPYFFTLLL
YGPYFFTLLT

SEQ ID NO: 76363 - protein, 10 aa, synthetic construct
  source 1..10: note = Seed: YMPYFFTLLL
YGPYFFTLLV

SEQ ID NO: 76364 - protein, 10 aa, synthetic construct
  source 1..10: note = Seed: YMPYFFTLLL
YGPYFFTLLW

SEQ ID NO: 76365 - protein, 10 aa, synthetic construct
  source 1..10: note = Seed: YMPYFFTLLL
YGPYFFTLLY

SEQ ID NO: 76366 - protein, 9 aa, synthetic construct
  source 1..9: note = Seed: YMPYFFTLL
YGPYFFTLV

SEQ ID NO: 76367 - protein, 9 aa, synthetic construct
  source 1..9: note = Seed: YQPYRVVVL
YGPYRVVVL

SEQ ID NO: 76368 - protein, 10 aa, synthetic construct
  source 1..10: note = Seed: YQPYRVVVLS
YGPYRVVVLA

SEQ ID NO: 76369 - protein, 9 aa, synthetic construct
  source 1..9: note = Seed: YQPYRVVVL
YGPYRVVVM

SEQ ID NO: 76370 - protein, 9 aa, synthetic construct
  source 1..9: note = Seed: YQPYRVVVL
YGPYRVVVY

SEQ ID NO: 76371 - protein, 10 aa, synthetic construct
  source 1..10: note = Seed: YKQFDTYNLW
YGQFDTYNLF

SEQ ID NO: 76372 - protein, 10 aa, synthetic construct
  source 1..10: note = Seed: YKQFDTYNLW
YGQFDTYNLM

SEQ ID NO: 76373 - protein, 10 aa, synthetic construct
  source 1..10: note = Seed: YKQFDTYNLW
YGQFDTYNLW

SEQ ID NO: 76374 - protein, 10 aa, synthetic construct
  source 1..10: note = Seed: YKQFDTYNLW
YGQFDTYNLY

SEQ ID NO: 76375 - protein, 10 aa, synthetic construct
  source 1..10: note = Seed: YSQLMCQPIL
YGQLMCQPIF

SEQ ID NO: 76376 - protein, 11 aa, synthetic construct
  source 1..11: note = Seed: YSQLMCQPILL
YGQLMCQPILA

SEQ ID NO: 76377 - protein, 11 aa, synthetic construct
  source 1..11: note = Seed: YSQLMCQPILL
YGQLMCQPILI

SEQ ID NO: 76378 - protein, 11 aa, synthetic construct
  source 1..11: note = Seed: YSQLMCQPILL
YGQLMCQPILL

SEQ ID NO: 76379 - protein, 11 aa, synthetic construct
  source 1..11: note = Seed: YSQLMCQPILL
YGQLMCQPILM

SEQ ID NO: 76380 - protein, 11 aa, synthetic construct
  source 1..11: note = Seed: YSQLMCQPILL
YGQLMCQPILV

SEQ ID NO: 76381 - protein, 10 aa, synthetic construct
  source 1..10: note = Seed: YSQLMCQPIL
YGQLMCQPIY

SEQ ID NO: 76382 - protein, 9 aa, synthetic construct
  source 1..9: note = Seed: YLQPRTFLL
YGQPRTFLF

SEQ ID NO: 76383 - protein, 9 aa, synthetic construct
  source 1..9: note = Seed: YLQPRTFLL
YGQPRTFLM

SEQ ID NO: 76384 - protein, 9 aa, synthetic construct
  source 1..9: note = Seed: YLQPRTFLL
YGQPRTFLY

SEQ ID NO: 76385 - protein, 10 aa, synthetic construct
  source 1..10: note = Seed: YPQVNGLTSI
YGQVNGLTSF

SEQ ID NO: 76386 - protein, 10 aa, synthetic construct
  source 1..10: note = Seed: YPQVNGLTSI
YGQVNGLTSI

SEQ ID NO: 76387 - protein, 10 aa, synthetic construct
  source 1..10: note = Seed: YPQVNGLTSI
YGQVNGLTSL

SEQ ID NO: 76388 - protein, 10 aa, synthetic construct
  source 1..10: note = Seed: YPQVNGLTSI
YGQVNGLTSM

SEQ ID NO: 76389 - protein, 10 aa, synthetic construct
  source 1..10: note = Seed: YPQVNGLTSI
YGQVNGLTSV

SEQ ID NO: 76390 - protein, 10 aa, synthetic construct
  source 1..10: note = Seed: YPQVNGLTSI
YGQVNGLTSY

SEQ ID NO: 76391 - protein, 10 aa, synthetic construct
  source 1..10: note = Seed: YRRLISMMGF
YGRLISMMGF

SEQ ID NO: 76392 - protein, 10 aa, synthetic construct
  source 1..10: note = Seed: YRRLISMMGF
YGRLISMMGI

SEQ ID NO: 76393 - protein, 10 aa, synthetic construct
  source 1..10: note = Seed: YRRLISMMGF
YGRLISMMGL

SEQ ID NO: 76394 - protein, 10 aa, synthetic construct
  source 1..10: note = Seed: YRRLISMMGF
YGRLISMMGM

SEQ ID NO: 76395 - protein, 9 aa, synthetic construct
  source 1..9: note = Seed: YFRLTLGVY
YGRLTLGVF

SEQ ID NO: 76396 - protein, 9 aa, synthetic construct
  source 1..9: note = Seed: YFRLTLGVY
YGRLTLGVY

SEQ ID NO: 76397 - protein, 9 aa, synthetic construct
  source 1..9: note = Seed: YKRNRATRV
YGRNRATRL

SEQ ID NO: 76398 - protein, 9 aa, synthetic construct
  source 1..9: note = Seed: YYRSLPGVF
YGRSLPGVY

SEQ ID NO: 76399 - protein, 9 aa, synthetic construct
  source 1..9: note = Seed: YYRYNLPTM
YGRYNLPTF

SEQ ID NO: 76400 - protein, 9 aa, synthetic construct
  source 1..9: note = Seed: YYRYNLPTM
YGRYNLPTK

SEQ ID NO: 76401 - protein, 9 aa, synthetic construct
  source 1..9: note = Seed: YYRYNLPTM
YGRYNLPTL

SEQ ID NO: 76402 - protein, 9 aa, synthetic construct
  source 1..9: note = Seed: YYRYNLPTM
YGRYNLPTM

SEQ ID NO: 76403 - protein, 10 aa, synthetic construct
  source 1..10: note = Seed: YYRYNLPTMC
YGRYNLPTMF

SEQ ID NO: 76404 - protein, 10 aa, synthetic construct
  source 1..10: note = Seed: YYRYNLPTMC
YGRYNLPTMI

SEQ ID NO: 76405 - protein, 10 aa, synthetic construct
  source 1..10: note = Seed: YYRYNLPTMC
YGRYNLPTML

SEQ ID NO: 76406 - protein, 10 aa, synthetic construct
  source 1..10: note = Seed: YYRYNLPTMC
YGRYNLPTMM

SEQ ID NO: 76407 - protein, 10 aa, synthetic construct
  source 1..10: note = Seed: YYRYNLPTMC
YGRYNLPTMV

SEQ ID NO: 76408 - protein, 9 aa, synthetic construct
  source 1..9: note = Seed: YYRYNLPTM
YGRYNLPTY

SEQ ID NO: 76409 - protein, 10 aa, synthetic construct
  source 1..10: note = Seed: YSRYRIGNYK
YGRYRIGNYF

SEQ ID NO: 76410 - protein, 10 aa, synthetic construct
  source 1..10: note = Seed: YSRYRIGNYK
YGRYRIGNYK

SEQ ID NO: 76411 - protein, 11 aa, synthetic construct
  source 1..11: note = Seed: YSRYRIGNYKL
YGRYRIGNYKF

SEQ ID NO: 76412 - protein, 10 aa, synthetic construct
  source 1..10: note = Seed: YSRYRIGNYK
YGRYRIGNYL

SEQ ID NO: 76413 - protein, 10 aa, synthetic construct
  source 1..10: note = Seed: YSRYRIGNYK
YGRYRIGNYM

SEQ ID NO: 76414 - protein, 10 aa, synthetic construct
  source 1..10: note = Seed: YSRYRIGNYK
YGRYRIGNYR

SEQ ID NO: 76415 - protein, 11 aa, synthetic construct
  source 1..11: note = Seed: YSSANNCTFEY
YGSANNCTFEW

SEQ ID NO: 76416 - protein, 9 aa, synthetic construct
  source 1..9: note = Seed: YSSANNCTF
YGSANNCTW

SEQ ID NO: 76417 - protein, 9 aa, synthetic construct
  source 1..9: note = Seed: YSSANNCTF
YGSANNCTY

SEQ ID NO: 76418 - protein, 9 aa, synthetic construct
  source 1..9: note = Seed: YNSASFSTF
YGSASFSTF

SEQ ID NO: 76419 - protein, 10 aa, synthetic construct
  source 1..10: note = Seed: YNSASFSTFK
YGSASFSTFK

SEQ ID NO: 76420 - protein, 10 aa, synthetic construct
  source 1..10: note = Seed: YNSASFSTFK
YGSASFSTFR

SEQ ID NO: 76421 - protein, 9 aa, synthetic construct
  source 1..9: note = Seed: YNSASFSTF
YGSASFSTL

SEQ ID NO: 76422 - protein, 9 aa, synthetic construct
  source 1..9: note = Seed: YNSASFSTF
YGSASFSTM

SEQ ID NO: 76423 - protein, 9 aa, synthetic construct
  source 1..9: note = Seed: YNSASFSTF
YGSASFSTW

SEQ ID NO: 76424 - protein, 9 aa, synthetic construct
  source 1..9: note = Seed: YNSASFSTF
YGSASFSTY

SEQ ID NO: 76425 - protein, 9 aa, synthetic construct
  source 1..9: note = Seed: YASAVVLLI
YGSAVVLLF

SEQ ID NO: 76426 - protein, 10 aa, synthetic construct
  source 1..10: note = Seed: YASAVVLLIL
YGSAVVLLIW

SEQ ID NO: 76427 - protein, 9 aa, synthetic construct
  source 1..9: note = Seed: YASAVVLLI
YGSAVVLLW

SEQ ID NO: 76428 - protein, 9 aa, synthetic construct
  source 1..9: note = Seed: YASAVVLLI
YGSAVVLLY

SEQ ID NO: 76429 - protein, 11 aa, synthetic construct
  source 1..11: note = Seed: YYSLLMPILTL
YGSLLMPILTV

SEQ ID NO: 76430 - protein, 11 aa, synthetic construct
  source 1..11: note = Seed: YRSLPGVFCGV
YGSLPGVFCGI

SEQ ID NO: 76431 - protein, 11 aa, synthetic construct
  source 1..11: note = Seed: YRSLPGVFCGV
YGSLPGVFCGV

SEQ ID NO: 76432 - protein, 10 aa, synthetic construct
  source 1..10: note = Seed: YESLRPDTRY
YGSLRPDTRF

SEQ ID NO: 76433 - protein, 10 aa, synthetic construct
  source 1..10: note = Seed: YESLRPDTRY
YGSLRPDTRW

SEQ ID NO: 76434 - protein, 9 aa, synthetic construct
  source 1..9: note = Seed: YTSNPTTFH
YGSNPTTFF

SEQ ID NO: 76435 - protein, 10 aa, synthetic construct
  source 1..10: note = Seed: YTSNPTTFHL
YGSNPTTFHF

SEQ ID NO: 76436 - protein, 10 aa, synthetic construct
  source 1..10: note = Seed: YTSNPTTFHL
YGSNPTTFHW

SEQ ID NO: 76437 - protein, 10 aa, synthetic construct
  source 1..10: note = Seed: YTSNPTTFHL
YGSNPTTFHY

SEQ ID NO: 76438 - protein, 9 aa, synthetic construct
  source 1..9: note = Seed: YTSNPTTFH
YGSNPTTFR

SEQ ID NO: 76439 - protein, 9 aa, synthetic construct
  source 1..9: note = Seed: YTSNPTTFH
YGSNPTTFY

SEQ ID NO: 76440 - protein, 10 aa, synthetic construct
  source 1..10: note = Seed: YLTFYLTNDV
YGTFYLTNDV

SEQ ID NO: 76441 - protein, 9 aa, synthetic construct
  source 1..9: note = Seed: YITGGVVQL
YGTGGVVQY

SEQ ID NO: 76442 - protein, 10 aa, synthetic construct
  source 1..10: note = Seed: YLTNDVSFLA
YGTNDVSFLA

SEQ ID NO: 76443 - protein, 10 aa, synthetic construct
  source 1..10: note = Seed: YLTNDVSFLA
YGTNDVSFLI

SEQ ID NO: 76444 - protein, 10 aa, synthetic construct
  source 1..10: note = Seed: YLTNDVSFLA
YGTNDVSFLL

SEQ ID NO: 76445 - protein, 10 aa, synthetic construct
  source 1..10: note = Seed: YLTNDVSFLA
YGTNDVSFLM

SEQ ID NO: 76446 - protein, 10 aa, synthetic construct
  source 1..10: note = Seed: YLTNDVSFLA
YGTNDVSFLV

SEQ ID NO: 76447 - protein, 10 aa, synthetic construct
  source 1..10: note = Seed: YFTSDYYQLY
YGTSDYYQLK

SEQ ID NO: 76448 - protein, 10 aa, synthetic construct
  source 1..10: note = Seed: YFTSDYYQLY
YGTSDYYQLR

SEQ ID NO: 76449 - protein, 10 aa, synthetic construct
  source 1..10: note = Seed: YFTSDYYQLY
YGTSDYYQLW

SEQ ID NO: 76450 - protein, 10 aa, synthetic construct
  source 1..10: note = Seed: YFTSDYYQLY
YGTSDYYQLY

SEQ ID NO: 76451 - protein, 9 aa, synthetic construct
  source 1..9: note = Seed: YYTSNPTTF
YGTSNPTTF

SEQ ID NO: 76452 - protein, 11 aa, synthetic construct
  source 1..11: note = Seed: YYTSNPTTFHL
YGTSNPTTFHF

SEQ ID NO: 76453 - protein, 11 aa, synthetic construct
  source 1..11: note = Seed: YYTSNPTTFHL
YGTSNPTTFHW

SEQ ID NO: 76454 - protein, 9 aa, synthetic construct
  source 1..9: note = Seed: YYTSNPTTF
YGTSNPTTM

SEQ ID NO: 76455 - protein, 9 aa, synthetic construct
  source 1..9: note = Seed: YYTSNPTTF
YGTSNPTTY

SEQ ID NO: 76456 - protein, 10 aa, synthetic construct
  source 1..10: note = Seed: YTTTIKPVTY
YGTTIKPVTW

SEQ ID NO: 76457 - protein, 11 aa, synthetic construct
  source 1..11: note = Seed: YTTTIKPVTYK
YGTTIKPVTYR

SEQ ID NO: 76458 - protein, 9 aa, synthetic construct
  source 1..9: note = Seed: YTVEEAKTV
YGVEEAKTY

SEQ ID NO: 76459 - protein, 9 aa, synthetic construct
  source 1..9: note = Seed: YTVELGTEV
YGVELGTEF

SEQ ID NO: 76460 - protein, 9 aa, synthetic construct
  source 1..9: note = Seed: YTVELGTEV
YGVELGTEL

SEQ ID NO: 76461 - protein, 9 aa, synthetic construct
  source 1..9: note = Seed: YTVELGTEV
YGVELGTEM

SEQ ID NO: 76462 - protein, 9 aa, synthetic construct
  source 1..9: note = Seed: YTVELGTEV
YGVELGTEY

SEQ ID NO: 76463 - protein, 9 aa, synthetic construct
  source 1..9: note = Seed: YQVNGYPNM
YGVNGYPNY

SEQ ID NO: 76464 - protein, 10 aa, synthetic construct
  source 1..10: note = Seed: YLVSTQEFRY
YGVSTQEFRY

SEQ ID NO: 76465 - protein, 9 aa, synthetic construct
  source 1..9: note = Seed: YFVVKRHTF
YGVVKRHTL

SEQ ID NO: 76466 - protein, 10 aa, synthetic construct
  source 1..10: note = Seed: YRVVVLSFEL
YGVVVLSFEV

SEQ ID NO: 76467 - protein, 10 aa, synthetic construct
  source 1..10: note = Seed: YYVWKSYVHV
YGVWKSYVHV

SEQ ID NO: 76468 - protein, 10 aa, synthetic construct
  source 1..10: note = Seed: YVYANGGKGF
YGYANGGKGF

SEQ ID NO: 76469 - protein, 10 aa, synthetic construct
  source 1..10: note = Seed: YVYANGGKGF
YGYANGGKGM

SEQ ID NO: 76470 - protein, 11 aa, synthetic construct
  source 1..11: note = Seed: YLYFIKGLNNL
YGYFIKGLNNF

SEQ ID NO: 76471 - protein, 10 aa, synthetic construct
  source 1..10: note = Seed: YDYLVSTQEF
YGYLVSTQEF

SEQ ID NO: 76472 - protein, 10 aa, synthetic construct
  source 1..10: note = Seed: YDYLVSTQEF
YGYLVSTQEI

SEQ ID NO: 76473 - protein, 10 aa, synthetic construct
  source 1..10: note = Seed: YDYLVSTQEF
YGYLVSTQEL

SEQ ID NO: 76474 - protein, 10 aa, synthetic construct
  source 1..10: note = Seed: YDYLVSTQEF
YGYLVSTQEM

SEQ ID NO: 76475 - protein, 10 aa, synthetic construct
  source 1..10: note = Seed: YDYLVSTQEF
YGYLVSTQEW

SEQ ID NO: 76476 - protein, 10 aa, synthetic construct
  source 1..10: note = Seed: YDYLVSTQEF
YGYLVSTQEY

SEQ ID NO: 76477 - protein, 9 aa, synthetic construct
  source 1..9: note = Seed: YNYLYRLFR
YGYLYRLFK

SEQ ID NO: 76478 - protein, 9 aa, synthetic construct
  source 1..9: note = Seed: YNYLYRLFR
YGYLYRLFR

SEQ ID NO: 76479 - protein, 10 aa, synthetic construct
  source 1..10: note = Seed: YNYLYRLFRK
YGYLYRLFRK

SEQ ID NO: 76480 - protein, 10 aa, synthetic construct
  source 1..10: note = Seed: YNYLYRLFRK
YGYLYRLFRR

SEQ ID NO: 76481 - protein, 11 aa, synthetic construct
  source 1..11: note = Seed: YDYYRYNLPTM
YGYYRYNLPTF

SEQ ID NO: 76482 - protein, 11 aa, synthetic construct
  source 1..11: note = Seed: YDYYRYNLPTM
YGYYRYNLPTW

SEQ ID NO: 76483 - protein, 10 aa, synthetic construct
  source 1..10: note = Seed: YGANKDGIIW
YHANKDGIIW

SEQ ID NO: 76484 - protein, 10 aa, synthetic construct
  source 1..10: note = Seed: YPANSIVCRF
YHANSIVCRW

SEQ ID NO: 76485 - protein, 9 aa, synthetic construct
  source 1..9: note = Seed: YRARAGEAA
YHARAGEAA

SEQ ID NO: 76486 - protein, 9 aa, synthetic construct
  source 1..9: note = Seed: YRARAGEAA
YHARAGEAF

SEQ ID NO: 76487 - protein, 9 aa, synthetic construct
  source 1..9: note = Seed: YRARAGEAA
YHARAGEAI

SEQ ID NO: 76488 - protein, 9 aa, synthetic construct
  source 1..9: note = Seed: YRARAGEAA
YHARAGEAL

SEQ ID NO: 76489 - protein, 9 aa, synthetic construct
  source 1..9: note = Seed: YRARAGEAA
YHARAGEAM

SEQ ID NO: 76490 - protein, 9 aa, synthetic construct
  source 1..9: note = Seed: YRARAGEAA
YHARAGEAV

SEQ ID NO: 76491 - protein, 10 aa, synthetic construct
  source 1..10: note = Seed: YKENSYTTTI
YHENSYTTTA

SEQ ID NO: 76492 - protein, 10 aa, synthetic construct
  source 1..10: note = Seed: YKENSYTTTI
YHENSYTTTF

SEQ ID NO: 76493 - protein, 10 aa, synthetic construct
  source 1..10: note = Seed: YKENSYTTTI
YHENSYTTTL

SEQ ID NO: 76494 - protein, 10 aa, synthetic construct
  source 1..10: note = Seed: YKENSYTTTI
YHENSYTTTM

SEQ ID NO: 76495 - protein, 10 aa, synthetic construct
  source 1..10: note = Seed: YKENSYTTTI
YHENSYTTTY

SEQ ID NO: 76496 - protein, 9 aa, synthetic construct
  source 1..9: note = Seed: YVFCTVNAL
YHFCTVNAA

SEQ ID NO: 76497 - protein, 9 aa, synthetic construct
  source 1..9: note = Seed: YVFCTVNAL
YHFCTVNAF

SEQ ID NO: 76498 - protein, 9 aa, synthetic construct
  source 1..9: note = Seed: YVFCTVNAL
YHFCTVNAI

SEQ ID NO: 76499 - protein, 9 aa, synthetic construct
  source 1..9: note = Seed: YVFCTVNAL
YHFCTVNAL

SEQ ID NO: 76500 - protein, 9 aa, synthetic construct
  source 1..9: note = Seed: YVFCTVNAL
YHFCTVNAM

SEQ ID NO: 76501 - protein, 9 aa, synthetic construct
  source 1..9: note = Seed: YVFCTVNAL
YHFCTVNAV

SEQ ID NO: 76502 - protein, 9 aa, synthetic construct
  source 1..9: note = Seed: YVFCTVNAL
YHFCTVNAY

SEQ ID NO: 76503 - protein, 9 aa, synthetic construct
  source 1..9: note = Seed: YIFFASFYY
YHFFASFYF

SEQ ID NO: 76504 - protein, 9 aa, synthetic construct
  source 1..9: note = Seed: YIFFASFYY
YHFFASFYK

SEQ ID NO: 76505 - protein, 9 aa, synthetic construct
  source 1..9: note = Seed: YIFFASFYY
YHFFASFYL

SEQ ID NO: 76506 - protein, 9 aa, synthetic construct
  source 1..9: note = Seed: YIFFASFYY
YHFFASFYM

SEQ ID NO: 76507 - protein, 9 aa, synthetic construct
  source 1..9: note = Seed: YIFFASFYY
YHFFASFYR

SEQ ID NO: 76508 - protein, 9 aa, synthetic construct
  source 1..9: note = Seed: YIFFASFYY
YHFFASFYY

SEQ ID NO: 76509 - protein, 10 aa, synthetic construct
  source 1..10: note = Seed: YIFFASFYYV
YHFFASFYYF

SEQ ID NO: 76510 - protein, 10 aa, synthetic construct
  source 1..10: note = Seed: YIFFASFYYV
YHFFASFYYH

SEQ ID NO: 76511 - protein, 10 aa, synthetic construct
  source 1..10: note = Seed: YIFFASFYYV
YHFFASFYYI

SEQ ID NO: 76512 - protein, 10 aa, synthetic construct
  source 1..10: note = Seed: YIFFASFYYV
YHFFASFYYK

SEQ ID NO: 76513 - protein, 10 aa, synthetic construct
  source 1..10: note = Seed: YIFFASFYYV
YHFFASFYYL

SEQ ID NO: 76514 - protein, 10 aa, synthetic construct
  source 1..10: note = Seed: YIFFASFYYV
YHFFASFYYM

SEQ ID NO: 76515 - protein, 10 aa, synthetic construct
  source 1..10: note = Seed: YIFFASFYYV
YHFFASFYYR

SEQ ID NO: 76516 - protein, 10 aa, synthetic construct
  source 1..10: note = Seed: YIFFASFYYV
YHFFASFYYV

SEQ ID NO: 76517 - protein, 11 aa, synthetic construct
  source 1..11: note = Seed: YIFFASFYYVW
YHFFASFYYVY

SEQ ID NO: 76518 - protein, 10 aa, synthetic construct
  source 1..10: note = Seed: YIFFASFYYV
YHFFASFYYW

SEQ ID NO: 76519 - protein, 10 aa, synthetic construct
  source 1..10: note = Seed: YIFFASFYYV
YHFFASFYYY

SEQ ID NO: 76520 - protein, 10 aa, synthetic construct
  source 1..10: note = Seed: YWFFSNYLKR
YHFFSNYLKR

SEQ ID NO: 76521 - protein, 9 aa, synthetic construct
  source 1..9: note = Seed: YWFFSNYLK
YHFFSNYLR

SEQ ID NO: 76522 - protein, 9 aa, synthetic construct
  source 1..9: note = Seed: YWFFSNYLK
YHFFSNYLY

SEQ ID NO: 76523 - protein, 10 aa, synthetic construct
  source 1..10: note = Seed: YSFLPGVYSV
YHFLPGVYSF

SEQ ID NO: 76524 - protein, 10 aa, synthetic construct
  source 1..10: note = Seed: YSFLPGVYSV
YHFLPGVYSI

SEQ ID NO: 76525 - protein, 10 aa, synthetic construct
  source 1..10: note = Seed: YSFLPGVYSV
YHFLPGVYSL

SEQ ID NO: 76526 - protein, 10 aa, synthetic construct
  source 1..10: note = Seed: YSFLPGVYSV
YHFLPGVYSM

SEQ ID NO: 76527 - protein, 10 aa, synthetic construct
  source 1..10: note = Seed: YSFLPGVYSV
YHFLPGVYSW

SEQ ID NO: 76528 - protein, 9 aa, synthetic construct
  source 1..9: note = Seed: YRFNGIGVT
YHFNGIGVA

SEQ ID NO: 76529 - protein, 9 aa, synthetic construct
  source 1..9: note = Seed: YHFRELGVV
YHFRELGVA

SEQ ID NO: 76530 - protein, 9 aa, synthetic construct
  source 1..9: note = Seed: YHFRELGVV
YHFRELGVL

SEQ ID NO: 76531 - protein, 9 aa, synthetic construct
  source 1..9: note = Seed: YHFRELGVV
YHFRELGVM

SEQ ID NO: 76532 - protein, 10 aa, synthetic construct
  source 1..10: note = Seed: YHFRELGVVH
YHFRELGVVF

SEQ ID NO: 76533 - protein, 10 aa, synthetic construct
  source 1..10: note = Seed: YHFRELGVVH
YHFRELGVVY

SEQ ID NO: 76534 - protein, 10 aa, synthetic construct
  source 1..10: note = Seed: YVFTGYRVTK
YHFTGYRVTR

SEQ ID NO: 76535 - protein, 9 aa, synthetic construct
  source 1..9: note = Seed: YFFTLLLQL
YHFTLLLQY

SEQ ID NO: 76536 - protein, 9 aa, synthetic construct
  source 1..9: note = Seed: YRGTTTYKL
YHGTTTYKL

SEQ ID NO: 76537 - protein, 11 aa, synthetic construct
  source 1..11: note = Seed: YVGYLQPRTFL
YHGYLQPRTFF

SEQ ID NO: 76538 - protein, 11 aa, synthetic construct
  source 1..11: note = Seed: YVGYLQPRTFL
YHGYLQPRTFW

SEQ ID NO: 76539 - protein, 10 aa, synthetic construct
  source 1..10: note = Seed: YVGYLQPRTF
YHGYLQPRTY

SEQ ID NO: 76540 - protein, 9 aa, synthetic construct
  source 1..9: note = Seed: YMHHMELPT
YHHHMELPF

SEQ ID NO: 76541 - protein, 9 aa, synthetic construct
  source 1..9: note = Seed: YMHHMELPT
YHHHMELPM

SEQ ID NO: 76542 - protein, 9 aa, synthetic construct
  source 1..9: note = Seed: YMHHMELPT
YHHHMELPY

SEQ ID NO: 76543 - protein, 9 aa, synthetic construct
  source 1..9: note = Seed: YFIASFRLF
YHIASFRLF

SEQ ID NO: 76544 - protein, 11 aa, synthetic construct
  source 1..11: note = Seed: YFIASFRLFAR
YHIASFRLFAR

SEQ ID NO: 76545 - protein, 10 aa, synthetic construct
  source 1..10: note = Seed: YFIASFRLFA
YHIASFRLFI

SEQ ID NO: 76546 - protein, 10 aa, synthetic construct
  source 1..10: note = Seed: YFIASFRLFA
YHIASFRLFL

SEQ ID NO: 76547 - protein, 10 aa, synthetic construct
  source 1..10: note = Seed: YFIASFRLFA
YHIASFRLFV

SEQ ID NO: 76548 - protein, 9 aa, synthetic construct
  source 1..9: note = Seed: YFIASFRLF
YHIASFRLL

SEQ ID NO: 76549 - protein, 9 aa, synthetic construct
  source 1..9: note = Seed: YFIASFRLF
YHIASFRLM

SEQ ID NO: 76550 - protein, 9 aa, synthetic construct
  source 1..9: note = Seed: YFIASFRLF
YHIASFRLY

SEQ ID NO: 76551 - protein, 10 aa, synthetic construct
  source 1..10: note = Seed: YIICISTKHF
YHICISTKHY

SEQ ID NO: 76552 - protein, 11 aa, synthetic construct
  source 1..11: note = Seed: YDKLQFTSLEI
YHKLQFTSLEV

SEQ ID NO: 76553 - protein, 9 aa, synthetic construct
  source 1..9: note = Seed: YIKWPWYIW
YHKWPWYIF

SEQ ID NO: 76554 - protein, 10 aa, synthetic construct
  source 1..10: note = Seed: YRLFRKSNLK
YHLFRKSNLK

SEQ ID NO: 76555 - protein, 10 aa, synthetic construct
  source 1..10: note = Seed: YRLFRKSNLK
YHLFRKSNLR

SEQ ID NO: 76556 - protein, 9 aa, synthetic construct
  source 1..9: note = Seed: YILFTRFFY
YHLFTRFFF

SEQ ID NO: 76557 - protein, 9 aa, synthetic construct
  source 1..9: note = Seed: YILFTRFFY
YHLFTRFFR

SEQ ID NO: 76558 - protein, 9 aa, synthetic construct
  source 1..9: note = Seed: YILFTRFFY
YHLFTRFFY

SEQ ID NO: 76559 - protein, 10 aa, synthetic construct
  source 1..10: note = Seed: YILFTRFFYV
YHLFTRFFYA

SEQ ID NO: 76560 - protein, 10 aa, synthetic construct
  source 1..10: note = Seed: YILFTRFFYV
YHLFTRFFYC

SEQ ID NO: 76561 - protein, 10 aa, synthetic construct
  source 1..10: note = Seed: YILFTRFFYV
YHLFTRFFYF

SEQ ID NO: 76562 - protein, 10 aa, synthetic construct
  source 1..10: note = Seed: YILFTRFFYV
YHLFTRFFYI

SEQ ID NO: 76563 - protein, 10 aa, synthetic construct
  source 1..10: note = Seed: YILFTRFFYV
YHLFTRFFYK

SEQ ID NO: 76564 - protein, 10 aa, synthetic construct
  source 1..10: note = Seed: YILFTRFFYV
YHLFTRFFYL

SEQ ID NO: 76565 - protein, 10 aa, synthetic construct
  source 1..10: note = Seed: YILFTRFFYV
YHLFTRFFYM

SEQ ID NO: 76566 - protein, 10 aa, synthetic construct
  source 1..10: note = Seed: YILFTRFFYV
YHLFTRFFYR

SEQ ID NO: 76567 - protein, 10 aa, synthetic construct
  source 1..10: note = Seed: YILFTRFFYV
YHLFTRFFYS

SEQ ID NO: 76568 - protein, 10 aa, synthetic construct
  source 1..10: note = Seed: YILFTRFFYV
YHLFTRFFYT

SEQ ID NO: 76569 - protein, 10 aa, synthetic construct
  source 1..10: note = Seed: YILFTRFFYV
YHLFTRFFYV

SEQ ID NO: 76570 - protein, 11 aa, synthetic construct
  source 1..11: note = Seed: YILFTRFFYVL
YHLFTRFFYVA

SEQ ID NO: 76571 - protein, 11 aa, synthetic construct
  source 1..11: note = Seed: YILFTRFFYVL
YHLFTRFFYVC

SEQ ID NO: 76572 - protein, 11 aa, synthetic construct
  source 1..11: note = Seed: YILFTRFFYVL
YHLFTRFFYVD

SEQ ID NO: 76573 - protein, 11 aa, synthetic construct
  source 1..11: note = Seed: YILFTRFFYVL
YHLFTRFFYVE

SEQ ID NO: 76574 - protein, 11 aa, synthetic construct
  source 1..11: note = Seed: YILFTRFFYVL
YHLFTRFFYVF

SEQ ID NO: 76575 - protein, 11 aa, synthetic construct
  source 1..11: note = Seed: YILFTRFFYVL
YHLFTRFFYVG

SEQ ID NO: 76576 - protein, 11 aa, synthetic construct
  source 1..11: note = Seed: YILFTRFFYVL
YHLFTRFFYVH

SEQ ID NO: 76577 - protein, 11 aa, synthetic construct
  source 1..11: note = Seed: YILFTRFFYVL
YHLFTRFFYVI

SEQ ID NO: 76578 - protein, 11 aa, synthetic construct
  source 1..11: note = Seed: YILFTRFFYVL
YHLFTRFFYVK

SEQ ID NO: 76579 - protein, 11 aa, synthetic construct
  source 1..11: note = Seed: YILFTRFFYVL
YHLFTRFFYVL

SEQ ID NO: 76580 - protein, 11 aa, synthetic construct
  source 1..11: note = Seed: YILFTRFFYVL
YHLFTRFFYVM

SEQ ID NO: 76581 - protein, 11 aa, synthetic construct
  source 1..11: note = Seed: YILFTRFFYVL
YHLFTRFFYVN

SEQ ID NO: 76582 - protein, 11 aa, synthetic construct
  source 1..11: note = Seed: YILFTRFFYVL
YHLFTRFFYVP

SEQ ID NO: 76583 - protein, 11 aa, synthetic construct
  source 1..11: note = Seed: YILFTRFFYVL
YHLFTRFFYVQ

SEQ ID NO: 76584 - protein, 11 aa, synthetic construct
  source 1..11: note = Seed: YILFTRFFYVL
YHLFTRFFYVR

SEQ ID NO: 76585 - protein, 11 aa, synthetic construct
  source 1..11: note = Seed: YILFTRFFYVL
YHLFTRFFYVS

SEQ ID NO: 76586 - protein, 11 aa, synthetic construct
  source 1..11: note = Seed: YILFTRFFYVL
YHLFTRFFYVT

SEQ ID NO: 76587 - protein, 11 aa, synthetic construct
  source 1..11: note = Seed: YILFTRFFYVL
YHLFTRFFYVV

SEQ ID NO: 76588 - protein, 11 aa, synthetic construct
  source 1..11: note = Seed: YILFTRFFYVL
YHLFTRFFYVW

SEQ ID NO: 76589 - protein, 11 aa, synthetic construct
  source 1..11: note = Seed: YILFTRFFYVL
YHLFTRFFYVY

SEQ ID NO: 76590 - protein, 10 aa, synthetic construct
  source 1..10: note = Seed: YILFTRFFYV
YHLFTRFFYY

SEQ ID NO: 76591 - protein, 9 aa, synthetic construct
  source 1..9: note = Seed: YKLGASQRV
YHLGASQRF

SEQ ID NO: 76592 - protein, 9 aa, synthetic construct
  source 1..9: note = Seed: YKLGASQRV
YHLGASQRY

SEQ ID NO: 76593 - protein, 10 aa, synthetic construct
  source 1..10: note = Seed: YSLLMPILTL
YHLLMPILTA

SEQ ID NO: 76594 - protein, 10 aa, synthetic construct
  source 1..10: note = Seed: YSLLMPILTL
YHLLMPILTI

SEQ ID NO: 76595 - protein, 10 aa, synthetic construct
  source 1..10: note = Seed: YSLLMPILTL
YHLLMPILTL

SEQ ID NO: 76596 - protein, 10 aa, synthetic construct
  source 1..10: note = Seed: YSLLMPILTL
YHLLMPILTV

SEQ ID NO: 76597 - protein, 11 aa, synthetic construct
  source 1..11: note = Seed: YHLMSFPQSAP
YHLMSFPQSAV

SEQ ID NO: 76598 - protein, 10 aa, synthetic construct
  source 1..10: note = Seed: YHLMSFPQSA
YHLMSFPQSI

SEQ ID NO: 76599 - protein, 10 aa, synthetic construct
  source 1..10: note = Seed: YHLMSFPQSA
YHLMSFPQSL

SEQ ID NO: 76600 - protein, 10 aa, synthetic construct
  source 1..10: note = Seed: YHLMSFPQSA
YHLMSFPQSM

SEQ ID NO: 76601 - protein, 10 aa, synthetic construct
  source 1..10: note = Seed: YHLMSFPQSA
YHLMSFPQST

SEQ ID NO: 76602 - protein, 10 aa, synthetic construct
  source 1..10: note = Seed: YHLMSFPQSA
YHLMSFPQSV

SEQ ID NO: 76603 - protein, 10 aa, synthetic construct
  source 1..10: note = Seed: YDLSVVNARL
YHLSVVNARA

SEQ ID NO: 76604 - protein, 10 aa, synthetic construct
  source 1..10: note = Seed: YDLSVVNARL
YHLSVVNARI

SEQ ID NO: 76605 - protein, 10 aa, synthetic construct
  source 1..10: note = Seed: YDLSVVNARL
YHLSVVNARL

SEQ ID NO: 76606 - protein, 10 aa, synthetic construct
  source 1..10: note = Seed: YDLSVVNARL
YHLSVVNARM

SEQ ID NO: 76607 - protein, 10 aa, synthetic construct
  source 1..10: note = Seed: YDLSVVNARL
YHLSVVNARV

SEQ ID NO: 76608 - protein, 8 aa, synthetic construct
  source 1..8: note = Seed: YTMADLVY
YHMADLVY

SEQ ID NO: 76609 - protein, 10 aa, synthetic construct
  source 1..10: note = Seed: YTMADLVYAL
YHMADLVYAA

SEQ ID NO: 76610 - protein, 10 aa, synthetic construct
  source 1..10: note = Seed: YTMADLVYAL
YHMADLVYAC

SEQ ID NO: 76611 - protein, 10 aa, synthetic construct
  source 1..10: note = Seed: YTMADLVYAL
YHMADLVYAF

SEQ ID NO: 76612 - protein, 10 aa, synthetic construct
  source 1..10: note = Seed: YTMADLVYAL
YHMADLVYAG

SEQ ID NO: 76613 - protein, 10 aa, synthetic construct
  source 1..10: note = Seed: YTMADLVYAL
YHMADLVYAI

SEQ ID NO: 76614 - protein, 10 aa, synthetic construct
  source 1..10: note = Seed: YTMADLVYAL
YHMADLVYAL

SEQ ID NO: 76615 - protein, 11 aa, synthetic construct
  source 1..11: note = Seed: YTMADLVYALR
YHMADLVYALA

SEQ ID NO: 76616 - protein, 11 aa, synthetic construct
  source 1..11: note = Seed: YTMADLVYALR
YHMADLVYALC

SEQ ID NO: 76617 - protein, 11 aa, synthetic construct
  source 1..11: note = Seed: YTMADLVYALR
YHMADLVYALD

SEQ ID NO: 76618 - protein, 11 aa, synthetic construct
  source 1..11: note = Seed: YTMADLVYALR
YHMADLVYALE

SEQ ID NO: 76619 - protein, 11 aa, synthetic construct
  source 1..11: note = Seed: YTMADLVYALR
YHMADLVYALF

SEQ ID NO: 76620 - protein, 11 aa, synthetic construct
  source 1..11: note = Seed: YTMADLVYALR
YHMADLVYALG

SEQ ID NO: 76621 - protein, 11 aa, synthetic construct
  source 1..11: note = Seed: YTMADLVYALR
YHMADLVYALH

SEQ ID NO: 76622 - protein, 11 aa, synthetic construct
  source 1..11: note = Seed: YTMADLVYALR
YHMADLVYALI

SEQ ID NO: 76623 - protein, 11 aa, synthetic construct
  source 1..11: note = Seed: YTMADLVYALR
YHMADLVYALK

SEQ ID NO: 76624 - protein, 11 aa, synthetic construct
  source 1..11: note = Seed: YTMADLVYALR
YHMADLVYALL

SEQ ID NO: 76625 - protein, 11 aa, synthetic construct
  source 1..11: note = Seed: YTMADLVYALR
YHMADLVYALM

SEQ ID NO: 76626 - protein, 11 aa, synthetic construct
  source 1..11: note = Seed: YTMADLVYALR
YHMADLVYALN

SEQ ID NO: 76627 - protein, 11 aa, synthetic construct
  source 1..11: note = Seed: YTMADLVYALR
YHMADLVYALP

SEQ ID NO: 76628 - protein, 11 aa, synthetic construct
  source 1..11: note = Seed: YTMADLVYALR
YHMADLVYALQ

SEQ ID NO: 76629 - protein, 11 aa, synthetic construct
  source 1..11: note = Seed: YTMADLVYALR
YHMADLVYALR

SEQ ID NO: 76630 - protein, 11 aa, synthetic construct
  source 1..11: note = Seed: YTMADLVYALR
YHMADLVYALS

SEQ ID NO: 76631 - protein, 11 aa, synthetic construct
  source 1..11: note = Seed: YTMADLVYALR
YHMADLVYALT

SEQ ID NO: 76632 - protein, 11 aa, synthetic construct
  source 1..11: note = Seed: YTMADLVYALR
YHMADLVYALV

SEQ ID NO: 76633 - protein, 11 aa, synthetic construct
  source 1..11: note = Seed: YTMADLVYALR
YHMADLVYALW

SEQ ID NO: 76634 - protein, 11 aa, synthetic construct
  source 1..11: note = Seed: YTMADLVYALR
YHMADLVYALY

SEQ ID NO: 76635 - protein, 10 aa, synthetic construct
  source 1..10: note = Seed: YTMADLVYAL
YHMADLVYAM

SEQ ID NO: 76636 - protein, 10 aa, synthetic construct
  source 1..10: note = Seed: YTMADLVYAL
YHMADLVYAS

SEQ ID NO: 76637 - protein, 10 aa, synthetic construct
  source 1..10: note = Seed: YTMADLVYAL
YHMADLVYAT

SEQ ID NO: 76638 - protein, 10 aa, synthetic construct
  source 1..10: note = Seed: YTMADLVYAL
YHMADLVYAV

SEQ ID NO: 76639 - protein, 10 aa, synthetic construct
  source 1..10: note = Seed: YTMADLVYAL
YHMADLVYAY

SEQ ID NO: 76640 - protein, 9 aa, synthetic construct
  source 1..9: note = Seed: YVMHANYIF
YHMHANYIF

SEQ ID NO: 76641 - protein, 10 aa, synthetic construct
  source 1..10: note = Seed: YVMHANYIFW
YHMHANYIFF

SEQ ID NO: 76642 - protein, 10 aa, synthetic construct
  source 1..10: note = Seed: YVMHANYIFW
YHMHANYIFY

SEQ ID NO: 76643 - protein, 9 aa, synthetic construct
  source 1..9: note = Seed: YVMHANYIF
YHMHANYIM

SEQ ID NO: 76644 - protein, 9 aa, synthetic construct
  source 1..9: note = Seed: YVMHANYIF
YHMHANYIW

SEQ ID NO: 76645 - protein, 9 aa, synthetic construct
  source 1..9: note = Seed: YVMHANYIF
YHMHANYIY

SEQ ID NO: 76646 - protein, 9 aa, synthetic construct
  source 1..9: note = Seed: YTNDKACPL
YHNDKACPF

SEQ ID NO: 76647 - protein, 9 aa, synthetic construct
  source 1..9: note = Seed: YTNDKACPL
YHNDKACPY

SEQ ID NO: 76648 - protein, 9 aa, synthetic construct
  source 1..9: note = Seed: YFNMVYMPA
YHNMVYMPF

SEQ ID NO: 76649 - protein, 9 aa, synthetic construct
  source 1..9: note = Seed: YFNMVYMPA
YHNMVYMPL

SEQ ID NO: 76650 - protein, 9 aa, synthetic construct
  source 1..9: note = Seed: YFNMVYMPA
YHNMVYMPM

SEQ ID NO: 76651 - protein, 10 aa, synthetic construct
  source 1..10: note = Seed: YQNNVFMSEA
YHNNVFMSEF

SEQ ID NO: 76652 - protein, 10 aa, synthetic construct
  source 1..10: note = Seed: YQNNVFMSEA
YHNNVFMSEY

SEQ ID NO: 76653 - protein, 9 aa, synthetic construct
  source 1..9: note = Seed: YQNNVFMSE
YHNNVFMSF

SEQ ID NO: 76654 - protein, 9 aa, synthetic construct
  source 1..9: note = Seed: YQNNVFMSE
YHNNVFMSL

SEQ ID NO: 76655 - protein, 9 aa, synthetic construct
  source 1..9: note = Seed: YQNNVFMSE
YHNNVFMSM

SEQ ID NO: 76656 - protein, 9 aa, synthetic construct
  source 1..9: note = Seed: YQNNVFMSE
YHNNVFMSY

SEQ ID NO: 76657 - protein, 9 aa, synthetic construct
  source 1..9: note = Seed: YVNTFSSTF
YHNTFSSTF

SEQ ID NO: 76658 - protein, 9 aa, synthetic construct
  source 1..9: note = Seed: YVNTFSSTF
YHNTFSSTL

SEQ ID NO: 76659 - protein, 9 aa, synthetic construct
  source 1..9: note = Seed: YVNTFSSTF
YHNTFSSTM

SEQ ID NO: 76660 - protein, 9 aa, synthetic construct
  source 1..9: note = Seed: YVNTFSSTF
YHNTFSSTY

SEQ ID NO: 76661 - protein, 10 aa, synthetic construct
  source 1..10: note = Seed: YTPHTVLQAV
YHPHTVLQAA

SEQ ID NO: 76662 - protein, 10 aa, synthetic construct
  source 1..10: note = Seed: YTPHTVLQAV
YHPHTVLQAI

SEQ ID NO: 76663 - protein, 10 aa, synthetic construct
  source 1..10: note = Seed: YTPHTVLQAV
YHPHTVLQAL

SEQ ID NO: 76664 - protein, 10 aa, synthetic construct
  source 1..10: note = Seed: YTPHTVLQAV
YHPHTVLQAM

SEQ ID NO: 76665 - protein, 10 aa, synthetic construct
  source 1..10: note = Seed: YTPHTVLQAV
YHPHTVLQAV

SEQ ID NO: 76666 - protein, 8 aa, synthetic construct
  source 1..8: note = Seed: YMPYFFTL
YHPYFFTF

SEQ ID NO: 76667 - protein, 9 aa, synthetic construct
  source 1..9: note = Seed: YMPYFFTLL
YHPYFFTLF

SEQ ID NO: 76668 - protein, 10 aa, synthetic construct
  source 1..10: note = Seed: YMPYFFTLLL
YHPYFFTLLA

SEQ ID NO: 76669 - protein, 10 aa, synthetic construct
  source 1..10: note = Seed: YMPYFFTLLL
YHPYFFTLLF

SEQ ID NO: 76670 - protein, 10 aa, synthetic construct
  source 1..10: note = Seed: YMPYFFTLLL
YHPYFFTLLL

SEQ ID NO: 76671 - protein, 10 aa, synthetic construct
  source 1..10: note = Seed: YMPYFFTLLL
YHPYFFTLLM

SEQ ID NO: 76672 - protein, 10 aa, synthetic construct
  source 1..10: note = Seed: YMPYFFTLLL
YHPYFFTLLT

SEQ ID NO: 76673 - protein, 10 aa, synthetic construct
  source 1..10: note = Seed: YMPYFFTLLL
YHPYFFTLLV

SEQ ID NO: 76674 - protein, 10 aa, synthetic construct
  source 1..10: note = Seed: YMPYFFTLLL
YHPYFFTLLW

SEQ ID NO: 76675 - protein, 10 aa, synthetic construct
  source 1..10: note = Seed: YMPYFFTLLL
YHPYFFTLLY

SEQ ID NO: 76676 - protein, 9 aa, synthetic construct
  source 1..9: note = Seed: YMPYFFTLL
YHPYFFTLM

SEQ ID NO: 76677 - protein, 9 aa, synthetic construct
  source 1..9: note = Seed: YMPYFFTLL
YHPYFFTLW

SEQ ID NO: 76678 - protein, 9 aa, synthetic construct
  source 1..9: note = Seed: YMPYFFTLL
YHPYFFTLY

SEQ ID NO: 76679 - protein, 9 aa, synthetic construct
  source 1..9: note = Seed: YQPYRVVVL
YHPYRVVVF

SEQ ID NO: 76680 - protein, 9 aa, synthetic construct
  source 1..9: note = Seed: YQPYRVVVL
YHPYRVVVL

SEQ ID NO: 76681 - protein, 10 aa, synthetic construct
  source 1..10: note = Seed: YQPYRVVVLS
YHPYRVVVLA

SEQ ID NO: 76682 - protein, 9 aa, synthetic construct
  source 1..9: note = Seed: YQPYRVVVL
YHPYRVVVM

SEQ ID NO: 76683 - protein, 9 aa, synthetic construct
  source 1..9: note = Seed: YQPYRVVVL
YHPYRVVVY

SEQ ID NO: 76684 - protein, 9 aa, synthetic construct
  source 1..9: note = Seed: YKQFDTYNL
YHQFDTYNI

SEQ ID NO: 76685 - protein, 9 aa, synthetic construct
  source 1..9: note = Seed: YKQFDTYNL
YHQFDTYNL

SEQ ID NO: 76686 - protein, 10 aa, synthetic construct
  source 1..10: note = Seed: YKQFDTYNLW
YHQFDTYNLF

SEQ ID NO: 76687 - protein, 10 aa, synthetic construct
  source 1..10: note = Seed: YKQFDTYNLW
YHQFDTYNLM

SEQ ID NO: 76688 - protein, 10 aa, synthetic construct
  source 1..10: note = Seed: YKQFDTYNLW
YHQFDTYNLY

SEQ ID NO: 76689 - protein, 9 aa, synthetic construct
  source 1..9: note = Seed: YKQFDTYNL
YHQFDTYNM

SEQ ID NO: 76690 - protein, 10 aa, synthetic construct
  source 1..10: note = Seed: YSQLMCQPIL
YHQLMCQPIF

SEQ ID NO: 76691 - protein, 11 aa, synthetic construct
  source 1..11: note = Seed: YSQLMCQPILL
YHQLMCQPILA

SEQ ID NO: 76692 - protein, 11 aa, synthetic construct
  source 1..11: note = Seed: YSQLMCQPILL
YHQLMCQPILI

SEQ ID NO: 76693 - protein, 11 aa, synthetic construct
  source 1..11: note = Seed: YSQLMCQPILL
YHQLMCQPILL

SEQ ID NO: 76694 - protein, 11 aa, synthetic construct
  source 1..11: note = Seed: YSQLMCQPILL
YHQLMCQPILM

SEQ ID NO: 76695 - protein, 11 aa, synthetic construct
  source 1..11: note = Seed: YSQLMCQPILL
YHQLMCQPILV

SEQ ID NO: 76696 - protein, 10 aa, synthetic construct
  source 1..10: note = Seed: YSQLMCQPIL
YHQLMCQPIY

SEQ ID NO: 76697 - protein, 9 aa, synthetic construct
  source 1..9: note = Seed: YYQNNVFMS
YHQNNVFMF

SEQ ID NO: 76698 - protein, 9 aa, synthetic construct
  source 1..9: note = Seed: YYQNNVFMS
YHQNNVFMW

SEQ ID NO: 76699 - protein, 9 aa, synthetic construct
  source 1..9: note = Seed: YLQPRTFLL
YHQPRTFLF

SEQ ID NO: 76700 - protein, 9 aa, synthetic construct
  source 1..9: note = Seed: YLQPRTFLL
YHQPRTFLI

SEQ ID NO: 76701 - protein, 9 aa, synthetic construct
  source 1..9: note = Seed: YLQPRTFLL
YHQPRTFLL

SEQ ID NO: 76702 - protein, 9 aa, synthetic construct
  source 1..9: note = Seed: YLQPRTFLL
YHQPRTFLM

SEQ ID NO: 76703 - protein, 9 aa, synthetic construct
  source 1..9: note = Seed: YLQPRTFLL
YHQPRTFLW

SEQ ID NO: 76704 - protein, 9 aa, synthetic construct
  source 1..9: note = Seed: YLQPRTFLL
YHQPRTFLY

SEQ ID NO: 76705 - protein, 10 aa, synthetic construct
  source 1..10: note = Seed: YPQVNGLTSI
YHQVNGLTSF

SEQ ID NO: 76706 - protein, 10 aa, synthetic construct
  source 1..10: note = Seed: YPQVNGLTSI
YHQVNGLTSI

SEQ ID NO: 76707 - protein, 10 aa, synthetic construct
  source 1..10: note = Seed: YPQVNGLTSI
YHQVNGLTSL

SEQ ID NO: 76708 - protein, 10 aa, synthetic construct
  source 1..10: note = Seed: YPQVNGLTSI
YHQVNGLTSM

SEQ ID NO: 76709 - protein, 10 aa, synthetic construct
  source 1..10: note = Seed: YPQVNGLTSI
YHQVNGLTSV

SEQ ID NO: 76710 - protein, 10 aa, synthetic construct
  source 1..10: note = Seed: YPQVNGLTSI
YHQVNGLTSY

SEQ ID NO: 76711 - protein, 9 aa, synthetic construct
  source 1..9: note = Seed: YKRDAPAHI
YHRDAPAHF

SEQ ID NO: 76712 - protein, 9 aa, synthetic construct
  source 1..9: note = Seed: YKRDAPAHI
YHRDAPAHY

SEQ ID NO: 76713 - protein, 10 aa, synthetic construct
  source 1..10: note = Seed: YRRLISMMGF
YHRLISMMGF

SEQ ID NO: 76714 - protein, 10 aa, synthetic construct
  source 1..10: note = Seed: YRRLISMMGF
YHRLISMMGI

SEQ ID NO: 76715 - protein, 10 aa, synthetic construct
  source 1..10: note = Seed: YRRLISMMGF
YHRLISMMGL

SEQ ID NO: 76716 - protein, 10 aa, synthetic construct
  source 1..10: note = Seed: YRRLISMMGF
YHRLISMMGM

SEQ ID NO: 76717 - protein, 10 aa, synthetic construct
  source 1..10: note = Seed: YRRLISMMGF
YHRLISMMGY

SEQ ID NO: 76718 - protein, 9 aa, synthetic construct
  source 1..9: note = Seed: YFRLTLGVY
YHRLTLGVF

SEQ ID NO: 76719 - protein, 9 aa, synthetic construct
  source 1..9: note = Seed: YFRLTLGVY
YHRLTLGVM

SEQ ID NO: 76720 - protein, 9 aa, synthetic construct
  source 1..9: note = Seed: YFRLTLGVY
YHRLTLGVY

SEQ ID NO: 76721 - protein, 9 aa, synthetic construct
  source 1..9: note = Seed: YYRSLPGVF
YHRSLPGVF

SEQ ID NO: 76722 - protein, 9 aa, synthetic construct
  source 1..9: note = Seed: YYRSLPGVF
YHRSLPGVY

SEQ ID NO: 76723 - protein, 9 aa, synthetic construct
  source 1..9: note = Seed: YYRYNLPTM
YHRYNLPTF

SEQ ID NO: 76724 - protein, 9 aa, synthetic construct
  source 1..9: note = Seed: YYRYNLPTM
YHRYNLPTL

SEQ ID NO: 76725 - protein, 9 aa, synthetic construct
  source 1..9: note = Seed: YYRYNLPTM
YHRYNLPTM

SEQ ID NO: 76726 - protein, 10 aa, synthetic construct
  source 1..10: note = Seed: YYRYNLPTMC
YHRYNLPTMF

SEQ ID NO: 76727 - protein, 10 aa, synthetic construct
  source 1..10: note = Seed: YYRYNLPTMC
YHRYNLPTMI

SEQ ID NO: 76728 - protein, 10 aa, synthetic construct
  source 1..10: note = Seed: YYRYNLPTMC
YHRYNLPTML

SEQ ID NO: 76729 - protein, 10 aa, synthetic construct
  source 1..10: note = Seed: YYRYNLPTMC
YHRYNLPTMM

SEQ ID NO: 76730 - protein, 10 aa, synthetic construct
  source 1..10: note = Seed: YYRYNLPTMC
YHRYNLPTMV

SEQ ID NO: 76731 - protein, 9 aa, synthetic construct
  source 1..9: note = Seed: YYRYNLPTM
YHRYNLPTY

SEQ ID NO: 76732 - protein, 10 aa, synthetic construct
  source 1..10: note = Seed: YSRYRIGNYK
YHRYRIGNYF

SEQ ID NO: 76733 - protein, 10 aa, synthetic construct
  source 1..10: note = Seed: YSRYRIGNYK
YHRYRIGNYK

SEQ ID NO: 76734 - protein, 11 aa, synthetic construct
  source 1..11: note = Seed: YSRYRIGNYKL
YHRYRIGNYKF

SEQ ID NO: 76735 - protein, 10 aa, synthetic construct
  source 1..10: note = Seed: YSRYRIGNYK
YHRYRIGNYL

SEQ ID NO: 76736 - protein, 10 aa, synthetic construct
  source 1..10: note = Seed: YSRYRIGNYK
YHRYRIGNYM

SEQ ID NO: 76737 - protein, 10 aa, synthetic construct
  source 1..10: note = Seed: YSRYRIGNYK
YHRYRIGNYR

SEQ ID NO: 76738 - protein, 9 aa, synthetic construct
  source 1..9: note = Seed: YSSANNCTF
YHSANNCTF

SEQ ID NO: 76739 - protein, 11 aa, synthetic construct
  source 1..11: note = Seed: YSSANNCTFEY
YHSANNCTFEW

SEQ ID NO: 76740 - protein, 9 aa, synthetic construct
  source 1..9: note = Seed: YSSANNCTF
YHSANNCTY

SEQ ID NO: 76741 - protein, 9 aa, synthetic construct
  source 1..9: note = Seed: YNSASFSTF
YHSASFSTF

SEQ ID NO: 76742 - protein, 10 aa, synthetic construct
  source 1..10: note = Seed: YNSASFSTFK
YHSASFSTFK

SEQ ID NO: 76743 - protein, 10 aa, synthetic construct
  source 1..10: note = Seed: YNSASFSTFK
YHSASFSTFR

SEQ ID NO: 76744 - protein, 9 aa, synthetic construct
  source 1..9: note = Seed: YNSASFSTF
YHSASFSTL

SEQ ID NO: 76745 - protein, 9 aa, synthetic construct
  source 1..9: note = Seed: YNSASFSTF
YHSASFSTM

SEQ ID NO: 76746 - protein, 9 aa, synthetic construct
  source 1..9: note = Seed: YNSASFSTF
YHSASFSTY

SEQ ID NO: 76747 - protein, 9 aa, synthetic construct
  source 1..9: note = Seed: YASAVVLLI
YHSAVVLLF

SEQ ID NO: 76748 - protein, 10 aa, synthetic construct
  source 1..10: note = Seed: YASAVVLLIL
YHSAVVLLIW

SEQ ID NO: 76749 - protein, 9 aa, synthetic construct
  source 1..9: note = Seed: YASAVVLLI
YHSAVVLLM

SEQ ID NO: 76750 - protein, 9 aa, synthetic construct
  source 1..9: note = Seed: YASAVVLLI
YHSAVVLLY

SEQ ID NO: 76751 - protein, 11 aa, synthetic construct
  source 1..11: note = Seed: YYSLLMPILTL
YHSLLMPILTV

SEQ ID NO: 76752 - protein, 11 aa, synthetic construct
  source 1..11: note = Seed: YRSLPGVFCGV
YHSLPGVFCGI

SEQ ID NO: 76753 - protein, 11 aa, synthetic construct
  source 1..11: note = Seed: YRSLPGVFCGV
YHSLPGVFCGV

SEQ ID NO: 76754 - protein, 10 aa, synthetic construct
  source 1..10: note = Seed: YESLRPDTRY
YHSLRPDTRF

SEQ ID NO: 76755 - protein, 10 aa, synthetic construct
  source 1..10: note = Seed: YESLRPDTRY
YHSLRPDTRW

SEQ ID NO: 76756 - protein, 10 aa, synthetic construct
  source 1..10: note = Seed: YTSNPTTFHL
YHSNPTTFHF

SEQ ID NO: 76757 - protein, 10 aa, synthetic construct
  source 1..10: note = Seed: YTSNPTTFHL
YHSNPTTFHW

SEQ ID NO: 76758 - protein, 10 aa, synthetic construct
  source 1..10: note = Seed: YTSNPTTFHL
YHSNPTTFHY

SEQ ID NO: 76759 - protein, 10 aa, synthetic construct
  source 1..10: note = Seed: YLTFYLTNDV
YHTFYLTNDV

SEQ ID NO: 76760 - protein, 10 aa, synthetic construct
  source 1..10: note = Seed: YLTNDVSFLA
YHTNDVSFLA

SEQ ID NO: 76761 - protein, 10 aa, synthetic construct
  source 1..10: note = Seed: YLTNDVSFLA
YHTNDVSFLI

SEQ ID NO: 76762 - protein, 10 aa, synthetic construct
  source 1..10: note = Seed: YLTNDVSFLA
YHTNDVSFLL

SEQ ID NO: 76763 - protein, 10 aa, synthetic construct
  source 1..10: note = Seed: YLTNDVSFLA
YHTNDVSFLM

SEQ ID NO: 76764 - protein, 10 aa, synthetic construct
  source 1..10: note = Seed: YLTNDVSFLA
YHTNDVSFLV

SEQ ID NO: 76765 - protein, 10 aa, synthetic construct
  source 1..10: note = Seed: YFTSDYYQLY
YHTSDYYQLK

SEQ ID NO: 76766 - protein, 10 aa, synthetic construct
  source 1..10: note = Seed: YFTSDYYQLY
YHTSDYYQLR

SEQ ID NO: 76767 - protein, 10 aa, synthetic construct
  source 1..10: note = Seed: YFTSDYYQLY
YHTSDYYQLW

SEQ ID NO: 76768 - protein, 10 aa, synthetic construct
  source 1..10: note = Seed: YFTSDYYQLY
YHTSDYYQLY

SEQ ID NO: 76769 - protein, 9 aa, synthetic construct
  source 1..9: note = Seed: YYTSNPTTF
YHTSNPTTF

SEQ ID NO: 76770 - protein, 11 aa, synthetic construct
  source 1..11: note = Seed: YYTSNPTTFHL
YHTSNPTTFHF

SEQ ID NO: 76771 - protein, 11 aa, synthetic construct
  source 1..11: note = Seed: YYTSNPTTFHL
YHTSNPTTFHW

SEQ ID NO: 76772 - protein, 9 aa, synthetic construct
  source 1..9: note = Seed: YYTSNPTTF
YHTSNPTTY

SEQ ID NO: 76773 - protein, 10 aa, synthetic construct
  source 1..10: note = Seed: YTTTIKPVTY
YHTTIKPVTW

SEQ ID NO: 76774 - protein, 11 aa, synthetic construct
  source 1..11: note = Seed: YTTTIKPVTYK
YHTTIKPVTYR

SEQ ID NO: 76775 - protein, 9 aa, synthetic construct
  source 1..9: note = Seed: YYVGYLQPR
YHVGYLQPM

SEQ ID NO: 76776 - protein, 9 aa, synthetic construct
  source 1..9: note = Seed: YQVNGYPNM
YHVNGYPNF

SEQ ID NO: 76777 - protein, 9 aa, synthetic construct
  source 1..9: note = Seed: YQVNGYPNM
YHVNGYPNL

SEQ ID NO: 76778 - protein, 9 aa, synthetic construct
  source 1..9: note = Seed: YQVNGYPNM
YHVNGYPNY

SEQ ID NO: 76779 - protein, 10 aa, synthetic construct
  source 1..10: note = Seed: YLVSTQEFRY
YHVSTQEFRY

SEQ ID NO: 76780 - protein, 9 aa, synthetic construct
  source 1..9: note = Seed: YFVVKRHTF
YHVVKRHTY

SEQ ID NO: 76781 - protein, 10 aa, synthetic construct
  source 1..10: note = Seed: YRVVVLSFEL
YHVVVLSFEL

SEQ ID NO: 76782 - protein, 10 aa, synthetic construct
  source 1..10: note = Seed: YYVWKSYVHV
YHVWKSYVHV

SEQ ID NO: 76783 - protein, 10 aa, synthetic construct
  source 1..10: note = Seed: YVYANGGKGF
YHYANGGKGF

SEQ ID NO: 76784 - protein, 10 aa, synthetic construct
  source 1..10: note = Seed: YVYANGGKGF
YHYANGGKGM

SEQ ID NO: 76785 - protein, 10 aa, synthetic construct
  source 1..10: note = Seed: YVYANGGKGF
YHYANGGKGY

SEQ ID NO: 76786 - protein, 11 aa, synthetic construct
  source 1..11: note = Seed: YLYFIKGLNNL
YHYFIKGLNNF

SEQ ID NO: 76787 - protein, 10 aa, synthetic construct
  source 1..10: note = Seed: YDYLVSTQEF
YHYLVSTQEF

SEQ ID NO: 76788 - protein, 11 aa, synthetic construct
  source 1..11: note = Seed: YDYLVSTQEFR
YHYLVSTQEFF

SEQ ID NO: 76789 - protein, 10 aa, synthetic construct
  source 1..10: note = Seed: YDYLVSTQEF
YHYLVSTQEI

SEQ ID NO: 76790 - protein, 10 aa, synthetic construct
  source 1..10: note = Seed: YDYLVSTQEF
YHYLVSTQEL

SEQ ID NO: 76791 - protein, 10 aa, synthetic construct
  source 1..10: note = Seed: YDYLVSTQEF
YHYLVSTQEM

SEQ ID NO: 76792 - protein, 10 aa, synthetic construct
  source 1..10: note = Seed: YDYLVSTQEF
YHYLVSTQEW

SEQ ID NO: 76793 - protein, 10 aa, synthetic construct
  source 1..10: note = Seed: YDYLVSTQEF
YHYLVSTQEY

SEQ ID NO: 76794 - protein, 9 aa, synthetic construct
  source 1..9: note = Seed: YNYLYRLFR
YHYLYRLFR

SEQ ID NO: 76795 - protein, 10 aa, synthetic construct
  source 1..10: note = Seed: YNYLYRLFRK
YHYLYRLFRR

SEQ ID NO: 76796 - protein, 9 aa, synthetic construct
  source 1..9: note = Seed: YRYNLPTMC
YHYNLPTMA

SEQ ID NO: 76797 - protein, 11 aa, synthetic construct
  source 1..11: note = Seed: YDYYRYNLPTM
YHYYRYNLPTF

SEQ ID NO: 76798 - protein, 11 aa, synthetic construct
  source 1..11: note = Seed: YDYYRYNLPTM
YHYYRYNLPTM

SEQ ID NO: 76799 - protein, 11 aa, synthetic construct
  source 1..11: note = Seed: YDYYRYNLPTM
YHYYRYNLPTW

SEQ ID NO: 76800 - protein, 10 aa, synthetic construct
  source 1..10: note = Seed: YGANKDGIIW
YIANKDGIIW

SEQ ID NO: 76801 - protein, 9 aa, synthetic construct
  source 1..9: note = Seed: YPANSIVCR
YIANSIVCK

SEQ ID NO: 76802 - protein, 9 aa, synthetic construct
  source 1..9: note = Seed: YPANSIVCR
YIANSIVCR

SEQ ID NO: 76803 - protein, 10 aa, synthetic construct
  source 1..10: note = Seed: YPANSIVCRF
YIANSIVCRW

SEQ ID NO: 76804 - protein, 9 aa, synthetic construct
  source 1..9: note = Seed: YIATNGPLK
YIATNGPLR

SEQ ID NO: 76805 - protein, 9 aa, synthetic construct
  source 1..9: note = Seed: YAAVINGDR
YIAVINGDR

SEQ ID NO: 76806 - protein, 10 aa, synthetic construct
  source 1..10: note = Seed: YFCTCYFGLF
YICTCYFGLY

SEQ ID NO: 76807 - protein, 8 aa, synthetic construct
  source 1..8: note = Seed: YTEISFML
YIEISFMV

SEQ ID NO: 76808 - protein, 10 aa, synthetic construct
  source 1..10: note = Seed: YKENSYTTTI
YIENSYTTTA

SEQ ID NO: 76809 - protein, 10 aa, synthetic construct
  source 1..10: note = Seed: YKENSYTTTI
YIENSYTTTF

SEQ ID NO: 76810 - protein, 10 aa, synthetic construct
  source 1..10: note = Seed: YKENSYTTTI
YIENSYTTTL

SEQ ID NO: 76811 - protein, 10 aa, synthetic construct
  source 1..10: note = Seed: YKENSYTTTI
YIENSYTTTM

SEQ ID NO: 76812 - protein, 10 aa, synthetic construct
  source 1..10: note = Seed: YKENSYTTTI
YIENSYTTTY

SEQ ID NO: 76813 - protein, 9 aa, synthetic construct
  source 1..9: note = Seed: YVFCTVNAL
YIFCTVNAA

SEQ ID NO: 76814 - protein, 9 aa, synthetic construct
  source 1..9: note = Seed: YVFCTVNAL
YIFCTVNAF

SEQ ID NO: 76815 - protein, 9 aa, synthetic construct
  source 1..9: note = Seed: YVFCTVNAL
YIFCTVNAI

SEQ ID NO: 76816 - protein, 9 aa, synthetic construct
  source 1..9: note = Seed: YVFCTVNAL
YIFCTVNAL

SEQ ID NO: 76817 - protein, 9 aa, synthetic construct
  source 1..9: note = Seed: YVFCTVNAL
YIFCTVNAM

SEQ ID NO: 76818 - protein, 9 aa, synthetic construct
  source 1..9: note = Seed: YVFCTVNAL
YIFCTVNAT

SEQ ID NO: 76819 - protein, 9 aa, synthetic construct
  source 1..9: note = Seed: YVFCTVNAL
YIFCTVNAV

SEQ ID NO: 76820 - protein, 9 aa, synthetic construct
  source 1..9: note = Seed: YVFCTVNAL
YIFCTVNAY

SEQ ID NO: 76821 - protein, 9 aa, synthetic construct
  source 1..9: note = Seed: YIFFASFYY
YIFFASFYA

SEQ ID NO: 76822 - protein, 9 aa, synthetic construct
  source 1..9: note = Seed: YIFFASFYY
YIFFASFYC

SEQ ID NO: 76823 - protein, 9 aa, synthetic construct
  source 1..9: note = Seed: YIFFASFYY
YIFFASFYF

SEQ ID NO: 76824 - protein, 9 aa, synthetic construct
  source 1..9: note = Seed: YIFFASFYY
YIFFASFYH

SEQ ID NO: 76825 - protein, 9 aa, synthetic construct
  source 1..9: note = Seed: YIFFASFYY
YIFFASFYI

SEQ ID NO: 76826 - protein, 9 aa, synthetic construct
  source 1..9: note = Seed: YIFFASFYY
YIFFASFYK

SEQ ID NO: 76827 - protein, 9 aa, synthetic construct
  source 1..9: note = Seed: YIFFASFYY
YIFFASFYL

SEQ ID NO: 76828 - protein, 9 aa, synthetic construct
  source 1..9: note = Seed: YIFFASFYY
YIFFASFYM

SEQ ID NO: 76829 - protein, 9 aa, synthetic construct
  source 1..9: note = Seed: YIFFASFYY
YIFFASFYQ

SEQ ID NO: 76830 - protein, 9 aa, synthetic construct
  source 1..9: note = Seed: YIFFASFYY
YIFFASFYR

SEQ ID NO: 76831 - protein, 9 aa, synthetic construct
  source 1..9: note = Seed: YIFFASFYY
YIFFASFYS

SEQ ID NO: 76832 - protein, 9 aa, synthetic construct
  source 1..9: note = Seed: YIFFASFYY
YIFFASFYT

SEQ ID NO: 76833 - protein, 9 aa, synthetic construct
  source 1..9: note = Seed: YIFFASFYY
YIFFASFYV

SEQ ID NO: 76834 - protein, 9 aa, synthetic construct
  source 1..9: note = Seed: YIFFASFYY
YIFFASFYW

SEQ ID NO: 76835 - protein, 10 aa, synthetic construct
  source 1..10: note = Seed: YIFFASFYYV
YIFFASFYYA

SEQ ID NO: 76836 - protein, 10 aa, synthetic construct
  source 1..10: note = Seed: YIFFASFYYV
YIFFASFYYC

SEQ ID NO: 76837 - protein, 10 aa, synthetic construct
  source 1..10: note = Seed: YIFFASFYYV
YIFFASFYYD

SEQ ID NO: 76838 - protein, 10 aa, synthetic construct
  source 1..10: note = Seed: YIFFASFYYV
YIFFASFYYE

SEQ ID NO: 76839 - protein, 10 aa, synthetic construct
  source 1..10: note = Seed: YIFFASFYYV
YIFFASFYYF

SEQ ID NO: 76840 - protein, 10 aa, synthetic construct
  source 1..10: note = Seed: YIFFASFYYV
YIFFASFYYG

SEQ ID NO: 76841 - protein, 10 aa, synthetic construct
  source 1..10: note = Seed: YIFFASFYYV
YIFFASFYYH

SEQ ID NO: 76842 - protein, 10 aa, synthetic construct
  source 1..10: note = Seed: YIFFASFYYV
YIFFASFYYI

SEQ ID NO: 76843 - protein, 10 aa, synthetic construct
  source 1..10: note = Seed: YIFFASFYYV
YIFFASFYYK

SEQ ID NO: 76844 - protein, 10 aa, synthetic construct
  source 1..10: note = Seed: YIFFASFYYV
YIFFASFYYL

SEQ ID NO: 76845 - protein, 10 aa, synthetic construct
  source 1..10: note = Seed: YIFFASFYYV
YIFFASFYYM

SEQ ID NO: 76846 - protein, 10 aa, synthetic construct
  source 1..10: note = Seed: YIFFASFYYV
YIFFASFYYN

SEQ ID NO: 76847 - protein, 10 aa, synthetic construct
  source 1..10: note = Seed: YIFFASFYYV
YIFFASFYYP

SEQ ID NO: 76848 - protein, 10 aa, synthetic construct
  source 1..10: note = Seed: YIFFASFYYV
YIFFASFYYQ

SEQ ID NO: 76849 - protein, 10 aa, synthetic construct
  source 1..10: note = Seed: YIFFASFYYV
YIFFASFYYR

SEQ ID NO: 76850 - protein, 10 aa, synthetic construct
  source 1..10: note = Seed: YIFFASFYYV
YIFFASFYYS

SEQ ID NO: 76851 - protein, 10 aa, synthetic construct
  source 1..10: note = Seed: YIFFASFYYV
YIFFASFYYT

SEQ ID NO: 76852 - protein, 11 aa, synthetic construct
  source 1..11: note = Seed: YIFFASFYYVW
YIFFASFYYVA

SEQ ID NO: 76853 - protein, 11 aa, synthetic construct
  source 1..11: note = Seed: YIFFASFYYVW
YIFFASFYYVC

SEQ ID NO: 76854 - protein, 11 aa, synthetic construct
  source 1..11: note = Seed: YIFFASFYYVW
YIFFASFYYVD

SEQ ID NO: 76855 - protein, 11 aa, synthetic construct
  source 1..11: note = Seed: YIFFASFYYVW
YIFFASFYYVE

SEQ ID NO: 76856 - protein, 11 aa, synthetic construct
  source 1..11: note = Seed: YIFFASFYYVW
YIFFASFYYVF

SEQ ID NO: 76857 - protein, 11 aa, synthetic construct
  source 1..11: note = Seed: YIFFASFYYVW
YIFFASFYYVG

SEQ ID NO: 76858 - protein, 11 aa, synthetic construct
  source 1..11: note = Seed: YIFFASFYYVW
YIFFASFYYVH

SEQ ID NO: 76859 - protein, 11 aa, synthetic construct
  source 1..11: note = Seed: YIFFASFYYVW
YIFFASFYYVI

SEQ ID NO: 76860 - protein, 11 aa, synthetic construct
  source 1..11: note = Seed: YIFFASFYYVW
YIFFASFYYVK

SEQ ID NO: 76861 - protein, 11 aa, synthetic construct
  source 1..11: note = Seed: YIFFASFYYVW
YIFFASFYYVL

SEQ ID NO: 76862 - protein, 11 aa, synthetic construct
  source 1..11: note = Seed: YIFFASFYYVW
YIFFASFYYVM

SEQ ID NO: 76863 - protein, 11 aa, synthetic construct
  source 1..11: note = Seed: YIFFASFYYVW
YIFFASFYYVN

SEQ ID NO: 76864 - protein, 11 aa, synthetic construct
  source 1..11: note = Seed: YIFFASFYYVW
YIFFASFYYVP

SEQ ID NO: 76865 - protein, 11 aa, synthetic construct
  source 1..11: note = Seed: YIFFASFYYVW
YIFFASFYYVQ

SEQ ID NO: 76866 - protein, 11 aa, synthetic construct
  source 1..11: note = Seed: YIFFASFYYVW
YIFFASFYYVR

SEQ ID NO: 76867 - protein, 11 aa, synthetic construct
  source 1..11: note = Seed: YIFFASFYYVW
YIFFASFYYVS

SEQ ID NO: 76868 - protein, 11 aa, synthetic construct
  source 1..11: note = Seed: YIFFASFYYVW
YIFFASFYYVT

SEQ ID NO: 76869 - protein, 11 aa, synthetic construct
  source 1..11: note = Seed: YIFFASFYYVW
YIFFASFYYVV

SEQ ID NO: 76870 - protein, 11 aa, synthetic construct
  source 1..11: note = Seed: YIFFASFYYVW
YIFFASFYYVY

SEQ ID NO: 76871 - protein, 10 aa, synthetic construct
  source 1..10: note = Seed: YIFFASFYYV
YIFFASFYYW

SEQ ID NO: 76872 - protein, 10 aa, synthetic construct
  source 1..10: note = Seed: YIFFASFYYV
YIFFASFYYY

SEQ ID NO: 76873 - protein, 9 aa, synthetic construct
  source 1..9: note = Seed: YWFFSNYLK
YIFFSNYLF

SEQ ID NO: 76874 - protein, 9 aa, synthetic construct
  source 1..9: note = Seed: YWFFSNYLK
YIFFSNYLH

SEQ ID NO: 76875 - protein, 9 aa, synthetic construct
  source 1..9: note = Seed: YWFFSNYLK
YIFFSNYLK

SEQ ID NO: 76876 - protein, 10 aa, synthetic construct
  source 1..10: note = Seed: YWFFSNYLKR
YIFFSNYLKK

SEQ ID NO: 76877 - protein, 10 aa, synthetic construct
  source 1..10: note = Seed: YWFFSNYLKR
YIFFSNYLKR

SEQ ID NO: 76878 - protein, 11 aa, synthetic construct
  source 1..11: note = Seed: YWFFSNYLKRR
YIFFSNYLKRR

SEQ ID NO: 76879 - protein, 10 aa, synthetic construct
  source 1..10: note = Seed: YWFFSNYLKR
YIFFSNYLKY

SEQ ID NO: 76880 - protein, 9 aa, synthetic construct
  source 1..9: note = Seed: YWFFSNYLK
YIFFSNYLM

SEQ ID NO: 76881 - protein, 9 aa, synthetic construct
  source 1..9: note = Seed: YWFFSNYLK
YIFFSNYLR

SEQ ID NO: 76882 - protein, 9 aa, synthetic construct
  source 1..9: note = Seed: YWFFSNYLK
YIFFSNYLY

SEQ ID NO: 76883 - protein, 10 aa, synthetic construct
  source 1..10: note = Seed: YSFLPGVYSV
YIFLPGVYSA

SEQ ID NO: 76884 - protein, 10 aa, synthetic construct
  source 1..10: note = Seed: YSFLPGVYSV
YIFLPGVYSF

SEQ ID NO: 76885 - protein, 10 aa, synthetic construct
  source 1..10: note = Seed: YSFLPGVYSV
YIFLPGVYSI

SEQ ID NO: 76886 - protein, 10 aa, synthetic construct
  source 1..10: note = Seed: YSFLPGVYSV
YIFLPGVYSL

SEQ ID NO: 76887 - protein, 10 aa, synthetic construct
  source 1..10: note = Seed: YSFLPGVYSV
YIFLPGVYSM

SEQ ID NO: 76888 - protein, 10 aa, synthetic construct
  source 1..10: note = Seed: YSFLPGVYSV
YIFLPGVYSV

SEQ ID NO: 76889 - protein, 10 aa, synthetic construct
  source 1..10: note = Seed: YSFLPGVYSV
YIFLPGVYSW

SEQ ID NO: 76890 - protein, 9 aa, synthetic construct
  source 1..9: note = Seed: YSFLPGVYS
YIFLPGVYV

SEQ ID NO: 76891 - protein, 8 aa, synthetic construct
  source 1..8: note = Seed: YYFMRFRR
YIFMRFRR

SEQ ID NO: 76892 - protein, 9 aa, synthetic construct
  source 1..9: note = Seed: YGFQPTNGV
YIFQPTNGA

SEQ ID NO: 76893 - protein, 9 aa, synthetic construct
  source 1..9: note = Seed: YGFQPTNGV
YIFQPTNGI

SEQ ID NO: 76894 - protein, 9 aa, synthetic construct
  source 1..9: note = Seed: YGFQPTNGV
YIFQPTNGL

SEQ ID NO: 76895 - protein, 9 aa, synthetic construct
  source 1..9: note = Seed: YGFQPTNGV
YIFQPTNGM

SEQ ID NO: 76896 - protein, 9 aa, synthetic construct
  source 1..9: note = Seed: YGFQPTNGV
YIFQPTNGV

SEQ ID NO: 76897 - protein, 10 aa, synthetic construct
  source 1..10: note = Seed: YHFRELGVVH
YIFRELGVVF

SEQ ID NO: 76898 - protein, 10 aa, synthetic construct
  source 1..10: note = Seed: YHFRELGVVH
YIFRELGVVY

SEQ ID NO: 76899 - protein, 9 aa, synthetic construct
  source 1..9: note = Seed: YVFTGYRVT
YIFTGYRVF

SEQ ID NO: 76900 - protein, 9 aa, synthetic construct
  source 1..9: note = Seed: YVFTGYRVT
YIFTGYRVI

SEQ ID NO: 76901 - protein, 9 aa, synthetic construct
  source 1..9: note = Seed: YVFTGYRVT
YIFTGYRVL

SEQ ID NO: 76902 - protein, 9 aa, synthetic construct
  source 1..9: note = Seed: YVFTGYRVT
YIFTGYRVM

SEQ ID NO: 76903 - protein, 10 aa, synthetic construct
  source 1..10: note = Seed: YVFTGYRVTK
YIFTGYRVTK

SEQ ID NO: 76904 - protein, 10 aa, synthetic construct
  source 1..10: note = Seed: YVFTGYRVTK
YIFTGYRVTR

SEQ ID NO: 76905 - protein, 9 aa, synthetic construct
  source 1..9: note = Seed: YVFTGYRVT
YIFTGYRVV

SEQ ID NO: 76906 - protein, 9 aa, synthetic construct
  source 1..9: note = Seed: YVFTGYRVT
YIFTGYRVY

SEQ ID NO: 76907 - protein, 9 aa, synthetic construct
  source 1..9: note = Seed: YFFTLLLQL
YIFTLLLQA

SEQ ID NO: 76908 - protein, 9 aa, synthetic construct
  source 1..9: note = Seed: YFFTLLLQL
YIFTLLLQI

SEQ ID NO: 76909 - protein, 9 aa, synthetic construct
  source 1..9: note = Seed: YFFTLLLQL
YIFTLLLQL

SEQ ID NO: 76910 - protein, 9 aa, synthetic construct
  source 1..9: note = Seed: YFFTLLLQL
YIFTLLLQM

SEQ ID NO: 76911 - protein, 9 aa, synthetic construct
  source 1..9: note = Seed: YFFTLLLQL
YIFTLLLQT

SEQ ID NO: 76912 - protein, 9 aa, synthetic construct
  source 1..9: note = Seed: YFFTLLLQL
YIFTLLLQV

SEQ ID NO: 76913 - protein, 9 aa, synthetic construct
  source 1..9: note = Seed: YFFTLLLQL
YIFTLLLQY

SEQ ID NO: 76914 - protein, 9 aa, synthetic construct
  source 1..9: note = Seed: YLGGMSYYC
YIGGMSYYA

SEQ ID NO: 76915 - protein, 10 aa, synthetic construct
  source 1..10: note = Seed: YLGGMSYYCK
YIGGMSYYCR

SEQ ID NO: 76916 - protein, 9 aa, synthetic construct
  source 1..9: note = Seed: YLGGMSYYC
YIGGMSYYI

SEQ ID NO: 76917 - protein, 9 aa, synthetic construct
  source 1..9: note = Seed: YLGGMSYYC
YIGGMSYYL

SEQ ID NO: 76918 - protein, 9 aa, synthetic construct
  source 1..9: note = Seed: YLGGMSYYC
YIGGMSYYM

SEQ ID NO: 76919 - protein, 9 aa, synthetic construct
  source 1..9: note = Seed: YLGGMSYYC
YIGGMSYYT

SEQ ID NO: 76920 - protein, 9 aa, synthetic construct
  source 1..9: note = Seed: YLGGMSYYC
YIGGMSYYV

SEQ ID NO: 76921 - protein, 11 aa, synthetic construct
  source 1..11: note = Seed: YTGNYQCGHYK
YIGNYQCGHYR

SEQ ID NO: 76922 - protein, 11 aa, synthetic construct
  source 1..11: note = Seed: YVGYLQPRTFL
YIGYLQPRTFF

SEQ ID NO: 76923 - protein, 11 aa, synthetic construct
  source 1..11: note = Seed: YVGYLQPRTFL
YIGYLQPRTFW

SEQ ID NO: 76924 - protein, 9 aa, synthetic construct
  source 1..9: note = Seed: YMHHMELPT
YIHHMELPF

SEQ ID NO: 76925 - protein, 9 aa, synthetic construct
  source 1..9: note = Seed: YMHHMELPT
YIHHMELPI

SEQ ID NO: 76926 - protein, 9 aa, synthetic construct
  source 1..9: note = Seed: YMHHMELPT
YIHHMELPL

SEQ ID NO: 76927 - protein, 11 aa, synthetic construct
  source 1..11: note = Seed: YMHHMELPTGV
YIHHMELPTGI

SEQ ID NO: 76928 - protein, 11 aa, synthetic construct
  source 1..11: note = Seed: YMHHMELPTGV
YIHHMELPTGL

SEQ ID NO: 76929 - protein, 11 aa, synthetic construct
  source 1..11: note = Seed: YMHHMELPTGV
YIHHMELPTGV

SEQ ID NO: 76930 - protein, 9 aa, synthetic construct
  source 1..9: note = Seed: YMHHMELPT
YIHHMELPV

SEQ ID NO: 76931 - protein, 9 aa, synthetic construct
  source 1..9: note = Seed: YMHHMELPT
YIHHMELPY

SEQ ID NO: 76932 - protein, 9 aa, synthetic construct
  source 1..9: note = Seed: YFIASFRLF
YIIASFRLF

SEQ ID NO: 76933 - protein, 10 aa, synthetic construct
  source 1..10: note = Seed: YFIASFRLFA
YIIASFRLFA

SEQ ID NO: 76934 - protein, 11 aa, synthetic construct
  source 1..11: note = Seed: YFIASFRLFAR
YIIASFRLFAR

SEQ ID NO: 76935 - protein, 10 aa, synthetic construct
  source 1..10: note = Seed: YFIASFRLFA
YIIASFRLFI

SEQ ID NO: 76936 - protein, 10 aa, synthetic construct
  source 1..10: note = Seed: YFIASFRLFA
YIIASFRLFL

SEQ ID NO: 76937 - protein, 10 aa, synthetic construct
  source 1..10: note = Seed: YFIASFRLFA
YIIASFRLFV

SEQ ID NO: 76938 - protein, 9 aa, synthetic construct
  source 1..9: note = Seed: YFIASFRLF
YIIASFRLL

SEQ ID NO: 76939 - protein, 9 aa, synthetic construct
  source 1..9: note = Seed: YFIASFRLF
YIIASFRLM

SEQ ID NO: 76940 - protein, 9 aa, synthetic construct
  source 1..9: note = Seed: YFIASFRLF
YIIASFRLV

SEQ ID NO: 76941 - protein, 9 aa, synthetic construct
  source 1..9: note = Seed: YFIASFRLF
YIIASFRLY

SEQ ID NO: 76942 - protein, 9 aa, synthetic construct
  source 1..9: note = Seed: YGIATVREV
YIIATVREA

SEQ ID NO: 76943 - protein, 9 aa, synthetic construct
  source 1..9: note = Seed: YGIATVREV
YIIATVREF

SEQ ID NO: 76944 - protein, 9 aa, synthetic construct
  source 1..9: note = Seed: YGIATVREV
YIIATVREI

SEQ ID NO: 76945 - protein, 9 aa, synthetic construct
  source 1..9: note = Seed: YGIATVREV
YIIATVREL

SEQ ID NO: 76946 - protein, 9 aa, synthetic construct
  source 1..9: note = Seed: YGIATVREV
YIIATVREM

SEQ ID NO: 76947 - protein, 9 aa, synthetic construct
  source 1..9: note = Seed: YGIATVREV
YIIATVREV

SEQ ID NO: 76948 - protein, 9 aa, synthetic construct
  source 1..9: note = Seed: YGIATVREV
YIIATVREY

SEQ ID NO: 76949 - protein, 10 aa, synthetic construct
  source 1..10: note = Seed: YIICISTKHF
YIICISTKHY

SEQ ID NO: 76950 - protein, 9 aa, synthetic construct
  source 1..9: note = Seed: YFIKGLNNL
YIIKGLNNA

SEQ ID NO: 76951 - protein, 9 aa, synthetic construct
  source 1..9: note = Seed: YFIKGLNNL
YIIKGLNNI

SEQ ID NO: 76952 - protein, 9 aa, synthetic construct
  source 1..9: note = Seed: YFIKGLNNL
YIIKGLNNL

SEQ ID NO: 76953 - protein, 9 aa, synthetic construct
  source 1..9: note = Seed: YFIKGLNNL
YIIKGLNNM

SEQ ID NO: 76954 - protein, 9 aa, synthetic construct
  source 1..9: note = Seed: YFIKGLNNL
YIIKGLNNV

SEQ ID NO: 76955 - protein, 10 aa, synthetic construct
  source 1..10: note = Seed: YAISAKNRAR
YIISAKNRAR

SEQ ID NO: 76956 - protein, 11 aa, synthetic construct
  source 1..11: note = Seed: YFKIYSKHTPI
YIKIYSKHTPL

SEQ ID NO: 76957 - protein, 9 aa, synthetic construct
  source 1..9: note = Seed: YYKKDNSYF
YIKKDNSYF

SEQ ID NO: 76958 - protein, 9 aa, synthetic construct
  source 1..9: note = Seed: YDKLQFTSL
YIKLQFTSA

SEQ ID NO: 76959 - protein, 9 aa, synthetic construct
  source 1..9: note = Seed: YDKLQFTSL
YIKLQFTSF

SEQ ID NO: 76960 - protein, 9 aa, synthetic construct
  source 1..9: note = Seed: YDKLQFTSL
YIKLQFTSI

SEQ ID NO: 76961 - protein, 9 aa, synthetic construct
  source 1..9: note = Seed: YDKLQFTSL
YIKLQFTSL

SEQ ID NO: 76962 - protein, 11 aa, synthetic construct
  source 1..11: note = Seed: YDKLQFTSLEI
YIKLQFTSLEV

SEQ ID NO: 76963 - protein, 9 aa, synthetic construct
  source 1..9: note = Seed: YDKLQFTSL
YIKLQFTSM

SEQ ID NO: 76964 - protein, 9 aa, synthetic construct
  source 1..9: note = Seed: YDKLQFTSL
YIKLQFTSV

SEQ ID NO: 76965 - protein, 8 aa, synthetic construct
  source 1..8: note = Seed: YLKLRSDV
YIKLRSDL

SEQ ID NO: 76966 - protein, 8 aa, synthetic construct
  source 1..8: note = Seed: YLKLRSDV
YIKLRSDM

SEQ ID NO: 76967 - protein, 9 aa, synthetic construct
  source 1..9: note = Seed: YLKLRSDVL
YIKLRSDVA

SEQ ID NO: 76968 - protein, 9 aa, synthetic construct
  source 1..9: note = Seed: YLKLRSDVL
YIKLRSDVF

SEQ ID NO: 76969 - protein, 9 aa, synthetic construct
  source 1..9: note = Seed: YLKLRSDVL
YIKLRSDVI

SEQ ID NO: 76970 - protein, 9 aa, synthetic construct
  source 1..9: note = Seed: YLKLRSDVL
YIKLRSDVL

SEQ ID NO: 76971 - protein, 10 aa, synthetic construct
  source 1..10: note = Seed: YLKLRSDVLL
YIKLRSDVLL

SEQ ID NO: 76972 - protein, 9 aa, synthetic construct
  source 1..9: note = Seed: YLKLRSDVL
YIKLRSDVM

SEQ ID NO: 76973 - protein, 9 aa, synthetic construct
  source 1..9: note = Seed: YLKLRSDVL
YIKLRSDVV

SEQ ID NO: 76974 - protein, 9 aa, synthetic construct
  source 1..9: note = Seed: YLKLRSDVL
YIKLRSDVY

SEQ ID NO: 76975 - protein, 8 aa, synthetic construct
  source 1..8: note = Seed: YLKRRVVF
YIKRRVVA

SEQ ID NO: 76976 - protein, 8 aa, synthetic construct
  source 1..8: note = Seed: YLKRRVVF
YIKRRVVF

SEQ ID NO: 76977 - protein, 8 aa, synthetic construct
  source 1..8: note = Seed: YLKRRVVF
YIKRRVVI

SEQ ID NO: 76978 - protein, 8 aa, synthetic construct
  source 1..8: note = Seed: YLKRRVVF
YIKRRVVL

SEQ ID NO: 76979 - protein, 8 aa, synthetic construct
  source 1..8: note = Seed: YLKRRVVF
YIKRRVVM

SEQ ID NO: 76980 - protein, 8 aa, synthetic construct
  source 1..8: note = Seed: YLKRRVVF
YIKRRVVV

SEQ ID NO: 76981 - protein, 9 aa, synthetic construct
  source 1..9: note = Seed: YLKSPNFSK
YIKSPNFSK

SEQ ID NO: 76982 - protein, 10 aa, synthetic construct
  source 1..10: note = Seed: YLKSPNFSKL
YIKSPNFSKV

SEQ ID NO: 76983 - protein, 9 aa, synthetic construct
  source 1..9: note = Seed: YLKSPNFSK
YIKSPNFSR

SEQ ID NO: 76984 - protein, 8 aa, synthetic construct
  source 1..8: note = Seed: YIKWPWYI
YIKWPWYA

SEQ ID NO: 76985 - protein, 8 aa, synthetic construct
  source 1..8: note = Seed: YIKWPWYI
YIKWPWYF

SEQ ID NO: 76986 - protein, 10 aa, synthetic construct
  source 1..10: note = Seed: YIKWPWYIWL
YIKWPWYIWI

SEQ ID NO: 76987 - protein, 10 aa, synthetic construct
  source 1..10: note = Seed: YIKWPWYIWL
YIKWPWYIWV

SEQ ID NO: 76988 - protein, 8 aa, synthetic construct
  source 1..8: note = Seed: YIKWPWYI
YIKWPWYL

SEQ ID NO: 76989 - protein, 8 aa, synthetic construct
  source 1..8: note = Seed: YIKWPWYI
YIKWPWYV

SEQ ID NO: 76990 - protein, 9 aa, synthetic construct
  source 1..9: note = Seed: YNKYKYFSG
YIKYKYFSA

SEQ ID NO: 76991 - protein, 9 aa, synthetic construct
  source 1..9: note = Seed: YNKYKYFSG
YIKYKYFSC

SEQ ID NO: 76992 - protein, 9 aa, synthetic construct
  source 1..9: note = Seed: YNKYKYFSG
YIKYKYFSF

SEQ ID NO: 76993 - protein, 9 aa, synthetic construct
  source 1..9: note = Seed: YNKYKYFSG
YIKYKYFSI

SEQ ID NO: 76994 - protein, 9 aa, synthetic construct
  source 1..9: note = Seed: YNKYKYFSG
YIKYKYFSL

SEQ ID NO: 76995 - protein, 9 aa, synthetic construct
  source 1..9: note = Seed: YNKYKYFSG
YIKYKYFSM

SEQ ID NO: 76996 - protein, 9 aa, synthetic construct
  source 1..9: note = Seed: YNKYKYFSG
YIKYKYFST

SEQ ID NO: 76997 - protein, 9 aa, synthetic construct
  source 1..9: note = Seed: YNKYKYFSG
YIKYKYFSV

SEQ ID NO: 76998 - protein, 10 aa, synthetic construct
  source 1..10: note = Seed: YFLCWHTNCY
YILCWHTNCY

SEQ ID NO: 76999 - protein, 10 aa, synthetic construct
  source 1..10: note = Seed: YPLECIKDLL
YILECIKDLI

SEQ ID NO: 77000 - protein, 10 aa, synthetic construct
  source 1..10: note = Seed: YPLECIKDLL
YILECIKDLL

SEQ ID NO: 77001 - protein, 10 aa, synthetic construct
  source 1..10: note = Seed: YPLECIKDLL
YILECIKDLV

SEQ ID NO: 77002 - protein, 9 aa, synthetic construct
  source 1..9: note = Seed: YRLFRKSNL
YILFRKSNL

SEQ ID NO: 77003 - protein, 10 aa, synthetic construct
  source 1..10: note = Seed: YRLFRKSNLK
YILFRKSNLK

SEQ ID NO: 77004 - protein, 10 aa, synthetic construct
  source 1..10: note = Seed: YRLFRKSNLK
YILFRKSNLR

SEQ ID NO: 77005 - protein, 9 aa, synthetic construct
  source 1..9: note = Seed: YILFTRFFY
YILFTRFFF

SEQ ID NO: 77006 - protein, 9 aa, synthetic construct
  source 1..9: note = Seed: YILFTRFFY
YILFTRFFK

SEQ ID NO: 77007 - protein, 9 aa, synthetic construct
  source 1..9: note = Seed: YILFTRFFY
YILFTRFFR

SEQ ID NO: 77008 - protein, 10 aa, synthetic construct
  source 1..10: note = Seed: YILFTRFFYV
YILFTRFFYA

SEQ ID NO: 77009 - protein, 10 aa, synthetic construct
  source 1..10: note = Seed: YILFTRFFYV
YILFTRFFYC

SEQ ID NO: 77010 - protein, 10 aa, synthetic construct
  source 1..10: note = Seed: YILFTRFFYV
YILFTRFFYF

SEQ ID NO: 77011 - protein, 10 aa, synthetic construct
  source 1..10: note = Seed: YILFTRFFYV
YILFTRFFYI

SEQ ID NO: 77012 - protein, 10 aa, synthetic construct
  source 1..10: note = Seed: YILFTRFFYV
YILFTRFFYK

SEQ ID NO: 77013 - protein, 10 aa, synthetic construct
  source 1..10: note = Seed: YILFTRFFYV
YILFTRFFYL

SEQ ID NO: 77014 - protein, 10 aa, synthetic construct
  source 1..10: note = Seed: YILFTRFFYV
YILFTRFFYM

SEQ ID NO: 77015 - protein, 10 aa, synthetic construct
  source 1..10: note = Seed: YILFTRFFYV
YILFTRFFYR

SEQ ID NO: 77016 - protein, 10 aa, synthetic construct
  source 1..10: note = Seed: YILFTRFFYV
YILFTRFFYS

SEQ ID NO: 77017 - protein, 10 aa, synthetic construct
  source 1..10: note = Seed: YILFTRFFYV
YILFTRFFYT

SEQ ID NO: 77018 - protein, 11 aa, synthetic construct
  source 1..11: note = Seed: YILFTRFFYVL
YILFTRFFYVA

SEQ ID NO: 77019 - protein, 11 aa, synthetic construct
  source 1..11: note = Seed: YILFTRFFYVL
YILFTRFFYVC

SEQ ID NO: 77020 - protein, 11 aa, synthetic construct
  source 1..11: note = Seed: YILFTRFFYVL
YILFTRFFYVD

SEQ ID NO: 77021 - protein, 11 aa, synthetic construct
  source 1..11: note = Seed: YILFTRFFYVL
YILFTRFFYVE

SEQ ID NO: 77022 - protein, 11 aa, synthetic construct
  source 1..11: note = Seed: YILFTRFFYVL
YILFTRFFYVF

SEQ ID NO: 77023 - protein, 11 aa, synthetic construct
  source 1..11: note = Seed: YILFTRFFYVL
YILFTRFFYVG

SEQ ID NO: 77024 - protein, 11 aa, synthetic construct
  source 1..11: note = Seed: YILFTRFFYVL
YILFTRFFYVH

SEQ ID NO: 77025 - protein, 11 aa, synthetic construct
  source 1..11: note = Seed: YILFTRFFYVL
YILFTRFFYVI

SEQ ID NO: 77026 - protein, 11 aa, synthetic construct
  source 1..11: note = Seed: YILFTRFFYVL
YILFTRFFYVK

SEQ ID NO: 77027 - protein, 11 aa, synthetic construct
  source 1..11: note = Seed: YILFTRFFYVL
YILFTRFFYVM

SEQ ID NO: 77028 - protein, 11 aa, synthetic construct
  source 1..11: note = Seed: YILFTRFFYVL
YILFTRFFYVN

SEQ ID NO: 77029 - protein, 11 aa, synthetic construct
  source 1..11: note = Seed: YILFTRFFYVL
YILFTRFFYVP

SEQ ID NO: 77030 - protein, 11 aa, synthetic construct
  source 1..11: note = Seed: YILFTRFFYVL
YILFTRFFYVQ

SEQ ID NO: 77031 - protein, 11 aa, synthetic construct
  source 1..11: note = Seed: YILFTRFFYVL
YILFTRFFYVR

SEQ ID NO: 77032 - protein, 11 aa, synthetic construct
  source 1..11: note = Seed: YILFTRFFYVL
YILFTRFFYVS

SEQ ID NO: 77033 - protein, 11 aa, synthetic construct
  source 1..11: note = Seed: YILFTRFFYVL
YILFTRFFYVT

SEQ ID NO: 77034 - protein, 11 aa, synthetic construct
  source 1..11: note = Seed: YILFTRFFYVL
YILFTRFFYVV

SEQ ID NO: 77035 - protein, 11 aa, synthetic construct
  source 1..11: note = Seed: YILFTRFFYVL
YILFTRFFYVW

SEQ ID NO: 77036 - protein, 11 aa, synthetic construct
  source 1..11: note = Seed: YILFTRFFYVL
YILFTRFFYVY

SEQ ID NO: 77037 - protein, 10 aa, synthetic construct
  source 1..10: note = Seed: YILFTRFFYV
YILFTRFFYY

SEQ ID NO: 77038 - protein, 9 aa, synthetic construct
  source 1..9: note = Seed: YKLGASQRV
YILGASQRF

SEQ ID NO: 77039 - protein, 10 aa, synthetic construct
  source 1..10: note = Seed: YSLLMPILTL
YILLMPILTA

SEQ ID NO: 77040 - protein, 10 aa, synthetic construct
  source 1..10: note = Seed: YSLLMPILTL
YILLMPILTI

SEQ ID NO: 77041 - protein, 10 aa, synthetic construct
  source 1..10: note = Seed: YSLLMPILTL
YILLMPILTL

SEQ ID NO: 77042 - protein, 10 aa, synthetic construct
  source 1..10: note = Seed: YSLLMPILTL
YILLMPILTV

SEQ ID NO: 77043 - protein, 10 aa, synthetic construct
  source 1..10: note = Seed: YHLMSFPQSA
YILMSFPQSA

SEQ ID NO: 77044 - protein, 11 aa, synthetic construct
  source 1..11: note = Seed: YHLMSFPQSAP
YILMSFPQSAV

SEQ ID NO: 77045 - protein, 10 aa, synthetic construct
  source 1..10: note = Seed: YHLMSFPQSA
YILMSFPQSI

SEQ ID NO: 77046 - protein, 10 aa, synthetic construct
  source 1..10: note = Seed: YHLMSFPQSA
YILMSFPQSL

SEQ ID NO: 77047 - protein, 10 aa, synthetic construct
  source 1..10: note = Seed: YHLMSFPQSA
YILMSFPQSM

SEQ ID NO: 77048 - protein, 10 aa, synthetic construct
  source 1..10: note = Seed: YHLMSFPQSA
YILMSFPQST

SEQ ID NO: 77049 - protein, 10 aa, synthetic construct
  source 1..10: note = Seed: YHLMSFPQSA
YILMSFPQSV

SEQ ID NO: 77050 - protein, 9 aa, synthetic construct
  source 1..9: note = Seed: YELQTPFEI
YILQTPFEA

SEQ ID NO: 77051 - protein, 9 aa, synthetic construct
  source 1..9: note = Seed: YELQTPFEI
YILQTPFEI

SEQ ID NO: 77052 - protein, 9 aa, synthetic construct
  source 1..9: note = Seed: YELQTPFEI
YILQTPFEL

SEQ ID NO: 77053 - protein, 9 aa, synthetic construct
  source 1..9: note = Seed: YELQTPFEI
YILQTPFEM

SEQ ID NO: 77054 - protein, 9 aa, synthetic construct
  source 1..9: note = Seed: YELQTPFEI
YILQTPFEV

SEQ ID NO: 77055 - protein, 10 aa, synthetic construct
  source 1..10: note = Seed: YDLSVVNARL
YILSVVNARA

SEQ ID NO: 77056 - protein, 10 aa, synthetic construct
  source 1..10: note = Seed: YDLSVVNARL
YILSVVNARI

SEQ ID NO: 77057 - protein, 10 aa, synthetic construct
  source 1..10: note = Seed: YDLSVVNARL
YILSVVNARL

SEQ ID NO: 77058 - protein, 10 aa, synthetic construct
  source 1..10: note = Seed: YDLSVVNARL
YILSVVNARM

SEQ ID NO: 77059 - protein, 10 aa, synthetic construct
  source 1..10: note = Seed: YDLSVVNARL
YILSVVNARV

SEQ ID NO: 77060 - protein, 11 aa, synthetic construct
  source 1..11: note = Seed: YMLTYNKVENM
YILTYNKVENV

SEQ ID NO: 77061 - protein, 8 aa, synthetic construct
  source 1..8: note = Seed: YTMADLVY
YIMADLVY

SEQ ID NO: 77062 - protein, 9 aa, synthetic construct
  source 1..9: note = Seed: YTMADLVYA
YIMADLVYA

SEQ ID NO: 77063 - protein, 10 aa, synthetic construct
  source 1..10: note = Seed: YTMADLVYAL
YIMADLVYAA

SEQ ID NO: 77064 - protein, 10 aa, synthetic construct
  source 1..10: note = Seed: YTMADLVYAL
YIMADLVYAC

SEQ ID NO: 77065 - protein, 10 aa, synthetic construct
  source 1..10: note = Seed: YTMADLVYAL
YIMADLVYAD

SEQ ID NO: 77066 - protein, 10 aa, synthetic construct
  source 1..10: note = Seed: YTMADLVYAL
YIMADLVYAE

SEQ ID NO: 77067 - protein, 10 aa, synthetic construct
  source 1..10: note = Seed: YTMADLVYAL
YIMADLVYAF

SEQ ID NO: 77068 - protein, 10 aa, synthetic construct
  source 1..10: note = Seed: YTMADLVYAL
YIMADLVYAG

SEQ ID NO: 77069 - protein, 10 aa, synthetic construct
  source 1..10: note = Seed: YTMADLVYAL
YIMADLVYAH

SEQ ID NO: 77070 - protein, 10 aa, synthetic construct
  source 1..10: note = Seed: YTMADLVYAL
YIMADLVYAI

SEQ ID NO: 77071 - protein, 10 aa, synthetic construct
  source 1..10: note = Seed: YTMADLVYAL
YIMADLVYAK

SEQ ID NO: 77072 - protein, 10 aa, synthetic construct
  source 1..10: note = Seed: YTMADLVYAL
YIMADLVYAL

SEQ ID NO: 77073 - protein, 11 aa, synthetic construct
  source 1..11: note = Seed: YTMADLVYALR
YIMADLVYALA

SEQ ID NO: 77074 - protein, 11 aa, synthetic construct
  source 1..11: note = Seed: YTMADLVYALR
YIMADLVYALC

SEQ ID NO: 77075 - protein, 11 aa, synthetic construct
  source 1..11: note = Seed: YTMADLVYALR
YIMADLVYALD

SEQ ID NO: 77076 - protein, 11 aa, synthetic construct
  source 1..11: note = Seed: YTMADLVYALR
YIMADLVYALE

SEQ ID NO: 77077 - protein, 11 aa, synthetic construct
  source 1..11: note = Seed: YTMADLVYALR
YIMADLVYALF

SEQ ID NO: 77078 - protein, 11 aa, synthetic construct
  source 1..11: note = Seed: YTMADLVYALR
YIMADLVYALG

SEQ ID NO: 77079 - protein, 11 aa, synthetic construct
  source 1..11: note = Seed: YTMADLVYALR
YIMADLVYALH

SEQ ID NO: 77080 - protein, 11 aa, synthetic construct
  source 1..11: note = Seed: YTMADLVYALR
YIMADLVYALI

SEQ ID NO: 77081 - protein, 11 aa, synthetic construct
  source 1..11: note = Seed: YTMADLVYALR
YIMADLVYALK

SEQ ID NO: 77082 - protein, 11 aa, synthetic construct
  source 1..11: note = Seed: YTMADLVYALR
YIMADLVYALL

SEQ ID NO: 77083 - protein, 11 aa, synthetic construct
  source 1..11: note = Seed: YTMADLVYALR
YIMADLVYALM

SEQ ID NO: 77084 - protein, 11 aa, synthetic construct
  source 1..11: note = Seed: YTMADLVYALR
YIMADLVYALN

SEQ ID NO: 77085 - protein, 11 aa, synthetic construct
  source 1..11: note = Seed: YTMADLVYALR
YIMADLVYALP

SEQ ID NO: 77086 - protein, 11 aa, synthetic construct
  source 1..11: note = Seed: YTMADLVYALR
YIMADLVYALQ

SEQ ID NO: 77087 - protein, 11 aa, synthetic construct
  source 1..11: note = Seed: YTMADLVYALR
YIMADLVYALR

SEQ ID NO: 77088 - protein, 11 aa, synthetic construct
  source 1..11: note = Seed: YTMADLVYALR
YIMADLVYALS

SEQ ID NO: 77089 - protein, 11 aa, synthetic construct
  source 1..11: note = Seed: YTMADLVYALR
YIMADLVYALT

SEQ ID NO: 77090 - protein, 11 aa, synthetic construct
  source 1..11: note = Seed: YTMADLVYALR
YIMADLVYALV

SEQ ID NO: 77091 - protein, 11 aa, synthetic construct
  source 1..11: note = Seed: YTMADLVYALR
YIMADLVYALW

SEQ ID NO: 77092 - protein, 11 aa, synthetic construct
  source 1..11: note = Seed: YTMADLVYALR
YIMADLVYALY

SEQ ID NO: 77093 - protein, 10 aa, synthetic construct
  source 1..10: note = Seed: YTMADLVYAL
YIMADLVYAM

SEQ ID NO: 77094 - protein, 10 aa, synthetic construct
  source 1..10: note = Seed: YTMADLVYAL
YIMADLVYAN

SEQ ID NO: 77095 - protein, 10 aa, synthetic construct
  source 1..10: note = Seed: YTMADLVYAL
YIMADLVYAP

SEQ ID NO: 77096 - protein, 10 aa, synthetic construct
  source 1..10: note = Seed: YTMADLVYAL
YIMADLVYAQ

SEQ ID NO: 77097 - protein, 10 aa, synthetic construct
  source 1..10: note = Seed: YTMADLVYAL
YIMADLVYAR

SEQ ID NO: 77098 - protein, 10 aa, synthetic construct
  source 1..10: note = Seed: YTMADLVYAL
YIMADLVYAS

SEQ ID NO: 77099 - protein, 10 aa, synthetic construct
  source 1..10: note = Seed: YTMADLVYAL
YIMADLVYAT

SEQ ID NO: 77100 - protein, 10 aa, synthetic construct
  source 1..10: note = Seed: YTMADLVYAL
YIMADLVYAV

SEQ ID NO: 77101 - protein, 10 aa, synthetic construct
  source 1..10: note = Seed: YTMADLVYAL
YIMADLVYAW

SEQ ID NO: 77102 - protein, 10 aa, synthetic construct
  source 1..10: note = Seed: YTMADLVYAL
YIMADLVYAY

SEQ ID NO: 77103 - protein, 9 aa, synthetic construct
  source 1..9: note = Seed: YTMADLVYA
YIMADLVYC

SEQ ID NO: 77104 - protein, 9 aa, synthetic construct
  source 1..9: note = Seed: YTMADLVYA
YIMADLVYF

SEQ ID NO: 77105 - protein, 9 aa, synthetic construct
  source 1..9: note = Seed: YTMADLVYA
YIMADLVYG

SEQ ID NO: 77106 - protein, 9 aa, synthetic construct
  source 1..9: note = Seed: YTMADLVYA
YIMADLVYI

SEQ ID NO: 77107 - protein, 9 aa, synthetic construct
  source 1..9: note = Seed: YTMADLVYA
YIMADLVYK

SEQ ID NO: 77108 - protein, 9 aa, synthetic construct
  source 1..9: note = Seed: YTMADLVYA
YIMADLVYL

SEQ ID NO: 77109 - protein, 9 aa, synthetic construct
  source 1..9: note = Seed: YTMADLVYA
YIMADLVYM

SEQ ID NO: 77110 - protein, 9 aa, synthetic construct
  source 1..9: note = Seed: YTMADLVYA
YIMADLVYR

SEQ ID NO: 77111 - protein, 9 aa, synthetic construct
  source 1..9: note = Seed: YTMADLVYA
YIMADLVYS

SEQ ID NO: 77112 - protein, 9 aa, synthetic construct
  source 1..9: note = Seed: YTMADLVYA
YIMADLVYT

SEQ ID NO: 77113 - protein, 9 aa, synthetic construct
  source 1..9: note = Seed: YTMADLVYA
YIMADLVYV

SEQ ID NO: 77114 - protein, 9 aa, synthetic construct
  source 1..9: note = Seed: YTMADLVYA
YIMADLVYY

SEQ ID NO: 77115 - protein, 9 aa, synthetic construct
  source 1..9: note = Seed: YVMHANYIF
YIMHANYIA

SEQ ID NO: 77116 - protein, 9 aa, synthetic construct
  source 1..9: note = Seed: YVMHANYIF
YIMHANYIF

SEQ ID NO: 77117 - protein, 10 aa, synthetic construct
  source 1..10: note = Seed: YVMHANYIFW
YIMHANYIFF

SEQ ID NO: 77118 - protein, 10 aa, synthetic construct
  source 1..10: note = Seed: YVMHANYIFW
YIMHANYIFW

SEQ ID NO: 77119 - protein, 10 aa, synthetic construct
  source 1..10: note = Seed: YVMHANYIFW
YIMHANYIFY

SEQ ID NO: 77120 - protein, 9 aa, synthetic construct
  source 1..9: note = Seed: YVMHANYIF
YIMHANYII

SEQ ID NO: 77121 - protein, 9 aa, synthetic construct
  source 1..9: note = Seed: YVMHANYIF
YIMHANYIL

SEQ ID NO: 77122 - protein, 9 aa, synthetic construct
  source 1..9: note = Seed: YVMHANYIF
YIMHANYIM

SEQ ID NO: 77123 - protein, 9 aa, synthetic construct
  source 1..9: note = Seed: YVMHANYIF
YIMHANYIV

SEQ ID NO: 77124 - protein, 9 aa, synthetic construct
  source 1..9: note = Seed: YVMHANYIF
YIMHANYIW

SEQ ID NO: 77125 - protein, 9 aa, synthetic construct
  source 1..9: note = Seed: YVMHANYIF
YIMHANYIY

SEQ ID NO: 77126 - protein, 8 aa, synthetic construct
  source 1..8: note = Seed: YVMHANYI
YIMHANYV

SEQ ID NO: 77127 - protein, 9 aa, synthetic construct
  source 1..9: note = Seed: YTNDKACPL
YINDKACPA

SEQ ID NO: 77128 - protein, 9 aa, synthetic construct
  source 1..9: note = Seed: YTNDKACPL
YINDKACPF

SEQ ID NO: 77129 - protein, 9 aa, synthetic construct
  source 1..9: note = Seed: YTNDKACPL
YINDKACPI

SEQ ID NO: 77130 - protein, 9 aa, synthetic construct
  source 1..9: note = Seed: YTNDKACPL
YINDKACPL

SEQ ID NO: 77131 - protein, 10 aa, synthetic construct
  source 1..10: note = Seed: YTNDKACPLI
YINDKACPLV

SEQ ID NO: 77132 - protein, 9 aa, synthetic construct
  source 1..9: note = Seed: YTNDKACPL
YINDKACPM

SEQ ID NO: 77133 - protein, 9 aa, synthetic construct
  source 1..9: note = Seed: YTNDKACPL
YINDKACPV

SEQ ID NO: 77134 - protein, 9 aa, synthetic construct
  source 1..9: note = Seed: YTNDKACPL
YINDKACPY

SEQ ID NO: 77135 - protein, 10 aa, synthetic construct
  source 1..10: note = Seed: YQNNVFMSEA
YINNVFMSEA

SEQ ID NO: 77136 - protein, 10 aa, synthetic construct
  source 1..10: note = Seed: YQNNVFMSEA
YINNVFMSEI

SEQ ID NO: 77137 - protein, 10 aa, synthetic construct
  source 1..10: note = Seed: YQNNVFMSEA
YINNVFMSEL

SEQ ID NO: 77138 - protein, 10 aa, synthetic construct
  source 1..10: note = Seed: YQNNVFMSEA
YINNVFMSEV

SEQ ID NO: 77139 - protein, 9 aa, synthetic construct
  source 1..9: note = Seed: YQNNVFMSE
YINNVFMSF

SEQ ID NO: 77140 - protein, 9 aa, synthetic construct
  source 1..9: note = Seed: YQNNVFMSE
YINNVFMSM

SEQ ID NO: 77141 - protein, 9 aa, synthetic construct
  source 1..9: note = Seed: YQNNVFMSE
YINNVFMSY

SEQ ID NO: 77142 - protein, 9 aa, synthetic construct
  source 1..9: note = Seed: YANSVFNIC
YINSVFNIF

SEQ ID NO: 77143 - protein, 9 aa, synthetic construct
  source 1..9: note = Seed: YANSVFNIC
YINSVFNIL

SEQ ID NO: 77144 - protein, 9 aa, synthetic construct
  source 1..9: note = Seed: YANSVFNIC
YINSVFNIM

SEQ ID NO: 77145 - protein, 9 aa, synthetic construct
  source 1..9: note = Seed: YANSVFNIC
YINSVFNIY

SEQ ID NO: 77146 - protein, 9 aa, synthetic construct
  source 1..9: note = Seed: YVNTFSSTF
YINTFSSTF

SEQ ID NO: 77147 - protein, 9 aa, synthetic construct
  source 1..9: note = Seed: YVNTFSSTF
YINTFSSTI

SEQ ID NO: 77148 - protein, 9 aa, synthetic construct
  source 1..9: note = Seed: YVNTFSSTF
YINTFSSTL

SEQ ID NO: 77149 - protein, 9 aa, synthetic construct
  source 1..9: note = Seed: YVNTFSSTF
YINTFSSTM

SEQ ID NO: 77150 - protein, 9 aa, synthetic construct
  source 1..9: note = Seed: YVNTFSSTF
YINTFSSTV

SEQ ID NO: 77151 - protein, 9 aa, synthetic construct
  source 1..9: note = Seed: YVNTFSSTF
YINTFSSTW

SEQ ID NO: 77152 - protein, 9 aa, synthetic construct
  source 1..9: note = Seed: YVNTFSSTF
YINTFSSTY

SEQ ID NO: 77153 - protein, 10 aa, synthetic construct
  source 1..10: note = Seed: YTPHTVLQAV
YIPHTVLQAA

SEQ ID NO: 77154 - protein, 10 aa, synthetic construct
  source 1..10: note = Seed: YTPHTVLQAV
YIPHTVLQAI

SEQ ID NO: 77155 - protein, 10 aa, synthetic construct
  source 1..10: note = Seed: YTPHTVLQAV
YIPHTVLQAL

SEQ ID NO: 77156 - protein, 10 aa, synthetic construct
  source 1..10: note = Seed: YTPHTVLQAV
YIPHTVLQAM

SEQ ID NO: 77157 - protein, 10 aa, synthetic construct
  source 1..10: note = Seed: YTPHTVLQAV
YIPHTVLQAV

SEQ ID NO: 77158 - protein, 9 aa, synthetic construct
  source 1..9: note = Seed: YTPHTVLQA
YIPHTVLQI

SEQ ID NO: 77159 - protein, 9 aa, synthetic construct
  source 1..9: note = Seed: YTPHTVLQA
YIPHTVLQL

SEQ ID NO: 77160 - protein, 9 aa, synthetic construct
  source 1..9: note = Seed: YTPHTVLQA
YIPHTVLQV

SEQ ID NO: 77161 - protein, 10 aa, synthetic construct
  source 1..10: note = Seed: YLPIDKCSRI
YIPIDKCSRV

SEQ ID NO: 77162 - protein, 9 aa, synthetic construct
  source 1..9: note = Seed: YVPLKSATC
YIPLKSATF

SEQ ID NO: 77163 - protein, 9 aa, synthetic construct
  source 1..9: note = Seed: YVPLKSATC
YIPLKSATI

SEQ ID NO: 77164 - protein, 9 aa, synthetic construct
  source 1..9: note = Seed: YVPLKSATC
YIPLKSATL

SEQ ID NO: 77165 - protein, 9 aa, synthetic construct
  source 1..9: note = Seed: YVPLKSATC
YIPLKSATM

SEQ ID NO: 77166 - protein, 9 aa, synthetic construct
  source 1..9: note = Seed: YVPLKSATC
YIPLKSATV

SEQ ID NO: 77167 - protein, 8 aa, synthetic construct
  source 1..8: note = Seed: YMPYFFTL
YIPYFFTF

SEQ ID NO: 77168 - protein, 8 aa, synthetic construct
  source 1..8: note = Seed: YMPYFFTL
YIPYFFTI

SEQ ID NO: 77169 - protein, 8 aa, synthetic construct
  source 1..8: note = Seed: YMPYFFTL
YIPYFFTL

SEQ ID NO: 77170 - protein, 9 aa, synthetic construct
  source 1..9: note = Seed: YMPYFFTLL
YIPYFFTLA

SEQ ID NO: 77171 - protein, 9 aa, synthetic construct
  source 1..9: note = Seed: YMPYFFTLL
YIPYFFTLF

SEQ ID NO: 77172 - protein, 9 aa, synthetic construct
  source 1..9: note = Seed: YMPYFFTLL
YIPYFFTLI

SEQ ID NO: 77173 - protein, 9 aa, synthetic construct
  source 1..9: note = Seed: YMPYFFTLL
YIPYFFTLL

SEQ ID NO: 77174 - protein, 10 aa, synthetic construct
  source 1..10: note = Seed: YMPYFFTLLL
YIPYFFTLLA

SEQ ID NO: 77175 - protein, 10 aa, synthetic construct
  source 1..10: note = Seed: YMPYFFTLLL
YIPYFFTLLF

SEQ ID NO: 77176 - protein, 10 aa, synthetic construct
  source 1..10: note = Seed: YMPYFFTLLL
YIPYFFTLLI

SEQ ID NO: 77177 - protein, 10 aa, synthetic construct
  source 1..10: note = Seed: YMPYFFTLLL
YIPYFFTLLL

SEQ ID NO: 77178 - protein, 10 aa, synthetic construct
  source 1..10: note = Seed: YMPYFFTLLL
YIPYFFTLLM

SEQ ID NO: 77179 - protein, 10 aa, synthetic construct
  source 1..10: note = Seed: YMPYFFTLLL
YIPYFFTLLT

SEQ ID NO: 77180 - protein, 10 aa, synthetic construct
  source 1..10: note = Seed: YMPYFFTLLL
YIPYFFTLLV

SEQ ID NO: 77181 - protein, 10 aa, synthetic construct
  source 1..10: note = Seed: YMPYFFTLLL
YIPYFFTLLW

SEQ ID NO: 77182 - protein, 10 aa, synthetic construct
  source 1..10: note = Seed: YMPYFFTLLL
YIPYFFTLLY

SEQ ID NO: 77183 - protein, 9 aa, synthetic construct
  source 1..9: note = Seed: YMPYFFTLL
YIPYFFTLM

SEQ ID NO: 77184 - protein, 9 aa, synthetic construct
  source 1..9: note = Seed: YMPYFFTLL
YIPYFFTLV

SEQ ID NO: 77185 - protein, 8 aa, synthetic construct
  source 1..8: note = Seed: YMPYFFTL
YIPYFFTV

SEQ ID NO: 77186 - protein, 9 aa, synthetic construct
  source 1..9: note = Seed: YQPYRVVVL
YIPYRVVVI

SEQ ID NO: 77187 - protein, 9 aa, synthetic construct
  source 1..9: note = Seed: YQPYRVVVL
YIPYRVVVL

SEQ ID NO: 77188 - protein, 10 aa, synthetic construct
  source 1..10: note = Seed: YQPYRVVVLS
YIPYRVVVLA

SEQ ID NO: 77189 - protein, 9 aa, synthetic construct
  source 1..9: note = Seed: YQPYRVVVL
YIPYRVVVM

SEQ ID NO: 77190 - protein, 9 aa, synthetic construct
  source 1..9: note = Seed: YQPYRVVVL
YIPYRVVVV

SEQ ID NO: 77191 - protein, 10 aa, synthetic construct
  source 1..10: note = Seed: YKQFDTYNLW
YIQFDTYNLF

SEQ ID NO: 77192 - protein, 10 aa, synthetic construct
  source 1..10: note = Seed: YKQFDTYNLW
YIQFDTYNLM

SEQ ID NO: 77193 - protein, 10 aa, synthetic construct
  source 1..10: note = Seed: YKQFDTYNLW
YIQFDTYNLY

SEQ ID NO: 77194 - protein, 10 aa, synthetic construct
  source 1..10: note = Seed: YSQLMCQPIL
YIQLMCQPIF

SEQ ID NO: 77195 - protein, 11 aa, synthetic construct
  source 1..11: note = Seed: YSQLMCQPILL
YIQLMCQPILA

SEQ ID NO: 77196 - protein, 11 aa, synthetic construct
  source 1..11: note = Seed: YSQLMCQPILL
YIQLMCQPILI

SEQ ID NO: 77197 - protein, 11 aa, synthetic construct
  source 1..11: note = Seed: YSQLMCQPILL
YIQLMCQPILL

SEQ ID NO: 77198 - protein, 11 aa, synthetic construct
  source 1..11: note = Seed: YSQLMCQPILL
YIQLMCQPILM

SEQ ID NO: 77199 - protein, 11 aa, synthetic construct
  source 1..11: note = Seed: YSQLMCQPILL
YIQLMCQPILV

SEQ ID NO: 77200 - protein, 10 aa, synthetic construct
  source 1..10: note = Seed: YSQLMCQPIL
YIQLMCQPIY

SEQ ID NO: 77201 - protein, 9 aa, synthetic construct
  source 1..9: note = Seed: YSQLMCQPI
YIQLMCQPV

SEQ ID NO: 77202 - protein, 9 aa, synthetic construct
  source 1..9: note = Seed: YYQNNVFMS
YIQNNVFMF

SEQ ID NO: 77203 - protein, 9 aa, synthetic construct
  source 1..9: note = Seed: YLQPRTFLL
YIQPRTFLA

SEQ ID NO: 77204 - protein, 9 aa, synthetic construct
  source 1..9: note = Seed: YLQPRTFLL
YIQPRTFLF

SEQ ID NO: 77205 - protein, 9 aa, synthetic construct
  source 1..9: note = Seed: YLQPRTFLL
YIQPRTFLI

SEQ ID NO: 77206 - protein, 9 aa, synthetic construct
  source 1..9: note = Seed: YLQPRTFLL
YIQPRTFLL

SEQ ID NO: 77207 - protein, 10 aa, synthetic construct
  source 1..10: note = Seed: YLQPRTFLLK
YIQPRTFLLK

SEQ ID NO: 77208 - protein, 11 aa, synthetic construct
  source 1..11: note = Seed: YLQPRTFLLKY
YIQPRTFLLKV

SEQ ID NO: 77209 - protein, 11 aa, synthetic construct
  source 1..11: note = Seed: YLQPRTFLLKY
YIQPRTFLLKY

SEQ ID NO: 77210 - protein, 10 aa, synthetic construct
  source 1..10: note = Seed: YLQPRTFLLK
YIQPRTFLLR

SEQ ID NO: 77211 - protein, 10 aa, synthetic construct
  source 1..10: note = Seed: YLQPRTFLLK
YIQPRTFLLV

SEQ ID NO: 77212 - protein, 9 aa, synthetic construct
  source 1..9: note = Seed: YLQPRTFLL
YIQPRTFLM

SEQ ID NO: 77213 - protein, 9 aa, synthetic construct
  source 1..9: note = Seed: YLQPRTFLL
YIQPRTFLV

SEQ ID NO: 77214 - protein, 9 aa, synthetic construct
  source 1..9: note = Seed: YLQPRTFLL
YIQPRTFLW

SEQ ID NO: 77215 - protein, 9 aa, synthetic construct
  source 1..9: note = Seed: YLQPRTFLL
YIQPRTFLY

SEQ ID NO: 77216 - protein, 10 aa, synthetic construct
  source 1..10: note = Seed: YCQVHGNAHV
YIQVHGNAHV

SEQ ID NO: 77217 - protein, 9 aa, synthetic construct
  source 1..9: note = Seed: YPQVNGLTS
YIQVNGLTF

SEQ ID NO: 77218 - protein, 10 aa, synthetic construct
  source 1..10: note = Seed: YPQVNGLTSI
YIQVNGLTSA

SEQ ID NO: 77219 - protein, 10 aa, synthetic construct
  source 1..10: note = Seed: YPQVNGLTSI
YIQVNGLTSF

SEQ ID NO: 77220 - protein, 10 aa, synthetic construct
  source 1..10: note = Seed: YPQVNGLTSI
YIQVNGLTSI

SEQ ID NO: 77221 - protein, 10 aa, synthetic construct
  source 1..10: note = Seed: YPQVNGLTSI
YIQVNGLTSL

SEQ ID NO: 77222 - protein, 10 aa, synthetic construct
  source 1..10: note = Seed: YPQVNGLTSI
YIQVNGLTSM

SEQ ID NO: 77223 - protein, 10 aa, synthetic construct
  source 1..10: note = Seed: YPQVNGLTSI
YIQVNGLTSV

SEQ ID NO: 77224 - protein, 10 aa, synthetic construct
  source 1..10: note = Seed: YPQVNGLTSI
YIQVNGLTSY

SEQ ID NO: 77225 - protein, 9 aa, synthetic construct
  source 1..9: note = Seed: YPQVNGLTS
YIQVNGLTY

SEQ ID NO: 77226 - protein, 9 aa, synthetic construct
  source 1..9: note = Seed: YKRDAPAHI
YIRDAPAHF

SEQ ID NO: 77227 - protein, 9 aa, synthetic construct
  source 1..9: note = Seed: YKRDAPAHI
YIRDAPAHY

SEQ ID NO: 77228 - protein, 10 aa, synthetic construct
  source 1..10: note = Seed: YRRLISMMGF
YIRLISMMGF

SEQ ID NO: 77229 - protein, 10 aa, synthetic construct
  source 1..10: note = Seed: YRRLISMMGF
YIRLISMMGI

SEQ ID NO: 77230 - protein, 10 aa, synthetic construct
  source 1..10: note = Seed: YRRLISMMGF
YIRLISMMGL

SEQ ID NO: 77231 - protein, 10 aa, synthetic construct
  source 1..10: note = Seed: YRRLISMMGF
YIRLISMMGM

SEQ ID NO: 77232 - protein, 9 aa, synthetic construct
  source 1..9: note = Seed: YFRLTLGVY
YIRLTLGVF

SEQ ID NO: 77233 - protein, 9 aa, synthetic construct
  source 1..9: note = Seed: YFRLTLGVY
YIRLTLGVM

SEQ ID NO: 77234 - protein, 9 aa, synthetic construct
  source 1..9: note = Seed: YFRLTLGVY
YIRLTLGVY

SEQ ID NO: 77235 - protein, 9 aa, synthetic construct
  source 1..9: note = Seed: YKRNRATRV
YIRNRATRI

SEQ ID NO: 77236 - protein, 9 aa, synthetic construct
  source 1..9: note = Seed: YKRNRATRV
YIRNRATRL

SEQ ID NO: 77237 - protein, 9 aa, synthetic construct
  source 1..9: note = Seed: YKRNRATRV
YIRNRATRM

SEQ ID NO: 77238 - protein, 9 aa, synthetic construct
  source 1..9: note = Seed: YKRNRATRV
YIRNRATRV

SEQ ID NO: 77239 - protein, 9 aa, synthetic construct
  source 1..9: note = Seed: YYRSLPGVF
YIRSLPGVF

SEQ ID NO: 77240 - protein, 9 aa, synthetic construct
  source 1..9: note = Seed: YYRSLPGVF
YIRSLPGVY

SEQ ID NO: 77241 - protein, 9 aa, synthetic construct
  source 1..9: note = Seed: YYRYNLPTM
YIRYNLPTF

SEQ ID NO: 77242 - protein, 9 aa, synthetic construct
  source 1..9: note = Seed: YYRYNLPTM
YIRYNLPTK

SEQ ID NO: 77243 - protein, 9 aa, synthetic construct
  source 1..9: note = Seed: YYRYNLPTM
YIRYNLPTL

SEQ ID NO: 77244 - protein, 9 aa, synthetic construct
  source 1..9: note = Seed: YYRYNLPTM
YIRYNLPTM

SEQ ID NO: 77245 - protein, 10 aa, synthetic construct
  source 1..10: note = Seed: YYRYNLPTMC
YIRYNLPTMF

SEQ ID NO: 77246 - protein, 10 aa, synthetic construct
  source 1..10: note = Seed: YYRYNLPTMC
YIRYNLPTMI

SEQ ID NO: 77247 - protein, 10 aa, synthetic construct
  source 1..10: note = Seed: YYRYNLPTMC
YIRYNLPTML

SEQ ID NO: 77248 - protein, 10 aa, synthetic construct
  source 1..10: note = Seed: YYRYNLPTMC
YIRYNLPTMM

SEQ ID NO: 77249 - protein, 10 aa, synthetic construct
  source 1..10: note = Seed: YYRYNLPTMC
YIRYNLPTMV

SEQ ID NO: 77250 - protein, 9 aa, synthetic construct
  source 1..9: note = Seed: YYRYNLPTM
YIRYNLPTY

SEQ ID NO: 77251 - protein, 10 aa, synthetic construct
  source 1..10: note = Seed: YSRYRIGNYK
YIRYRIGNYF

SEQ ID NO: 77252 - protein, 10 aa, synthetic construct
  source 1..10: note = Seed: YSRYRIGNYK
YIRYRIGNYK

SEQ ID NO: 77253 - protein, 11 aa, synthetic construct
  source 1..11: note = Seed: YSRYRIGNYKL
YIRYRIGNYKF

SEQ ID NO: 77254 - protein, 10 aa, synthetic construct
  source 1..10: note = Seed: YSRYRIGNYK
YIRYRIGNYL

SEQ ID NO: 77255 - protein, 10 aa, synthetic construct
  source 1..10: note = Seed: YSRYRIGNYK
YIRYRIGNYM

SEQ ID NO: 77256 - protein, 10 aa, synthetic construct
  source 1..10: note = Seed: YSRYRIGNYK
YIRYRIGNYR

SEQ ID NO: 77257 - protein, 9 aa, synthetic construct
  source 1..9: note = Seed: YSSANNCTF
YISANNCTF

SEQ ID NO: 77258 - protein, 11 aa, synthetic construct
  source 1..11: note = Seed: YSSANNCTFEY
YISANNCTFEW

SEQ ID NO: 77259 - protein, 11 aa, synthetic construct
  source 1..11: note = Seed: YSSANNCTFEY
YISANNCTFEY

SEQ ID NO: 77260 - protein, 9 aa, synthetic construct
  source 1..9: note = Seed: YSSANNCTF
YISANNCTL

SEQ ID NO: 77261 - protein, 9 aa, synthetic construct
  source 1..9: note = Seed: YSSANNCTF
YISANNCTM

SEQ ID NO: 77262 - protein, 9 aa, synthetic construct
  source 1..9: note = Seed: YSSANNCTF
YISANNCTW

SEQ ID NO: 77263 - protein, 9 aa, synthetic construct
  source 1..9: note = Seed: YSSANNCTF
YISANNCTY

SEQ ID NO: 77264 - protein, 9 aa, synthetic construct
  source 1..9: note = Seed: YNSASFSTF
YISASFSTF

SEQ ID NO: 77265 - protein, 10 aa, synthetic construct
  source 1..10: note = Seed: YNSASFSTFK
YISASFSTFK

SEQ ID NO: 77266 - protein, 10 aa, synthetic construct
  source 1..10: note = Seed: YNSASFSTFK
YISASFSTFR

SEQ ID NO: 77267 - protein, 9 aa, synthetic construct
  source 1..9: note = Seed: YNSASFSTF
YISASFSTI

SEQ ID NO: 77268 - protein, 9 aa, synthetic construct
  source 1..9: note = Seed: YNSASFSTF
YISASFSTL

SEQ ID NO: 77269 - protein, 9 aa, synthetic construct
  source 1..9: note = Seed: YNSASFSTF
YISASFSTM

SEQ ID NO: 77270 - protein, 9 aa, synthetic construct
  source 1..9: note = Seed: YNSASFSTF
YISASFSTV

SEQ ID NO: 77271 - protein, 9 aa, synthetic construct
  source 1..9: note = Seed: YNSASFSTF
YISASFSTW

SEQ ID NO: 77272 - protein, 9 aa, synthetic construct
  source 1..9: note = Seed: YNSASFSTF
YISASFSTY

SEQ ID NO: 77273 - protein, 9 aa, synthetic construct
  source 1..9: note = Seed: YASAVVLLI
YISAVVLLA

SEQ ID NO: 77274 - protein, 9 aa, synthetic construct
  source 1..9: note = Seed: YASAVVLLI
YISAVVLLF

SEQ ID NO: 77275 - protein, 9 aa, synthetic construct
  source 1..9: note = Seed: YASAVVLLI
YISAVVLLI

SEQ ID NO: 77276 - protein, 10 aa, synthetic construct
  source 1..10: note = Seed: YASAVVLLIL
YISAVVLLII

SEQ ID NO: 77277 - protein, 10 aa, synthetic construct
  source 1..10: note = Seed: YASAVVLLIL
YISAVVLLIL

SEQ ID NO: 77278 - protein, 10 aa, synthetic construct
  source 1..10: note = Seed: YASAVVLLIL
YISAVVLLIV

SEQ ID NO: 77279 - protein, 10 aa, synthetic construct
  source 1..10: note = Seed: YASAVVLLIL
YISAVVLLIW

SEQ ID NO: 77280 - protein, 9 aa, synthetic construct
  source 1..9: note = Seed: YASAVVLLI
YISAVVLLL

SEQ ID NO: 77281 - protein, 9 aa, synthetic construct
  source 1..9: note = Seed: YASAVVLLI
YISAVVLLM

SEQ ID NO: 77282 - protein, 9 aa, synthetic construct
  source 1..9: note = Seed: YASAVVLLI
YISAVVLLV

SEQ ID NO: 77283 - protein, 9 aa, synthetic construct
  source 1..9: note = Seed: YASAVVLLI
YISAVVLLW

SEQ ID NO: 77284 - protein, 9 aa, synthetic construct
  source 1..9: note = Seed: YASAVVLLI
YISAVVLLY

SEQ ID NO: 77285 - protein, 11 aa, synthetic construct
  source 1..11: note = Seed: YYSLLMPILTL
YISLLMPILTV

SEQ ID NO: 77286 - protein, 11 aa, synthetic construct
  source 1..11: note = Seed: YRSLPGVFCGV
YISLPGVFCGI

SEQ ID NO: 77287 - protein, 11 aa, synthetic construct
  source 1..11: note = Seed: YRSLPGVFCGV
YISLPGVFCGV

SEQ ID NO: 77288 - protein, 10 aa, synthetic construct
  source 1..10: note = Seed: YESLRPDTRY
YISLRPDTRF

SEQ ID NO: 77289 - protein, 10 aa, synthetic construct
  source 1..10: note = Seed: YESLRPDTRY
YISLRPDTRW

SEQ ID NO: 77290 - protein, 9 aa, synthetic construct
  source 1..9: note = Seed: YTSNPTTFH
YISNPTTFF

SEQ ID NO: 77291 - protein, 10 aa, synthetic construct
  source 1..10: note = Seed: YTSNPTTFHL
YISNPTTFHF

SEQ ID NO: 77292 - protein, 10 aa, synthetic construct
  source 1..10: note = Seed: YTSNPTTFHL
YISNPTTFHI

SEQ ID NO: 77293 - protein, 10 aa, synthetic construct
  source 1..10: note = Seed: YTSNPTTFHL
YISNPTTFHL

SEQ ID NO: 77294 - protein, 10 aa, synthetic construct
  source 1..10: note = Seed: YTSNPTTFHL
YISNPTTFHV

SEQ ID NO: 77295 - protein, 10 aa, synthetic construct
  source 1..10: note = Seed: YTSNPTTFHL
YISNPTTFHW

SEQ ID NO: 77296 - protein, 10 aa, synthetic construct
  source 1..10: note = Seed: YTSNPTTFHL
YISNPTTFHY

SEQ ID NO: 77297 - protein, 9 aa, synthetic construct
  source 1..9: note = Seed: YTSNPTTFH
YISNPTTFK

SEQ ID NO: 77298 - protein, 9 aa, synthetic construct
  source 1..9: note = Seed: YTSNPTTFH
YISNPTTFM

SEQ ID NO: 77299 - protein, 9 aa, synthetic construct
  source 1..9: note = Seed: YTSNPTTFH
YISNPTTFR

SEQ ID NO: 77300 - protein, 9 aa, synthetic construct
  source 1..9: note = Seed: YTSNPTTFH
YISNPTTFY

SEQ ID NO: 77301 - protein, 10 aa, synthetic construct
  source 1..10: note = Seed: YLTFYLTNDV
YITFYLTNDV

SEQ ID NO: 77302 - protein, 9 aa, synthetic construct
  source 1..9: note = Seed: YITGGVVQL
YITGGVVQA

SEQ ID NO: 77303 - protein, 9 aa, synthetic construct
  source 1..9: note = Seed: YITGGVVQL
YITGGVVQF

SEQ ID NO: 77304 - protein, 9 aa, synthetic construct
  source 1..9: note = Seed: YITGGVVQL
YITGGVVQI

SEQ ID NO: 77305 - protein, 9 aa, synthetic construct
  source 1..9: note = Seed: YITGGVVQL
YITGGVVQM

SEQ ID NO: 77306 - protein, 9 aa, synthetic construct
  source 1..9: note = Seed: YITGGVVQL
YITGGVVQV

SEQ ID NO: 77307 - protein, 9 aa, synthetic construct
  source 1..9: note = Seed: YITGGVVQL
YITGGVVQY

SEQ ID NO: 77308 - protein, 9 aa, synthetic construct
  source 1..9: note = Seed: YLTNDVSFL
YITNDVSFA

SEQ ID NO: 77309 - protein, 9 aa, synthetic construct
  source 1..9: note = Seed: YLTNDVSFL
YITNDVSFF

SEQ ID NO: 77310 - protein, 9 aa, synthetic construct
  source 1..9: note = Seed: YLTNDVSFL
YITNDVSFI

SEQ ID NO: 77311 - protein, 9 aa, synthetic construct
  source 1..9: note = Seed: YLTNDVSFL
YITNDVSFL

SEQ ID NO: 77312 - protein, 10 aa, synthetic construct
  source 1..10: note = Seed: YLTNDVSFLA
YITNDVSFLA

SEQ ID NO: 77313 - protein, 10 aa, synthetic construct
  source 1..10: note = Seed: YLTNDVSFLA
YITNDVSFLI

SEQ ID NO: 77314 - protein, 10 aa, synthetic construct
  source 1..10: note = Seed: YLTNDVSFLA
YITNDVSFLL

SEQ ID NO: 77315 - protein, 10 aa, synthetic construct
  source 1..10: note = Seed: YLTNDVSFLA
YITNDVSFLM

SEQ ID NO: 77316 - protein, 10 aa, synthetic construct
  source 1..10: note = Seed: YLTNDVSFLA
YITNDVSFLV

SEQ ID NO: 77317 - protein, 9 aa, synthetic construct
  source 1..9: note = Seed: YLTNDVSFL
YITNDVSFV

SEQ ID NO: 77318 - protein, 9 aa, synthetic construct
  source 1..9: note = Seed: YLTNDVSFL
YITNDVSFY

SEQ ID NO: 77319 - protein, 9 aa, synthetic construct
  source 1..9: note = Seed: YVTQQLIRA
YITQQLIRV

SEQ ID NO: 77320 - protein, 9 aa, synthetic construct
  source 1..9: note = Seed: YFTSDYYQL
YITSDYYQF

SEQ ID NO: 77321 - protein, 10 aa, synthetic construct
  source 1..10: note = Seed: YFTSDYYQLY
YITSDYYQLK

SEQ ID NO: 77322 - protein, 10 aa, synthetic construct
  source 1..10: note = Seed: YFTSDYYQLY
YITSDYYQLR

SEQ ID NO: 77323 - protein, 10 aa, synthetic construct
  source 1..10: note = Seed: YFTSDYYQLY
YITSDYYQLW

SEQ ID NO: 77324 - protein, 10 aa, synthetic construct
  source 1..10: note = Seed: YFTSDYYQLY
YITSDYYQLY

SEQ ID NO: 77325 - protein, 11 aa, synthetic construct
  source 1..11: note = Seed: YFTSDYYQLYS
YITSDYYQLYY

SEQ ID NO: 77326 - protein, 9 aa, synthetic construct
  source 1..9: note = Seed: YYTSNPTTF
YITSNPTTF

SEQ ID NO: 77327 - protein, 11 aa, synthetic construct
  source 1..11: note = Seed: YYTSNPTTFHL
YITSNPTTFHF

SEQ ID NO: 77328 - protein, 11 aa, synthetic construct
  source 1..11: note = Seed: YYTSNPTTFHL
YITSNPTTFHW

SEQ ID NO: 77329 - protein, 9 aa, synthetic construct
  source 1..9: note = Seed: YYTSNPTTF
YITSNPTTL

SEQ ID NO: 77330 - protein, 9 aa, synthetic construct
  source 1..9: note = Seed: YYTSNPTTF
YITSNPTTM

SEQ ID NO: 77331 - protein, 9 aa, synthetic construct
  source 1..9: note = Seed: YYTSNPTTF
YITSNPTTY

SEQ ID NO: 77332 - protein, 10 aa, synthetic construct
  source 1..10: note = Seed: YTTTIKPVTY
YITTIKPVTW

SEQ ID NO: 77333 - protein, 11 aa, synthetic construct
  source 1..11: note = Seed: YTTTIKPVTYK
YITTIKPVTYR

SEQ ID NO: 77334 - protein, 9 aa, synthetic construct
  source 1..9: note = Seed: YIVDSVTVK
YIVDSVTVR

SEQ ID NO: 77335 - protein, 9 aa, synthetic construct
  source 1..9: note = Seed: YTVEEAKTV
YIVEEAKTF

SEQ ID NO: 77336 - protein, 9 aa, synthetic construct
  source 1..9: note = Seed: YTVEEAKTV
YIVEEAKTL

SEQ ID NO: 77337 - protein, 9 aa, synthetic construct
  source 1..9: note = Seed: YTVEEAKTV
YIVEEAKTM

SEQ ID NO: 77338 - protein, 9 aa, synthetic construct
  source 1..9: note = Seed: YTVEEAKTV
YIVEEAKTV

SEQ ID NO: 77339 - protein, 9 aa, synthetic construct
  source 1..9: note = Seed: YTVEEAKTV
YIVEEAKTY

SEQ ID NO: 77340 - protein, 9 aa, synthetic construct
  source 1..9: note = Seed: YTVELGTEV
YIVELGTEF

SEQ ID NO: 77341 - protein, 9 aa, synthetic construct
  source 1..9: note = Seed: YTVELGTEV
YIVELGTEI

SEQ ID NO: 77342 - protein, 9 aa, synthetic construct
  source 1..9: note = Seed: YTVELGTEV
YIVELGTEL

SEQ ID NO: 77343 - protein, 9 aa, synthetic construct
  source 1..9: note = Seed: YTVELGTEV
YIVELGTEM

SEQ ID NO: 77344 - protein, 9 aa, synthetic construct
  source 1..9: note = Seed: YTVELGTEV
YIVELGTEV

SEQ ID NO: 77345 - protein, 9 aa, synthetic construct
  source 1..9: note = Seed: YTVELGTEV
YIVELGTEY

SEQ ID NO: 77346 - protein, 9 aa, synthetic construct
  source 1..9: note = Seed: YYVGYLQPR
YIVGYLQPK

SEQ ID NO: 77347 - protein, 9 aa, synthetic construct
  source 1..9: note = Seed: YYVGYLQPR
YIVGYLQPM

SEQ ID NO: 77348 - protein, 9 aa, synthetic construct
  source 1..9: note = Seed: YYVGYLQPR
YIVGYLQPR

SEQ ID NO: 77349 - protein, 9 aa, synthetic construct
  source 1..9: note = Seed: YFVKIGPER
YIVKIGPER

SEQ ID NO: 77350 - protein, 9 aa, synthetic construct
  source 1..9: note = Seed: YFVLTSHTV
YIVLTSHTI

SEQ ID NO: 77351 - protein, 9 aa, synthetic construct
  source 1..9: note = Seed: YFVLTSHTV
YIVLTSHTL

SEQ ID NO: 77352 - protein, 9 aa, synthetic construct
  source 1..9: note = Seed: YFVLTSHTV
YIVLTSHTV

SEQ ID NO: 77353 - protein, 9 aa, synthetic construct
  source 1..9: note = Seed: YQVNGYPNM
YIVNGYPNA

SEQ ID NO: 77354 - protein, 9 aa, synthetic construct
  source 1..9: note = Seed: YQVNGYPNM
YIVNGYPNF

SEQ ID NO: 77355 - protein, 9 aa, synthetic construct
  source 1..9: note = Seed: YQVNGYPNM
YIVNGYPNI

SEQ ID NO: 77356 - protein, 9 aa, synthetic construct
  source 1..9: note = Seed: YQVNGYPNM
YIVNGYPNL

SEQ ID NO: 77357 - protein, 9 aa, synthetic construct
  source 1..9: note = Seed: YQVNGYPNM
YIVNGYPNM

SEQ ID NO: 77358 - protein, 11 aa, synthetic construct
  source 1..11: note = Seed: YQVNGYPNMFI
YIVNGYPNMFV

SEQ ID NO: 77359 - protein, 10 aa, synthetic construct
  source 1..10: note = Seed: YQVNGYPNMF
YIVNGYPNMV

SEQ ID NO: 77360 - protein, 9 aa, synthetic construct
  source 1..9: note = Seed: YQVNGYPNM
YIVNGYPNV

SEQ ID NO: 77361 - protein, 9 aa, synthetic construct
  source 1..9: note = Seed: YQVNGYPNM
YIVNGYPNY

SEQ ID NO: 77362 - protein, 9 aa, synthetic construct
  source 1..9: note = Seed: YLVSTQEFR
YIVSTQEFK

SEQ ID NO: 77363 - protein, 9 aa, synthetic construct
  source 1..9: note = Seed: YLVSTQEFR
YIVSTQEFR

SEQ ID NO: 77364 - protein, 10 aa, synthetic construct
  source 1..10: note = Seed: YLVSTQEFRY
YIVSTQEFRY

SEQ ID NO: 77365 - protein, 9 aa, synthetic construct
  source 1..9: note = Seed: YNVTQAFGR
YIVTQAFGK

SEQ ID NO: 77366 - protein, 9 aa, synthetic construct
  source 1..9: note = Seed: YNVTQAFGR
YIVTQAFGR

SEQ ID NO: 77367 - protein, 10 aa, synthetic construct
  source 1..10: note = Seed: YNVTQAFGRR
YIVTQAFGRR

SEQ ID NO: 77368 - protein, 9 aa, synthetic construct
  source 1..9: note = Seed: YFVVKRHTF
YIVVKRHTI

SEQ ID NO: 77369 - protein, 9 aa, synthetic construct
  source 1..9: note = Seed: YFVVKRHTF
YIVVKRHTL

SEQ ID NO: 77370 - protein, 9 aa, synthetic construct
  source 1..9: note = Seed: YFVVKRHTF
YIVVKRHTM

SEQ ID NO: 77371 - protein, 9 aa, synthetic construct
  source 1..9: note = Seed: YFVVKRHTF
YIVVKRHTV

SEQ ID NO: 77372 - protein, 9 aa, synthetic construct
  source 1..9: note = Seed: YFVVKRHTF
YIVVKRHTY

SEQ ID NO: 77373 - protein, 10 aa, synthetic construct
  source 1..10: note = Seed: YRVVVLSFEL
YIVVVLSFEV

SEQ ID NO: 77374 - protein, 10 aa, synthetic construct
  source 1..10: note = Seed: YYVWKSYVHV
YIVWKSYVHI

SEQ ID NO: 77375 - protein, 10 aa, synthetic construct
  source 1..10: note = Seed: YYVWKSYVHV
YIVWKSYVHL

SEQ ID NO: 77376 - protein, 10 aa, synthetic construct
  source 1..10: note = Seed: YYVWKSYVHV
YIVWKSYVHV

SEQ ID NO: 77377 - protein, 9 aa, synthetic construct
  source 1..9: note = Seed: YYVWKSYVH
YIVWKSYVY

SEQ ID NO: 77378 - protein, 9 aa, synthetic construct
  source 1..9: note = Seed: YVWKSYVHV
YIWKSYVHA

SEQ ID NO: 77379 - protein, 9 aa, synthetic construct
  source 1..9: note = Seed: YVWKSYVHV
YIWKSYVHI

SEQ ID NO: 77380 - protein, 9 aa, synthetic construct
  source 1..9: note = Seed: YVWKSYVHV
YIWKSYVHL

SEQ ID NO: 77381 - protein, 9 aa, synthetic construct
  source 1..9: note = Seed: YVWKSYVHV
YIWKSYVHM

SEQ ID NO: 77382 - protein, 9 aa, synthetic construct
  source 1..9: note = Seed: YVWKSYVHV
YIWKSYVHV

SEQ ID NO: 77383 - protein, 10 aa, synthetic construct
  source 1..10: note = Seed: YVWKSYVHVV
YIWKSYVHVA

SEQ ID NO: 77384 - protein, 10 aa, synthetic construct
  source 1..10: note = Seed: YVWKSYVHVV
YIWKSYVHVI

SEQ ID NO: 77385 - protein, 10 aa, synthetic construct
  source 1..10: note = Seed: YVWKSYVHVV
YIWKSYVHVL

SEQ ID NO: 77386 - protein, 10 aa, synthetic construct
  source 1..10: note = Seed: YVWKSYVHVV
YIWKSYVHVM

SEQ ID NO: 77387 - protein, 10 aa, synthetic construct
  source 1..10: note = Seed: YVWKSYVHVV
YIWKSYVHVV

SEQ ID NO: 77388 - protein, 11 aa, synthetic construct
  source 1..11: note = Seed: YVWKSYVHVVD
YIWKSYVHVVV

SEQ ID NO: 77389 - protein, 10 aa, synthetic construct
  source 1..10: note = Seed: YVYANGGKGF
YIYANGGKGF

SEQ ID NO: 77390 - protein, 10 aa, synthetic construct
  source 1..10: note = Seed: YVYANGGKGF
YIYANGGKGM

SEQ ID NO: 77391 - protein, 10 aa, synthetic construct
  source 1..10: note = Seed: YVYANGGKGF
YIYANGGKGY

SEQ ID NO: 77392 - protein, 11 aa, synthetic construct
  source 1..11: note = Seed: YLYFIKGLNNL
YIYFIKGLNNF

SEQ ID NO: 77393 - protein, 11 aa, synthetic construct
  source 1..11: note = Seed: YLYFIKGLNNL
YIYFIKGLNNV

SEQ ID NO: 77394 - protein, 8 aa, synthetic construct
  source 1..8: note = Seed: YLYLTFYL
YIYLTFYI

SEQ ID NO: 77395 - protein, 8 aa, synthetic construct
  source 1..8: note = Seed: YLYLTFYL
YIYLTFYL

SEQ ID NO: 77396 - protein, 9 aa, synthetic construct
  source 1..9: note = Seed: YLYLTFYLT
YIYLTFYLA

SEQ ID NO: 77397 - protein, 9 aa, synthetic construct
  source 1..9: note = Seed: YLYLTFYLT
YIYLTFYLI

SEQ ID NO: 77398 - protein, 9 aa, synthetic construct
  source 1..9: note = Seed: YLYLTFYLT
YIYLTFYLL

SEQ ID NO: 77399 - protein, 9 aa, synthetic construct
  source 1..9: note = Seed: YLYLTFYLT
YIYLTFYLM

SEQ ID NO: 77400 - protein, 9 aa, synthetic construct
  source 1..9: note = Seed: YLYLTFYLT
YIYLTFYLT

SEQ ID NO: 77401 - protein, 9 aa, synthetic construct
  source 1..9: note = Seed: YLYLTFYLT
YIYLTFYLV

SEQ ID NO: 77402 - protein, 8 aa, synthetic construct
  source 1..8: note = Seed: YLYLTFYL
YIYLTFYV

SEQ ID NO: 77403 - protein, 10 aa, synthetic construct
  source 1..10: note = Seed: YDYLVSTQEF
YIYLVSTQEF

SEQ ID NO: 77404 - protein, 11 aa, synthetic construct
  source 1..11: note = Seed: YDYLVSTQEFR
YIYLVSTQEFF

SEQ ID NO: 77405 - protein, 11 aa, synthetic construct
  source 1..11: note = Seed: YDYLVSTQEFR
YIYLVSTQEFR

SEQ ID NO: 77406 - protein, 10 aa, synthetic construct
  source 1..10: note = Seed: YDYLVSTQEF
YIYLVSTQEI

SEQ ID NO: 77407 - protein, 10 aa, synthetic construct
  source 1..10: note = Seed: YDYLVSTQEF
YIYLVSTQEL

SEQ ID NO: 77408 - protein, 10 aa, synthetic construct
  source 1..10: note = Seed: YDYLVSTQEF
YIYLVSTQEM

SEQ ID NO: 77409 - protein, 10 aa, synthetic construct
  source 1..10: note = Seed: YDYLVSTQEF
YIYLVSTQEW

SEQ ID NO: 77410 - protein, 10 aa, synthetic construct
  source 1..10: note = Seed: YDYLVSTQEF
YIYLVSTQEY

SEQ ID NO: 77411 - protein, 9 aa, synthetic construct
  source 1..9: note = Seed: YNYLYRLFR
YIYLYRLFK

SEQ ID NO: 77412 - protein, 9 aa, synthetic construct
  source 1..9: note = Seed: YNYLYRLFR
YIYLYRLFR

SEQ ID NO: 77413 - protein, 10 aa, synthetic construct
  source 1..10: note = Seed: YNYLYRLFRK
YIYLYRLFRK

SEQ ID NO: 77414 - protein, 10 aa, synthetic construct
  source 1..10: note = Seed: YNYLYRLFRK
YIYLYRLFRR

SEQ ID NO: 77415 - protein, 10 aa, synthetic construct
  source 1..10: note = Seed: YVYNPFMIDV
YIYNPFMIDA

SEQ ID NO: 77416 - protein, 10 aa, synthetic construct
  source 1..10: note = Seed: YVYNPFMIDV
YIYNPFMIDI

SEQ ID NO: 77417 - protein, 10 aa, synthetic construct
  source 1..10: note = Seed: YVYNPFMIDV
YIYNPFMIDL

SEQ ID NO: 77418 - protein, 10 aa, synthetic construct
  source 1..10: note = Seed: YVYNPFMIDV
YIYNPFMIDV

SEQ ID NO: 77419 - protein, 8 aa, synthetic construct
  source 1..8: note = Seed: YVYNPFMI
YIYNPFMV

SEQ ID NO: 77420 - protein, 9 aa, synthetic construct
  source 1..9: note = Seed: YLYRLFRKS
YIYRLFRKV

SEQ ID NO: 77421 - protein, 11 aa, synthetic construct
  source 1..11: note = Seed: YDYYRYNLPTM
YIYYRYNLPTF

SEQ ID NO: 77422 - protein, 11 aa, synthetic construct
  source 1..11: note = Seed: YDYYRYNLPTM
YIYYRYNLPTW

SEQ ID NO: 77423 - protein, 10 aa, synthetic construct
  source 1..10: note = Seed: YGANKDGIIW
YKANKDGIIW

SEQ ID NO: 77424 - protein, 10 aa, synthetic construct
  source 1..10: note = Seed: YPANSIVCRF
YKANSIVCRF

SEQ ID NO: 77425 - protein, 10 aa, synthetic construct
  source 1..10: note = Seed: YPANSIVCRF
YKANSIVCRW

SEQ ID NO: 77426 - protein, 10 aa, synthetic construct
  source 1..10: note = Seed: YPANSIVCRF
YKANSIVCRY

SEQ ID NO: 77427 - protein, 9 aa, synthetic construct
  source 1..9: note = Seed: YRARAGEAA
YKARAGEAL

SEQ ID NO: 77428 - protein, 9 aa, synthetic construct
  source 1..9: note = Seed: YRARAGEAA
YKARAGEAM

SEQ ID NO: 77429 - protein, 9 aa, synthetic construct
  source 1..9: note = Seed: YQCGHYKHI
YKCGHYKHF

SEQ ID NO: 77430 - protein, 9 aa, synthetic construct
  source 1..9: note = Seed: YQCGHYKHI
YKCGHYKHY

SEQ ID NO: 77431 - protein, 10 aa, synthetic construct
  source 1..10: note = Seed: YKENSYTTTI
YKENSYTTTA

SEQ ID NO: 77432 - protein, 10 aa, synthetic construct
  source 1..10: note = Seed: YKENSYTTTI
YKENSYTTTF

SEQ ID NO: 77433 - protein, 10 aa, synthetic construct
  source 1..10: note = Seed: YKENSYTTTI
YKENSYTTTL

SEQ ID NO: 77434 - protein, 10 aa, synthetic construct
  source 1..10: note = Seed: YKENSYTTTI
YKENSYTTTM

SEQ ID NO: 77435 - protein, 10 aa, synthetic construct
  source 1..10: note = Seed: YKENSYTTTI
YKENSYTTTY

SEQ ID NO: 77436 - protein, 9 aa, synthetic construct
  source 1..9: note = Seed: YVFCTVNAL
YKFCTVNAF

SEQ ID NO: 77437 - protein, 9 aa, synthetic construct
  source 1..9: note = Seed: YVFCTVNAL
YKFCTVNAH

SEQ ID NO: 77438 - protein, 9 aa, synthetic construct
  source 1..9: note = Seed: YVFCTVNAL
YKFCTVNAI

SEQ ID NO: 77439 - protein, 9 aa, synthetic construct
  source 1..9: note = Seed: YVFCTVNAL
YKFCTVNAL

SEQ ID NO: 77440 - protein, 9 aa, synthetic construct
  source 1..9: note = Seed: YVFCTVNAL
YKFCTVNAM

SEQ ID NO: 77441 - protein, 9 aa, synthetic construct
  source 1..9: note = Seed: YVFCTVNAL
YKFCTVNAV

SEQ ID NO: 77442 - protein, 9 aa, synthetic construct
  source 1..9: note = Seed: YVFCTVNAL
YKFCTVNAW

SEQ ID NO: 77443 - protein, 9 aa, synthetic construct
  source 1..9: note = Seed: YVFCTVNAL
YKFCTVNAY

SEQ ID NO: 77444 - protein, 8 aa, synthetic construct
  source 1..8: note = Seed: YIFFASFY
YKFFASFF

SEQ ID NO: 77445 - protein, 8 aa, synthetic construct
  source 1..8: note = Seed: YIFFASFY
YKFFASFY

SEQ ID NO: 77446 - protein, 9 aa, synthetic construct
  source 1..9: note = Seed: YIFFASFYY
YKFFASFYF

SEQ ID NO: 77447 - protein, 9 aa, synthetic construct
  source 1..9: note = Seed: YIFFASFYY
YKFFASFYI

SEQ ID NO: 77448 - protein, 9 aa, synthetic construct
  source 1..9: note = Seed: YIFFASFYY
YKFFASFYL

SEQ ID NO: 77449 - protein, 9 aa, synthetic construct
  source 1..9: note = Seed: YIFFASFYY
YKFFASFYM

SEQ ID NO: 77450 - protein, 9 aa, synthetic construct
  source 1..9: note = Seed: YIFFASFYY
YKFFASFYR

SEQ ID NO: 77451 - protein, 9 aa, synthetic construct
  source 1..9: note = Seed: YIFFASFYY
YKFFASFYV

SEQ ID NO: 77452 - protein, 9 aa, synthetic construct
  source 1..9: note = Seed: YIFFASFYY
YKFFASFYW

SEQ ID NO: 77453 - protein, 9 aa, synthetic construct
  source 1..9: note = Seed: YIFFASFYY
YKFFASFYY

SEQ ID NO: 77454 - protein, 10 aa, synthetic construct
  source 1..10: note = Seed: YIFFASFYYV
YKFFASFYYF

SEQ ID NO: 77455 - protein, 10 aa, synthetic construct
  source 1..10: note = Seed: YIFFASFYYV
YKFFASFYYH

SEQ ID NO: 77456 - protein, 10 aa, synthetic construct
  source 1..10: note = Seed: YIFFASFYYV
YKFFASFYYI

SEQ ID NO: 77457 - protein, 10 aa, synthetic construct
  source 1..10: note = Seed: YIFFASFYYV
YKFFASFYYK

SEQ ID NO: 77458 - protein, 10 aa, synthetic construct
  source 1..10: note = Seed: YIFFASFYYV
YKFFASFYYL

SEQ ID NO: 77459 - protein, 10 aa, synthetic construct
  source 1..10: note = Seed: YIFFASFYYV
YKFFASFYYM

SEQ ID NO: 77460 - protein, 10 aa, synthetic construct
  source 1..10: note = Seed: YIFFASFYYV
YKFFASFYYR

SEQ ID NO: 77461 - protein, 10 aa, synthetic construct
  source 1..10: note = Seed: YIFFASFYYV
YKFFASFYYV

SEQ ID NO: 77462 - protein, 11 aa, synthetic construct
  source 1..11: note = Seed: YIFFASFYYVW
YKFFASFYYVF

SEQ ID NO: 77463 - protein, 11 aa, synthetic construct
  source 1..11: note = Seed: YIFFASFYYVW
YKFFASFYYVY

SEQ ID NO: 77464 - protein, 10 aa, synthetic construct
  source 1..10: note = Seed: YIFFASFYYV
YKFFASFYYW

SEQ ID NO: 77465 - protein, 10 aa, synthetic construct
  source 1..10: note = Seed: YIFFASFYYV
YKFFASFYYY

SEQ ID NO: 77466 - protein, 10 aa, synthetic construct
  source 1..10: note = Seed: YWFFSNYLKR
YKFFSNYLKR

SEQ ID NO: 77467 - protein, 9 aa, synthetic construct
  source 1..9: note = Seed: YWFFSNYLK
YKFFSNYLY

SEQ ID NO: 77468 - protein, 8 aa, synthetic construct
  source 1..8: note = Seed: YSFLPGVY
YKFLPGVF

SEQ ID NO: 77469 - protein, 8 aa, synthetic construct
  source 1..8: note = Seed: YSFLPGVY
YKFLPGVY

SEQ ID NO: 77470 - protein, 10 aa, synthetic construct
  source 1..10: note = Seed: YSFLPGVYSV
YKFLPGVYSF

SEQ ID NO: 77471 - protein, 10 aa, synthetic construct
  source 1..10: note = Seed: YSFLPGVYSV
YKFLPGVYSI

SEQ ID NO: 77472 - protein, 10 aa, synthetic construct
  source 1..10: note = Seed: YSFLPGVYSV
YKFLPGVYSL

SEQ ID NO: 77473 - protein, 10 aa, synthetic construct
  source 1..10: note = Seed: YSFLPGVYSV
YKFLPGVYSM

SEQ ID NO: 77474 - protein, 10 aa, synthetic construct
  source 1..10: note = Seed: YSFLPGVYSV
YKFLPGVYSW

SEQ ID NO: 77475 - protein, 11 aa, synthetic construct
  source 1..11: note = Seed: YGFQPTNGVGY
YKFQPTNGVGF

SEQ ID NO: 77476 - protein, 11 aa, synthetic construct
  source 1..11: note = Seed: YGFQPTNGVGY
YKFQPTNGVGY

SEQ ID NO: 77477 - protein, 10 aa, synthetic construct
  source 1..10: note = Seed: YHFRELGVVH
YKFRELGVVF

SEQ ID NO: 77478 - protein, 10 aa, synthetic construct
  source 1..10: note = Seed: YHFRELGVVH
YKFRELGVVL

SEQ ID NO: 77479 - protein, 10 aa, synthetic construct
  source 1..10: note = Seed: YHFRELGVVH
YKFRELGVVM

SEQ ID NO: 77480 - protein, 10 aa, synthetic construct
  source 1..10: note = Seed: YHFRELGVVH
YKFRELGVVY

SEQ ID NO: 77481 - protein, 10 aa, synthetic construct
  source 1..10: note = Seed: YVFTGYRVTK
YKFTGYRVTR

SEQ ID NO: 77482 - protein, 10 aa, synthetic construct
  source 1..10: note = Seed: YVGYLQPRTF
YKGYLQPRTF

SEQ ID NO: 77483 - protein, 11 aa, synthetic construct
  source 1..11: note = Seed: YVGYLQPRTFL
YKGYLQPRTFF

SEQ ID NO: 77484 - protein, 11 aa, synthetic construct
  source 1..11: note = Seed: YVGYLQPRTFL
YKGYLQPRTFW

SEQ ID NO: 77485 - protein, 10 aa, synthetic construct
  source 1..10: note = Seed: YVGYLQPRTF
YKGYLQPRTY

SEQ ID NO: 77486 - protein, 9 aa, synthetic construct
  source 1..9: note = Seed: YMHHMELPT
YKHHMELPF

SEQ ID NO: 77487 - protein, 9 aa, synthetic construct
  source 1..9: note = Seed: YMHHMELPT
YKHHMELPI

SEQ ID NO: 77488 - protein, 9 aa, synthetic construct
  source 1..9: note = Seed: YMHHMELPT
YKHHMELPL

SEQ ID NO: 77489 - protein, 9 aa, synthetic construct
  source 1..9: note = Seed: YMHHMELPT
YKHHMELPM

SEQ ID NO: 77490 - protein, 9 aa, synthetic construct
  source 1..9: note = Seed: YMHHMELPT
YKHHMELPY

SEQ ID NO: 77491 - protein, 9 aa, synthetic construct
  source 1..9: note = Seed: YFIASFRLF
YKIASFRLF

SEQ ID NO: 77492 - protein, 11 aa, synthetic construct
  source 1..11: note = Seed: YFIASFRLFAR
YKIASFRLFAR

SEQ ID NO: 77493 - protein, 10 aa, synthetic construct
  source 1..10: note = Seed: YFIASFRLFA
YKIASFRLFI

SEQ ID NO: 77494 - protein, 10 aa, synthetic construct
  source 1..10: note = Seed: YFIASFRLFA
YKIASFRLFL

SEQ ID NO: 77495 - protein, 10 aa, synthetic construct
  source 1..10: note = Seed: YFIASFRLFA
YKIASFRLFV

SEQ ID NO: 77496 - protein, 9 aa, synthetic construct
  source 1..9: note = Seed: YFIASFRLF
YKIASFRLI

SEQ ID NO: 77497 - protein, 9 aa, synthetic construct
  source 1..9: note = Seed: YFIASFRLF
YKIASFRLL

SEQ ID NO: 77498 - protein, 9 aa, synthetic construct
  source 1..9: note = Seed: YFIASFRLF
YKIASFRLM

SEQ ID NO: 77499 - protein, 9 aa, synthetic construct
  source 1..9: note = Seed: YFIASFRLF
YKIASFRLW

SEQ ID NO: 77500 - protein, 9 aa, synthetic construct
  source 1..9: note = Seed: YFIASFRLF
YKIASFRLY

SEQ ID NO: 77501 - protein, 10 aa, synthetic construct
  source 1..10: note = Seed: YIICISTKHF
YKICISTKHF

SEQ ID NO: 77502 - protein, 10 aa, synthetic construct
  source 1..10: note = Seed: YIICISTKHF
YKICISTKHY

SEQ ID NO: 77503 - protein, 9 aa, synthetic construct
  source 1..9: note = Seed: YYKKDNSYF
YKKKDNSYF

SEQ ID NO: 77504 - protein, 9 aa, synthetic construct
  source 1..9: note = Seed: YYKKDNSYF
YKKKDNSYM

SEQ ID NO: 77505 - protein, 9 aa, synthetic construct
  source 1..9: note = Seed: YYKKDNSYF
YKKKDNSYY

SEQ ID NO: 77506 - protein, 9 aa, synthetic construct
  source 1..9: note = Seed: YDKLQFTSL
YKKLQFTSL

SEQ ID NO: 77507 - protein, 11 aa, synthetic construct
  source 1..11: note = Seed: YDKLQFTSLEI
YKKLQFTSLEV

SEQ ID NO: 77508 - protein, 9 aa, synthetic construct
  source 1..9: note = Seed: YDKLQFTSL
YKKLQFTSM

SEQ ID NO: 77509 - protein, 8 aa, synthetic construct
  source 1..8: note = Seed: YLKRRVVF
YKKRRVVL

SEQ ID NO: 77510 - protein, 9 aa, synthetic construct
  source 1..9: note = Seed: YIKWDLLKY
YKKWDLLKF

SEQ ID NO: 77511 - protein, 9 aa, synthetic construct
  source 1..9: note = Seed: YIKWDLLKY
YKKWDLLKY

SEQ ID NO: 77512 - protein, 9 aa, synthetic construct
  source 1..9: note = Seed: YNKYKYFSG
YKKYKYFSI

SEQ ID NO: 77513 - protein, 9 aa, synthetic construct
  source 1..9: note = Seed: YNKYKYFSG
YKKYKYFSL

SEQ ID NO: 77514 - protein, 9 aa, synthetic construct
  source 1..9: note = Seed: YNKYKYFSG
YKKYKYFSM

SEQ ID NO: 77515 - protein, 9 aa, synthetic construct
  source 1..9: note = Seed: YNKYKYFSG
YKKYKYFSV

SEQ ID NO: 77516 - protein, 10 aa, synthetic construct
  source 1..10: note = Seed: YRLFRKSNLK
YKLFRKSNLK

SEQ ID NO: 77517 - protein, 10 aa, synthetic construct
  source 1..10: note = Seed: YRLFRKSNLK
YKLFRKSNLR

SEQ ID NO: 77518 - protein, 9 aa, synthetic construct
  source 1..9: note = Seed: YILFTRFFY
YKLFTRFFF

SEQ ID NO: 77519 - protein, 9 aa, synthetic construct
  source 1..9: note = Seed: YILFTRFFY
YKLFTRFFM

SEQ ID NO: 77520 - protein, 9 aa, synthetic construct
  source 1..9: note = Seed: YILFTRFFY
YKLFTRFFR

SEQ ID NO: 77521 - protein, 9 aa, synthetic construct
  source 1..9: note = Seed: YILFTRFFY
YKLFTRFFY

SEQ ID NO: 77522 - protein, 10 aa, synthetic construct
  source 1..10: note = Seed: YILFTRFFYV
YKLFTRFFYA

SEQ ID NO: 77523 - protein, 10 aa, synthetic construct
  source 1..10: note = Seed: YILFTRFFYV
YKLFTRFFYC

SEQ ID NO: 77524 - protein, 10 aa, synthetic construct
  source 1..10: note = Seed: YILFTRFFYV
YKLFTRFFYF

SEQ ID NO: 77525 - protein, 10 aa, synthetic construct
  source 1..10: note = Seed: YILFTRFFYV
YKLFTRFFYH

SEQ ID NO: 77526 - protein, 10 aa, synthetic construct
  source 1..10: note = Seed: YILFTRFFYV
YKLFTRFFYI

SEQ ID NO: 77527 - protein, 10 aa, synthetic construct
  source 1..10: note = Seed: YILFTRFFYV
YKLFTRFFYK

SEQ ID NO: 77528 - protein, 10 aa, synthetic construct
  source 1..10: note = Seed: YILFTRFFYV
YKLFTRFFYL

SEQ ID NO: 77529 - protein, 10 aa, synthetic construct
  source 1..10: note = Seed: YILFTRFFYV
YKLFTRFFYM

SEQ ID NO: 77530 - protein, 10 aa, synthetic construct
  source 1..10: note = Seed: YILFTRFFYV
YKLFTRFFYR

SEQ ID NO: 77531 - protein, 10 aa, synthetic construct
  source 1..10: note = Seed: YILFTRFFYV
YKLFTRFFYS

SEQ ID NO: 77532 - protein, 10 aa, synthetic construct
  source 1..10: note = Seed: YILFTRFFYV
YKLFTRFFYT

SEQ ID NO: 77533 - protein, 10 aa, synthetic construct
  source 1..10: note = Seed: YILFTRFFYV
YKLFTRFFYV

SEQ ID NO: 77534 - protein, 11 aa, synthetic construct
  source 1..11: note = Seed: YILFTRFFYVL
YKLFTRFFYVA

SEQ ID NO: 77535 - protein, 11 aa, synthetic construct
  source 1..11: note = Seed: YILFTRFFYVL
YKLFTRFFYVC

SEQ ID NO: 77536 - protein, 11 aa, synthetic construct
  source 1..11: note = Seed: YILFTRFFYVL
YKLFTRFFYVD

SEQ ID NO: 77537 - protein, 11 aa, synthetic construct
  source 1..11: note = Seed: YILFTRFFYVL
YKLFTRFFYVE

SEQ ID NO: 77538 - protein, 11 aa, synthetic construct
  source 1..11: note = Seed: YILFTRFFYVL
YKLFTRFFYVF

SEQ ID NO: 77539 - protein, 11 aa, synthetic construct
  source 1..11: note = Seed: YILFTRFFYVL
YKLFTRFFYVG

SEQ ID NO: 77540 - protein, 11 aa, synthetic construct
  source 1..11: note = Seed: YILFTRFFYVL
YKLFTRFFYVH

SEQ ID NO: 77541 - protein, 11 aa, synthetic construct
  source 1..11: note = Seed: YILFTRFFYVL
YKLFTRFFYVI

SEQ ID NO: 77542 - protein, 11 aa, synthetic construct
  source 1..11: note = Seed: YILFTRFFYVL
YKLFTRFFYVK

SEQ ID NO: 77543 - protein, 11 aa, synthetic construct
  source 1..11: note = Seed: YILFTRFFYVL
YKLFTRFFYVL

SEQ ID NO: 77544 - protein, 11 aa, synthetic construct
  source 1..11: note = Seed: YILFTRFFYVL
YKLFTRFFYVM

SEQ ID NO: 77545 - protein, 11 aa, synthetic construct
  source 1..11: note = Seed: YILFTRFFYVL
YKLFTRFFYVN

SEQ ID NO: 77546 - protein, 11 aa, synthetic construct
  source 1..11: note = Seed: YILFTRFFYVL
YKLFTRFFYVP

SEQ ID NO: 77547 - protein, 11 aa, synthetic construct
  source 1..11: note = Seed: YILFTRFFYVL
YKLFTRFFYVQ

SEQ ID NO: 77548 - protein, 11 aa, synthetic construct
  source 1..11: note = Seed: YILFTRFFYVL
YKLFTRFFYVR

SEQ ID NO: 77549 - protein, 11 aa, synthetic construct
  source 1..11: note = Seed: YILFTRFFYVL
YKLFTRFFYVS

SEQ ID NO: 77550 - protein, 11 aa, synthetic construct
  source 1..11: note = Seed: YILFTRFFYVL
YKLFTRFFYVT

SEQ ID NO: 77551 - protein, 11 aa, synthetic construct
  source 1..11: note = Seed: YILFTRFFYVL
YKLFTRFFYVV

SEQ ID NO: 77552 - protein, 11 aa, synthetic construct
  source 1..11: note = Seed: YILFTRFFYVL
YKLFTRFFYVW

SEQ ID NO: 77553 - protein, 11 aa, synthetic construct
  source 1..11: note = Seed: YILFTRFFYVL
YKLFTRFFYVY

SEQ ID NO: 77554 - protein, 10 aa, synthetic construct
  source 1..10: note = Seed: YILFTRFFYV
YKLFTRFFYY

SEQ ID NO: 77555 - protein, 9 aa, synthetic construct
  source 1..9: note = Seed: YKLGASQRV
YKLGASQRF

SEQ ID NO: 77556 - protein, 9 aa, synthetic construct
  source 1..9: note = Seed: YKLGASQRV
YKLGASQRL

SEQ ID NO: 77557 - protein, 9 aa, synthetic construct
  source 1..9: note = Seed: YKLGASQRV
YKLGASQRM

SEQ ID NO: 77558 - protein, 9 aa, synthetic construct
  source 1..9: note = Seed: YKLGASQRV
YKLGASQRY

SEQ ID NO: 77559 - protein, 10 aa, synthetic construct
  source 1..10: note = Seed: YSLLMPILTL
YKLLMPILTA

SEQ ID NO: 77560 - protein, 10 aa, synthetic construct
  source 1..10: note = Seed: YSLLMPILTL
YKLLMPILTI

SEQ ID NO: 77561 - protein, 10 aa, synthetic construct
  source 1..10: note = Seed: YSLLMPILTL
YKLLMPILTL

SEQ ID NO: 77562 - protein, 10 aa, synthetic construct
  source 1..10: note = Seed: YSLLMPILTL
YKLLMPILTV

SEQ ID NO: 77563 - protein, 10 aa, synthetic construct
  source 1..10: note = Seed: YHLMSFPQSA
YKLMSFPQSA

SEQ ID NO: 77564 - protein, 11 aa, synthetic construct
  source 1..11: note = Seed: YHLMSFPQSAP
YKLMSFPQSAV

SEQ ID NO: 77565 - protein, 10 aa, synthetic construct
  source 1..10: note = Seed: YHLMSFPQSA
YKLMSFPQSI

SEQ ID NO: 77566 - protein, 10 aa, synthetic construct
  source 1..10: note = Seed: YHLMSFPQSA
YKLMSFPQSL

SEQ ID NO: 77567 - protein, 10 aa, synthetic construct
  source 1..10: note = Seed: YHLMSFPQSA
YKLMSFPQSM

SEQ ID NO: 77568 - protein, 10 aa, synthetic construct
  source 1..10: note = Seed: YHLMSFPQSA
YKLMSFPQST

SEQ ID NO: 77569 - protein, 10 aa, synthetic construct
  source 1..10: note = Seed: YHLMSFPQSA
YKLMSFPQSV

SEQ ID NO: 77570 - protein, 10 aa, synthetic construct
  source 1..10: note = Seed: YDLSVVNARL
YKLSVVNARA

SEQ ID NO: 77571 - protein, 10 aa, synthetic construct
  source 1..10: note = Seed: YDLSVVNARL
YKLSVVNARI

SEQ ID NO: 77572 - protein, 10 aa, synthetic construct
  source 1..10: note = Seed: YDLSVVNARL
YKLSVVNARL

SEQ ID NO: 77573 - protein, 10 aa, synthetic construct
  source 1..10: note = Seed: YDLSVVNARL
YKLSVVNARM

SEQ ID NO: 77574 - protein, 10 aa, synthetic construct
  source 1..10: note = Seed: YDLSVVNARL
YKLSVVNARV

SEQ ID NO: 77575 - protein, 8 aa, synthetic construct
  source 1..8: note = Seed: YTMADLVY
YKMADLVF

SEQ ID NO: 77576 - protein, 8 aa, synthetic construct
  source 1..8: note = Seed: YTMADLVY
YKMADLVM

SEQ ID NO: 77577 - protein, 8 aa, synthetic construct
  source 1..8: note = Seed: YTMADLVY
YKMADLVY

SEQ ID NO: 77578 - protein, 10 aa, synthetic construct
  source 1..10: note = Seed: YTMADLVYAL
YKMADLVYAA

SEQ ID NO: 77579 - protein, 10 aa, synthetic construct
  source 1..10: note = Seed: YTMADLVYAL
YKMADLVYAC

SEQ ID NO: 77580 - protein, 10 aa, synthetic construct
  source 1..10: note = Seed: YTMADLVYAL
YKMADLVYAF

SEQ ID NO: 77581 - protein, 10 aa, synthetic construct
  source 1..10: note = Seed: YTMADLVYAL
YKMADLVYAG

SEQ ID NO: 77582 - protein, 10 aa, synthetic construct
  source 1..10: note = Seed: YTMADLVYAL
YKMADLVYAI

SEQ ID NO: 77583 - protein, 10 aa, synthetic construct
  source 1..10: note = Seed: YTMADLVYAL
YKMADLVYAL

SEQ ID NO: 77584 - protein, 11 aa, synthetic construct
  source 1..11: note = Seed: YTMADLVYALR
YKMADLVYALA

SEQ ID NO: 77585 - protein, 11 aa, synthetic construct
  source 1..11: note = Seed: YTMADLVYALR
YKMADLVYALC

SEQ ID NO: 77586 - protein, 11 aa, synthetic construct
  source 1..11: note = Seed: YTMADLVYALR
YKMADLVYALD

SEQ ID NO: 77587 - protein, 11 aa, synthetic construct
  source 1..11: note = Seed: YTMADLVYALR
YKMADLVYALE

SEQ ID NO: 77588 - protein, 11 aa, synthetic construct
  source 1..11: note = Seed: YTMADLVYALR
YKMADLVYALF

SEQ ID NO: 77589 - protein, 11 aa, synthetic construct
  source 1..11: note = Seed: YTMADLVYALR
YKMADLVYALG

SEQ ID NO: 77590 - protein, 11 aa, synthetic construct
  source 1..11: note = Seed: YTMADLVYALR
YKMADLVYALH

SEQ ID NO: 77591 - protein, 11 aa, synthetic construct
  source 1..11: note = Seed: YTMADLVYALR
YKMADLVYALI

SEQ ID NO: 77592 - protein, 11 aa, synthetic construct
  source 1..11: note = Seed: YTMADLVYALR
YKMADLVYALK

SEQ ID NO: 77593 - protein, 11 aa, synthetic construct
  source 1..11: note = Seed: YTMADLVYALR
YKMADLVYALL

SEQ ID NO: 77594 - protein, 11 aa, synthetic construct
  source 1..11: note = Seed: YTMADLVYALR
YKMADLVYALM

SEQ ID NO: 77595 - protein, 11 aa, synthetic construct
  source 1..11: note = Seed: YTMADLVYALR
YKMADLVYALN

SEQ ID NO: 77596 - protein, 11 aa, synthetic construct
  source 1..11: note = Seed: YTMADLVYALR
YKMADLVYALP

SEQ ID NO: 77597 - protein, 11 aa, synthetic construct
  source 1..11: note = Seed: YTMADLVYALR
YKMADLVYALQ

SEQ ID NO: 77598 - protein, 11 aa, synthetic construct
  source 1..11: note = Seed: YTMADLVYALR
YKMADLVYALR

SEQ ID NO: 77599 - protein, 11 aa, synthetic construct
  source 1..11: note = Seed: YTMADLVYALR
YKMADLVYALS

SEQ ID NO: 77600 - protein, 11 aa, synthetic construct
  source 1..11: note = Seed: YTMADLVYALR
YKMADLVYALT

SEQ ID NO: 77601 - protein, 11 aa, synthetic construct
  source 1..11: note = Seed: YTMADLVYALR
YKMADLVYALV

SEQ ID NO: 77602 - protein, 11 aa, synthetic construct
  source 1..11: note = Seed: YTMADLVYALR
YKMADLVYALW

SEQ ID NO: 77603 - protein, 11 aa, synthetic construct
  source 1..11: note = Seed: YTMADLVYALR
YKMADLVYALY

SEQ ID NO: 77604 - protein, 10 aa, synthetic construct
  source 1..10: note = Seed: YTMADLVYAL
YKMADLVYAM

SEQ ID NO: 77605 - protein, 10 aa, synthetic construct
  source 1..10: note = Seed: YTMADLVYAL
YKMADLVYAS

SEQ ID NO: 77606 - protein, 10 aa, synthetic construct
  source 1..10: note = Seed: YTMADLVYAL
YKMADLVYAT

SEQ ID NO: 77607 - protein, 10 aa, synthetic construct
  source 1..10: note = Seed: YTMADLVYAL
YKMADLVYAV

SEQ ID NO: 77608 - protein, 10 aa, synthetic construct
  source 1..10: note = Seed: YTMADLVYAL
YKMADLVYAY

SEQ ID NO: 77609 - protein, 9 aa, synthetic construct
  source 1..9: note = Seed: YTMADLVYA
YKMADLVYI

SEQ ID NO: 77610 - protein, 9 aa, synthetic construct
  source 1..9: note = Seed: YTMADLVYA
YKMADLVYL

SEQ ID NO: 77611 - protein, 9 aa, synthetic construct
  source 1..9: note = Seed: YTMADLVYA
YKMADLVYV

SEQ ID NO: 77612 - protein, 9 aa, synthetic construct
  source 1..9: note = Seed: YVMHANYIF
YKMHANYIF

SEQ ID NO: 77613 - protein, 10 aa, synthetic construct
  source 1..10: note = Seed: YVMHANYIFW
YKMHANYIFF

SEQ ID NO: 77614 - protein, 10 aa, synthetic construct
  source 1..10: note = Seed: YVMHANYIFW
YKMHANYIFY

SEQ ID NO: 77615 - protein, 9 aa, synthetic construct
  source 1..9: note = Seed: YVMHANYIF
YKMHANYII

SEQ ID NO: 77616 - protein, 9 aa, synthetic construct
  source 1..9: note = Seed: YVMHANYIF
YKMHANYIL

SEQ ID NO: 77617 - protein, 9 aa, synthetic construct
  source 1..9: note = Seed: YVMHANYIF
YKMHANYIM

SEQ ID NO: 77618 - protein, 9 aa, synthetic construct
  source 1..9: note = Seed: YVMHANYIF
YKMHANYIW

SEQ ID NO: 77619 - protein, 9 aa, synthetic construct
  source 1..9: note = Seed: YVMHANYIF
YKMHANYIY

SEQ ID NO: 77620 - protein, 9 aa, synthetic construct
  source 1..9: note = Seed: YTNDKACPL
YKNDKACPF

SEQ ID NO: 77621 - protein, 9 aa, synthetic construct
  source 1..9: note = Seed: YTNDKACPL
YKNDKACPL

SEQ ID NO: 77622 - protein, 9 aa, synthetic construct
  source 1..9: note = Seed: YTNDKACPL
YKNDKACPM

SEQ ID NO: 77623 - protein, 9 aa, synthetic construct
  source 1..9: note = Seed: YTNDKACPL
YKNDKACPY

SEQ ID NO: 77624 - protein, 10 aa, synthetic construct
  source 1..10: note = Seed: YQNNVFMSEA
YKNNVFMSEF

SEQ ID NO: 77625 - protein, 10 aa, synthetic construct
  source 1..10: note = Seed: YQNNVFMSEA
YKNNVFMSEM

SEQ ID NO: 77626 - protein, 10 aa, synthetic construct
  source 1..10: note = Seed: YQNNVFMSEA
YKNNVFMSEY

SEQ ID NO: 77627 - protein, 9 aa, synthetic construct
  source 1..9: note = Seed: YQNNVFMSE
YKNNVFMSF

SEQ ID NO: 77628 - protein, 9 aa, synthetic construct
  source 1..9: note = Seed: YQNNVFMSE
YKNNVFMSH

SEQ ID NO: 77629 - protein, 9 aa, synthetic construct
  source 1..9: note = Seed: YQNNVFMSE
YKNNVFMSI

SEQ ID NO: 77630 - protein, 9 aa, synthetic construct
  source 1..9: note = Seed: YQNNVFMSE
YKNNVFMSL

SEQ ID NO: 77631 - protein, 9 aa, synthetic construct
  source 1..9: note = Seed: YQNNVFMSE
YKNNVFMSM

SEQ ID NO: 77632 - protein, 9 aa, synthetic construct
  source 1..9: note = Seed: YQNNVFMSE
YKNNVFMSV

SEQ ID NO: 77633 - protein, 9 aa, synthetic construct
  source 1..9: note = Seed: YQNNVFMSE
YKNNVFMSW

SEQ ID NO: 77634 - protein, 9 aa, synthetic construct
  source 1..9: note = Seed: YQNNVFMSE
YKNNVFMSY

SEQ ID NO: 77635 - protein, 9 aa, synthetic construct
  source 1..9: note = Seed: YVNTFSSTF
YKNTFSSTF

SEQ ID NO: 77636 - protein, 9 aa, synthetic construct
  source 1..9: note = Seed: YVNTFSSTF
YKNTFSSTH

SEQ ID NO: 77637 - protein, 9 aa, synthetic construct
  source 1..9: note = Seed: YVNTFSSTF
YKNTFSSTI

SEQ ID NO: 77638 - protein, 9 aa, synthetic construct
  source 1..9: note = Seed: YVNTFSSTF
YKNTFSSTL

SEQ ID NO: 77639 - protein, 9 aa, synthetic construct
  source 1..9: note = Seed: YVNTFSSTF
YKNTFSSTM

SEQ ID NO: 77640 - protein, 9 aa, synthetic construct
  source 1..9: note = Seed: YVNTFSSTF
YKNTFSSTV

SEQ ID NO: 77641 - protein, 9 aa, synthetic construct
  source 1..9: note = Seed: YVNTFSSTF
YKNTFSSTW

SEQ ID NO: 77642 - protein, 9 aa, synthetic construct
  source 1..9: note = Seed: YVNTFSSTF
YKNTFSSTY

SEQ ID NO: 77643 - protein, 10 aa, synthetic construct
  source 1..10: note = Seed: YTPHTVLQAV
YKPHTVLQAA

SEQ ID NO: 77644 - protein, 10 aa, synthetic construct
  source 1..10: note = Seed: YTPHTVLQAV
YKPHTVLQAI

SEQ ID NO: 77645 - protein, 10 aa, synthetic construct
  source 1..10: note = Seed: YTPHTVLQAV
YKPHTVLQAL

SEQ ID NO: 77646 - protein, 10 aa, synthetic construct
  source 1..10: note = Seed: YTPHTVLQAV
YKPHTVLQAM

SEQ ID NO: 77647 - protein, 10 aa, synthetic construct
  source 1..10: note = Seed: YTPHTVLQAV
YKPHTVLQAV

SEQ ID NO: 77648 - protein, 8 aa, synthetic construct
  source 1..8: note = Seed: YMPYFFTL
YKPYFFTF

SEQ ID NO: 77649 - protein, 9 aa, synthetic construct
  source 1..9: note = Seed: YMPYFFTLL
YKPYFFTLF

SEQ ID NO: 77650 - protein, 10 aa, synthetic construct
  source 1..10: note = Seed: YMPYFFTLLL
YKPYFFTLLA

SEQ ID NO: 77651 - protein, 10 aa, synthetic construct
  source 1..10: note = Seed: YMPYFFTLLL
YKPYFFTLLF

SEQ ID NO: 77652 - protein, 10 aa, synthetic construct
  source 1..10: note = Seed: YMPYFFTLLL
YKPYFFTLLL

SEQ ID NO: 77653 - protein, 10 aa, synthetic construct
  source 1..10: note = Seed: YMPYFFTLLL
YKPYFFTLLM

SEQ ID NO: 77654 - protein, 10 aa, synthetic construct
  source 1..10: note = Seed: YMPYFFTLLL
YKPYFFTLLT

SEQ ID NO: 77655 - protein, 10 aa, synthetic construct
  source 1..10: note = Seed: YMPYFFTLLL
YKPYFFTLLV

SEQ ID NO: 77656 - protein, 10 aa, synthetic construct
  source 1..10: note = Seed: YMPYFFTLLL
YKPYFFTLLW

SEQ ID NO: 77657 - protein, 10 aa, synthetic construct
  source 1..10: note = Seed: YMPYFFTLLL
YKPYFFTLLY

SEQ ID NO: 77658 - protein, 9 aa, synthetic construct
  source 1..9: note = Seed: YMPYFFTLL
YKPYFFTLY

SEQ ID NO: 77659 - protein, 10 aa, synthetic construct
  source 1..10: note = Seed: YQPYRVVVLS
YKPYRVVVLA

SEQ ID NO: 77660 - protein, 9 aa, synthetic construct
  source 1..9: note = Seed: YQPYRVVVL
YKPYRVVVY

SEQ ID NO: 77661 - protein, 9 aa, synthetic construct
  source 1..9: note = Seed: YKQFDTYNL
YKQFDTYNF

SEQ ID NO: 77662 - protein, 10 aa, synthetic construct
  source 1..10: note = Seed: YKQFDTYNLW
YKQFDTYNLF

SEQ ID NO: 77663 - protein, 10 aa, synthetic construct
  source 1..10: note = Seed: YKQFDTYNLW
YKQFDTYNLM

SEQ ID NO: 77664 - protein, 10 aa, synthetic construct
  source 1..10: note = Seed: YKQFDTYNLW
YKQFDTYNLY

SEQ ID NO: 77665 - protein, 9 aa, synthetic construct
  source 1..9: note = Seed: YKQFDTYNL
YKQFDTYNM

SEQ ID NO: 77666 - protein, 9 aa, synthetic construct
  source 1..9: note = Seed: YKQFDTYNL
YKQFDTYNY

SEQ ID NO: 77667 - protein, 10 aa, synthetic construct
  source 1..10: note = Seed: YSQLMCQPIL
YKQLMCQPIF

SEQ ID NO: 77668 - protein, 11 aa, synthetic construct
  source 1..11: note = Seed: YSQLMCQPILL
YKQLMCQPILA

SEQ ID NO: 77669 - protein, 11 aa, synthetic construct
  source 1..11: note = Seed: YSQLMCQPILL
YKQLMCQPILI

SEQ ID NO: 77670 - protein, 11 aa, synthetic construct
  source 1..11: note = Seed: YSQLMCQPILL
YKQLMCQPILL

SEQ ID NO: 77671 - protein, 11 aa, synthetic construct
  source 1..11: note = Seed: YSQLMCQPILL
YKQLMCQPILM

SEQ ID NO: 77672 - protein, 11 aa, synthetic construct
  source 1..11: note = Seed: YSQLMCQPILL
YKQLMCQPILV

SEQ ID NO: 77673 - protein, 10 aa, synthetic construct
  source 1..10: note = Seed: YSQLMCQPIL
YKQLMCQPIM

SEQ ID NO: 77674 - protein, 10 aa, synthetic construct
  source 1..10: note = Seed: YSQLMCQPIL
YKQLMCQPIY

SEQ ID NO: 77675 - protein, 9 aa, synthetic construct
  source 1..9: note = Seed: YLQPRTFLL
YKQPRTFLF

SEQ ID NO: 77676 - protein, 9 aa, synthetic construct
  source 1..9: note = Seed: YLQPRTFLL
YKQPRTFLL

SEQ ID NO: 77677 - protein, 9 aa, synthetic construct
  source 1..9: note = Seed: YLQPRTFLL
YKQPRTFLM

SEQ ID NO: 77678 - protein, 9 aa, synthetic construct
  source 1..9: note = Seed: YLQPRTFLL
YKQPRTFLY

SEQ ID NO: 77679 - protein, 10 aa, synthetic construct
  source 1..10: note = Seed: YPQVNGLTSI
YKQVNGLTSF

SEQ ID NO: 77680 - protein, 10 aa, synthetic construct
  source 1..10: note = Seed: YPQVNGLTSI
YKQVNGLTSI

SEQ ID NO: 77681 - protein, 10 aa, synthetic construct
  source 1..10: note = Seed: YPQVNGLTSI
YKQVNGLTSL

SEQ ID NO: 77682 - protein, 10 aa, synthetic construct
  source 1..10: note = Seed: YPQVNGLTSI
YKQVNGLTSM

SEQ ID NO: 77683 - protein, 10 aa, synthetic construct
  source 1..10: note = Seed: YPQVNGLTSI
YKQVNGLTSV

SEQ ID NO: 77684 - protein, 10 aa, synthetic construct
  source 1..10: note = Seed: YPQVNGLTSI
YKQVNGLTSY

SEQ ID NO: 77685 - protein, 9 aa, synthetic construct
  source 1..9: note = Seed: YKRDAPAHI
YKRDAPAHF

SEQ ID NO: 77686 - protein, 9 aa, synthetic construct
  source 1..9: note = Seed: YKRDAPAHI
YKRDAPAHM

SEQ ID NO: 77687 - protein, 9 aa, synthetic construct
  source 1..9: note = Seed: YKRDAPAHI
YKRDAPAHY

SEQ ID NO: 77688 - protein, 10 aa, synthetic construct
  source 1..10: note = Seed: YRRLISMMGF
YKRLISMMGF

SEQ ID NO: 77689 - protein, 10 aa, synthetic construct
  source 1..10: note = Seed: YRRLISMMGF
YKRLISMMGI

SEQ ID NO: 77690 - protein, 10 aa, synthetic construct
  source 1..10: note = Seed: YRRLISMMGF
YKRLISMMGL

SEQ ID NO: 77691 - protein, 10 aa, synthetic construct
  source 1..10: note = Seed: YRRLISMMGF
YKRLISMMGM

SEQ ID NO: 77692 - protein, 10 aa, synthetic construct
  source 1..10: note = Seed: YRRLISMMGF
YKRLISMMGY

SEQ ID NO: 77693 - protein, 9 aa, synthetic construct
  source 1..9: note = Seed: YFRLTLGVY
YKRLTLGVF

SEQ ID NO: 77694 - protein, 9 aa, synthetic construct
  source 1..9: note = Seed: YFRLTLGVY
YKRLTLGVL

SEQ ID NO: 77695 - protein, 9 aa, synthetic construct
  source 1..9: note = Seed: YFRLTLGVY
YKRLTLGVM

SEQ ID NO: 77696 - protein, 9 aa, synthetic construct
  source 1..9: note = Seed: YFRLTLGVY
YKRLTLGVY

SEQ ID NO: 77697 - protein, 9 aa, synthetic construct
  source 1..9: note = Seed: YYRSLPGVF
YKRSLPGVF

SEQ ID NO: 77698 - protein, 9 aa, synthetic construct
  source 1..9: note = Seed: YYRSLPGVF
YKRSLPGVL

SEQ ID NO: 77699 - protein, 9 aa, synthetic construct
  source 1..9: note = Seed: YYRSLPGVF
YKRSLPGVM

SEQ ID NO: 77700 - protein, 9 aa, synthetic construct
  source 1..9: note = Seed: YYRSLPGVF
YKRSLPGVY

SEQ ID NO: 77701 - protein, 9 aa, synthetic construct
  source 1..9: note = Seed: YYRYNLPTM
YKRYNLPTF

SEQ ID NO: 77702 - protein, 9 aa, synthetic construct
  source 1..9: note = Seed: YYRYNLPTM
YKRYNLPTL

SEQ ID NO: 77703 - protein, 9 aa, synthetic construct
  source 1..9: note = Seed: YYRYNLPTM
YKRYNLPTM

SEQ ID NO: 77704 - protein, 10 aa, synthetic construct
  source 1..10: note = Seed: YYRYNLPTMC
YKRYNLPTMF

SEQ ID NO: 77705 - protein, 10 aa, synthetic construct
  source 1..10: note = Seed: YYRYNLPTMC
YKRYNLPTMI

SEQ ID NO: 77706 - protein, 10 aa, synthetic construct
  source 1..10: note = Seed: YYRYNLPTMC
YKRYNLPTML

SEQ ID NO: 77707 - protein, 10 aa, synthetic construct
  source 1..10: note = Seed: YYRYNLPTMC
YKRYNLPTMM

SEQ ID NO: 77708 - protein, 10 aa, synthetic construct
  source 1..10: note = Seed: YYRYNLPTMC
YKRYNLPTMV

SEQ ID NO: 77709 - protein, 9 aa, synthetic construct
  source 1..9: note = Seed: YYRYNLPTM
YKRYNLPTY

SEQ ID NO: 77710 - protein, 9 aa, synthetic construct
  source 1..9: note = Seed: YSRYRIGNY
YKRYRIGNF

SEQ ID NO: 77711 - protein, 9 aa, synthetic construct
  source 1..9: note = Seed: YSRYRIGNY
YKRYRIGNY

SEQ ID NO: 77712 - protein, 10 aa, synthetic construct
  source 1..10: note = Seed: YSRYRIGNYK
YKRYRIGNYF

SEQ ID NO: 77713 - protein, 10 aa, synthetic construct
  source 1..10: note = Seed: YSRYRIGNYK
YKRYRIGNYK

SEQ ID NO: 77714 - protein, 11 aa, synthetic construct
  source 1..11: note = Seed: YSRYRIGNYKL
YKRYRIGNYKF

SEQ ID NO: 77715 - protein, 10 aa, synthetic construct
  source 1..10: note = Seed: YSRYRIGNYK
YKRYRIGNYL

SEQ ID NO: 77716 - protein, 10 aa, synthetic construct
  source 1..10: note = Seed: YSRYRIGNYK
YKRYRIGNYM

SEQ ID NO: 77717 - protein, 10 aa, synthetic construct
  source 1..10: note = Seed: YSRYRIGNYK
YKRYRIGNYR

SEQ ID NO: 77718 - protein, 9 aa, synthetic construct
  source 1..9: note = Seed: YSSANNCTF
YKSANNCTF

SEQ ID NO: 77719 - protein, 11 aa, synthetic construct
  source 1..11: note = Seed: YSSANNCTFEY
YKSANNCTFEF

SEQ ID NO: 77720 - protein, 11 aa, synthetic construct
  source 1..11: note = Seed: YSSANNCTFEY
YKSANNCTFEW

SEQ ID NO: 77721 - protein, 9 aa, synthetic construct
  source 1..9: note = Seed: YSSANNCTF
YKSANNCTL

SEQ ID NO: 77722 - protein, 9 aa, synthetic construct
  source 1..9: note = Seed: YSSANNCTF
YKSANNCTM

SEQ ID NO: 77723 - protein, 9 aa, synthetic construct
  source 1..9: note = Seed: YSSANNCTF
YKSANNCTY

SEQ ID NO: 77724 - protein, 9 aa, synthetic construct
  source 1..9: note = Seed: YNSASFSTF
YKSASFSTF

SEQ ID NO: 77725 - protein, 10 aa, synthetic construct
  source 1..10: note = Seed: YNSASFSTFK
YKSASFSTFK

SEQ ID NO: 77726 - protein, 10 aa, synthetic construct
  source 1..10: note = Seed: YNSASFSTFK
YKSASFSTFR

SEQ ID NO: 77727 - protein, 9 aa, synthetic construct
  source 1..9: note = Seed: YNSASFSTF
YKSASFSTH

SEQ ID NO: 77728 - protein, 9 aa, synthetic construct
  source 1..9: note = Seed: YNSASFSTF
YKSASFSTI

SEQ ID NO: 77729 - protein, 9 aa, synthetic construct
  source 1..9: note = Seed: YNSASFSTF
YKSASFSTL

SEQ ID NO: 77730 - protein, 9 aa, synthetic construct
  source 1..9: note = Seed: YNSASFSTF
YKSASFSTM

SEQ ID NO: 77731 - protein, 9 aa, synthetic construct
  source 1..9: note = Seed: YNSASFSTF
YKSASFSTV

SEQ ID NO: 77732 - protein, 9 aa, synthetic construct
  source 1..9: note = Seed: YNSASFSTF
YKSASFSTW

SEQ ID NO: 77733 - protein, 9 aa, synthetic construct
  source 1..9: note = Seed: YNSASFSTF
YKSASFSTY

SEQ ID NO: 77734 - protein, 9 aa, synthetic construct
  source 1..9: note = Seed: YASAVVLLI
YKSAVVLLF

SEQ ID NO: 77735 - protein, 10 aa, synthetic construct
  source 1..10: note = Seed: YASAVVLLIL
YKSAVVLLIW

SEQ ID NO: 77736 - protein, 9 aa, synthetic construct
  source 1..9: note = Seed: YASAVVLLI
YKSAVVLLL

SEQ ID NO: 77737 - protein, 9 aa, synthetic construct
  source 1..9: note = Seed: YASAVVLLI
YKSAVVLLM

SEQ ID NO: 77738 - protein, 9 aa, synthetic construct
  source 1..9: note = Seed: YASAVVLLI
YKSAVVLLY

SEQ ID NO: 77739 - protein, 11 aa, synthetic construct
  source 1..11: note = Seed: YYSLLMPILTL
YKSLLMPILTV

SEQ ID NO: 77740 - protein, 11 aa, synthetic construct
  source 1..11: note = Seed: YRSLPGVFCGV
YKSLPGVFCGI

SEQ ID NO: 77741 - protein, 11 aa, synthetic construct
  source 1..11: note = Seed: YRSLPGVFCGV
YKSLPGVFCGV

SEQ ID NO: 77742 - protein, 10 aa, synthetic construct
  source 1..10: note = Seed: YESLRPDTRY
YKSLRPDTRF

SEQ ID NO: 77743 - protein, 10 aa, synthetic construct
  source 1..10: note = Seed: YESLRPDTRY
YKSLRPDTRW

SEQ ID NO: 77744 - protein, 10 aa, synthetic construct
  source 1..10: note = Seed: YTSNPTTFHL
YKSNPTTFHF

SEQ ID NO: 77745 - protein, 10 aa, synthetic construct
  source 1..10: note = Seed: YTSNPTTFHL
YKSNPTTFHW

SEQ ID NO: 77746 - protein, 10 aa, synthetic construct
  source 1..10: note = Seed: YTSNPTTFHL
YKSNPTTFHY

SEQ ID NO: 77747 - protein, 10 aa, synthetic construct
  source 1..10: note = Seed: YLTFYLTNDV
YKTFYLTNDV

SEQ ID NO: 77748 - protein, 10 aa, synthetic construct
  source 1..10: note = Seed: YLTNDVSFLA
YKTNDVSFLA

SEQ ID NO: 77749 - protein, 10 aa, synthetic construct
  source 1..10: note = Seed: YLTNDVSFLA
YKTNDVSFLI

SEQ ID NO: 77750 - protein, 10 aa, synthetic construct
  source 1..10: note = Seed: YLTNDVSFLA
YKTNDVSFLL

SEQ ID NO: 77751 - protein, 10 aa, synthetic construct
  source 1..10: note = Seed: YLTNDVSFLA
YKTNDVSFLM

SEQ ID NO: 77752 - protein, 10 aa, synthetic construct
  source 1..10: note = Seed: YLTNDVSFLA
YKTNDVSFLV

SEQ ID NO: 77753 - protein, 10 aa, synthetic construct
  source 1..10: note = Seed: YFTSDYYQLY
YKTSDYYQLK

SEQ ID NO: 77754 - protein, 10 aa, synthetic construct
  source 1..10: note = Seed: YFTSDYYQLY
YKTSDYYQLR

SEQ ID NO: 77755 - protein, 10 aa, synthetic construct
  source 1..10: note = Seed: YFTSDYYQLY
YKTSDYYQLW

SEQ ID NO: 77756 - protein, 10 aa, synthetic construct
  source 1..10: note = Seed: YFTSDYYQLY
YKTSDYYQLY

SEQ ID NO: 77757 - protein, 9 aa, synthetic construct
  source 1..9: note = Seed: YYTSNPTTF
YKTSNPTTF

SEQ ID NO: 77758 - protein, 11 aa, synthetic construct
  source 1..11: note = Seed: YYTSNPTTFHL
YKTSNPTTFHF

SEQ ID NO: 77759 - protein, 11 aa, synthetic construct
  source 1..11: note = Seed: YYTSNPTTFHL
YKTSNPTTFHW

SEQ ID NO: 77760 - protein, 9 aa, synthetic construct
  source 1..9: note = Seed: YYTSNPTTF
YKTSNPTTL

SEQ ID NO: 77761 - protein, 9 aa, synthetic construct
  source 1..9: note = Seed: YYTSNPTTF
YKTSNPTTM

SEQ ID NO: 77762 - protein, 9 aa, synthetic construct
  source 1..9: note = Seed: YYTSNPTTF
YKTSNPTTY

SEQ ID NO: 77763 - protein, 10 aa, synthetic construct
  source 1..10: note = Seed: YTTTIKPVTY
YKTTIKPVTW

SEQ ID NO: 77764 - protein, 11 aa, synthetic construct
  source 1..11: note = Seed: YTTTIKPVTYK
YKTTIKPVTYR

SEQ ID NO: 77765 - protein, 9 aa, synthetic construct
  source 1..9: note = Seed: YQVNGYPNM
YKVNGYPNF

SEQ ID NO: 77766 - protein, 9 aa, synthetic construct
  source 1..9: note = Seed: YQVNGYPNM
YKVNGYPNL

SEQ ID NO: 77767 - protein, 9 aa, synthetic construct
  source 1..9: note = Seed: YQVNGYPNM
YKVNGYPNM

SEQ ID NO: 77768 - protein, 10 aa, synthetic construct
  source 1..10: note = Seed: YQVNGYPNMF
YKVNGYPNMF

SEQ ID NO: 77769 - protein, 10 aa, synthetic construct
  source 1..10: note = Seed: YQVNGYPNMF
YKVNGYPNMY

SEQ ID NO: 77770 - protein, 9 aa, synthetic construct
  source 1..9: note = Seed: YQVNGYPNM
YKVNGYPNY

SEQ ID NO: 77771 - protein, 10 aa, synthetic construct
  source 1..10: note = Seed: YLVSTQEFRY
YKVSTQEFRF

SEQ ID NO: 77772 - protein, 9 aa, synthetic construct
  source 1..9: note = Seed: YFVVKRHTF
YKVVKRHTF

SEQ ID NO: 77773 - protein, 9 aa, synthetic construct
  source 1..9: note = Seed: YFVVKRHTF
YKVVKRHTM

SEQ ID NO: 77774 - protein, 9 aa, synthetic construct
  source 1..9: note = Seed: YFVVKRHTF
YKVVKRHTY

SEQ ID NO: 77775 - protein, 8 aa, synthetic construct
  source 1..8: note = Seed: YRVVVLSF
YKVVVLSF

SEQ ID NO: 77776 - protein, 8 aa, synthetic construct
  source 1..8: note = Seed: YRVVVLSF
YKVVVLSY

SEQ ID NO: 77777 - protein, 10 aa, synthetic construct
  source 1..10: note = Seed: YYVWKSYVHV
YKVWKSYVHV

SEQ ID NO: 77778 - protein, 10 aa, synthetic construct
  source 1..10: note = Seed: YVYANGGKGF
YKYANGGKGF

SEQ ID NO: 77779 - protein, 10 aa, synthetic construct
  source 1..10: note = Seed: YVYANGGKGF
YKYANGGKGM

SEQ ID NO: 77780 - protein, 10 aa, synthetic construct
  source 1..10: note = Seed: YVYANGGKGF
YKYANGGKGY

SEQ ID NO: 77781 - protein, 11 aa, synthetic construct
  source 1..11: note = Seed: YLYFIKGLNNL
YKYFIKGLNNF

SEQ ID NO: 77782 - protein, 9 aa, synthetic construct
  source 1..9: note = Seed: YNYKLPDDF
YKYKLPDDF

SEQ ID NO: 77783 - protein, 9 aa, synthetic construct
  source 1..9: note = Seed: YNYKLPDDF
YKYKLPDDY

SEQ ID NO: 77784 - protein, 10 aa, synthetic construct
  source 1..10: note = Seed: YDYLVSTQEF
YKYLVSTQEF

SEQ ID NO: 77785 - protein, 11 aa, synthetic construct
  source 1..11: note = Seed: YDYLVSTQEFR
YKYLVSTQEFF

SEQ ID NO: 77786 - protein, 11 aa, synthetic construct
  source 1..11: note = Seed: YDYLVSTQEFR
YKYLVSTQEFW

SEQ ID NO: 77787 - protein, 10 aa, synthetic construct
  source 1..10: note = Seed: YDYLVSTQEF
YKYLVSTQEI

SEQ ID NO: 77788 - protein, 10 aa, synthetic construct
  source 1..10: note = Seed: YDYLVSTQEF
YKYLVSTQEL

SEQ ID NO: 77789 - protein, 10 aa, synthetic construct
  source 1..10: note = Seed: YDYLVSTQEF
YKYLVSTQEM

SEQ ID NO: 77790 - protein, 10 aa, synthetic construct
  source 1..10: note = Seed: YDYLVSTQEF
YKYLVSTQEW

SEQ ID NO: 77791 - protein, 10 aa, synthetic construct
  source 1..10: note = Seed: YDYLVSTQEF
YKYLVSTQEY

SEQ ID NO: 77792 - protein, 10 aa, synthetic construct
  source 1..10: note = Seed: YNYLYRLFRK
YKYLYRLFRR

SEQ ID NO: 77793 - protein, 8 aa, synthetic construct
  source 1..8: note = Seed: YRYNLPTM
YKYNLPTF

SEQ ID NO: 77794 - protein, 8 aa, synthetic construct
  source 1..8: note = Seed: YRYNLPTM
YKYNLPTY

SEQ ID NO: 77795 - protein, 11 aa, synthetic construct
  source 1..11: note = Seed: YDYYRYNLPTM
YKYYRYNLPTF

SEQ ID NO: 77796 - protein, 11 aa, synthetic construct
  source 1..11: note = Seed: YDYYRYNLPTM
YKYYRYNLPTW

SEQ ID NO: 77797 - protein, 10 aa, synthetic construct
  source 1..10: note = Seed: YGANKDGIIW
YLANKDGIIW

SEQ ID NO: 77798 - protein, 9 aa, synthetic construct
  source 1..9: note = Seed: YPANSIVCR
YLANSIVCR

SEQ ID NO: 77799 - protein, 10 aa, synthetic construct
  source 1..10: note = Seed: YPANSIVCRF
YLANSIVCRF

SEQ ID NO: 77800 - protein, 10 aa, synthetic construct
  source 1..10: note = Seed: YPANSIVCRF
YLANSIVCRW

SEQ ID NO: 77801 - protein, 10 aa, synthetic construct
  source 1..10: note = Seed: YPANSIVCRF
YLANSIVCRY

SEQ ID NO: 77802 - protein, 10 aa, synthetic construct
  source 1..10: note = Seed: YIATNGPLKV
YLATNGPLKA

SEQ ID NO: 77803 - protein, 10 aa, synthetic construct
  source 1..10: note = Seed: YIATNGPLKV
YLATNGPLKI

SEQ ID NO: 77804 - protein, 10 aa, synthetic construct
  source 1..10: note = Seed: YIATNGPLKV
YLATNGPLKL

SEQ ID NO: 77805 - protein, 10 aa, synthetic construct
  source 1..10: note = Seed: YIATNGPLKV
YLATNGPLKV

SEQ ID NO: 77806 - protein, 9 aa, synthetic construct
  source 1..9: note = Seed: YQCGHYKHI
YLCGHYKHA

SEQ ID NO: 77807 - protein, 9 aa, synthetic construct
  source 1..9: note = Seed: YQCGHYKHI
YLCGHYKHI

SEQ ID NO: 77808 - protein, 9 aa, synthetic construct
  source 1..9: note = Seed: YQCGHYKHI
YLCGHYKHL

SEQ ID NO: 77809 - protein, 9 aa, synthetic construct
  source 1..9: note = Seed: YQCGHYKHI
YLCGHYKHV

SEQ ID NO: 77810 - protein, 10 aa, synthetic construct
  source 1..10: note = Seed: YFCTCYFGLF
YLCTCYFGLY

SEQ ID NO: 77811 - protein, 8 aa, synthetic construct
  source 1..8: note = Seed: YTEISFML
YLEISFMA

SEQ ID NO: 77812 - protein, 8 aa, synthetic construct
  source 1..8: note = Seed: YTEISFML
YLEISFMI

SEQ ID NO: 77813 - protein, 8 aa, synthetic construct
  source 1..8: note = Seed: YTEISFML
YLEISFML

SEQ ID NO: 77814 - protein, 8 aa, synthetic construct
  source 1..8: note = Seed: YTEISFML
YLEISFMM

SEQ ID NO: 77815 - protein, 8 aa, synthetic construct
  source 1..8: note = Seed: YTEISFML
YLEISFMV

SEQ ID NO: 77816 - protein, 10 aa, synthetic construct
  source 1..10: note = Seed: YKENSYTTTI
YLENSYTTTA

SEQ ID NO: 77817 - protein, 10 aa, synthetic construct
  source 1..10: note = Seed: YKENSYTTTI
YLENSYTTTF

SEQ ID NO: 77818 - protein, 10 aa, synthetic construct
  source 1..10: note = Seed: YKENSYTTTI
YLENSYTTTL

SEQ ID NO: 77819 - protein, 10 aa, synthetic construct
  source 1..10: note = Seed: YKENSYTTTI
YLENSYTTTM

SEQ ID NO: 77820 - protein, 10 aa, synthetic construct
  source 1..10: note = Seed: YKENSYTTTI
YLENSYTTTY

SEQ ID NO: 77821 - protein, 9 aa, synthetic construct
  source 1..9: note = Seed: YVFCTVNAL
YLFCTVNAA

SEQ ID NO: 77822 - protein, 9 aa, synthetic construct
  source 1..9: note = Seed: YVFCTVNAL
YLFCTVNAC

SEQ ID NO: 77823 - protein, 9 aa, synthetic construct
  source 1..9: note = Seed: YVFCTVNAL
YLFCTVNAF

SEQ ID NO: 77824 - protein, 9 aa, synthetic construct
  source 1..9: note = Seed: YVFCTVNAL
YLFCTVNAI

SEQ ID NO: 77825 - protein, 9 aa, synthetic construct
  source 1..9: note = Seed: YVFCTVNAL
YLFCTVNAL

SEQ ID NO: 77826 - protein, 9 aa, synthetic construct
  source 1..9: note = Seed: YVFCTVNAL
YLFCTVNAM

SEQ ID NO: 77827 - protein, 9 aa, synthetic construct
  source 1..9: note = Seed: YVFCTVNAL
YLFCTVNAS

SEQ ID NO: 77828 - protein, 9 aa, synthetic construct
  source 1..9: note = Seed: YVFCTVNAL
YLFCTVNAT

SEQ ID NO: 77829 - protein, 9 aa, synthetic construct
  source 1..9: note = Seed: YVFCTVNAL
YLFCTVNAV

SEQ ID NO: 77830 - protein, 9 aa, synthetic construct
  source 1..9: note = Seed: YVFCTVNAL
YLFCTVNAW

SEQ ID NO: 77831 - protein, 9 aa, synthetic construct
  source 1..9: note = Seed: YVFCTVNAL
YLFCTVNAY

SEQ ID NO: 77832 - protein, 8 aa, synthetic construct
  source 1..8: note = Seed: YIFFASFY
YLFFASFY

SEQ ID NO: 77833 - protein, 9 aa, synthetic construct
  source 1..9: note = Seed: YIFFASFYY
YLFFASFYA

SEQ ID NO: 77834 - protein, 9 aa, synthetic construct
  source 1..9: note = Seed: YIFFASFYY
YLFFASFYC

SEQ ID NO: 77835 - protein, 9 aa, synthetic construct
  source 1..9: note = Seed: YIFFASFYY
YLFFASFYE

SEQ ID NO: 77836 - protein, 9 aa, synthetic construct
  source 1..9: note = Seed: YIFFASFYY
YLFFASFYF

SEQ ID NO: 77837 - protein, 9 aa, synthetic construct
  source 1..9: note = Seed: YIFFASFYY
YLFFASFYG

SEQ ID NO: 77838 - protein, 9 aa, synthetic construct
  source 1..9: note = Seed: YIFFASFYY
YLFFASFYH

SEQ ID NO: 77839 - protein, 9 aa, synthetic construct
  source 1..9: note = Seed: YIFFASFYY
YLFFASFYI

SEQ ID NO: 77840 - protein, 9 aa, synthetic construct
  source 1..9: note = Seed: YIFFASFYY
YLFFASFYK

SEQ ID NO: 77841 - protein, 9 aa, synthetic construct
  source 1..9: note = Seed: YIFFASFYY
YLFFASFYL

SEQ ID NO: 77842 - protein, 9 aa, synthetic construct
  source 1..9: note = Seed: YIFFASFYY
YLFFASFYM

SEQ ID NO: 77843 - protein, 9 aa, synthetic construct
  source 1..9: note = Seed: YIFFASFYY
YLFFASFYP

SEQ ID NO: 77844 - protein, 9 aa, synthetic construct
  source 1..9: note = Seed: YIFFASFYY
YLFFASFYR

SEQ ID NO: 77845 - protein, 9 aa, synthetic construct
  source 1..9: note = Seed: YIFFASFYY
YLFFASFYS

SEQ ID NO: 77846 - protein, 9 aa, synthetic construct
  source 1..9: note = Seed: YIFFASFYY
YLFFASFYT

SEQ ID NO: 77847 - protein, 9 aa, synthetic construct
  source 1..9: note = Seed: YIFFASFYY
YLFFASFYV

SEQ ID NO: 77848 - protein, 9 aa, synthetic construct
  source 1..9: note = Seed: YIFFASFYY
YLFFASFYW

SEQ ID NO: 77849 - protein, 9 aa, synthetic construct
  source 1..9: note = Seed: YIFFASFYY
YLFFASFYY

SEQ ID NO: 77850 - protein, 10 aa, synthetic construct
  source 1..10: note = Seed: YIFFASFYYV
YLFFASFYYA

SEQ ID NO: 77851 - protein, 10 aa, synthetic construct
  source 1..10: note = Seed: YIFFASFYYV
YLFFASFYYC

SEQ ID NO: 77852 - protein, 10 aa, synthetic construct
  source 1..10: note = Seed: YIFFASFYYV
YLFFASFYYD

SEQ ID NO: 77853 - protein, 10 aa, synthetic construct
  source 1..10: note = Seed: YIFFASFYYV
YLFFASFYYE

SEQ ID NO: 77854 - protein, 10 aa, synthetic construct
  source 1..10: note = Seed: YIFFASFYYV
YLFFASFYYF

SEQ ID NO: 77855 - protein, 10 aa, synthetic construct
  source 1..10: note = Seed: YIFFASFYYV
YLFFASFYYG

SEQ ID NO: 77856 - protein, 10 aa, synthetic construct
  source 1..10: note = Seed: YIFFASFYYV
YLFFASFYYH

SEQ ID NO: 77857 - protein, 10 aa, synthetic construct
  source 1..10: note = Seed: YIFFASFYYV
YLFFASFYYI

SEQ ID NO: 77858 - protein, 10 aa, synthetic construct
  source 1..10: note = Seed: YIFFASFYYV
YLFFASFYYK

SEQ ID NO: 77859 - protein, 10 aa, synthetic construct
  source 1..10: note = Seed: YIFFASFYYV
YLFFASFYYL

SEQ ID NO: 77860 - protein, 10 aa, synthetic construct
  source 1..10: note = Seed: YIFFASFYYV
YLFFASFYYM

SEQ ID NO: 77861 - protein, 10 aa, synthetic construct
  source 1..10: note = Seed: YIFFASFYYV
YLFFASFYYN

SEQ ID NO: 77862 - protein, 10 aa, synthetic construct
  source 1..10: note = Seed: YIFFASFYYV
YLFFASFYYP

SEQ ID NO: 77863 - protein, 10 aa, synthetic construct
  source 1..10: note = Seed: YIFFASFYYV
YLFFASFYYQ

SEQ ID NO: 77864 - protein, 10 aa, synthetic construct
  source 1..10: note = Seed: YIFFASFYYV
YLFFASFYYR

SEQ ID NO: 77865 - protein, 10 aa, synthetic construct
  source 1..10: note = Seed: YIFFASFYYV
YLFFASFYYS

SEQ ID NO: 77866 - protein, 10 aa, synthetic construct
  source 1..10: note = Seed: YIFFASFYYV
YLFFASFYYT

SEQ ID NO: 77867 - protein, 10 aa, synthetic construct
  source 1..10: note = Seed: YIFFASFYYV
YLFFASFYYV

SEQ ID NO: 77868 - protein, 11 aa, synthetic construct
  source 1..11: note = Seed: YIFFASFYYVW
YLFFASFYYVA

SEQ ID NO: 77869 - protein, 11 aa, synthetic construct
  source 1..11: note = Seed: YIFFASFYYVW
YLFFASFYYVC

SEQ ID NO: 77870 - protein, 11 aa, synthetic construct
  source 1..11: note = Seed: YIFFASFYYVW
YLFFASFYYVD

SEQ ID NO: 77871 - protein, 11 aa, synthetic construct
  source 1..11: note = Seed: YIFFASFYYVW
YLFFASFYYVE

SEQ ID NO: 77872 - protein, 11 aa, synthetic construct
  source 1..11: note = Seed: YIFFASFYYVW
YLFFASFYYVF

SEQ ID NO: 77873 - protein, 11 aa, synthetic construct
  source 1..11: note = Seed: YIFFASFYYVW
YLFFASFYYVG

SEQ ID NO: 77874 - protein, 11 aa, synthetic construct
  source 1..11: note = Seed: YIFFASFYYVW
YLFFASFYYVH

SEQ ID NO: 77875 - protein, 11 aa, synthetic construct
  source 1..11: note = Seed: YIFFASFYYVW
YLFFASFYYVI

SEQ ID NO: 77876 - protein, 11 aa, synthetic construct
  source 1..11: note = Seed: YIFFASFYYVW
YLFFASFYYVK

SEQ ID NO: 77877 - protein, 11 aa, synthetic construct
  source 1..11: note = Seed: YIFFASFYYVW
YLFFASFYYVL

SEQ ID NO: 77878 - protein, 11 aa, synthetic construct
  source 1..11: note = Seed: YIFFASFYYVW
YLFFASFYYVM

SEQ ID NO: 77879 - protein, 11 aa, synthetic construct
  source 1..11: note = Seed: YIFFASFYYVW
YLFFASFYYVN

SEQ ID NO: 77880 - protein, 11 aa, synthetic construct
  source 1..11: note = Seed: YIFFASFYYVW
YLFFASFYYVP

SEQ ID NO: 77881 - protein, 11 aa, synthetic construct
  source 1..11: note = Seed: YIFFASFYYVW
YLFFASFYYVQ

SEQ ID NO: 77882 - protein, 11 aa, synthetic construct
  source 1..11: note = Seed: YIFFASFYYVW
YLFFASFYYVR

SEQ ID NO: 77883 - protein, 11 aa, synthetic construct
  source 1..11: note = Seed: YIFFASFYYVW
YLFFASFYYVS

SEQ ID NO: 77884 - protein, 11 aa, synthetic construct
  source 1..11: note = Seed: YIFFASFYYVW
YLFFASFYYVT

SEQ ID NO: 77885 - protein, 11 aa, synthetic construct
  source 1..11: note = Seed: YIFFASFYYVW
YLFFASFYYVV

SEQ ID NO: 77886 - protein, 11 aa, synthetic construct
  source 1..11: note = Seed: YIFFASFYYVW
YLFFASFYYVW

SEQ ID NO: 77887 - protein, 11 aa, synthetic construct
  source 1..11: note = Seed: YIFFASFYYVW
YLFFASFYYVY

SEQ ID NO: 77888 - protein, 10 aa, synthetic construct
  source 1..10: note = Seed: YIFFASFYYV
YLFFASFYYW

SEQ ID NO: 77889 - protein, 10 aa, synthetic construct
  source 1..10: note = Seed: YIFFASFYYV
YLFFASFYYY

SEQ ID NO: 77890 - protein, 9 aa, synthetic construct
  source 1..9: note = Seed: YWFFSNYLK
YLFFSNYLF

SEQ ID NO: 77891 - protein, 9 aa, synthetic construct
  source 1..9: note = Seed: YWFFSNYLK
YLFFSNYLH

SEQ ID NO: 77892 - protein, 9 aa, synthetic construct
  source 1..9: note = Seed: YWFFSNYLK
YLFFSNYLK

SEQ ID NO: 77893 - protein, 10 aa, synthetic construct
  source 1..10: note = Seed: YWFFSNYLKR
YLFFSNYLKK

SEQ ID NO: 77894 - protein, 10 aa, synthetic construct
  source 1..10: note = Seed: YWFFSNYLKR
YLFFSNYLKR

SEQ ID NO: 77895 - protein, 11 aa, synthetic construct
  source 1..11: note = Seed: YWFFSNYLKRR
YLFFSNYLKRR

SEQ ID NO: 77896 - protein, 9 aa, synthetic construct
  source 1..9: note = Seed: YWFFSNYLK
YLFFSNYLM

SEQ ID NO: 77897 - protein, 9 aa, synthetic construct
  source 1..9: note = Seed: YWFFSNYLK
YLFFSNYLR

SEQ ID NO: 77898 - protein, 9 aa, synthetic construct
  source 1..9: note = Seed: YWFFSNYLK
YLFFSNYLY

SEQ ID NO: 77899 - protein, 8 aa, synthetic construct
  source 1..8: note = Seed: YSFLPGVY
YLFLPGVY

SEQ ID NO: 77900 - protein, 10 aa, synthetic construct
  source 1..10: note = Seed: YSFLPGVYSV
YLFLPGVYSA

SEQ ID NO: 77901 - protein, 10 aa, synthetic construct
  source 1..10: note = Seed: YSFLPGVYSV
YLFLPGVYSC

SEQ ID NO: 77902 - protein, 10 aa, synthetic construct
  source 1..10: note = Seed: YSFLPGVYSV
YLFLPGVYSF

SEQ ID NO: 77903 - protein, 10 aa, synthetic construct
  source 1..10: note = Seed: YSFLPGVYSV
YLFLPGVYSI

SEQ ID NO: 77904 - protein, 10 aa, synthetic construct
  source 1..10: note = Seed: YSFLPGVYSV
YLFLPGVYSL

SEQ ID NO: 77905 - protein, 10 aa, synthetic construct
  source 1..10: note = Seed: YSFLPGVYSV
YLFLPGVYSM

SEQ ID NO: 77906 - protein, 10 aa, synthetic construct
  source 1..10: note = Seed: YSFLPGVYSV
YLFLPGVYSS

SEQ ID NO: 77907 - protein, 10 aa, synthetic construct
  source 1..10: note = Seed: YSFLPGVYSV
YLFLPGVYST

SEQ ID NO: 77908 - protein, 10 aa, synthetic construct
  source 1..10: note = Seed: YSFLPGVYSV
YLFLPGVYSV

SEQ ID NO: 77909 - protein, 10 aa, synthetic construct
  source 1..10: note = Seed: YSFLPGVYSV
YLFLPGVYSW

SEQ ID NO: 77910 - protein, 8 aa, synthetic construct
  source 1..8: note = Seed: YYFMRFRR
YLFMRFRR

SEQ ID NO: 77911 - protein, 9 aa, synthetic construct
  source 1..9: note = Seed: YGFQPTNGV
YLFQPTNGA

SEQ ID NO: 77912 - protein, 9 aa, synthetic construct
  source 1..9: note = Seed: YGFQPTNGV
YLFQPTNGC

SEQ ID NO: 77913 - protein, 9 aa, synthetic construct
  source 1..9: note = Seed: YGFQPTNGV
YLFQPTNGI

SEQ ID NO: 77914 - protein, 9 aa, synthetic construct
  source 1..9: note = Seed: YGFQPTNGV
YLFQPTNGL

SEQ ID NO: 77915 - protein, 9 aa, synthetic construct
  source 1..9: note = Seed: YGFQPTNGV
YLFQPTNGM

SEQ ID NO: 77916 - protein, 9 aa, synthetic construct
  source 1..9: note = Seed: YGFQPTNGV
YLFQPTNGT

SEQ ID NO: 77917 - protein, 9 aa, synthetic construct
  source 1..9: note = Seed: YGFQPTNGV
YLFQPTNGV

SEQ ID NO: 77918 - protein, 11 aa, synthetic construct
  source 1..11: note = Seed: YGFQPTNGVGY
YLFQPTNGVGY

SEQ ID NO: 77919 - protein, 10 aa, synthetic construct
  source 1..10: note = Seed: YHFRELGVVH
YLFRELGVVF

SEQ ID NO: 77920 - protein, 10 aa, synthetic construct
  source 1..10: note = Seed: YHFRELGVVH
YLFRELGVVY

SEQ ID NO: 77921 - protein, 8 aa, synthetic construct
  source 1..8: note = Seed: YVFTGYRV
YLFTGYRI

SEQ ID NO: 77922 - protein, 8 aa, synthetic construct
  source 1..8: note = Seed: YVFTGYRV
YLFTGYRL

SEQ ID NO: 77923 - protein, 8 aa, synthetic construct
  source 1..8: note = Seed: YVFTGYRV
YLFTGYRV

SEQ ID NO: 77924 - protein, 9 aa, synthetic construct
  source 1..9: note = Seed: YVFTGYRVT
YLFTGYRVF

SEQ ID NO: 77925 - protein, 9 aa, synthetic construct
  source 1..9: note = Seed: YVFTGYRVT
YLFTGYRVI

SEQ ID NO: 77926 - protein, 9 aa, synthetic construct
  source 1..9: note = Seed: YVFTGYRVT
YLFTGYRVL

SEQ ID NO: 77927 - protein, 9 aa, synthetic construct
  source 1..9: note = Seed: YVFTGYRVT
YLFTGYRVM

SEQ ID NO: 77928 - protein, 10 aa, synthetic construct
  source 1..10: note = Seed: YVFTGYRVTK
YLFTGYRVTK

SEQ ID NO: 77929 - protein, 10 aa, synthetic construct
  source 1..10: note = Seed: YVFTGYRVTK
YLFTGYRVTR

SEQ ID NO: 77930 - protein, 9 aa, synthetic construct
  source 1..9: note = Seed: YVFTGYRVT
YLFTGYRVV

SEQ ID NO: 77931 - protein, 9 aa, synthetic construct
  source 1..9: note = Seed: YVFTGYRVT
YLFTGYRVY

SEQ ID NO: 77932 - protein, 9 aa, synthetic construct
  source 1..9: note = Seed: YFFTLLLQL
YLFTLLLQA

SEQ ID NO: 77933 - protein, 9 aa, synthetic construct
  source 1..9: note = Seed: YFFTLLLQL
YLFTLLLQC

SEQ ID NO: 77934 - protein, 9 aa, synthetic construct
  source 1..9: note = Seed: YFFTLLLQL
YLFTLLLQI

SEQ ID NO: 77935 - protein, 9 aa, synthetic construct
  source 1..9: note = Seed: YFFTLLLQL
YLFTLLLQL

SEQ ID NO: 77936 - protein, 9 aa, synthetic construct
  source 1..9: note = Seed: YFFTLLLQL
YLFTLLLQM

SEQ ID NO: 77937 - protein, 9 aa, synthetic construct
  source 1..9: note = Seed: YFFTLLLQL
YLFTLLLQS

SEQ ID NO: 77938 - protein, 9 aa, synthetic construct
  source 1..9: note = Seed: YFFTLLLQL
YLFTLLLQT

SEQ ID NO: 77939 - protein, 9 aa, synthetic construct
  source 1..9: note = Seed: YFFTLLLQL
YLFTLLLQV

SEQ ID NO: 77940 - protein, 9 aa, synthetic construct
  source 1..9: note = Seed: YFFTLLLQL
YLFTLLLQY

SEQ ID NO: 77941 - protein, 9 aa, synthetic construct
  source 1..9: note = Seed: YLGGMSYYC
YLGGMSYYA

SEQ ID NO: 77942 - protein, 10 aa, synthetic construct
  source 1..10: note = Seed: YLGGMSYYCK
YLGGMSYYCR

SEQ ID NO: 77943 - protein, 9 aa, synthetic construct
  source 1..9: note = Seed: YLGGMSYYC
YLGGMSYYF

SEQ ID NO: 77944 - protein, 9 aa, synthetic construct
  source 1..9: note = Seed: YLGGMSYYC
YLGGMSYYG

SEQ ID NO: 77945 - protein, 9 aa, synthetic construct
  source 1..9: note = Seed: YLGGMSYYC
YLGGMSYYI

SEQ ID NO: 77946 - protein, 9 aa, synthetic construct
  source 1..9: note = Seed: YLGGMSYYC
YLGGMSYYL

SEQ ID NO: 77947 - protein, 9 aa, synthetic construct
  source 1..9: note = Seed: YLGGMSYYC
YLGGMSYYM

SEQ ID NO: 77948 - protein, 9 aa, synthetic construct
  source 1..9: note = Seed: YLGGMSYYC
YLGGMSYYS

SEQ ID NO: 77949 - protein, 9 aa, synthetic construct
  source 1..9: note = Seed: YLGGMSYYC
YLGGMSYYT

SEQ ID NO: 77950 - protein, 9 aa, synthetic construct
  source 1..9: note = Seed: YLGGMSYYC
YLGGMSYYV

SEQ ID NO: 77951 - protein, 11 aa, synthetic construct
  source 1..11: note = Seed: YTGNYQCGHYK
YLGNYQCGHYR

SEQ ID NO: 77952 - protein, 11 aa, synthetic construct
  source 1..11: note = Seed: YVGYLQPRTFL
YLGYLQPRTFF

SEQ ID NO: 77953 - protein, 11 aa, synthetic construct
  source 1..11: note = Seed: YVGYLQPRTFL
YLGYLQPRTFW

SEQ ID NO: 77954 - protein, 10 aa, synthetic construct
  source 1..10: note = Seed: YVGYLQPRTF
YLGYLQPRTY

SEQ ID NO: 77955 - protein, 9 aa, synthetic construct
  source 1..9: note = Seed: YMHHMELPT
YLHHMELPA

SEQ ID NO: 77956 - protein, 9 aa, synthetic construct
  source 1..9: note = Seed: YMHHMELPT
YLHHMELPF

SEQ ID NO: 77957 - protein, 9 aa, synthetic construct
  source 1..9: note = Seed: YMHHMELPT
YLHHMELPI

SEQ ID NO: 77958 - protein, 9 aa, synthetic construct
  source 1..9: note = Seed: YMHHMELPT
YLHHMELPL

SEQ ID NO: 77959 - protein, 9 aa, synthetic construct
  source 1..9: note = Seed: YMHHMELPT
YLHHMELPM

SEQ ID NO: 77960 - protein, 9 aa, synthetic construct
  source 1..9: note = Seed: YMHHMELPT
YLHHMELPT

SEQ ID NO: 77961 - protein, 11 aa, synthetic construct
  source 1..11: note = Seed: YMHHMELPTGV
YLHHMELPTGA

SEQ ID NO: 77962 - protein, 11 aa, synthetic construct
  source 1..11: note = Seed: YMHHMELPTGV
YLHHMELPTGI

SEQ ID NO: 77963 - protein, 11 aa, synthetic construct
  source 1..11: note = Seed: YMHHMELPTGV
YLHHMELPTGL

SEQ ID NO: 77964 - protein, 11 aa, synthetic construct
  source 1..11: note = Seed: YMHHMELPTGV
YLHHMELPTGM

SEQ ID NO: 77965 - protein, 11 aa, synthetic construct
  source 1..11: note = Seed: YMHHMELPTGV
YLHHMELPTGV

SEQ ID NO: 77966 - protein, 9 aa, synthetic construct
  source 1..9: note = Seed: YMHHMELPT
YLHHMELPV

SEQ ID NO: 77967 - protein, 9 aa, synthetic construct
  source 1..9: note = Seed: YMHHMELPT
YLHHMELPY

SEQ ID NO: 77968 - protein, 9 aa, synthetic construct
  source 1..9: note = Seed: YFIASFRLF
YLIASFRLF

SEQ ID NO: 77969 - protein, 10 aa, synthetic construct
  source 1..10: note = Seed: YFIASFRLFA
YLIASFRLFA

SEQ ID NO: 77970 - protein, 11 aa, synthetic construct
  source 1..11: note = Seed: YFIASFRLFAR
YLIASFRLFAR

SEQ ID NO: 77971 - protein, 10 aa, synthetic construct
  source 1..10: note = Seed: YFIASFRLFA
YLIASFRLFI

SEQ ID NO: 77972 - protein, 10 aa, synthetic construct
  source 1..10: note = Seed: YFIASFRLFA
YLIASFRLFL

SEQ ID NO: 77973 - protein, 10 aa, synthetic construct
  source 1..10: note = Seed: YFIASFRLFA
YLIASFRLFM

SEQ ID NO: 77974 - protein, 10 aa, synthetic construct
  source 1..10: note = Seed: YFIASFRLFA
YLIASFRLFT

SEQ ID NO: 77975 - protein, 10 aa, synthetic construct
  source 1..10: note = Seed: YFIASFRLFA
YLIASFRLFV

SEQ ID NO: 77976 - protein, 9 aa, synthetic construct
  source 1..9: note = Seed: YFIASFRLF
YLIASFRLM

SEQ ID NO: 77977 - protein, 9 aa, synthetic construct
  source 1..9: note = Seed: YFIASFRLF
YLIASFRLY

SEQ ID NO: 77978 - protein, 9 aa, synthetic construct
  source 1..9: note = Seed: YGIATVREV
YLIATVREA

SEQ ID NO: 77979 - protein, 9 aa, synthetic construct
  source 1..9: note = Seed: YGIATVREV
YLIATVREC

SEQ ID NO: 77980 - protein, 9 aa, synthetic construct
  source 1..9: note = Seed: YGIATVREV
YLIATVREF

SEQ ID NO: 77981 - protein, 9 aa, synthetic construct
  source 1..9: note = Seed: YGIATVREV
YLIATVREI

SEQ ID NO: 77982 - protein, 9 aa, synthetic construct
  source 1..9: note = Seed: YGIATVREV
YLIATVREL

SEQ ID NO: 77983 - protein, 9 aa, synthetic construct
  source 1..9: note = Seed: YGIATVREV
YLIATVREM

SEQ ID NO: 77984 - protein, 9 aa, synthetic construct
  source 1..9: note = Seed: YGIATVREV
YLIATVRES

SEQ ID NO: 77985 - protein, 9 aa, synthetic construct
  source 1..9: note = Seed: YGIATVREV
YLIATVRET

SEQ ID NO: 77986 - protein, 9 aa, synthetic construct
  source 1..9: note = Seed: YGIATVREV
YLIATVREV

SEQ ID NO: 77987 - protein, 10 aa, synthetic construct
  source 1..10: note = Seed: YGIATVREVL
YLIATVREVA

SEQ ID NO: 77988 - protein, 10 aa, synthetic construct
  source 1..10: note = Seed: YGIATVREVL
YLIATVREVI

SEQ ID NO: 77989 - protein, 10 aa, synthetic construct
  source 1..10: note = Seed: YGIATVREVL
YLIATVREVL

SEQ ID NO: 77990 - protein, 10 aa, synthetic construct
  source 1..10: note = Seed: YGIATVREVL
YLIATVREVM

SEQ ID NO: 77991 - protein, 10 aa, synthetic construct
  source 1..10: note = Seed: YGIATVREVL
YLIATVREVV

SEQ ID NO: 77992 - protein, 9 aa, synthetic construct
  source 1..9: note = Seed: YGIATVREV
YLIATVREY

SEQ ID NO: 77993 - protein, 10 aa, synthetic construct
  source 1..10: note = Seed: YIICISTKHF
YLICISTKHF

SEQ ID NO: 77994 - protein, 11 aa, synthetic construct
  source 1..11: note = Seed: YIICISTKHFY
YLICISTKHFY

SEQ ID NO: 77995 - protein, 10 aa, synthetic construct
  source 1..10: note = Seed: YIICISTKHF
YLICISTKHY

SEQ ID NO: 77996 - protein, 9 aa, synthetic construct
  source 1..9: note = Seed: YFIKGLNNL
YLIKGLNNA

SEQ ID NO: 77997 - protein, 9 aa, synthetic construct
  source 1..9: note = Seed: YFIKGLNNL
YLIKGLNNC

SEQ ID NO: 77998 - protein, 9 aa, synthetic construct
  source 1..9: note = Seed: YFIKGLNNL
YLIKGLNNI

SEQ ID NO: 77999 - protein, 9 aa, synthetic construct
  source 1..9: note = Seed: YFIKGLNNL
YLIKGLNNL

SEQ ID NO: 78000 - protein, 9 aa, synthetic construct
  source 1..9: note = Seed: YFIKGLNNL
YLIKGLNNM

SEQ ID NO: 78001 - protein, 9 aa, synthetic construct
  source 1..9: note = Seed: YFIKGLNNL
YLIKGLNNS

SEQ ID NO: 78002 - protein, 9 aa, synthetic construct
  source 1..9: note = Seed: YFIKGLNNL
YLIKGLNNT

SEQ ID NO: 78003 - protein, 9 aa, synthetic construct
  source 1..9: note = Seed: YFIKGLNNL
YLIKGLNNV

SEQ ID NO: 78004 - protein, 11 aa, synthetic construct
  source 1..11: note = Seed: YFKIYSKHTPI
YLKIYSKHTPA

SEQ ID NO: 78005 - protein, 11 aa, synthetic construct
  source 1..11: note = Seed: YFKIYSKHTPI
YLKIYSKHTPI

SEQ ID NO: 78006 - protein, 11 aa, synthetic construct
  source 1..11: note = Seed: YFKIYSKHTPI
YLKIYSKHTPL

SEQ ID NO: 78007 - protein, 11 aa, synthetic construct
  source 1..11: note = Seed: YFKIYSKHTPI
YLKIYSKHTPM

SEQ ID NO: 78008 - protein, 11 aa, synthetic construct
  source 1..11: note = Seed: YFKIYSKHTPI
YLKIYSKHTPV

SEQ ID NO: 78009 - protein, 9 aa, synthetic construct
  source 1..9: note = Seed: YYKKDNSYF
YLKKDNSYF

SEQ ID NO: 78010 - protein, 9 aa, synthetic construct
  source 1..9: note = Seed: YYKKDNSYF
YLKKDNSYY

SEQ ID NO: 78011 - protein, 9 aa, synthetic construct
  source 1..9: note = Seed: YDKLQFTSL
YLKLQFTSA

SEQ ID NO: 78012 - protein, 9 aa, synthetic construct
  source 1..9: note = Seed: YDKLQFTSL
YLKLQFTSC

SEQ ID NO: 78013 - protein, 9 aa, synthetic construct
  source 1..9: note = Seed: YDKLQFTSL
YLKLQFTSF

SEQ ID NO: 78014 - protein, 9 aa, synthetic construct
  source 1..9: note = Seed: YDKLQFTSL
YLKLQFTSI

SEQ ID NO: 78015 - protein, 9 aa, synthetic construct
  source 1..9: note = Seed: YDKLQFTSL
YLKLQFTSL

SEQ ID NO: 78016 - protein, 11 aa, synthetic construct
  source 1..11: note = Seed: YDKLQFTSLEI
YLKLQFTSLEV

SEQ ID NO: 78017 - protein, 9 aa, synthetic construct
  source 1..9: note = Seed: YDKLQFTSL
YLKLQFTSM

SEQ ID NO: 78018 - protein, 9 aa, synthetic construct
  source 1..9: note = Seed: YDKLQFTSL
YLKLQFTST

SEQ ID NO: 78019 - protein, 9 aa, synthetic construct
  source 1..9: note = Seed: YDKLQFTSL
YLKLQFTSV

SEQ ID NO: 78020 - protein, 8 aa, synthetic construct
  source 1..8: note = Seed: YLKLRSDV
YLKLRSDI

SEQ ID NO: 78021 - protein, 8 aa, synthetic construct
  source 1..8: note = Seed: YLKLRSDV
YLKLRSDL

SEQ ID NO: 78022 - protein, 8 aa, synthetic construct
  source 1..8: note = Seed: YLKLRSDV
YLKLRSDM

SEQ ID NO: 78023 - protein, 9 aa, synthetic construct
  source 1..9: note = Seed: YLKLRSDVL
YLKLRSDVA

SEQ ID NO: 78024 - protein, 9 aa, synthetic construct
  source 1..9: note = Seed: YLKLRSDVL
YLKLRSDVF

SEQ ID NO: 78025 - protein, 9 aa, synthetic construct
  source 1..9: note = Seed: YLKLRSDVL
YLKLRSDVI

SEQ ID NO: 78026 - protein, 10 aa, synthetic construct
  source 1..10: note = Seed: YLKLRSDVLL
YLKLRSDVLI

SEQ ID NO: 78027 - protein, 10 aa, synthetic construct
  source 1..10: note = Seed: YLKLRSDVLL
YLKLRSDVLM

SEQ ID NO: 78028 - protein, 10 aa, synthetic construct
  source 1..10: note = Seed: YLKLRSDVLL
YLKLRSDVLV

SEQ ID NO: 78029 - protein, 9 aa, synthetic construct
  source 1..9: note = Seed: YLKLRSDVL
YLKLRSDVM

SEQ ID NO: 78030 - protein, 9 aa, synthetic construct
  source 1..9: note = Seed: YLKLRSDVL
YLKLRSDVV

SEQ ID NO: 78031 - protein, 9 aa, synthetic construct
  source 1..9: note = Seed: YLKLRSDVL
YLKLRSDVY

SEQ ID NO: 78032 - protein, 8 aa, synthetic construct
  source 1..8: note = Seed: YLKRRVVF
YLKRRVVA

SEQ ID NO: 78033 - protein, 11 aa, synthetic construct
  source 1..11: note = Seed: YLKRRVVFNGV
YLKRRVVFNGL

SEQ ID NO: 78034 - protein, 11 aa, synthetic construct
  source 1..11: note = Seed: YLKRRVVFNGV
YLKRRVVFNGM

SEQ ID NO: 78035 - protein, 8 aa, synthetic construct
  source 1..8: note = Seed: YLKRRVVF
YLKRRVVI

SEQ ID NO: 78036 - protein, 8 aa, synthetic construct
  source 1..8: note = Seed: YLKRRVVF
YLKRRVVL

SEQ ID NO: 78037 - protein, 8 aa, synthetic construct
  source 1..8: note = Seed: YLKRRVVF
YLKRRVVM

SEQ ID NO: 78038 - protein, 8 aa, synthetic construct
  source 1..8: note = Seed: YLKRRVVF
YLKRRVVV

SEQ ID NO: 78039 - protein, 10 aa, synthetic construct
  source 1..10: note = Seed: YLKSPNFSKL
YLKSPNFSKA

SEQ ID NO: 78040 - protein, 10 aa, synthetic construct
  source 1..10: note = Seed: YLKSPNFSKL
YLKSPNFSKI

SEQ ID NO: 78041 - protein, 10 aa, synthetic construct
  source 1..10: note = Seed: YLKSPNFSKL
YLKSPNFSKM

SEQ ID NO: 78042 - protein, 10 aa, synthetic construct
  source 1..10: note = Seed: YLKSPNFSKL
YLKSPNFSKV

SEQ ID NO: 78043 - protein, 9 aa, synthetic construct
  source 1..9: note = Seed: YLKSPNFSK
YLKSPNFSR

SEQ ID NO: 78044 - protein, 9 aa, synthetic construct
  source 1..9: note = Seed: YIKWDLLKY
YLKWDLLKF

SEQ ID NO: 78045 - protein, 9 aa, synthetic construct
  source 1..9: note = Seed: YIKWDLLKY
YLKWDLLKY

SEQ ID NO: 78046 - protein, 8 aa, synthetic construct
  source 1..8: note = Seed: YIKWPWYI
YLKWPWYA

SEQ ID NO: 78047 - protein, 8 aa, synthetic construct
  source 1..8: note = Seed: YIKWPWYI
YLKWPWYI

SEQ ID NO: 78048 - protein, 10 aa, synthetic construct
  source 1..10: note = Seed: YIKWPWYIWL
YLKWPWYIWA

SEQ ID NO: 78049 - protein, 10 aa, synthetic construct
  source 1..10: note = Seed: YIKWPWYIWL
YLKWPWYIWI

SEQ ID NO: 78050 - protein, 10 aa, synthetic construct
  source 1..10: note = Seed: YIKWPWYIWL
YLKWPWYIWL

SEQ ID NO: 78051 - protein, 10 aa, synthetic construct
  source 1..10: note = Seed: YIKWPWYIWL
YLKWPWYIWM

SEQ ID NO: 78052 - protein, 10 aa, synthetic construct
  source 1..10: note = Seed: YIKWPWYIWL
YLKWPWYIWT

SEQ ID NO: 78053 - protein, 10 aa, synthetic construct
  source 1..10: note = Seed: YIKWPWYIWL
YLKWPWYIWV

SEQ ID NO: 78054 - protein, 8 aa, synthetic construct
  source 1..8: note = Seed: YIKWPWYI
YLKWPWYL

SEQ ID NO: 78055 - protein, 8 aa, synthetic construct
  source 1..8: note = Seed: YIKWPWYI
YLKWPWYM

SEQ ID NO: 78056 - protein, 8 aa, synthetic construct
  source 1..8: note = Seed: YIKWPWYI
YLKWPWYT

SEQ ID NO: 78057 - protein, 8 aa, synthetic construct
  source 1..8: note = Seed: YIKWPWYI
YLKWPWYV

SEQ ID NO: 78058 - protein, 9 aa, synthetic construct
  source 1..9: note = Seed: YNKYKYFSG
YLKYKYFSA

SEQ ID NO: 78059 - protein, 9 aa, synthetic construct
  source 1..9: note = Seed: YNKYKYFSG
YLKYKYFSC

SEQ ID NO: 78060 - protein, 9 aa, synthetic construct
  source 1..9: note = Seed: YNKYKYFSG
YLKYKYFSF

SEQ ID NO: 78061 - protein, 9 aa, synthetic construct
  source 1..9: note = Seed: YNKYKYFSG
YLKYKYFSG

SEQ ID NO: 78062 - protein, 9 aa, synthetic construct
  source 1..9: note = Seed: YNKYKYFSG
YLKYKYFSI

SEQ ID NO: 78063 - protein, 9 aa, synthetic construct
  source 1..9: note = Seed: YNKYKYFSG
YLKYKYFSL

SEQ ID NO: 78064 - protein, 9 aa, synthetic construct
  source 1..9: note = Seed: YNKYKYFSG
YLKYKYFSM

SEQ ID NO: 78065 - protein, 9 aa, synthetic construct
  source 1..9: note = Seed: YNKYKYFSG
YLKYKYFST

SEQ ID NO: 78066 - protein, 9 aa, synthetic construct
  source 1..9: note = Seed: YNKYKYFSG
YLKYKYFSV

SEQ ID NO: 78067 - protein, 10 aa, synthetic construct
  source 1..10: note = Seed: YFLCWHTNCY
YLLCWHTNCY

SEQ ID NO: 78068 - protein, 10 aa, synthetic construct
  source 1..10: note = Seed: YPLECIKDLL
YLLECIKDLA

SEQ ID NO: 78069 - protein, 10 aa, synthetic construct
  source 1..10: note = Seed: YPLECIKDLL
YLLECIKDLI

SEQ ID NO: 78070 - protein, 10 aa, synthetic construct
  source 1..10: note = Seed: YPLECIKDLL
YLLECIKDLL

SEQ ID NO: 78071 - protein, 10 aa, synthetic construct
  source 1..10: note = Seed: YPLECIKDLL
YLLECIKDLM

SEQ ID NO: 78072 - protein, 10 aa, synthetic construct
  source 1..10: note = Seed: YPLECIKDLL
YLLECIKDLV

SEQ ID NO: 78073 - protein, 9 aa, synthetic construct
  source 1..9: note = Seed: YRLFRKSNL
YLLFRKSNI

SEQ ID NO: 78074 - protein, 9 aa, synthetic construct
  source 1..9: note = Seed: YRLFRKSNL
YLLFRKSNL

SEQ ID NO: 78075 - protein, 10 aa, synthetic construct
  source 1..10: note = Seed: YRLFRKSNLK
YLLFRKSNLK

SEQ ID NO: 78076 - protein, 10 aa, synthetic construct
  source 1..10: note = Seed: YRLFRKSNLK
YLLFRKSNLR

SEQ ID NO: 78077 - protein, 9 aa, synthetic construct
  source 1..9: note = Seed: YRLFRKSNL
YLLFRKSNM

SEQ ID NO: 78078 - protein, 9 aa, synthetic construct
  source 1..9: note = Seed: YILFTRFFY
YLLFTRFFF

SEQ ID NO: 78079 - protein, 9 aa, synthetic construct
  source 1..9: note = Seed: YILFTRFFY
YLLFTRFFK

SEQ ID NO: 78080 - protein, 9 aa, synthetic construct
  source 1..9: note = Seed: YILFTRFFY
YLLFTRFFR

SEQ ID NO: 78081 - protein, 9 aa, synthetic construct
  source 1..9: note = Seed: YILFTRFFY
YLLFTRFFY

SEQ ID NO: 78082 - protein, 10 aa, synthetic construct
  source 1..10: note = Seed: YILFTRFFYV
YLLFTRFFYA

SEQ ID NO: 78083 - protein, 10 aa, synthetic construct
  source 1..10: note = Seed: YILFTRFFYV
YLLFTRFFYC

SEQ ID NO: 78084 - protein, 10 aa, synthetic construct
  source 1..10: note = Seed: YILFTRFFYV
YLLFTRFFYF

SEQ ID NO: 78085 - protein, 10 aa, synthetic construct
  source 1..10: note = Seed: YILFTRFFYV
YLLFTRFFYH

SEQ ID NO: 78086 - protein, 10 aa, synthetic construct
  source 1..10: note = Seed: YILFTRFFYV
YLLFTRFFYI

SEQ ID NO: 78087 - protein, 10 aa, synthetic construct
  source 1..10: note = Seed: YILFTRFFYV
YLLFTRFFYK

SEQ ID NO: 78088 - protein, 10 aa, synthetic construct
  source 1..10: note = Seed: YILFTRFFYV
YLLFTRFFYL

SEQ ID NO: 78089 - protein, 10 aa, synthetic construct
  source 1..10: note = Seed: YILFTRFFYV
YLLFTRFFYM

SEQ ID NO: 78090 - protein, 10 aa, synthetic construct
  source 1..10: note = Seed: YILFTRFFYV
YLLFTRFFYR

SEQ ID NO: 78091 - protein, 10 aa, synthetic construct
  source 1..10: note = Seed: YILFTRFFYV
YLLFTRFFYS

SEQ ID NO: 78092 - protein, 10 aa, synthetic construct
  source 1..10: note = Seed: YILFTRFFYV
YLLFTRFFYT

SEQ ID NO: 78093 - protein, 10 aa, synthetic construct
  source 1..10: note = Seed: YILFTRFFYV
YLLFTRFFYV

SEQ ID NO: 78094 - protein, 11 aa, synthetic construct
  source 1..11: note = Seed: YILFTRFFYVL
YLLFTRFFYVA

SEQ ID NO: 78095 - protein, 11 aa, synthetic construct
  source 1..11: note = Seed: YILFTRFFYVL
YLLFTRFFYVC

SEQ ID NO: 78096 - protein, 11 aa, synthetic construct
  source 1..11: note = Seed: YILFTRFFYVL
YLLFTRFFYVD

SEQ ID NO: 78097 - protein, 11 aa, synthetic construct
  source 1..11: note = Seed: YILFTRFFYVL
YLLFTRFFYVE

SEQ ID NO: 78098 - protein, 11 aa, synthetic construct
  source 1..11: note = Seed: YILFTRFFYVL
YLLFTRFFYVF

SEQ ID NO: 78099 - protein, 11 aa, synthetic construct
  source 1..11: note = Seed: YILFTRFFYVL
YLLFTRFFYVG

SEQ ID NO: 78100 - protein, 11 aa, synthetic construct
  source 1..11: note = Seed: YILFTRFFYVL
YLLFTRFFYVH

SEQ ID NO: 78101 - protein, 11 aa, synthetic construct
  source 1..11: note = Seed: YILFTRFFYVL
YLLFTRFFYVI

SEQ ID NO: 78102 - protein, 11 aa, synthetic construct
  source 1..11: note = Seed: YILFTRFFYVL
YLLFTRFFYVK

SEQ ID NO: 78103 - protein, 11 aa, synthetic construct
  source 1..11: note = Seed: YILFTRFFYVL
YLLFTRFFYVL

SEQ ID NO: 78104 - protein, 11 aa, synthetic construct
  source 1..11: note = Seed: YILFTRFFYVL
YLLFTRFFYVM

SEQ ID NO: 78105 - protein, 11 aa, synthetic construct
  source 1..11: note = Seed: YILFTRFFYVL
YLLFTRFFYVN

SEQ ID NO: 78106 - protein, 11 aa, synthetic construct
  source 1..11: note = Seed: YILFTRFFYVL
YLLFTRFFYVP

SEQ ID NO: 78107 - protein, 11 aa, synthetic construct
  source 1..11: note = Seed: YILFTRFFYVL
YLLFTRFFYVQ

SEQ ID NO: 78108 - protein, 11 aa, synthetic construct
  source 1..11: note = Seed: YILFTRFFYVL
YLLFTRFFYVR

SEQ ID NO: 78109 - protein, 11 aa, synthetic construct
  source 1..11: note = Seed: YILFTRFFYVL
YLLFTRFFYVS

SEQ ID NO: 78110 - protein, 11 aa, synthetic construct
  source 1..11: note = Seed: YILFTRFFYVL
YLLFTRFFYVT

SEQ ID NO: 78111 - protein, 11 aa, synthetic construct
  source 1..11: note = Seed: YILFTRFFYVL
YLLFTRFFYVV

SEQ ID NO: 78112 - protein, 11 aa, synthetic construct
  source 1..11: note = Seed: YILFTRFFYVL
YLLFTRFFYVW

SEQ ID NO: 78113 - protein, 11 aa, synthetic construct
  source 1..11: note = Seed: YILFTRFFYVL
YLLFTRFFYVY

SEQ ID NO: 78114 - protein, 10 aa, synthetic construct
  source 1..10: note = Seed: YILFTRFFYV
YLLFTRFFYW

SEQ ID NO: 78115 - protein, 10 aa, synthetic construct
  source 1..10: note = Seed: YILFTRFFYV
YLLFTRFFYY

SEQ ID NO: 78116 - protein, 9 aa, synthetic construct
  source 1..9: note = Seed: YKLGASQRV
YLLGASQRF

SEQ ID NO: 78117 - protein, 9 aa, synthetic construct
  source 1..9: note = Seed: YKLGASQRV
YLLGASQRY

SEQ ID NO: 78118 - protein, 10 aa, synthetic construct
  source 1..10: note = Seed: YSLLMPILTL
YLLLMPILTA

SEQ ID NO: 78119 - protein, 10 aa, synthetic construct
  source 1..10: note = Seed: YSLLMPILTL
YLLLMPILTI

SEQ ID NO: 78120 - protein, 10 aa, synthetic construct
  source 1..10: note = Seed: YSLLMPILTL
YLLLMPILTL

SEQ ID NO: 78121 - protein, 10 aa, synthetic construct
  source 1..10: note = Seed: YSLLMPILTL
YLLLMPILTM

SEQ ID NO: 78122 - protein, 10 aa, synthetic construct
  source 1..10: note = Seed: YSLLMPILTL
YLLLMPILTV

SEQ ID NO: 78123 - protein, 10 aa, synthetic construct
  source 1..10: note = Seed: YHLMSFPQSA
YLLMSFPQSA

SEQ ID NO: 78124 - protein, 11 aa, synthetic construct
  source 1..11: note = Seed: YHLMSFPQSAP
YLLMSFPQSAI

SEQ ID NO: 78125 - protein, 11 aa, synthetic construct
  source 1..11: note = Seed: YHLMSFPQSAP
YLLMSFPQSAL

SEQ ID NO: 78126 - protein, 11 aa, synthetic construct
  source 1..11: note = Seed: YHLMSFPQSAP
YLLMSFPQSAV

SEQ ID NO: 78127 - protein, 10 aa, synthetic construct
  source 1..10: note = Seed: YHLMSFPQSA
YLLMSFPQSI

SEQ ID NO: 78128 - protein, 10 aa, synthetic construct
  source 1..10: note = Seed: YHLMSFPQSA
YLLMSFPQSL

SEQ ID NO: 78129 - protein, 10 aa, synthetic construct
  source 1..10: note = Seed: YHLMSFPQSA
YLLMSFPQSM

SEQ ID NO: 78130 - protein, 10 aa, synthetic construct
  source 1..10: note = Seed: YHLMSFPQSA
YLLMSFPQST

SEQ ID NO: 78131 - protein, 10 aa, synthetic construct
  source 1..10: note = Seed: YHLMSFPQSA
YLLMSFPQSV

SEQ ID NO: 78132 - protein, 9 aa, synthetic construct
  source 1..9: note = Seed: YELQTPFEI
YLLQTPFEA

SEQ ID NO: 78133 - protein, 9 aa, synthetic construct
  source 1..9: note = Seed: YELQTPFEI
YLLQTPFEI

SEQ ID NO: 78134 - protein, 9 aa, synthetic construct
  source 1..9: note = Seed: YELQTPFEI
YLLQTPFEL

SEQ ID NO: 78135 - protein, 9 aa, synthetic construct
  source 1..9: note = Seed: YELQTPFEI
YLLQTPFEM

SEQ ID NO: 78136 - protein, 9 aa, synthetic construct
  source 1..9: note = Seed: YELQTPFEI
YLLQTPFET

SEQ ID NO: 78137 - protein, 9 aa, synthetic construct
  source 1..9: note = Seed: YELQTPFEI
YLLQTPFEV

SEQ ID NO: 78138 - protein, 10 aa, synthetic construct
  source 1..10: note = Seed: YDLSVVNARL
YLLSVVNARA

SEQ ID NO: 78139 - protein, 10 aa, synthetic construct
  source 1..10: note = Seed: YDLSVVNARL
YLLSVVNARI

SEQ ID NO: 78140 - protein, 10 aa, synthetic construct
  source 1..10: note = Seed: YDLSVVNARL
YLLSVVNARL

SEQ ID NO: 78141 - protein, 10 aa, synthetic construct
  source 1..10: note = Seed: YDLSVVNARL
YLLSVVNARM

SEQ ID NO: 78142 - protein, 10 aa, synthetic construct
  source 1..10: note = Seed: YDLSVVNARL
YLLSVVNART

SEQ ID NO: 78143 - protein, 10 aa, synthetic construct
  source 1..10: note = Seed: YDLSVVNARL
YLLSVVNARV

SEQ ID NO: 78144 - protein, 11 aa, synthetic construct
  source 1..11: note = Seed: YMLTYNKVENM
YLLTYNKVENA

SEQ ID NO: 78145 - protein, 11 aa, synthetic construct
  source 1..11: note = Seed: YMLTYNKVENM
YLLTYNKVENI

SEQ ID NO: 78146 - protein, 11 aa, synthetic construct
  source 1..11: note = Seed: YMLTYNKVENM
YLLTYNKVENL

SEQ ID NO: 78147 - protein, 11 aa, synthetic construct
  source 1..11: note = Seed: YMLTYNKVENM
YLLTYNKVENV

SEQ ID NO: 78148 - protein, 8 aa, synthetic construct
  source 1..8: note = Seed: YTMADLVY
YLMADLVF

SEQ ID NO: 78149 - protein, 8 aa, synthetic construct
  source 1..8: note = Seed: YTMADLVY
YLMADLVY

SEQ ID NO: 78150 - protein, 9 aa, synthetic construct
  source 1..9: note = Seed: YTMADLVYA
YLMADLVYA

SEQ ID NO: 78151 - protein, 10 aa, synthetic construct
  source 1..10: note = Seed: YTMADLVYAL
YLMADLVYAA

SEQ ID NO: 78152 - protein, 10 aa, synthetic construct
  source 1..10: note = Seed: YTMADLVYAL
YLMADLVYAC

SEQ ID NO: 78153 - protein, 10 aa, synthetic construct
  source 1..10: note = Seed: YTMADLVYAL
YLMADLVYAD

SEQ ID NO: 78154 - protein, 10 aa, synthetic construct
  source 1..10: note = Seed: YTMADLVYAL
YLMADLVYAE

SEQ ID NO: 78155 - protein, 10 aa, synthetic construct
  source 1..10: note = Seed: YTMADLVYAL
YLMADLVYAF

SEQ ID NO: 78156 - protein, 10 aa, synthetic construct
  source 1..10: note = Seed: YTMADLVYAL
YLMADLVYAG

SEQ ID NO: 78157 - protein, 10 aa, synthetic construct
  source 1..10: note = Seed: YTMADLVYAL
YLMADLVYAH

SEQ ID NO: 78158 - protein, 10 aa, synthetic construct
  source 1..10: note = Seed: YTMADLVYAL
YLMADLVYAI

SEQ ID NO: 78159 - protein, 10 aa, synthetic construct
  source 1..10: note = Seed: YTMADLVYAL
YLMADLVYAK

SEQ ID NO: 78160 - protein, 10 aa, synthetic construct
  source 1..10: note = Seed: YTMADLVYAL
YLMADLVYAL

SEQ ID NO: 78161 - protein, 11 aa, synthetic construct
  source 1..11: note = Seed: YTMADLVYALR
YLMADLVYALA

SEQ ID NO: 78162 - protein, 11 aa, synthetic construct
  source 1..11: note = Seed: YTMADLVYALR
YLMADLVYALC

SEQ ID NO: 78163 - protein, 11 aa, synthetic construct
  source 1..11: note = Seed: YTMADLVYALR
YLMADLVYALD

SEQ ID NO: 78164 - protein, 11 aa, synthetic construct
  source 1..11: note = Seed: YTMADLVYALR
YLMADLVYALE

SEQ ID NO: 78165 - protein, 11 aa, synthetic construct
  source 1..11: note = Seed: YTMADLVYALR
YLMADLVYALF

SEQ ID NO: 78166 - protein, 11 aa, synthetic construct
  source 1..11: note = Seed: YTMADLVYALR
YLMADLVYALG

SEQ ID NO: 78167 - protein, 11 aa, synthetic construct
  source 1..11: note = Seed: YTMADLVYALR
YLMADLVYALH

SEQ ID NO: 78168 - protein, 11 aa, synthetic construct
  source 1..11: note = Seed: YTMADLVYALR
YLMADLVYALI

SEQ ID NO: 78169 - protein, 11 aa, synthetic construct
  source 1..11: note = Seed: YTMADLVYALR
YLMADLVYALK

SEQ ID NO: 78170 - protein, 11 aa, synthetic construct
  source 1..11: note = Seed: YTMADLVYALR
YLMADLVYALL

SEQ ID NO: 78171 - protein, 11 aa, synthetic construct
  source 1..11: note = Seed: YTMADLVYALR
YLMADLVYALM

SEQ ID NO: 78172 - protein, 11 aa, synthetic construct
  source 1..11: note = Seed: YTMADLVYALR
YLMADLVYALN

SEQ ID NO: 78173 - protein, 11 aa, synthetic construct
  source 1..11: note = Seed: YTMADLVYALR
YLMADLVYALP

SEQ ID NO: 78174 - protein, 11 aa, synthetic construct
  source 1..11: note = Seed: YTMADLVYALR
YLMADLVYALQ

SEQ ID NO: 78175 - protein, 11 aa, synthetic construct
  source 1..11: note = Seed: YTMADLVYALR
YLMADLVYALR

SEQ ID NO: 78176 - protein, 11 aa, synthetic construct
  source 1..11: note = Seed: YTMADLVYALR
YLMADLVYALS

SEQ ID NO: 78177 - protein, 11 aa, synthetic construct
  source 1..11: note = Seed: YTMADLVYALR
YLMADLVYALT

SEQ ID NO: 78178 - protein, 11 aa, synthetic construct
  source 1..11: note = Seed: YTMADLVYALR
YLMADLVYALV

SEQ ID NO: 78179 - protein, 11 aa, synthetic construct
  source 1..11: note = Seed: YTMADLVYALR
YLMADLVYALW

SEQ ID NO: 78180 - protein, 11 aa, synthetic construct
  source 1..11: note = Seed: YTMADLVYALR
YLMADLVYALY

SEQ ID NO: 78181 - protein, 10 aa, synthetic construct
  source 1..10: note = Seed: YTMADLVYAL
YLMADLVYAM

SEQ ID NO: 78182 - protein, 10 aa, synthetic construct
  source 1..10: note = Seed: YTMADLVYAL
YLMADLVYAN

SEQ ID NO: 78183 - protein, 10 aa, synthetic construct
  source 1..10: note = Seed: YTMADLVYAL
YLMADLVYAP

SEQ ID NO: 78184 - protein, 10 aa, synthetic construct
  source 1..10: note = Seed: YTMADLVYAL
YLMADLVYAQ

SEQ ID NO: 78185 - protein, 10 aa, synthetic construct
  source 1..10: note = Seed: YTMADLVYAL
YLMADLVYAR

SEQ ID NO: 78186 - protein, 10 aa, synthetic construct
  source 1..10: note = Seed: YTMADLVYAL
YLMADLVYAS

SEQ ID NO: 78187 - protein, 10 aa, synthetic construct
  source 1..10: note = Seed: YTMADLVYAL
YLMADLVYAT

SEQ ID NO: 78188 - protein, 10 aa, synthetic construct
  source 1..10: note = Seed: YTMADLVYAL
YLMADLVYAV

SEQ ID NO: 78189 - protein, 10 aa, synthetic construct
  source 1..10: note = Seed: YTMADLVYAL
YLMADLVYAW

SEQ ID NO: 78190 - protein, 10 aa, synthetic construct
  source 1..10: note = Seed: YTMADLVYAL
YLMADLVYAY

SEQ ID NO: 78191 - protein, 9 aa, synthetic construct
  source 1..9: note = Seed: YTMADLVYA
YLMADLVYC

SEQ ID NO: 78192 - protein, 9 aa, synthetic construct
  source 1..9: note = Seed: YTMADLVYA
YLMADLVYE

SEQ ID NO: 78193 - protein, 9 aa, synthetic construct
  source 1..9: note = Seed: YTMADLVYA
YLMADLVYF

SEQ ID NO: 78194 - protein, 9 aa, synthetic construct
  source 1..9: note = Seed: YTMADLVYA
YLMADLVYG

SEQ ID NO: 78195 - protein, 9 aa, synthetic construct
  source 1..9: note = Seed: YTMADLVYA
YLMADLVYI

SEQ ID NO: 78196 - protein, 9 aa, synthetic construct
  source 1..9: note = Seed: YTMADLVYA
YLMADLVYK

SEQ ID NO: 78197 - protein, 9 aa, synthetic construct
  source 1..9: note = Seed: YTMADLVYA
YLMADLVYL

SEQ ID NO: 78198 - protein, 9 aa, synthetic construct
  source 1..9: note = Seed: YTMADLVYA
YLMADLVYM

SEQ ID NO: 78199 - protein, 9 aa, synthetic construct
  source 1..9: note = Seed: YTMADLVYA
YLMADLVYP

SEQ ID NO: 78200 - protein, 9 aa, synthetic construct
  source 1..9: note = Seed: YTMADLVYA
YLMADLVYQ

SEQ ID NO: 78201 - protein, 9 aa, synthetic construct
  source 1..9: note = Seed: YTMADLVYA
YLMADLVYR

SEQ ID NO: 78202 - protein, 9 aa, synthetic construct
  source 1..9: note = Seed: YTMADLVYA
YLMADLVYS

SEQ ID NO: 78203 - protein, 9 aa, synthetic construct
  source 1..9: note = Seed: YTMADLVYA
YLMADLVYT

SEQ ID NO: 78204 - protein, 9 aa, synthetic construct
  source 1..9: note = Seed: YTMADLVYA
YLMADLVYV

SEQ ID NO: 78205 - protein, 9 aa, synthetic construct
  source 1..9: note = Seed: YTMADLVYA
YLMADLVYY

SEQ ID NO: 78206 - protein, 8 aa, synthetic construct
  source 1..8: note = Seed: YVMHANYI
YLMHANYA

SEQ ID NO: 78207 - protein, 8 aa, synthetic construct
  source 1..8: note = Seed: YVMHANYI
YLMHANYI

SEQ ID NO: 78208 - protein, 9 aa, synthetic construct
  source 1..9: note = Seed: YVMHANYIF
YLMHANYIA

SEQ ID NO: 78209 - protein, 9 aa, synthetic construct
  source 1..9: note = Seed: YVMHANYIF
YLMHANYIC

SEQ ID NO: 78210 - protein, 9 aa, synthetic construct
  source 1..9: note = Seed: YVMHANYIF
YLMHANYIF

SEQ ID NO: 78211 - protein, 10 aa, synthetic construct
  source 1..10: note = Seed: YVMHANYIFW
YLMHANYIFF

SEQ ID NO: 78212 - protein, 10 aa, synthetic construct
  source 1..10: note = Seed: YVMHANYIFW
YLMHANYIFW

SEQ ID NO: 78213 - protein, 10 aa, synthetic construct
  source 1..10: note = Seed: YVMHANYIFW
YLMHANYIFY

SEQ ID NO: 78214 - protein, 9 aa, synthetic construct
  source 1..9: note = Seed: YVMHANYIF
YLMHANYII

SEQ ID NO: 78215 - protein, 9 aa, synthetic construct
  source 1..9: note = Seed: YVMHANYIF
YLMHANYIL

SEQ ID NO: 78216 - protein, 9 aa, synthetic construct
  source 1..9: note = Seed: YVMHANYIF
YLMHANYIM

SEQ ID NO: 78217 - protein, 9 aa, synthetic construct
  source 1..9: note = Seed: YVMHANYIF
YLMHANYIS

SEQ ID NO: 78218 - protein, 9 aa, synthetic construct
  source 1..9: note = Seed: YVMHANYIF
YLMHANYIT

SEQ ID NO: 78219 - protein, 9 aa, synthetic construct
  source 1..9: note = Seed: YVMHANYIF
YLMHANYIV

SEQ ID NO: 78220 - protein, 9 aa, synthetic construct
  source 1..9: note = Seed: YVMHANYIF
YLMHANYIW

SEQ ID NO: 78221 - protein, 9 aa, synthetic construct
  source 1..9: note = Seed: YVMHANYIF
YLMHANYIY

SEQ ID NO: 78222 - protein, 8 aa, synthetic construct
  source 1..8: note = Seed: YVMHANYI
YLMHANYL

SEQ ID NO: 78223 - protein, 8 aa, synthetic construct
  source 1..8: note = Seed: YVMHANYI
YLMHANYV

SEQ ID NO: 78224 - protein, 9 aa, synthetic construct
  source 1..9: note = Seed: YTNDKACPL
YLNDKACPA

SEQ ID NO: 78225 - protein, 9 aa, synthetic construct
  source 1..9: note = Seed: YTNDKACPL
YLNDKACPC

SEQ ID NO: 78226 - protein, 9 aa, synthetic construct
  source 1..9: note = Seed: YTNDKACPL
YLNDKACPF

SEQ ID NO: 78227 - protein, 9 aa, synthetic construct
  source 1..9: note = Seed: YTNDKACPL
YLNDKACPI

SEQ ID NO: 78228 - protein, 9 aa, synthetic construct
  source 1..9: note = Seed: YTNDKACPL
YLNDKACPL

SEQ ID NO: 78229 - protein, 10 aa, synthetic construct
  source 1..10: note = Seed: YTNDKACPLI
YLNDKACPLA

SEQ ID NO: 78230 - protein, 10 aa, synthetic construct
  source 1..10: note = Seed: YTNDKACPLI
YLNDKACPLI

SEQ ID NO: 78231 - protein, 10 aa, synthetic construct
  source 1..10: note = Seed: YTNDKACPLI
YLNDKACPLL

SEQ ID NO: 78232 - protein, 10 aa, synthetic construct
  source 1..10: note = Seed: YTNDKACPLI
YLNDKACPLM

SEQ ID NO: 78233 - protein, 10 aa, synthetic construct
  source 1..10: note = Seed: YTNDKACPLI
YLNDKACPLT

SEQ ID NO: 78234 - protein, 10 aa, synthetic construct
  source 1..10: note = Seed: YTNDKACPLI
YLNDKACPLV

SEQ ID NO: 78235 - protein, 9 aa, synthetic construct
  source 1..9: note = Seed: YTNDKACPL
YLNDKACPM

SEQ ID NO: 78236 - protein, 9 aa, synthetic construct
  source 1..9: note = Seed: YTNDKACPL
YLNDKACPS

SEQ ID NO: 78237 - protein, 9 aa, synthetic construct
  source 1..9: note = Seed: YTNDKACPL
YLNDKACPT

SEQ ID NO: 78238 - protein, 9 aa, synthetic construct
  source 1..9: note = Seed: YTNDKACPL
YLNDKACPV

SEQ ID NO: 78239 - protein, 9 aa, synthetic construct
  source 1..9: note = Seed: YTNDKACPL
YLNDKACPY

SEQ ID NO: 78240 - protein, 10 aa, synthetic construct
  source 1..10: note = Seed: YQNNVFMSEA
YLNNVFMSEA

SEQ ID NO: 78241 - protein, 10 aa, synthetic construct
  source 1..10: note = Seed: YQNNVFMSEA
YLNNVFMSEF

SEQ ID NO: 78242 - protein, 10 aa, synthetic construct
  source 1..10: note = Seed: YQNNVFMSEA
YLNNVFMSEI

SEQ ID NO: 78243 - protein, 10 aa, synthetic construct
  source 1..10: note = Seed: YQNNVFMSEA
YLNNVFMSEL

SEQ ID NO: 78244 - protein, 10 aa, synthetic construct
  source 1..10: note = Seed: YQNNVFMSEA
YLNNVFMSEM

SEQ ID NO: 78245 - protein, 10 aa, synthetic construct
  source 1..10: note = Seed: YQNNVFMSEA
YLNNVFMSET

SEQ ID NO: 78246 - protein, 10 aa, synthetic construct
  source 1..10: note = Seed: YQNNVFMSEA
YLNNVFMSEV

SEQ ID NO: 78247 - protein, 10 aa, synthetic construct
  source 1..10: note = Seed: YQNNVFMSEA
YLNNVFMSEY

SEQ ID NO: 78248 - protein, 9 aa, synthetic construct
  source 1..9: note = Seed: YQNNVFMSE
YLNNVFMSF

SEQ ID NO: 78249 - protein, 9 aa, synthetic construct
  source 1..9: note = Seed: YQNNVFMSE
YLNNVFMSL

SEQ ID NO: 78250 - protein, 9 aa, synthetic construct
  source 1..9: note = Seed: YQNNVFMSE
YLNNVFMSM

SEQ ID NO: 78251 - protein, 9 aa, synthetic construct
  source 1..9: note = Seed: YQNNVFMSE
YLNNVFMSY

SEQ ID NO: 78252 - protein, 9 aa, synthetic construct
  source 1..9: note = Seed: YANSVFNIC
YLNSVFNIF

SEQ ID NO: 78253 - protein, 9 aa, synthetic construct
  source 1..9: note = Seed: YANSVFNIC
YLNSVFNIM

SEQ ID NO: 78254 - protein, 9 aa, synthetic construct
  source 1..9: note = Seed: YANSVFNIC
YLNSVFNIY

SEQ ID NO: 78255 - protein, 9 aa, synthetic construct
  source 1..9: note = Seed: YVNTFSSTF
YLNTFSSTA

SEQ ID NO: 78256 - protein, 9 aa, synthetic construct
  source 1..9: note = Seed: YVNTFSSTF
YLNTFSSTF

SEQ ID NO: 78257 - protein, 9 aa, synthetic construct
  source 1..9: note = Seed: YVNTFSSTF
YLNTFSSTI

SEQ ID NO: 78258 - protein, 9 aa, synthetic construct
  source 1..9: note = Seed: YVNTFSSTF
YLNTFSSTL

SEQ ID NO: 78259 - protein, 9 aa, synthetic construct
  source 1..9: note = Seed: YVNTFSSTF
YLNTFSSTM

SEQ ID NO: 78260 - protein, 9 aa, synthetic construct
  source 1..9: note = Seed: YVNTFSSTF
YLNTFSSTV

SEQ ID NO: 78261 - protein, 9 aa, synthetic construct
  source 1..9: note = Seed: YVNTFSSTF
YLNTFSSTW

SEQ ID NO: 78262 - protein, 9 aa, synthetic construct
  source 1..9: note = Seed: YVNTFSSTF
YLNTFSSTY

SEQ ID NO: 78263 - protein, 9 aa, synthetic construct
  source 1..9: note = Seed: YTPHTVLQA
YLPHTVLQA

SEQ ID NO: 78264 - protein, 10 aa, synthetic construct
  source 1..10: note = Seed: YTPHTVLQAV
YLPHTVLQAA

SEQ ID NO: 78265 - protein, 10 aa, synthetic construct
  source 1..10: note = Seed: YTPHTVLQAV
YLPHTVLQAI

SEQ ID NO: 78266 - protein, 10 aa, synthetic construct
  source 1..10: note = Seed: YTPHTVLQAV
YLPHTVLQAL

SEQ ID NO: 78267 - protein, 10 aa, synthetic construct
  source 1..10: note = Seed: YTPHTVLQAV
YLPHTVLQAM

SEQ ID NO: 78268 - protein, 10 aa, synthetic construct
  source 1..10: note = Seed: YTPHTVLQAV
YLPHTVLQAV

SEQ ID NO: 78269 - protein, 9 aa, synthetic construct
  source 1..9: note = Seed: YTPHTVLQA
YLPHTVLQC

SEQ ID NO: 78270 - protein, 9 aa, synthetic construct
  source 1..9: note = Seed: YTPHTVLQA
YLPHTVLQI

SEQ ID NO: 78271 - protein, 9 aa, synthetic construct
  source 1..9: note = Seed: YTPHTVLQA
YLPHTVLQL

SEQ ID NO: 78272 - protein, 9 aa, synthetic construct
  source 1..9: note = Seed: YTPHTVLQA
YLPHTVLQM

SEQ ID NO: 78273 - protein, 9 aa, synthetic construct
  source 1..9: note = Seed: YTPHTVLQA
YLPHTVLQT

SEQ ID NO: 78274 - protein, 9 aa, synthetic construct
  source 1..9: note = Seed: YTPHTVLQA
YLPHTVLQV

SEQ ID NO: 78275 - protein, 10 aa, synthetic construct
  source 1..10: note = Seed: YLPIDKCSRI
YLPIDKCSRA

SEQ ID NO: 78276 - protein, 10 aa, synthetic construct
  source 1..10: note = Seed: YLPIDKCSRI
YLPIDKCSRL

SEQ ID NO: 78277 - protein, 10 aa, synthetic construct
  source 1..10: note = Seed: YLPIDKCSRI
YLPIDKCSRV

SEQ ID NO: 78278 - protein, 9 aa, synthetic construct
  source 1..9: note = Seed: YVPLKSATC
YLPLKSATF

SEQ ID NO: 78279 - protein, 9 aa, synthetic construct
  source 1..9: note = Seed: YVPLKSATC
YLPLKSATI

SEQ ID NO: 78280 - protein, 9 aa, synthetic construct
  source 1..9: note = Seed: YVPLKSATC
YLPLKSATL

SEQ ID NO: 78281 - protein, 9 aa, synthetic construct
  source 1..9: note = Seed: YVPLKSATC
YLPLKSATM

SEQ ID NO: 78282 - protein, 9 aa, synthetic construct
  source 1..9: note = Seed: YVPLKSATC
YLPLKSATV

SEQ ID NO: 78283 - protein, 8 aa, synthetic construct
  source 1..8: note = Seed: YMPYFFTL
YLPYFFTA

SEQ ID NO: 78284 - protein, 8 aa, synthetic construct
  source 1..8: note = Seed: YMPYFFTL
YLPYFFTF

SEQ ID NO: 78285 - protein, 8 aa, synthetic construct
  source 1..8: note = Seed: YMPYFFTL
YLPYFFTI

SEQ ID NO: 78286 - protein, 8 aa, synthetic construct
  source 1..8: note = Seed: YMPYFFTL
YLPYFFTL

SEQ ID NO: 78287 - protein, 9 aa, synthetic construct
  source 1..9: note = Seed: YMPYFFTLL
YLPYFFTLA

SEQ ID NO: 78288 - protein, 9 aa, synthetic construct
  source 1..9: note = Seed: YMPYFFTLL
YLPYFFTLF

SEQ ID NO: 78289 - protein, 9 aa, synthetic construct
  source 1..9: note = Seed: YMPYFFTLL
YLPYFFTLI

SEQ ID NO: 78290 - protein, 9 aa, synthetic construct
  source 1..9: note = Seed: YMPYFFTLL
YLPYFFTLL

SEQ ID NO: 78291 - protein, 10 aa, synthetic construct
  source 1..10: note = Seed: YMPYFFTLLL
YLPYFFTLLA

SEQ ID NO: 78292 - protein, 10 aa, synthetic construct
  source 1..10: note = Seed: YMPYFFTLLL
YLPYFFTLLF

SEQ ID NO: 78293 - protein, 10 aa, synthetic construct
  source 1..10: note = Seed: YMPYFFTLLL
YLPYFFTLLI

SEQ ID NO: 78294 - protein, 10 aa, synthetic construct
  source 1..10: note = Seed: YMPYFFTLLL
YLPYFFTLLL

SEQ ID NO: 78295 - protein, 11 aa, synthetic construct
  source 1..11: note = Seed: YMPYFFTLLLQ
YLPYFFTLLLI

SEQ ID NO: 78296 - protein, 11 aa, synthetic construct
  source 1..11: note = Seed: YMPYFFTLLLQ
YLPYFFTLLLL

SEQ ID NO: 78297 - protein, 11 aa, synthetic construct
  source 1..11: note = Seed: YMPYFFTLLLQ
YLPYFFTLLLV

SEQ ID NO: 78298 - protein, 10 aa, synthetic construct
  source 1..10: note = Seed: YMPYFFTLLL
YLPYFFTLLM

SEQ ID NO: 78299 - protein, 10 aa, synthetic construct
  source 1..10: note = Seed: YMPYFFTLLL
YLPYFFTLLT

SEQ ID NO: 78300 - protein, 10 aa, synthetic construct
  source 1..10: note = Seed: YMPYFFTLLL
YLPYFFTLLV

SEQ ID NO: 78301 - protein, 10 aa, synthetic construct
  source 1..10: note = Seed: YMPYFFTLLL
YLPYFFTLLW

SEQ ID NO: 78302 - protein, 10 aa, synthetic construct
  source 1..10: note = Seed: YMPYFFTLLL
YLPYFFTLLY

SEQ ID NO: 78303 - protein, 9 aa, synthetic construct
  source 1..9: note = Seed: YMPYFFTLL
YLPYFFTLM

SEQ ID NO: 78304 - protein, 9 aa, synthetic construct
  source 1..9: note = Seed: YMPYFFTLL
YLPYFFTLT

SEQ ID NO: 78305 - protein, 9 aa, synthetic construct
  source 1..9: note = Seed: YMPYFFTLL
YLPYFFTLV

SEQ ID NO: 78306 - protein, 9 aa, synthetic construct
  source 1..9: note = Seed: YMPYFFTLL
YLPYFFTLW

SEQ ID NO: 78307 - protein, 8 aa, synthetic construct
  source 1..8: note = Seed: YMPYFFTL
YLPYFFTM

SEQ ID NO: 78308 - protein, 8 aa, synthetic construct
  source 1..8: note = Seed: YMPYFFTL
YLPYFFTV

SEQ ID NO: 78309 - protein, 9 aa, synthetic construct
  source 1..9: note = Seed: YQPYRVVVL
YLPYRVVVA

SEQ ID NO: 78310 - protein, 9 aa, synthetic construct
  source 1..9: note = Seed: YQPYRVVVL
YLPYRVVVI

SEQ ID NO: 78311 - protein, 9 aa, synthetic construct
  source 1..9: note = Seed: YQPYRVVVL
YLPYRVVVL

SEQ ID NO: 78312 - protein, 10 aa, synthetic construct
  source 1..10: note = Seed: YQPYRVVVLS
YLPYRVVVLA

SEQ ID NO: 78313 - protein, 9 aa, synthetic construct
  source 1..9: note = Seed: YQPYRVVVL
YLPYRVVVM

SEQ ID NO: 78314 - protein, 9 aa, synthetic construct
  source 1..9: note = Seed: YQPYRVVVL
YLPYRVVVV

SEQ ID NO: 78315 - protein, 9 aa, synthetic construct
  source 1..9: note = Seed: YKQFDTYNL
YLQFDTYNF

SEQ ID NO: 78316 - protein, 10 aa, synthetic construct
  source 1..10: note = Seed: YKQFDTYNLW
YLQFDTYNLF

SEQ ID NO: 78317 - protein, 10 aa, synthetic construct
  source 1..10: note = Seed: YKQFDTYNLW
YLQFDTYNLM

SEQ ID NO: 78318 - protein, 10 aa, synthetic construct
  source 1..10: note = Seed: YKQFDTYNLW
YLQFDTYNLY

SEQ ID NO: 78319 - protein, 10 aa, synthetic construct
  source 1..10: note = Seed: YSQLMCQPIL
YLQLMCQPIF

SEQ ID NO: 78320 - protein, 11 aa, synthetic construct
  source 1..11: note = Seed: YSQLMCQPILL
YLQLMCQPILA

SEQ ID NO: 78321 - protein, 11 aa, synthetic construct
  source 1..11: note = Seed: YSQLMCQPILL
YLQLMCQPILI

SEQ ID NO: 78322 - protein, 11 aa, synthetic construct
  source 1..11: note = Seed: YSQLMCQPILL
YLQLMCQPILL

SEQ ID NO: 78323 - protein, 11 aa, synthetic construct
  source 1..11: note = Seed: YSQLMCQPILL
YLQLMCQPILM

SEQ ID NO: 78324 - protein, 11 aa, synthetic construct
  source 1..11: note = Seed: YSQLMCQPILL
YLQLMCQPILV

SEQ ID NO: 78325 - protein, 10 aa, synthetic construct
  source 1..10: note = Seed: YSQLMCQPIL
YLQLMCQPIY

SEQ ID NO: 78326 - protein, 9 aa, synthetic construct
  source 1..9: note = Seed: YSQLMCQPI
YLQLMCQPV

SEQ ID NO: 78327 - protein, 9 aa, synthetic construct
  source 1..9: note = Seed: YYQNNVFMS
YLQNNVFMF

SEQ ID NO: 78328 - protein, 9 aa, synthetic construct
  source 1..9: note = Seed: YYQNNVFMS
YLQNNVFMW

SEQ ID NO: 78329 - protein, 9 aa, synthetic construct
  source 1..9: note = Seed: YLQPRTFLL
YLQPRTFLA

SEQ ID NO: 78330 - protein, 9 aa, synthetic construct
  source 1..9: note = Seed: YLQPRTFLL
YLQPRTFLC

SEQ ID NO: 78331 - protein, 9 aa, synthetic construct
  source 1..9: note = Seed: YLQPRTFLL
YLQPRTFLF

SEQ ID NO: 78332 - protein, 9 aa, synthetic construct
  source 1..9: note = Seed: YLQPRTFLL
YLQPRTFLI

SEQ ID NO: 78333 - protein, 10 aa, synthetic construct
  source 1..10: note = Seed: YLQPRTFLLK
YLQPRTFLLA

SEQ ID NO: 78334 - protein, 10 aa, synthetic construct
  source 1..10: note = Seed: YLQPRTFLLK
YLQPRTFLLC

SEQ ID NO: 78335 - protein, 10 aa, synthetic construct
  source 1..10: note = Seed: YLQPRTFLLK
YLQPRTFLLD

SEQ ID NO: 78336 - protein, 10 aa, synthetic construct
  source 1..10: note = Seed: YLQPRTFLLK
YLQPRTFLLE

SEQ ID NO: 78337 - protein, 10 aa, synthetic construct
  source 1..10: note = Seed: YLQPRTFLLK
YLQPRTFLLF

SEQ ID NO: 78338 - protein, 10 aa, synthetic construct
  source 1..10: note = Seed: YLQPRTFLLK
YLQPRTFLLG

SEQ ID NO: 78339 - protein, 10 aa, synthetic construct
  source 1..10: note = Seed: YLQPRTFLLK
YLQPRTFLLH

SEQ ID NO: 78340 - protein, 10 aa, synthetic construct
  source 1..10: note = Seed: YLQPRTFLLK
YLQPRTFLLI

SEQ ID NO: 78341 - protein, 11 aa, synthetic construct
  source 1..11: note = Seed: YLQPRTFLLKY
YLQPRTFLLKA

SEQ ID NO: 78342 - protein, 11 aa, synthetic construct
  source 1..11: note = Seed: YLQPRTFLLKY
YLQPRTFLLKI

SEQ ID NO: 78343 - protein, 11 aa, synthetic construct
  source 1..11: note = Seed: YLQPRTFLLKY
YLQPRTFLLKL

SEQ ID NO: 78344 - protein, 11 aa, synthetic construct
  source 1..11: note = Seed: YLQPRTFLLKY
YLQPRTFLLKV

SEQ ID NO: 78345 - protein, 10 aa, synthetic construct
  source 1..10: note = Seed: YLQPRTFLLK
YLQPRTFLLL

SEQ ID NO: 78346 - protein, 10 aa, synthetic construct
  source 1..10: note = Seed: YLQPRTFLLK
YLQPRTFLLM

SEQ ID NO: 78347 - protein, 10 aa, synthetic construct
  source 1..10: note = Seed: YLQPRTFLLK
YLQPRTFLLN

SEQ ID NO: 78348 - protein, 10 aa, synthetic construct
  source 1..10: note = Seed: YLQPRTFLLK
YLQPRTFLLP

SEQ ID NO: 78349 - protein, 10 aa, synthetic construct
  source 1..10: note = Seed: YLQPRTFLLK
YLQPRTFLLQ

SEQ ID NO: 78350 - protein, 10 aa, synthetic construct
  source 1..10: note = Seed: YLQPRTFLLK
YLQPRTFLLR

SEQ ID NO: 78351 - protein, 10 aa, synthetic construct
  source 1..10: note = Seed: YLQPRTFLLK
YLQPRTFLLS

SEQ ID NO: 78352 - protein, 10 aa, synthetic construct
  source 1..10: note = Seed: YLQPRTFLLK
YLQPRTFLLT

SEQ ID NO: 78353 - protein, 10 aa, synthetic construct
  source 1..10: note = Seed: YLQPRTFLLK
YLQPRTFLLV

SEQ ID NO: 78354 - protein, 10 aa, synthetic construct
  source 1..10: note = Seed: YLQPRTFLLK
YLQPRTFLLW

SEQ ID NO: 78355 - protein, 10 aa, synthetic construct
  source 1..10: note = Seed: YLQPRTFLLK
YLQPRTFLLY

SEQ ID NO: 78356 - protein, 9 aa, synthetic construct
  source 1..9: note = Seed: YLQPRTFLL
YLQPRTFLM

SEQ ID NO: 78357 - protein, 9 aa, synthetic construct
  source 1..9: note = Seed: YLQPRTFLL
YLQPRTFLR

SEQ ID NO: 78358 - protein, 9 aa, synthetic construct
  source 1..9: note = Seed: YLQPRTFLL
YLQPRTFLS

SEQ ID NO: 78359 - protein, 9 aa, synthetic construct
  source 1..9: note = Seed: YLQPRTFLL
YLQPRTFLT

SEQ ID NO: 78360 - protein, 9 aa, synthetic construct
  source 1..9: note = Seed: YLQPRTFLL
YLQPRTFLV

SEQ ID NO: 78361 - protein, 9 aa, synthetic construct
  source 1..9: note = Seed: YLQPRTFLL
YLQPRTFLW

SEQ ID NO: 78362 - protein, 9 aa, synthetic construct
  source 1..9: note = Seed: YLQPRTFLL
YLQPRTFLY

SEQ ID NO: 78363 - protein, 8 aa, synthetic construct
  source 1..8: note = Seed: YLQPRTFL
YLQPRTFV

SEQ ID NO: 78364 - protein, 10 aa, synthetic construct
  source 1..10: note = Seed: YCQVHGNAHV
YLQVHGNAHA

SEQ ID NO: 78365 - protein, 10 aa, synthetic construct
  source 1..10: note = Seed: YCQVHGNAHV
YLQVHGNAHI

SEQ ID NO: 78366 - protein, 10 aa, synthetic construct
  source 1..10: note = Seed: YCQVHGNAHV
YLQVHGNAHL

SEQ ID NO: 78367 - protein, 10 aa, synthetic construct
  source 1..10: note = Seed: YCQVHGNAHV
YLQVHGNAHV

SEQ ID NO: 78368 - protein, 10 aa, synthetic construct
  source 1..10: note = Seed: YPQVNGLTSI
YLQVNGLTSA

SEQ ID NO: 78369 - protein, 10 aa, synthetic construct
  source 1..10: note = Seed: YPQVNGLTSI
YLQVNGLTSF

SEQ ID NO: 78370 - protein, 10 aa, synthetic construct
  source 1..10: note = Seed: YPQVNGLTSI
YLQVNGLTSI

SEQ ID NO: 78371 - protein, 10 aa, synthetic construct
  source 1..10: note = Seed: YPQVNGLTSI
YLQVNGLTSL

SEQ ID NO: 78372 - protein, 10 aa, synthetic construct
  source 1..10: note = Seed: YPQVNGLTSI
YLQVNGLTSM

SEQ ID NO: 78373 - protein, 10 aa, synthetic construct
  source 1..10: note = Seed: YPQVNGLTSI
YLQVNGLTST

SEQ ID NO: 78374 - protein, 10 aa, synthetic construct
  source 1..10: note = Seed: YPQVNGLTSI
YLQVNGLTSV

SEQ ID NO: 78375 - protein, 10 aa, synthetic construct
  source 1..10: note = Seed: YPQVNGLTSI
YLQVNGLTSY

SEQ ID NO: 78376 - protein, 9 aa, synthetic construct
  source 1..9: note = Seed: YPQVNGLTS
YLQVNGLTY

SEQ ID NO: 78377 - protein, 9 aa, synthetic construct
  source 1..9: note = Seed: YKRDAPAHI
YLRDAPAHF

SEQ ID NO: 78378 - protein, 9 aa, synthetic construct
  source 1..9: note = Seed: YKRDAPAHI
YLRDAPAHM

SEQ ID NO: 78379 - protein, 9 aa, synthetic construct
  source 1..9: note = Seed: YKRDAPAHI
YLRDAPAHY

SEQ ID NO: 78380 - protein, 10 aa, synthetic construct
  source 1..10: note = Seed: YRRLISMMGF
YLRLISMMGF

SEQ ID NO: 78381 - protein, 10 aa, synthetic construct
  source 1..10: note = Seed: YRRLISMMGF
YLRLISMMGI

SEQ ID NO: 78382 - protein, 10 aa, synthetic construct
  source 1..10: note = Seed: YRRLISMMGF
YLRLISMMGL

SEQ ID NO: 78383 - protein, 10 aa, synthetic construct
  source 1..10: note = Seed: YRRLISMMGF
YLRLISMMGM

SEQ ID NO: 78384 - protein, 9 aa, synthetic construct
  source 1..9: note = Seed: YFRLTLGVY
YLRLTLGVF

SEQ ID NO: 78385 - protein, 9 aa, synthetic construct
  source 1..9: note = Seed: YFRLTLGVY
YLRLTLGVM

SEQ ID NO: 78386 - protein, 9 aa, synthetic construct
  source 1..9: note = Seed: YFRLTLGVY
YLRLTLGVY

SEQ ID NO: 78387 - protein, 10 aa, synthetic construct
  source 1..10: note = Seed: YVRNLQHRLY
YLRNLQHRLY

SEQ ID NO: 78388 - protein, 9 aa, synthetic construct
  source 1..9: note = Seed: YKRNRATRV
YLRNRATRA

SEQ ID NO: 78389 - protein, 9 aa, synthetic construct
  source 1..9: note = Seed: YKRNRATRV
YLRNRATRF

SEQ ID NO: 78390 - protein, 9 aa, synthetic construct
  source 1..9: note = Seed: YKRNRATRV
YLRNRATRI

SEQ ID NO: 78391 - protein, 9 aa, synthetic construct
  source 1..9: note = Seed: YKRNRATRV
YLRNRATRL

SEQ ID NO: 78392 - protein, 9 aa, synthetic construct
  source 1..9: note = Seed: YKRNRATRV
YLRNRATRM

SEQ ID NO: 78393 - protein, 9 aa, synthetic construct
  source 1..9: note = Seed: YKRNRATRV
YLRNRATRV

SEQ ID NO: 78394 - protein, 9 aa, synthetic construct
  source 1..9: note = Seed: YYRSLPGVF
YLRSLPGVF

SEQ ID NO: 78395 - protein, 9 aa, synthetic construct
  source 1..9: note = Seed: YYRSLPGVF
YLRSLPGVM

SEQ ID NO: 78396 - protein, 9 aa, synthetic construct
  source 1..9: note = Seed: YYRSLPGVF
YLRSLPGVY

SEQ ID NO: 78397 - protein, 9 aa, synthetic construct
  source 1..9: note = Seed: YYRYNLPTM
YLRYNLPTF

SEQ ID NO: 78398 - protein, 9 aa, synthetic construct
  source 1..9: note = Seed: YYRYNLPTM
YLRYNLPTK

SEQ ID NO: 78399 - protein, 9 aa, synthetic construct
  source 1..9: note = Seed: YYRYNLPTM
YLRYNLPTM

SEQ ID NO: 78400 - protein, 10 aa, synthetic construct
  source 1..10: note = Seed: YYRYNLPTMC
YLRYNLPTMF

SEQ ID NO: 78401 - protein, 10 aa, synthetic construct
  source 1..10: note = Seed: YYRYNLPTMC
YLRYNLPTMI

SEQ ID NO: 78402 - protein, 10 aa, synthetic construct
  source 1..10: note = Seed: YYRYNLPTMC
YLRYNLPTML

SEQ ID NO: 78403 - protein, 10 aa, synthetic construct
  source 1..10: note = Seed: YYRYNLPTMC
YLRYNLPTMM

SEQ ID NO: 78404 - protein, 10 aa, synthetic construct
  source 1..10: note = Seed: YYRYNLPTMC
YLRYNLPTMV

SEQ ID NO: 78405 - protein, 9 aa, synthetic construct
  source 1..9: note = Seed: YYRYNLPTM
YLRYNLPTY

SEQ ID NO: 78406 - protein, 9 aa, synthetic construct
  source 1..9: note = Seed: YSRYRIGNY
YLRYRIGNF

SEQ ID NO: 78407 - protein, 9 aa, synthetic construct
  source 1..9: note = Seed: YSRYRIGNY
YLRYRIGNY

SEQ ID NO: 78408 - protein, 10 aa, synthetic construct
  source 1..10: note = Seed: YSRYRIGNYK
YLRYRIGNYF

SEQ ID NO: 78409 - protein, 10 aa, synthetic construct
  source 1..10: note = Seed: YSRYRIGNYK
YLRYRIGNYK

SEQ ID NO: 78410 - protein, 11 aa, synthetic construct
  source 1..11: note = Seed: YSRYRIGNYKL
YLRYRIGNYKF

SEQ ID NO: 78411 - protein, 10 aa, synthetic construct
  source 1..10: note = Seed: YSRYRIGNYK
YLRYRIGNYL

SEQ ID NO: 78412 - protein, 10 aa, synthetic construct
  source 1..10: note = Seed: YSRYRIGNYK
YLRYRIGNYM

SEQ ID NO: 78413 - protein, 10 aa, synthetic construct
  source 1..10: note = Seed: YSRYRIGNYK
YLRYRIGNYR

SEQ ID NO: 78414 - protein, 9 aa, synthetic construct
  source 1..9: note = Seed: YSSANNCTF
YLSANNCTF

SEQ ID NO: 78415 - protein, 11 aa, synthetic construct
  source 1..11: note = Seed: YSSANNCTFEY
YLSANNCTFEW

SEQ ID NO: 78416 - protein, 11 aa, synthetic construct
  source 1..11: note = Seed: YSSANNCTFEY
YLSANNCTFEY

SEQ ID NO: 78417 - protein, 9 aa, synthetic construct
  source 1..9: note = Seed: YSSANNCTF
YLSANNCTL

SEQ ID NO: 78418 - protein, 9 aa, synthetic construct
  source 1..9: note = Seed: YSSANNCTF
YLSANNCTM

SEQ ID NO: 78419 - protein, 9 aa, synthetic construct
  source 1..9: note = Seed: YSSANNCTF
YLSANNCTW

SEQ ID NO: 78420 - protein, 9 aa, synthetic construct
  source 1..9: note = Seed: YSSANNCTF
YLSANNCTY

SEQ ID NO: 78421 - protein, 9 aa, synthetic construct
  source 1..9: note = Seed: YNSASFSTF
YLSASFSTF

SEQ ID NO: 78422 - protein, 10 aa, synthetic construct
  source 1..10: note = Seed: YNSASFSTFK
YLSASFSTFK

SEQ ID NO: 78423 - protein, 10 aa, synthetic construct
  source 1..10: note = Seed: YNSASFSTFK
YLSASFSTFR

SEQ ID NO: 78424 - protein, 9 aa, synthetic construct
  source 1..9: note = Seed: YNSASFSTF
YLSASFSTL

SEQ ID NO: 78425 - protein, 9 aa, synthetic construct
  source 1..9: note = Seed: YNSASFSTF
YLSASFSTM

SEQ ID NO: 78426 - protein, 9 aa, synthetic construct
  source 1..9: note = Seed: YNSASFSTF
YLSASFSTW

SEQ ID NO: 78427 - protein, 9 aa, synthetic construct
  source 1..9: note = Seed: YNSASFSTF
YLSASFSTY

SEQ ID NO: 78428 - protein, 9 aa, synthetic construct
  source 1..9: note = Seed: YASAVVLLI
YLSAVVLLA

SEQ ID NO: 78429 - protein, 9 aa, synthetic construct
  source 1..9: note = Seed: YASAVVLLI
YLSAVVLLC

SEQ ID NO: 78430 - protein, 9 aa, synthetic construct
  source 1..9: note = Seed: YASAVVLLI
YLSAVVLLF

SEQ ID NO: 78431 - protein, 9 aa, synthetic construct
  source 1..9: note = Seed: YASAVVLLI
YLSAVVLLG

SEQ ID NO: 78432 - protein, 9 aa, synthetic construct
  source 1..9: note = Seed: YASAVVLLI
YLSAVVLLI

SEQ ID NO: 78433 - protein, 10 aa, synthetic construct
  source 1..10: note = Seed: YASAVVLLIL
YLSAVVLLIA

SEQ ID NO: 78434 - protein, 10 aa, synthetic construct
  source 1..10: note = Seed: YASAVVLLIL
YLSAVVLLIC

SEQ ID NO: 78435 - protein, 10 aa, synthetic construct
  source 1..10: note = Seed: YASAVVLLIL
YLSAVVLLID

SEQ ID NO: 78436 - protein, 10 aa, synthetic construct
  source 1..10: note = Seed: YASAVVLLIL
YLSAVVLLIE

SEQ ID NO: 78437 - protein, 10 aa, synthetic construct
  source 1..10: note = Seed: YASAVVLLIL
YLSAVVLLIF

SEQ ID NO: 78438 - protein, 10 aa, synthetic construct
  source 1..10: note = Seed: YASAVVLLIL
YLSAVVLLIG

SEQ ID NO: 78439 - protein, 10 aa, synthetic construct
  source 1..10: note = Seed: YASAVVLLIL
YLSAVVLLIH

SEQ ID NO: 78440 - protein, 10 aa, synthetic construct
  source 1..10: note = Seed: YASAVVLLIL
YLSAVVLLII

SEQ ID NO: 78441 - protein, 10 aa, synthetic construct
  source 1..10: note = Seed: YASAVVLLIL
YLSAVVLLIK

SEQ ID NO: 78442 - protein, 10 aa, synthetic construct
  source 1..10: note = Seed: YASAVVLLIL
YLSAVVLLIL

SEQ ID NO: 78443 - protein, 10 aa, synthetic construct
  source 1..10: note = Seed: YASAVVLLIL
YLSAVVLLIM

SEQ ID NO: 78444 - protein, 10 aa, synthetic construct
  source 1..10: note = Seed: YASAVVLLIL
YLSAVVLLIN

SEQ ID NO: 78445 - protein, 10 aa, synthetic construct
  source 1..10: note = Seed: YASAVVLLIL
YLSAVVLLIP

SEQ ID NO: 78446 - protein, 10 aa, synthetic construct
  source 1..10: note = Seed: YASAVVLLIL
YLSAVVLLIQ

SEQ ID NO: 78447 - protein, 10 aa, synthetic construct
  source 1..10: note = Seed: YASAVVLLIL
YLSAVVLLIR

SEQ ID NO: 78448 - protein, 10 aa, synthetic construct
  source 1..10: note = Seed: YASAVVLLIL
YLSAVVLLIS

SEQ ID NO: 78449 - protein, 10 aa, synthetic construct
  source 1..10: note = Seed: YASAVVLLIL
YLSAVVLLIT

SEQ ID NO: 78450 - protein, 10 aa, synthetic construct
  source 1..10: note = Seed: YASAVVLLIL
YLSAVVLLIV

SEQ ID NO: 78451 - protein, 10 aa, synthetic construct
  source 1..10: note = Seed: YASAVVLLIL
YLSAVVLLIW

SEQ ID NO: 78452 - protein, 10 aa, synthetic construct
  source 1..10: note = Seed: YASAVVLLIL
YLSAVVLLIY

SEQ ID NO: 78453 - protein, 9 aa, synthetic construct
  source 1..9: note = Seed: YASAVVLLI
YLSAVVLLL

SEQ ID NO: 78454 - protein, 9 aa, synthetic construct
  source 1..9: note = Seed: YASAVVLLI
YLSAVVLLM

SEQ ID NO: 78455 - protein, 9 aa, synthetic construct
  source 1..9: note = Seed: YASAVVLLI
YLSAVVLLS

SEQ ID NO: 78456 - protein, 9 aa, synthetic construct
  source 1..9: note = Seed: YASAVVLLI
YLSAVVLLT

SEQ ID NO: 78457 - protein, 9 aa, synthetic construct
  source 1..9: note = Seed: YASAVVLLI
YLSAVVLLV

SEQ ID NO: 78458 - protein, 9 aa, synthetic construct
  source 1..9: note = Seed: YASAVVLLI
YLSAVVLLW

SEQ ID NO: 78459 - protein, 9 aa, synthetic construct
  source 1..9: note = Seed: YASAVVLLI
YLSAVVLLY

SEQ ID NO: 78460 - protein, 11 aa, synthetic construct
  source 1..11: note = Seed: YYSLLMPILTL
YLSLLMPILTI

SEQ ID NO: 78461 - protein, 11 aa, synthetic construct
  source 1..11: note = Seed: YYSLLMPILTL
YLSLLMPILTL

SEQ ID NO: 78462 - protein, 11 aa, synthetic construct
  source 1..11: note = Seed: YYSLLMPILTL
YLSLLMPILTV

SEQ ID NO: 78463 - protein, 11 aa, synthetic construct
  source 1..11: note = Seed: YRSLPGVFCGV
YLSLPGVFCGA

SEQ ID NO: 78464 - protein, 11 aa, synthetic construct
  source 1..11: note = Seed: YRSLPGVFCGV
YLSLPGVFCGI

SEQ ID NO: 78465 - protein, 11 aa, synthetic construct
  source 1..11: note = Seed: YRSLPGVFCGV
YLSLPGVFCGL

SEQ ID NO: 78466 - protein, 11 aa, synthetic construct
  source 1..11: note = Seed: YRSLPGVFCGV
YLSLPGVFCGV

SEQ ID NO: 78467 - protein, 10 aa, synthetic construct
  source 1..10: note = Seed: YESLRPDTRY
YLSLRPDTRF

SEQ ID NO: 78468 - protein, 10 aa, synthetic construct
  source 1..10: note = Seed: YESLRPDTRY
YLSLRPDTRW

SEQ ID NO: 78469 - protein, 11 aa, synthetic construct
  source 1..11: note = Seed: YESLRPDTRYV
YLSLRPDTRYV

SEQ ID NO: 78470 - protein, 9 aa, synthetic construct
  source 1..9: note = Seed: YTSNPTTFH
YLSNPTTFF

SEQ ID NO: 78471 - protein, 10 aa, synthetic construct
  source 1..10: note = Seed: YTSNPTTFHL
YLSNPTTFHA

SEQ ID NO: 78472 - protein, 10 aa, synthetic construct
  source 1..10: note = Seed: YTSNPTTFHL
YLSNPTTFHF

SEQ ID NO: 78473 - protein, 10 aa, synthetic construct
  source 1..10: note = Seed: YTSNPTTFHL
YLSNPTTFHI

SEQ ID NO: 78474 - protein, 10 aa, synthetic construct
  source 1..10: note = Seed: YTSNPTTFHL
YLSNPTTFHL

SEQ ID NO: 78475 - protein, 10 aa, synthetic construct
  source 1..10: note = Seed: YTSNPTTFHL
YLSNPTTFHM

SEQ ID NO: 78476 - protein, 10 aa, synthetic construct
  source 1..10: note = Seed: YTSNPTTFHL
YLSNPTTFHT

SEQ ID NO: 78477 - protein, 10 aa, synthetic construct
  source 1..10: note = Seed: YTSNPTTFHL
YLSNPTTFHV

SEQ ID NO: 78478 - protein, 10 aa, synthetic construct
  source 1..10: note = Seed: YTSNPTTFHL
YLSNPTTFHW

SEQ ID NO: 78479 - protein, 10 aa, synthetic construct
  source 1..10: note = Seed: YTSNPTTFHL
YLSNPTTFHY

SEQ ID NO: 78480 - protein, 9 aa, synthetic construct
  source 1..9: note = Seed: YTSNPTTFH
YLSNPTTFK

SEQ ID NO: 78481 - protein, 9 aa, synthetic construct
  source 1..9: note = Seed: YTSNPTTFH
YLSNPTTFM

SEQ ID NO: 78482 - protein, 9 aa, synthetic construct
  source 1..9: note = Seed: YTSNPTTFH
YLSNPTTFR

SEQ ID NO: 78483 - protein, 9 aa, synthetic construct
  source 1..9: note = Seed: YTSNPTTFH
YLSNPTTFY

SEQ ID NO: 78484 - protein, 10 aa, synthetic construct
  source 1..10: note = Seed: YLTFYLTNDV
YLTFYLTNDA

SEQ ID NO: 78485 - protein, 10 aa, synthetic construct
  source 1..10: note = Seed: YLTFYLTNDV
YLTFYLTNDI

SEQ ID NO: 78486 - protein, 10 aa, synthetic construct
  source 1..10: note = Seed: YLTFYLTNDV
YLTFYLTNDL

SEQ ID NO: 78487 - protein, 10 aa, synthetic construct
  source 1..10: note = Seed: YLTFYLTNDV
YLTFYLTNDM

SEQ ID NO: 78488 - protein, 11 aa, synthetic construct
  source 1..11: note = Seed: YLTFYLTNDVS
YLTFYLTNDVV

SEQ ID NO: 78489 - protein, 9 aa, synthetic construct
  source 1..9: note = Seed: YITGGVVQL
YLTGGVVQA

SEQ ID NO: 78490 - protein, 9 aa, synthetic construct
  source 1..9: note = Seed: YITGGVVQL
YLTGGVVQC

SEQ ID NO: 78491 - protein, 9 aa, synthetic construct
  source 1..9: note = Seed: YITGGVVQL
YLTGGVVQI

SEQ ID NO: 78492 - protein, 9 aa, synthetic construct
  source 1..9: note = Seed: YITGGVVQL
YLTGGVVQL

SEQ ID NO: 78493 - protein, 9 aa, synthetic construct
  source 1..9: note = Seed: YITGGVVQL
YLTGGVVQM

SEQ ID NO: 78494 - protein, 9 aa, synthetic construct
  source 1..9: note = Seed: YITGGVVQL
YLTGGVVQT

SEQ ID NO: 78495 - protein, 9 aa, synthetic construct
  source 1..9: note = Seed: YITGGVVQL
YLTGGVVQV

SEQ ID NO: 78496 - protein, 9 aa, synthetic construct
  source 1..9: note = Seed: YLTNDVSFL
YLTNDVSFA

SEQ ID NO: 78497 - protein, 9 aa, synthetic construct
  source 1..9: note = Seed: YLTNDVSFL
YLTNDVSFI

SEQ ID NO: 78498 - protein, 11 aa, synthetic construct
  source 1..11: note = Seed: YLTNDVSFLAH
YLTNDVSFLAI

SEQ ID NO: 78499 - protein, 11 aa, synthetic construct
  source 1..11: note = Seed: YLTNDVSFLAH
YLTNDVSFLAL

SEQ ID NO: 78500 - protein, 11 aa, synthetic construct
  source 1..11: note = Seed: YLTNDVSFLAH
YLTNDVSFLAV

SEQ ID NO: 78501 - protein, 10 aa, synthetic construct
  source 1..10: note = Seed: YLTNDVSFLA
YLTNDVSFLC

SEQ ID NO: 78502 - protein, 10 aa, synthetic construct
  source 1..10: note = Seed: YLTNDVSFLA
YLTNDVSFLD

SEQ ID NO: 78503 - protein, 10 aa, synthetic construct
  source 1..10: note = Seed: YLTNDVSFLA
YLTNDVSFLE

SEQ ID NO: 78504 - protein, 10 aa, synthetic construct
  source 1..10: note = Seed: YLTNDVSFLA
YLTNDVSFLF

SEQ ID NO: 78505 - protein, 10 aa, synthetic construct
  source 1..10: note = Seed: YLTNDVSFLA
YLTNDVSFLG

SEQ ID NO: 78506 - protein, 10 aa, synthetic construct
  source 1..10: note = Seed: YLTNDVSFLA
YLTNDVSFLH

SEQ ID NO: 78507 - protein, 10 aa, synthetic construct
  source 1..10: note = Seed: YLTNDVSFLA
YLTNDVSFLI

SEQ ID NO: 78508 - protein, 10 aa, synthetic construct
  source 1..10: note = Seed: YLTNDVSFLA
YLTNDVSFLK

SEQ ID NO: 78509 - protein, 10 aa, synthetic construct
  source 1..10: note = Seed: YLTNDVSFLA
YLTNDVSFLL

SEQ ID NO: 78510 - protein, 10 aa, synthetic construct
  source 1..10: note = Seed: YLTNDVSFLA
YLTNDVSFLM

SEQ ID NO: 78511 - protein, 10 aa, synthetic construct
  source 1..10: note = Seed: YLTNDVSFLA
YLTNDVSFLN

SEQ ID NO: 78512 - protein, 10 aa, synthetic construct
  source 1..10: note = Seed: YLTNDVSFLA
YLTNDVSFLP

SEQ ID NO: 78513 - protein, 10 aa, synthetic construct
  source 1..10: note = Seed: YLTNDVSFLA
YLTNDVSFLQ

SEQ ID NO: 78514 - protein, 10 aa, synthetic construct
  source 1..10: note = Seed: YLTNDVSFLA
YLTNDVSFLR

SEQ ID NO: 78515 - protein, 10 aa, synthetic construct
  source 1..10: note = Seed: YLTNDVSFLA
YLTNDVSFLS

SEQ ID NO: 78516 - protein, 10 aa, synthetic construct
  source 1..10: note = Seed: YLTNDVSFLA
YLTNDVSFLT

SEQ ID NO: 78517 - protein, 10 aa, synthetic construct
  source 1..10: note = Seed: YLTNDVSFLA
YLTNDVSFLV

SEQ ID NO: 78518 - protein, 10 aa, synthetic construct
  source 1..10: note = Seed: YLTNDVSFLA
YLTNDVSFLW

SEQ ID NO: 78519 - protein, 10 aa, synthetic construct
  source 1..10: note = Seed: YLTNDVSFLA
YLTNDVSFLY

SEQ ID NO: 78520 - protein, 9 aa, synthetic construct
  source 1..9: note = Seed: YLTNDVSFL
YLTNDVSFM

SEQ ID NO: 78521 - protein, 9 aa, synthetic construct
  source 1..9: note = Seed: YLTNDVSFL
YLTNDVSFT

SEQ ID NO: 78522 - protein, 9 aa, synthetic construct
  source 1..9: note = Seed: YLTNDVSFL
YLTNDVSFV

SEQ ID NO: 78523 - protein, 9 aa, synthetic construct
  source 1..9: note = Seed: YVTQQLIRA
YLTQQLIRL

SEQ ID NO: 78524 - protein, 9 aa, synthetic construct
  source 1..9: note = Seed: YVTQQLIRA
YLTQQLIRV

SEQ ID NO: 78525 - protein, 9 aa, synthetic construct
  source 1..9: note = Seed: YFTSDYYQL
YLTSDYYQF

SEQ ID NO: 78526 - protein, 10 aa, synthetic construct
  source 1..10: note = Seed: YFTSDYYQLY
YLTSDYYQLK

SEQ ID NO: 78527 - protein, 10 aa, synthetic construct
  source 1..10: note = Seed: YFTSDYYQLY
YLTSDYYQLR

SEQ ID NO: 78528 - protein, 10 aa, synthetic construct
  source 1..10: note = Seed: YFTSDYYQLY
YLTSDYYQLW

SEQ ID NO: 78529 - protein, 10 aa, synthetic construct
  source 1..10: note = Seed: YFTSDYYQLY
YLTSDYYQLY

SEQ ID NO: 78530 - protein, 11 aa, synthetic construct
  source 1..11: note = Seed: YFTSDYYQLYS
YLTSDYYQLYY

SEQ ID NO: 78531 - protein, 9 aa, synthetic construct
  source 1..9: note = Seed: YYTSNPTTF
YLTSNPTTF

SEQ ID NO: 78532 - protein, 11 aa, synthetic construct
  source 1..11: note = Seed: YYTSNPTTFHL
YLTSNPTTFHF

SEQ ID NO: 78533 - protein, 11 aa, synthetic construct
  source 1..11: note = Seed: YYTSNPTTFHL
YLTSNPTTFHW

SEQ ID NO: 78534 - protein, 9 aa, synthetic construct
  source 1..9: note = Seed: YYTSNPTTF
YLTSNPTTM

SEQ ID NO: 78535 - protein, 9 aa, synthetic construct
  source 1..9: note = Seed: YYTSNPTTF
YLTSNPTTY

SEQ ID NO: 78536 - protein, 10 aa, synthetic construct
  source 1..10: note = Seed: YTTTIKPVTY
YLTTIKPVTW

SEQ ID NO: 78537 - protein, 11 aa, synthetic construct
  source 1..11: note = Seed: YTTTIKPVTYK
YLTTIKPVTYR

SEQ ID NO: 78538 - protein, 10 aa, synthetic construct
  source 1..10: note = Seed: YITTYPGQGL
YLTTYPGQGI

SEQ ID NO: 78539 - protein, 10 aa, synthetic construct
  source 1..10: note = Seed: YITTYPGQGL
YLTTYPGQGL

SEQ ID NO: 78540 - protein, 10 aa, synthetic construct
  source 1..10: note = Seed: YITTYPGQGL
YLTTYPGQGV

SEQ ID NO: 78541 - protein, 8 aa, synthetic construct
  source 1..8: note = Seed: YIVDSVTV
YLVDSVTV

SEQ ID NO: 78542 - protein, 9 aa, synthetic construct
  source 1..9: note = Seed: YTVEEAKTV
YLVEEAKTA

SEQ ID NO: 78543 - protein, 9 aa, synthetic construct
  source 1..9: note = Seed: YTVEEAKTV
YLVEEAKTI

SEQ ID NO: 78544 - protein, 9 aa, synthetic construct
  source 1..9: note = Seed: YTVEEAKTV
YLVEEAKTL

SEQ ID NO: 78545 - protein, 9 aa, synthetic construct
  source 1..9: note = Seed: YTVEEAKTV
YLVEEAKTM

SEQ ID NO: 78546 - protein, 9 aa, synthetic construct
  source 1..9: note = Seed: YTVEEAKTV
YLVEEAKTV

SEQ ID NO: 78547 - protein, 9 aa, synthetic construct
  source 1..9: note = Seed: YTVEEAKTV
YLVEEAKTY

SEQ ID NO: 78548 - protein, 9 aa, synthetic construct
  source 1..9: note = Seed: YTVELGTEV
YLVELGTEA

SEQ ID NO: 78549 - protein, 9 aa, synthetic construct
  source 1..9: note = Seed: YTVELGTEV
YLVELGTEF

SEQ ID NO: 78550 - protein, 9 aa, synthetic construct
  source 1..9: note = Seed: YTVELGTEV
YLVELGTEI

SEQ ID NO: 78551 - protein, 9 aa, synthetic construct
  source 1..9: note = Seed: YTVELGTEV
YLVELGTEL

SEQ ID NO: 78552 - protein, 9 aa, synthetic construct
  source 1..9: note = Seed: YTVELGTEV
YLVELGTEM

SEQ ID NO: 78553 - protein, 9 aa, synthetic construct
  source 1..9: note = Seed: YTVELGTEV
YLVELGTET

SEQ ID NO: 78554 - protein, 9 aa, synthetic construct
  source 1..9: note = Seed: YTVELGTEV
YLVELGTEV

SEQ ID NO: 78555 - protein, 9 aa, synthetic construct
  source 1..9: note = Seed: YTVELGTEV
YLVELGTEY

SEQ ID NO: 78556 - protein, 9 aa, synthetic construct
  source 1..9: note = Seed: YYVGYLQPR
YLVGYLQPM

SEQ ID NO: 78557 - protein, 9 aa, synthetic construct
  source 1..9: note = Seed: YFVLTSHTV
YLVLTSHTA

SEQ ID NO: 78558 - protein, 9 aa, synthetic construct
  source 1..9: note = Seed: YFVLTSHTV
YLVLTSHTI

SEQ ID NO: 78559 - protein, 9 aa, synthetic construct
  source 1..9: note = Seed: YFVLTSHTV
YLVLTSHTL

SEQ ID NO: 78560 - protein, 9 aa, synthetic construct
  source 1..9: note = Seed: YFVLTSHTV
YLVLTSHTM

SEQ ID NO: 78561 - protein, 9 aa, synthetic construct
  source 1..9: note = Seed: YFVLTSHTV
YLVLTSHTV

SEQ ID NO: 78562 - protein, 9 aa, synthetic construct
  source 1..9: note = Seed: YQVNGYPNM
YLVNGYPNA

SEQ ID NO: 78563 - protein, 9 aa, synthetic construct
  source 1..9: note = Seed: YQVNGYPNM
YLVNGYPNC

SEQ ID NO: 78564 - protein, 9 aa, synthetic construct
  source 1..9: note = Seed: YQVNGYPNM
YLVNGYPNF

SEQ ID NO: 78565 - protein, 9 aa, synthetic construct
  source 1..9: note = Seed: YQVNGYPNM
YLVNGYPNI

SEQ ID NO: 78566 - protein, 9 aa, synthetic construct
  source 1..9: note = Seed: YQVNGYPNM
YLVNGYPNL

SEQ ID NO: 78567 - protein, 9 aa, synthetic construct
  source 1..9: note = Seed: YQVNGYPNM
YLVNGYPNM

SEQ ID NO: 78568 - protein, 11 aa, synthetic construct
  source 1..11: note = Seed: YQVNGYPNMFI
YLVNGYPNMFA

SEQ ID NO: 78569 - protein, 11 aa, synthetic construct
  source 1..11: note = Seed: YQVNGYPNMFI
YLVNGYPNMFI

SEQ ID NO: 78570 - protein, 11 aa, synthetic construct
  source 1..11: note = Seed: YQVNGYPNMFI
YLVNGYPNMFL

SEQ ID NO: 78571 - protein, 11 aa, synthetic construct
  source 1..11: note = Seed: YQVNGYPNMFI
YLVNGYPNMFM

SEQ ID NO: 78572 - protein, 11 aa, synthetic construct
  source 1..11: note = Seed: YQVNGYPNMFI
YLVNGYPNMFV

SEQ ID NO: 78573 - protein, 10 aa, synthetic construct
  source 1..10: note = Seed: YQVNGYPNMF
YLVNGYPNMV

SEQ ID NO: 78574 - protein, 10 aa, synthetic construct
  source 1..10: note = Seed: YQVNGYPNMF
YLVNGYPNMY

SEQ ID NO: 78575 - protein, 9 aa, synthetic construct
  source 1..9: note = Seed: YQVNGYPNM
YLVNGYPNT

SEQ ID NO: 78576 - protein, 9 aa, synthetic construct
  source 1..9: note = Seed: YQVNGYPNM
YLVNGYPNV

SEQ ID NO: 78577 - protein, 9 aa, synthetic construct
  source 1..9: note = Seed: YQVNGYPNM
YLVNGYPNY

SEQ ID NO: 78578 - protein, 11 aa, synthetic construct
  source 1..11: note = Seed: YLVSTQEFRYM
YLVSTQEFRYI

SEQ ID NO: 78579 - protein, 11 aa, synthetic construct
  source 1..11: note = Seed: YLVSTQEFRYM
YLVSTQEFRYL

SEQ ID NO: 78580 - protein, 11 aa, synthetic construct
  source 1..11: note = Seed: YLVSTQEFRYM
YLVSTQEFRYV

SEQ ID NO: 78581 - protein, 9 aa, synthetic construct
  source 1..9: note = Seed: YNVTQAFGR
YLVTQAFGR

SEQ ID NO: 78582 - protein, 9 aa, synthetic construct
  source 1..9: note = Seed: YFVVKRHTF
YLVVKRHTA

SEQ ID NO: 78583 - protein, 9 aa, synthetic construct
  source 1..9: note = Seed: YFVVKRHTF
YLVVKRHTF

SEQ ID NO: 78584 - protein, 9 aa, synthetic construct
  source 1..9: note = Seed: YFVVKRHTF
YLVVKRHTI

SEQ ID NO: 78585 - protein, 9 aa, synthetic construct
  source 1..9: note = Seed: YFVVKRHTF
YLVVKRHTL

SEQ ID NO: 78586 - protein, 9 aa, synthetic construct
  source 1..9: note = Seed: YFVVKRHTF
YLVVKRHTM

SEQ ID NO: 78587 - protein, 9 aa, synthetic construct
  source 1..9: note = Seed: YFVVKRHTF
YLVVKRHTV

SEQ ID NO: 78588 - protein, 9 aa, synthetic construct
  source 1..9: note = Seed: YFVVKRHTF
YLVVKRHTY

SEQ ID NO: 78589 - protein, 10 aa, synthetic construct
  source 1..10: note = Seed: YRVVVLSFEL
YLVVVLSFEA

SEQ ID NO: 78590 - protein, 10 aa, synthetic construct
  source 1..10: note = Seed: YRVVVLSFEL
YLVVVLSFEI

SEQ ID NO: 78591 - protein, 10 aa, synthetic construct
  source 1..10: note = Seed: YRVVVLSFEL
YLVVVLSFEL

SEQ ID NO: 78592 - protein, 10 aa, synthetic construct
  source 1..10: note = Seed: YRVVVLSFEL
YLVVVLSFEM

SEQ ID NO: 78593 - protein, 10 aa, synthetic construct
  source 1..10: note = Seed: YRVVVLSFEL
YLVVVLSFEV

SEQ ID NO: 78594 - protein, 10 aa, synthetic construct
  source 1..10: note = Seed: YYVWKSYVHV
YLVWKSYVHA

SEQ ID NO: 78595 - protein, 10 aa, synthetic construct
  source 1..10: note = Seed: YYVWKSYVHV
YLVWKSYVHI

SEQ ID NO: 78596 - protein, 10 aa, synthetic construct
  source 1..10: note = Seed: YYVWKSYVHV
YLVWKSYVHL

SEQ ID NO: 78597 - protein, 10 aa, synthetic construct
  source 1..10: note = Seed: YYVWKSYVHV
YLVWKSYVHM

SEQ ID NO: 78598 - protein, 10 aa, synthetic construct
  source 1..10: note = Seed: YYVWKSYVHV
YLVWKSYVHT

SEQ ID NO: 78599 - protein, 10 aa, synthetic construct
  source 1..10: note = Seed: YYVWKSYVHV
YLVWKSYVHV

SEQ ID NO: 78600 - protein, 11 aa, synthetic construct
  source 1..11: note = Seed: YYVWKSYVHVV
YLVWKSYVHVA

SEQ ID NO: 78601 - protein, 11 aa, synthetic construct
  source 1..11: note = Seed: YYVWKSYVHVV
YLVWKSYVHVI

SEQ ID NO: 78602 - protein, 11 aa, synthetic construct
  source 1..11: note = Seed: YYVWKSYVHVV
YLVWKSYVHVL

SEQ ID NO: 78603 - protein, 11 aa, synthetic construct
  source 1..11: note = Seed: YYVWKSYVHVV
YLVWKSYVHVV

SEQ ID NO: 78604 - protein, 9 aa, synthetic construct
  source 1..9: note = Seed: YYVWKSYVH
YLVWKSYVY

SEQ ID NO: 78605 - protein, 9 aa, synthetic construct
  source 1..9: note = Seed: YVWKSYVHV
YLWKSYVHA

SEQ ID NO: 78606 - protein, 9 aa, synthetic construct
  source 1..9: note = Seed: YVWKSYVHV
YLWKSYVHC

SEQ ID NO: 78607 - protein, 9 aa, synthetic construct
  source 1..9: note = Seed: YVWKSYVHV
YLWKSYVHF

SEQ ID NO: 78608 - protein, 9 aa, synthetic construct
  source 1..9: note = Seed: YVWKSYVHV
YLWKSYVHI

SEQ ID NO: 78609 - protein, 9 aa, synthetic construct
  source 1..9: note = Seed: YVWKSYVHV
YLWKSYVHL

SEQ ID NO: 78610 - protein, 9 aa, synthetic construct
  source 1..9: note = Seed: YVWKSYVHV
YLWKSYVHM

SEQ ID NO: 78611 - protein, 9 aa, synthetic construct
  source 1..9: note = Seed: YVWKSYVHV
YLWKSYVHS

SEQ ID NO: 78612 - protein, 9 aa, synthetic construct
  source 1..9: note = Seed: YVWKSYVHV
YLWKSYVHT

SEQ ID NO: 78613 - protein, 9 aa, synthetic construct
  source 1..9: note = Seed: YVWKSYVHV
YLWKSYVHV

SEQ ID NO: 78614 - protein, 10 aa, synthetic construct
  source 1..10: note = Seed: YVWKSYVHVV
YLWKSYVHVA

SEQ ID NO: 78615 - protein, 10 aa, synthetic construct
  source 1..10: note = Seed: YVWKSYVHVV
YLWKSYVHVC

SEQ ID NO: 78616 - protein, 10 aa, synthetic construct
  source 1..10: note = Seed: YVWKSYVHVV
YLWKSYVHVD

SEQ ID NO: 78617 - protein, 10 aa, synthetic construct
  source 1..10: note = Seed: YVWKSYVHVV
YLWKSYVHVE

SEQ ID NO: 78618 - protein, 10 aa, synthetic construct
  source 1..10: note = Seed: YVWKSYVHVV
YLWKSYVHVF

SEQ ID NO: 78619 - protein, 10 aa, synthetic construct
  source 1..10: note = Seed: YVWKSYVHVV
YLWKSYVHVG

SEQ ID NO: 78620 - protein, 10 aa, synthetic construct
  source 1..10: note = Seed: YVWKSYVHVV
YLWKSYVHVH

SEQ ID NO: 78621 - protein, 10 aa, synthetic construct
  source 1..10: note = Seed: YVWKSYVHVV
YLWKSYVHVI

SEQ ID NO: 78622 - protein, 10 aa, synthetic construct
  source 1..10: note = Seed: YVWKSYVHVV
YLWKSYVHVK

SEQ ID NO: 78623 - protein, 10 aa, synthetic construct
  source 1..10: note = Seed: YVWKSYVHVV
YLWKSYVHVL

SEQ ID NO: 78624 - protein, 10 aa, synthetic construct
  source 1..10: note = Seed: YVWKSYVHVV
YLWKSYVHVM

SEQ ID NO: 78625 - protein, 10 aa, synthetic construct
  source 1..10: note = Seed: YVWKSYVHVV
YLWKSYVHVN

SEQ ID NO: 78626 - protein, 10 aa, synthetic construct
  source 1..10: note = Seed: YVWKSYVHVV
YLWKSYVHVP

SEQ ID NO: 78627 - protein, 10 aa, synthetic construct
  source 1..10: note = Seed: YVWKSYVHVV
YLWKSYVHVQ

SEQ ID NO: 78628 - protein, 10 aa, synthetic construct
  source 1..10: note = Seed: YVWKSYVHVV
YLWKSYVHVR

SEQ ID NO: 78629 - protein, 10 aa, synthetic construct
  source 1..10: note = Seed: YVWKSYVHVV
YLWKSYVHVS

SEQ ID NO: 78630 - protein, 10 aa, synthetic construct
  source 1..10: note = Seed: YVWKSYVHVV
YLWKSYVHVT

SEQ ID NO: 78631 - protein, 10 aa, synthetic construct
  source 1..10: note = Seed: YVWKSYVHVV
YLWKSYVHVV

SEQ ID NO: 78632 - protein, 11 aa, synthetic construct
  source 1..11: note = Seed: YVWKSYVHVVD
YLWKSYVHVVA

SEQ ID NO: 78633 - protein, 11 aa, synthetic construct
  source 1..11: note = Seed: YVWKSYVHVVD
YLWKSYVHVVC

SEQ ID NO: 78634 - protein, 11 aa, synthetic construct
  source 1..11: note = Seed: YVWKSYVHVVD
YLWKSYVHVVD

SEQ ID NO: 78635 - protein, 11 aa, synthetic construct
  source 1..11: note = Seed: YVWKSYVHVVD
YLWKSYVHVVE

SEQ ID NO: 78636 - protein, 11 aa, synthetic construct
  source 1..11: note = Seed: YVWKSYVHVVD
YLWKSYVHVVF

SEQ ID NO: 78637 - protein, 11 aa, synthetic construct
  source 1..11: note = Seed: YVWKSYVHVVD
YLWKSYVHVVG

SEQ ID NO: 78638 - protein, 11 aa, synthetic construct
  source 1..11: note = Seed: YVWKSYVHVVD
YLWKSYVHVVH

SEQ ID NO: 78639 - protein, 11 aa, synthetic construct
  source 1..11: note = Seed: YVWKSYVHVVD
YLWKSYVHVVI

SEQ ID NO: 78640 - protein, 11 aa, synthetic construct
  source 1..11: note = Seed: YVWKSYVHVVD
YLWKSYVHVVK

SEQ ID NO: 78641 - protein, 11 aa, synthetic construct
  source 1..11: note = Seed: YVWKSYVHVVD
YLWKSYVHVVL

SEQ ID NO: 78642 - protein, 11 aa, synthetic construct
  source 1..11: note = Seed: YVWKSYVHVVD
YLWKSYVHVVM

SEQ ID NO: 78643 - protein, 11 aa, synthetic construct
  source 1..11: note = Seed: YVWKSYVHVVD
YLWKSYVHVVN

SEQ ID NO: 78644 - protein, 11 aa, synthetic construct
  source 1..11: note = Seed: YVWKSYVHVVD
YLWKSYVHVVP

SEQ ID NO: 78645 - protein, 11 aa, synthetic construct
  source 1..11: note = Seed: YVWKSYVHVVD
YLWKSYVHVVQ

SEQ ID NO: 78646 - protein, 11 aa, synthetic construct
  source 1..11: note = Seed: YVWKSYVHVVD
YLWKSYVHVVR

SEQ ID NO: 78647 - protein, 11 aa, synthetic construct
  source 1..11: note = Seed: YVWKSYVHVVD
YLWKSYVHVVS

SEQ ID NO: 78648 - protein, 11 aa, synthetic construct
  source 1..11: note = Seed: YVWKSYVHVVD
YLWKSYVHVVT

SEQ ID NO: 78649 - protein, 11 aa, synthetic construct
  source 1..11: note = Seed: YVWKSYVHVVD
YLWKSYVHVVV

SEQ ID NO: 78650 - protein, 11 aa, synthetic construct
  source 1..11: note = Seed: YVWKSYVHVVD
YLWKSYVHVVW

SEQ ID NO: 78651 - protein, 11 aa, synthetic construct
  source 1..11: note = Seed: YVWKSYVHVVD
YLWKSYVHVVY

SEQ ID NO: 78652 - protein, 10 aa, synthetic construct
  source 1..10: note = Seed: YVWKSYVHVV
YLWKSYVHVW

SEQ ID NO: 78653 - protein, 10 aa, synthetic construct
  source 1..10: note = Seed: YVWKSYVHVV
YLWKSYVHVY

SEQ ID NO: 78654 - protein, 10 aa, synthetic construct
  source 1..10: note = Seed: YVYANGGKGF
YLYANGGKGF

SEQ ID NO: 78655 - protein, 10 aa, synthetic construct
  source 1..10: note = Seed: YVYANGGKGF
YLYANGGKGM

SEQ ID NO: 78656 - protein, 10 aa, synthetic construct
  source 1..10: note = Seed: YVYANGGKGF
YLYANGGKGY

SEQ ID NO: 78657 - protein, 11 aa, synthetic construct
  source 1..11: note = Seed: YLYFIKGLNNL
YLYFIKGLNNA

SEQ ID NO: 78658 - protein, 11 aa, synthetic construct
  source 1..11: note = Seed: YLYFIKGLNNL
YLYFIKGLNNF

SEQ ID NO: 78659 - protein, 11 aa, synthetic construct
  source 1..11: note = Seed: YLYFIKGLNNL
YLYFIKGLNNI

SEQ ID NO: 78660 - protein, 11 aa, synthetic construct
  source 1..11: note = Seed: YLYFIKGLNNL
YLYFIKGLNNM

SEQ ID NO: 78661 - protein, 11 aa, synthetic construct
  source 1..11: note = Seed: YLYFIKGLNNL
YLYFIKGLNNV

SEQ ID NO: 78662 - protein, 8 aa, synthetic construct
  source 1..8: note = Seed: YLYFIKGL
YLYFIKGV

SEQ ID NO: 78663 - protein, 9 aa, synthetic construct
  source 1..9: note = Seed: YNYKLPDDF
YLYKLPDDF

SEQ ID NO: 78664 - protein, 9 aa, synthetic construct
  source 1..9: note = Seed: YNYKLPDDF
YLYKLPDDY

SEQ ID NO: 78665 - protein, 8 aa, synthetic construct
  source 1..8: note = Seed: YLYLTFYL
YLYLTFYA

SEQ ID NO: 78666 - protein, 8 aa, synthetic construct
  source 1..8: note = Seed: YLYLTFYL
YLYLTFYI

SEQ ID NO: 78667 - protein, 9 aa, synthetic construct
  source 1..9: note = Seed: YLYLTFYLT
YLYLTFYLA

SEQ ID NO: 78668 - protein, 9 aa, synthetic construct
  source 1..9: note = Seed: YLYLTFYLT
YLYLTFYLI

SEQ ID NO: 78669 - protein, 9 aa, synthetic construct
  source 1..9: note = Seed: YLYLTFYLT
YLYLTFYLL

SEQ ID NO: 78670 - protein, 9 aa, synthetic construct
  source 1..9: note = Seed: YLYLTFYLT
YLYLTFYLM

SEQ ID NO: 78671 - protein, 9 aa, synthetic construct
  source 1..9: note = Seed: YLYLTFYLT
YLYLTFYLS

SEQ ID NO: 78672 - protein, 9 aa, synthetic construct
  source 1..9: note = Seed: YLYLTFYLT
YLYLTFYLV

SEQ ID NO: 78673 - protein, 8 aa, synthetic construct
  source 1..8: note = Seed: YLYLTFYL
YLYLTFYM

SEQ ID NO: 78674 - protein, 8 aa, synthetic construct
  source 1..8: note = Seed: YLYLTFYL
YLYLTFYT

SEQ ID NO: 78675 - protein, 8 aa, synthetic construct
  source 1..8: note = Seed: YLYLTFYL
YLYLTFYV

SEQ ID NO: 78676 - protein, 10 aa, synthetic construct
  source 1..10: note = Seed: YDYLVSTQEF
YLYLVSTQEF

SEQ ID NO: 78677 - protein, 11 aa, synthetic construct
  source 1..11: note = Seed: YDYLVSTQEFR
YLYLVSTQEFF

SEQ ID NO: 78678 - protein, 10 aa, synthetic construct
  source 1..10: note = Seed: YDYLVSTQEF
YLYLVSTQEI

SEQ ID NO: 78679 - protein, 10 aa, synthetic construct
  source 1..10: note = Seed: YDYLVSTQEF
YLYLVSTQEL

SEQ ID NO: 78680 - protein, 10 aa, synthetic construct
  source 1..10: note = Seed: YDYLVSTQEF
YLYLVSTQEM

SEQ ID NO: 78681 - protein, 10 aa, synthetic construct
  source 1..10: note = Seed: YDYLVSTQEF
YLYLVSTQEW

SEQ ID NO: 78682 - protein, 10 aa, synthetic construct
  source 1..10: note = Seed: YDYLVSTQEF
YLYLVSTQEY

SEQ ID NO: 78683 - protein, 9 aa, synthetic construct
  source 1..9: note = Seed: YNYLYRLFR
YLYLYRLFK

SEQ ID NO: 78684 - protein, 9 aa, synthetic construct
  source 1..9: note = Seed: YNYLYRLFR
YLYLYRLFR

SEQ ID NO: 78685 - protein, 10 aa, synthetic construct
  source 1..10: note = Seed: YNYLYRLFRK
YLYLYRLFRK

SEQ ID NO: 78686 - protein, 10 aa, synthetic construct
  source 1..10: note = Seed: YNYLYRLFRK
YLYLYRLFRR

SEQ ID NO: 78687 - protein, 8 aa, synthetic construct
  source 1..8: note = Seed: YRYNLPTM
YLYNLPTF

SEQ ID NO: 78688 - protein, 8 aa, synthetic construct
  source 1..8: note = Seed: YRYNLPTM
YLYNLPTY

SEQ ID NO: 78689 - protein, 8 aa, synthetic construct
  source 1..8: note = Seed: YVYNPFMI
YLYNPFMA

SEQ ID NO: 78690 - protein, 8 aa, synthetic construct
  source 1..8: note = Seed: YVYNPFMI
YLYNPFMI

SEQ ID NO: 78691 - protein, 10 aa, synthetic construct
  source 1..10: note = Seed: YVYNPFMIDV
YLYNPFMIDA

SEQ ID NO: 78692 - protein, 10 aa, synthetic construct
  source 1..10: note = Seed: YVYNPFMIDV
YLYNPFMIDI

SEQ ID NO: 78693 - protein, 10 aa, synthetic construct
  source 1..10: note = Seed: YVYNPFMIDV
YLYNPFMIDL

SEQ ID NO: 78694 - protein, 10 aa, synthetic construct
  source 1..10: note = Seed: YVYNPFMIDV
YLYNPFMIDM

SEQ ID NO: 78695 - protein, 10 aa, synthetic construct
  source 1..10: note = Seed: YVYNPFMIDV
YLYNPFMIDT

SEQ ID NO: 78696 - protein, 10 aa, synthetic construct
  source 1..10: note = Seed: YVYNPFMIDV
YLYNPFMIDV

SEQ ID NO: 78697 - protein, 8 aa, synthetic construct
  source 1..8: note = Seed: YVYNPFMI
YLYNPFML

SEQ ID NO: 78698 - protein, 8 aa, synthetic construct
  source 1..8: note = Seed: YVYNPFMI
YLYNPFMM

SEQ ID NO: 78699 - protein, 8 aa, synthetic construct
  source 1..8: note = Seed: YVYNPFMI
YLYNPFMV

SEQ ID NO: 78700 - protein, 9 aa, synthetic construct
  source 1..9: note = Seed: YLYRLFRKS
YLYRLFRKA

SEQ ID NO: 78701 - protein, 9 aa, synthetic construct
  source 1..9: note = Seed: YLYRLFRKS
YLYRLFRKI

SEQ ID NO: 78702 - protein, 9 aa, synthetic construct
  source 1..9: note = Seed: YLYRLFRKS
YLYRLFRKL

SEQ ID NO: 78703 - protein, 9 aa, synthetic construct
  source 1..9: note = Seed: YLYRLFRKS
YLYRLFRKM

SEQ ID NO: 78704 - protein, 11 aa, synthetic construct
  source 1..11: note = Seed: YLYRLFRKSNL
YLYRLFRKSNV

SEQ ID NO: 78705 - protein, 9 aa, synthetic construct
  source 1..9: note = Seed: YLYRLFRKS
YLYRLFRKT

SEQ ID NO: 78706 - protein, 9 aa, synthetic construct
  source 1..9: note = Seed: YLYRLFRKS
YLYRLFRKV

SEQ ID NO: 78707 - protein, 11 aa, synthetic construct
  source 1..11: note = Seed: YDYYRYNLPTM
YLYYRYNLPTF

SEQ ID NO: 78708 - protein, 11 aa, synthetic construct
  source 1..11: note = Seed: YDYYRYNLPTM
YLYYRYNLPTW

SEQ ID NO: 78709 - protein, 10 aa, synthetic construct
  source 1..10: note = Seed: YGANKDGIIW
YMANKDGIIW

SEQ ID NO: 78710 - protein, 9 aa, synthetic construct
  source 1..9: note = Seed: YPANSIVCR
YMANSIVCR

SEQ ID NO: 78711 - protein, 10 aa, synthetic construct
  source 1..10: note = Seed: YPANSIVCRF
YMANSIVCRF

SEQ ID NO: 78712 - protein, 10 aa, synthetic construct
  source 1..10: note = Seed: YPANSIVCRF
YMANSIVCRM

SEQ ID NO: 78713 - protein, 10 aa, synthetic construct
  source 1..10: note = Seed: YPANSIVCRF
YMANSIVCRW

SEQ ID NO: 78714 - protein, 10 aa, synthetic construct
  source 1..10: note = Seed: YPANSIVCRF
YMANSIVCRY

SEQ ID NO: 78715 - protein, 11 aa, synthetic construct
  source 1..11: note = Seed: YRARAGEAANF
YMARAGEAANF

SEQ ID NO: 78716 - protein, 9 aa, synthetic construct
  source 1..9: note = Seed: YRARAGEAA
YMARAGEAL

SEQ ID NO: 78717 - protein, 10 aa, synthetic construct
  source 1..10: note = Seed: YIATNGPLKV
YMATNGPLKA

SEQ ID NO: 78718 - protein, 10 aa, synthetic construct
  source 1..10: note = Seed: YIATNGPLKV
YMATNGPLKI

SEQ ID NO: 78719 - protein, 10 aa, synthetic construct
  source 1..10: note = Seed: YIATNGPLKV
YMATNGPLKL

SEQ ID NO: 78720 - protein, 10 aa, synthetic construct
  source 1..10: note = Seed: YIATNGPLKV
YMATNGPLKV

SEQ ID NO: 78721 - protein, 10 aa, synthetic construct
  source 1..10: note = Seed: YAAVINGDRW
YMAVINGDRW

SEQ ID NO: 78722 - protein, 9 aa, synthetic construct
  source 1..9: note = Seed: YQCGHYKHI
YMCGHYKHA

SEQ ID NO: 78723 - protein, 9 aa, synthetic construct
  source 1..9: note = Seed: YQCGHYKHI
YMCGHYKHF

SEQ ID NO: 78724 - protein, 9 aa, synthetic construct
  source 1..9: note = Seed: YQCGHYKHI
YMCGHYKHI

SEQ ID NO: 78725 - protein, 9 aa, synthetic construct
  source 1..9: note = Seed: YQCGHYKHI
YMCGHYKHL

SEQ ID NO: 78726 - protein, 9 aa, synthetic construct
  source 1..9: note = Seed: YQCGHYKHI
YMCGHYKHV

SEQ ID NO: 78727 - protein, 9 aa, synthetic construct
  source 1..9: note = Seed: YQCGHYKHI
YMCGHYKHY

SEQ ID NO: 78728 - protein, 10 aa, synthetic construct
  source 1..10: note = Seed: YFCTCYFGLF
YMCTCYFGLY

SEQ ID NO: 78729 - protein, 8 aa, synthetic construct
  source 1..8: note = Seed: YTEISFML
YMEISFMA

SEQ ID NO: 78730 - protein, 8 aa, synthetic construct
  source 1..8: note = Seed: YTEISFML
YMEISFMI

SEQ ID NO: 78731 - protein, 8 aa, synthetic construct
  source 1..8: note = Seed: YTEISFML
YMEISFML

SEQ ID NO: 78732 - protein, 8 aa, synthetic construct
  source 1..8: note = Seed: YTEISFML
YMEISFMM

SEQ ID NO: 78733 - protein, 8 aa, synthetic construct
  source 1..8: note = Seed: YTEISFML
YMEISFMV

SEQ ID NO: 78734 - protein, 10 aa, synthetic construct
  source 1..10: note = Seed: YKENSYTTTI
YMENSYTTTA

SEQ ID NO: 78735 - protein, 10 aa, synthetic construct
  source 1..10: note = Seed: YKENSYTTTI
YMENSYTTTF

SEQ ID NO: 78736 - protein, 10 aa, synthetic construct
  source 1..10: note = Seed: YKENSYTTTI
YMENSYTTTL

SEQ ID NO: 78737 - protein, 10 aa, synthetic construct
  source 1..10: note = Seed: YKENSYTTTI
YMENSYTTTM

SEQ ID NO: 78738 - protein, 10 aa, synthetic construct
  source 1..10: note = Seed: YKENSYTTTI
YMENSYTTTY

SEQ ID NO: 78739 - protein, 9 aa, synthetic construct
  source 1..9: note = Seed: YVFCTVNAL
YMFCTVNAA

SEQ ID NO: 78740 - protein, 9 aa, synthetic construct
  source 1..9: note = Seed: YVFCTVNAL
YMFCTVNAC

SEQ ID NO: 78741 - protein, 9 aa, synthetic construct
  source 1..9: note = Seed: YVFCTVNAL
YMFCTVNAF

SEQ ID NO: 78742 - protein, 9 aa, synthetic construct
  source 1..9: note = Seed: YVFCTVNAL
YMFCTVNAH

SEQ ID NO: 78743 - protein, 9 aa, synthetic construct
  source 1..9: note = Seed: YVFCTVNAL
YMFCTVNAI

SEQ ID NO: 78744 - protein, 9 aa, synthetic construct
  source 1..9: note = Seed: YVFCTVNAL
YMFCTVNAL

SEQ ID NO: 78745 - protein, 9 aa, synthetic construct
  source 1..9: note = Seed: YVFCTVNAL
YMFCTVNAM

SEQ ID NO: 78746 - protein, 9 aa, synthetic construct
  source 1..9: note = Seed: YVFCTVNAL
YMFCTVNAS

SEQ ID NO: 78747 - protein, 9 aa, synthetic construct
  source 1..9: note = Seed: YVFCTVNAL
YMFCTVNAT

SEQ ID NO: 78748 - protein, 9 aa, synthetic construct
  source 1..9: note = Seed: YVFCTVNAL
YMFCTVNAV

SEQ ID NO: 78749 - protein, 9 aa, synthetic construct
  source 1..9: note = Seed: YVFCTVNAL
YMFCTVNAW

SEQ ID NO: 78750 - protein, 9 aa, synthetic construct
  source 1..9: note = Seed: YVFCTVNAL
YMFCTVNAY

SEQ ID NO: 78751 - protein, 8 aa, synthetic construct
  source 1..8: note = Seed: YIFFASFY
YMFFASFF

SEQ ID NO: 78752 - protein, 8 aa, synthetic construct
  source 1..8: note = Seed: YIFFASFY
YMFFASFY

SEQ ID NO: 78753 - protein, 9 aa, synthetic construct
  source 1..9: note = Seed: YIFFASFYY
YMFFASFYA

SEQ ID NO: 78754 - protein, 9 aa, synthetic construct
  source 1..9: note = Seed: YIFFASFYY
YMFFASFYC

SEQ ID NO: 78755 - protein, 9 aa, synthetic construct
  source 1..9: note = Seed: YIFFASFYY
YMFFASFYE

SEQ ID NO: 78756 - protein, 9 aa, synthetic construct
  source 1..9: note = Seed: YIFFASFYY
YMFFASFYF

SEQ ID NO: 78757 - protein, 9 aa, synthetic construct
  source 1..9: note = Seed: YIFFASFYY
YMFFASFYG

SEQ ID NO: 78758 - protein, 9 aa, synthetic construct
  source 1..9: note = Seed: YIFFASFYY
YMFFASFYH

SEQ ID NO: 78759 - protein, 9 aa, synthetic construct
  source 1..9: note = Seed: YIFFASFYY
YMFFASFYI

SEQ ID NO: 78760 - protein, 9 aa, synthetic construct
  source 1..9: note = Seed: YIFFASFYY
YMFFASFYK

SEQ ID NO: 78761 - protein, 9 aa, synthetic construct
  source 1..9: note = Seed: YIFFASFYY
YMFFASFYL

SEQ ID NO: 78762 - protein, 9 aa, synthetic construct
  source 1..9: note = Seed: YIFFASFYY
YMFFASFYM

SEQ ID NO: 78763 - protein, 9 aa, synthetic construct
  source 1..9: note = Seed: YIFFASFYY
YMFFASFYP

SEQ ID NO: 78764 - protein, 9 aa, synthetic construct
  source 1..9: note = Seed: YIFFASFYY
YMFFASFYQ

SEQ ID NO: 78765 - protein, 9 aa, synthetic construct
  source 1..9: note = Seed: YIFFASFYY
YMFFASFYR

SEQ ID NO: 78766 - protein, 9 aa, synthetic construct
  source 1..9: note = Seed: YIFFASFYY
YMFFASFYS

SEQ ID NO: 78767 - protein, 9 aa, synthetic construct
  source 1..9: note = Seed: YIFFASFYY
YMFFASFYT

SEQ ID NO: 78768 - protein, 9 aa, synthetic construct
  source 1..9: note = Seed: YIFFASFYY
YMFFASFYV

SEQ ID NO: 78769 - protein, 9 aa, synthetic construct
  source 1..9: note = Seed: YIFFASFYY
YMFFASFYW

SEQ ID NO: 78770 - protein, 9 aa, synthetic construct
  source 1..9: note = Seed: YIFFASFYY
YMFFASFYY

SEQ ID NO: 78771 - protein, 10 aa, synthetic construct
  source 1..10: note = Seed: YIFFASFYYV
YMFFASFYYA

SEQ ID NO: 78772 - protein, 10 aa, synthetic construct
  source 1..10: note = Seed: YIFFASFYYV
YMFFASFYYC

SEQ ID NO: 78773 - protein, 10 aa, synthetic construct
  source 1..10: note = Seed: YIFFASFYYV
YMFFASFYYD

SEQ ID NO: 78774 - protein, 10 aa, synthetic construct
  source 1..10: note = Seed: YIFFASFYYV
YMFFASFYYE

SEQ ID NO: 78775 - protein, 10 aa, synthetic construct
  source 1..10: note = Seed: YIFFASFYYV
YMFFASFYYF

SEQ ID NO: 78776 - protein, 10 aa, synthetic construct
  source 1..10: note = Seed: YIFFASFYYV
YMFFASFYYG

SEQ ID NO: 78777 - protein, 10 aa, synthetic construct
  source 1..10: note = Seed: YIFFASFYYV
YMFFASFYYH

SEQ ID NO: 78778 - protein, 10 aa, synthetic construct
  source 1..10: note = Seed: YIFFASFYYV
YMFFASFYYI

SEQ ID NO: 78779 - protein, 10 aa, synthetic construct
  source 1..10: note = Seed: YIFFASFYYV
YMFFASFYYK

SEQ ID NO: 78780 - protein, 10 aa, synthetic construct
  source 1..10: note = Seed: YIFFASFYYV
YMFFASFYYL

SEQ ID NO: 78781 - protein, 10 aa, synthetic construct
  source 1..10: note = Seed: YIFFASFYYV
YMFFASFYYM

SEQ ID NO: 78782 - protein, 10 aa, synthetic construct
  source 1..10: note = Seed: YIFFASFYYV
YMFFASFYYN

SEQ ID NO: 78783 - protein, 10 aa, synthetic construct
  source 1..10: note = Seed: YIFFASFYYV
YMFFASFYYP

SEQ ID NO: 78784 - protein, 10 aa, synthetic construct
  source 1..10: note = Seed: YIFFASFYYV
YMFFASFYYQ

SEQ ID NO: 78785 - protein, 10 aa, synthetic construct
  source 1..10: note = Seed: YIFFASFYYV
YMFFASFYYR

SEQ ID NO: 78786 - protein, 10 aa, synthetic construct
  source 1..10: note = Seed: YIFFASFYYV
YMFFASFYYS

SEQ ID NO: 78787 - protein, 10 aa, synthetic construct
  source 1..10: note = Seed: YIFFASFYYV
YMFFASFYYT

SEQ ID NO: 78788 - protein, 10 aa, synthetic construct
  source 1..10: note = Seed: YIFFASFYYV
YMFFASFYYV

SEQ ID NO: 78789 - protein, 11 aa, synthetic construct
  source 1..11: note = Seed: YIFFASFYYVW
YMFFASFYYVA

SEQ ID NO: 78790 - protein, 11 aa, synthetic construct
  source 1..11: note = Seed: YIFFASFYYVW
YMFFASFYYVC

SEQ ID NO: 78791 - protein, 11 aa, synthetic construct
  source 1..11: note = Seed: YIFFASFYYVW
YMFFASFYYVD

SEQ ID NO: 78792 - protein, 11 aa, synthetic construct
  source 1..11: note = Seed: YIFFASFYYVW
YMFFASFYYVE

SEQ ID NO: 78793 - protein, 11 aa, synthetic construct
  source 1..11: note = Seed: YIFFASFYYVW
YMFFASFYYVF

SEQ ID NO: 78794 - protein, 11 aa, synthetic construct
  source 1..11: note = Seed: YIFFASFYYVW
YMFFASFYYVG

SEQ ID NO: 78795 - protein, 11 aa, synthetic construct
  source 1..11: note = Seed: YIFFASFYYVW
YMFFASFYYVH

SEQ ID NO: 78796 - protein, 11 aa, synthetic construct
  source 1..11: note = Seed: YIFFASFYYVW
YMFFASFYYVI

SEQ ID NO: 78797 - protein, 11 aa, synthetic construct
  source 1..11: note = Seed: YIFFASFYYVW
YMFFASFYYVK

SEQ ID NO: 78798 - protein, 11 aa, synthetic construct
  source 1..11: note = Seed: YIFFASFYYVW
YMFFASFYYVL

SEQ ID NO: 78799 - protein, 11 aa, synthetic construct
  source 1..11: note = Seed: YIFFASFYYVW
YMFFASFYYVM

SEQ ID NO: 78800 - protein, 11 aa, synthetic construct
  source 1..11: note = Seed: YIFFASFYYVW
YMFFASFYYVN

SEQ ID NO: 78801 - protein, 11 aa, synthetic construct
  source 1..11: note = Seed: YIFFASFYYVW
YMFFASFYYVP

SEQ ID NO: 78802 - protein, 11 aa, synthetic construct
  source 1..11: note = Seed: YIFFASFYYVW
YMFFASFYYVQ

SEQ ID NO: 78803 - protein, 11 aa, synthetic construct
  source 1..11: note = Seed: YIFFASFYYVW
YMFFASFYYVR

SEQ ID NO: 78804 - protein, 11 aa, synthetic construct
  source 1..11: note = Seed: YIFFASFYYVW
YMFFASFYYVS

SEQ ID NO: 78805 - protein, 11 aa, synthetic construct
  source 1..11: note = Seed: YIFFASFYYVW
YMFFASFYYVT

SEQ ID NO: 78806 - protein, 11 aa, synthetic construct
  source 1..11: note = Seed: YIFFASFYYVW
YMFFASFYYVV

SEQ ID NO: 78807 - protein, 11 aa, synthetic construct
  source 1..11: note = Seed: YIFFASFYYVW
YMFFASFYYVW

SEQ ID NO: 78808 - protein, 11 aa, synthetic construct
  source 1..11: note = Seed: YIFFASFYYVW
YMFFASFYYVY

SEQ ID NO: 78809 - protein, 10 aa, synthetic construct
  source 1..10: note = Seed: YIFFASFYYV
YMFFASFYYW

SEQ ID NO: 78810 - protein, 10 aa, synthetic construct
  source 1..10: note = Seed: YIFFASFYYV
YMFFASFYYY

SEQ ID NO: 78811 - protein, 9 aa, synthetic construct
  source 1..9: note = Seed: YWFFSNYLK
YMFFSNYLF

SEQ ID NO: 78812 - protein, 9 aa, synthetic construct
  source 1..9: note = Seed: YWFFSNYLK
YMFFSNYLH

SEQ ID NO: 78813 - protein, 9 aa, synthetic construct
  source 1..9: note = Seed: YWFFSNYLK
YMFFSNYLK

SEQ ID NO: 78814 - protein, 10 aa, synthetic construct
  source 1..10: note = Seed: YWFFSNYLKR
YMFFSNYLKK

SEQ ID NO: 78815 - protein, 10 aa, synthetic construct
  source 1..10: note = Seed: YWFFSNYLKR
YMFFSNYLKR

SEQ ID NO: 78816 - protein, 11 aa, synthetic construct
  source 1..11: note = Seed: YWFFSNYLKRR
YMFFSNYLKRK

SEQ ID NO: 78817 - protein, 11 aa, synthetic construct
  source 1..11: note = Seed: YWFFSNYLKRR
YMFFSNYLKRR

SEQ ID NO: 78818 - protein, 9 aa, synthetic construct
  source 1..9: note = Seed: YWFFSNYLK
YMFFSNYLL

SEQ ID NO: 78819 - protein, 9 aa, synthetic construct
  source 1..9: note = Seed: YWFFSNYLK
YMFFSNYLM

SEQ ID NO: 78820 - protein, 9 aa, synthetic construct
  source 1..9: note = Seed: YWFFSNYLK
YMFFSNYLR

SEQ ID NO: 78821 - protein, 9 aa, synthetic construct
  source 1..9: note = Seed: YWFFSNYLK
YMFFSNYLV

SEQ ID NO: 78822 - protein, 9 aa, synthetic construct
  source 1..9: note = Seed: YWFFSNYLK
YMFFSNYLW

SEQ ID NO: 78823 - protein, 9 aa, synthetic construct
  source 1..9: note = Seed: YWFFSNYLK
YMFFSNYLY

SEQ ID NO: 78824 - protein, 8 aa, synthetic construct
  source 1..8: note = Seed: YSFLPGVY
YMFLPGVF

SEQ ID NO: 78825 - protein, 8 aa, synthetic construct
  source 1..8: note = Seed: YSFLPGVY
YMFLPGVM

SEQ ID NO: 78826 - protein, 8 aa, synthetic construct
  source 1..8: note = Seed: YSFLPGVY
YMFLPGVY

SEQ ID NO: 78827 - protein, 10 aa, synthetic construct
  source 1..10: note = Seed: YSFLPGVYSV
YMFLPGVYSA

SEQ ID NO: 78828 - protein, 10 aa, synthetic construct
  source 1..10: note = Seed: YSFLPGVYSV
YMFLPGVYSC

SEQ ID NO: 78829 - protein, 10 aa, synthetic construct
  source 1..10: note = Seed: YSFLPGVYSV
YMFLPGVYSF

SEQ ID NO: 78830 - protein, 10 aa, synthetic construct
  source 1..10: note = Seed: YSFLPGVYSV
YMFLPGVYSI

SEQ ID NO: 78831 - protein, 10 aa, synthetic construct
  source 1..10: note = Seed: YSFLPGVYSV
YMFLPGVYSL

SEQ ID NO: 78832 - protein, 10 aa, synthetic construct
  source 1..10: note = Seed: YSFLPGVYSV
YMFLPGVYSM

SEQ ID NO: 78833 - protein, 10 aa, synthetic construct
  source 1..10: note = Seed: YSFLPGVYSV
YMFLPGVYSS

SEQ ID NO: 78834 - protein, 10 aa, synthetic construct
  source 1..10: note = Seed: YSFLPGVYSV
YMFLPGVYST

SEQ ID NO: 78835 - protein, 10 aa, synthetic construct
  source 1..10: note = Seed: YSFLPGVYSV
YMFLPGVYSV

SEQ ID NO: 78836 - protein, 10 aa, synthetic construct
  source 1..10: note = Seed: YSFLPGVYSV
YMFLPGVYSW

SEQ ID NO: 78837 - protein, 10 aa, synthetic construct
  source 1..10: note = Seed: YSFLPGVYSV
YMFLPGVYSY

SEQ ID NO: 78838 - protein, 8 aa, synthetic construct
  source 1..8: note = Seed: YYFMRFRR
YMFMRFRR

SEQ ID NO: 78839 - protein, 9 aa, synthetic construct
  source 1..9: note = Seed: YGFQPTNGV
YMFQPTNGA

SEQ ID NO: 78840 - protein, 9 aa, synthetic construct
  source 1..9: note = Seed: YGFQPTNGV
YMFQPTNGC

SEQ ID NO: 78841 - protein, 9 aa, synthetic construct
  source 1..9: note = Seed: YGFQPTNGV
YMFQPTNGI

SEQ ID NO: 78842 - protein, 9 aa, synthetic construct
  source 1..9: note = Seed: YGFQPTNGV
YMFQPTNGL

SEQ ID NO: 78843 - protein, 9 aa, synthetic construct
  source 1..9: note = Seed: YGFQPTNGV
YMFQPTNGM

SEQ ID NO: 78844 - protein, 9 aa, synthetic construct
  source 1..9: note = Seed: YGFQPTNGV
YMFQPTNGT

SEQ ID NO: 78845 - protein, 9 aa, synthetic construct
  source 1..9: note = Seed: YGFQPTNGV
YMFQPTNGV

SEQ ID NO: 78846 - protein, 11 aa, synthetic construct
  source 1..11: note = Seed: YGFQPTNGVGY
YMFQPTNGVGF

SEQ ID NO: 78847 - protein, 11 aa, synthetic construct
  source 1..11: note = Seed: YGFQPTNGVGY
YMFQPTNGVGY

SEQ ID NO: 78848 - protein, 9 aa, synthetic construct
  source 1..9: note = Seed: YGFQPTNGV
YMFQPTNGY

SEQ ID NO: 78849 - protein, 10 aa, synthetic construct
  source 1..10: note = Seed: YHFRELGVVH
YMFRELGVVF

SEQ ID NO: 78850 - protein, 10 aa, synthetic construct
  source 1..10: note = Seed: YHFRELGVVH
YMFRELGVVL

SEQ ID NO: 78851 - protein, 10 aa, synthetic construct
  source 1..10: note = Seed: YHFRELGVVH
YMFRELGVVM

SEQ ID NO: 78852 - protein, 10 aa, synthetic construct
  source 1..10: note = Seed: YHFRELGVVH
YMFRELGVVY

SEQ ID NO: 78853 - protein, 8 aa, synthetic construct
  source 1..8: note = Seed: YVFTGYRV
YMFTGYRI

SEQ ID NO: 78854 - protein, 8 aa, synthetic construct
  source 1..8: note = Seed: YVFTGYRV
YMFTGYRL

SEQ ID NO: 78855 - protein, 8 aa, synthetic construct
  source 1..8: note = Seed: YVFTGYRV
YMFTGYRV

SEQ ID NO: 78856 - protein, 9 aa, synthetic construct
  source 1..9: note = Seed: YVFTGYRVT
YMFTGYRVF

SEQ ID NO: 78857 - protein, 9 aa, synthetic construct
  source 1..9: note = Seed: YVFTGYRVT
YMFTGYRVI

SEQ ID NO: 78858 - protein, 9 aa, synthetic construct
  source 1..9: note = Seed: YVFTGYRVT
YMFTGYRVL

SEQ ID NO: 78859 - protein, 9 aa, synthetic construct
  source 1..9: note = Seed: YVFTGYRVT
YMFTGYRVM

SEQ ID NO: 78860 - protein, 10 aa, synthetic construct
  source 1..10: note = Seed: YVFTGYRVTK
YMFTGYRVTK

SEQ ID NO: 78861 - protein, 10 aa, synthetic construct
  source 1..10: note = Seed: YVFTGYRVTK
YMFTGYRVTR

SEQ ID NO: 78862 - protein, 9 aa, synthetic construct
  source 1..9: note = Seed: YVFTGYRVT
YMFTGYRVV

SEQ ID NO: 78863 - protein, 9 aa, synthetic construct
  source 1..9: note = Seed: YVFTGYRVT
YMFTGYRVY

SEQ ID NO: 78864 - protein, 9 aa, synthetic construct
  source 1..9: note = Seed: YFFTLLLQL
YMFTLLLQA

SEQ ID NO: 78865 - protein, 9 aa, synthetic construct
  source 1..9: note = Seed: YFFTLLLQL
YMFTLLLQC

SEQ ID NO: 78866 - protein, 9 aa, synthetic construct
  source 1..9: note = Seed: YFFTLLLQL
YMFTLLLQF

SEQ ID NO: 78867 - protein, 9 aa, synthetic construct
  source 1..9: note = Seed: YFFTLLLQL
YMFTLLLQI

SEQ ID NO: 78868 - protein, 9 aa, synthetic construct
  source 1..9: note = Seed: YFFTLLLQL
YMFTLLLQL

SEQ ID NO: 78869 - protein, 9 aa, synthetic construct
  source 1..9: note = Seed: YFFTLLLQL
YMFTLLLQM

SEQ ID NO: 78870 - protein, 9 aa, synthetic construct
  source 1..9: note = Seed: YFFTLLLQL
YMFTLLLQS

SEQ ID NO: 78871 - protein, 9 aa, synthetic construct
  source 1..9: note = Seed: YFFTLLLQL
YMFTLLLQT

SEQ ID NO: 78872 - protein, 9 aa, synthetic construct
  source 1..9: note = Seed: YFFTLLLQL
YMFTLLLQV

SEQ ID NO: 78873 - protein, 9 aa, synthetic construct
  source 1..9: note = Seed: YFFTLLLQL
YMFTLLLQY

SEQ ID NO: 78874 - protein, 9 aa, synthetic construct
  source 1..9: note = Seed: YLGGMSYYC
YMGGMSYYA

SEQ ID NO: 78875 - protein, 9 aa, synthetic construct
  source 1..9: note = Seed: YLGGMSYYC
YMGGMSYYC

SEQ ID NO: 78876 - protein, 10 aa, synthetic construct
  source 1..10: note = Seed: YLGGMSYYCK
YMGGMSYYCK

SEQ ID NO: 78877 - protein, 10 aa, synthetic construct
  source 1..10: note = Seed: YLGGMSYYCK
YMGGMSYYCR

SEQ ID NO: 78878 - protein, 9 aa, synthetic construct
  source 1..9: note = Seed: YLGGMSYYC
YMGGMSYYF

SEQ ID NO: 78879 - protein, 9 aa, synthetic construct
  source 1..9: note = Seed: YLGGMSYYC
YMGGMSYYG

SEQ ID NO: 78880 - protein, 9 aa, synthetic construct
  source 1..9: note = Seed: YLGGMSYYC
YMGGMSYYI

SEQ ID NO: 78881 - protein, 9 aa, synthetic construct
  source 1..9: note = Seed: YLGGMSYYC
YMGGMSYYL

SEQ ID NO: 78882 - protein, 9 aa, synthetic construct
  source 1..9: note = Seed: YLGGMSYYC
YMGGMSYYM

SEQ ID NO: 78883 - protein, 9 aa, synthetic construct
  source 1..9: note = Seed: YLGGMSYYC
YMGGMSYYS

SEQ ID NO: 78884 - protein, 9 aa, synthetic construct
  source 1..9: note = Seed: YLGGMSYYC
YMGGMSYYT

SEQ ID NO: 78885 - protein, 9 aa, synthetic construct
  source 1..9: note = Seed: YLGGMSYYC
YMGGMSYYV

SEQ ID NO: 78886 - protein, 10 aa, synthetic construct
  source 1..10: note = Seed: YTGNYQCGHY
YMGNYQCGHF

SEQ ID NO: 78887 - protein, 10 aa, synthetic construct
  source 1..10: note = Seed: YTGNYQCGHY
YMGNYQCGHY

SEQ ID NO: 78888 - protein, 11 aa, synthetic construct
  source 1..11: note = Seed: YTGNYQCGHYK
YMGNYQCGHYK

SEQ ID NO: 78889 - protein, 11 aa, synthetic construct
  source 1..11: note = Seed: YTGNYQCGHYK
YMGNYQCGHYR

SEQ ID NO: 78890 - protein, 10 aa, synthetic construct
  source 1..10: note = Seed: YVGYLQPRTF
YMGYLQPRTF

SEQ ID NO: 78891 - protein, 11 aa, synthetic construct
  source 1..11: note = Seed: YVGYLQPRTFL
YMGYLQPRTFF

SEQ ID NO: 78892 - protein, 11 aa, synthetic construct
  source 1..11: note = Seed: YVGYLQPRTFL
YMGYLQPRTFW

SEQ ID NO: 78893 - protein, 10 aa, synthetic construct
  source 1..10: note = Seed: YVGYLQPRTF
YMGYLQPRTM

SEQ ID NO: 78894 - protein, 10 aa, synthetic construct
  source 1..10: note = Seed: YVGYLQPRTF
YMGYLQPRTY

SEQ ID NO: 78895 - protein, 9 aa, synthetic construct
  source 1..9: note = Seed: YMHHMELPT
YMHHMELPA

SEQ ID NO: 78896 - protein, 9 aa, synthetic construct
  source 1..9: note = Seed: YMHHMELPT
YMHHMELPF

SEQ ID NO: 78897 - protein, 9 aa, synthetic construct
  source 1..9: note = Seed: YMHHMELPT
YMHHMELPI

SEQ ID NO: 78898 - protein, 9 aa, synthetic construct
  source 1..9: note = Seed: YMHHMELPT
YMHHMELPL

SEQ ID NO: 78899 - protein, 9 aa, synthetic construct
  source 1..9: note = Seed: YMHHMELPT
YMHHMELPM

SEQ ID NO: 78900 - protein, 11 aa, synthetic construct
  source 1..11: note = Seed: YMHHMELPTGV
YMHHMELPTGA

SEQ ID NO: 78901 - protein, 11 aa, synthetic construct
  source 1..11: note = Seed: YMHHMELPTGV
YMHHMELPTGI

SEQ ID NO: 78902 - protein, 11 aa, synthetic construct
  source 1..11: note = Seed: YMHHMELPTGV
YMHHMELPTGL

SEQ ID NO: 78903 - protein, 11 aa, synthetic construct
  source 1..11: note = Seed: YMHHMELPTGV
YMHHMELPTGM

SEQ ID NO: 78904 - protein, 9 aa, synthetic construct
  source 1..9: note = Seed: YMHHMELPT
YMHHMELPV

SEQ ID NO: 78905 - protein, 9 aa, synthetic construct
  source 1..9: note = Seed: YMHHMELPT
YMHHMELPW

SEQ ID NO: 78906 - protein, 9 aa, synthetic construct
  source 1..9: note = Seed: YMHHMELPT
YMHHMELPY

SEQ ID NO: 78907 - protein, 8 aa, synthetic construct
  source 1..8: note = Seed: YFIASFRL
YMIASFRF

SEQ ID NO: 78908 - protein, 9 aa, synthetic construct
  source 1..9: note = Seed: YFIASFRLF
YMIASFRLF

SEQ ID NO: 78909 - protein, 10 aa, synthetic construct
  source 1..10: note = Seed: YFIASFRLFA
YMIASFRLFA

SEQ ID NO: 78910 - protein, 11 aa, synthetic construct
  source 1..11: note = Seed: YFIASFRLFAR
YMIASFRLFAR

SEQ ID NO: 78911 - protein, 10 aa, synthetic construct
  source 1..10: note = Seed: YFIASFRLFA
YMIASFRLFF

SEQ ID NO: 78912 - protein, 10 aa, synthetic construct
  source 1..10: note = Seed: YFIASFRLFA
YMIASFRLFI

SEQ ID NO: 78913 - protein, 10 aa, synthetic construct
  source 1..10: note = Seed: YFIASFRLFA
YMIASFRLFL

SEQ ID NO: 78914 - protein, 10 aa, synthetic construct
  source 1..10: note = Seed: YFIASFRLFA
YMIASFRLFM

SEQ ID NO: 78915 - protein, 10 aa, synthetic construct
  source 1..10: note = Seed: YFIASFRLFA
YMIASFRLFT

SEQ ID NO: 78916 - protein, 10 aa, synthetic construct
  source 1..10: note = Seed: YFIASFRLFA
YMIASFRLFV

SEQ ID NO: 78917 - protein, 9 aa, synthetic construct
  source 1..9: note = Seed: YFIASFRLF
YMIASFRLH

SEQ ID NO: 78918 - protein, 9 aa, synthetic construct
  source 1..9: note = Seed: YFIASFRLF
YMIASFRLI

SEQ ID NO: 78919 - protein, 9 aa, synthetic construct
  source 1..9: note = Seed: YFIASFRLF
YMIASFRLL

SEQ ID NO: 78920 - protein, 9 aa, synthetic construct
  source 1..9: note = Seed: YFIASFRLF
YMIASFRLM

SEQ ID NO: 78921 - protein, 9 aa, synthetic construct
  source 1..9: note = Seed: YFIASFRLF
YMIASFRLV

SEQ ID NO: 78922 - protein, 9 aa, synthetic construct
  source 1..9: note = Seed: YFIASFRLF
YMIASFRLW

SEQ ID NO: 78923 - protein, 9 aa, synthetic construct
  source 1..9: note = Seed: YFIASFRLF
YMIASFRLY

SEQ ID NO: 78924 - protein, 9 aa, synthetic construct
  source 1..9: note = Seed: YGIATVREV
YMIATVREA

SEQ ID NO: 78925 - protein, 9 aa, synthetic construct
  source 1..9: note = Seed: YGIATVREV
YMIATVREC

SEQ ID NO: 78926 - protein, 9 aa, synthetic construct
  source 1..9: note = Seed: YGIATVREV
YMIATVREF

SEQ ID NO: 78927 - protein, 9 aa, synthetic construct
  source 1..9: note = Seed: YGIATVREV
YMIATVREI

SEQ ID NO: 78928 - protein, 9 aa, synthetic construct
  source 1..9: note = Seed: YGIATVREV
YMIATVREL

SEQ ID NO: 78929 - protein, 9 aa, synthetic construct
  source 1..9: note = Seed: YGIATVREV
YMIATVREM

SEQ ID NO: 78930 - protein, 9 aa, synthetic construct
  source 1..9: note = Seed: YGIATVREV
YMIATVRES

SEQ ID NO: 78931 - protein, 9 aa, synthetic construct
  source 1..9: note = Seed: YGIATVREV
YMIATVRET

SEQ ID NO: 78932 - protein, 9 aa, synthetic construct
  source 1..9: note = Seed: YGIATVREV
YMIATVREV

SEQ ID NO: 78933 - protein, 10 aa, synthetic construct
  source 1..10: note = Seed: YGIATVREVL
YMIATVREVA

SEQ ID NO: 78934 - protein, 10 aa, synthetic construct
  source 1..10: note = Seed: YGIATVREVL
YMIATVREVI

SEQ ID NO: 78935 - protein, 10 aa, synthetic construct
  source 1..10: note = Seed: YGIATVREVL
YMIATVREVL

SEQ ID NO: 78936 - protein, 10 aa, synthetic construct
  source 1..10: note = Seed: YGIATVREVL
YMIATVREVM

SEQ ID NO: 78937 - protein, 10 aa, synthetic construct
  source 1..10: note = Seed: YGIATVREVL
YMIATVREVV

SEQ ID NO: 78938 - protein, 9 aa, synthetic construct
  source 1..9: note = Seed: YGIATVREV
YMIATVREY

SEQ ID NO: 78939 - protein, 10 aa, synthetic construct
  source 1..10: note = Seed: YIICISTKHF
YMICISTKHF

SEQ ID NO: 78940 - protein, 11 aa, synthetic construct
  source 1..11: note = Seed: YIICISTKHFY
YMICISTKHFY

SEQ ID NO: 78941 - protein, 10 aa, synthetic construct
  source 1..10: note = Seed: YIICISTKHF
YMICISTKHM

SEQ ID NO: 78942 - protein, 10 aa, synthetic construct
  source 1..10: note = Seed: YIICISTKHF
YMICISTKHW

SEQ ID NO: 78943 - protein, 10 aa, synthetic construct
  source 1..10: note = Seed: YIICISTKHF
YMICISTKHY

SEQ ID NO: 78944 - protein, 9 aa, synthetic construct
  source 1..9: note = Seed: YFIKGLNNL
YMIKGLNNA

SEQ ID NO: 78945 - protein, 9 aa, synthetic construct
  source 1..9: note = Seed: YFIKGLNNL
YMIKGLNNC

SEQ ID NO: 78946 - protein, 9 aa, synthetic construct
  source 1..9: note = Seed: YFIKGLNNL
YMIKGLNNF

SEQ ID NO: 78947 - protein, 9 aa, synthetic construct
  source 1..9: note = Seed: YFIKGLNNL
YMIKGLNNI

SEQ ID NO: 78948 - protein, 9 aa, synthetic construct
  source 1..9: note = Seed: YFIKGLNNL
YMIKGLNNL

SEQ ID NO: 78949 - protein, 9 aa, synthetic construct
  source 1..9: note = Seed: YFIKGLNNL
YMIKGLNNM

SEQ ID NO: 78950 - protein, 9 aa, synthetic construct
  source 1..9: note = Seed: YFIKGLNNL
YMIKGLNNS

SEQ ID NO: 78951 - protein, 9 aa, synthetic construct
  source 1..9: note = Seed: YFIKGLNNL
YMIKGLNNT

SEQ ID NO: 78952 - protein, 9 aa, synthetic construct
  source 1..9: note = Seed: YFIKGLNNL
YMIKGLNNV

SEQ ID NO: 78953 - protein, 9 aa, synthetic construct
  source 1..9: note = Seed: YFIKGLNNL
YMIKGLNNW

SEQ ID NO: 78954 - protein, 8 aa, synthetic construct
  source 1..8: note = Seed: YLITPVHV
YMITPVHV

SEQ ID NO: 78955 - protein, 11 aa, synthetic construct
  source 1..11: note = Seed: YFKIYSKHTPI
YMKIYSKHTPA

SEQ ID NO: 78956 - protein, 11 aa, synthetic construct
  source 1..11: note = Seed: YFKIYSKHTPI
YMKIYSKHTPI

SEQ ID NO: 78957 - protein, 11 aa, synthetic construct
  source 1..11: note = Seed: YFKIYSKHTPI
YMKIYSKHTPL

SEQ ID NO: 78958 - protein, 11 aa, synthetic construct
  source 1..11: note = Seed: YFKIYSKHTPI
YMKIYSKHTPM

SEQ ID NO: 78959 - protein, 11 aa, synthetic construct
  source 1..11: note = Seed: YFKIYSKHTPI
YMKIYSKHTPV

SEQ ID NO: 78960 - protein, 9 aa, synthetic construct
  source 1..9: note = Seed: YYKKDNSYF
YMKKDNSYF

SEQ ID NO: 78961 - protein, 9 aa, synthetic construct
  source 1..9: note = Seed: YYKKDNSYF
YMKKDNSYM

SEQ ID NO: 78962 - protein, 9 aa, synthetic construct
  source 1..9: note = Seed: YYKKDNSYF
YMKKDNSYY

SEQ ID NO: 78963 - protein, 9 aa, synthetic construct
  source 1..9: note = Seed: YDKLQFTSL
YMKLQFTSA

SEQ ID NO: 78964 - protein, 9 aa, synthetic construct
  source 1..9: note = Seed: YDKLQFTSL
YMKLQFTSC

SEQ ID NO: 78965 - protein, 9 aa, synthetic construct
  source 1..9: note = Seed: YDKLQFTSL
YMKLQFTSF

SEQ ID NO: 78966 - protein, 9 aa, synthetic construct
  source 1..9: note = Seed: YDKLQFTSL
YMKLQFTSI

SEQ ID NO: 78967 - protein, 9 aa, synthetic construct
  source 1..9: note = Seed: YDKLQFTSL
YMKLQFTSL

SEQ ID NO: 78968 - protein, 11 aa, synthetic construct
  source 1..11: note = Seed: YDKLQFTSLEI
YMKLQFTSLEL

SEQ ID NO: 78969 - protein, 11 aa, synthetic construct
  source 1..11: note = Seed: YDKLQFTSLEI
YMKLQFTSLEV

SEQ ID NO: 78970 - protein, 9 aa, synthetic construct
  source 1..9: note = Seed: YDKLQFTSL
YMKLQFTSM

SEQ ID NO: 78971 - protein, 9 aa, synthetic construct
  source 1..9: note = Seed: YDKLQFTSL
YMKLQFTST

SEQ ID NO: 78972 - protein, 9 aa, synthetic construct
  source 1..9: note = Seed: YDKLQFTSL
YMKLQFTSV

SEQ ID NO: 78973 - protein, 8 aa, synthetic construct
  source 1..8: note = Seed: YLKLRSDV
YMKLRSDF

SEQ ID NO: 78974 - protein, 8 aa, synthetic construct
  source 1..8: note = Seed: YLKLRSDV
YMKLRSDI

SEQ ID NO: 78975 - protein, 8 aa, synthetic construct
  source 1..8: note = Seed: YLKLRSDV
YMKLRSDL

SEQ ID NO: 78976 - protein, 8 aa, synthetic construct
  source 1..8: note = Seed: YLKLRSDV
YMKLRSDM

SEQ ID NO: 78977 - protein, 8 aa, synthetic construct
  source 1..8: note = Seed: YLKLRSDV
YMKLRSDV

SEQ ID NO: 78978 - protein, 9 aa, synthetic construct
  source 1..9: note = Seed: YLKLRSDVL
YMKLRSDVA

SEQ ID NO: 78979 - protein, 9 aa, synthetic construct
  source 1..9: note = Seed: YLKLRSDVL
YMKLRSDVF

SEQ ID NO: 78980 - protein, 9 aa, synthetic construct
  source 1..9: note = Seed: YLKLRSDVL
YMKLRSDVI

SEQ ID NO: 78981 - protein, 9 aa, synthetic construct
  source 1..9: note = Seed: YLKLRSDVL
YMKLRSDVL

SEQ ID NO: 78982 - protein, 10 aa, synthetic construct
  source 1..10: note = Seed: YLKLRSDVLL
YMKLRSDVLF

SEQ ID NO: 78983 - protein, 10 aa, synthetic construct
  source 1..10: note = Seed: YLKLRSDVLL
YMKLRSDVLI

SEQ ID NO: 78984 - protein, 10 aa, synthetic construct
  source 1..10: note = Seed: YLKLRSDVLL
YMKLRSDVLL

SEQ ID NO: 78985 - protein, 10 aa, synthetic construct
  source 1..10: note = Seed: YLKLRSDVLL
YMKLRSDVLM

SEQ ID NO: 78986 - protein, 10 aa, synthetic construct
  source 1..10: note = Seed: YLKLRSDVLL
YMKLRSDVLV

SEQ ID NO: 78987 - protein, 9 aa, synthetic construct
  source 1..9: note = Seed: YLKLRSDVL
YMKLRSDVM

SEQ ID NO: 78988 - protein, 9 aa, synthetic construct
  source 1..9: note = Seed: YLKLRSDVL
YMKLRSDVV

SEQ ID NO: 78989 - protein, 9 aa, synthetic construct
  source 1..9: note = Seed: YLKLRSDVL
YMKLRSDVY

SEQ ID NO: 78990 - protein, 8 aa, synthetic construct
  source 1..8: note = Seed: YLKRRVVF
YMKRRVVA

SEQ ID NO: 78991 - protein, 8 aa, synthetic construct
  source 1..8: note = Seed: YLKRRVVF
YMKRRVVF

SEQ ID NO: 78992 - protein, 11 aa, synthetic construct
  source 1..11: note = Seed: YLKRRVVFNGV
YMKRRVVFNGL

SEQ ID NO: 78993 - protein, 11 aa, synthetic construct
  source 1..11: note = Seed: YLKRRVVFNGV
YMKRRVVFNGM

SEQ ID NO: 78994 - protein, 8 aa, synthetic construct
  source 1..8: note = Seed: YLKRRVVF
YMKRRVVI

SEQ ID NO: 78995 - protein, 8 aa, synthetic construct
  source 1..8: note = Seed: YLKRRVVF
YMKRRVVL

SEQ ID NO: 78996 - protein, 8 aa, synthetic construct
  source 1..8: note = Seed: YLKRRVVF
YMKRRVVM

SEQ ID NO: 78997 - protein, 8 aa, synthetic construct
  source 1..8: note = Seed: YLKRRVVF
YMKRRVVV

SEQ ID NO: 78998 - protein, 9 aa, synthetic construct
  source 1..9: note = Seed: YLKSPNFSK
YMKSPNFSK

SEQ ID NO: 78999 - protein, 10 aa, synthetic construct
  source 1..10: note = Seed: YLKSPNFSKL
YMKSPNFSKA

SEQ ID NO: 79000 - protein, 10 aa, synthetic construct
  source 1..10: note = Seed: YLKSPNFSKL
YMKSPNFSKI

SEQ ID NO: 79001 - protein, 10 aa, synthetic construct
  source 1..10: note = Seed: YLKSPNFSKL
YMKSPNFSKL

SEQ ID NO: 79002 - protein, 10 aa, synthetic construct
  source 1..10: note = Seed: YLKSPNFSKL
YMKSPNFSKV

SEQ ID NO: 79003 - protein, 9 aa, synthetic construct
  source 1..9: note = Seed: YLKSPNFSK
YMKSPNFSR

SEQ ID NO: 79004 - protein, 9 aa, synthetic construct
  source 1..9: note = Seed: YIKWDLLKY
YMKWDLLKF

SEQ ID NO: 79005 - protein, 9 aa, synthetic construct
  source 1..9: note = Seed: YIKWDLLKY
YMKWDLLKM

SEQ ID NO: 79006 - protein, 9 aa, synthetic construct
  source 1..9: note = Seed: YIKWDLLKY
YMKWDLLKY

SEQ ID NO: 79007 - protein, 8 aa, synthetic construct
  source 1..8: note = Seed: YIKWPWYI
YMKWPWYA

SEQ ID NO: 79008 - protein, 8 aa, synthetic construct
  source 1..8: note = Seed: YIKWPWYI
YMKWPWYF

SEQ ID NO: 79009 - protein, 8 aa, synthetic construct
  source 1..8: note = Seed: YIKWPWYI
YMKWPWYI

SEQ ID NO: 79010 - protein, 9 aa, synthetic construct
  source 1..9: note = Seed: YIKWPWYIW
YMKWPWYIF

SEQ ID NO: 79011 - protein, 9 aa, synthetic construct
  source 1..9: note = Seed: YIKWPWYIW
YMKWPWYIW

SEQ ID NO: 79012 - protein, 10 aa, synthetic construct
  source 1..10: note = Seed: YIKWPWYIWL
YMKWPWYIWA

SEQ ID NO: 79013 - protein, 10 aa, synthetic construct
  source 1..10: note = Seed: YIKWPWYIWL
YMKWPWYIWI

SEQ ID NO: 79014 - protein, 10 aa, synthetic construct
  source 1..10: note = Seed: YIKWPWYIWL
YMKWPWYIWL

SEQ ID NO: 79015 - protein, 10 aa, synthetic construct
  source 1..10: note = Seed: YIKWPWYIWL
YMKWPWYIWM

SEQ ID NO: 79016 - protein, 10 aa, synthetic construct
  source 1..10: note = Seed: YIKWPWYIWL
YMKWPWYIWT

SEQ ID NO: 79017 - protein, 10 aa, synthetic construct
  source 1..10: note = Seed: YIKWPWYIWL
YMKWPWYIWV

SEQ ID NO: 79018 - protein, 8 aa, synthetic construct
  source 1..8: note = Seed: YIKWPWYI
YMKWPWYL

SEQ ID NO: 79019 - protein, 8 aa, synthetic construct
  source 1..8: note = Seed: YIKWPWYI
YMKWPWYM

SEQ ID NO: 79020 - protein, 8 aa, synthetic construct
  source 1..8: note = Seed: YIKWPWYI
YMKWPWYT

SEQ ID NO: 79021 - protein, 8 aa, synthetic construct
  source 1..8: note = Seed: YIKWPWYI
YMKWPWYV

SEQ ID NO: 79022 - protein, 9 aa, synthetic construct
  source 1..9: note = Seed: YNKYKYFSG
YMKYKYFSA

SEQ ID NO: 79023 - protein, 9 aa, synthetic construct
  source 1..9: note = Seed: YNKYKYFSG
YMKYKYFSC

SEQ ID NO: 79024 - protein, 9 aa, synthetic construct
  source 1..9: note = Seed: YNKYKYFSG
YMKYKYFSF

SEQ ID NO: 79025 - protein, 9 aa, synthetic construct
  source 1..9: note = Seed: YNKYKYFSG
YMKYKYFSG

SEQ ID NO: 79026 - protein, 9 aa, synthetic construct
  source 1..9: note = Seed: YNKYKYFSG
YMKYKYFSI

SEQ ID NO: 79027 - protein, 9 aa, synthetic construct
  source 1..9: note = Seed: YNKYKYFSG
YMKYKYFSL

SEQ ID NO: 79028 - protein, 9 aa, synthetic construct
  source 1..9: note = Seed: YNKYKYFSG
YMKYKYFSM

SEQ ID NO: 79029 - protein, 9 aa, synthetic construct
  source 1..9: note = Seed: YNKYKYFSG
YMKYKYFSS

SEQ ID NO: 79030 - protein, 9 aa, synthetic construct
  source 1..9: note = Seed: YNKYKYFSG
YMKYKYFST

SEQ ID NO: 79031 - protein, 9 aa, synthetic construct
  source 1..9: note = Seed: YNKYKYFSG
YMKYKYFSV

SEQ ID NO: 79032 - protein, 10 aa, synthetic construct
  source 1..10: note = Seed: YFLCWHTNCY
YMLCWHTNCF

SEQ ID NO: 79033 - protein, 10 aa, synthetic construct
  source 1..10: note = Seed: YFLCWHTNCY
YMLCWHTNCY

SEQ ID NO: 79034 - protein, 10 aa, synthetic construct
  source 1..10: note = Seed: YPLECIKDLL
YMLECIKDLA

SEQ ID NO: 79035 - protein, 10 aa, synthetic construct
  source 1..10: note = Seed: YPLECIKDLL
YMLECIKDLI

SEQ ID NO: 79036 - protein, 10 aa, synthetic construct
  source 1..10: note = Seed: YPLECIKDLL
YMLECIKDLL

SEQ ID NO: 79037 - protein, 10 aa, synthetic construct
  source 1..10: note = Seed: YPLECIKDLL
YMLECIKDLM

SEQ ID NO: 79038 - protein, 10 aa, synthetic construct
  source 1..10: note = Seed: YPLECIKDLL
YMLECIKDLV

SEQ ID NO: 79039 - protein, 8 aa, synthetic construct
  source 1..8: note = Seed: YKLEGYAF
YMLEGYAF

SEQ ID NO: 79040 - protein, 8 aa, synthetic construct
  source 1..8: note = Seed: YKLEGYAF
YMLEGYAY

SEQ ID NO: 79041 - protein, 9 aa, synthetic construct
  source 1..9: note = Seed: YRLFRKSNL
YMLFRKSNF

SEQ ID NO: 79042 - protein, 9 aa, synthetic construct
  source 1..9: note = Seed: YRLFRKSNL
YMLFRKSNI

SEQ ID NO: 79043 - protein, 9 aa, synthetic construct
  source 1..9: note = Seed: YRLFRKSNL
YMLFRKSNL

SEQ ID NO: 79044 - protein, 10 aa, synthetic construct
  source 1..10: note = Seed: YRLFRKSNLK
YMLFRKSNLK

SEQ ID NO: 79045 - protein, 10 aa, synthetic construct
  source 1..10: note = Seed: YRLFRKSNLK
YMLFRKSNLR

SEQ ID NO: 79046 - protein, 9 aa, synthetic construct
  source 1..9: note = Seed: YRLFRKSNL
YMLFRKSNM

SEQ ID NO: 79047 - protein, 9 aa, synthetic construct
  source 1..9: note = Seed: YRLFRKSNL
YMLFRKSNV

SEQ ID NO: 79048 - protein, 9 aa, synthetic construct
  source 1..9: note = Seed: YILFTRFFY
YMLFTRFFF

SEQ ID NO: 79049 - protein, 9 aa, synthetic construct
  source 1..9: note = Seed: YILFTRFFY
YMLFTRFFH

SEQ ID NO: 79050 - protein, 9 aa, synthetic construct
  source 1..9: note = Seed: YILFTRFFY
YMLFTRFFK

SEQ ID NO: 79051 - protein, 9 aa, synthetic construct
  source 1..9: note = Seed: YILFTRFFY
YMLFTRFFM

SEQ ID NO: 79052 - protein, 9 aa, synthetic construct
  source 1..9: note = Seed: YILFTRFFY
YMLFTRFFR

SEQ ID NO: 79053 - protein, 9 aa, synthetic construct
  source 1..9: note = Seed: YILFTRFFY
YMLFTRFFY

SEQ ID NO: 79054 - protein, 10 aa, synthetic construct
  source 1..10: note = Seed: YILFTRFFYV
YMLFTRFFYA

SEQ ID NO: 79055 - protein, 10 aa, synthetic construct
  source 1..10: note = Seed: YILFTRFFYV
YMLFTRFFYC

SEQ ID NO: 79056 - protein, 10 aa, synthetic construct
  source 1..10: note = Seed: YILFTRFFYV
YMLFTRFFYD

SEQ ID NO: 79057 - protein, 10 aa, synthetic construct
  source 1..10: note = Seed: YILFTRFFYV
YMLFTRFFYE

SEQ ID NO: 79058 - protein, 10 aa, synthetic construct
  source 1..10: note = Seed: YILFTRFFYV
YMLFTRFFYF

SEQ ID NO: 79059 - protein, 10 aa, synthetic construct
  source 1..10: note = Seed: YILFTRFFYV
YMLFTRFFYG

SEQ ID NO: 79060 - protein, 10 aa, synthetic construct
  source 1..10: note = Seed: YILFTRFFYV
YMLFTRFFYH

SEQ ID NO: 79061 - protein, 10 aa, synthetic construct
  source 1..10: note = Seed: YILFTRFFYV
YMLFTRFFYI

SEQ ID NO: 79062 - protein, 10 aa, synthetic construct
  source 1..10: note = Seed: YILFTRFFYV
YMLFTRFFYK

SEQ ID NO: 79063 - protein, 10 aa, synthetic construct
  source 1..10: note = Seed: YILFTRFFYV
YMLFTRFFYL

SEQ ID NO: 79064 - protein, 10 aa, synthetic construct
  source 1..10: note = Seed: YILFTRFFYV
YMLFTRFFYM

SEQ ID NO: 79065 - protein, 10 aa, synthetic construct
  source 1..10: note = Seed: YILFTRFFYV
YMLFTRFFYN

SEQ ID NO: 79066 - protein, 10 aa, synthetic construct
  source 1..10: note = Seed: YILFTRFFYV
YMLFTRFFYP

SEQ ID NO: 79067 - protein, 10 aa, synthetic construct
  source 1..10: note = Seed: YILFTRFFYV
YMLFTRFFYQ

SEQ ID NO: 79068 - protein, 10 aa, synthetic construct
  source 1..10: note = Seed: YILFTRFFYV
YMLFTRFFYR

SEQ ID NO: 79069 - protein, 10 aa, synthetic construct
  source 1..10: note = Seed: YILFTRFFYV
YMLFTRFFYS

SEQ ID NO: 79070 - protein, 10 aa, synthetic construct
  source 1..10: note = Seed: YILFTRFFYV
YMLFTRFFYT

SEQ ID NO: 79071 - protein, 10 aa, synthetic construct
  source 1..10: note = Seed: YILFTRFFYV
YMLFTRFFYV

SEQ ID NO: 79072 - protein, 11 aa, synthetic construct
  source 1..11: note = Seed: YILFTRFFYVL
YMLFTRFFYVA

SEQ ID NO: 79073 - protein, 11 aa, synthetic construct
  source 1..11: note = Seed: YILFTRFFYVL
YMLFTRFFYVC

SEQ ID NO: 79074 - protein, 11 aa, synthetic construct
  source 1..11: note = Seed: YILFTRFFYVL
YMLFTRFFYVD

SEQ ID NO: 79075 - protein, 11 aa, synthetic construct
  source 1..11: note = Seed: YILFTRFFYVL
YMLFTRFFYVE

SEQ ID NO: 79076 - protein, 11 aa, synthetic construct
  source 1..11: note = Seed: YILFTRFFYVL
YMLFTRFFYVF

SEQ ID NO: 79077 - protein, 11 aa, synthetic construct
  source 1..11: note = Seed: YILFTRFFYVL
YMLFTRFFYVG

SEQ ID NO: 79078 - protein, 11 aa, synthetic construct
  source 1..11: note = Seed: YILFTRFFYVL
YMLFTRFFYVH

SEQ ID NO: 79079 - protein, 11 aa, synthetic construct
  source 1..11: note = Seed: YILFTRFFYVL
YMLFTRFFYVI

SEQ ID NO: 79080 - protein, 11 aa, synthetic construct
  source 1..11: note = Seed: YILFTRFFYVL
YMLFTRFFYVK

SEQ ID NO: 79081 - protein, 11 aa, synthetic construct
  source 1..11: note = Seed: YILFTRFFYVL
YMLFTRFFYVL

SEQ ID NO: 79082 - protein, 11 aa, synthetic construct
  source 1..11: note = Seed: YILFTRFFYVL
YMLFTRFFYVM

SEQ ID NO: 79083 - protein, 11 aa, synthetic construct
  source 1..11: note = Seed: YILFTRFFYVL
YMLFTRFFYVN

SEQ ID NO: 79084 - protein, 11 aa, synthetic construct
  source 1..11: note = Seed: YILFTRFFYVL
YMLFTRFFYVP

SEQ ID NO: 79085 - protein, 11 aa, synthetic construct
  source 1..11: note = Seed: YILFTRFFYVL
YMLFTRFFYVQ

SEQ ID NO: 79086 - protein, 11 aa, synthetic construct
  source 1..11: note = Seed: YILFTRFFYVL
YMLFTRFFYVR

SEQ ID NO: 79087 - protein, 11 aa, synthetic construct
  source 1..11: note = Seed: YILFTRFFYVL
YMLFTRFFYVS

SEQ ID NO: 79088 - protein, 11 aa, synthetic construct
  source 1..11: note = Seed: YILFTRFFYVL
YMLFTRFFYVT

SEQ ID NO: 79089 - protein, 11 aa, synthetic construct
  source 1..11: note = Seed: YILFTRFFYVL
YMLFTRFFYVV

SEQ ID NO: 79090 - protein, 11 aa, synthetic construct
  source 1..11: note = Seed: YILFTRFFYVL
YMLFTRFFYVW

SEQ ID NO: 79091 - protein, 11 aa, synthetic construct
  source 1..11: note = Seed: YILFTRFFYVL
YMLFTRFFYVY

SEQ ID NO: 79092 - protein, 10 aa, synthetic construct
  source 1..10: note = Seed: YILFTRFFYV
YMLFTRFFYW

SEQ ID NO: 79093 - protein, 10 aa, synthetic construct
  source 1..10: note = Seed: YILFTRFFYV
YMLFTRFFYY

SEQ ID NO: 79094 - protein, 9 aa, synthetic construct
  source 1..9: note = Seed: YKLGASQRV
YMLGASQRF

SEQ ID NO: 79095 - protein, 9 aa, synthetic construct
  source 1..9: note = Seed: YKLGASQRV
YMLGASQRL

SEQ ID NO: 79096 - protein, 9 aa, synthetic construct
  source 1..9: note = Seed: YKLGASQRV
YMLGASQRM

SEQ ID NO: 79097 - protein, 9 aa, synthetic construct
  source 1..9: note = Seed: YKLGASQRV
YMLGASQRY

SEQ ID NO: 79098 - protein, 10 aa, synthetic construct
  source 1..10: note = Seed: YSLLMPILTL
YMLLMPILTA

SEQ ID NO: 79099 - protein, 10 aa, synthetic construct
  source 1..10: note = Seed: YSLLMPILTL
YMLLMPILTI

SEQ ID NO: 79100 - protein, 10 aa, synthetic construct
  source 1..10: note = Seed: YSLLMPILTL
YMLLMPILTL

SEQ ID NO: 79101 - protein, 10 aa, synthetic construct
  source 1..10: note = Seed: YSLLMPILTL
YMLLMPILTM

SEQ ID NO: 79102 - protein, 10 aa, synthetic construct
  source 1..10: note = Seed: YSLLMPILTL
YMLLMPILTT

SEQ ID NO: 79103 - protein, 10 aa, synthetic construct
  source 1..10: note = Seed: YSLLMPILTL
YMLLMPILTV

SEQ ID NO: 79104 - protein, 10 aa, synthetic construct
  source 1..10: note = Seed: YHLMSFPQSA
YMLMSFPQSA

SEQ ID NO: 79105 - protein, 11 aa, synthetic construct
  source 1..11: note = Seed: YHLMSFPQSAP
YMLMSFPQSAA

SEQ ID NO: 79106 - protein, 11 aa, synthetic construct
  source 1..11: note = Seed: YHLMSFPQSAP
YMLMSFPQSAI

SEQ ID NO: 79107 - protein, 11 aa, synthetic construct
  source 1..11: note = Seed: YHLMSFPQSAP
YMLMSFPQSAL

SEQ ID NO: 79108 - protein, 11 aa, synthetic construct
  source 1..11: note = Seed: YHLMSFPQSAP
YMLMSFPQSAV

SEQ ID NO: 79109 - protein, 10 aa, synthetic construct
  source 1..10: note = Seed: YHLMSFPQSA
YMLMSFPQSC

SEQ ID NO: 79110 - protein, 10 aa, synthetic construct
  source 1..10: note = Seed: YHLMSFPQSA
YMLMSFPQSI

SEQ ID NO: 79111 - protein, 10 aa, synthetic construct
  source 1..10: note = Seed: YHLMSFPQSA
YMLMSFPQSL

SEQ ID NO: 79112 - protein, 10 aa, synthetic construct
  source 1..10: note = Seed: YHLMSFPQSA
YMLMSFPQSM

SEQ ID NO: 79113 - protein, 10 aa, synthetic construct
  source 1..10: note = Seed: YHLMSFPQSA
YMLMSFPQST

SEQ ID NO: 79114 - protein, 10 aa, synthetic construct
  source 1..10: note = Seed: YHLMSFPQSA
YMLMSFPQSV

SEQ ID NO: 79115 - protein, 9 aa, synthetic construct
  source 1..9: note = Seed: YELQTPFEI
YMLQTPFEA

SEQ ID NO: 79116 - protein, 9 aa, synthetic construct
  source 1..9: note = Seed: YELQTPFEI
YMLQTPFEF

SEQ ID NO: 79117 - protein, 9 aa, synthetic construct
  source 1..9: note = Seed: YELQTPFEI
YMLQTPFEI

SEQ ID NO: 79118 - protein, 9 aa, synthetic construct
  source 1..9: note = Seed: YELQTPFEI
YMLQTPFEL

SEQ ID NO: 79119 - protein, 9 aa, synthetic construct
  source 1..9: note = Seed: YELQTPFEI
YMLQTPFEM

SEQ ID NO: 79120 - protein, 9 aa, synthetic construct
  source 1..9: note = Seed: YELQTPFEI
YMLQTPFET

SEQ ID NO: 79121 - protein, 9 aa, synthetic construct
  source 1..9: note = Seed: YELQTPFEI
YMLQTPFEV

SEQ ID NO: 79122 - protein, 10 aa, synthetic construct
  source 1..10: note = Seed: YDLSVVNARL
YMLSVVNARA

SEQ ID NO: 79123 - protein, 10 aa, synthetic construct
  source 1..10: note = Seed: YDLSVVNARL
YMLSVVNARI

SEQ ID NO: 79124 - protein, 10 aa, synthetic construct
  source 1..10: note = Seed: YDLSVVNARL
YMLSVVNARL

SEQ ID NO: 79125 - protein, 10 aa, synthetic construct
  source 1..10: note = Seed: YDLSVVNARL
YMLSVVNARM

SEQ ID NO: 79126 - protein, 10 aa, synthetic construct
  source 1..10: note = Seed: YDLSVVNARL
YMLSVVNART

SEQ ID NO: 79127 - protein, 10 aa, synthetic construct
  source 1..10: note = Seed: YDLSVVNARL
YMLSVVNARV

SEQ ID NO: 79128 - protein, 11 aa, synthetic construct
  source 1..11: note = Seed: YMLTYNKVENM
YMLTYNKVENA

SEQ ID NO: 79129 - protein, 11 aa, synthetic construct
  source 1..11: note = Seed: YMLTYNKVENM
YMLTYNKVENI

SEQ ID NO: 79130 - protein, 11 aa, synthetic construct
  source 1..11: note = Seed: YMLTYNKVENM
YMLTYNKVENL

SEQ ID NO: 79131 - protein, 11 aa, synthetic construct
  source 1..11: note = Seed: YMLTYNKVENM
YMLTYNKVENV

SEQ ID NO: 79132 - protein, 8 aa, synthetic construct
  source 1..8: note = Seed: YTMADLVY
YMMADLVF

SEQ ID NO: 79133 - protein, 8 aa, synthetic construct
  source 1..8: note = Seed: YTMADLVY
YMMADLVL

SEQ ID NO: 79134 - protein, 8 aa, synthetic construct
  source 1..8: note = Seed: YTMADLVY
YMMADLVM

SEQ ID NO: 79135 - protein, 8 aa, synthetic construct
  source 1..8: note = Seed: YTMADLVY
YMMADLVY

SEQ ID NO: 79136 - protein, 9 aa, synthetic construct
  source 1..9: note = Seed: YTMADLVYA
YMMADLVYA

SEQ ID NO: 79137 - protein, 10 aa, synthetic construct
  source 1..10: note = Seed: YTMADLVYAL
YMMADLVYAA

SEQ ID NO: 79138 - protein, 10 aa, synthetic construct
  source 1..10: note = Seed: YTMADLVYAL
YMMADLVYAC

SEQ ID NO: 79139 - protein, 10 aa, synthetic construct
  source 1..10: note = Seed: YTMADLVYAL
YMMADLVYAD

SEQ ID NO: 79140 - protein, 10 aa, synthetic construct
  source 1..10: note = Seed: YTMADLVYAL
YMMADLVYAE

SEQ ID NO: 79141 - protein, 10 aa, synthetic construct
  source 1..10: note = Seed: YTMADLVYAL
YMMADLVYAF

SEQ ID NO: 79142 - protein, 10 aa, synthetic construct
  source 1..10: note = Seed: YTMADLVYAL
YMMADLVYAG

SEQ ID NO: 79143 - protein, 10 aa, synthetic construct
  source 1..10: note = Seed: YTMADLVYAL
YMMADLVYAH

SEQ ID NO: 79144 - protein, 10 aa, synthetic construct
  source 1..10: note = Seed: YTMADLVYAL
YMMADLVYAI

SEQ ID NO: 79145 - protein, 10 aa, synthetic construct
  source 1..10: note = Seed: YTMADLVYAL
YMMADLVYAK

SEQ ID NO: 79146 - protein, 10 aa, synthetic construct
  source 1..10: note = Seed: YTMADLVYAL
YMMADLVYAL

SEQ ID NO: 79147 - protein, 11 aa, synthetic construct
  source 1..11: note = Seed: YTMADLVYALR
YMMADLVYALA

SEQ ID NO: 79148 - protein, 11 aa, synthetic construct
  source 1..11: note = Seed: YTMADLVYALR
YMMADLVYALC

SEQ ID NO: 79149 - protein, 11 aa, synthetic construct
  source 1..11: note = Seed: YTMADLVYALR
YMMADLVYALD

SEQ ID NO: 79150 - protein, 11 aa, synthetic construct
  source 1..11: note = Seed: YTMADLVYALR
YMMADLVYALE

SEQ ID NO: 79151 - protein, 11 aa, synthetic construct
  source 1..11: note = Seed: YTMADLVYALR
YMMADLVYALF

SEQ ID NO: 79152 - protein, 11 aa, synthetic construct
  source 1..11: note = Seed: YTMADLVYALR
YMMADLVYALG

SEQ ID NO: 79153 - protein, 11 aa, synthetic construct
  source 1..11: note = Seed: YTMADLVYALR
YMMADLVYALH

SEQ ID NO: 79154 - protein, 11 aa, synthetic construct
  source 1..11: note = Seed: YTMADLVYALR
YMMADLVYALI

SEQ ID NO: 79155 - protein, 11 aa, synthetic construct
  source 1..11: note = Seed: YTMADLVYALR
YMMADLVYALK

SEQ ID NO: 79156 - protein, 11 aa, synthetic construct
  source 1..11: note = Seed: YTMADLVYALR
YMMADLVYALL

SEQ ID NO: 79157 - protein, 11 aa, synthetic construct
  source 1..11: note = Seed: YTMADLVYALR
YMMADLVYALM

SEQ ID NO: 79158 - protein, 11 aa, synthetic construct
  source 1..11: note = Seed: YTMADLVYALR
YMMADLVYALN

SEQ ID NO: 79159 - protein, 11 aa, synthetic construct
  source 1..11: note = Seed: YTMADLVYALR
YMMADLVYALP

SEQ ID NO: 79160 - protein, 11 aa, synthetic construct
  source 1..11: note = Seed: YTMADLVYALR
YMMADLVYALQ

SEQ ID NO: 79161 - protein, 11 aa, synthetic construct
  source 1..11: note = Seed: YTMADLVYALR
YMMADLVYALR

SEQ ID NO: 79162 - protein, 11 aa, synthetic construct
  source 1..11: note = Seed: YTMADLVYALR
YMMADLVYALS

SEQ ID NO: 79163 - protein, 11 aa, synthetic construct
  source 1..11: note = Seed: YTMADLVYALR
YMMADLVYALT

SEQ ID NO: 79164 - protein, 11 aa, synthetic construct
  source 1..11: note = Seed: YTMADLVYALR
YMMADLVYALV

SEQ ID NO: 79165 - protein, 11 aa, synthetic construct
  source 1..11: note = Seed: YTMADLVYALR
YMMADLVYALW

SEQ ID NO: 79166 - protein, 11 aa, synthetic construct
  source 1..11: note = Seed: YTMADLVYALR
YMMADLVYALY

SEQ ID NO: 79167 - protein, 10 aa, synthetic construct
  source 1..10: note = Seed: YTMADLVYAL
YMMADLVYAM

SEQ ID NO: 79168 - protein, 10 aa, synthetic construct
  source 1..10: note = Seed: YTMADLVYAL
YMMADLVYAN

SEQ ID NO: 79169 - protein, 10 aa, synthetic construct
  source 1..10: note = Seed: YTMADLVYAL
YMMADLVYAP

SEQ ID NO: 79170 - protein, 10 aa, synthetic construct
  source 1..10: note = Seed: YTMADLVYAL
YMMADLVYAQ

SEQ ID NO: 79171 - protein, 10 aa, synthetic construct
  source 1..10: note = Seed: YTMADLVYAL
YMMADLVYAR

SEQ ID NO: 79172 - protein, 10 aa, synthetic construct
  source 1..10: note = Seed: YTMADLVYAL
YMMADLVYAS

SEQ ID NO: 79173 - protein, 10 aa, synthetic construct
  source 1..10: note = Seed: YTMADLVYAL
YMMADLVYAT

SEQ ID NO: 79174 - protein, 10 aa, synthetic construct
  source 1..10: note = Seed: YTMADLVYAL
YMMADLVYAV

SEQ ID NO: 79175 - protein, 10 aa, synthetic construct
  source 1..10: note = Seed: YTMADLVYAL
YMMADLVYAW

SEQ ID NO: 79176 - protein, 10 aa, synthetic construct
  source 1..10: note = Seed: YTMADLVYAL
YMMADLVYAY

SEQ ID NO: 79177 - protein, 9 aa, synthetic construct
  source 1..9: note = Seed: YTMADLVYA
YMMADLVYC

SEQ ID NO: 79178 - protein, 9 aa, synthetic construct
  source 1..9: note = Seed: YTMADLVYA
YMMADLVYE

SEQ ID NO: 79179 - protein, 9 aa, synthetic construct
  source 1..9: note = Seed: YTMADLVYA
YMMADLVYF

SEQ ID NO: 79180 - protein, 9 aa, synthetic construct
  source 1..9: note = Seed: YTMADLVYA
YMMADLVYG

SEQ ID NO: 79181 - protein, 9 aa, synthetic construct
  source 1..9: note = Seed: YTMADLVYA
YMMADLVYI

SEQ ID NO: 79182 - protein, 9 aa, synthetic construct
  source 1..9: note = Seed: YTMADLVYA
YMMADLVYK

SEQ ID NO: 79183 - protein, 9 aa, synthetic construct
  source 1..9: note = Seed: YTMADLVYA
YMMADLVYL

SEQ ID NO: 79184 - protein, 9 aa, synthetic construct
  source 1..9: note = Seed: YTMADLVYA
YMMADLVYM

SEQ ID NO: 79185 - protein, 9 aa, synthetic construct
  source 1..9: note = Seed: YTMADLVYA
YMMADLVYP

SEQ ID NO: 79186 - protein, 9 aa, synthetic construct
  source 1..9: note = Seed: YTMADLVYA
YMMADLVYQ

SEQ ID NO: 79187 - protein, 9 aa, synthetic construct
  source 1..9: note = Seed: YTMADLVYA
YMMADLVYR

SEQ ID NO: 79188 - protein, 9 aa, synthetic construct
  source 1..9: note = Seed: YTMADLVYA
YMMADLVYS

SEQ ID NO: 79189 - protein, 9 aa, synthetic construct
  source 1..9: note = Seed: YTMADLVYA
YMMADLVYT

SEQ ID NO: 79190 - protein, 9 aa, synthetic construct
  source 1..9: note = Seed: YTMADLVYA
YMMADLVYV

SEQ ID NO: 79191 - protein, 9 aa, synthetic construct
  source 1..9: note = Seed: YTMADLVYA
YMMADLVYW

SEQ ID NO: 79192 - protein, 9 aa, synthetic construct
  source 1..9: note = Seed: YTMADLVYA
YMMADLVYY

SEQ ID NO: 79193 - protein, 8 aa, synthetic construct
  source 1..8: note = Seed: YVMHANYI
YMMHANYA

SEQ ID NO: 79194 - protein, 8 aa, synthetic construct
  source 1..8: note = Seed: YVMHANYI
YMMHANYI

SEQ ID NO: 79195 - protein, 9 aa, synthetic construct
  source 1..9: note = Seed: YVMHANYIF
YMMHANYIA

SEQ ID NO: 79196 - protein, 9 aa, synthetic construct
  source 1..9: note = Seed: YVMHANYIF
YMMHANYIC

SEQ ID NO: 79197 - protein, 9 aa, synthetic construct
  source 1..9: note = Seed: YVMHANYIF
YMMHANYIF

SEQ ID NO: 79198 - protein, 10 aa, synthetic construct
  source 1..10: note = Seed: YVMHANYIFW
YMMHANYIFF

SEQ ID NO: 79199 - protein, 10 aa, synthetic construct
  source 1..10: note = Seed: YVMHANYIFW
YMMHANYIFM

SEQ ID NO: 79200 - protein, 10 aa, synthetic construct
  source 1..10: note = Seed: YVMHANYIFW
YMMHANYIFW

SEQ ID NO: 79201 - protein, 10 aa, synthetic construct
  source 1..10: note = Seed: YVMHANYIFW
YMMHANYIFY

SEQ ID NO: 79202 - protein, 9 aa, synthetic construct
  source 1..9: note = Seed: YVMHANYIF
YMMHANYIH

SEQ ID NO: 79203 - protein, 9 aa, synthetic construct
  source 1..9: note = Seed: YVMHANYIF
YMMHANYII

SEQ ID NO: 79204 - protein, 9 aa, synthetic construct
  source 1..9: note = Seed: YVMHANYIF
YMMHANYIL

SEQ ID NO: 79205 - protein, 9 aa, synthetic construct
  source 1..9: note = Seed: YVMHANYIF
YMMHANYIM

SEQ ID NO: 79206 - protein, 9 aa, synthetic construct
  source 1..9: note = Seed: YVMHANYIF
YMMHANYIS

SEQ ID NO: 79207 - protein, 9 aa, synthetic construct
  source 1..9: note = Seed: YVMHANYIF
YMMHANYIT

SEQ ID NO: 79208 - protein, 9 aa, synthetic construct
  source 1..9: note = Seed: YVMHANYIF
YMMHANYIV

SEQ ID NO: 79209 - protein, 9 aa, synthetic construct
  source 1..9: note = Seed: YVMHANYIF
YMMHANYIW

SEQ ID NO: 79210 - protein, 9 aa, synthetic construct
  source 1..9: note = Seed: YVMHANYIF
YMMHANYIY

SEQ ID NO: 79211 - protein, 8 aa, synthetic construct
  source 1..8: note = Seed: YVMHANYI
YMMHANYL

SEQ ID NO: 79212 - protein, 8 aa, synthetic construct
  source 1..8: note = Seed: YVMHANYI
YMMHANYV

SEQ ID NO: 79213 - protein, 9 aa, synthetic construct
  source 1..9: note = Seed: YTNDKACPL
YMNDKACPA

SEQ ID NO: 79214 - protein, 9 aa, synthetic construct
  source 1..9: note = Seed: YTNDKACPL
YMNDKACPC

SEQ ID NO: 79215 - protein, 9 aa, synthetic construct
  source 1..9: note = Seed: YTNDKACPL
YMNDKACPF

SEQ ID NO: 79216 - protein, 9 aa, synthetic construct
  source 1..9: note = Seed: YTNDKACPL
YMNDKACPI

SEQ ID NO: 79217 - protein, 9 aa, synthetic construct
  source 1..9: note = Seed: YTNDKACPL
YMNDKACPL

SEQ ID NO: 79218 - protein, 10 aa, synthetic construct
  source 1..10: note = Seed: YTNDKACPLI
YMNDKACPLA

SEQ ID NO: 79219 - protein, 10 aa, synthetic construct
  source 1..10: note = Seed: YTNDKACPLI
YMNDKACPLI

SEQ ID NO: 79220 - protein, 10 aa, synthetic construct
  source 1..10: note = Seed: YTNDKACPLI
YMNDKACPLL

SEQ ID NO: 79221 - protein, 10 aa, synthetic construct
  source 1..10: note = Seed: YTNDKACPLI
YMNDKACPLM

SEQ ID NO: 79222 - protein, 10 aa, synthetic construct
  source 1..10: note = Seed: YTNDKACPLI
YMNDKACPLV

SEQ ID NO: 79223 - protein, 9 aa, synthetic construct
  source 1..9: note = Seed: YTNDKACPL
YMNDKACPM

SEQ ID NO: 79224 - protein, 9 aa, synthetic construct
  source 1..9: note = Seed: YTNDKACPL
YMNDKACPS

SEQ ID NO: 79225 - protein, 9 aa, synthetic construct
  source 1..9: note = Seed: YTNDKACPL
YMNDKACPT

SEQ ID NO: 79226 - protein, 9 aa, synthetic construct
  source 1..9: note = Seed: YTNDKACPL
YMNDKACPV

SEQ ID NO: 79227 - protein, 9 aa, synthetic construct
  source 1..9: note = Seed: YTNDKACPL
YMNDKACPW

SEQ ID NO: 79228 - protein, 9 aa, synthetic construct
  source 1..9: note = Seed: YTNDKACPL
YMNDKACPY

SEQ ID NO: 79229 - protein, 9 aa, synthetic construct
  source 1..9: note = Seed: YFNMVYMPA
YMNMVYMPL

SEQ ID NO: 79230 - protein, 9 aa, synthetic construct
  source 1..9: note = Seed: YFNMVYMPA
YMNMVYMPM

SEQ ID NO: 79231 - protein, 9 aa, synthetic construct
  source 1..9: note = Seed: YQNNVFMSE
YMNNVFMSA

SEQ ID NO: 79232 - protein, 10 aa, synthetic construct
  source 1..10: note = Seed: YQNNVFMSEA
YMNNVFMSEA

SEQ ID NO: 79233 - protein, 11 aa, synthetic construct
  source 1..11: note = Seed: YQNNVFMSEAK
YMNNVFMSEAR

SEQ ID NO: 79234 - protein, 10 aa, synthetic construct
  source 1..10: note = Seed: YQNNVFMSEA
YMNNVFMSEF

SEQ ID NO: 79235 - protein, 10 aa, synthetic construct
  source 1..10: note = Seed: YQNNVFMSEA
YMNNVFMSEI

SEQ ID NO: 79236 - protein, 10 aa, synthetic construct
  source 1..10: note = Seed: YQNNVFMSEA
YMNNVFMSEL

SEQ ID NO: 79237 - protein, 10 aa, synthetic construct
  source 1..10: note = Seed: YQNNVFMSEA
YMNNVFMSEM

SEQ ID NO: 79238 - protein, 10 aa, synthetic construct
  source 1..10: note = Seed: YQNNVFMSEA
YMNNVFMSET

SEQ ID NO: 79239 - protein, 10 aa, synthetic construct
  source 1..10: note = Seed: YQNNVFMSEA
YMNNVFMSEV

SEQ ID NO: 79240 - protein, 10 aa, synthetic construct
  source 1..10: note = Seed: YQNNVFMSEA
YMNNVFMSEY

SEQ ID NO: 79241 - protein, 9 aa, synthetic construct
  source 1..9: note = Seed: YQNNVFMSE
YMNNVFMSF

SEQ ID NO: 79242 - protein, 9 aa, synthetic construct
  source 1..9: note = Seed: YQNNVFMSE
YMNNVFMSH

SEQ ID NO: 79243 - protein, 9 aa, synthetic construct
  source 1..9: note = Seed: YQNNVFMSE
YMNNVFMSI

SEQ ID NO: 79244 - protein, 9 aa, synthetic construct
  source 1..9: note = Seed: YQNNVFMSE
YMNNVFMSL

SEQ ID NO: 79245 - protein, 9 aa, synthetic construct
  source 1..9: note = Seed: YQNNVFMSE
YMNNVFMSM

SEQ ID NO: 79246 - protein, 9 aa, synthetic construct
  source 1..9: note = Seed: YQNNVFMSE
YMNNVFMSV

SEQ ID NO: 79247 - protein, 9 aa, synthetic construct
  source 1..9: note = Seed: YQNNVFMSE
YMNNVFMSW

SEQ ID NO: 79248 - protein, 9 aa, synthetic construct
  source 1..9: note = Seed: YQNNVFMSE
YMNNVFMSY

SEQ ID NO: 79249 - protein, 9 aa, synthetic construct
  source 1..9: note = Seed: YANSVFNIC
YMNSVFNIF

SEQ ID NO: 79250 - protein, 9 aa, synthetic construct
  source 1..9: note = Seed: YANSVFNIC
YMNSVFNIL

SEQ ID NO: 79251 - protein, 9 aa, synthetic construct
  source 1..9: note = Seed: YANSVFNIC
YMNSVFNIM

SEQ ID NO: 79252 - protein, 9 aa, synthetic construct
  source 1..9: note = Seed: YANSVFNIC
YMNSVFNIY

SEQ ID NO: 79253 - protein, 9 aa, synthetic construct
  source 1..9: note = Seed: YVNTFSSTF
YMNTFSSTA

SEQ ID NO: 79254 - protein, 9 aa, synthetic construct
  source 1..9: note = Seed: YVNTFSSTF
YMNTFSSTF

SEQ ID NO: 79255 - protein, 9 aa, synthetic construct
  source 1..9: note = Seed: YVNTFSSTF
YMNTFSSTH

SEQ ID NO: 79256 - protein, 9 aa, synthetic construct
  source 1..9: note = Seed: YVNTFSSTF
YMNTFSSTI

SEQ ID NO: 79257 - protein, 9 aa, synthetic construct
  source 1..9: note = Seed: YVNTFSSTF
YMNTFSSTL

SEQ ID NO: 79258 - protein, 9 aa, synthetic construct
  source 1..9: note = Seed: YVNTFSSTF
YMNTFSSTM

SEQ ID NO: 79259 - protein, 9 aa, synthetic construct
  source 1..9: note = Seed: YVNTFSSTF
YMNTFSSTV

SEQ ID NO: 79260 - protein, 9 aa, synthetic construct
  source 1..9: note = Seed: YVNTFSSTF
YMNTFSSTW

SEQ ID NO: 79261 - protein, 9 aa, synthetic construct
  source 1..9: note = Seed: YVNTFSSTF
YMNTFSSTY

SEQ ID NO: 79262 - protein, 9 aa, synthetic construct
  source 1..9: note = Seed: YTPHTVLQA
YMPHTVLQA

SEQ ID NO: 79263 - protein, 10 aa, synthetic construct
  source 1..10: note = Seed: YTPHTVLQAV
YMPHTVLQAA

SEQ ID NO: 79264 - protein, 10 aa, synthetic construct
  source 1..10: note = Seed: YTPHTVLQAV
YMPHTVLQAI

SEQ ID NO: 79265 - protein, 10 aa, synthetic construct
  source 1..10: note = Seed: YTPHTVLQAV
YMPHTVLQAL

SEQ ID NO: 79266 - protein, 10 aa, synthetic construct
  source 1..10: note = Seed: YTPHTVLQAV
YMPHTVLQAM

SEQ ID NO: 79267 - protein, 10 aa, synthetic construct
  source 1..10: note = Seed: YTPHTVLQAV
YMPHTVLQAV

SEQ ID NO: 79268 - protein, 9 aa, synthetic construct
  source 1..9: note = Seed: YTPHTVLQA
YMPHTVLQC

SEQ ID NO: 79269 - protein, 9 aa, synthetic construct
  source 1..9: note = Seed: YTPHTVLQA
YMPHTVLQI

SEQ ID NO: 79270 - protein, 9 aa, synthetic construct
  source 1..9: note = Seed: YTPHTVLQA
YMPHTVLQL

SEQ ID NO: 79271 - protein, 9 aa, synthetic construct
  source 1..9: note = Seed: YTPHTVLQA
YMPHTVLQM

SEQ ID NO: 79272 - protein, 9 aa, synthetic construct
  source 1..9: note = Seed: YTPHTVLQA
YMPHTVLQT

SEQ ID NO: 79273 - protein, 9 aa, synthetic construct
  source 1..9: note = Seed: YTPHTVLQA
YMPHTVLQV

SEQ ID NO: 79274 - protein, 10 aa, synthetic construct
  source 1..10: note = Seed: YLPIDKCSRI
YMPIDKCSRA

SEQ ID NO: 79275 - protein, 10 aa, synthetic construct
  source 1..10: note = Seed: YLPIDKCSRI
YMPIDKCSRI

SEQ ID NO: 79276 - protein, 10 aa, synthetic construct
  source 1..10: note = Seed: YLPIDKCSRI
YMPIDKCSRL

SEQ ID NO: 79277 - protein, 10 aa, synthetic construct
  source 1..10: note = Seed: YLPIDKCSRI
YMPIDKCSRV

SEQ ID NO: 79278 - protein, 10 aa, synthetic construct
  source 1..10: note = Seed: YVPLKSATCI
YMPLKSATCL

SEQ ID NO: 79279 - protein, 9 aa, synthetic construct
  source 1..9: note = Seed: YVPLKSATC
YMPLKSATF

SEQ ID NO: 79280 - protein, 9 aa, synthetic construct
  source 1..9: note = Seed: YVPLKSATC
YMPLKSATI

SEQ ID NO: 79281 - protein, 9 aa, synthetic construct
  source 1..9: note = Seed: YVPLKSATC
YMPLKSATL

SEQ ID NO: 79282 - protein, 9 aa, synthetic construct
  source 1..9: note = Seed: YVPLKSATC
YMPLKSATM

SEQ ID NO: 79283 - protein, 9 aa, synthetic construct
  source 1..9: note = Seed: YVPLKSATC
YMPLKSATV

SEQ ID NO: 79284 - protein, 8 aa, synthetic construct
  source 1..8: note = Seed: YMPYFFTL
YMPYFFTA

SEQ ID NO: 79285 - protein, 8 aa, synthetic construct
  source 1..8: note = Seed: YMPYFFTL
YMPYFFTF

SEQ ID NO: 79286 - protein, 8 aa, synthetic construct
  source 1..8: note = Seed: YMPYFFTL
YMPYFFTI

SEQ ID NO: 79287 - protein, 9 aa, synthetic construct
  source 1..9: note = Seed: YMPYFFTLL
YMPYFFTLA

SEQ ID NO: 79288 - protein, 9 aa, synthetic construct
  source 1..9: note = Seed: YMPYFFTLL
YMPYFFTLC

SEQ ID NO: 79289 - protein, 9 aa, synthetic construct
  source 1..9: note = Seed: YMPYFFTLL
YMPYFFTLF

SEQ ID NO: 79290 - protein, 9 aa, synthetic construct
  source 1..9: note = Seed: YMPYFFTLL
YMPYFFTLI

SEQ ID NO: 79291 - protein, 10 aa, synthetic construct
  source 1..10: note = Seed: YMPYFFTLLL
YMPYFFTLLA

SEQ ID NO: 79292 - protein, 10 aa, synthetic construct
  source 1..10: note = Seed: YMPYFFTLLL
YMPYFFTLLF

SEQ ID NO: 79293 - protein, 10 aa, synthetic construct
  source 1..10: note = Seed: YMPYFFTLLL
YMPYFFTLLH

SEQ ID NO: 79294 - protein, 10 aa, synthetic construct
  source 1..10: note = Seed: YMPYFFTLLL
YMPYFFTLLI

SEQ ID NO: 79295 - protein, 11 aa, synthetic construct
  source 1..11: note = Seed: YMPYFFTLLLQ
YMPYFFTLLLA

SEQ ID NO: 79296 - protein, 11 aa, synthetic construct
  source 1..11: note = Seed: YMPYFFTLLLQ
YMPYFFTLLLI

SEQ ID NO: 79297 - protein, 11 aa, synthetic construct
  source 1..11: note = Seed: YMPYFFTLLLQ
YMPYFFTLLLL

SEQ ID NO: 79298 - protein, 11 aa, synthetic construct
  source 1..11: note = Seed: YMPYFFTLLLQ
YMPYFFTLLLV

SEQ ID NO: 79299 - protein, 10 aa, synthetic construct
  source 1..10: note = Seed: YMPYFFTLLL
YMPYFFTLLM

SEQ ID NO: 79300 - protein, 10 aa, synthetic construct
  source 1..10: note = Seed: YMPYFFTLLL
YMPYFFTLLT

SEQ ID NO: 79301 - protein, 10 aa, synthetic construct
  source 1..10: note = Seed: YMPYFFTLLL
YMPYFFTLLV

SEQ ID NO: 79302 - protein, 10 aa, synthetic construct
  source 1..10: note = Seed: YMPYFFTLLL
YMPYFFTLLW

SEQ ID NO: 79303 - protein, 10 aa, synthetic construct
  source 1..10: note = Seed: YMPYFFTLLL
YMPYFFTLLY

SEQ ID NO: 79304 - protein, 9 aa, synthetic construct
  source 1..9: note = Seed: YMPYFFTLL
YMPYFFTLM

SEQ ID NO: 79305 - protein, 9 aa, synthetic construct
  source 1..9: note = Seed: YMPYFFTLL
YMPYFFTLT

SEQ ID NO: 79306 - protein, 9 aa, synthetic construct
  source 1..9: note = Seed: YMPYFFTLL
YMPYFFTLV

SEQ ID NO: 79307 - protein, 9 aa, synthetic construct
  source 1..9: note = Seed: YMPYFFTLL
YMPYFFTLW

SEQ ID NO: 79308 - protein, 9 aa, synthetic construct
  source 1..9: note = Seed: YMPYFFTLL
YMPYFFTLY

SEQ ID NO: 79309 - protein, 8 aa, synthetic construct
  source 1..8: note = Seed: YMPYFFTL
YMPYFFTM

SEQ ID NO: 79310 - protein, 8 aa, synthetic construct
  source 1..8: note = Seed: YMPYFFTL
YMPYFFTV

SEQ ID NO: 79311 - protein, 8 aa, synthetic construct
  source 1..8: note = Seed: YMPYFFTL
YMPYFFTW

SEQ ID NO: 79312 - protein, 9 aa, synthetic construct
  source 1..9: note = Seed: YQPYRVVVL
YMPYRVVVA

SEQ ID NO: 79313 - protein, 9 aa, synthetic construct
  source 1..9: note = Seed: YQPYRVVVL
YMPYRVVVF

SEQ ID NO: 79314 - protein, 9 aa, synthetic construct
  source 1..9: note = Seed: YQPYRVVVL
YMPYRVVVI

SEQ ID NO: 79315 - protein, 9 aa, synthetic construct
  source 1..9: note = Seed: YQPYRVVVL
YMPYRVVVL

SEQ ID NO: 79316 - protein, 10 aa, synthetic construct
  source 1..10: note = Seed: YQPYRVVVLS
YMPYRVVVLA

SEQ ID NO: 79317 - protein, 10 aa, synthetic construct
  source 1..10: note = Seed: YQPYRVVVLS
YMPYRVVVLV

SEQ ID NO: 79318 - protein, 9 aa, synthetic construct
  source 1..9: note = Seed: YQPYRVVVL
YMPYRVVVM

SEQ ID NO: 79319 - protein, 9 aa, synthetic construct
  source 1..9: note = Seed: YQPYRVVVL
YMPYRVVVV

SEQ ID NO: 79320 - protein, 9 aa, synthetic construct
  source 1..9: note = Seed: YQPYRVVVL
YMPYRVVVY

SEQ ID NO: 79321 - protein, 9 aa, synthetic construct
  source 1..9: note = Seed: YKQFDTYNL
YMQFDTYNF

SEQ ID NO: 79322 - protein, 10 aa, synthetic construct
  source 1..10: note = Seed: YKQFDTYNLW
YMQFDTYNLF

SEQ ID NO: 79323 - protein, 10 aa, synthetic construct
  source 1..10: note = Seed: YKQFDTYNLW
YMQFDTYNLM

SEQ ID NO: 79324 - protein, 10 aa, synthetic construct
  source 1..10: note = Seed: YKQFDTYNLW
YMQFDTYNLW

SEQ ID NO: 79325 - protein, 10 aa, synthetic construct
  source 1..10: note = Seed: YKQFDTYNLW
YMQFDTYNLY

SEQ ID NO: 79326 - protein, 9 aa, synthetic construct
  source 1..9: note = Seed: YKQFDTYNL
YMQFDTYNM

SEQ ID NO: 79327 - protein, 9 aa, synthetic construct
  source 1..9: note = Seed: YKQFDTYNL
YMQFDTYNY

SEQ ID NO: 79328 - protein, 10 aa, synthetic construct
  source 1..10: note = Seed: YSQLMCQPIL
YMQLMCQPIF

SEQ ID NO: 79329 - protein, 11 aa, synthetic construct
  source 1..11: note = Seed: YSQLMCQPILL
YMQLMCQPILA

SEQ ID NO: 79330 - protein, 11 aa, synthetic construct
  source 1..11: note = Seed: YSQLMCQPILL
YMQLMCQPILI

SEQ ID NO: 79331 - protein, 11 aa, synthetic construct
  source 1..11: note = Seed: YSQLMCQPILL
YMQLMCQPILL

SEQ ID NO: 79332 - protein, 11 aa, synthetic construct
  source 1..11: note = Seed: YSQLMCQPILL
YMQLMCQPILM

SEQ ID NO: 79333 - protein, 11 aa, synthetic construct
  source 1..11: note = Seed: YSQLMCQPILL
YMQLMCQPILV

SEQ ID NO: 79334 - protein, 10 aa, synthetic construct
  source 1..10: note = Seed: YSQLMCQPIL
YMQLMCQPIY

SEQ ID NO: 79335 - protein, 9 aa, synthetic construct
  source 1..9: note = Seed: YSQLMCQPI
YMQLMCQPM

SEQ ID NO: 79336 - protein, 9 aa, synthetic construct
  source 1..9: note = Seed: YSQLMCQPI
YMQLMCQPV

SEQ ID NO: 79337 - protein, 9 aa, synthetic construct
  source 1..9: note = Seed: YSQLMCQPI
YMQLMCQPY

SEQ ID NO: 79338 - protein, 8 aa, synthetic construct
  source 1..8: note = Seed: YYQNNVFM
YMQNNVFF

SEQ ID NO: 79339 - protein, 9 aa, synthetic construct
  source 1..9: note = Seed: YYQNNVFMS
YMQNNVFMF

SEQ ID NO: 79340 - protein, 9 aa, synthetic construct
  source 1..9: note = Seed: YYQNNVFMS
YMQNNVFMW

SEQ ID NO: 79341 - protein, 8 aa, synthetic construct
  source 1..8: note = Seed: YLQPRTFL
YMQPRTFL

SEQ ID NO: 79342 - protein, 9 aa, synthetic construct
  source 1..9: note = Seed: YLQPRTFLL
YMQPRTFLA

SEQ ID NO: 79343 - protein, 9 aa, synthetic construct
  source 1..9: note = Seed: YLQPRTFLL
YMQPRTFLC

SEQ ID NO: 79344 - protein, 9 aa, synthetic construct
  source 1..9: note = Seed: YLQPRTFLL
YMQPRTFLF

SEQ ID NO: 79345 - protein, 9 aa, synthetic construct
  source 1..9: note = Seed: YLQPRTFLL
YMQPRTFLH

SEQ ID NO: 79346 - protein, 9 aa, synthetic construct
  source 1..9: note = Seed: YLQPRTFLL
YMQPRTFLI

SEQ ID NO: 79347 - protein, 9 aa, synthetic construct
  source 1..9: note = Seed: YLQPRTFLL
YMQPRTFLL

SEQ ID NO: 79348 - protein, 10 aa, synthetic construct
  source 1..10: note = Seed: YLQPRTFLLK
YMQPRTFLLA

SEQ ID NO: 79349 - protein, 10 aa, synthetic construct
  source 1..10: note = Seed: YLQPRTFLLK
YMQPRTFLLC

SEQ ID NO: 79350 - protein, 10 aa, synthetic construct
  source 1..10: note = Seed: YLQPRTFLLK
YMQPRTFLLD

SEQ ID NO: 79351 - protein, 10 aa, synthetic construct
  source 1..10: note = Seed: YLQPRTFLLK
YMQPRTFLLE

SEQ ID NO: 79352 - protein, 10 aa, synthetic construct
  source 1..10: note = Seed: YLQPRTFLLK
YMQPRTFLLF

SEQ ID NO: 79353 - protein, 10 aa, synthetic construct
  source 1..10: note = Seed: YLQPRTFLLK
YMQPRTFLLG

SEQ ID NO: 79354 - protein, 10 aa, synthetic construct
  source 1..10: note = Seed: YLQPRTFLLK
YMQPRTFLLH

SEQ ID NO: 79355 - protein, 10 aa, synthetic construct
  source 1..10: note = Seed: YLQPRTFLLK
YMQPRTFLLI

SEQ ID NO: 79356 - protein, 10 aa, synthetic construct
  source 1..10: note = Seed: YLQPRTFLLK
YMQPRTFLLK

SEQ ID NO: 79357 - protein, 11 aa, synthetic construct
  source 1..11: note = Seed: YLQPRTFLLKY
YMQPRTFLLKA

SEQ ID NO: 79358 - protein, 11 aa, synthetic construct
  source 1..11: note = Seed: YLQPRTFLLKY
YMQPRTFLLKI

SEQ ID NO: 79359 - protein, 11 aa, synthetic construct
  source 1..11: note = Seed: YLQPRTFLLKY
YMQPRTFLLKL

SEQ ID NO: 79360 - protein, 11 aa, synthetic construct
  source 1..11: note = Seed: YLQPRTFLLKY
YMQPRTFLLKV

SEQ ID NO: 79361 - protein, 11 aa, synthetic construct
  source 1..11: note = Seed: YLQPRTFLLKY
YMQPRTFLLKY

SEQ ID NO: 79362 - protein, 10 aa, synthetic construct
  source 1..10: note = Seed: YLQPRTFLLK
YMQPRTFLLL

SEQ ID NO: 79363 - protein, 10 aa, synthetic construct
  source 1..10: note = Seed: YLQPRTFLLK
YMQPRTFLLM

SEQ ID NO: 79364 - protein, 10 aa, synthetic construct
  source 1..10: note = Seed: YLQPRTFLLK
YMQPRTFLLN

SEQ ID NO: 79365 - protein, 10 aa, synthetic construct
  source 1..10: note = Seed: YLQPRTFLLK
YMQPRTFLLP

SEQ ID NO: 79366 - protein, 10 aa, synthetic construct
  source 1..10: note = Seed: YLQPRTFLLK
YMQPRTFLLQ

SEQ ID NO: 79367 - protein, 10 aa, synthetic construct
  source 1..10: note = Seed: YLQPRTFLLK
YMQPRTFLLR

SEQ ID NO: 79368 - protein, 10 aa, synthetic construct
  source 1..10: note = Seed: YLQPRTFLLK
YMQPRTFLLS

SEQ ID NO: 79369 - protein, 10 aa, synthetic construct
  source 1..10: note = Seed: YLQPRTFLLK
YMQPRTFLLT

SEQ ID NO: 79370 - protein, 10 aa, synthetic construct
  source 1..10: note = Seed: YLQPRTFLLK
YMQPRTFLLV

SEQ ID NO: 79371 - protein, 10 aa, synthetic construct
  source 1..10: note = Seed: YLQPRTFLLK
YMQPRTFLLW

SEQ ID NO: 79372 - protein, 10 aa, synthetic construct
  source 1..10: note = Seed: YLQPRTFLLK
YMQPRTFLLY

SEQ ID NO: 79373 - protein, 9 aa, synthetic construct
  source 1..9: note = Seed: YLQPRTFLL
YMQPRTFLM

SEQ ID NO: 79374 - protein, 9 aa, synthetic construct
  source 1..9: note = Seed: YLQPRTFLL
YMQPRTFLR

SEQ ID NO: 79375 - protein, 9 aa, synthetic construct
  source 1..9: note = Seed: YLQPRTFLL
YMQPRTFLS

SEQ ID NO: 79376 - protein, 9 aa, synthetic construct
  source 1..9: note = Seed: YLQPRTFLL
YMQPRTFLT

SEQ ID NO: 79377 - protein, 9 aa, synthetic construct
  source 1..9: note = Seed: YLQPRTFLL
YMQPRTFLV

SEQ ID NO: 79378 - protein, 9 aa, synthetic construct
  source 1..9: note = Seed: YLQPRTFLL
YMQPRTFLW

SEQ ID NO: 79379 - protein, 9 aa, synthetic construct
  source 1..9: note = Seed: YLQPRTFLL
YMQPRTFLY

SEQ ID NO: 79380 - protein, 8 aa, synthetic construct
  source 1..8: note = Seed: YLQPRTFL
YMQPRTFV

SEQ ID NO: 79381 - protein, 10 aa, synthetic construct
  source 1..10: note = Seed: YCQVHGNAHV
YMQVHGNAHA

SEQ ID NO: 79382 - protein, 10 aa, synthetic construct
  source 1..10: note = Seed: YCQVHGNAHV
YMQVHGNAHI

SEQ ID NO: 79383 - protein, 10 aa, synthetic construct
  source 1..10: note = Seed: YCQVHGNAHV
YMQVHGNAHL

SEQ ID NO: 79384 - protein, 10 aa, synthetic construct
  source 1..10: note = Seed: YCQVHGNAHV
YMQVHGNAHV

SEQ ID NO: 79385 - protein, 9 aa, synthetic construct
  source 1..9: note = Seed: YPQVNGLTS
YMQVNGLTF

SEQ ID NO: 79386 - protein, 10 aa, synthetic construct
  source 1..10: note = Seed: YPQVNGLTSI
YMQVNGLTSA

SEQ ID NO: 79387 - protein, 10 aa, synthetic construct
  source 1..10: note = Seed: YPQVNGLTSI
YMQVNGLTSF

SEQ ID NO: 79388 - protein, 10 aa, synthetic construct
  source 1..10: note = Seed: YPQVNGLTSI
YMQVNGLTSI

SEQ ID NO: 79389 - protein, 10 aa, synthetic construct
  source 1..10: note = Seed: YPQVNGLTSI
YMQVNGLTSL

SEQ ID NO: 79390 - protein, 10 aa, synthetic construct
  source 1..10: note = Seed: YPQVNGLTSI
YMQVNGLTSM

SEQ ID NO: 79391 - protein, 10 aa, synthetic construct
  source 1..10: note = Seed: YPQVNGLTSI
YMQVNGLTST

SEQ ID NO: 79392 - protein, 10 aa, synthetic construct
  source 1..10: note = Seed: YPQVNGLTSI
YMQVNGLTSV

SEQ ID NO: 79393 - protein, 10 aa, synthetic construct
  source 1..10: note = Seed: YPQVNGLTSI
YMQVNGLTSY

SEQ ID NO: 79394 - protein, 9 aa, synthetic construct
  source 1..9: note = Seed: YPQVNGLTS
YMQVNGLTY

SEQ ID NO: 79395 - protein, 9 aa, synthetic construct
  source 1..9: note = Seed: YYRARAGEA
YMRARAGEF

SEQ ID NO: 79396 - protein, 9 aa, synthetic construct
  source 1..9: note = Seed: YYRARAGEA
YMRARAGEM

SEQ ID NO: 79397 - protein, 9 aa, synthetic construct
  source 1..9: note = Seed: YKRDAPAHI
YMRDAPAHF

SEQ ID NO: 79398 - protein, 9 aa, synthetic construct
  source 1..9: note = Seed: YKRDAPAHI
YMRDAPAHL

SEQ ID NO: 79399 - protein, 9 aa, synthetic construct
  source 1..9: note = Seed: YKRDAPAHI
YMRDAPAHM

SEQ ID NO: 79400 - protein, 9 aa, synthetic construct
  source 1..9: note = Seed: YKRDAPAHI
YMRDAPAHW

SEQ ID NO: 79401 - protein, 9 aa, synthetic construct
  source 1..9: note = Seed: YKRDAPAHI
YMRDAPAHY

SEQ ID NO: 79402 - protein, 10 aa, synthetic construct
  source 1..10: note = Seed: YRRLISMMGF
YMRLISMMGF

SEQ ID NO: 79403 - protein, 10 aa, synthetic construct
  source 1..10: note = Seed: YRRLISMMGF
YMRLISMMGI

SEQ ID NO: 79404 - protein, 10 aa, synthetic construct
  source 1..10: note = Seed: YRRLISMMGF
YMRLISMMGL

SEQ ID NO: 79405 - protein, 10 aa, synthetic construct
  source 1..10: note = Seed: YRRLISMMGF
YMRLISMMGM

SEQ ID NO: 79406 - protein, 10 aa, synthetic construct
  source 1..10: note = Seed: YRRLISMMGF
YMRLISMMGY

SEQ ID NO: 79407 - protein, 9 aa, synthetic construct
  source 1..9: note = Seed: YFRLTLGVY
YMRLTLGVF

SEQ ID NO: 79408 - protein, 9 aa, synthetic construct
  source 1..9: note = Seed: YFRLTLGVY
YMRLTLGVL

SEQ ID NO: 79409 - protein, 9 aa, synthetic construct
  source 1..9: note = Seed: YFRLTLGVY
YMRLTLGVM

SEQ ID NO: 79410 - protein, 9 aa, synthetic construct
  source 1..9: note = Seed: YFRLTLGVY
YMRLTLGVW

SEQ ID NO: 79411 - protein, 9 aa, synthetic construct
  source 1..9: note = Seed: YFRLTLGVY
YMRLTLGVY

SEQ ID NO: 79412 - protein, 10 aa, synthetic construct
  source 1..10: note = Seed: YVRNLQHRLY
YMRNLQHRLF

SEQ ID NO: 79413 - protein, 10 aa, synthetic construct
  source 1..10: note = Seed: YVRNLQHRLY
YMRNLQHRLY

SEQ ID NO: 79414 - protein, 9 aa, synthetic construct
  source 1..9: note = Seed: YKRNRATRV
YMRNRATRA

SEQ ID NO: 79415 - protein, 9 aa, synthetic construct
  source 1..9: note = Seed: YKRNRATRV
YMRNRATRF

SEQ ID NO: 79416 - protein, 9 aa, synthetic construct
  source 1..9: note = Seed: YKRNRATRV
YMRNRATRI

SEQ ID NO: 79417 - protein, 9 aa, synthetic construct
  source 1..9: note = Seed: YKRNRATRV
YMRNRATRL

SEQ ID NO: 79418 - protein, 9 aa, synthetic construct
  source 1..9: note = Seed: YKRNRATRV
YMRNRATRM

SEQ ID NO: 79419 - protein, 9 aa, synthetic construct
  source 1..9: note = Seed: YKRNRATRV
YMRNRATRV

SEQ ID NO: 79420 - protein, 9 aa, synthetic construct
  source 1..9: note = Seed: YYRSLPGVF
YMRSLPGVF

SEQ ID NO: 79421 - protein, 9 aa, synthetic construct
  source 1..9: note = Seed: YYRSLPGVF
YMRSLPGVL

SEQ ID NO: 79422 - protein, 9 aa, synthetic construct
  source 1..9: note = Seed: YYRSLPGVF
YMRSLPGVM

SEQ ID NO: 79423 - protein, 9 aa, synthetic construct
  source 1..9: note = Seed: YYRSLPGVF
YMRSLPGVW

SEQ ID NO: 79424 - protein, 9 aa, synthetic construct
  source 1..9: note = Seed: YYRSLPGVF
YMRSLPGVY

SEQ ID NO: 79425 - protein, 9 aa, synthetic construct
  source 1..9: note = Seed: YYRYNLPTM
YMRYNLPTF

SEQ ID NO: 79426 - protein, 9 aa, synthetic construct
  source 1..9: note = Seed: YYRYNLPTM
YMRYNLPTH

SEQ ID NO: 79427 - protein, 9 aa, synthetic construct
  source 1..9: note = Seed: YYRYNLPTM
YMRYNLPTK

SEQ ID NO: 79428 - protein, 9 aa, synthetic construct
  source 1..9: note = Seed: YYRYNLPTM
YMRYNLPTL

SEQ ID NO: 79429 - protein, 9 aa, synthetic construct
  source 1..9: note = Seed: YYRYNLPTM
YMRYNLPTM

SEQ ID NO: 79430 - protein, 10 aa, synthetic construct
  source 1..10: note = Seed: YYRYNLPTMC
YMRYNLPTMF

SEQ ID NO: 79431 - protein, 10 aa, synthetic construct
  source 1..10: note = Seed: YYRYNLPTMC
YMRYNLPTMI

SEQ ID NO: 79432 - protein, 10 aa, synthetic construct
  source 1..10: note = Seed: YYRYNLPTMC
YMRYNLPTML

SEQ ID NO: 79433 - protein, 10 aa, synthetic construct
  source 1..10: note = Seed: YYRYNLPTMC
YMRYNLPTMM

SEQ ID NO: 79434 - protein, 10 aa, synthetic construct
  source 1..10: note = Seed: YYRYNLPTMC
YMRYNLPTMV

SEQ ID NO: 79435 - protein, 9 aa, synthetic construct
  source 1..9: note = Seed: YYRYNLPTM
YMRYNLPTV

SEQ ID NO: 79436 - protein, 9 aa, synthetic construct
  source 1..9: note = Seed: YYRYNLPTM
YMRYNLPTW

SEQ ID NO: 79437 - protein, 9 aa, synthetic construct
  source 1..9: note = Seed: YYRYNLPTM
YMRYNLPTY

SEQ ID NO: 79438 - protein, 9 aa, synthetic construct
  source 1..9: note = Seed: YSRYRIGNY
YMRYRIGNF

SEQ ID NO: 79439 - protein, 9 aa, synthetic construct
  source 1..9: note = Seed: YSRYRIGNY
YMRYRIGNM

SEQ ID NO: 79440 - protein, 9 aa, synthetic construct
  source 1..9: note = Seed: YSRYRIGNY
YMRYRIGNY

SEQ ID NO: 79441 - protein, 10 aa, synthetic construct
  source 1..10: note = Seed: YSRYRIGNYK
YMRYRIGNYF

SEQ ID NO: 79442 - protein, 10 aa, synthetic construct
  source 1..10: note = Seed: YSRYRIGNYK
YMRYRIGNYK

SEQ ID NO: 79443 - protein, 11 aa, synthetic construct
  source 1..11: note = Seed: YSRYRIGNYKL
YMRYRIGNYKF

SEQ ID NO: 79444 - protein, 10 aa, synthetic construct
  source 1..10: note = Seed: YSRYRIGNYK
YMRYRIGNYL

SEQ ID NO: 79445 - protein, 10 aa, synthetic construct
  source 1..10: note = Seed: YSRYRIGNYK
YMRYRIGNYM

SEQ ID NO: 79446 - protein, 10 aa, synthetic construct
  source 1..10: note = Seed: YSRYRIGNYK
YMRYRIGNYR

SEQ ID NO: 79447 - protein, 9 aa, synthetic construct
  source 1..9: note = Seed: YSSANNCTF
YMSANNCTF

SEQ ID NO: 79448 - protein, 11 aa, synthetic construct
  source 1..11: note = Seed: YSSANNCTFEY
YMSANNCTFEF

SEQ ID NO: 79449 - protein, 11 aa, synthetic construct
  source 1..11: note = Seed: YSSANNCTFEY
YMSANNCTFEW

SEQ ID NO: 79450 - protein, 11 aa, synthetic construct
  source 1..11: note = Seed: YSSANNCTFEY
YMSANNCTFEY

SEQ ID NO: 79451 - protein, 9 aa, synthetic construct
  source 1..9: note = Seed: YSSANNCTF
YMSANNCTI

SEQ ID NO: 79452 - protein, 9 aa, synthetic construct
  source 1..9: note = Seed: YSSANNCTF
YMSANNCTL

SEQ ID NO: 79453 - protein, 9 aa, synthetic construct
  source 1..9: note = Seed: YSSANNCTF
YMSANNCTM

SEQ ID NO: 79454 - protein, 9 aa, synthetic construct
  source 1..9: note = Seed: YSSANNCTF
YMSANNCTW

SEQ ID NO: 79455 - protein, 9 aa, synthetic construct
  source 1..9: note = Seed: YSSANNCTF
YMSANNCTY

SEQ ID NO: 79456 - protein, 9 aa, synthetic construct
  source 1..9: note = Seed: YNSASFSTF
YMSASFSTA

SEQ ID NO: 79457 - protein, 9 aa, synthetic construct
  source 1..9: note = Seed: YNSASFSTF
YMSASFSTF

SEQ ID NO: 79458 - protein, 10 aa, synthetic construct
  source 1..10: note = Seed: YNSASFSTFK
YMSASFSTFK

SEQ ID NO: 79459 - protein, 10 aa, synthetic construct
  source 1..10: note = Seed: YNSASFSTFK
YMSASFSTFR

SEQ ID NO: 79460 - protein, 9 aa, synthetic construct
  source 1..9: note = Seed: YNSASFSTF
YMSASFSTH

SEQ ID NO: 79461 - protein, 9 aa, synthetic construct
  source 1..9: note = Seed: YNSASFSTF
YMSASFSTI

SEQ ID NO: 79462 - protein, 9 aa, synthetic construct
  source 1..9: note = Seed: YNSASFSTF
YMSASFSTL

SEQ ID NO: 79463 - protein, 9 aa, synthetic construct
  source 1..9: note = Seed: YNSASFSTF
YMSASFSTM

SEQ ID NO: 79464 - protein, 9 aa, synthetic construct
  source 1..9: note = Seed: YNSASFSTF
YMSASFSTV

SEQ ID NO: 79465 - protein, 9 aa, synthetic construct
  source 1..9: note = Seed: YNSASFSTF
YMSASFSTW

SEQ ID NO: 79466 - protein, 9 aa, synthetic construct
  source 1..9: note = Seed: YNSASFSTF
YMSASFSTY

SEQ ID NO: 79467 - protein, 9 aa, synthetic construct
  source 1..9: note = Seed: YASAVVLLI
YMSAVVLLA

SEQ ID NO: 79468 - protein, 9 aa, synthetic construct
  source 1..9: note = Seed: YASAVVLLI
YMSAVVLLC

SEQ ID NO: 79469 - protein, 9 aa, synthetic construct
  source 1..9: note = Seed: YASAVVLLI
YMSAVVLLF

SEQ ID NO: 79470 - protein, 9 aa, synthetic construct
  source 1..9: note = Seed: YASAVVLLI
YMSAVVLLG

SEQ ID NO: 79471 - protein, 9 aa, synthetic construct
  source 1..9: note = Seed: YASAVVLLI
YMSAVVLLI

SEQ ID NO: 79472 - protein, 10 aa, synthetic construct
  source 1..10: note = Seed: YASAVVLLIL
YMSAVVLLIA

SEQ ID NO: 79473 - protein, 10 aa, synthetic construct
  source 1..10: note = Seed: YASAVVLLIL
YMSAVVLLIC

SEQ ID NO: 79474 - protein, 10 aa, synthetic construct
  source 1..10: note = Seed: YASAVVLLIL
YMSAVVLLID

SEQ ID NO: 79475 - protein, 10 aa, synthetic construct
  source 1..10: note = Seed: YASAVVLLIL
YMSAVVLLIE

SEQ ID NO: 79476 - protein, 10 aa, synthetic construct
  source 1..10: note = Seed: YASAVVLLIL
YMSAVVLLIF

SEQ ID NO: 79477 - protein, 10 aa, synthetic construct
  source 1..10: note = Seed: YASAVVLLIL
YMSAVVLLIG

SEQ ID NO: 79478 - protein, 10 aa, synthetic construct
  source 1..10: note = Seed: YASAVVLLIL
YMSAVVLLIH

SEQ ID NO: 79479 - protein, 10 aa, synthetic construct
  source 1..10: note = Seed: YASAVVLLIL
YMSAVVLLII

SEQ ID NO: 79480 - protein, 10 aa, synthetic construct
  source 1..10: note = Seed: YASAVVLLIL
YMSAVVLLIK

SEQ ID NO: 79481 - protein, 10 aa, synthetic construct
  source 1..10: note = Seed: YASAVVLLIL
YMSAVVLLIL

SEQ ID NO: 79482 - protein, 10 aa, synthetic construct
  source 1..10: note = Seed: YASAVVLLIL
YMSAVVLLIM

SEQ ID NO: 79483 - protein, 10 aa, synthetic construct
  source 1..10: note = Seed: YASAVVLLIL
YMSAVVLLIN

SEQ ID NO: 79484 - protein, 10 aa, synthetic construct
  source 1..10: note = Seed: YASAVVLLIL
YMSAVVLLIP

SEQ ID NO: 79485 - protein, 10 aa, synthetic construct
  source 1..10: note = Seed: YASAVVLLIL
YMSAVVLLIQ

SEQ ID NO: 79486 - protein, 10 aa, synthetic construct
  source 1..10: note = Seed: YASAVVLLIL
YMSAVVLLIR

SEQ ID NO: 79487 - protein, 10 aa, synthetic construct
  source 1..10: note = Seed: YASAVVLLIL
YMSAVVLLIS

SEQ ID NO: 79488 - protein, 10 aa, synthetic construct
  source 1..10: note = Seed: YASAVVLLIL
YMSAVVLLIT

SEQ ID NO: 79489 - protein, 10 aa, synthetic construct
  source 1..10: note = Seed: YASAVVLLIL
YMSAVVLLIV

SEQ ID NO: 79490 - protein, 10 aa, synthetic construct
  source 1..10: note = Seed: YASAVVLLIL
YMSAVVLLIW

SEQ ID NO: 79491 - protein, 10 aa, synthetic construct
  source 1..10: note = Seed: YASAVVLLIL
YMSAVVLLIY

SEQ ID NO: 79492 - protein, 9 aa, synthetic construct
  source 1..9: note = Seed: YASAVVLLI
YMSAVVLLL

SEQ ID NO: 79493 - protein, 9 aa, synthetic construct
  source 1..9: note = Seed: YASAVVLLI
YMSAVVLLM

SEQ ID NO: 79494 - protein, 9 aa, synthetic construct
  source 1..9: note = Seed: YASAVVLLI
YMSAVVLLS

SEQ ID NO: 79495 - protein, 9 aa, synthetic construct
  source 1..9: note = Seed: YASAVVLLI
YMSAVVLLT

SEQ ID NO: 79496 - protein, 9 aa, synthetic construct
  source 1..9: note = Seed: YASAVVLLI
YMSAVVLLV

SEQ ID NO: 79497 - protein, 9 aa, synthetic construct
  source 1..9: note = Seed: YASAVVLLI
YMSAVVLLW

SEQ ID NO: 79498 - protein, 9 aa, synthetic construct
  source 1..9: note = Seed: YASAVVLLI
YMSAVVLLY

SEQ ID NO: 79499 - protein, 8 aa, synthetic construct
  source 1..8: note = Seed: YYSLLMPI
YMSLLMPF

SEQ ID NO: 79500 - protein, 11 aa, synthetic construct
  source 1..11: note = Seed: YYSLLMPILTL
YMSLLMPILTI

SEQ ID NO: 79501 - protein, 11 aa, synthetic construct
  source 1..11: note = Seed: YYSLLMPILTL
YMSLLMPILTL

SEQ ID NO: 79502 - protein, 11 aa, synthetic construct
  source 1..11: note = Seed: YYSLLMPILTL
YMSLLMPILTV

SEQ ID NO: 79503 - protein, 11 aa, synthetic construct
  source 1..11: note = Seed: YRSLPGVFCGV
YMSLPGVFCGA

SEQ ID NO: 79504 - protein, 11 aa, synthetic construct
  source 1..11: note = Seed: YRSLPGVFCGV
YMSLPGVFCGI

SEQ ID NO: 79505 - protein, 11 aa, synthetic construct
  source 1..11: note = Seed: YRSLPGVFCGV
YMSLPGVFCGL

SEQ ID NO: 79506 - protein, 11 aa, synthetic construct
  source 1..11: note = Seed: YRSLPGVFCGV
YMSLPGVFCGV

SEQ ID NO: 79507 - protein, 10 aa, synthetic construct
  source 1..10: note = Seed: YESLRPDTRY
YMSLRPDTRF

SEQ ID NO: 79508 - protein, 10 aa, synthetic construct
  source 1..10: note = Seed: YESLRPDTRY
YMSLRPDTRW

SEQ ID NO: 79509 - protein, 11 aa, synthetic construct
  source 1..11: note = Seed: YESLRPDTRYV
YMSLRPDTRYV

SEQ ID NO: 79510 - protein, 9 aa, synthetic construct
  source 1..9: note = Seed: YTSNPTTFH
YMSNPTTFF

SEQ ID NO: 79511 - protein, 10 aa, synthetic construct
  source 1..10: note = Seed: YTSNPTTFHL
YMSNPTTFHA

SEQ ID NO: 79512 - protein, 10 aa, synthetic construct
  source 1..10: note = Seed: YTSNPTTFHL
YMSNPTTFHF

SEQ ID NO: 79513 - protein, 10 aa, synthetic construct
  source 1..10: note = Seed: YTSNPTTFHL
YMSNPTTFHI

SEQ ID NO: 79514 - protein, 10 aa, synthetic construct
  source 1..10: note = Seed: YTSNPTTFHL
YMSNPTTFHL

SEQ ID NO: 79515 - protein, 10 aa, synthetic construct
  source 1..10: note = Seed: YTSNPTTFHL
YMSNPTTFHM

SEQ ID NO: 79516 - protein, 10 aa, synthetic construct
  source 1..10: note = Seed: YTSNPTTFHL
YMSNPTTFHT

SEQ ID NO: 79517 - protein, 10 aa, synthetic construct
  source 1..10: note = Seed: YTSNPTTFHL
YMSNPTTFHV

SEQ ID NO: 79518 - protein, 10 aa, synthetic construct
  source 1..10: note = Seed: YTSNPTTFHL
YMSNPTTFHW

SEQ ID NO: 79519 - protein, 10 aa, synthetic construct
  source 1..10: note = Seed: YTSNPTTFHL
YMSNPTTFHY

SEQ ID NO: 79520 - protein, 9 aa, synthetic construct
  source 1..9: note = Seed: YTSNPTTFH
YMSNPTTFK

SEQ ID NO: 79521 - protein, 9 aa, synthetic construct
  source 1..9: note = Seed: YTSNPTTFH
YMSNPTTFL

SEQ ID NO: 79522 - protein, 9 aa, synthetic construct
  source 1..9: note = Seed: YTSNPTTFH
YMSNPTTFM

SEQ ID NO: 79523 - protein, 9 aa, synthetic construct
  source 1..9: note = Seed: YTSNPTTFH
YMSNPTTFR

SEQ ID NO: 79524 - protein, 9 aa, synthetic construct
  source 1..9: note = Seed: YTSNPTTFH
YMSNPTTFY

SEQ ID NO: 79525 - protein, 10 aa, synthetic construct
  source 1..10: note = Seed: YLTFYLTNDV
YMTFYLTNDA

SEQ ID NO: 79526 - protein, 10 aa, synthetic construct
  source 1..10: note = Seed: YLTFYLTNDV
YMTFYLTNDI

SEQ ID NO: 79527 - protein, 10 aa, synthetic construct
  source 1..10: note = Seed: YLTFYLTNDV
YMTFYLTNDL

SEQ ID NO: 79528 - protein, 10 aa, synthetic construct
  source 1..10: note = Seed: YLTFYLTNDV
YMTFYLTNDM

SEQ ID NO: 79529 - protein, 10 aa, synthetic construct
  source 1..10: note = Seed: YLTFYLTNDV
YMTFYLTNDV

SEQ ID NO: 79530 - protein, 11 aa, synthetic construct
  source 1..11: note = Seed: YLTFYLTNDVS
YMTFYLTNDVV

SEQ ID NO: 79531 - protein, 9 aa, synthetic construct
  source 1..9: note = Seed: YITGGVVQL
YMTGGVVQA

SEQ ID NO: 79532 - protein, 9 aa, synthetic construct
  source 1..9: note = Seed: YITGGVVQL
YMTGGVVQC

SEQ ID NO: 79533 - protein, 9 aa, synthetic construct
  source 1..9: note = Seed: YITGGVVQL
YMTGGVVQF

SEQ ID NO: 79534 - protein, 9 aa, synthetic construct
  source 1..9: note = Seed: YITGGVVQL
YMTGGVVQI

SEQ ID NO: 79535 - protein, 9 aa, synthetic construct
  source 1..9: note = Seed: YITGGVVQL
YMTGGVVQL

SEQ ID NO: 79536 - protein, 9 aa, synthetic construct
  source 1..9: note = Seed: YITGGVVQL
YMTGGVVQM

SEQ ID NO: 79537 - protein, 9 aa, synthetic construct
  source 1..9: note = Seed: YITGGVVQL
YMTGGVVQT

SEQ ID NO: 79538 - protein, 9 aa, synthetic construct
  source 1..9: note = Seed: YITGGVVQL
YMTGGVVQV

SEQ ID NO: 79539 - protein, 9 aa, synthetic construct
  source 1..9: note = Seed: YITGGVVQL
YMTGGVVQY

SEQ ID NO: 79540 - protein, 8 aa, synthetic construct
  source 1..8: note = Seed: YSTGSNVF
YMTGSNVF

SEQ ID NO: 79541 - protein, 8 aa, synthetic construct
  source 1..8: note = Seed: YSTGSNVF
YMTGSNVY

SEQ ID NO: 79542 - protein, 9 aa, synthetic construct
  source 1..9: note = Seed: YLTNDVSFL
YMTNDVSFA

SEQ ID NO: 79543 - protein, 9 aa, synthetic construct
  source 1..9: note = Seed: YLTNDVSFL
YMTNDVSFF

SEQ ID NO: 79544 - protein, 9 aa, synthetic construct
  source 1..9: note = Seed: YLTNDVSFL
YMTNDVSFI

SEQ ID NO: 79545 - protein, 9 aa, synthetic construct
  source 1..9: note = Seed: YLTNDVSFL
YMTNDVSFL

SEQ ID NO: 79546 - protein, 10 aa, synthetic construct
  source 1..10: note = Seed: YLTNDVSFLA
YMTNDVSFLA

SEQ ID NO: 79547 - protein, 11 aa, synthetic construct
  source 1..11: note = Seed: YLTNDVSFLAH
YMTNDVSFLAI

SEQ ID NO: 79548 - protein, 11 aa, synthetic construct
  source 1..11: note = Seed: YLTNDVSFLAH
YMTNDVSFLAL

SEQ ID NO: 79549 - protein, 11 aa, synthetic construct
  source 1..11: note = Seed: YLTNDVSFLAH
YMTNDVSFLAV

SEQ ID NO: 79550 - protein, 10 aa, synthetic construct
  source 1..10: note = Seed: YLTNDVSFLA
YMTNDVSFLC

SEQ ID NO: 79551 - protein, 10 aa, synthetic construct
  source 1..10: note = Seed: YLTNDVSFLA
YMTNDVSFLD

SEQ ID NO: 79552 - protein, 10 aa, synthetic construct
  source 1..10: note = Seed: YLTNDVSFLA
YMTNDVSFLE

SEQ ID NO: 79553 - protein, 10 aa, synthetic construct
  source 1..10: note = Seed: YLTNDVSFLA
YMTNDVSFLF

SEQ ID NO: 79554 - protein, 10 aa, synthetic construct
  source 1..10: note = Seed: YLTNDVSFLA
YMTNDVSFLG

SEQ ID NO: 79555 - protein, 10 aa, synthetic construct
  source 1..10: note = Seed: YLTNDVSFLA
YMTNDVSFLH

SEQ ID NO: 79556 - protein, 10 aa, synthetic construct
  source 1..10: note = Seed: YLTNDVSFLA
YMTNDVSFLI

SEQ ID NO: 79557 - protein, 10 aa, synthetic construct
  source 1..10: note = Seed: YLTNDVSFLA
YMTNDVSFLK

SEQ ID NO: 79558 - protein, 10 aa, synthetic construct
  source 1..10: note = Seed: YLTNDVSFLA
YMTNDVSFLL

SEQ ID NO: 79559 - protein, 10 aa, synthetic construct
  source 1..10: note = Seed: YLTNDVSFLA
YMTNDVSFLM

SEQ ID NO: 79560 - protein, 10 aa, synthetic construct
  source 1..10: note = Seed: YLTNDVSFLA
YMTNDVSFLN

SEQ ID NO: 79561 - protein, 10 aa, synthetic construct
  source 1..10: note = Seed: YLTNDVSFLA
YMTNDVSFLP

SEQ ID NO: 79562 - protein, 10 aa, synthetic construct
  source 1..10: note = Seed: YLTNDVSFLA
YMTNDVSFLQ

SEQ ID NO: 79563 - protein, 10 aa, synthetic construct
  source 1..10: note = Seed: YLTNDVSFLA
YMTNDVSFLR

SEQ ID NO: 79564 - protein, 10 aa, synthetic construct
  source 1..10: note = Seed: YLTNDVSFLA
YMTNDVSFLS

SEQ ID NO: 79565 - protein, 10 aa, synthetic construct
  source 1..10: note = Seed: YLTNDVSFLA
YMTNDVSFLT

SEQ ID NO: 79566 - protein, 10 aa, synthetic construct
  source 1..10: note = Seed: YLTNDVSFLA
YMTNDVSFLV

SEQ ID NO: 79567 - protein, 10 aa, synthetic construct
  source 1..10: note = Seed: YLTNDVSFLA
YMTNDVSFLW

SEQ ID NO: 79568 - protein, 10 aa, synthetic construct
  source 1..10: note = Seed: YLTNDVSFLA
YMTNDVSFLY

SEQ ID NO: 79569 - protein, 9 aa, synthetic construct
  source 1..9: note = Seed: YLTNDVSFL
YMTNDVSFM

SEQ ID NO: 79570 - protein, 9 aa, synthetic construct
  source 1..9: note = Seed: YLTNDVSFL
YMTNDVSFT

SEQ ID NO: 79571 - protein, 9 aa, synthetic construct
  source 1..9: note = Seed: YLTNDVSFL
YMTNDVSFV

SEQ ID NO: 79572 - protein, 9 aa, synthetic construct
  source 1..9: note = Seed: YLTNDVSFL
YMTNDVSFY

SEQ ID NO: 79573 - protein, 9 aa, synthetic construct
  source 1..9: note = Seed: YVTQQLIRA
YMTQQLIRL

SEQ ID NO: 79574 - protein, 9 aa, synthetic construct
  source 1..9: note = Seed: YVTQQLIRA
YMTQQLIRV

SEQ ID NO: 79575 - protein, 9 aa, synthetic construct
  source 1..9: note = Seed: YFTSDYYQL
YMTSDYYQF

SEQ ID NO: 79576 - protein, 10 aa, synthetic construct
  source 1..10: note = Seed: YFTSDYYQLY
YMTSDYYQLF

SEQ ID NO: 79577 - protein, 10 aa, synthetic construct
  source 1..10: note = Seed: YFTSDYYQLY
YMTSDYYQLK

SEQ ID NO: 79578 - protein, 10 aa, synthetic construct
  source 1..10: note = Seed: YFTSDYYQLY
YMTSDYYQLR

SEQ ID NO: 79579 - protein, 10 aa, synthetic construct
  source 1..10: note = Seed: YFTSDYYQLY
YMTSDYYQLW

SEQ ID NO: 79580 - protein, 10 aa, synthetic construct
  source 1..10: note = Seed: YFTSDYYQLY
YMTSDYYQLY

SEQ ID NO: 79581 - protein, 11 aa, synthetic construct
  source 1..11: note = Seed: YFTSDYYQLYS
YMTSDYYQLYY

SEQ ID NO: 79582 - protein, 9 aa, synthetic construct
  source 1..9: note = Seed: YFTSDYYQL
YMTSDYYQW

SEQ ID NO: 79583 - protein, 9 aa, synthetic construct
  source 1..9: note = Seed: YYTSNPTTF
YMTSNPTTF

SEQ ID NO: 79584 - protein, 11 aa, synthetic construct
  source 1..11: note = Seed: YYTSNPTTFHL
YMTSNPTTFHF

SEQ ID NO: 79585 - protein, 11 aa, synthetic construct
  source 1..11: note = Seed: YYTSNPTTFHL
YMTSNPTTFHW

SEQ ID NO: 79586 - protein, 9 aa, synthetic construct
  source 1..9: note = Seed: YYTSNPTTF
YMTSNPTTL

SEQ ID NO: 79587 - protein, 9 aa, synthetic construct
  source 1..9: note = Seed: YYTSNPTTF
YMTSNPTTM

SEQ ID NO: 79588 - protein, 9 aa, synthetic construct
  source 1..9: note = Seed: YYTSNPTTF
YMTSNPTTY

SEQ ID NO: 79589 - protein, 10 aa, synthetic construct
  source 1..10: note = Seed: YTTTIKPVTY
YMTTIKPVTF

SEQ ID NO: 79590 - protein, 10 aa, synthetic construct
  source 1..10: note = Seed: YTTTIKPVTY
YMTTIKPVTW

SEQ ID NO: 79591 - protein, 10 aa, synthetic construct
  source 1..10: note = Seed: YTTTIKPVTY
YMTTIKPVTY

SEQ ID NO: 79592 - protein, 11 aa, synthetic construct
  source 1..11: note = Seed: YTTTIKPVTYK
YMTTIKPVTYR

SEQ ID NO: 79593 - protein, 10 aa, synthetic construct
  source 1..10: note = Seed: YITTYPGQGL
YMTTYPGQGI

SEQ ID NO: 79594 - protein, 10 aa, synthetic construct
  source 1..10: note = Seed: YITTYPGQGL
YMTTYPGQGL

SEQ ID NO: 79595 - protein, 10 aa, synthetic construct
  source 1..10: note = Seed: YITTYPGQGL
YMTTYPGQGV

SEQ ID NO: 79596 - protein, 8 aa, synthetic construct
  source 1..8: note = Seed: YIVDSVTV
YMVDSVTV

SEQ ID NO: 79597 - protein, 9 aa, synthetic construct
  source 1..9: note = Seed: YTVEEAKTV
YMVEEAKTA

SEQ ID NO: 79598 - protein, 9 aa, synthetic construct
  source 1..9: note = Seed: YTVEEAKTV
YMVEEAKTF

SEQ ID NO: 79599 - protein, 9 aa, synthetic construct
  source 1..9: note = Seed: YTVEEAKTV
YMVEEAKTI

SEQ ID NO: 79600 - protein, 9 aa, synthetic construct
  source 1..9: note = Seed: YTVEEAKTV
YMVEEAKTL

SEQ ID NO: 79601 - protein, 9 aa, synthetic construct
  source 1..9: note = Seed: YTVEEAKTV
YMVEEAKTM

SEQ ID NO: 79602 - protein, 9 aa, synthetic construct
  source 1..9: note = Seed: YTVEEAKTV
YMVEEAKTV

SEQ ID NO: 79603 - protein, 9 aa, synthetic construct
  source 1..9: note = Seed: YTVEEAKTV
YMVEEAKTY

SEQ ID NO: 79604 - protein, 9 aa, synthetic construct
  source 1..9: note = Seed: YTVELGTEV
YMVELGTEA

SEQ ID NO: 79605 - protein, 9 aa, synthetic construct
  source 1..9: note = Seed: YTVELGTEV
YMVELGTEF

SEQ ID NO: 79606 - protein, 9 aa, synthetic construct
  source 1..9: note = Seed: YTVELGTEV
YMVELGTEI

SEQ ID NO: 79607 - protein, 9 aa, synthetic construct
  source 1..9: note = Seed: YTVELGTEV
YMVELGTEL

SEQ ID NO: 79608 - protein, 9 aa, synthetic construct
  source 1..9: note = Seed: YTVELGTEV
YMVELGTEM

SEQ ID NO: 79609 - protein, 9 aa, synthetic construct
  source 1..9: note = Seed: YTVELGTEV
YMVELGTET

SEQ ID NO: 79610 - protein, 9 aa, synthetic construct
  source 1..9: note = Seed: YTVELGTEV
YMVELGTEV

SEQ ID NO: 79611 - protein, 9 aa, synthetic construct
  source 1..9: note = Seed: YTVELGTEV
YMVELGTEY

SEQ ID NO: 79612 - protein, 9 aa, synthetic construct
  source 1..9: note = Seed: YYVGYLQPR
YMVGYLQPF

SEQ ID NO: 79613 - protein, 9 aa, synthetic construct
  source 1..9: note = Seed: YYVGYLQPR
YMVGYLQPL

SEQ ID NO: 79614 - protein, 9 aa, synthetic construct
  source 1..9: note = Seed: YYVGYLQPR
YMVGYLQPM

SEQ ID NO: 79615 - protein, 9 aa, synthetic construct
  source 1..9: note = Seed: YYVGYLQPR
YMVGYLQPR

SEQ ID NO: 79616 - protein, 9 aa, synthetic construct
  source 1..9: note = Seed: YYVGYLQPR
YMVGYLQPY

SEQ ID NO: 79617 - protein, 9 aa, synthetic construct
  source 1..9: note = Seed: YFVLTSHTV
YMVLTSHTA

SEQ ID NO: 79618 - protein, 9 aa, synthetic construct
  source 1..9: note = Seed: YFVLTSHTV
YMVLTSHTF

SEQ ID NO: 79619 - protein, 9 aa, synthetic construct
  source 1..9: note = Seed: YFVLTSHTV
YMVLTSHTI

SEQ ID NO: 79620 - protein, 9 aa, synthetic construct
  source 1..9: note = Seed: YFVLTSHTV
YMVLTSHTL

SEQ ID NO: 79621 - protein, 9 aa, synthetic construct
  source 1..9: note = Seed: YFVLTSHTV
YMVLTSHTM

SEQ ID NO: 79622 - protein, 9 aa, synthetic construct
  source 1..9: note = Seed: YFVLTSHTV
YMVLTSHTV

SEQ ID NO: 79623 - protein, 9 aa, synthetic construct
  source 1..9: note = Seed: YFVLTSHTV
YMVLTSHTW

SEQ ID NO: 79624 - protein, 9 aa, synthetic construct
  source 1..9: note = Seed: YFVLTSHTV
YMVLTSHTY

SEQ ID NO: 79625 - protein, 9 aa, synthetic construct
  source 1..9: note = Seed: YQVNGYPNM
YMVNGYPNA

SEQ ID NO: 79626 - protein, 9 aa, synthetic construct
  source 1..9: note = Seed: YQVNGYPNM
YMVNGYPNC

SEQ ID NO: 79627 - protein, 9 aa, synthetic construct
  source 1..9: note = Seed: YQVNGYPNM
YMVNGYPNF

SEQ ID NO: 79628 - protein, 9 aa, synthetic construct
  source 1..9: note = Seed: YQVNGYPNM
YMVNGYPNI

SEQ ID NO: 79629 - protein, 9 aa, synthetic construct
  source 1..9: note = Seed: YQVNGYPNM
YMVNGYPNL

SEQ ID NO: 79630 - protein, 9 aa, synthetic construct
  source 1..9: note = Seed: YQVNGYPNM
YMVNGYPNM

SEQ ID NO: 79631 - protein, 10 aa, synthetic construct
  source 1..10: note = Seed: YQVNGYPNMF
YMVNGYPNMF

SEQ ID NO: 79632 - protein, 11 aa, synthetic construct
  source 1..11: note = Seed: YQVNGYPNMFI
YMVNGYPNMFA

SEQ ID NO: 79633 - protein, 11 aa, synthetic construct
  source 1..11: note = Seed: YQVNGYPNMFI
YMVNGYPNMFI

SEQ ID NO: 79634 - protein, 11 aa, synthetic construct
  source 1..11: note = Seed: YQVNGYPNMFI
YMVNGYPNMFL

SEQ ID NO: 79635 - protein, 11 aa, synthetic construct
  source 1..11: note = Seed: YQVNGYPNMFI
YMVNGYPNMFM

SEQ ID NO: 79636 - protein, 11 aa, synthetic construct
  source 1..11: note = Seed: YQVNGYPNMFI
YMVNGYPNMFV

SEQ ID NO: 79637 - protein, 10 aa, synthetic construct
  source 1..10: note = Seed: YQVNGYPNMF
YMVNGYPNMV

SEQ ID NO: 79638 - protein, 10 aa, synthetic construct
  source 1..10: note = Seed: YQVNGYPNMF
YMVNGYPNMY

SEQ ID NO: 79639 - protein, 9 aa, synthetic construct
  source 1..9: note = Seed: YQVNGYPNM
YMVNGYPNT

SEQ ID NO: 79640 - protein, 9 aa, synthetic construct
  source 1..9: note = Seed: YQVNGYPNM
YMVNGYPNV

SEQ ID NO: 79641 - protein, 9 aa, synthetic construct
  source 1..9: note = Seed: YQVNGYPNM
YMVNGYPNY

SEQ ID NO: 79642 - protein, 8 aa, synthetic construct
  source 1..8: note = Seed: YLVSTQEF
YMVSTQEF

SEQ ID NO: 79643 - protein, 9 aa, synthetic construct
  source 1..9: note = Seed: YLVSTQEFR
YMVSTQEFK

SEQ ID NO: 79644 - protein, 9 aa, synthetic construct
  source 1..9: note = Seed: YLVSTQEFR
YMVSTQEFR

SEQ ID NO: 79645 - protein, 10 aa, synthetic construct
  source 1..10: note = Seed: YLVSTQEFRY
YMVSTQEFRF

SEQ ID NO: 79646 - protein, 10 aa, synthetic construct
  source 1..10: note = Seed: YLVSTQEFRY
YMVSTQEFRY

SEQ ID NO: 79647 - protein, 11 aa, synthetic construct
  source 1..11: note = Seed: YLVSTQEFRYM
YMVSTQEFRYI

SEQ ID NO: 79648 - protein, 11 aa, synthetic construct
  source 1..11: note = Seed: YLVSTQEFRYM
YMVSTQEFRYL

SEQ ID NO: 79649 - protein, 11 aa, synthetic construct
  source 1..11: note = Seed: YLVSTQEFRYM
YMVSTQEFRYV

SEQ ID NO: 79650 - protein, 8 aa, synthetic construct
  source 1..8: note = Seed: YLVSTQEF
YMVSTQEY

SEQ ID NO: 79651 - protein, 9 aa, synthetic construct
  source 1..9: note = Seed: YNVTQAFGR
YMVTQAFGR

SEQ ID NO: 79652 - protein, 9 aa, synthetic construct
  source 1..9: note = Seed: YFVVKRHTF
YMVVKRHTA

SEQ ID NO: 79653 - protein, 9 aa, synthetic construct
  source 1..9: note = Seed: YFVVKRHTF
YMVVKRHTF

SEQ ID NO: 79654 - protein, 9 aa, synthetic construct
  source 1..9: note = Seed: YFVVKRHTF
YMVVKRHTI

SEQ ID NO: 79655 - protein, 9 aa, synthetic construct
  source 1..9: note = Seed: YFVVKRHTF
YMVVKRHTL

SEQ ID NO: 79656 - protein, 9 aa, synthetic construct
  source 1..9: note = Seed: YFVVKRHTF
YMVVKRHTM

SEQ ID NO: 79657 - protein, 9 aa, synthetic construct
  source 1..9: note = Seed: YFVVKRHTF
YMVVKRHTV

SEQ ID NO: 79658 - protein, 9 aa, synthetic construct
  source 1..9: note = Seed: YFVVKRHTF
YMVVKRHTY

SEQ ID NO: 79659 - protein, 10 aa, synthetic construct
  source 1..10: note = Seed: YRVVVLSFEL
YMVVVLSFEA

SEQ ID NO: 79660 - protein, 10 aa, synthetic construct
  source 1..10: note = Seed: YRVVVLSFEL
YMVVVLSFEI

SEQ ID NO: 79661 - protein, 10 aa, synthetic construct
  source 1..10: note = Seed: YRVVVLSFEL
YMVVVLSFEL

SEQ ID NO: 79662 - protein, 10 aa, synthetic construct
  source 1..10: note = Seed: YRVVVLSFEL
YMVVVLSFEM

SEQ ID NO: 79663 - protein, 10 aa, synthetic construct
  source 1..10: note = Seed: YRVVVLSFEL
YMVVVLSFEV

SEQ ID NO: 79664 - protein, 10 aa, synthetic construct
  source 1..10: note = Seed: YYVWKSYVHV
YMVWKSYVHA

SEQ ID NO: 79665 - protein, 10 aa, synthetic construct
  source 1..10: note = Seed: YYVWKSYVHV
YMVWKSYVHF

SEQ ID NO: 79666 - protein, 10 aa, synthetic construct
  source 1..10: note = Seed: YYVWKSYVHV
YMVWKSYVHI

SEQ ID NO: 79667 - protein, 10 aa, synthetic construct
  source 1..10: note = Seed: YYVWKSYVHV
YMVWKSYVHL

SEQ ID NO: 79668 - protein, 10 aa, synthetic construct
  source 1..10: note = Seed: YYVWKSYVHV
YMVWKSYVHM

SEQ ID NO: 79669 - protein, 10 aa, synthetic construct
  source 1..10: note = Seed: YYVWKSYVHV
YMVWKSYVHV

SEQ ID NO: 79670 - protein, 11 aa, synthetic construct
  source 1..11: note = Seed: YYVWKSYVHVV
YMVWKSYVHVA

SEQ ID NO: 79671 - protein, 11 aa, synthetic construct
  source 1..11: note = Seed: YYVWKSYVHVV
YMVWKSYVHVI

SEQ ID NO: 79672 - protein, 11 aa, synthetic construct
  source 1..11: note = Seed: YYVWKSYVHVV
YMVWKSYVHVL

SEQ ID NO: 79673 - protein, 11 aa, synthetic construct
  source 1..11: note = Seed: YYVWKSYVHVV
YMVWKSYVHVM

SEQ ID NO: 79674 - protein, 11 aa, synthetic construct
  source 1..11: note = Seed: YYVWKSYVHVV
YMVWKSYVHVV

SEQ ID NO: 79675 - protein, 9 aa, synthetic construct
  source 1..9: note = Seed: YYVWKSYVH
YMVWKSYVM

SEQ ID NO: 79676 - protein, 9 aa, synthetic construct
  source 1..9: note = Seed: YYVWKSYVH
YMVWKSYVY

SEQ ID NO: 79677 - protein, 9 aa, synthetic construct
  source 1..9: note = Seed: YVWKSYVHV
YMWKSYVHA

SEQ ID NO: 79678 - protein, 9 aa, synthetic construct
  source 1..9: note = Seed: YVWKSYVHV
YMWKSYVHC

SEQ ID NO: 79679 - protein, 9 aa, synthetic construct
  source 1..9: note = Seed: YVWKSYVHV
YMWKSYVHF

SEQ ID NO: 79680 - protein, 9 aa, synthetic construct
  source 1..9: note = Seed: YVWKSYVHV
YMWKSYVHI

SEQ ID NO: 79681 - protein, 9 aa, synthetic construct
  source 1..9: note = Seed: YVWKSYVHV
YMWKSYVHL

SEQ ID NO: 79682 - protein, 9 aa, synthetic construct
  source 1..9: note = Seed: YVWKSYVHV
YMWKSYVHM

SEQ ID NO: 79683 - protein, 9 aa, synthetic construct
  source 1..9: note = Seed: YVWKSYVHV
YMWKSYVHS

SEQ ID NO: 79684 - protein, 9 aa, synthetic construct
  source 1..9: note = Seed: YVWKSYVHV
YMWKSYVHT

SEQ ID NO: 79685 - protein, 9 aa, synthetic construct
  source 1..9: note = Seed: YVWKSYVHV
YMWKSYVHV

SEQ ID NO: 79686 - protein, 10 aa, synthetic construct
  source 1..10: note = Seed: YVWKSYVHVV
YMWKSYVHVA

SEQ ID NO: 79687 - protein, 10 aa, synthetic construct
  source 1..10: note = Seed: YVWKSYVHVV
YMWKSYVHVC

SEQ ID NO: 79688 - protein, 10 aa, synthetic construct
  source 1..10: note = Seed: YVWKSYVHVV
YMWKSYVHVD

SEQ ID NO: 79689 - protein, 10 aa, synthetic construct
  source 1..10: note = Seed: YVWKSYVHVV
YMWKSYVHVE

SEQ ID NO: 79690 - protein, 10 aa, synthetic construct
  source 1..10: note = Seed: YVWKSYVHVV
YMWKSYVHVF

SEQ ID NO: 79691 - protein, 10 aa, synthetic construct
  source 1..10: note = Seed: YVWKSYVHVV
YMWKSYVHVG

SEQ ID NO: 79692 - protein, 10 aa, synthetic construct
  source 1..10: note = Seed: YVWKSYVHVV
YMWKSYVHVH

SEQ ID NO: 79693 - protein, 10 aa, synthetic construct
  source 1..10: note = Seed: YVWKSYVHVV
YMWKSYVHVI

SEQ ID NO: 79694 - protein, 10 aa, synthetic construct
  source 1..10: note = Seed: YVWKSYVHVV
YMWKSYVHVK

SEQ ID NO: 79695 - protein, 10 aa, synthetic construct
  source 1..10: note = Seed: YVWKSYVHVV
YMWKSYVHVL

SEQ ID NO: 79696 - protein, 10 aa, synthetic construct
  source 1..10: note = Seed: YVWKSYVHVV
YMWKSYVHVM

SEQ ID NO: 79697 - protein, 10 aa, synthetic construct
  source 1..10: note = Seed: YVWKSYVHVV
YMWKSYVHVN

SEQ ID NO: 79698 - protein, 10 aa, synthetic construct
  source 1..10: note = Seed: YVWKSYVHVV
YMWKSYVHVP

SEQ ID NO: 79699 - protein, 10 aa, synthetic construct
  source 1..10: note = Seed: YVWKSYVHVV
YMWKSYVHVQ

SEQ ID NO: 79700 - protein, 10 aa, synthetic construct
  source 1..10: note = Seed: YVWKSYVHVV
YMWKSYVHVR

SEQ ID NO: 79701 - protein, 10 aa, synthetic construct
  source 1..10: note = Seed: YVWKSYVHVV
YMWKSYVHVS

SEQ ID NO: 79702 - protein, 10 aa, synthetic construct
  source 1..10: note = Seed: YVWKSYVHVV
YMWKSYVHVT

SEQ ID NO: 79703 - protein, 10 aa, synthetic construct
  source 1..10: note = Seed: YVWKSYVHVV
YMWKSYVHVV

SEQ ID NO: 79704 - protein, 11 aa, synthetic construct
  source 1..11: note = Seed: YVWKSYVHVVD
YMWKSYVHVVA

SEQ ID NO: 79705 - protein, 11 aa, synthetic construct
  source 1..11: note = Seed: YVWKSYVHVVD
YMWKSYVHVVC

SEQ ID NO: 79706 - protein, 11 aa, synthetic construct
  source 1..11: note = Seed: YVWKSYVHVVD
YMWKSYVHVVD

SEQ ID NO: 79707 - protein, 11 aa, synthetic construct
  source 1..11: note = Seed: YVWKSYVHVVD
YMWKSYVHVVE

SEQ ID NO: 79708 - protein, 11 aa, synthetic construct
  source 1..11: note = Seed: YVWKSYVHVVD
YMWKSYVHVVF

SEQ ID NO: 79709 - protein, 11 aa, synthetic construct
  source 1..11: note = Seed: YVWKSYVHVVD
YMWKSYVHVVG

SEQ ID NO: 79710 - protein, 11 aa, synthetic construct
  source 1..11: note = Seed: YVWKSYVHVVD
YMWKSYVHVVH

SEQ ID NO: 79711 - protein, 11 aa, synthetic construct
  source 1..11: note = Seed: YVWKSYVHVVD
YMWKSYVHVVI

SEQ ID NO: 79712 - protein, 11 aa, synthetic construct
  source 1..11: note = Seed: YVWKSYVHVVD
YMWKSYVHVVK

SEQ ID NO: 79713 - protein, 11 aa, synthetic construct
  source 1..11: note = Seed: YVWKSYVHVVD
YMWKSYVHVVL

SEQ ID NO: 79714 - protein, 11 aa, synthetic construct
  source 1..11: note = Seed: YVWKSYVHVVD
YMWKSYVHVVM

SEQ ID NO: 79715 - protein, 11 aa, synthetic construct
  source 1..11: note = Seed: YVWKSYVHVVD
YMWKSYVHVVN

SEQ ID NO: 79716 - protein, 11 aa, synthetic construct
  source 1..11: note = Seed: YVWKSYVHVVD
YMWKSYVHVVP

SEQ ID NO: 79717 - protein, 11 aa, synthetic construct
  source 1..11: note = Seed: YVWKSYVHVVD
YMWKSYVHVVQ

SEQ ID NO: 79718 - protein, 11 aa, synthetic construct
  source 1..11: note = Seed: YVWKSYVHVVD
YMWKSYVHVVR

SEQ ID NO: 79719 - protein, 11 aa, synthetic construct
  source 1..11: note = Seed: YVWKSYVHVVD
YMWKSYVHVVS

SEQ ID NO: 79720 - protein, 11 aa, synthetic construct
  source 1..11: note = Seed: YVWKSYVHVVD
YMWKSYVHVVT

SEQ ID NO: 79721 - protein, 11 aa, synthetic construct
  source 1..11: note = Seed: YVWKSYVHVVD
YMWKSYVHVVV

SEQ ID NO: 79722 - protein, 11 aa, synthetic construct
  source 1..11: note = Seed: YVWKSYVHVVD
YMWKSYVHVVW

SEQ ID NO: 79723 - protein, 11 aa, synthetic construct
  source 1..11: note = Seed: YVWKSYVHVVD
YMWKSYVHVVY

SEQ ID NO: 79724 - protein, 10 aa, synthetic construct
  source 1..10: note = Seed: YVWKSYVHVV
YMWKSYVHVW

SEQ ID NO: 79725 - protein, 10 aa, synthetic construct
  source 1..10: note = Seed: YVWKSYVHVV
YMWKSYVHVY

SEQ ID NO: 79726 - protein, 10 aa, synthetic construct
  source 1..10: note = Seed: YVYANGGKGF
YMYANGGKGF

SEQ ID NO: 79727 - protein, 10 aa, synthetic construct
  source 1..10: note = Seed: YVYANGGKGF
YMYANGGKGM

SEQ ID NO: 79728 - protein, 10 aa, synthetic construct
  source 1..10: note = Seed: YVYANGGKGF
YMYANGGKGY

SEQ ID NO: 79729 - protein, 11 aa, synthetic construct
  source 1..11: note = Seed: YLYFIKGLNNL
YMYFIKGLNNA

SEQ ID NO: 79730 - protein, 11 aa, synthetic construct
  source 1..11: note = Seed: YLYFIKGLNNL
YMYFIKGLNNF

SEQ ID NO: 79731 - protein, 11 aa, synthetic construct
  source 1..11: note = Seed: YLYFIKGLNNL
YMYFIKGLNNI

SEQ ID NO: 79732 - protein, 11 aa, synthetic construct
  source 1..11: note = Seed: YLYFIKGLNNL
YMYFIKGLNNL

SEQ ID NO: 79733 - protein, 11 aa, synthetic construct
  source 1..11: note = Seed: YLYFIKGLNNL
YMYFIKGLNNM

SEQ ID NO: 79734 - protein, 11 aa, synthetic construct
  source 1..11: note = Seed: YLYFIKGLNNL
YMYFIKGLNNV

SEQ ID NO: 79735 - protein, 8 aa, synthetic construct
  source 1..8: note = Seed: YLYFIKGL
YMYFIKGV

SEQ ID NO: 79736 - protein, 9 aa, synthetic construct
  source 1..9: note = Seed: YNYKLPDDF
YMYKLPDDF

SEQ ID NO: 79737 - protein, 9 aa, synthetic construct
  source 1..9: note = Seed: YNYKLPDDF
YMYKLPDDM

SEQ ID NO: 79738 - protein, 9 aa, synthetic construct
  source 1..9: note = Seed: YNYKLPDDF
YMYKLPDDY

SEQ ID NO: 79739 - protein, 8 aa, synthetic construct
  source 1..8: note = Seed: YLYLTFYL
YMYLTFYA

SEQ ID NO: 79740 - protein, 8 aa, synthetic construct
  source 1..8: note = Seed: YLYLTFYL
YMYLTFYI

SEQ ID NO: 79741 - protein, 8 aa, synthetic construct
  source 1..8: note = Seed: YLYLTFYL
YMYLTFYL

SEQ ID NO: 79742 - protein, 9 aa, synthetic construct
  source 1..9: note = Seed: YLYLTFYLT
YMYLTFYLA

SEQ ID NO: 79743 - protein, 9 aa, synthetic construct
  source 1..9: note = Seed: YLYLTFYLT
YMYLTFYLC

SEQ ID NO: 79744 - protein, 9 aa, synthetic construct
  source 1..9: note = Seed: YLYLTFYLT
YMYLTFYLF

SEQ ID NO: 79745 - protein, 9 aa, synthetic construct
  source 1..9: note = Seed: YLYLTFYLT
YMYLTFYLI

SEQ ID NO: 79746 - protein, 9 aa, synthetic construct
  source 1..9: note = Seed: YLYLTFYLT
YMYLTFYLL

SEQ ID NO: 79747 - protein, 9 aa, synthetic construct
  source 1..9: note = Seed: YLYLTFYLT
YMYLTFYLM

SEQ ID NO: 79748 - protein, 9 aa, synthetic construct
  source 1..9: note = Seed: YLYLTFYLT
YMYLTFYLS

SEQ ID NO: 79749 - protein, 9 aa, synthetic construct
  source 1..9: note = Seed: YLYLTFYLT
YMYLTFYLT

SEQ ID NO: 79750 - protein, 9 aa, synthetic construct
  source 1..9: note = Seed: YLYLTFYLT
YMYLTFYLV

SEQ ID NO: 79751 - protein, 8 aa, synthetic construct
  source 1..8: note = Seed: YLYLTFYL
YMYLTFYM

SEQ ID NO: 79752 - protein, 8 aa, synthetic construct
  source 1..8: note = Seed: YLYLTFYL
YMYLTFYT

SEQ ID NO: 79753 - protein, 8 aa, synthetic construct
  source 1..8: note = Seed: YLYLTFYL
YMYLTFYV

SEQ ID NO: 79754 - protein, 10 aa, synthetic construct
  source 1..10: note = Seed: YDYLVSTQEF
YMYLVSTQEF

SEQ ID NO: 79755 - protein, 11 aa, synthetic construct
  source 1..11: note = Seed: YDYLVSTQEFR
YMYLVSTQEFF

SEQ ID NO: 79756 - protein, 11 aa, synthetic construct
  source 1..11: note = Seed: YDYLVSTQEFR
YMYLVSTQEFR

SEQ ID NO: 79757 - protein, 11 aa, synthetic construct
  source 1..11: note = Seed: YDYLVSTQEFR
YMYLVSTQEFW

SEQ ID NO: 79758 - protein, 10 aa, synthetic construct
  source 1..10: note = Seed: YDYLVSTQEF
YMYLVSTQEI

SEQ ID NO: 79759 - protein, 10 aa, synthetic construct
  source 1..10: note = Seed: YDYLVSTQEF
YMYLVSTQEL

SEQ ID NO: 79760 - protein, 10 aa, synthetic construct
  source 1..10: note = Seed: YDYLVSTQEF
YMYLVSTQEM

SEQ ID NO: 79761 - protein, 10 aa, synthetic construct
  source 1..10: note = Seed: YDYLVSTQEF
YMYLVSTQEW

SEQ ID NO: 79762 - protein, 10 aa, synthetic construct
  source 1..10: note = Seed: YDYLVSTQEF
YMYLVSTQEY

SEQ ID NO: 79763 - protein, 9 aa, synthetic construct
  source 1..9: note = Seed: YNYLYRLFR
YMYLYRLFK

SEQ ID NO: 79764 - protein, 9 aa, synthetic construct
  source 1..9: note = Seed: YNYLYRLFR
YMYLYRLFR

SEQ ID NO: 79765 - protein, 10 aa, synthetic construct
  source 1..10: note = Seed: YNYLYRLFRK
YMYLYRLFRA

SEQ ID NO: 79766 - protein, 10 aa, synthetic construct
  source 1..10: note = Seed: YNYLYRLFRK
YMYLYRLFRC

SEQ ID NO: 79767 - protein, 10 aa, synthetic construct
  source 1..10: note = Seed: YNYLYRLFRK
YMYLYRLFRD

SEQ ID NO: 79768 - protein, 10 aa, synthetic construct
  source 1..10: note = Seed: YNYLYRLFRK
YMYLYRLFRE

SEQ ID NO: 79769 - protein, 10 aa, synthetic construct
  source 1..10: note = Seed: YNYLYRLFRK
YMYLYRLFRF

SEQ ID NO: 79770 - protein, 10 aa, synthetic construct
  source 1..10: note = Seed: YNYLYRLFRK
YMYLYRLFRG

SEQ ID NO: 79771 - protein, 10 aa, synthetic construct
  source 1..10: note = Seed: YNYLYRLFRK
YMYLYRLFRH

SEQ ID NO: 79772 - protein, 10 aa, synthetic construct
  source 1..10: note = Seed: YNYLYRLFRK
YMYLYRLFRI

SEQ ID NO: 79773 - protein, 10 aa, synthetic construct
  source 1..10: note = Seed: YNYLYRLFRK
YMYLYRLFRK

SEQ ID NO: 79774 - protein, 10 aa, synthetic construct
  source 1..10: note = Seed: YNYLYRLFRK
YMYLYRLFRL

SEQ ID NO: 79775 - protein, 10 aa, synthetic construct
  source 1..10: note = Seed: YNYLYRLFRK
YMYLYRLFRM

SEQ ID NO: 79776 - protein, 10 aa, synthetic construct
  source 1..10: note = Seed: YNYLYRLFRK
YMYLYRLFRN

SEQ ID NO: 79777 - protein, 10 aa, synthetic construct
  source 1..10: note = Seed: YNYLYRLFRK
YMYLYRLFRP

SEQ ID NO: 79778 - protein, 10 aa, synthetic construct
  source 1..10: note = Seed: YNYLYRLFRK
YMYLYRLFRQ

SEQ ID NO: 79779 - protein, 10 aa, synthetic construct
  source 1..10: note = Seed: YNYLYRLFRK
YMYLYRLFRR

SEQ ID NO: 79780 - protein, 10 aa, synthetic construct
  source 1..10: note = Seed: YNYLYRLFRK
YMYLYRLFRS

SEQ ID NO: 79781 - protein, 10 aa, synthetic construct
  source 1..10: note = Seed: YNYLYRLFRK
YMYLYRLFRT

SEQ ID NO: 79782 - protein, 10 aa, synthetic construct
  source 1..10: note = Seed: YNYLYRLFRK
YMYLYRLFRV

SEQ ID NO: 79783 - protein, 10 aa, synthetic construct
  source 1..10: note = Seed: YNYLYRLFRK
YMYLYRLFRW

SEQ ID NO: 79784 - protein, 10 aa, synthetic construct
  source 1..10: note = Seed: YNYLYRLFRK
YMYLYRLFRY

SEQ ID NO: 79785 - protein, 8 aa, synthetic construct
  source 1..8: note = Seed: YRYNLPTM
YMYNLPTF

SEQ ID NO: 79786 - protein, 8 aa, synthetic construct
  source 1..8: note = Seed: YRYNLPTM
YMYNLPTM

SEQ ID NO: 79787 - protein, 9 aa, synthetic construct
  source 1..9: note = Seed: YRYNLPTMC
YMYNLPTML

SEQ ID NO: 79788 - protein, 9 aa, synthetic construct
  source 1..9: note = Seed: YRYNLPTMC
YMYNLPTMM

SEQ ID NO: 79789 - protein, 8 aa, synthetic construct
  source 1..8: note = Seed: YRYNLPTM
YMYNLPTY

SEQ ID NO: 79790 - protein, 8 aa, synthetic construct
  source 1..8: note = Seed: YVYNPFMI
YMYNPFMA

SEQ ID NO: 79791 - protein, 8 aa, synthetic construct
  source 1..8: note = Seed: YVYNPFMI
YMYNPFMI

SEQ ID NO: 79792 - protein, 10 aa, synthetic construct
  source 1..10: note = Seed: YVYNPFMIDV
YMYNPFMIDA

SEQ ID NO: 79793 - protein, 10 aa, synthetic construct
  source 1..10: note = Seed: YVYNPFMIDV
YMYNPFMIDI

SEQ ID NO: 79794 - protein, 10 aa, synthetic construct
  source 1..10: note = Seed: YVYNPFMIDV
YMYNPFMIDL

SEQ ID NO: 79795 - protein, 10 aa, synthetic construct
  source 1..10: note = Seed: YVYNPFMIDV
YMYNPFMIDM

SEQ ID NO: 79796 - protein, 10 aa, synthetic construct
  source 1..10: note = Seed: YVYNPFMIDV
YMYNPFMIDT

SEQ ID NO: 79797 - protein, 10 aa, synthetic construct
  source 1..10: note = Seed: YVYNPFMIDV
YMYNPFMIDV

SEQ ID NO: 79798 - protein, 8 aa, synthetic construct
  source 1..8: note = Seed: YVYNPFMI
YMYNPFML

SEQ ID NO: 79799 - protein, 8 aa, synthetic construct
  source 1..8: note = Seed: YVYNPFMI
YMYNPFMM

SEQ ID NO: 79800 - protein, 8 aa, synthetic construct
  source 1..8: note = Seed: YVYNPFMI
YMYNPFMV

SEQ ID NO: 79801 - protein, 9 aa, synthetic construct
  source 1..9: note = Seed: YLYRLFRKS
YMYRLFRKA

SEQ ID NO: 79802 - protein, 9 aa, synthetic construct
  source 1..9: note = Seed: YLYRLFRKS
YMYRLFRKI

SEQ ID NO: 79803 - protein, 9 aa, synthetic construct
  source 1..9: note = Seed: YLYRLFRKS
YMYRLFRKL

SEQ ID NO: 79804 - protein, 9 aa, synthetic construct
  source 1..9: note = Seed: YLYRLFRKS
YMYRLFRKM

SEQ ID NO: 79805 - protein, 11 aa, synthetic construct
  source 1..11: note = Seed: YLYRLFRKSNL
YMYRLFRKSNV

SEQ ID NO: 79806 - protein, 9 aa, synthetic construct
  source 1..9: note = Seed: YLYRLFRKS
YMYRLFRKV

SEQ ID NO: 79807 - protein, 8 aa, synthetic construct
  source 1..8: note = Seed: YLYRLFRK
YMYRLFRR

SEQ ID NO: 79808 - protein, 11 aa, synthetic construct
  source 1..11: note = Seed: YDYYRYNLPTM
YMYYRYNLPTF

SEQ ID NO: 79809 - protein, 11 aa, synthetic construct
  source 1..11: note = Seed: YDYYRYNLPTM
YMYYRYNLPTM

SEQ ID NO: 79810 - protein, 11 aa, synthetic construct
  source 1..11: note = Seed: YDYYRYNLPTM
YMYYRYNLPTW

SEQ ID NO: 79811 - protein, 10 aa, synthetic construct
  source 1..10: note = Seed: YGANKDGIIW
YNANKDGIIW

SEQ ID NO: 79812 - protein, 10 aa, synthetic construct
  source 1..10: note = Seed: YPANSIVCRF
YNANSIVCRW

SEQ ID NO: 79813 - protein, 10 aa, synthetic construct
  source 1..10: note = Seed: YFCTCYFGLF
YNCTCYFGLY

SEQ ID NO: 79814 - protein, 10 aa, synthetic construct
  source 1..10: note = Seed: YKENSYTTTI
YNENSYTTTA

SEQ ID NO: 79815 - protein, 10 aa, synthetic construct
  source 1..10: note = Seed: YKENSYTTTI
YNENSYTTTF

SEQ ID NO: 79816 - protein, 10 aa, synthetic construct
  source 1..10: note = Seed: YKENSYTTTI
YNENSYTTTL

SEQ ID NO: 79817 - protein, 10 aa, synthetic construct
  source 1..10: note = Seed: YKENSYTTTI
YNENSYTTTM

SEQ ID NO: 79818 - protein, 9 aa, synthetic construct
  source 1..9: note = Seed: YVFCTVNAL
YNFCTVNAF

SEQ ID NO: 79819 - protein, 9 aa, synthetic construct
  source 1..9: note = Seed: YVFCTVNAL
YNFCTVNAM

SEQ ID NO: 79820 - protein, 9 aa, synthetic construct
  source 1..9: note = Seed: YVFCTVNAL
YNFCTVNAY

SEQ ID NO: 79821 - protein, 9 aa, synthetic construct
  source 1..9: note = Seed: YIFFASFYY
YNFFASFYF

SEQ ID NO: 79822 - protein, 9 aa, synthetic construct
  source 1..9: note = Seed: YIFFASFYY
YNFFASFYK

SEQ ID NO: 79823 - protein, 9 aa, synthetic construct
  source 1..9: note = Seed: YIFFASFYY
YNFFASFYM

SEQ ID NO: 79824 - protein, 9 aa, synthetic construct
  source 1..9: note = Seed: YIFFASFYY
YNFFASFYR

SEQ ID NO: 79825 - protein, 9 aa, synthetic construct
  source 1..9: note = Seed: YIFFASFYY
YNFFASFYV

SEQ ID NO: 79826 - protein, 9 aa, synthetic construct
  source 1..9: note = Seed: YIFFASFYY
YNFFASFYY

SEQ ID NO: 79827 - protein, 10 aa, synthetic construct
  source 1..10: note = Seed: YIFFASFYYV
YNFFASFYYA

SEQ ID NO: 79828 - protein, 10 aa, synthetic construct
  source 1..10: note = Seed: YIFFASFYYV
YNFFASFYYC

SEQ ID NO: 79829 - protein, 10 aa, synthetic construct
  source 1..10: note = Seed: YIFFASFYYV
YNFFASFYYD

SEQ ID NO: 79830 - protein, 10 aa, synthetic construct
  source 1..10: note = Seed: YIFFASFYYV
YNFFASFYYE

SEQ ID NO: 79831 - protein, 10 aa, synthetic construct
  source 1..10: note = Seed: YIFFASFYYV
YNFFASFYYF

SEQ ID NO: 79832 - protein, 10 aa, synthetic construct
  source 1..10: note = Seed: YIFFASFYYV
YNFFASFYYG

SEQ ID NO: 79833 - protein, 10 aa, synthetic construct
  source 1..10: note = Seed: YIFFASFYYV
YNFFASFYYH

SEQ ID NO: 79834 - protein, 10 aa, synthetic construct
  source 1..10: note = Seed: YIFFASFYYV
YNFFASFYYI

SEQ ID NO: 79835 - protein, 10 aa, synthetic construct
  source 1..10: note = Seed: YIFFASFYYV
YNFFASFYYK

SEQ ID NO: 79836 - protein, 10 aa, synthetic construct
  source 1..10: note = Seed: YIFFASFYYV
YNFFASFYYL

SEQ ID NO: 79837 - protein, 10 aa, synthetic construct
  source 1..10: note = Seed: YIFFASFYYV
YNFFASFYYM

SEQ ID NO: 79838 - protein, 10 aa, synthetic construct
  source 1..10: note = Seed: YIFFASFYYV
YNFFASFYYN

SEQ ID NO: 79839 - protein, 10 aa, synthetic construct
  source 1..10: note = Seed: YIFFASFYYV
YNFFASFYYQ

SEQ ID NO: 79840 - protein, 10 aa, synthetic construct
  source 1..10: note = Seed: YIFFASFYYV
YNFFASFYYR

SEQ ID NO: 79841 - protein, 10 aa, synthetic construct
  source 1..10: note = Seed: YIFFASFYYV
YNFFASFYYS

SEQ ID NO: 79842 - protein, 10 aa, synthetic construct
  source 1..10: note = Seed: YIFFASFYYV
YNFFASFYYT

SEQ ID NO: 79843 - protein, 10 aa, synthetic construct
  source 1..10: note = Seed: YIFFASFYYV
YNFFASFYYV

SEQ ID NO: 79844 - protein, 11 aa, synthetic construct
  source 1..11: note = Seed: YIFFASFYYVW
YNFFASFYYVY

SEQ ID NO: 79845 - protein, 10 aa, synthetic construct
  source 1..10: note = Seed: YIFFASFYYV
YNFFASFYYW

SEQ ID NO: 79846 - protein, 10 aa, synthetic construct
  source 1..10: note = Seed: YIFFASFYYV
YNFFASFYYY

SEQ ID NO: 79847 - protein, 9 aa, synthetic construct
  source 1..9: note = Seed: YWFFSNYLK
YNFFSNYLF

SEQ ID NO: 79848 - protein, 9 aa, synthetic construct
  source 1..9: note = Seed: YWFFSNYLK
YNFFSNYLK

SEQ ID NO: 79849 - protein, 10 aa, synthetic construct
  source 1..10: note = Seed: YWFFSNYLKR
YNFFSNYLKK

SEQ ID NO: 79850 - protein, 10 aa, synthetic construct
  source 1..10: note = Seed: YWFFSNYLKR
YNFFSNYLKR

SEQ ID NO: 79851 - protein, 9 aa, synthetic construct
  source 1..9: note = Seed: YWFFSNYLK
YNFFSNYLR

SEQ ID NO: 79852 - protein, 9 aa, synthetic construct
  source 1..9: note = Seed: YWFFSNYLK
YNFFSNYLY

SEQ ID NO: 79853 - protein, 10 aa, synthetic construct
  source 1..10: note = Seed: YSFLPGVYSV
YNFLPGVYSF

SEQ ID NO: 79854 - protein, 10 aa, synthetic construct
  source 1..10: note = Seed: YSFLPGVYSV
YNFLPGVYSI

SEQ ID NO: 79855 - protein, 10 aa, synthetic construct
  source 1..10: note = Seed: YSFLPGVYSV
YNFLPGVYSL

SEQ ID NO: 79856 - protein, 10 aa, synthetic construct
  source 1..10: note = Seed: YSFLPGVYSV
YNFLPGVYSM

SEQ ID NO: 79857 - protein, 10 aa, synthetic construct
  source 1..10: note = Seed: YSFLPGVYSV
YNFLPGVYSW

SEQ ID NO: 79858 - protein, 10 aa, synthetic construct
  source 1..10: note = Seed: YHFRELGVVH
YNFRELGVVY

SEQ ID NO: 79859 - protein, 10 aa, synthetic construct
  source 1..10: note = Seed: YVFTGYRVTK
YNFTGYRVTR

SEQ ID NO: 79860 - protein, 9 aa, synthetic construct
  source 1..9: note = Seed: YVFTGYRVT
YNFTGYRVY

SEQ ID NO: 79861 - protein, 9 aa, synthetic construct
  source 1..9: note = Seed: YFFTLLLQL
YNFTLLLQY

SEQ ID NO: 79862 - protein, 11 aa, synthetic construct
  source 1..11: note = Seed: YVGYLQPRTFL
YNGYLQPRTFF

SEQ ID NO: 79863 - protein, 11 aa, synthetic construct
  source 1..11: note = Seed: YVGYLQPRTFL
YNGYLQPRTFW

SEQ ID NO: 79864 - protein, 9 aa, synthetic construct
  source 1..9: note = Seed: YMHHMELPT
YNHHMELPF

SEQ ID NO: 79865 - protein, 9 aa, synthetic construct
  source 1..9: note = Seed: YMHHMELPT
YNHHMELPY

SEQ ID NO: 79866 - protein, 9 aa, synthetic construct
  source 1..9: note = Seed: YFIASFRLF
YNIASFRLF

SEQ ID NO: 79867 - protein, 10 aa, synthetic construct
  source 1..10: note = Seed: YFIASFRLFA
YNIASFRLFI

SEQ ID NO: 79868 - protein, 10 aa, synthetic construct
  source 1..10: note = Seed: YFIASFRLFA
YNIASFRLFL

SEQ ID NO: 79869 - protein, 10 aa, synthetic construct
  source 1..10: note = Seed: YFIASFRLFA
YNIASFRLFV

SEQ ID NO: 79870 - protein, 9 aa, synthetic construct
  source 1..9: note = Seed: YFIASFRLF
YNIASFRLM

SEQ ID NO: 79871 - protein, 9 aa, synthetic construct
  source 1..9: note = Seed: YFIASFRLF
YNIASFRLY

SEQ ID NO: 79872 - protein, 9 aa, synthetic construct
  source 1..9: note = Seed: YGIATVREV
YNIATVREY

SEQ ID NO: 79873 - protein, 9 aa, synthetic construct
  source 1..9: note = Seed: YDKLQFTSL
YNKLQFTSI

SEQ ID NO: 79874 - protein, 9 aa, synthetic construct
  source 1..9: note = Seed: YDKLQFTSL
YNKLQFTSL

SEQ ID NO: 79875 - protein, 11 aa, synthetic construct
  source 1..11: note = Seed: YDKLQFTSLEI
YNKLQFTSLEV

SEQ ID NO: 79876 - protein, 9 aa, synthetic construct
  source 1..9: note = Seed: YDKLQFTSL
YNKLQFTSM

SEQ ID NO: 79877 - protein, 9 aa, synthetic construct
  source 1..9: note = Seed: YDKLQFTSL
YNKLQFTSV

SEQ ID NO: 79878 - protein, 9 aa, synthetic construct
  source 1..9: note = Seed: YLKLRSDVL
YNKLRSDVL

SEQ ID NO: 79879 - protein, 8 aa, synthetic construct
  source 1..8: note = Seed: YLKRRVVF
YNKRRVVL

SEQ ID NO: 79880 - protein, 8 aa, synthetic construct
  source 1..8: note = Seed: YLKRRVVF
YNKRRVVM

SEQ ID NO: 79881 - protein, 9 aa, synthetic construct
  source 1..9: note = Seed: YLKSPNFSK
YNKSPNFSR

SEQ ID NO: 79882 - protein, 9 aa, synthetic construct
  source 1..9: note = Seed: YNKYKYFSG
YNKYKYFSA

SEQ ID NO: 79883 - protein, 9 aa, synthetic construct
  source 1..9: note = Seed: YNKYKYFSG
YNKYKYFSF

SEQ ID NO: 79884 - protein, 9 aa, synthetic construct
  source 1..9: note = Seed: YNKYKYFSG
YNKYKYFSI

SEQ ID NO: 79885 - protein, 9 aa, synthetic construct
  source 1..9: note = Seed: YNKYKYFSG
YNKYKYFSL

SEQ ID NO: 79886 - protein, 9 aa, synthetic construct
  source 1..9: note = Seed: YNKYKYFSG
YNKYKYFSM

SEQ ID NO: 79887 - protein, 9 aa, synthetic construct
  source 1..9: note = Seed: YNKYKYFSG
YNKYKYFSV

SEQ ID NO: 79888 - protein, 10 aa, synthetic construct
  source 1..10: note = Seed: YRLFRKSNLK
YNLFRKSNLK

SEQ ID NO: 79889 - protein, 10 aa, synthetic construct
  source 1..10: note = Seed: YRLFRKSNLK
YNLFRKSNLR

SEQ ID NO: 79890 - protein, 9 aa, synthetic construct
  source 1..9: note = Seed: YILFTRFFY
YNLFTRFFK

SEQ ID NO: 79891 - protein, 9 aa, synthetic construct
  source 1..9: note = Seed: YILFTRFFY
YNLFTRFFR

SEQ ID NO: 79892 - protein, 9 aa, synthetic construct
  source 1..9: note = Seed: YILFTRFFY
YNLFTRFFY

SEQ ID NO: 79893 - protein, 10 aa, synthetic construct
  source 1..10: note = Seed: YILFTRFFYV
YNLFTRFFYA

SEQ ID NO: 79894 - protein, 10 aa, synthetic construct
  source 1..10: note = Seed: YILFTRFFYV
YNLFTRFFYC

SEQ ID NO: 79895 - protein, 10 aa, synthetic construct
  source 1..10: note = Seed: YILFTRFFYV
YNLFTRFFYF

SEQ ID NO: 79896 - protein, 10 aa, synthetic construct
  source 1..10: note = Seed: YILFTRFFYV
YNLFTRFFYI

SEQ ID NO: 79897 - protein, 10 aa, synthetic construct
  source 1..10: note = Seed: YILFTRFFYV
YNLFTRFFYK

SEQ ID NO: 79898 - protein, 10 aa, synthetic construct
  source 1..10: note = Seed: YILFTRFFYV
YNLFTRFFYL

SEQ ID NO: 79899 - protein, 10 aa, synthetic construct
  source 1..10: note = Seed: YILFTRFFYV
YNLFTRFFYM

SEQ ID NO: 79900 - protein, 10 aa, synthetic construct
  source 1..10: note = Seed: YILFTRFFYV
YNLFTRFFYR

SEQ ID NO: 79901 - protein, 10 aa, synthetic construct
  source 1..10: note = Seed: YILFTRFFYV
YNLFTRFFYS

SEQ ID NO: 79902 - protein, 10 aa, synthetic construct
  source 1..10: note = Seed: YILFTRFFYV
YNLFTRFFYT

SEQ ID NO: 79903 - protein, 10 aa, synthetic construct
  source 1..10: note = Seed: YILFTRFFYV
YNLFTRFFYV

SEQ ID NO: 79904 - protein, 11 aa, synthetic construct
  source 1..11: note = Seed: YILFTRFFYVL
YNLFTRFFYVA

SEQ ID NO: 79905 - protein, 11 aa, synthetic construct
  source 1..11: note = Seed: YILFTRFFYVL
YNLFTRFFYVC

SEQ ID NO: 79906 - protein, 11 aa, synthetic construct
  source 1..11: note = Seed: YILFTRFFYVL
YNLFTRFFYVD

SEQ ID NO: 79907 - protein, 11 aa, synthetic construct
  source 1..11: note = Seed: YILFTRFFYVL
YNLFTRFFYVE

SEQ ID NO: 79908 - protein, 11 aa, synthetic construct
  source 1..11: note = Seed: YILFTRFFYVL
YNLFTRFFYVF

SEQ ID NO: 79909 - protein, 11 aa, synthetic construct
  source 1..11: note = Seed: YILFTRFFYVL
YNLFTRFFYVG

SEQ ID NO: 79910 - protein, 11 aa, synthetic construct
  source 1..11: note = Seed: YILFTRFFYVL
YNLFTRFFYVH

SEQ ID NO: 79911 - protein, 11 aa, synthetic construct
  source 1..11: note = Seed: YILFTRFFYVL
YNLFTRFFYVI

SEQ ID NO: 79912 - protein, 11 aa, synthetic construct
  source 1..11: note = Seed: YILFTRFFYVL
YNLFTRFFYVK

SEQ ID NO: 79913 - protein, 11 aa, synthetic construct
  source 1..11: note = Seed: YILFTRFFYVL
YNLFTRFFYVL

SEQ ID NO: 79914 - protein, 11 aa, synthetic construct
  source 1..11: note = Seed: YILFTRFFYVL
YNLFTRFFYVM

SEQ ID NO: 79915 - protein, 11 aa, synthetic construct
  source 1..11: note = Seed: YILFTRFFYVL
YNLFTRFFYVN

SEQ ID NO: 79916 - protein, 11 aa, synthetic construct
  source 1..11: note = Seed: YILFTRFFYVL
YNLFTRFFYVP

SEQ ID NO: 79917 - protein, 11 aa, synthetic construct
  source 1..11: note = Seed: YILFTRFFYVL
YNLFTRFFYVQ

SEQ ID NO: 79918 - protein, 11 aa, synthetic construct
  source 1..11: note = Seed: YILFTRFFYVL
YNLFTRFFYVR

SEQ ID NO: 79919 - protein, 11 aa, synthetic construct
  source 1..11: note = Seed: YILFTRFFYVL
YNLFTRFFYVS

SEQ ID NO: 79920 - protein, 11 aa, synthetic construct
  source 1..11: note = Seed: YILFTRFFYVL
YNLFTRFFYVT

SEQ ID NO: 79921 - protein, 11 aa, synthetic construct
  source 1..11: note = Seed: YILFTRFFYVL
YNLFTRFFYVV

SEQ ID NO: 79922 - protein, 11 aa, synthetic construct
  source 1..11: note = Seed: YILFTRFFYVL
YNLFTRFFYVW

SEQ ID NO: 79923 - protein, 11 aa, synthetic construct
  source 1..11: note = Seed: YILFTRFFYVL
YNLFTRFFYVY

SEQ ID NO: 79924 - protein, 10 aa, synthetic construct
  source 1..10: note = Seed: YILFTRFFYV
YNLFTRFFYY

SEQ ID NO: 79925 - protein, 10 aa, synthetic construct
  source 1..10: note = Seed: YSLLMPILTL
YNLLMPILTA

SEQ ID NO: 79926 - protein, 10 aa, synthetic construct
  source 1..10: note = Seed: YSLLMPILTL
YNLLMPILTI

SEQ ID NO: 79927 - protein, 10 aa, synthetic construct
  source 1..10: note = Seed: YSLLMPILTL
YNLLMPILTL

SEQ ID NO: 79928 - protein, 10 aa, synthetic construct
  source 1..10: note = Seed: YSLLMPILTL
YNLLMPILTV

SEQ ID NO: 79929 - protein, 10 aa, synthetic construct
  source 1..10: note = Seed: YHLMSFPQSA
YNLMSFPQSA

SEQ ID NO: 79930 - protein, 11 aa, synthetic construct
  source 1..11: note = Seed: YHLMSFPQSAP
YNLMSFPQSAV

SEQ ID NO: 79931 - protein, 10 aa, synthetic construct
  source 1..10: note = Seed: YHLMSFPQSA
YNLMSFPQSI

SEQ ID NO: 79932 - protein, 10 aa, synthetic construct
  source 1..10: note = Seed: YHLMSFPQSA
YNLMSFPQSL

SEQ ID NO: 79933 - protein, 10 aa, synthetic construct
  source 1..10: note = Seed: YHLMSFPQSA
YNLMSFPQSM

SEQ ID NO: 79934 - protein, 10 aa, synthetic construct
  source 1..10: note = Seed: YHLMSFPQSA
YNLMSFPQST

SEQ ID NO: 79935 - protein, 10 aa, synthetic construct
  source 1..10: note = Seed: YHLMSFPQSA
YNLMSFPQSV

SEQ ID NO: 79936 - protein, 10 aa, synthetic construct
  source 1..10: note = Seed: YDLSVVNARL
YNLSVVNARA

SEQ ID NO: 79937 - protein, 10 aa, synthetic construct
  source 1..10: note = Seed: YDLSVVNARL
YNLSVVNARI

SEQ ID NO: 79938 - protein, 10 aa, synthetic construct
  source 1..10: note = Seed: YDLSVVNARL
YNLSVVNARL

SEQ ID NO: 79939 - protein, 10 aa, synthetic construct
  source 1..10: note = Seed: YDLSVVNARL
YNLSVVNARM

SEQ ID NO: 79940 - protein, 10 aa, synthetic construct
  source 1..10: note = Seed: YDLSVVNARL
YNLSVVNARV

SEQ ID NO: 79941 - protein, 10 aa, synthetic construct
  source 1..10: note = Seed: YTMADLVYAL
YNMADLVYAA

SEQ ID NO: 79942 - protein, 10 aa, synthetic construct
  source 1..10: note = Seed: YTMADLVYAL
YNMADLVYAC

SEQ ID NO: 79943 - protein, 10 aa, synthetic construct
  source 1..10: note = Seed: YTMADLVYAL
YNMADLVYAF

SEQ ID NO: 79944 - protein, 10 aa, synthetic construct
  source 1..10: note = Seed: YTMADLVYAL
YNMADLVYAG

SEQ ID NO: 79945 - protein, 10 aa, synthetic construct
  source 1..10: note = Seed: YTMADLVYAL
YNMADLVYAI

SEQ ID NO: 79946 - protein, 10 aa, synthetic construct
  source 1..10: note = Seed: YTMADLVYAL
YNMADLVYAL

SEQ ID NO: 79947 - protein, 11 aa, synthetic construct
  source 1..11: note = Seed: YTMADLVYALR
YNMADLVYALA

SEQ ID NO: 79948 - protein, 11 aa, synthetic construct
  source 1..11: note = Seed: YTMADLVYALR
YNMADLVYALC

SEQ ID NO: 79949 - protein, 11 aa, synthetic construct
  source 1..11: note = Seed: YTMADLVYALR
YNMADLVYALD

SEQ ID NO: 79950 - protein, 11 aa, synthetic construct
  source 1..11: note = Seed: YTMADLVYALR
YNMADLVYALE

SEQ ID NO: 79951 - protein, 11 aa, synthetic construct
  source 1..11: note = Seed: YTMADLVYALR
YNMADLVYALF

SEQ ID NO: 79952 - protein, 11 aa, synthetic construct
  source 1..11: note = Seed: YTMADLVYALR
YNMADLVYALG

SEQ ID NO: 79953 - protein, 11 aa, synthetic construct
  source 1..11: note = Seed: YTMADLVYALR
YNMADLVYALH

SEQ ID NO: 79954 - protein, 11 aa, synthetic construct
  source 1..11: note = Seed: YTMADLVYALR
YNMADLVYALI

SEQ ID NO: 79955 - protein, 11 aa, synthetic construct
  source 1..11: note = Seed: YTMADLVYALR
YNMADLVYALK

SEQ ID NO: 79956 - protein, 11 aa, synthetic construct
  source 1..11: note = Seed: YTMADLVYALR
YNMADLVYALL

SEQ ID NO: 79957 - protein, 11 aa, synthetic construct
  source 1..11: note = Seed: YTMADLVYALR
YNMADLVYALM

SEQ ID NO: 79958 - protein, 11 aa, synthetic construct
  source 1..11: note = Seed: YTMADLVYALR
YNMADLVYALN

SEQ ID NO: 79959 - protein, 11 aa, synthetic construct
  source 1..11: note = Seed: YTMADLVYALR
YNMADLVYALP

SEQ ID NO: 79960 - protein, 11 aa, synthetic construct
  source 1..11: note = Seed: YTMADLVYALR
YNMADLVYALQ

SEQ ID NO: 79961 - protein, 11 aa, synthetic construct
  source 1..11: note = Seed: YTMADLVYALR
YNMADLVYALR

SEQ ID NO: 79962 - protein, 11 aa, synthetic construct
  source 1..11: note = Seed: YTMADLVYALR
YNMADLVYALS

SEQ ID NO: 79963 - protein, 11 aa, synthetic construct
  source 1..11: note = Seed: YTMADLVYALR
YNMADLVYALT

SEQ ID NO: 79964 - protein, 11 aa, synthetic construct
  source 1..11: note = Seed: YTMADLVYALR
YNMADLVYALV

SEQ ID NO: 79965 - protein, 11 aa, synthetic construct
  source 1..11: note = Seed: YTMADLVYALR
YNMADLVYALW

SEQ ID NO: 79966 - protein, 11 aa, synthetic construct
  source 1..11: note = Seed: YTMADLVYALR
YNMADLVYALY

SEQ ID NO: 79967 - protein, 10 aa, synthetic construct
  source 1..10: note = Seed: YTMADLVYAL
YNMADLVYAM

SEQ ID NO: 79968 - protein, 10 aa, synthetic construct
  source 1..10: note = Seed: YTMADLVYAL
YNMADLVYAS

SEQ ID NO: 79969 - protein, 10 aa, synthetic construct
  source 1..10: note = Seed: YTMADLVYAL
YNMADLVYAT

SEQ ID NO: 79970 - protein, 10 aa, synthetic construct
  source 1..10: note = Seed: YTMADLVYAL
YNMADLVYAV

SEQ ID NO: 79971 - protein, 10 aa, synthetic construct
  source 1..10: note = Seed: YTMADLVYAL
YNMADLVYAW

SEQ ID NO: 79972 - protein, 10 aa, synthetic construct
  source 1..10: note = Seed: YTMADLVYAL
YNMADLVYAY

SEQ ID NO: 79973 - protein, 9 aa, synthetic construct
  source 1..9: note = Seed: YTMADLVYA
YNMADLVYI

SEQ ID NO: 79974 - protein, 9 aa, synthetic construct
  source 1..9: note = Seed: YTMADLVYA
YNMADLVYK

SEQ ID NO: 79975 - protein, 9 aa, synthetic construct
  source 1..9: note = Seed: YTMADLVYA
YNMADLVYL

SEQ ID NO: 79976 - protein, 9 aa, synthetic construct
  source 1..9: note = Seed: YTMADLVYA
YNMADLVYR

SEQ ID NO: 79977 - protein, 9 aa, synthetic construct
  source 1..9: note = Seed: YTMADLVYA
YNMADLVYV

SEQ ID NO: 79978 - protein, 9 aa, synthetic construct
  source 1..9: note = Seed: YVMHANYIF
YNMHANYIF

SEQ ID NO: 79979 - protein, 10 aa, synthetic construct
  source 1..10: note = Seed: YVMHANYIFW
YNMHANYIFF

SEQ ID NO: 79980 - protein, 10 aa, synthetic construct
  source 1..10: note = Seed: YVMHANYIFW
YNMHANYIFW

SEQ ID NO: 79981 - protein, 10 aa, synthetic construct
  source 1..10: note = Seed: YVMHANYIFW
YNMHANYIFY

SEQ ID NO: 79982 - protein, 9 aa, synthetic construct
  source 1..9: note = Seed: YVMHANYIF
YNMHANYIW

SEQ ID NO: 79983 - protein, 9 aa, synthetic construct
  source 1..9: note = Seed: YVMHANYIF
YNMHANYIY

SEQ ID NO: 79984 - protein, 9 aa, synthetic construct
  source 1..9: note = Seed: YTNDKACPL
YNNDKACPF

SEQ ID NO: 79985 - protein, 9 aa, synthetic construct
  source 1..9: note = Seed: YQNNVFMSE
YNNNVFMSF

SEQ ID NO: 79986 - protein, 9 aa, synthetic construct
  source 1..9: note = Seed: YQNNVFMSE
YNNNVFMSM

SEQ ID NO: 79987 - protein, 9 aa, synthetic construct
  source 1..9: note = Seed: YQNNVFMSE
YNNNVFMSY

SEQ ID NO: 79988 - protein, 9 aa, synthetic construct
  source 1..9: note = Seed: YVNTFSSTF
YNNTFSSTF

SEQ ID NO: 79989 - protein, 9 aa, synthetic construct
  source 1..9: note = Seed: YVNTFSSTF
YNNTFSSTM

SEQ ID NO: 79990 - protein, 9 aa, synthetic construct
  source 1..9: note = Seed: YVNTFSSTF
YNNTFSSTY

SEQ ID NO: 79991 - protein, 10 aa, synthetic construct
  source 1..10: note = Seed: YTPHTVLQAV
YNPHTVLQAA

SEQ ID NO: 79992 - protein, 10 aa, synthetic construct
  source 1..10: note = Seed: YTPHTVLQAV
YNPHTVLQAI

SEQ ID NO: 79993 - protein, 10 aa, synthetic construct
  source 1..10: note = Seed: YTPHTVLQAV
YNPHTVLQAL

SEQ ID NO: 79994 - protein, 10 aa, synthetic construct
  source 1..10: note = Seed: YTPHTVLQAV
YNPHTVLQAM

SEQ ID NO: 79995 - protein, 10 aa, synthetic construct
  source 1..10: note = Seed: YTPHTVLQAV
YNPHTVLQAV

SEQ ID NO: 79996 - protein, 8 aa, synthetic construct
  source 1..8: note = Seed: YMPYFFTL
YNPYFFTF

SEQ ID NO: 79997 - protein, 10 aa, synthetic construct
  source 1..10: note = Seed: YMPYFFTLLL
YNPYFFTLLA

SEQ ID NO: 79998 - protein, 10 aa, synthetic construct
  source 1..10: note = Seed: YMPYFFTLLL
YNPYFFTLLF

SEQ ID NO: 79999 - protein, 10 aa, synthetic construct
  source 1..10: note = Seed: YMPYFFTLLL
YNPYFFTLLL

SEQ ID NO: 80000 - protein, 10 aa, synthetic construct
  source 1..10: note = Seed: YMPYFFTLLL
YNPYFFTLLM

SEQ ID NO: 80001 - protein, 10 aa, synthetic construct
  source 1..10: note = Seed: YMPYFFTLLL
YNPYFFTLLT

SEQ ID NO: 80002 - protein, 10 aa, synthetic construct
  source 1..10: note = Seed: YMPYFFTLLL
YNPYFFTLLV

SEQ ID NO: 80003 - protein, 10 aa, synthetic construct
  source 1..10: note = Seed: YMPYFFTLLL
YNPYFFTLLW

SEQ ID NO: 80004 - protein, 10 aa, synthetic construct
  source 1..10: note = Seed: YMPYFFTLLL
YNPYFFTLLY

SEQ ID NO: 80005 - protein, 10 aa, synthetic construct
  source 1..10: note = Seed: YQPYRVVVLS
YNPYRVVVLA

SEQ ID NO: 80006 - protein, 10 aa, synthetic construct
  source 1..10: note = Seed: YKQFDTYNLW
YNQFDTYNLF

SEQ ID NO: 80007 - protein, 10 aa, synthetic construct
  source 1..10: note = Seed: YKQFDTYNLW
YNQFDTYNLM

SEQ ID NO: 80008 - protein, 10 aa, synthetic construct
  source 1..10: note = Seed: YKQFDTYNLW
YNQFDTYNLY

SEQ ID NO: 80009 - protein, 10 aa, synthetic construct
  source 1..10: note = Seed: YSQLMCQPIL
YNQLMCQPIF

SEQ ID NO: 80010 - protein, 11 aa, synthetic construct
  source 1..11: note = Seed: YSQLMCQPILL
YNQLMCQPILA

SEQ ID NO: 80011 - protein, 11 aa, synthetic construct
  source 1..11: note = Seed: YSQLMCQPILL
YNQLMCQPILI

SEQ ID NO: 80012 - protein, 11 aa, synthetic construct
  source 1..11: note = Seed: YSQLMCQPILL
YNQLMCQPILL

SEQ ID NO: 80013 - protein, 11 aa, synthetic construct
  source 1..11: note = Seed: YSQLMCQPILL
YNQLMCQPILM

SEQ ID NO: 80014 - protein, 11 aa, synthetic construct
  source 1..11: note = Seed: YSQLMCQPILL
YNQLMCQPILV

SEQ ID NO: 80015 - protein, 10 aa, synthetic construct
  source 1..10: note = Seed: YSQLMCQPIL
YNQLMCQPIY

SEQ ID NO: 80016 - protein, 9 aa, synthetic construct
  source 1..9: note = Seed: YLQPRTFLL
YNQPRTFLY

SEQ ID NO: 80017 - protein, 10 aa, synthetic construct
  source 1..10: note = Seed: YPQVNGLTSI
YNQVNGLTSF

SEQ ID NO: 80018 - protein, 10 aa, synthetic construct
  source 1..10: note = Seed: YPQVNGLTSI
YNQVNGLTSI

SEQ ID NO: 80019 - protein, 10 aa, synthetic construct
  source 1..10: note = Seed: YPQVNGLTSI
YNQVNGLTSL

SEQ ID NO: 80020 - protein, 10 aa, synthetic construct
  source 1..10: note = Seed: YPQVNGLTSI
YNQVNGLTSM

SEQ ID NO: 80021 - protein, 10 aa, synthetic construct
  source 1..10: note = Seed: YPQVNGLTSI
YNQVNGLTSV

SEQ ID NO: 80022 - protein, 10 aa, synthetic construct
  source 1..10: note = Seed: YPQVNGLTSI
YNQVNGLTSY

SEQ ID NO: 80023 - protein, 10 aa, synthetic construct
  source 1..10: note = Seed: YRRLISMMGF
YNRLISMMGF

SEQ ID NO: 80024 - protein, 10 aa, synthetic construct
  source 1..10: note = Seed: YRRLISMMGF
YNRLISMMGI

SEQ ID NO: 80025 - protein, 10 aa, synthetic construct
  source 1..10: note = Seed: YRRLISMMGF
YNRLISMMGL

SEQ ID NO: 80026 - protein, 10 aa, synthetic construct
  source 1..10: note = Seed: YRRLISMMGF
YNRLISMMGM

SEQ ID NO: 80027 - protein, 9 aa, synthetic construct
  source 1..9: note = Seed: YFRLTLGVY
YNRLTLGVF

SEQ ID NO: 80028 - protein, 9 aa, synthetic construct
  source 1..9: note = Seed: YFRLTLGVY
YNRLTLGVY

SEQ ID NO: 80029 - protein, 9 aa, synthetic construct
  source 1..9: note = Seed: YKRNRATRV
YNRNRATRL

SEQ ID NO: 80030 - protein, 9 aa, synthetic construct
  source 1..9: note = Seed: YYRSLPGVF
YNRSLPGVF

SEQ ID NO: 80031 - protein, 9 aa, synthetic construct
  source 1..9: note = Seed: YYRSLPGVF
YNRSLPGVY

SEQ ID NO: 80032 - protein, 9 aa, synthetic construct
  source 1..9: note = Seed: YYRYNLPTM
YNRYNLPTF

SEQ ID NO: 80033 - protein, 9 aa, synthetic construct
  source 1..9: note = Seed: YYRYNLPTM
YNRYNLPTK

SEQ ID NO: 80034 - protein, 10 aa, synthetic construct
  source 1..10: note = Seed: YYRYNLPTMC
YNRYNLPTMF

SEQ ID NO: 80035 - protein, 10 aa, synthetic construct
  source 1..10: note = Seed: YYRYNLPTMC
YNRYNLPTMI

SEQ ID NO: 80036 - protein, 10 aa, synthetic construct
  source 1..10: note = Seed: YYRYNLPTMC
YNRYNLPTML

SEQ ID NO: 80037 - protein, 10 aa, synthetic construct
  source 1..10: note = Seed: YYRYNLPTMC
YNRYNLPTMM

SEQ ID NO: 80038 - protein, 10 aa, synthetic construct
  source 1..10: note = Seed: YYRYNLPTMC
YNRYNLPTMV

SEQ ID NO: 80039 - protein, 9 aa, synthetic construct
  source 1..9: note = Seed: YYRYNLPTM
YNRYNLPTY

SEQ ID NO: 80040 - protein, 10 aa, synthetic construct
  source 1..10: note = Seed: YSRYRIGNYK
YNRYRIGNYF

SEQ ID NO: 80041 - protein, 10 aa, synthetic construct
  source 1..10: note = Seed: YSRYRIGNYK
YNRYRIGNYK

SEQ ID NO: 80042 - protein, 11 aa, synthetic construct
  source 1..11: note = Seed: YSRYRIGNYKL
YNRYRIGNYKF

SEQ ID NO: 80043 - protein, 10 aa, synthetic construct
  source 1..10: note = Seed: YSRYRIGNYK
YNRYRIGNYL

SEQ ID NO: 80044 - protein, 10 aa, synthetic construct
  source 1..10: note = Seed: YSRYRIGNYK
YNRYRIGNYM

SEQ ID NO: 80045 - protein, 10 aa, synthetic construct
  source 1..10: note = Seed: YSRYRIGNYK
YNRYRIGNYR

SEQ ID NO: 80046 - protein, 9 aa, synthetic construct
  source 1..9: note = Seed: YSSANNCTF
YNSANNCTF

SEQ ID NO: 80047 - protein, 11 aa, synthetic construct
  source 1..11: note = Seed: YSSANNCTFEY
YNSANNCTFEW

SEQ ID NO: 80048 - protein, 10 aa, synthetic construct
  source 1..10: note = Seed: YNSASFSTFK
YNSASFSTFR

SEQ ID NO: 80049 - protein, 9 aa, synthetic construct
  source 1..9: note = Seed: YNSASFSTF
YNSASFSTM

SEQ ID NO: 80050 - protein, 9 aa, synthetic construct
  source 1..9: note = Seed: YNSASFSTF
YNSASFSTY

SEQ ID NO: 80051 - protein, 9 aa, synthetic construct
  source 1..9: note = Seed: YASAVVLLI
YNSAVVLLF

SEQ ID NO: 80052 - protein, 10 aa, synthetic construct
  source 1..10: note = Seed: YASAVVLLIL
YNSAVVLLIW

SEQ ID NO: 80053 - protein, 9 aa, synthetic construct
  source 1..9: note = Seed: YASAVVLLI
YNSAVVLLW

SEQ ID NO: 80054 - protein, 9 aa, synthetic construct
  source 1..9: note = Seed: YASAVVLLI
YNSAVVLLY

SEQ ID NO: 80055 - protein, 11 aa, synthetic construct
  source 1..11: note = Seed: YYSLLMPILTL
YNSLLMPILTV

SEQ ID NO: 80056 - protein, 11 aa, synthetic construct
  source 1..11: note = Seed: YRSLPGVFCGV
YNSLPGVFCGI

SEQ ID NO: 80057 - protein, 11 aa, synthetic construct
  source 1..11: note = Seed: YRSLPGVFCGV
YNSLPGVFCGV

SEQ ID NO: 80058 - protein, 10 aa, synthetic construct
  source 1..10: note = Seed: YESLRPDTRY
YNSLRPDTRF

SEQ ID NO: 80059 - protein, 10 aa, synthetic construct
  source 1..10: note = Seed: YESLRPDTRY
YNSLRPDTRW

SEQ ID NO: 80060 - protein, 10 aa, synthetic construct
  source 1..10: note = Seed: YTSNPTTFHL
YNSNPTTFHF

SEQ ID NO: 80061 - protein, 10 aa, synthetic construct
  source 1..10: note = Seed: YTSNPTTFHL
YNSNPTTFHW

SEQ ID NO: 80062 - protein, 10 aa, synthetic construct
  source 1..10: note = Seed: YTSNPTTFHL
YNSNPTTFHY

SEQ ID NO: 80063 - protein, 9 aa, synthetic construct
  source 1..9: note = Seed: YTSNPTTFH
YNSNPTTFR

SEQ ID NO: 80064 - protein, 10 aa, synthetic construct
  source 1..10: note = Seed: YLTFYLTNDV
YNTFYLTNDV

SEQ ID NO: 80065 - protein, 10 aa, synthetic construct
  source 1..10: note = Seed: YLTNDVSFLA
YNTNDVSFLA

SEQ ID NO: 80066 - protein, 10 aa, synthetic construct
  source 1..10: note = Seed: YLTNDVSFLA
YNTNDVSFLI

SEQ ID NO: 80067 - protein, 10 aa, synthetic construct
  source 1..10: note = Seed: YLTNDVSFLA
YNTNDVSFLL

SEQ ID NO: 80068 - protein, 10 aa, synthetic construct
  source 1..10: note = Seed: YLTNDVSFLA
YNTNDVSFLM

SEQ ID NO: 80069 - protein, 10 aa, synthetic construct
  source 1..10: note = Seed: YLTNDVSFLA
YNTNDVSFLV

SEQ ID NO: 80070 - protein, 10 aa, synthetic construct
  source 1..10: note = Seed: YFTSDYYQLY
YNTSDYYQLK

SEQ ID NO: 80071 - protein, 10 aa, synthetic construct
  source 1..10: note = Seed: YFTSDYYQLY
YNTSDYYQLR

SEQ ID NO: 80072 - protein, 10 aa, synthetic construct
  source 1..10: note = Seed: YFTSDYYQLY
YNTSDYYQLW

SEQ ID NO: 80073 - protein, 10 aa, synthetic construct
  source 1..10: note = Seed: YFTSDYYQLY
YNTSDYYQLY

SEQ ID NO: 80074 - protein, 11 aa, synthetic construct
  source 1..11: note = Seed: YYTSNPTTFHL
YNTSNPTTFHF

SEQ ID NO: 80075 - protein, 11 aa, synthetic construct
  source 1..11: note = Seed: YYTSNPTTFHL
YNTSNPTTFHW

SEQ ID NO: 80076 - protein, 10 aa, synthetic construct
  source 1..10: note = Seed: YTTTIKPVTY
YNTTIKPVTW

SEQ ID NO: 80077 - protein, 11 aa, synthetic construct
  source 1..11: note = Seed: YTTTIKPVTYK
YNTTIKPVTYR

SEQ ID NO: 80078 - protein, 9 aa, synthetic construct
  source 1..9: note = Seed: YLVSTQEFR
YNVSTQEFR

SEQ ID NO: 80079 - protein, 10 aa, synthetic construct
  source 1..10: note = Seed: YLVSTQEFRY
YNVSTQEFRY

SEQ ID NO: 80080 - protein, 9 aa, synthetic construct
  source 1..9: note = Seed: YFVVKRHTF
YNVVKRHTL

SEQ ID NO: 80081 - protein, 10 aa, synthetic construct
  source 1..10: note = Seed: YYVWKSYVHV
YNVWKSYVHV

SEQ ID NO: 80082 - protein, 9 aa, synthetic construct
  source 1..9: note = Seed: YYVWKSYVH
YNVWKSYVY

SEQ ID NO: 80083 - protein, 10 aa, synthetic construct
  source 1..10: note = Seed: YVYANGGKGF
YNYANGGKGF

SEQ ID NO: 80084 - protein, 10 aa, synthetic construct
  source 1..10: note = Seed: YVYANGGKGF
YNYANGGKGM

SEQ ID NO: 80085 - protein, 11 aa, synthetic construct
  source 1..11: note = Seed: YLYFIKGLNNL
YNYFIKGLNNF

SEQ ID NO: 80086 - protein, 10 aa, synthetic construct
  source 1..10: note = Seed: YDYLVSTQEF
YNYLVSTQEF

SEQ ID NO: 80087 - protein, 10 aa, synthetic construct
  source 1..10: note = Seed: YDYLVSTQEF
YNYLVSTQEI

SEQ ID NO: 80088 - protein, 10 aa, synthetic construct
  source 1..10: note = Seed: YDYLVSTQEF
YNYLVSTQEL

SEQ ID NO: 80089 - protein, 10 aa, synthetic construct
  source 1..10: note = Seed: YDYLVSTQEF
YNYLVSTQEM

SEQ ID NO: 80090 - protein, 10 aa, synthetic construct
  source 1..10: note = Seed: YDYLVSTQEF
YNYLVSTQEW

SEQ ID NO: 80091 - protein, 10 aa, synthetic construct
  source 1..10: note = Seed: YDYLVSTQEF
YNYLVSTQEY

SEQ ID NO: 80092 - protein, 9 aa, synthetic construct
  source 1..9: note = Seed: YNYLYRLFR
YNYLYRLFK

SEQ ID NO: 80093 - protein, 10 aa, synthetic construct
  source 1..10: note = Seed: YNYLYRLFRK
YNYLYRLFRR

SEQ ID NO: 80094 - protein, 11 aa, synthetic construct
  source 1..11: note = Seed: YDYYRYNLPTM
YNYYRYNLPTF

SEQ ID NO: 80095 - protein, 11 aa, synthetic construct
  source 1..11: note = Seed: YDYYRYNLPTM
YNYYRYNLPTW

SEQ ID NO: 80096 - protein, 10 aa, synthetic construct
  source 1..10: note = Seed: YGANKDGIIW
YPANKDGIIF

SEQ ID NO: 80097 - protein, 10 aa, synthetic construct
  source 1..10: note = Seed: YGANKDGIIW
YPANKDGIIW

SEQ ID NO: 80098 - protein, 10 aa, synthetic construct
  source 1..10: note = Seed: YPANSIVCRF
YPANSIVCRL

SEQ ID NO: 80099 - protein, 10 aa, synthetic construct
  source 1..10: note = Seed: YPANSIVCRF
YPANSIVCRM

SEQ ID NO: 80100 - protein, 10 aa, synthetic construct
  source 1..10: note = Seed: YPANSIVCRF
YPANSIVCRW

SEQ ID NO: 80101 - protein, 10 aa, synthetic construct
  source 1..10: note = Seed: YPANSIVCRF
YPANSIVCRY

SEQ ID NO: 80102 - protein, 9 aa, synthetic construct
  source 1..9: note = Seed: YRARAGEAA
YPARAGEAL

SEQ ID NO: 80103 - protein, 10 aa, synthetic construct
  source 1..10: note = Seed: YAAVINGDRW
YPAVINGDRF

SEQ ID NO: 80104 - protein, 10 aa, synthetic construct
  source 1..10: note = Seed: YAAVINGDRW
YPAVINGDRW

SEQ ID NO: 80105 - protein, 10 aa, synthetic construct
  source 1..10: note = Seed: YKENSYTTTI
YPENSYTTTA

SEQ ID NO: 80106 - protein, 10 aa, synthetic construct
  source 1..10: note = Seed: YKENSYTTTI
YPENSYTTTL

SEQ ID NO: 80107 - protein, 10 aa, synthetic construct
  source 1..10: note = Seed: YKENSYTTTI
YPENSYTTTM

SEQ ID NO: 80108 - protein, 9 aa, synthetic construct
  source 1..9: note = Seed: YVFCTVNAL
YPFCTVNAA

SEQ ID NO: 80109 - protein, 9 aa, synthetic construct
  source 1..9: note = Seed: YVFCTVNAL
YPFCTVNAC

SEQ ID NO: 80110 - protein, 9 aa, synthetic construct
  source 1..9: note = Seed: YVFCTVNAL
YPFCTVNAF

SEQ ID NO: 80111 - protein, 9 aa, synthetic construct
  source 1..9: note = Seed: YVFCTVNAL
YPFCTVNAG

SEQ ID NO: 80112 - protein, 9 aa, synthetic construct
  source 1..9: note = Seed: YVFCTVNAL
YPFCTVNAH

SEQ ID NO: 80113 - protein, 9 aa, synthetic construct
  source 1..9: note = Seed: YVFCTVNAL
YPFCTVNAI

SEQ ID NO: 80114 - protein, 9 aa, synthetic construct
  source 1..9: note = Seed: YVFCTVNAL
YPFCTVNAL

SEQ ID NO: 80115 - protein, 9 aa, synthetic construct
  source 1..9: note = Seed: YVFCTVNAL
YPFCTVNAM

SEQ ID NO: 80116 - protein, 9 aa, synthetic construct
  source 1..9: note = Seed: YVFCTVNAL
YPFCTVNAN

SEQ ID NO: 80117 - protein, 9 aa, synthetic construct
  source 1..9: note = Seed: YVFCTVNAL
YPFCTVNAQ

SEQ ID NO: 80118 - protein, 9 aa, synthetic construct
  source 1..9: note = Seed: YVFCTVNAL
YPFCTVNAS

SEQ ID NO: 80119 - protein, 9 aa, synthetic construct
  source 1..9: note = Seed: YVFCTVNAL
YPFCTVNAT

SEQ ID NO: 80120 - protein, 9 aa, synthetic construct
  source 1..9: note = Seed: YVFCTVNAL
YPFCTVNAV

SEQ ID NO: 80121 - protein, 9 aa, synthetic construct
  source 1..9: note = Seed: YVFCTVNAL
YPFCTVNAW

SEQ ID NO: 80122 - protein, 9 aa, synthetic construct
  source 1..9: note = Seed: YVFCTVNAL
YPFCTVNAY

SEQ ID NO: 80123 - protein, 9 aa, synthetic construct
  source 1..9: note = Seed: YIFFASFYY
YPFFASFYA

SEQ ID NO: 80124 - protein, 9 aa, synthetic construct
  source 1..9: note = Seed: YIFFASFYY
YPFFASFYE

SEQ ID NO: 80125 - protein, 9 aa, synthetic construct
  source 1..9: note = Seed: YIFFASFYY
YPFFASFYF

SEQ ID NO: 80126 - protein, 9 aa, synthetic construct
  source 1..9: note = Seed: YIFFASFYY
YPFFASFYG

SEQ ID NO: 80127 - protein, 9 aa, synthetic construct
  source 1..9: note = Seed: YIFFASFYY
YPFFASFYH

SEQ ID NO: 80128 - protein, 9 aa, synthetic construct
  source 1..9: note = Seed: YIFFASFYY
YPFFASFYI

SEQ ID NO: 80129 - protein, 9 aa, synthetic construct
  source 1..9: note = Seed: YIFFASFYY
YPFFASFYK

SEQ ID NO: 80130 - protein, 9 aa, synthetic construct
  source 1..9: note = Seed: YIFFASFYY
YPFFASFYL

SEQ ID NO: 80131 - protein, 9 aa, synthetic construct
  source 1..9: note = Seed: YIFFASFYY
YPFFASFYM

SEQ ID NO: 80132 - protein, 9 aa, synthetic construct
  source 1..9: note = Seed: YIFFASFYY
YPFFASFYN

SEQ ID NO: 80133 - protein, 9 aa, synthetic construct
  source 1..9: note = Seed: YIFFASFYY
YPFFASFYQ

SEQ ID NO: 80134 - protein, 9 aa, synthetic construct
  source 1..9: note = Seed: YIFFASFYY
YPFFASFYR

SEQ ID NO: 80135 - protein, 9 aa, synthetic construct
  source 1..9: note = Seed: YIFFASFYY
YPFFASFYS

SEQ ID NO: 80136 - protein, 9 aa, synthetic construct
  source 1..9: note = Seed: YIFFASFYY
YPFFASFYT

SEQ ID NO: 80137 - protein, 9 aa, synthetic construct
  source 1..9: note = Seed: YIFFASFYY
YPFFASFYV

SEQ ID NO: 80138 - protein, 9 aa, synthetic construct
  source 1..9: note = Seed: YIFFASFYY
YPFFASFYW

SEQ ID NO: 80139 - protein, 9 aa, synthetic construct
  source 1..9: note = Seed: YIFFASFYY
YPFFASFYY

SEQ ID NO: 80140 - protein, 10 aa, synthetic construct
  source 1..10: note = Seed: YIFFASFYYV
YPFFASFYYF

SEQ ID NO: 80141 - protein, 10 aa, synthetic construct
  source 1..10: note = Seed: YIFFASFYYV
YPFFASFYYH

SEQ ID NO: 80142 - protein, 10 aa, synthetic construct
  source 1..10: note = Seed: YIFFASFYYV
YPFFASFYYI

SEQ ID NO: 80143 - protein, 10 aa, synthetic construct
  source 1..10: note = Seed: YIFFASFYYV
YPFFASFYYK

SEQ ID NO: 80144 - protein, 10 aa, synthetic construct
  source 1..10: note = Seed: YIFFASFYYV
YPFFASFYYL

SEQ ID NO: 80145 - protein, 10 aa, synthetic construct
  source 1..10: note = Seed: YIFFASFYYV
YPFFASFYYM

SEQ ID NO: 80146 - protein, 10 aa, synthetic construct
  source 1..10: note = Seed: YIFFASFYYV
YPFFASFYYR

SEQ ID NO: 80147 - protein, 10 aa, synthetic construct
  source 1..10: note = Seed: YIFFASFYYV
YPFFASFYYV

SEQ ID NO: 80148 - protein, 11 aa, synthetic construct
  source 1..11: note = Seed: YIFFASFYYVW
YPFFASFYYVY

SEQ ID NO: 80149 - protein, 10 aa, synthetic construct
  source 1..10: note = Seed: YIFFASFYYV
YPFFASFYYW

SEQ ID NO: 80150 - protein, 10 aa, synthetic construct
  source 1..10: note = Seed: YIFFASFYYV
YPFFASFYYY

SEQ ID NO: 80151 - protein, 9 aa, synthetic construct
  source 1..9: note = Seed: YWFFSNYLK
YPFFSNYLK

SEQ ID NO: 80152 - protein, 10 aa, synthetic construct
  source 1..10: note = Seed: YWFFSNYLKR
YPFFSNYLKK

SEQ ID NO: 80153 - protein, 10 aa, synthetic construct
  source 1..10: note = Seed: YWFFSNYLKR
YPFFSNYLKR

SEQ ID NO: 80154 - protein, 9 aa, synthetic construct
  source 1..9: note = Seed: YWFFSNYLK
YPFFSNYLR

SEQ ID NO: 80155 - protein, 9 aa, synthetic construct
  source 1..9: note = Seed: YWFFSNYLK
YPFFSNYLY

SEQ ID NO: 80156 - protein, 10 aa, synthetic construct
  source 1..10: note = Seed: YSFLPGVYSV
YPFLPGVYSF

SEQ ID NO: 80157 - protein, 10 aa, synthetic construct
  source 1..10: note = Seed: YSFLPGVYSV
YPFLPGVYSI

SEQ ID NO: 80158 - protein, 10 aa, synthetic construct
  source 1..10: note = Seed: YSFLPGVYSV
YPFLPGVYSL

SEQ ID NO: 80159 - protein, 10 aa, synthetic construct
  source 1..10: note = Seed: YSFLPGVYSV
YPFLPGVYSM

SEQ ID NO: 80160 - protein, 10 aa, synthetic construct
  source 1..10: note = Seed: YSFLPGVYSV
YPFLPGVYSW

SEQ ID NO: 80161 - protein, 10 aa, synthetic construct
  source 1..10: note = Seed: YVFTGYRVTK
YPFTGYRVTR

SEQ ID NO: 80162 - protein, 9 aa, synthetic construct
  source 1..9: note = Seed: YFFTLLLQL
YPFTLLLQY

SEQ ID NO: 80163 - protein, 9 aa, synthetic construct
  source 1..9: note = Seed: YPGQGLNGY
YPGQGLNGF

SEQ ID NO: 80164 - protein, 9 aa, synthetic construct
  source 1..9: note = Seed: YPGQGLNGY
YPGQGLNGM

SEQ ID NO: 80165 - protein, 9 aa, synthetic construct
  source 1..9: note = Seed: YPGQGLNGY
YPGQGLNGW

SEQ ID NO: 80166 - protein, 11 aa, synthetic construct
  source 1..11: note = Seed: YVGYLQPRTFL
YPGYLQPRTFF

SEQ ID NO: 80167 - protein, 11 aa, synthetic construct
  source 1..11: note = Seed: YVGYLQPRTFL
YPGYLQPRTFW

SEQ ID NO: 80168 - protein, 9 aa, synthetic construct
  source 1..9: note = Seed: YFIASFRLF
YPIASFRLF

SEQ ID NO: 80169 - protein, 10 aa, synthetic construct
  source 1..10: note = Seed: YFIASFRLFA
YPIASFRLFI

SEQ ID NO: 80170 - protein, 10 aa, synthetic construct
  source 1..10: note = Seed: YFIASFRLFA
YPIASFRLFL

SEQ ID NO: 80171 - protein, 10 aa, synthetic construct
  source 1..10: note = Seed: YFIASFRLFA
YPIASFRLFV

SEQ ID NO: 80172 - protein, 9 aa, synthetic construct
  source 1..9: note = Seed: YFIASFRLF
YPIASFRLH

SEQ ID NO: 80173 - protein, 9 aa, synthetic construct
  source 1..9: note = Seed: YFIASFRLF
YPIASFRLL

SEQ ID NO: 80174 - protein, 9 aa, synthetic construct
  source 1..9: note = Seed: YFIASFRLF
YPIASFRLM

SEQ ID NO: 80175 - protein, 9 aa, synthetic construct
  source 1..9: note = Seed: YFIASFRLF
YPIASFRLW

SEQ ID NO: 80176 - protein, 9 aa, synthetic construct
  source 1..9: note = Seed: YFIASFRLF
YPIASFRLY

SEQ ID NO: 80177 - protein, 9 aa, synthetic construct
  source 1..9: note = Seed: YAISAKNRA
YPISAKNRA

SEQ ID NO: 80178 - protein, 8 aa, synthetic construct
  source 1..8: note = Seed: YPKCDRAM
YPKCDRAL

SEQ ID NO: 80179 - protein, 11 aa, synthetic construct
  source 1..11: note = Seed: YFKIYSKHTPI
YPKIYSKHTPL

SEQ ID NO: 80180 - protein, 11 aa, synthetic construct
  source 1..11: note = Seed: YFKIYSKHTPI
YPKIYSKHTPM

SEQ ID NO: 80181 - protein, 9 aa, synthetic construct
  source 1..9: note = Seed: YDKLQFTSL
YPKLQFTSA

SEQ ID NO: 80182 - protein, 9 aa, synthetic construct
  source 1..9: note = Seed: YDKLQFTSL
YPKLQFTSF

SEQ ID NO: 80183 - protein, 9 aa, synthetic construct
  source 1..9: note = Seed: YDKLQFTSL
YPKLQFTSI

SEQ ID NO: 80184 - protein, 9 aa, synthetic construct
  source 1..9: note = Seed: YDKLQFTSL
YPKLQFTSL

SEQ ID NO: 80185 - protein, 11 aa, synthetic construct
  source 1..11: note = Seed: YDKLQFTSLEI
YPKLQFTSLEV

SEQ ID NO: 80186 - protein, 9 aa, synthetic construct
  source 1..9: note = Seed: YDKLQFTSL
YPKLQFTSM

SEQ ID NO: 80187 - protein, 9 aa, synthetic construct
  source 1..9: note = Seed: YDKLQFTSL
YPKLQFTSV

SEQ ID NO: 80188 - protein, 8 aa, synthetic construct
  source 1..8: note = Seed: YLKLRSDV
YPKLRSDL

SEQ ID NO: 80189 - protein, 8 aa, synthetic construct
  source 1..8: note = Seed: YLKLRSDV
YPKLRSDM

SEQ ID NO: 80190 - protein, 9 aa, synthetic construct
  source 1..9: note = Seed: YLKLRSDVL
YPKLRSDVA

SEQ ID NO: 80191 - protein, 9 aa, synthetic construct
  source 1..9: note = Seed: YLKLRSDVL
YPKLRSDVF

SEQ ID NO: 80192 - protein, 9 aa, synthetic construct
  source 1..9: note = Seed: YLKLRSDVL
YPKLRSDVI

SEQ ID NO: 80193 - protein, 9 aa, synthetic construct
  source 1..9: note = Seed: YLKLRSDVL
YPKLRSDVL

SEQ ID NO: 80194 - protein, 10 aa, synthetic construct
  source 1..10: note = Seed: YLKLRSDVLL
YPKLRSDVLL

SEQ ID NO: 80195 - protein, 10 aa, synthetic construct
  source 1..10: note = Seed: YLKLRSDVLL
YPKLRSDVLM

SEQ ID NO: 80196 - protein, 9 aa, synthetic construct
  source 1..9: note = Seed: YLKLRSDVL
YPKLRSDVM

SEQ ID NO: 80197 - protein, 9 aa, synthetic construct
  source 1..9: note = Seed: YLKLRSDVL
YPKLRSDVV

SEQ ID NO: 80198 - protein, 8 aa, synthetic construct
  source 1..8: note = Seed: YLKRRVVF
YPKRRVVA

SEQ ID NO: 80199 - protein, 8 aa, synthetic construct
  source 1..8: note = Seed: YLKRRVVF
YPKRRVVF

SEQ ID NO: 80200 - protein, 11 aa, synthetic construct
  source 1..11: note = Seed: YLKRRVVFNGV
YPKRRVVFNGL

SEQ ID NO: 80201 - protein, 8 aa, synthetic construct
  source 1..8: note = Seed: YLKRRVVF
YPKRRVVI

SEQ ID NO: 80202 - protein, 8 aa, synthetic construct
  source 1..8: note = Seed: YLKRRVVF
YPKRRVVL

SEQ ID NO: 80203 - protein, 8 aa, synthetic construct
  source 1..8: note = Seed: YLKRRVVF
YPKRRVVM

SEQ ID NO: 80204 - protein, 8 aa, synthetic construct
  source 1..8: note = Seed: YLKRRVVF
YPKRRVVV

SEQ ID NO: 80205 - protein, 9 aa, synthetic construct
  source 1..9: note = Seed: YIKWDLLKY
YPKWDLLKF

SEQ ID NO: 80206 - protein, 9 aa, synthetic construct
  source 1..9: note = Seed: YIKWDLLKY
YPKWDLLKM

SEQ ID NO: 80207 - protein, 9 aa, synthetic construct
  source 1..9: note = Seed: YIKWDLLKY
YPKWDLLKY

SEQ ID NO: 80208 - protein, 8 aa, synthetic construct
  source 1..8: note = Seed: YIKWPWYI
YPKWPWYF

SEQ ID NO: 80209 - protein, 9 aa, synthetic construct
  source 1..9: note = Seed: YNKYKYFSG
YPKYKYFSA

SEQ ID NO: 80210 - protein, 9 aa, synthetic construct
  source 1..9: note = Seed: YNKYKYFSG
YPKYKYFSC

SEQ ID NO: 80211 - protein, 9 aa, synthetic construct
  source 1..9: note = Seed: YNKYKYFSG
YPKYKYFSF

SEQ ID NO: 80212 - protein, 9 aa, synthetic construct
  source 1..9: note = Seed: YNKYKYFSG
YPKYKYFSG

SEQ ID NO: 80213 - protein, 9 aa, synthetic construct
  source 1..9: note = Seed: YNKYKYFSG
YPKYKYFSI

SEQ ID NO: 80214 - protein, 9 aa, synthetic construct
  source 1..9: note = Seed: YNKYKYFSG
YPKYKYFSL

SEQ ID NO: 80215 - protein, 9 aa, synthetic construct
  source 1..9: note = Seed: YNKYKYFSG
YPKYKYFSM

SEQ ID NO: 80216 - protein, 9 aa, synthetic construct
  source 1..9: note = Seed: YNKYKYFSG
YPKYKYFST

SEQ ID NO: 80217 - protein, 9 aa, synthetic construct
  source 1..9: note = Seed: YNKYKYFSG
YPKYKYFSV

SEQ ID NO: 80218 - protein, 9 aa, synthetic construct
  source 1..9: note = Seed: YPLECIKDL
YPLECIKDF

SEQ ID NO: 80219 - protein, 10 aa, synthetic construct
  source 1..10: note = Seed: YPLECIKDLL
YPLECIKDLF

SEQ ID NO: 80220 - protein, 10 aa, synthetic construct
  source 1..10: note = Seed: YPLECIKDLL
YPLECIKDLM

SEQ ID NO: 80221 - protein, 10 aa, synthetic construct
  source 1..10: note = Seed: YPLECIKDLL
YPLECIKDLW

SEQ ID NO: 80222 - protein, 10 aa, synthetic construct
  source 1..10: note = Seed: YPLECIKDLL
YPLECIKDLY

SEQ ID NO: 80223 - protein, 9 aa, synthetic construct
  source 1..9: note = Seed: YPLECIKDL
YPLECIKDM

SEQ ID NO: 80224 - protein, 9 aa, synthetic construct
  source 1..9: note = Seed: YPLECIKDL
YPLECIKDW

SEQ ID NO: 80225 - protein, 9 aa, synthetic construct
  source 1..9: note = Seed: YPLECIKDL
YPLECIKDY

SEQ ID NO: 80226 - protein, 9 aa, synthetic construct
  source 1..9: note = Seed: YRLFRKSNL
YPLFRKSNL

SEQ ID NO: 80227 - protein, 10 aa, synthetic construct
  source 1..10: note = Seed: YRLFRKSNLK
YPLFRKSNLK

SEQ ID NO: 80228 - protein, 10 aa, synthetic construct
  source 1..10: note = Seed: YRLFRKSNLK
YPLFRKSNLR

SEQ ID NO: 80229 - protein, 9 aa, synthetic construct
  source 1..9: note = Seed: YRLFRKSNL
YPLFRKSNM

SEQ ID NO: 80230 - protein, 9 aa, synthetic construct
  source 1..9: note = Seed: YILFTRFFY
YPLFTRFFF

SEQ ID NO: 80231 - protein, 9 aa, synthetic construct
  source 1..9: note = Seed: YILFTRFFY
YPLFTRFFL

SEQ ID NO: 80232 - protein, 9 aa, synthetic construct
  source 1..9: note = Seed: YILFTRFFY
YPLFTRFFM

SEQ ID NO: 80233 - protein, 9 aa, synthetic construct
  source 1..9: note = Seed: YILFTRFFY
YPLFTRFFR

SEQ ID NO: 80234 - protein, 9 aa, synthetic construct
  source 1..9: note = Seed: YILFTRFFY
YPLFTRFFW

SEQ ID NO: 80235 - protein, 9 aa, synthetic construct
  source 1..9: note = Seed: YILFTRFFY
YPLFTRFFY

SEQ ID NO: 80236 - protein, 10 aa, synthetic construct
  source 1..10: note = Seed: YILFTRFFYV
YPLFTRFFYA

SEQ ID NO: 80237 - protein, 10 aa, synthetic construct
  source 1..10: note = Seed: YILFTRFFYV
YPLFTRFFYC

SEQ ID NO: 80238 - protein, 10 aa, synthetic construct
  source 1..10: note = Seed: YILFTRFFYV
YPLFTRFFYF

SEQ ID NO: 80239 - protein, 10 aa, synthetic construct
  source 1..10: note = Seed: YILFTRFFYV
YPLFTRFFYI

SEQ ID NO: 80240 - protein, 10 aa, synthetic construct
  source 1..10: note = Seed: YILFTRFFYV
YPLFTRFFYK

SEQ ID NO: 80241 - protein, 10 aa, synthetic construct
  source 1..10: note = Seed: YILFTRFFYV
YPLFTRFFYL

SEQ ID NO: 80242 - protein, 10 aa, synthetic construct
  source 1..10: note = Seed: YILFTRFFYV
YPLFTRFFYM

SEQ ID NO: 80243 - protein, 10 aa, synthetic construct
  source 1..10: note = Seed: YILFTRFFYV
YPLFTRFFYR

SEQ ID NO: 80244 - protein, 10 aa, synthetic construct
  source 1..10: note = Seed: YILFTRFFYV
YPLFTRFFYS

SEQ ID NO: 80245 - protein, 10 aa, synthetic construct
  source 1..10: note = Seed: YILFTRFFYV
YPLFTRFFYT

SEQ ID NO: 80246 - protein, 10 aa, synthetic construct
  source 1..10: note = Seed: YILFTRFFYV
YPLFTRFFYV

SEQ ID NO: 80247 - protein, 11 aa, synthetic construct
  source 1..11: note = Seed: YILFTRFFYVL
YPLFTRFFYVA

SEQ ID NO: 80248 - protein, 11 aa, synthetic construct
  source 1..11: note = Seed: YILFTRFFYVL
YPLFTRFFYVC

SEQ ID NO: 80249 - protein, 11 aa, synthetic construct
  source 1..11: note = Seed: YILFTRFFYVL
YPLFTRFFYVD

SEQ ID NO: 80250 - protein, 11 aa, synthetic construct
  source 1..11: note = Seed: YILFTRFFYVL
YPLFTRFFYVE

SEQ ID NO: 80251 - protein, 11 aa, synthetic construct
  source 1..11: note = Seed: YILFTRFFYVL
YPLFTRFFYVF

SEQ ID NO: 80252 - protein, 11 aa, synthetic construct
  source 1..11: note = Seed: YILFTRFFYVL
YPLFTRFFYVG

SEQ ID NO: 80253 - protein, 11 aa, synthetic construct
  source 1..11: note = Seed: YILFTRFFYVL
YPLFTRFFYVH

SEQ ID NO: 80254 - protein, 11 aa, synthetic construct
  source 1..11: note = Seed: YILFTRFFYVL
YPLFTRFFYVI

SEQ ID NO: 80255 - protein, 11 aa, synthetic construct
  source 1..11: note = Seed: YILFTRFFYVL
YPLFTRFFYVK

SEQ ID NO: 80256 - protein, 11 aa, synthetic construct
  source 1..11: note = Seed: YILFTRFFYVL
YPLFTRFFYVL

SEQ ID NO: 80257 - protein, 11 aa, synthetic construct
  source 1..11: note = Seed: YILFTRFFYVL
YPLFTRFFYVM

SEQ ID NO: 80258 - protein, 11 aa, synthetic construct
  source 1..11: note = Seed: YILFTRFFYVL
YPLFTRFFYVN

SEQ ID NO: 80259 - protein, 11 aa, synthetic construct
  source 1..11: note = Seed: YILFTRFFYVL
YPLFTRFFYVP

SEQ ID NO: 80260 - protein, 11 aa, synthetic construct
  source 1..11: note = Seed: YILFTRFFYVL
YPLFTRFFYVQ

SEQ ID NO: 80261 - protein, 11 aa, synthetic construct
  source 1..11: note = Seed: YILFTRFFYVL
YPLFTRFFYVR

SEQ ID NO: 80262 - protein, 11 aa, synthetic construct
  source 1..11: note = Seed: YILFTRFFYVL
YPLFTRFFYVS

SEQ ID NO: 80263 - protein, 11 aa, synthetic construct
  source 1..11: note = Seed: YILFTRFFYVL
YPLFTRFFYVT

SEQ ID NO: 80264 - protein, 11 aa, synthetic construct
  source 1..11: note = Seed: YILFTRFFYVL
YPLFTRFFYVV

SEQ ID NO: 80265 - protein, 11 aa, synthetic construct
  source 1..11: note = Seed: YILFTRFFYVL
YPLFTRFFYVW

SEQ ID NO: 80266 - protein, 11 aa, synthetic construct
  source 1..11: note = Seed: YILFTRFFYVL
YPLFTRFFYVY

SEQ ID NO: 80267 - protein, 10 aa, synthetic construct
  source 1..10: note = Seed: YILFTRFFYV
YPLFTRFFYY

SEQ ID NO: 80268 - protein, 10 aa, synthetic construct
  source 1..10: note = Seed: YSLLMPILTL
YPLLMPILTA

SEQ ID NO: 80269 - protein, 10 aa, synthetic construct
  source 1..10: note = Seed: YSLLMPILTL
YPLLMPILTI

SEQ ID NO: 80270 - protein, 10 aa, synthetic construct
  source 1..10: note = Seed: YSLLMPILTL
YPLLMPILTL

SEQ ID NO: 80271 - protein, 10 aa, synthetic construct
  source 1..10: note = Seed: YSLLMPILTL
YPLLMPILTV

SEQ ID NO: 80272 - protein, 10 aa, synthetic construct
  source 1..10: note = Seed: YHLMSFPQSA
YPLMSFPQSA

SEQ ID NO: 80273 - protein, 11 aa, synthetic construct
  source 1..11: note = Seed: YHLMSFPQSAP
YPLMSFPQSAV

SEQ ID NO: 80274 - protein, 10 aa, synthetic construct
  source 1..10: note = Seed: YHLMSFPQSA
YPLMSFPQSI

SEQ ID NO: 80275 - protein, 10 aa, synthetic construct
  source 1..10: note = Seed: YHLMSFPQSA
YPLMSFPQSL

SEQ ID NO: 80276 - protein, 10 aa, synthetic construct
  source 1..10: note = Seed: YHLMSFPQSA
YPLMSFPQSM

SEQ ID NO: 80277 - protein, 10 aa, synthetic construct
  source 1..10: note = Seed: YHLMSFPQSA
YPLMSFPQST

SEQ ID NO: 80278 - protein, 10 aa, synthetic construct
  source 1..10: note = Seed: YHLMSFPQSA
YPLMSFPQSV

SEQ ID NO: 80279 - protein, 10 aa, synthetic construct
  source 1..10: note = Seed: YDLSVVNARL
YPLSVVNARA

SEQ ID NO: 80280 - protein, 10 aa, synthetic construct
  source 1..10: note = Seed: YDLSVVNARL
YPLSVVNARI

SEQ ID NO: 80281 - protein, 10 aa, synthetic construct
  source 1..10: note = Seed: YDLSVVNARL
YPLSVVNARL

SEQ ID NO: 80282 - protein, 10 aa, synthetic construct
  source 1..10: note = Seed: YDLSVVNARL
YPLSVVNARM

SEQ ID NO: 80283 - protein, 10 aa, synthetic construct
  source 1..10: note = Seed: YDLSVVNARL
YPLSVVNARV

SEQ ID NO: 80284 - protein, 8 aa, synthetic construct
  source 1..8: note = Seed: YTMADLVY
YPMADLVF

SEQ ID NO: 80285 - protein, 8 aa, synthetic construct
  source 1..8: note = Seed: YTMADLVY
YPMADLVL

SEQ ID NO: 80286 - protein, 8 aa, synthetic construct
  source 1..8: note = Seed: YTMADLVY
YPMADLVM

SEQ ID NO: 80287 - protein, 8 aa, synthetic construct
  source 1..8: note = Seed: YTMADLVY
YPMADLVY

SEQ ID NO: 80288 - protein, 9 aa, synthetic construct
  source 1..9: note = Seed: YTMADLVYA
YPMADLVYA

SEQ ID NO: 80289 - protein, 10 aa, synthetic construct
  source 1..10: note = Seed: YTMADLVYAL
YPMADLVYAA

SEQ ID NO: 80290 - protein, 10 aa, synthetic construct
  source 1..10: note = Seed: YTMADLVYAL
YPMADLVYAC

SEQ ID NO: 80291 - protein, 10 aa, synthetic construct
  source 1..10: note = Seed: YTMADLVYAL
YPMADLVYAF

SEQ ID NO: 80292 - protein, 10 aa, synthetic construct
  source 1..10: note = Seed: YTMADLVYAL
YPMADLVYAG

SEQ ID NO: 80293 - protein, 10 aa, synthetic construct
  source 1..10: note = Seed: YTMADLVYAL
YPMADLVYAH

SEQ ID NO: 80294 - protein, 10 aa, synthetic construct
  source 1..10: note = Seed: YTMADLVYAL
YPMADLVYAI

SEQ ID NO: 80295 - protein, 10 aa, synthetic construct
  source 1..10: note = Seed: YTMADLVYAL
YPMADLVYAL

SEQ ID NO: 80296 - protein, 11 aa, synthetic construct
  source 1..11: note = Seed: YTMADLVYALR
YPMADLVYALA

SEQ ID NO: 80297 - protein, 11 aa, synthetic construct
  source 1..11: note = Seed: YTMADLVYALR
YPMADLVYALC

SEQ ID NO: 80298 - protein, 11 aa, synthetic construct
  source 1..11: note = Seed: YTMADLVYALR
YPMADLVYALD

SEQ ID NO: 80299 - protein, 11 aa, synthetic construct
  source 1..11: note = Seed: YTMADLVYALR
YPMADLVYALE

SEQ ID NO: 80300 - protein, 11 aa, synthetic construct
  source 1..11: note = Seed: YTMADLVYALR
YPMADLVYALF

SEQ ID NO: 80301 - protein, 11 aa, synthetic construct
  source 1..11: note = Seed: YTMADLVYALR
YPMADLVYALG

SEQ ID NO: 80302 - protein, 11 aa, synthetic construct
  source 1..11: note = Seed: YTMADLVYALR
YPMADLVYALH

SEQ ID NO: 80303 - protein, 11 aa, synthetic construct
  source 1..11: note = Seed: YTMADLVYALR
YPMADLVYALI

SEQ ID NO: 80304 - protein, 11 aa, synthetic construct
  source 1..11: note = Seed: YTMADLVYALR
YPMADLVYALK

SEQ ID NO: 80305 - protein, 11 aa, synthetic construct
  source 1..11: note = Seed: YTMADLVYALR
YPMADLVYALL

SEQ ID NO: 80306 - protein, 11 aa, synthetic construct
  source 1..11: note = Seed: YTMADLVYALR
YPMADLVYALM

SEQ ID NO: 80307 - protein, 11 aa, synthetic construct
  source 1..11: note = Seed: YTMADLVYALR
YPMADLVYALN

SEQ ID NO: 80308 - protein, 11 aa, synthetic construct
  source 1..11: note = Seed: YTMADLVYALR
YPMADLVYALP

SEQ ID NO: 80309 - protein, 11 aa, synthetic construct
  source 1..11: note = Seed: YTMADLVYALR
YPMADLVYALQ

SEQ ID NO: 80310 - protein, 11 aa, synthetic construct
  source 1..11: note = Seed: YTMADLVYALR
YPMADLVYALR

SEQ ID NO: 80311 - protein, 11 aa, synthetic construct
  source 1..11: note = Seed: YTMADLVYALR
YPMADLVYALS

SEQ ID NO: 80312 - protein, 11 aa, synthetic construct
  source 1..11: note = Seed: YTMADLVYALR
YPMADLVYALT

SEQ ID NO: 80313 - protein, 11 aa, synthetic construct
  source 1..11: note = Seed: YTMADLVYALR
YPMADLVYALV

SEQ ID NO: 80314 - protein, 11 aa, synthetic construct
  source 1..11: note = Seed: YTMADLVYALR
YPMADLVYALW

SEQ ID NO: 80315 - protein, 11 aa, synthetic construct
  source 1..11: note = Seed: YTMADLVYALR
YPMADLVYALY

SEQ ID NO: 80316 - protein, 10 aa, synthetic construct
  source 1..10: note = Seed: YTMADLVYAL
YPMADLVYAM

SEQ ID NO: 80317 - protein, 10 aa, synthetic construct
  source 1..10: note = Seed: YTMADLVYAL
YPMADLVYAS

SEQ ID NO: 80318 - protein, 10 aa, synthetic construct
  source 1..10: note = Seed: YTMADLVYAL
YPMADLVYAT

SEQ ID NO: 80319 - protein, 10 aa, synthetic construct
  source 1..10: note = Seed: YTMADLVYAL
YPMADLVYAV

SEQ ID NO: 80320 - protein, 10 aa, synthetic construct
  source 1..10: note = Seed: YTMADLVYAL
YPMADLVYAW

SEQ ID NO: 80321 - protein, 10 aa, synthetic construct
  source 1..10: note = Seed: YTMADLVYAL
YPMADLVYAY

SEQ ID NO: 80322 - protein, 9 aa, synthetic construct
  source 1..9: note = Seed: YTMADLVYA
YPMADLVYC

SEQ ID NO: 80323 - protein, 9 aa, synthetic construct
  source 1..9: note = Seed: YTMADLVYA
YPMADLVYI

SEQ ID NO: 80324 - protein, 9 aa, synthetic construct
  source 1..9: note = Seed: YTMADLVYA
YPMADLVYP

SEQ ID NO: 80325 - protein, 9 aa, synthetic construct
  source 1..9: note = Seed: YTMADLVYA
YPMADLVYR

SEQ ID NO: 80326 - protein, 9 aa, synthetic construct
  source 1..9: note = Seed: YTMADLVYA
YPMADLVYS

SEQ ID NO: 80327 - protein, 9 aa, synthetic construct
  source 1..9: note = Seed: YTMADLVYA
YPMADLVYT

SEQ ID NO: 80328 - protein, 9 aa, synthetic construct
  source 1..9: note = Seed: YTMADLVYA
YPMADLVYV

SEQ ID NO: 80329 - protein, 9 aa, synthetic construct
  source 1..9: note = Seed: YVMHANYIF
YPMHANYIA

SEQ ID NO: 80330 - protein, 9 aa, synthetic construct
  source 1..9: note = Seed: YVMHANYIF
YPMHANYIC

SEQ ID NO: 80331 - protein, 9 aa, synthetic construct
  source 1..9: note = Seed: YVMHANYIF
YPMHANYIE

SEQ ID NO: 80332 - protein, 9 aa, synthetic construct
  source 1..9: note = Seed: YVMHANYIF
YPMHANYIF

SEQ ID NO: 80333 - protein, 10 aa, synthetic construct
  source 1..10: note = Seed: YVMHANYIFW
YPMHANYIFF

SEQ ID NO: 80334 - protein, 10 aa, synthetic construct
  source 1..10: note = Seed: YVMHANYIFW
YPMHANYIFI

SEQ ID NO: 80335 - protein, 10 aa, synthetic construct
  source 1..10: note = Seed: YVMHANYIFW
YPMHANYIFL

SEQ ID NO: 80336 - protein, 10 aa, synthetic construct
  source 1..10: note = Seed: YVMHANYIFW
YPMHANYIFM

SEQ ID NO: 80337 - protein, 10 aa, synthetic construct
  source 1..10: note = Seed: YVMHANYIFW
YPMHANYIFW

SEQ ID NO: 80338 - protein, 10 aa, synthetic construct
  source 1..10: note = Seed: YVMHANYIFW
YPMHANYIFY

SEQ ID NO: 80339 - protein, 9 aa, synthetic construct
  source 1..9: note = Seed: YVMHANYIF
YPMHANYIG

SEQ ID NO: 80340 - protein, 9 aa, synthetic construct
  source 1..9: note = Seed: YVMHANYIF
YPMHANYIH

SEQ ID NO: 80341 - protein, 9 aa, synthetic construct
  source 1..9: note = Seed: YVMHANYIF
YPMHANYII

SEQ ID NO: 80342 - protein, 9 aa, synthetic construct
  source 1..9: note = Seed: YVMHANYIF
YPMHANYIL

SEQ ID NO: 80343 - protein, 9 aa, synthetic construct
  source 1..9: note = Seed: YVMHANYIF
YPMHANYIM

SEQ ID NO: 80344 - protein, 9 aa, synthetic construct
  source 1..9: note = Seed: YVMHANYIF
YPMHANYIN

SEQ ID NO: 80345 - protein, 9 aa, synthetic construct
  source 1..9: note = Seed: YVMHANYIF
YPMHANYIQ

SEQ ID NO: 80346 - protein, 9 aa, synthetic construct
  source 1..9: note = Seed: YVMHANYIF
YPMHANYIS

SEQ ID NO: 80347 - protein, 9 aa, synthetic construct
  source 1..9: note = Seed: YVMHANYIF
YPMHANYIT

SEQ ID NO: 80348 - protein, 9 aa, synthetic construct
  source 1..9: note = Seed: YVMHANYIF
YPMHANYIV

SEQ ID NO: 80349 - protein, 9 aa, synthetic construct
  source 1..9: note = Seed: YVMHANYIF
YPMHANYIW

SEQ ID NO: 80350 - protein, 9 aa, synthetic construct
  source 1..9: note = Seed: YVMHANYIF
YPMHANYIY

SEQ ID NO: 80351 - protein, 9 aa, synthetic construct
  source 1..9: note = Seed: YTNDKACPL
YPNDKACPA

SEQ ID NO: 80352 - protein, 9 aa, synthetic construct
  source 1..9: note = Seed: YTNDKACPL
YPNDKACPF

SEQ ID NO: 80353 - protein, 9 aa, synthetic construct
  source 1..9: note = Seed: YTNDKACPL
YPNDKACPI

SEQ ID NO: 80354 - protein, 9 aa, synthetic construct
  source 1..9: note = Seed: YTNDKACPL
YPNDKACPL

SEQ ID NO: 80355 - protein, 9 aa, synthetic construct
  source 1..9: note = Seed: YTNDKACPL
YPNDKACPM

SEQ ID NO: 80356 - protein, 9 aa, synthetic construct
  source 1..9: note = Seed: YTNDKACPL
YPNDKACPV

SEQ ID NO: 80357 - protein, 9 aa, synthetic construct
  source 1..9: note = Seed: YQNNVFMSE
YPNNVFMSF

SEQ ID NO: 80358 - protein, 9 aa, synthetic construct
  source 1..9: note = Seed: YQNNVFMSE
YPNNVFMSY

SEQ ID NO: 80359 - protein, 9 aa, synthetic construct
  source 1..9: note = Seed: YVNTFSSTF
YPNTFSSTA

SEQ ID NO: 80360 - protein, 9 aa, synthetic construct
  source 1..9: note = Seed: YVNTFSSTF
YPNTFSSTF

SEQ ID NO: 80361 - protein, 9 aa, synthetic construct
  source 1..9: note = Seed: YVNTFSSTF
YPNTFSSTH

SEQ ID NO: 80362 - protein, 9 aa, synthetic construct
  source 1..9: note = Seed: YVNTFSSTF
YPNTFSSTI

SEQ ID NO: 80363 - protein, 9 aa, synthetic construct
  source 1..9: note = Seed: YVNTFSSTF
YPNTFSSTL

SEQ ID NO: 80364 - protein, 9 aa, synthetic construct
  source 1..9: note = Seed: YVNTFSSTF
YPNTFSSTM

SEQ ID NO: 80365 - protein, 9 aa, synthetic construct
  source 1..9: note = Seed: YVNTFSSTF
YPNTFSSTQ

SEQ ID NO: 80366 - protein, 9 aa, synthetic construct
  source 1..9: note = Seed: YVNTFSSTF
YPNTFSSTS

SEQ ID NO: 80367 - protein, 9 aa, synthetic construct
  source 1..9: note = Seed: YVNTFSSTF
YPNTFSSTT

SEQ ID NO: 80368 - protein, 9 aa, synthetic construct
  source 1..9: note = Seed: YVNTFSSTF
YPNTFSSTV

SEQ ID NO: 80369 - protein, 9 aa, synthetic construct
  source 1..9: note = Seed: YVNTFSSTF
YPNTFSSTW

SEQ ID NO: 80370 - protein, 9 aa, synthetic construct
  source 1..9: note = Seed: YVNTFSSTF
YPNTFSSTY

SEQ ID NO: 80371 - protein, 10 aa, synthetic construct
  source 1..10: note = Seed: YTPHTVLQAV
YPPHTVLQAA

SEQ ID NO: 80372 - protein, 10 aa, synthetic construct
  source 1..10: note = Seed: YTPHTVLQAV
YPPHTVLQAI

SEQ ID NO: 80373 - protein, 10 aa, synthetic construct
  source 1..10: note = Seed: YTPHTVLQAV
YPPHTVLQAL

SEQ ID NO: 80374 - protein, 10 aa, synthetic construct
  source 1..10: note = Seed: YTPHTVLQAV
YPPHTVLQAM

SEQ ID NO: 80375 - protein, 10 aa, synthetic construct
  source 1..10: note = Seed: YTPHTVLQAV
YPPHTVLQAV

SEQ ID NO: 80376 - protein, 10 aa, synthetic construct
  source 1..10: note = Seed: YVPLKSATCI
YPPLKSATCL

SEQ ID NO: 80377 - protein, 8 aa, synthetic construct
  source 1..8: note = Seed: YMPYFFTL
YPPYFFTF

SEQ ID NO: 80378 - protein, 10 aa, synthetic construct
  source 1..10: note = Seed: YMPYFFTLLL
YPPYFFTLLA

SEQ ID NO: 80379 - protein, 10 aa, synthetic construct
  source 1..10: note = Seed: YMPYFFTLLL
YPPYFFTLLF

SEQ ID NO: 80380 - protein, 10 aa, synthetic construct
  source 1..10: note = Seed: YMPYFFTLLL
YPPYFFTLLL

SEQ ID NO: 80381 - protein, 10 aa, synthetic construct
  source 1..10: note = Seed: YMPYFFTLLL
YPPYFFTLLM

SEQ ID NO: 80382 - protein, 10 aa, synthetic construct
  source 1..10: note = Seed: YMPYFFTLLL
YPPYFFTLLT

SEQ ID NO: 80383 - protein, 10 aa, synthetic construct
  source 1..10: note = Seed: YMPYFFTLLL
YPPYFFTLLV

SEQ ID NO: 80384 - protein, 10 aa, synthetic construct
  source 1..10: note = Seed: YMPYFFTLLL
YPPYFFTLLW

SEQ ID NO: 80385 - protein, 10 aa, synthetic construct
  source 1..10: note = Seed: YMPYFFTLLL
YPPYFFTLLY

SEQ ID NO: 80386 - protein, 8 aa, synthetic construct
  source 1..8: note = Seed: YMPYFFTL
YPPYFFTW

SEQ ID NO: 80387 - protein, 10 aa, synthetic construct
  source 1..10: note = Seed: YQPYRVVVLS
YPPYRVVVLA

SEQ ID NO: 80388 - protein, 10 aa, synthetic construct
  source 1..10: note = Seed: YKQFDTYNLW
YPQFDTYNLF

SEQ ID NO: 80389 - protein, 10 aa, synthetic construct
  source 1..10: note = Seed: YKQFDTYNLW
YPQFDTYNLM

SEQ ID NO: 80390 - protein, 10 aa, synthetic construct
  source 1..10: note = Seed: YKQFDTYNLW
YPQFDTYNLY

SEQ ID NO: 80391 - protein, 10 aa, synthetic construct
  source 1..10: note = Seed: YSQLMCQPIL
YPQLMCQPIF

SEQ ID NO: 80392 - protein, 11 aa, synthetic construct
  source 1..11: note = Seed: YSQLMCQPILL
YPQLMCQPILA

SEQ ID NO: 80393 - protein, 11 aa, synthetic construct
  source 1..11: note = Seed: YSQLMCQPILL
YPQLMCQPILI

SEQ ID NO: 80394 - protein, 11 aa, synthetic construct
  source 1..11: note = Seed: YSQLMCQPILL
YPQLMCQPILL

SEQ ID NO: 80395 - protein, 11 aa, synthetic construct
  source 1..11: note = Seed: YSQLMCQPILL
YPQLMCQPILM

SEQ ID NO: 80396 - protein, 11 aa, synthetic construct
  source 1..11: note = Seed: YSQLMCQPILL
YPQLMCQPILV

SEQ ID NO: 80397 - protein, 10 aa, synthetic construct
  source 1..10: note = Seed: YSQLMCQPIL
YPQLMCQPIY

SEQ ID NO: 80398 - protein, 9 aa, synthetic construct
  source 1..9: note = Seed: YLQPRTFLL
YPQPRTFLA

SEQ ID NO: 80399 - protein, 9 aa, synthetic construct
  source 1..9: note = Seed: YLQPRTFLL
YPQPRTFLF

SEQ ID NO: 80400 - protein, 9 aa, synthetic construct
  source 1..9: note = Seed: YLQPRTFLL
YPQPRTFLI

SEQ ID NO: 80401 - protein, 9 aa, synthetic construct
  source 1..9: note = Seed: YLQPRTFLL
YPQPRTFLL

SEQ ID NO: 80402 - protein, 9 aa, synthetic construct
  source 1..9: note = Seed: YLQPRTFLL
YPQPRTFLM

SEQ ID NO: 80403 - protein, 9 aa, synthetic construct
  source 1..9: note = Seed: YLQPRTFLL
YPQPRTFLV

SEQ ID NO: 80404 - protein, 9 aa, synthetic construct
  source 1..9: note = Seed: YLQPRTFLL
YPQPRTFLY

SEQ ID NO: 80405 - protein, 9 aa, synthetic construct
  source 1..9: note = Seed: YPQVNGLTS
YPQVNGLTA

SEQ ID NO: 80406 - protein, 9 aa, synthetic construct
  source 1..9: note = Seed: YPQVNGLTS
YPQVNGLTF

SEQ ID NO: 80407 - protein, 9 aa, synthetic construct
  source 1..9: note = Seed: YPQVNGLTS
YPQVNGLTH

SEQ ID NO: 80408 - protein, 9 aa, synthetic construct
  source 1..9: note = Seed: YPQVNGLTS
YPQVNGLTI

SEQ ID NO: 80409 - protein, 9 aa, synthetic construct
  source 1..9: note = Seed: YPQVNGLTS
YPQVNGLTL

SEQ ID NO: 80410 - protein, 9 aa, synthetic construct
  source 1..9: note = Seed: YPQVNGLTS
YPQVNGLTM

SEQ ID NO: 80411 - protein, 10 aa, synthetic construct
  source 1..10: note = Seed: YPQVNGLTSI
YPQVNGLTSA

SEQ ID NO: 80412 - protein, 10 aa, synthetic construct
  source 1..10: note = Seed: YPQVNGLTSI
YPQVNGLTSF

SEQ ID NO: 80413 - protein, 10 aa, synthetic construct
  source 1..10: note = Seed: YPQVNGLTSI
YPQVNGLTSL

SEQ ID NO: 80414 - protein, 10 aa, synthetic construct
  source 1..10: note = Seed: YPQVNGLTSI
YPQVNGLTSM

SEQ ID NO: 80415 - protein, 10 aa, synthetic construct
  source 1..10: note = Seed: YPQVNGLTSI
YPQVNGLTSV

SEQ ID NO: 80416 - protein, 10 aa, synthetic construct
  source 1..10: note = Seed: YPQVNGLTSI
YPQVNGLTSW

SEQ ID NO: 80417 - protein, 10 aa, synthetic construct
  source 1..10: note = Seed: YPQVNGLTSI
YPQVNGLTSY

SEQ ID NO: 80418 - protein, 9 aa, synthetic construct
  source 1..9: note = Seed: YPQVNGLTS
YPQVNGLTV

SEQ ID NO: 80419 - protein, 9 aa, synthetic construct
  source 1..9: note = Seed: YPQVNGLTS
YPQVNGLTW

SEQ ID NO: 80420 - protein, 9 aa, synthetic construct
  source 1..9: note = Seed: YPQVNGLTS
YPQVNGLTY

SEQ ID NO: 80421 - protein, 10 aa, synthetic construct
  source 1..10: note = Seed: YRRLISMMGF
YPRLISMMGF

SEQ ID NO: 80422 - protein, 10 aa, synthetic construct
  source 1..10: note = Seed: YRRLISMMGF
YPRLISMMGI

SEQ ID NO: 80423 - protein, 10 aa, synthetic construct
  source 1..10: note = Seed: YRRLISMMGF
YPRLISMMGL

SEQ ID NO: 80424 - protein, 10 aa, synthetic construct
  source 1..10: note = Seed: YRRLISMMGF
YPRLISMMGM

SEQ ID NO: 80425 - protein, 9 aa, synthetic construct
  source 1..9: note = Seed: YFRLTLGVY
YPRLTLGVY

SEQ ID NO: 80426 - protein, 9 aa, synthetic construct
  source 1..9: note = Seed: YVRNLQHRL
YPRNLQHRF

SEQ ID NO: 80427 - protein, 9 aa, synthetic construct
  source 1..9: note = Seed: YVRNLQHRL
YPRNLQHRI

SEQ ID NO: 80428 - protein, 9 aa, synthetic construct
  source 1..9: note = Seed: YVRNLQHRL
YPRNLQHRL

SEQ ID NO: 80429 - protein, 9 aa, synthetic construct
  source 1..9: note = Seed: YVRNLQHRL
YPRNLQHRM

SEQ ID NO: 80430 - protein, 9 aa, synthetic construct
  source 1..9: note = Seed: YVRNLQHRL
YPRNLQHRV

SEQ ID NO: 80431 - protein, 9 aa, synthetic construct
  source 1..9: note = Seed: YKRNRATRV
YPRNRATRF

SEQ ID NO: 80432 - protein, 9 aa, synthetic construct
  source 1..9: note = Seed: YKRNRATRV
YPRNRATRI

SEQ ID NO: 80433 - protein, 9 aa, synthetic construct
  source 1..9: note = Seed: YKRNRATRV
YPRNRATRL

SEQ ID NO: 80434 - protein, 9 aa, synthetic construct
  source 1..9: note = Seed: YKRNRATRV
YPRNRATRM

SEQ ID NO: 80435 - protein, 9 aa, synthetic construct
  source 1..9: note = Seed: YKRNRATRV
YPRNRATRV

SEQ ID NO: 80436 - protein, 10 aa, synthetic construct
  source 1..10: note = Seed: YYRYNLPTMC
YPRYNLPTMF

SEQ ID NO: 80437 - protein, 10 aa, synthetic construct
  source 1..10: note = Seed: YYRYNLPTMC
YPRYNLPTMI

SEQ ID NO: 80438 - protein, 10 aa, synthetic construct
  source 1..10: note = Seed: YYRYNLPTMC
YPRYNLPTML

SEQ ID NO: 80439 - protein, 10 aa, synthetic construct
  source 1..10: note = Seed: YYRYNLPTMC
YPRYNLPTMM

SEQ ID NO: 80440 - protein, 10 aa, synthetic construct
  source 1..10: note = Seed: YYRYNLPTMC
YPRYNLPTMV

SEQ ID NO: 80441 - protein, 10 aa, synthetic construct
  source 1..10: note = Seed: YSRYRIGNYK
YPRYRIGNYF

SEQ ID NO: 80442 - protein, 10 aa, synthetic construct
  source 1..10: note = Seed: YSRYRIGNYK
YPRYRIGNYK

SEQ ID NO: 80443 - protein, 11 aa, synthetic construct
  source 1..11: note = Seed: YSRYRIGNYKL
YPRYRIGNYKF

SEQ ID NO: 80444 - protein, 10 aa, synthetic construct
  source 1..10: note = Seed: YSRYRIGNYK
YPRYRIGNYL

SEQ ID NO: 80445 - protein, 10 aa, synthetic construct
  source 1..10: note = Seed: YSRYRIGNYK
YPRYRIGNYM

SEQ ID NO: 80446 - protein, 10 aa, synthetic construct
  source 1..10: note = Seed: YSRYRIGNYK
YPRYRIGNYR

SEQ ID NO: 80447 - protein, 9 aa, synthetic construct
  source 1..9: note = Seed: YSSANNCTF
YPSANNCTA

SEQ ID NO: 80448 - protein, 9 aa, synthetic construct
  source 1..9: note = Seed: YSSANNCTF
YPSANNCTF

SEQ ID NO: 80449 - protein, 11 aa, synthetic construct
  source 1..11: note = Seed: YSSANNCTFEY
YPSANNCTFEF

SEQ ID NO: 80450 - protein, 11 aa, synthetic construct
  source 1..11: note = Seed: YSSANNCTFEY
YPSANNCTFEM

SEQ ID NO: 80451 - protein, 11 aa, synthetic construct
  source 1..11: note = Seed: YSSANNCTFEY
YPSANNCTFEW

SEQ ID NO: 80452 - protein, 11 aa, synthetic construct
  source 1..11: note = Seed: YSSANNCTFEY
YPSANNCTFEY

SEQ ID NO: 80453 - protein, 9 aa, synthetic construct
  source 1..9: note = Seed: YSSANNCTF
YPSANNCTH

SEQ ID NO: 80454 - protein, 9 aa, synthetic construct
  source 1..9: note = Seed: YSSANNCTF
YPSANNCTI

SEQ ID NO: 80455 - protein, 9 aa, synthetic construct
  source 1..9: note = Seed: YSSANNCTF
YPSANNCTL

SEQ ID NO: 80456 - protein, 9 aa, synthetic construct
  source 1..9: note = Seed: YSSANNCTF
YPSANNCTM

SEQ ID NO: 80457 - protein, 9 aa, synthetic construct
  source 1..9: note = Seed: YSSANNCTF
YPSANNCTV

SEQ ID NO: 80458 - protein, 9 aa, synthetic construct
  source 1..9: note = Seed: YSSANNCTF
YPSANNCTW

SEQ ID NO: 80459 - protein, 9 aa, synthetic construct
  source 1..9: note = Seed: YSSANNCTF
YPSANNCTY

SEQ ID NO: 80460 - protein, 9 aa, synthetic construct
  source 1..9: note = Seed: YNSASFSTF
YPSASFSTA

SEQ ID NO: 80461 - protein, 9 aa, synthetic construct
  source 1..9: note = Seed: YNSASFSTF
YPSASFSTF

SEQ ID NO: 80462 - protein, 10 aa, synthetic construct
  source 1..10: note = Seed: YNSASFSTFK
YPSASFSTFK

SEQ ID NO: 80463 - protein, 10 aa, synthetic construct
  source 1..10: note = Seed: YNSASFSTFK
YPSASFSTFR

SEQ ID NO: 80464 - protein, 9 aa, synthetic construct
  source 1..9: note = Seed: YNSASFSTF
YPSASFSTH

SEQ ID NO: 80465 - protein, 9 aa, synthetic construct
  source 1..9: note = Seed: YNSASFSTF
YPSASFSTI

SEQ ID NO: 80466 - protein, 9 aa, synthetic construct
  source 1..9: note = Seed: YNSASFSTF
YPSASFSTL

SEQ ID NO: 80467 - protein, 9 aa, synthetic construct
  source 1..9: note = Seed: YNSASFSTF
YPSASFSTM

SEQ ID NO: 80468 - protein, 9 aa, synthetic construct
  source 1..9: note = Seed: YNSASFSTF
YPSASFSTQ

SEQ ID NO: 80469 - protein, 9 aa, synthetic construct
  source 1..9: note = Seed: YNSASFSTF
YPSASFSTS

SEQ ID NO: 80470 - protein, 9 aa, synthetic construct
  source 1..9: note = Seed: YNSASFSTF
YPSASFSTT

SEQ ID NO: 80471 - protein, 9 aa, synthetic construct
  source 1..9: note = Seed: YNSASFSTF
YPSASFSTV

SEQ ID NO: 80472 - protein, 9 aa, synthetic construct
  source 1..9: note = Seed: YNSASFSTF
YPSASFSTW

SEQ ID NO: 80473 - protein, 9 aa, synthetic construct
  source 1..9: note = Seed: YNSASFSTF
YPSASFSTY

SEQ ID NO: 80474 - protein, 9 aa, synthetic construct
  source 1..9: note = Seed: YASAVVLLI
YPSAVVLLA

SEQ ID NO: 80475 - protein, 9 aa, synthetic construct
  source 1..9: note = Seed: YASAVVLLI
YPSAVVLLF

SEQ ID NO: 80476 - protein, 9 aa, synthetic construct
  source 1..9: note = Seed: YASAVVLLI
YPSAVVLLH

SEQ ID NO: 80477 - protein, 9 aa, synthetic construct
  source 1..9: note = Seed: YASAVVLLI
YPSAVVLLI

SEQ ID NO: 80478 - protein, 10 aa, synthetic construct
  source 1..10: note = Seed: YASAVVLLIL
YPSAVVLLIW

SEQ ID NO: 80479 - protein, 9 aa, synthetic construct
  source 1..9: note = Seed: YASAVVLLI
YPSAVVLLL

SEQ ID NO: 80480 - protein, 9 aa, synthetic construct
  source 1..9: note = Seed: YASAVVLLI
YPSAVVLLM

SEQ ID NO: 80481 - protein, 9 aa, synthetic construct
  source 1..9: note = Seed: YASAVVLLI
YPSAVVLLS

SEQ ID NO: 80482 - protein, 9 aa, synthetic construct
  source 1..9: note = Seed: YASAVVLLI
YPSAVVLLV

SEQ ID NO: 80483 - protein, 9 aa, synthetic construct
  source 1..9: note = Seed: YASAVVLLI
YPSAVVLLW

SEQ ID NO: 80484 - protein, 9 aa, synthetic construct
  source 1..9: note = Seed: YASAVVLLI
YPSAVVLLY

SEQ ID NO: 80485 - protein, 11 aa, synthetic construct
  source 1..11: note = Seed: YYSLLMPILTL
YPSLLMPILTV

SEQ ID NO: 80486 - protein, 11 aa, synthetic construct
  source 1..11: note = Seed: YRSLPGVFCGV
YPSLPGVFCGI

SEQ ID NO: 80487 - protein, 11 aa, synthetic construct
  source 1..11: note = Seed: YRSLPGVFCGV
YPSLPGVFCGV

SEQ ID NO: 80488 - protein, 10 aa, synthetic construct
  source 1..10: note = Seed: YESLRPDTRY
YPSLRPDTRF

SEQ ID NO: 80489 - protein, 10 aa, synthetic construct
  source 1..10: note = Seed: YESLRPDTRY
YPSLRPDTRW

SEQ ID NO: 80490 - protein, 10 aa, synthetic construct
  source 1..10: note = Seed: YTSNPTTFHL
YPSNPTTFHF

SEQ ID NO: 80491 - protein, 10 aa, synthetic construct
  source 1..10: note = Seed: YTSNPTTFHL
YPSNPTTFHW

SEQ ID NO: 80492 - protein, 10 aa, synthetic construct
  source 1..10: note = Seed: YTSNPTTFHL
YPSNPTTFHY

SEQ ID NO: 80493 - protein, 9 aa, synthetic construct
  source 1..9: note = Seed: YTSNPTTFH
YPSNPTTFR

SEQ ID NO: 80494 - protein, 10 aa, synthetic construct
  source 1..10: note = Seed: YLTFYLTNDV
YPTFYLTNDV

SEQ ID NO: 80495 - protein, 10 aa, synthetic construct
  source 1..10: note = Seed: YLTNDVSFLA
YPTNDVSFLA

SEQ ID NO: 80496 - protein, 10 aa, synthetic construct
  source 1..10: note = Seed: YLTNDVSFLA
YPTNDVSFLI

SEQ ID NO: 80497 - protein, 10 aa, synthetic construct
  source 1..10: note = Seed: YLTNDVSFLA
YPTNDVSFLL

SEQ ID NO: 80498 - protein, 10 aa, synthetic construct
  source 1..10: note = Seed: YLTNDVSFLA
YPTNDVSFLM

SEQ ID NO: 80499 - protein, 10 aa, synthetic construct
  source 1..10: note = Seed: YLTNDVSFLA
YPTNDVSFLV

SEQ ID NO: 80500 - protein, 10 aa, synthetic construct
  source 1..10: note = Seed: YFTSDYYQLY
YPTSDYYQLK

SEQ ID NO: 80501 - protein, 10 aa, synthetic construct
  source 1..10: note = Seed: YFTSDYYQLY
YPTSDYYQLR

SEQ ID NO: 80502 - protein, 10 aa, synthetic construct
  source 1..10: note = Seed: YFTSDYYQLY
YPTSDYYQLW

SEQ ID NO: 80503 - protein, 10 aa, synthetic construct
  source 1..10: note = Seed: YFTSDYYQLY
YPTSDYYQLY

SEQ ID NO: 80504 - protein, 11 aa, synthetic construct
  source 1..11: note = Seed: YYTSNPTTFHL
YPTSNPTTFHF

SEQ ID NO: 80505 - protein, 11 aa, synthetic construct
  source 1..11: note = Seed: YYTSNPTTFHL
YPTSNPTTFHW

SEQ ID NO: 80506 - protein, 10 aa, synthetic construct
  source 1..10: note = Seed: YTTTIKPVTY
YPTTIKPVTF

SEQ ID NO: 80507 - protein, 10 aa, synthetic construct
  source 1..10: note = Seed: YTTTIKPVTY
YPTTIKPVTM

SEQ ID NO: 80508 - protein, 10 aa, synthetic construct
  source 1..10: note = Seed: YTTTIKPVTY
YPTTIKPVTW

SEQ ID NO: 80509 - protein, 10 aa, synthetic construct
  source 1..10: note = Seed: YTTTIKPVTY
YPTTIKPVTY

SEQ ID NO: 80510 - protein, 11 aa, synthetic construct
  source 1..11: note = Seed: YTTTIKPVTYK
YPTTIKPVTYR

SEQ ID NO: 80511 - protein, 9 aa, synthetic construct
  source 1..9: note = Seed: YQVNGYPNM
YPVNGYPNY

SEQ ID NO: 80512 - protein, 9 aa, synthetic construct
  source 1..9: note = Seed: YFVVKRHTF
YPVVKRHTF

SEQ ID NO: 80513 - protein, 9 aa, synthetic construct
  source 1..9: note = Seed: YFVVKRHTF
YPVVKRHTI

SEQ ID NO: 80514 - protein, 9 aa, synthetic construct
  source 1..9: note = Seed: YFVVKRHTF
YPVVKRHTL

SEQ ID NO: 80515 - protein, 9 aa, synthetic construct
  source 1..9: note = Seed: YFVVKRHTF
YPVVKRHTM

SEQ ID NO: 80516 - protein, 9 aa, synthetic construct
  source 1..9: note = Seed: YFVVKRHTF
YPVVKRHTV

SEQ ID NO: 80517 - protein, 10 aa, synthetic construct
  source 1..10: note = Seed: YYVWKSYVHV
YPVWKSYVHV

SEQ ID NO: 80518 - protein, 10 aa, synthetic construct
  source 1..10: note = Seed: YVYANGGKGF
YPYANGGKGF

SEQ ID NO: 80519 - protein, 10 aa, synthetic construct
  source 1..10: note = Seed: YVYANGGKGF
YPYANGGKGM

SEQ ID NO: 80520 - protein, 11 aa, synthetic construct
  source 1..11: note = Seed: YLYFIKGLNNL
YPYFIKGLNNF

SEQ ID NO: 80521 - protein, 10 aa, synthetic construct
  source 1..10: note = Seed: YDYLVSTQEF
YPYLVSTQEF

SEQ ID NO: 80522 - protein, 10 aa, synthetic construct
  source 1..10: note = Seed: YDYLVSTQEF
YPYLVSTQEI

SEQ ID NO: 80523 - protein, 10 aa, synthetic construct
  source 1..10: note = Seed: YDYLVSTQEF
YPYLVSTQEL

SEQ ID NO: 80524 - protein, 10 aa, synthetic construct
  source 1..10: note = Seed: YDYLVSTQEF
YPYLVSTQEM

SEQ ID NO: 80525 - protein, 10 aa, synthetic construct
  source 1..10: note = Seed: YDYLVSTQEF
YPYLVSTQEW

SEQ ID NO: 80526 - protein, 10 aa, synthetic construct
  source 1..10: note = Seed: YDYLVSTQEF
YPYLVSTQEY

SEQ ID NO: 80527 - protein, 9 aa, synthetic construct
  source 1..9: note = Seed: YNYLYRLFR
YPYLYRLFR

SEQ ID NO: 80528 - protein, 10 aa, synthetic construct
  source 1..10: note = Seed: YNYLYRLFRK
YPYLYRLFRR

SEQ ID NO: 80529 - protein, 11 aa, synthetic construct
  source 1..11: note = Seed: YDYYRYNLPTM
YPYYRYNLPTF

SEQ ID NO: 80530 - protein, 11 aa, synthetic construct
  source 1..11: note = Seed: YDYYRYNLPTM
YPYYRYNLPTW

SEQ ID NO: 80531 - protein, 10 aa, synthetic construct
  source 1..10: note = Seed: YGANKDGIIW
YQANKDGIIW

SEQ ID NO: 80532 - protein, 10 aa, synthetic construct
  source 1..10: note = Seed: YPANSIVCRF
YQANSIVCRF

SEQ ID NO: 80533 - protein, 10 aa, synthetic construct
  source 1..10: note = Seed: YPANSIVCRF
YQANSIVCRM

SEQ ID NO: 80534 - protein, 10 aa, synthetic construct
  source 1..10: note = Seed: YPANSIVCRF
YQANSIVCRW

SEQ ID NO: 80535 - protein, 10 aa, synthetic construct
  source 1..10: note = Seed: YPANSIVCRF
YQANSIVCRY

SEQ ID NO: 80536 - protein, 11 aa, synthetic construct
  source 1..11: note = Seed: YRARAGEAANF
YQARAGEAANF

SEQ ID NO: 80537 - protein, 11 aa, synthetic construct
  source 1..11: note = Seed: YRARAGEAANF
YQARAGEAANY

SEQ ID NO: 80538 - protein, 9 aa, synthetic construct
  source 1..9: note = Seed: YRARAGEAA
YQARAGEAI

SEQ ID NO: 80539 - protein, 9 aa, synthetic construct
  source 1..9: note = Seed: YRARAGEAA
YQARAGEAL

SEQ ID NO: 80540 - protein, 9 aa, synthetic construct
  source 1..9: note = Seed: YRARAGEAA
YQARAGEAM

SEQ ID NO: 80541 - protein, 9 aa, synthetic construct
  source 1..9: note = Seed: YQCGHYKHI
YQCGHYKHF

SEQ ID NO: 80542 - protein, 9 aa, synthetic construct
  source 1..9: note = Seed: YQCGHYKHI
YQCGHYKHM

SEQ ID NO: 80543 - protein, 9 aa, synthetic construct
  source 1..9: note = Seed: YQCGHYKHI
YQCGHYKHY

SEQ ID NO: 80544 - protein, 10 aa, synthetic construct
  source 1..10: note = Seed: YFCTCYFGLF
YQCTCYFGLY

SEQ ID NO: 80545 - protein, 10 aa, synthetic construct
  source 1..10: note = Seed: YKENSYTTTI
YQENSYTTTA

SEQ ID NO: 80546 - protein, 10 aa, synthetic construct
  source 1..10: note = Seed: YKENSYTTTI
YQENSYTTTF

SEQ ID NO: 80547 - protein, 10 aa, synthetic construct
  source 1..10: note = Seed: YKENSYTTTI
YQENSYTTTL

SEQ ID NO: 80548 - protein, 10 aa, synthetic construct
  source 1..10: note = Seed: YKENSYTTTI
YQENSYTTTM

SEQ ID NO: 80549 - protein, 10 aa, synthetic construct
  source 1..10: note = Seed: YKENSYTTTI
YQENSYTTTY

SEQ ID NO: 80550 - protein, 9 aa, synthetic construct
  source 1..9: note = Seed: YVFCTVNAL
YQFCTVNAA

SEQ ID NO: 80551 - protein, 9 aa, synthetic construct
  source 1..9: note = Seed: YVFCTVNAL
YQFCTVNAF

SEQ ID NO: 80552 - protein, 9 aa, synthetic construct
  source 1..9: note = Seed: YVFCTVNAL
YQFCTVNAG

SEQ ID NO: 80553 - protein, 9 aa, synthetic construct
  source 1..9: note = Seed: YVFCTVNAL
YQFCTVNAH

SEQ ID NO: 80554 - protein, 9 aa, synthetic construct
  source 1..9: note = Seed: YVFCTVNAL
YQFCTVNAI

SEQ ID NO: 80555 - protein, 9 aa, synthetic construct
  source 1..9: note = Seed: YVFCTVNAL
YQFCTVNAL

SEQ ID NO: 80556 - protein, 9 aa, synthetic construct
  source 1..9: note = Seed: YVFCTVNAL
YQFCTVNAM

SEQ ID NO: 80557 - protein, 9 aa, synthetic construct
  source 1..9: note = Seed: YVFCTVNAL
YQFCTVNAT

SEQ ID NO: 80558 - protein, 9 aa, synthetic construct
  source 1..9: note = Seed: YVFCTVNAL
YQFCTVNAV

SEQ ID NO: 80559 - protein, 9 aa, synthetic construct
  source 1..9: note = Seed: YVFCTVNAL
YQFCTVNAW

SEQ ID NO: 80560 - protein, 9 aa, synthetic construct
  source 1..9: note = Seed: YVFCTVNAL
YQFCTVNAY

SEQ ID NO: 80561 - protein, 8 aa, synthetic construct
  source 1..8: note = Seed: YIFFASFY
YQFFASFF

SEQ ID NO: 80562 - protein, 8 aa, synthetic construct
  source 1..8: note = Seed: YIFFASFY
YQFFASFL

SEQ ID NO: 80563 - protein, 8 aa, synthetic construct
  source 1..8: note = Seed: YIFFASFY
YQFFASFM

SEQ ID NO: 80564 - protein, 8 aa, synthetic construct
  source 1..8: note = Seed: YIFFASFY
YQFFASFY

SEQ ID NO: 80565 - protein, 9 aa, synthetic construct
  source 1..9: note = Seed: YIFFASFYY
YQFFASFYA

SEQ ID NO: 80566 - protein, 9 aa, synthetic construct
  source 1..9: note = Seed: YIFFASFYY
YQFFASFYC

SEQ ID NO: 80567 - protein, 9 aa, synthetic construct
  source 1..9: note = Seed: YIFFASFYY
YQFFASFYF

SEQ ID NO: 80568 - protein, 9 aa, synthetic construct
  source 1..9: note = Seed: YIFFASFYY
YQFFASFYG

SEQ ID NO: 80569 - protein, 9 aa, synthetic construct
  source 1..9: note = Seed: YIFFASFYY
YQFFASFYH

SEQ ID NO: 80570 - protein, 9 aa, synthetic construct
  source 1..9: note = Seed: YIFFASFYY
YQFFASFYI

SEQ ID NO: 80571 - protein, 9 aa, synthetic construct
  source 1..9: note = Seed: YIFFASFYY
YQFFASFYK

SEQ ID NO: 80572 - protein, 9 aa, synthetic construct
  source 1..9: note = Seed: YIFFASFYY
YQFFASFYL

SEQ ID NO: 80573 - protein, 9 aa, synthetic construct
  source 1..9: note = Seed: YIFFASFYY
YQFFASFYM

SEQ ID NO: 80574 - protein, 9 aa, synthetic construct
  source 1..9: note = Seed: YIFFASFYY
YQFFASFYR

SEQ ID NO: 80575 - protein, 9 aa, synthetic construct
  source 1..9: note = Seed: YIFFASFYY
YQFFASFYS

SEQ ID NO: 80576 - protein, 9 aa, synthetic construct
  source 1..9: note = Seed: YIFFASFYY
YQFFASFYT

SEQ ID NO: 80577 - protein, 9 aa, synthetic construct
  source 1..9: note = Seed: YIFFASFYY
YQFFASFYV

SEQ ID NO: 80578 - protein, 9 aa, synthetic construct
  source 1..9: note = Seed: YIFFASFYY
YQFFASFYW

SEQ ID NO: 80579 - protein, 9 aa, synthetic construct
  source 1..9: note = Seed: YIFFASFYY
YQFFASFYY

SEQ ID NO: 80580 - protein, 10 aa, synthetic construct
  source 1..10: note = Seed: YIFFASFYYV
YQFFASFYYA

SEQ ID NO: 80581 - protein, 10 aa, synthetic construct
  source 1..10: note = Seed: YIFFASFYYV
YQFFASFYYC

SEQ ID NO: 80582 - protein, 10 aa, synthetic construct
  source 1..10: note = Seed: YIFFASFYYV
YQFFASFYYD

SEQ ID NO: 80583 - protein, 10 aa, synthetic construct
  source 1..10: note = Seed: YIFFASFYYV
YQFFASFYYE

SEQ ID NO: 80584 - protein, 10 aa, synthetic construct
  source 1..10: note = Seed: YIFFASFYYV
YQFFASFYYF

SEQ ID NO: 80585 - protein, 10 aa, synthetic construct
  source 1..10: note = Seed: YIFFASFYYV
YQFFASFYYG

SEQ ID NO: 80586 - protein, 10 aa, synthetic construct
  source 1..10: note = Seed: YIFFASFYYV
YQFFASFYYH

SEQ ID NO: 80587 - protein, 10 aa, synthetic construct
  source 1..10: note = Seed: YIFFASFYYV
YQFFASFYYI

SEQ ID NO: 80588 - protein, 10 aa, synthetic construct
  source 1..10: note = Seed: YIFFASFYYV
YQFFASFYYK

SEQ ID NO: 80589 - protein, 10 aa, synthetic construct
  source 1..10: note = Seed: YIFFASFYYV
YQFFASFYYL

SEQ ID NO: 80590 - protein, 10 aa, synthetic construct
  source 1..10: note = Seed: YIFFASFYYV
YQFFASFYYM

SEQ ID NO: 80591 - protein, 10 aa, synthetic construct
  source 1..10: note = Seed: YIFFASFYYV
YQFFASFYYN

SEQ ID NO: 80592 - protein, 10 aa, synthetic construct
  source 1..10: note = Seed: YIFFASFYYV
YQFFASFYYP

SEQ ID NO: 80593 - protein, 10 aa, synthetic construct
  source 1..10: note = Seed: YIFFASFYYV
YQFFASFYYQ

SEQ ID NO: 80594 - protein, 10 aa, synthetic construct
  source 1..10: note = Seed: YIFFASFYYV
YQFFASFYYR

SEQ ID NO: 80595 - protein, 10 aa, synthetic construct
  source 1..10: note = Seed: YIFFASFYYV
YQFFASFYYS

SEQ ID NO: 80596 - protein, 10 aa, synthetic construct
  source 1..10: note = Seed: YIFFASFYYV
YQFFASFYYT

SEQ ID NO: 80597 - protein, 10 aa, synthetic construct
  source 1..10: note = Seed: YIFFASFYYV
YQFFASFYYV

SEQ ID NO: 80598 - protein, 11 aa, synthetic construct
  source 1..11: note = Seed: YIFFASFYYVW
YQFFASFYYVA

SEQ ID NO: 80599 - protein, 11 aa, synthetic construct
  source 1..11: note = Seed: YIFFASFYYVW
YQFFASFYYVC

SEQ ID NO: 80600 - protein, 11 aa, synthetic construct
  source 1..11: note = Seed: YIFFASFYYVW
YQFFASFYYVD

SEQ ID NO: 80601 - protein, 11 aa, synthetic construct
  source 1..11: note = Seed: YIFFASFYYVW
YQFFASFYYVE

SEQ ID NO: 80602 - protein, 11 aa, synthetic construct
  source 1..11: note = Seed: YIFFASFYYVW
YQFFASFYYVF

SEQ ID NO: 80603 - protein, 11 aa, synthetic construct
  source 1..11: note = Seed: YIFFASFYYVW
YQFFASFYYVG

SEQ ID NO: 80604 - protein, 11 aa, synthetic construct
  source 1..11: note = Seed: YIFFASFYYVW
YQFFASFYYVH

SEQ ID NO: 80605 - protein, 11 aa, synthetic construct
  source 1..11: note = Seed: YIFFASFYYVW
YQFFASFYYVI

SEQ ID NO: 80606 - protein, 11 aa, synthetic construct
  source 1..11: note = Seed: YIFFASFYYVW
YQFFASFYYVK

SEQ ID NO: 80607 - protein, 11 aa, synthetic construct
  source 1..11: note = Seed: YIFFASFYYVW
YQFFASFYYVL

SEQ ID NO: 80608 - protein, 11 aa, synthetic construct
  source 1..11: note = Seed: YIFFASFYYVW
YQFFASFYYVM

SEQ ID NO: 80609 - protein, 11 aa, synthetic construct
  source 1..11: note = Seed: YIFFASFYYVW
YQFFASFYYVN

SEQ ID NO: 80610 - protein, 11 aa, synthetic construct
  source 1..11: note = Seed: YIFFASFYYVW
YQFFASFYYVP

SEQ ID NO: 80611 - protein, 11 aa, synthetic construct
  source 1..11: note = Seed: YIFFASFYYVW
YQFFASFYYVQ

SEQ ID NO: 80612 - protein, 11 aa, synthetic construct
  source 1..11: note = Seed: YIFFASFYYVW
YQFFASFYYVR

SEQ ID NO: 80613 - protein, 11 aa, synthetic construct
  source 1..11: note = Seed: YIFFASFYYVW
YQFFASFYYVS

SEQ ID NO: 80614 - protein, 11 aa, synthetic construct
  source 1..11: note = Seed: YIFFASFYYVW
YQFFASFYYVT

SEQ ID NO: 80615 - protein, 11 aa, synthetic construct
  source 1..11: note = Seed: YIFFASFYYVW
YQFFASFYYVV

SEQ ID NO: 80616 - protein, 11 aa, synthetic construct
  source 1..11: note = Seed: YIFFASFYYVW
YQFFASFYYVW

SEQ ID NO: 80617 - protein, 11 aa, synthetic construct
  source 1..11: note = Seed: YIFFASFYYVW
YQFFASFYYVY

SEQ ID NO: 80618 - protein, 10 aa, synthetic construct
  source 1..10: note = Seed: YIFFASFYYV
YQFFASFYYW

SEQ ID NO: 80619 - protein, 10 aa, synthetic construct
  source 1..10: note = Seed: YIFFASFYYV
YQFFASFYYY

SEQ ID NO: 80620 - protein, 9 aa, synthetic construct
  source 1..9: note = Seed: YWFFSNYLK
YQFFSNYLF

SEQ ID NO: 80621 - protein, 9 aa, synthetic construct
  source 1..9: note = Seed: YWFFSNYLK
YQFFSNYLK

SEQ ID NO: 80622 - protein, 10 aa, synthetic construct
  source 1..10: note = Seed: YWFFSNYLKR
YQFFSNYLKR

SEQ ID NO: 80623 - protein, 11 aa, synthetic construct
  source 1..11: note = Seed: YWFFSNYLKRR
YQFFSNYLKRR

SEQ ID NO: 80624 - protein, 9 aa, synthetic construct
  source 1..9: note = Seed: YWFFSNYLK
YQFFSNYLR

SEQ ID NO: 80625 - protein, 9 aa, synthetic construct
  source 1..9: note = Seed: YWFFSNYLK
YQFFSNYLY

SEQ ID NO: 80626 - protein, 8 aa, synthetic construct
  source 1..8: note = Seed: YSFLPGVY
YQFLPGVF

SEQ ID NO: 80627 - protein, 8 aa, synthetic construct
  source 1..8: note = Seed: YSFLPGVY
YQFLPGVL

SEQ ID NO: 80628 - protein, 8 aa, synthetic construct
  source 1..8: note = Seed: YSFLPGVY
YQFLPGVM

SEQ ID NO: 80629 - protein, 8 aa, synthetic construct
  source 1..8: note = Seed: YSFLPGVY
YQFLPGVY

SEQ ID NO: 80630 - protein, 10 aa, synthetic construct
  source 1..10: note = Seed: YSFLPGVYSV
YQFLPGVYSA

SEQ ID NO: 80631 - protein, 10 aa, synthetic construct
  source 1..10: note = Seed: YSFLPGVYSV
YQFLPGVYSF

SEQ ID NO: 80632 - protein, 10 aa, synthetic construct
  source 1..10: note = Seed: YSFLPGVYSV
YQFLPGVYSI

SEQ ID NO: 80633 - protein, 10 aa, synthetic construct
  source 1..10: note = Seed: YSFLPGVYSV
YQFLPGVYSL

SEQ ID NO: 80634 - protein, 10 aa, synthetic construct
  source 1..10: note = Seed: YSFLPGVYSV
YQFLPGVYSM

SEQ ID NO: 80635 - protein, 10 aa, synthetic construct
  source 1..10: note = Seed: YSFLPGVYSV
YQFLPGVYST

SEQ ID NO: 80636 - protein, 10 aa, synthetic construct
  source 1..10: note = Seed: YSFLPGVYSV
YQFLPGVYSV

SEQ ID NO: 80637 - protein, 10 aa, synthetic construct
  source 1..10: note = Seed: YSFLPGVYSV
YQFLPGVYSW

SEQ ID NO: 80638 - protein, 9 aa, synthetic construct
  source 1..9: note = Seed: YRFNGIGVT
YQFNGIGVL

SEQ ID NO: 80639 - protein, 9 aa, synthetic construct
  source 1..9: note = Seed: YGFQPTNGV
YQFQPTNGA

SEQ ID NO: 80640 - protein, 9 aa, synthetic construct
  source 1..9: note = Seed: YGFQPTNGV
YQFQPTNGI

SEQ ID NO: 80641 - protein, 9 aa, synthetic construct
  source 1..9: note = Seed: YGFQPTNGV
YQFQPTNGL

SEQ ID NO: 80642 - protein, 9 aa, synthetic construct
  source 1..9: note = Seed: YGFQPTNGV
YQFQPTNGM

SEQ ID NO: 80643 - protein, 9 aa, synthetic construct
  source 1..9: note = Seed: YGFQPTNGV
YQFQPTNGV

SEQ ID NO: 80644 - protein, 11 aa, synthetic construct
  source 1..11: note = Seed: YGFQPTNGVGY
YQFQPTNGVGF

SEQ ID NO: 80645 - protein, 11 aa, synthetic construct
  source 1..11: note = Seed: YGFQPTNGVGY
YQFQPTNGVGM

SEQ ID NO: 80646 - protein, 11 aa, synthetic construct
  source 1..11: note = Seed: YGFQPTNGVGY
YQFQPTNGVGY

SEQ ID NO: 80647 - protein, 9 aa, synthetic construct
  source 1..9: note = Seed: YHFRELGVV
YQFRELGVL

SEQ ID NO: 80648 - protein, 10 aa, synthetic construct
  source 1..10: note = Seed: YHFRELGVVH
YQFRELGVVF

SEQ ID NO: 80649 - protein, 10 aa, synthetic construct
  source 1..10: note = Seed: YHFRELGVVH
YQFRELGVVH

SEQ ID NO: 80650 - protein, 10 aa, synthetic construct
  source 1..10: note = Seed: YHFRELGVVH
YQFRELGVVI

SEQ ID NO: 80651 - protein, 10 aa, synthetic construct
  source 1..10: note = Seed: YHFRELGVVH
YQFRELGVVL

SEQ ID NO: 80652 - protein, 10 aa, synthetic construct
  source 1..10: note = Seed: YHFRELGVVH
YQFRELGVVM

SEQ ID NO: 80653 - protein, 10 aa, synthetic construct
  source 1..10: note = Seed: YHFRELGVVH
YQFRELGVVW

SEQ ID NO: 80654 - protein, 10 aa, synthetic construct
  source 1..10: note = Seed: YHFRELGVVH
YQFRELGVVY

SEQ ID NO: 80655 - protein, 9 aa, synthetic construct
  source 1..9: note = Seed: YVFTGYRVT
YQFTGYRVF

SEQ ID NO: 80656 - protein, 9 aa, synthetic construct
  source 1..9: note = Seed: YVFTGYRVT
YQFTGYRVI

SEQ ID NO: 80657 - protein, 9 aa, synthetic construct
  source 1..9: note = Seed: YVFTGYRVT
YQFTGYRVL

SEQ ID NO: 80658 - protein, 9 aa, synthetic construct
  source 1..9: note = Seed: YVFTGYRVT
YQFTGYRVM

SEQ ID NO: 80659 - protein, 10 aa, synthetic construct
  source 1..10: note = Seed: YVFTGYRVTK
YQFTGYRVTR

SEQ ID NO: 80660 - protein, 9 aa, synthetic construct
  source 1..9: note = Seed: YVFTGYRVT
YQFTGYRVV

SEQ ID NO: 80661 - protein, 9 aa, synthetic construct
  source 1..9: note = Seed: YVFTGYRVT
YQFTGYRVY

SEQ ID NO: 80662 - protein, 9 aa, synthetic construct
  source 1..9: note = Seed: YFFTLLLQL
YQFTLLLQA

SEQ ID NO: 80663 - protein, 9 aa, synthetic construct
  source 1..9: note = Seed: YFFTLLLQL
YQFTLLLQI

SEQ ID NO: 80664 - protein, 9 aa, synthetic construct
  source 1..9: note = Seed: YFFTLLLQL
YQFTLLLQL

SEQ ID NO: 80665 - protein, 9 aa, synthetic construct
  source 1..9: note = Seed: YFFTLLLQL
YQFTLLLQM

SEQ ID NO: 80666 - protein, 9 aa, synthetic construct
  source 1..9: note = Seed: YFFTLLLQL
YQFTLLLQV

SEQ ID NO: 80667 - protein, 9 aa, synthetic construct
  source 1..9: note = Seed: YFFTLLLQL
YQFTLLLQY

SEQ ID NO: 80668 - protein, 9 aa, synthetic construct
  source 1..9: note = Seed: YLGGMSYYC
YQGGMSYYA

SEQ ID NO: 80669 - protein, 9 aa, synthetic construct
  source 1..9: note = Seed: YLGGMSYYC
YQGGMSYYI

SEQ ID NO: 80670 - protein, 9 aa, synthetic construct
  source 1..9: note = Seed: YLGGMSYYC
YQGGMSYYL

SEQ ID NO: 80671 - protein, 9 aa, synthetic construct
  source 1..9: note = Seed: YLGGMSYYC
YQGGMSYYM

SEQ ID NO: 80672 - protein, 9 aa, synthetic construct
  source 1..9: note = Seed: YLGGMSYYC
YQGGMSYYV

SEQ ID NO: 80673 - protein, 10 aa, synthetic construct
  source 1..10: note = Seed: YTGNYQCGHY
YQGNYQCGHF

SEQ ID NO: 80674 - protein, 10 aa, synthetic construct
  source 1..10: note = Seed: YTGNYQCGHY
YQGNYQCGHY

SEQ ID NO: 80675 - protein, 10 aa, synthetic construct
  source 1..10: note = Seed: YVGYLQPRTF
YQGYLQPRTF

SEQ ID NO: 80676 - protein, 11 aa, synthetic construct
  source 1..11: note = Seed: YVGYLQPRTFL
YQGYLQPRTFF

SEQ ID NO: 80677 - protein, 11 aa, synthetic construct
  source 1..11: note = Seed: YVGYLQPRTFL
YQGYLQPRTFW

SEQ ID NO: 80678 - protein, 10 aa, synthetic construct
  source 1..10: note = Seed: YVGYLQPRTF
YQGYLQPRTM

SEQ ID NO: 80679 - protein, 10 aa, synthetic construct
  source 1..10: note = Seed: YVGYLQPRTF
YQGYLQPRTY

SEQ ID NO: 80680 - protein, 9 aa, synthetic construct
  source 1..9: note = Seed: YMHHMELPT
YQHHMELPA

SEQ ID NO: 80681 - protein, 9 aa, synthetic construct
  source 1..9: note = Seed: YMHHMELPT
YQHHMELPF

SEQ ID NO: 80682 - protein, 9 aa, synthetic construct
  source 1..9: note = Seed: YMHHMELPT
YQHHMELPH

SEQ ID NO: 80683 - protein, 9 aa, synthetic construct
  source 1..9: note = Seed: YMHHMELPT
YQHHMELPI

SEQ ID NO: 80684 - protein, 9 aa, synthetic construct
  source 1..9: note = Seed: YMHHMELPT
YQHHMELPL

SEQ ID NO: 80685 - protein, 9 aa, synthetic construct
  source 1..9: note = Seed: YMHHMELPT
YQHHMELPM

SEQ ID NO: 80686 - protein, 11 aa, synthetic construct
  source 1..11: note = Seed: YMHHMELPTGV
YQHHMELPTGI

SEQ ID NO: 80687 - protein, 11 aa, synthetic construct
  source 1..11: note = Seed: YMHHMELPTGV
YQHHMELPTGL

SEQ ID NO: 80688 - protein, 11 aa, synthetic construct
  source 1..11: note = Seed: YMHHMELPTGV
YQHHMELPTGV

SEQ ID NO: 80689 - protein, 9 aa, synthetic construct
  source 1..9: note = Seed: YMHHMELPT
YQHHMELPV

SEQ ID NO: 80690 - protein, 9 aa, synthetic construct
  source 1..9: note = Seed: YMHHMELPT
YQHHMELPW

SEQ ID NO: 80691 - protein, 9 aa, synthetic construct
  source 1..9: note = Seed: YMHHMELPT
YQHHMELPY

SEQ ID NO: 80692 - protein, 9 aa, synthetic construct
  source 1..9: note = Seed: YFIASFRLF
YQIASFRLA

SEQ ID NO: 80693 - protein, 9 aa, synthetic construct
  source 1..9: note = Seed: YFIASFRLF
YQIASFRLF

SEQ ID NO: 80694 - protein, 10 aa, synthetic construct
  source 1..10: note = Seed: YFIASFRLFA
YQIASFRLFA

SEQ ID NO: 80695 - protein, 11 aa, synthetic construct
  source 1..11: note = Seed: YFIASFRLFAR
YQIASFRLFAR

SEQ ID NO: 80696 - protein, 10 aa, synthetic construct
  source 1..10: note = Seed: YFIASFRLFA
YQIASFRLFI

SEQ ID NO: 80697 - protein, 10 aa, synthetic construct
  source 1..10: note = Seed: YFIASFRLFA
YQIASFRLFL

SEQ ID NO: 80698 - protein, 10 aa, synthetic construct
  source 1..10: note = Seed: YFIASFRLFA
YQIASFRLFM

SEQ ID NO: 80699 - protein, 10 aa, synthetic construct
  source 1..10: note = Seed: YFIASFRLFA
YQIASFRLFT

SEQ ID NO: 80700 - protein, 10 aa, synthetic construct
  source 1..10: note = Seed: YFIASFRLFA
YQIASFRLFV

SEQ ID NO: 80701 - protein, 9 aa, synthetic construct
  source 1..9: note = Seed: YFIASFRLF
YQIASFRLH

SEQ ID NO: 80702 - protein, 9 aa, synthetic construct
  source 1..9: note = Seed: YFIASFRLF
YQIASFRLI

SEQ ID NO: 80703 - protein, 9 aa, synthetic construct
  source 1..9: note = Seed: YFIASFRLF
YQIASFRLL

SEQ ID NO: 80704 - protein, 9 aa, synthetic construct
  source 1..9: note = Seed: YFIASFRLF
YQIASFRLM

SEQ ID NO: 80705 - protein, 9 aa, synthetic construct
  source 1..9: note = Seed: YFIASFRLF
YQIASFRLV

SEQ ID NO: 80706 - protein, 9 aa, synthetic construct
  source 1..9: note = Seed: YFIASFRLF
YQIASFRLW

SEQ ID NO: 80707 - protein, 9 aa, synthetic construct
  source 1..9: note = Seed: YFIASFRLF
YQIASFRLY

SEQ ID NO: 80708 - protein, 9 aa, synthetic construct
  source 1..9: note = Seed: YGIATVREV
YQIATVREA

SEQ ID NO: 80709 - protein, 9 aa, synthetic construct
  source 1..9: note = Seed: YGIATVREV
YQIATVREF

SEQ ID NO: 80710 - protein, 9 aa, synthetic construct
  source 1..9: note = Seed: YGIATVREV
YQIATVREI

SEQ ID NO: 80711 - protein, 9 aa, synthetic construct
  source 1..9: note = Seed: YGIATVREV
YQIATVREL

SEQ ID NO: 80712 - protein, 9 aa, synthetic construct
  source 1..9: note = Seed: YGIATVREV
YQIATVREM

SEQ ID NO: 80713 - protein, 9 aa, synthetic construct
  source 1..9: note = Seed: YGIATVREV
YQIATVREV

SEQ ID NO: 80714 - protein, 10 aa, synthetic construct
  source 1..10: note = Seed: YGIATVREVL
YQIATVREVV

SEQ ID NO: 80715 - protein, 9 aa, synthetic construct
  source 1..9: note = Seed: YGIATVREV
YQIATVREY

SEQ ID NO: 80716 - protein, 10 aa, synthetic construct
  source 1..10: note = Seed: YIICISTKHF
YQICISTKHF

SEQ ID NO: 80717 - protein, 11 aa, synthetic construct
  source 1..11: note = Seed: YIICISTKHFY
YQICISTKHFY

SEQ ID NO: 80718 - protein, 10 aa, synthetic construct
  source 1..10: note = Seed: YIICISTKHF
YQICISTKHM

SEQ ID NO: 80719 - protein, 10 aa, synthetic construct
  source 1..10: note = Seed: YIICISTKHF
YQICISTKHW

SEQ ID NO: 80720 - protein, 10 aa, synthetic construct
  source 1..10: note = Seed: YIICISTKHF
YQICISTKHY

SEQ ID NO: 80721 - protein, 9 aa, synthetic construct
  source 1..9: note = Seed: YFIKGLNNL
YQIKGLNNA

SEQ ID NO: 80722 - protein, 9 aa, synthetic construct
  source 1..9: note = Seed: YFIKGLNNL
YQIKGLNNI

SEQ ID NO: 80723 - protein, 9 aa, synthetic construct
  source 1..9: note = Seed: YFIKGLNNL
YQIKGLNNL

SEQ ID NO: 80724 - protein, 9 aa, synthetic construct
  source 1..9: note = Seed: YFIKGLNNL
YQIKGLNNM

SEQ ID NO: 80725 - protein, 9 aa, synthetic construct
  source 1..9: note = Seed: YFIKGLNNL
YQIKGLNNT

SEQ ID NO: 80726 - protein, 9 aa, synthetic construct
  source 1..9: note = Seed: YFIKGLNNL
YQIKGLNNV

SEQ ID NO: 80727 - protein, 8 aa, synthetic construct
  source 1..8: note = Seed: YKKDNSYF
YQKDNSYF

SEQ ID NO: 80728 - protein, 8 aa, synthetic construct
  source 1..8: note = Seed: YKKDNSYF
YQKDNSYY

SEQ ID NO: 80729 - protein, 11 aa, synthetic construct
  source 1..11: note = Seed: YFKIYSKHTPI
YQKIYSKHTPV

SEQ ID NO: 80730 - protein, 9 aa, synthetic construct
  source 1..9: note = Seed: YYKKDNSYF
YQKKDNSYF

SEQ ID NO: 80731 - protein, 9 aa, synthetic construct
  source 1..9: note = Seed: YYKKDNSYF
YQKKDNSYL

SEQ ID NO: 80732 - protein, 9 aa, synthetic construct
  source 1..9: note = Seed: YYKKDNSYF
YQKKDNSYM

SEQ ID NO: 80733 - protein, 9 aa, synthetic construct
  source 1..9: note = Seed: YYKKDNSYF
YQKKDNSYY

SEQ ID NO: 80734 - protein, 9 aa, synthetic construct
  source 1..9: note = Seed: YDKLQFTSL
YQKLQFTSI

SEQ ID NO: 80735 - protein, 9 aa, synthetic construct
  source 1..9: note = Seed: YDKLQFTSL
YQKLQFTSL

SEQ ID NO: 80736 - protein, 11 aa, synthetic construct
  source 1..11: note = Seed: YDKLQFTSLEI
YQKLQFTSLEV

SEQ ID NO: 80737 - protein, 9 aa, synthetic construct
  source 1..9: note = Seed: YDKLQFTSL
YQKLQFTSM

SEQ ID NO: 80738 - protein, 9 aa, synthetic construct
  source 1..9: note = Seed: YDKLQFTSL
YQKLQFTSV

SEQ ID NO: 80739 - protein, 9 aa, synthetic construct
  source 1..9: note = Seed: YLKLRSDVL
YQKLRSDVF

SEQ ID NO: 80740 - protein, 9 aa, synthetic construct
  source 1..9: note = Seed: YLKLRSDVL
YQKLRSDVL

SEQ ID NO: 80741 - protein, 9 aa, synthetic construct
  source 1..9: note = Seed: YLKLRSDVL
YQKLRSDVM

SEQ ID NO: 80742 - protein, 9 aa, synthetic construct
  source 1..9: note = Seed: YLKLRSDVL
YQKLRSDVY

SEQ ID NO: 80743 - protein, 8 aa, synthetic construct
  source 1..8: note = Seed: YLKRRVVF
YQKRRVVL

SEQ ID NO: 80744 - protein, 8 aa, synthetic construct
  source 1..8: note = Seed: YLKRRVVF
YQKRRVVM

SEQ ID NO: 80745 - protein, 10 aa, synthetic construct
  source 1..10: note = Seed: YLKSPNFSKL
YQKSPNFSKV

SEQ ID NO: 80746 - protein, 9 aa, synthetic construct
  source 1..9: note = Seed: YLKSPNFSK
YQKSPNFSR

SEQ ID NO: 80747 - protein, 9 aa, synthetic construct
  source 1..9: note = Seed: YIKWDLLKY
YQKWDLLKF

SEQ ID NO: 80748 - protein, 9 aa, synthetic construct
  source 1..9: note = Seed: YIKWDLLKY
YQKWDLLKM

SEQ ID NO: 80749 - protein, 9 aa, synthetic construct
  source 1..9: note = Seed: YIKWDLLKY
YQKWDLLKY

SEQ ID NO: 80750 - protein, 9 aa, synthetic construct
  source 1..9: note = Seed: YIKWPWYIW
YQKWPWYIF

SEQ ID NO: 80751 - protein, 10 aa, synthetic construct
  source 1..10: note = Seed: YIKWPWYIWL
YQKWPWYIWA

SEQ ID NO: 80752 - protein, 10 aa, synthetic construct
  source 1..10: note = Seed: YIKWPWYIWL
YQKWPWYIWI

SEQ ID NO: 80753 - protein, 10 aa, synthetic construct
  source 1..10: note = Seed: YIKWPWYIWL
YQKWPWYIWL

SEQ ID NO: 80754 - protein, 10 aa, synthetic construct
  source 1..10: note = Seed: YIKWPWYIWL
YQKWPWYIWV

SEQ ID NO: 80755 - protein, 8 aa, synthetic construct
  source 1..8: note = Seed: YIKWPWYI
YQKWPWYV

SEQ ID NO: 80756 - protein, 9 aa, synthetic construct
  source 1..9: note = Seed: YNKYKYFSG
YQKYKYFSA

SEQ ID NO: 80757 - protein, 9 aa, synthetic construct
  source 1..9: note = Seed: YNKYKYFSG
YQKYKYFSF

SEQ ID NO: 80758 - protein, 9 aa, synthetic construct
  source 1..9: note = Seed: YNKYKYFSG
YQKYKYFSI

SEQ ID NO: 80759 - protein, 9 aa, synthetic construct
  source 1..9: note = Seed: YNKYKYFSG
YQKYKYFSL

SEQ ID NO: 80760 - protein, 9 aa, synthetic construct
  source 1..9: note = Seed: YNKYKYFSG
YQKYKYFSM

SEQ ID NO: 80761 - protein, 9 aa, synthetic construct
  source 1..9: note = Seed: YNKYKYFSG
YQKYKYFSV

SEQ ID NO: 80762 - protein, 10 aa, synthetic construct
  source 1..10: note = Seed: YFLCWHTNCY
YQLCWHTNCF

SEQ ID NO: 80763 - protein, 10 aa, synthetic construct
  source 1..10: note = Seed: YFLCWHTNCY
YQLCWHTNCM

SEQ ID NO: 80764 - protein, 10 aa, synthetic construct
  source 1..10: note = Seed: YFLCWHTNCY
YQLCWHTNCY

SEQ ID NO: 80765 - protein, 10 aa, synthetic construct
  source 1..10: note = Seed: YPLECIKDLL
YQLECIKDLL

SEQ ID NO: 80766 - protein, 10 aa, synthetic construct
  source 1..10: note = Seed: YPLECIKDLL
YQLECIKDLV

SEQ ID NO: 80767 - protein, 8 aa, synthetic construct
  source 1..8: note = Seed: YKLEGYAF
YQLEGYAF

SEQ ID NO: 80768 - protein, 8 aa, synthetic construct
  source 1..8: note = Seed: YKLEGYAF
YQLEGYAM

SEQ ID NO: 80769 - protein, 8 aa, synthetic construct
  source 1..8: note = Seed: YKLEGYAF
YQLEGYAY

SEQ ID NO: 80770 - protein, 10 aa, synthetic construct
  source 1..10: note = Seed: YRLFRKSNLK
YQLFRKSNLK

SEQ ID NO: 80771 - protein, 10 aa, synthetic construct
  source 1..10: note = Seed: YRLFRKSNLK
YQLFRKSNLR

SEQ ID NO: 80772 - protein, 9 aa, synthetic construct
  source 1..9: note = Seed: YILFTRFFY
YQLFTRFFF

SEQ ID NO: 80773 - protein, 9 aa, synthetic construct
  source 1..9: note = Seed: YILFTRFFY
YQLFTRFFK

SEQ ID NO: 80774 - protein, 9 aa, synthetic construct
  source 1..9: note = Seed: YILFTRFFY
YQLFTRFFL

SEQ ID NO: 80775 - protein, 9 aa, synthetic construct
  source 1..9: note = Seed: YILFTRFFY
YQLFTRFFM

SEQ ID NO: 80776 - protein, 9 aa, synthetic construct
  source 1..9: note = Seed: YILFTRFFY
YQLFTRFFR

SEQ ID NO: 80777 - protein, 9 aa, synthetic construct
  source 1..9: note = Seed: YILFTRFFY
YQLFTRFFY

SEQ ID NO: 80778 - protein, 10 aa, synthetic construct
  source 1..10: note = Seed: YILFTRFFYV
YQLFTRFFYA

SEQ ID NO: 80779 - protein, 10 aa, synthetic construct
  source 1..10: note = Seed: YILFTRFFYV
YQLFTRFFYC

SEQ ID NO: 80780 - protein, 10 aa, synthetic construct
  source 1..10: note = Seed: YILFTRFFYV
YQLFTRFFYF

SEQ ID NO: 80781 - protein, 10 aa, synthetic construct
  source 1..10: note = Seed: YILFTRFFYV
YQLFTRFFYH

SEQ ID NO: 80782 - protein, 10 aa, synthetic construct
  source 1..10: note = Seed: YILFTRFFYV
YQLFTRFFYI

SEQ ID NO: 80783 - protein, 10 aa, synthetic construct
  source 1..10: note = Seed: YILFTRFFYV
YQLFTRFFYK

SEQ ID NO: 80784 - protein, 10 aa, synthetic construct
  source 1..10: note = Seed: YILFTRFFYV
YQLFTRFFYL

SEQ ID NO: 80785 - protein, 10 aa, synthetic construct
  source 1..10: note = Seed: YILFTRFFYV
YQLFTRFFYM

SEQ ID NO: 80786 - protein, 10 aa, synthetic construct
  source 1..10: note = Seed: YILFTRFFYV
YQLFTRFFYR

SEQ ID NO: 80787 - protein, 10 aa, synthetic construct
  source 1..10: note = Seed: YILFTRFFYV
YQLFTRFFYS

SEQ ID NO: 80788 - protein, 10 aa, synthetic construct
  source 1..10: note = Seed: YILFTRFFYV
YQLFTRFFYT

SEQ ID NO: 80789 - protein, 10 aa, synthetic construct
  source 1..10: note = Seed: YILFTRFFYV
YQLFTRFFYV

SEQ ID NO: 80790 - protein, 11 aa, synthetic construct
  source 1..11: note = Seed: YILFTRFFYVL
YQLFTRFFYVA

SEQ ID NO: 80791 - protein, 11 aa, synthetic construct
  source 1..11: note = Seed: YILFTRFFYVL
YQLFTRFFYVC

SEQ ID NO: 80792 - protein, 11 aa, synthetic construct
  source 1..11: note = Seed: YILFTRFFYVL
YQLFTRFFYVD

SEQ ID NO: 80793 - protein, 11 aa, synthetic construct
  source 1..11: note = Seed: YILFTRFFYVL
YQLFTRFFYVE

SEQ ID NO: 80794 - protein, 11 aa, synthetic construct
  source 1..11: note = Seed: YILFTRFFYVL
YQLFTRFFYVF

SEQ ID NO: 80795 - protein, 11 aa, synthetic construct
  source 1..11: note = Seed: YILFTRFFYVL
YQLFTRFFYVG

SEQ ID NO: 80796 - protein, 11 aa, synthetic construct
  source 1..11: note = Seed: YILFTRFFYVL
YQLFTRFFYVH

SEQ ID NO: 80797 - protein, 11 aa, synthetic construct
  source 1..11: note = Seed: YILFTRFFYVL
YQLFTRFFYVI

SEQ ID NO: 80798 - protein, 11 aa, synthetic construct
  source 1..11: note = Seed: YILFTRFFYVL
YQLFTRFFYVK

SEQ ID NO: 80799 - protein, 11 aa, synthetic construct
  source 1..11: note = Seed: YILFTRFFYVL
YQLFTRFFYVL

SEQ ID NO: 80800 - protein, 11 aa, synthetic construct
  source 1..11: note = Seed: YILFTRFFYVL
YQLFTRFFYVM

SEQ ID NO: 80801 - protein, 11 aa, synthetic construct
  source 1..11: note = Seed: YILFTRFFYVL
YQLFTRFFYVN

SEQ ID NO: 80802 - protein, 11 aa, synthetic construct
  source 1..11: note = Seed: YILFTRFFYVL
YQLFTRFFYVP

SEQ ID NO: 80803 - protein, 11 aa, synthetic construct
  source 1..11: note = Seed: YILFTRFFYVL
YQLFTRFFYVQ

SEQ ID NO: 80804 - protein, 11 aa, synthetic construct
  source 1..11: note = Seed: YILFTRFFYVL
YQLFTRFFYVR

SEQ ID NO: 80805 - protein, 11 aa, synthetic construct
  source 1..11: note = Seed: YILFTRFFYVL
YQLFTRFFYVS

SEQ ID NO: 80806 - protein, 11 aa, synthetic construct
  source 1..11: note = Seed: YILFTRFFYVL
YQLFTRFFYVT

SEQ ID NO: 80807 - protein, 11 aa, synthetic construct
  source 1..11: note = Seed: YILFTRFFYVL
YQLFTRFFYVV

SEQ ID NO: 80808 - protein, 11 aa, synthetic construct
  source 1..11: note = Seed: YILFTRFFYVL
YQLFTRFFYVW

SEQ ID NO: 80809 - protein, 11 aa, synthetic construct
  source 1..11: note = Seed: YILFTRFFYVL
YQLFTRFFYVY

SEQ ID NO: 80810 - protein, 10 aa, synthetic construct
  source 1..10: note = Seed: YILFTRFFYV
YQLFTRFFYY

SEQ ID NO: 80811 - protein, 9 aa, synthetic construct
  source 1..9: note = Seed: YKLGASQRV
YQLGASQRF

SEQ ID NO: 80812 - protein, 9 aa, synthetic construct
  source 1..9: note = Seed: YKLGASQRV
YQLGASQRI

SEQ ID NO: 80813 - protein, 9 aa, synthetic construct
  source 1..9: note = Seed: YKLGASQRV
YQLGASQRL

SEQ ID NO: 80814 - protein, 9 aa, synthetic construct
  source 1..9: note = Seed: YKLGASQRV
YQLGASQRM

SEQ ID NO: 80815 - protein, 9 aa, synthetic construct
  source 1..9: note = Seed: YKLGASQRV
YQLGASQRY

SEQ ID NO: 80816 - protein, 10 aa, synthetic construct
  source 1..10: note = Seed: YSLLMPILTL
YQLLMPILTA

SEQ ID NO: 80817 - protein, 10 aa, synthetic construct
  source 1..10: note = Seed: YSLLMPILTL
YQLLMPILTI

SEQ ID NO: 80818 - protein, 10 aa, synthetic construct
  source 1..10: note = Seed: YSLLMPILTL
YQLLMPILTL

SEQ ID NO: 80819 - protein, 10 aa, synthetic construct
  source 1..10: note = Seed: YSLLMPILTL
YQLLMPILTV

SEQ ID NO: 80820 - protein, 10 aa, synthetic construct
  source 1..10: note = Seed: YHLMSFPQSA
YQLMSFPQSA

SEQ ID NO: 80821 - protein, 11 aa, synthetic construct
  source 1..11: note = Seed: YHLMSFPQSAP
YQLMSFPQSAV

SEQ ID NO: 80822 - protein, 10 aa, synthetic construct
  source 1..10: note = Seed: YHLMSFPQSA
YQLMSFPQSI

SEQ ID NO: 80823 - protein, 10 aa, synthetic construct
  source 1..10: note = Seed: YHLMSFPQSA
YQLMSFPQSL

SEQ ID NO: 80824 - protein, 10 aa, synthetic construct
  source 1..10: note = Seed: YHLMSFPQSA
YQLMSFPQSM

SEQ ID NO: 80825 - protein, 10 aa, synthetic construct
  source 1..10: note = Seed: YHLMSFPQSA
YQLMSFPQST

SEQ ID NO: 80826 - protein, 10 aa, synthetic construct
  source 1..10: note = Seed: YHLMSFPQSA
YQLMSFPQSV

SEQ ID NO: 80827 - protein, 9 aa, synthetic construct
  source 1..9: note = Seed: YELQTPFEI
YQLQTPFEA

SEQ ID NO: 80828 - protein, 9 aa, synthetic construct
  source 1..9: note = Seed: YELQTPFEI
YQLQTPFEF

SEQ ID NO: 80829 - protein, 9 aa, synthetic construct
  source 1..9: note = Seed: YELQTPFEI
YQLQTPFEI

SEQ ID NO: 80830 - protein, 9 aa, synthetic construct
  source 1..9: note = Seed: YELQTPFEI
YQLQTPFEL

SEQ ID NO: 80831 - protein, 9 aa, synthetic construct
  source 1..9: note = Seed: YELQTPFEI
YQLQTPFEM

SEQ ID NO: 80832 - protein, 9 aa, synthetic construct
  source 1..9: note = Seed: YELQTPFEI
YQLQTPFET

SEQ ID NO: 80833 - protein, 9 aa, synthetic construct
  source 1..9: note = Seed: YELQTPFEI
YQLQTPFEV

SEQ ID NO: 80834 - protein, 10 aa, synthetic construct
  source 1..10: note = Seed: YDLSVVNARL
YQLSVVNARA

SEQ ID NO: 80835 - protein, 10 aa, synthetic construct
  source 1..10: note = Seed: YDLSVVNARL
YQLSVVNARI

SEQ ID NO: 80836 - protein, 10 aa, synthetic construct
  source 1..10: note = Seed: YDLSVVNARL
YQLSVVNARL

SEQ ID NO: 80837 - protein, 10 aa, synthetic construct
  source 1..10: note = Seed: YDLSVVNARL
YQLSVVNARM

SEQ ID NO: 80838 - protein, 10 aa, synthetic construct
  source 1..10: note = Seed: YDLSVVNARL
YQLSVVNARV

SEQ ID NO: 80839 - protein, 11 aa, synthetic construct
  source 1..11: note = Seed: YMLTYNKVENM
YQLTYNKVENF

SEQ ID NO: 80840 - protein, 11 aa, synthetic construct
  source 1..11: note = Seed: YMLTYNKVENM
YQLTYNKVENY

SEQ ID NO: 80841 - protein, 8 aa, synthetic construct
  source 1..8: note = Seed: YTMADLVY
YQMADLVF

SEQ ID NO: 80842 - protein, 8 aa, synthetic construct
  source 1..8: note = Seed: YTMADLVY
YQMADLVI

SEQ ID NO: 80843 - protein, 8 aa, synthetic construct
  source 1..8: note = Seed: YTMADLVY
YQMADLVL

SEQ ID NO: 80844 - protein, 8 aa, synthetic construct
  source 1..8: note = Seed: YTMADLVY
YQMADLVM

SEQ ID NO: 80845 - protein, 8 aa, synthetic construct
  source 1..8: note = Seed: YTMADLVY
YQMADLVY

SEQ ID NO: 80846 - protein, 9 aa, synthetic construct
  source 1..9: note = Seed: YTMADLVYA
YQMADLVYA

SEQ ID NO: 80847 - protein, 10 aa, synthetic construct
  source 1..10: note = Seed: YTMADLVYAL
YQMADLVYAA

SEQ ID NO: 80848 - protein, 10 aa, synthetic construct
  source 1..10: note = Seed: YTMADLVYAL
YQMADLVYAC

SEQ ID NO: 80849 - protein, 10 aa, synthetic construct
  source 1..10: note = Seed: YTMADLVYAL
YQMADLVYAD

SEQ ID NO: 80850 - protein, 10 aa, synthetic construct
  source 1..10: note = Seed: YTMADLVYAL
YQMADLVYAE

SEQ ID NO: 80851 - protein, 10 aa, synthetic construct
  source 1..10: note = Seed: YTMADLVYAL
YQMADLVYAF

SEQ ID NO: 80852 - protein, 10 aa, synthetic construct
  source 1..10: note = Seed: YTMADLVYAL
YQMADLVYAG

SEQ ID NO: 80853 - protein, 10 aa, synthetic construct
  source 1..10: note = Seed: YTMADLVYAL
YQMADLVYAH

SEQ ID NO: 80854 - protein, 10 aa, synthetic construct
  source 1..10: note = Seed: YTMADLVYAL
YQMADLVYAI

SEQ ID NO: 80855 - protein, 10 aa, synthetic construct
  source 1..10: note = Seed: YTMADLVYAL
YQMADLVYAK

SEQ ID NO: 80856 - protein, 10 aa, synthetic construct
  source 1..10: note = Seed: YTMADLVYAL
YQMADLVYAL

SEQ ID NO: 80857 - protein, 11 aa, synthetic construct
  source 1..11: note = Seed: YTMADLVYALR
YQMADLVYALA

SEQ ID NO: 80858 - protein, 11 aa, synthetic construct
  source 1..11: note = Seed: YTMADLVYALR
YQMADLVYALC

SEQ ID NO: 80859 - protein, 11 aa, synthetic construct
  source 1..11: note = Seed: YTMADLVYALR
YQMADLVYALD

SEQ ID NO: 80860 - protein, 11 aa, synthetic construct
  source 1..11: note = Seed: YTMADLVYALR
YQMADLVYALE

SEQ ID NO: 80861 - protein, 11 aa, synthetic construct
  source 1..11: note = Seed: YTMADLVYALR
YQMADLVYALF

SEQ ID NO: 80862 - protein, 11 aa, synthetic construct
  source 1..11: note = Seed: YTMADLVYALR
YQMADLVYALG

SEQ ID NO: 80863 - protein, 11 aa, synthetic construct
  source 1..11: note = Seed: YTMADLVYALR
YQMADLVYALH

SEQ ID NO: 80864 - protein, 11 aa, synthetic construct
  source 1..11: note = Seed: YTMADLVYALR
YQMADLVYALI

SEQ ID NO: 80865 - protein, 11 aa, synthetic construct
  source 1..11: note = Seed: YTMADLVYALR
YQMADLVYALK

SEQ ID NO: 80866 - protein, 11 aa, synthetic construct
  source 1..11: note = Seed: YTMADLVYALR
YQMADLVYALL

SEQ ID NO: 80867 - protein, 11 aa, synthetic construct
  source 1..11: note = Seed: YTMADLVYALR
YQMADLVYALM

SEQ ID NO: 80868 - protein, 11 aa, synthetic construct
  source 1..11: note = Seed: YTMADLVYALR
YQMADLVYALN

SEQ ID NO: 80869 - protein, 11 aa, synthetic construct
  source 1..11: note = Seed: YTMADLVYALR
YQMADLVYALP

SEQ ID NO: 80870 - protein, 11 aa, synthetic construct
  source 1..11: note = Seed: YTMADLVYALR
YQMADLVYALQ

SEQ ID NO: 80871 - protein, 11 aa, synthetic construct
  source 1..11: note = Seed: YTMADLVYALR
YQMADLVYALR

SEQ ID NO: 80872 - protein, 11 aa, synthetic construct
  source 1..11: note = Seed: YTMADLVYALR
YQMADLVYALS

SEQ ID NO: 80873 - protein, 11 aa, synthetic construct
  source 1..11: note = Seed: YTMADLVYALR
YQMADLVYALT

SEQ ID NO: 80874 - protein, 11 aa, synthetic construct
  source 1..11: note = Seed: YTMADLVYALR
YQMADLVYALV

SEQ ID NO: 80875 - protein, 11 aa, synthetic construct
  source 1..11: note = Seed: YTMADLVYALR
YQMADLVYALW

SEQ ID NO: 80876 - protein, 11 aa, synthetic construct
  source 1..11: note = Seed: YTMADLVYALR
YQMADLVYALY

SEQ ID NO: 80877 - protein, 10 aa, synthetic construct
  source 1..10: note = Seed: YTMADLVYAL
YQMADLVYAM

SEQ ID NO: 80878 - protein, 10 aa, synthetic construct
  source 1..10: note = Seed: YTMADLVYAL
YQMADLVYAN

SEQ ID NO: 80879 - protein, 10 aa, synthetic construct
  source 1..10: note = Seed: YTMADLVYAL
YQMADLVYAP

SEQ ID NO: 80880 - protein, 10 aa, synthetic construct
  source 1..10: note = Seed: YTMADLVYAL
YQMADLVYAQ

SEQ ID NO: 80881 - protein, 10 aa, synthetic construct
  source 1..10: note = Seed: YTMADLVYAL
YQMADLVYAR

SEQ ID NO: 80882 - protein, 10 aa, synthetic construct
  source 1..10: note = Seed: YTMADLVYAL
YQMADLVYAS

SEQ ID NO: 80883 - protein, 10 aa, synthetic construct
  source 1..10: note = Seed: YTMADLVYAL
YQMADLVYAT

SEQ ID NO: 80884 - protein, 10 aa, synthetic construct
  source 1..10: note = Seed: YTMADLVYAL
YQMADLVYAV

SEQ ID NO: 80885 - protein, 10 aa, synthetic construct
  source 1..10: note = Seed: YTMADLVYAL
YQMADLVYAW

SEQ ID NO: 80886 - protein, 10 aa, synthetic construct
  source 1..10: note = Seed: YTMADLVYAL
YQMADLVYAY

SEQ ID NO: 80887 - protein, 9 aa, synthetic construct
  source 1..9: note = Seed: YTMADLVYA
YQMADLVYC

SEQ ID NO: 80888 - protein, 9 aa, synthetic construct
  source 1..9: note = Seed: YTMADLVYA
YQMADLVYF

SEQ ID NO: 80889 - protein, 9 aa, synthetic construct
  source 1..9: note = Seed: YTMADLVYA
YQMADLVYG

SEQ ID NO: 80890 - protein, 9 aa, synthetic construct
  source 1..9: note = Seed: YTMADLVYA
YQMADLVYI

SEQ ID NO: 80891 - protein, 9 aa, synthetic construct
  source 1..9: note = Seed: YTMADLVYA
YQMADLVYL

SEQ ID NO: 80892 - protein, 9 aa, synthetic construct
  source 1..9: note = Seed: YTMADLVYA
YQMADLVYM

SEQ ID NO: 80893 - protein, 9 aa, synthetic construct
  source 1..9: note = Seed: YTMADLVYA
YQMADLVYP

SEQ ID NO: 80894 - protein, 9 aa, synthetic construct
  source 1..9: note = Seed: YTMADLVYA
YQMADLVYS

SEQ ID NO: 80895 - protein, 9 aa, synthetic construct
  source 1..9: note = Seed: YTMADLVYA
YQMADLVYT

SEQ ID NO: 80896 - protein, 9 aa, synthetic construct
  source 1..9: note = Seed: YTMADLVYA
YQMADLVYV

SEQ ID NO: 80897 - protein, 9 aa, synthetic construct
  source 1..9: note = Seed: YTMADLVYA
YQMADLVYY

SEQ ID NO: 80898 - protein, 9 aa, synthetic construct
  source 1..9: note = Seed: YVMHANYIF
YQMHANYIA

SEQ ID NO: 80899 - protein, 9 aa, synthetic construct
  source 1..9: note = Seed: YVMHANYIF
YQMHANYIF

SEQ ID NO: 80900 - protein, 10 aa, synthetic construct
  source 1..10: note = Seed: YVMHANYIFW
YQMHANYIFF

SEQ ID NO: 80901 - protein, 10 aa, synthetic construct
  source 1..10: note = Seed: YVMHANYIFW
YQMHANYIFM

SEQ ID NO: 80902 - protein, 10 aa, synthetic construct
  source 1..10: note = Seed: YVMHANYIFW
YQMHANYIFW

SEQ ID NO: 80903 - protein, 10 aa, synthetic construct
  source 1..10: note = Seed: YVMHANYIFW
YQMHANYIFY

SEQ ID NO: 80904 - protein, 9 aa, synthetic construct
  source 1..9: note = Seed: YVMHANYIF
YQMHANYIH

SEQ ID NO: 80905 - protein, 9 aa, synthetic construct
  source 1..9: note = Seed: YVMHANYIF
YQMHANYII

SEQ ID NO: 80906 - protein, 9 aa, synthetic construct
  source 1..9: note = Seed: YVMHANYIF
YQMHANYIL

SEQ ID NO: 80907 - protein, 9 aa, synthetic construct
  source 1..9: note = Seed: YVMHANYIF
YQMHANYIM

SEQ ID NO: 80908 - protein, 9 aa, synthetic construct
  source 1..9: note = Seed: YVMHANYIF
YQMHANYIT

SEQ ID NO: 80909 - protein, 9 aa, synthetic construct
  source 1..9: note = Seed: YVMHANYIF
YQMHANYIV

SEQ ID NO: 80910 - protein, 9 aa, synthetic construct
  source 1..9: note = Seed: YVMHANYIF
YQMHANYIW

SEQ ID NO: 80911 - protein, 9 aa, synthetic construct
  source 1..9: note = Seed: YVMHANYIF
YQMHANYIY

SEQ ID NO: 80912 - protein, 9 aa, synthetic construct
  source 1..9: note = Seed: YTNDKACPL
YQNDKACPF

SEQ ID NO: 80913 - protein, 9 aa, synthetic construct
  source 1..9: note = Seed: YTNDKACPL
YQNDKACPI

SEQ ID NO: 80914 - protein, 9 aa, synthetic construct
  source 1..9: note = Seed: YTNDKACPL
YQNDKACPL

SEQ ID NO: 80915 - protein, 10 aa, synthetic construct
  source 1..10: note = Seed: YTNDKACPLI
YQNDKACPLV

SEQ ID NO: 80916 - protein, 9 aa, synthetic construct
  source 1..9: note = Seed: YTNDKACPL
YQNDKACPM

SEQ ID NO: 80917 - protein, 9 aa, synthetic construct
  source 1..9: note = Seed: YTNDKACPL
YQNDKACPV

SEQ ID NO: 80918 - protein, 9 aa, synthetic construct
  source 1..9: note = Seed: YTNDKACPL
YQNDKACPW

SEQ ID NO: 80919 - protein, 9 aa, synthetic construct
  source 1..9: note = Seed: YTNDKACPL
YQNDKACPY

SEQ ID NO: 80920 - protein, 9 aa, synthetic construct
  source 1..9: note = Seed: YQNNVFMSE
YQNNVFMSA

SEQ ID NO: 80921 - protein, 10 aa, synthetic construct
  source 1..10: note = Seed: YQNNVFMSEA
YQNNVFMSEF

SEQ ID NO: 80922 - protein, 10 aa, synthetic construct
  source 1..10: note = Seed: YQNNVFMSEA
YQNNVFMSEI

SEQ ID NO: 80923 - protein, 10 aa, synthetic construct
  source 1..10: note = Seed: YQNNVFMSEA
YQNNVFMSEL

SEQ ID NO: 80924 - protein, 10 aa, synthetic construct
  source 1..10: note = Seed: YQNNVFMSEA
YQNNVFMSEM

SEQ ID NO: 80925 - protein, 10 aa, synthetic construct
  source 1..10: note = Seed: YQNNVFMSEA
YQNNVFMSEV

SEQ ID NO: 80926 - protein, 10 aa, synthetic construct
  source 1..10: note = Seed: YQNNVFMSEA
YQNNVFMSEY

SEQ ID NO: 80927 - protein, 9 aa, synthetic construct
  source 1..9: note = Seed: YQNNVFMSE
YQNNVFMSF

SEQ ID NO: 80928 - protein, 9 aa, synthetic construct
  source 1..9: note = Seed: YQNNVFMSE
YQNNVFMSG

SEQ ID NO: 80929 - protein, 9 aa, synthetic construct
  source 1..9: note = Seed: YQNNVFMSE
YQNNVFMSH

SEQ ID NO: 80930 - protein, 9 aa, synthetic construct
  source 1..9: note = Seed: YQNNVFMSE
YQNNVFMSI

SEQ ID NO: 80931 - protein, 9 aa, synthetic construct
  source 1..9: note = Seed: YQNNVFMSE
YQNNVFMSL

SEQ ID NO: 80932 - protein, 9 aa, synthetic construct
  source 1..9: note = Seed: YQNNVFMSE
YQNNVFMSM

SEQ ID NO: 80933 - protein, 9 aa, synthetic construct
  source 1..9: note = Seed: YQNNVFMSE
YQNNVFMST

SEQ ID NO: 80934 - protein, 9 aa, synthetic construct
  source 1..9: note = Seed: YQNNVFMSE
YQNNVFMSV

SEQ ID NO: 80935 - protein, 9 aa, synthetic construct
  source 1..9: note = Seed: YQNNVFMSE
YQNNVFMSW

SEQ ID NO: 80936 - protein, 9 aa, synthetic construct
  source 1..9: note = Seed: YQNNVFMSE
YQNNVFMSY

SEQ ID NO: 80937 - protein, 9 aa, synthetic construct
  source 1..9: note = Seed: YANSVFNIC
YQNSVFNIF

SEQ ID NO: 80938 - protein, 9 aa, synthetic construct
  source 1..9: note = Seed: YANSVFNIC
YQNSVFNIM

SEQ ID NO: 80939 - protein, 9 aa, synthetic construct
  source 1..9: note = Seed: YANSVFNIC
YQNSVFNIY

SEQ ID NO: 80940 - protein, 9 aa, synthetic construct
  source 1..9: note = Seed: YVNTFSSTF
YQNTFSSTA

SEQ ID NO: 80941 - protein, 9 aa, synthetic construct
  source 1..9: note = Seed: YVNTFSSTF
YQNTFSSTF

SEQ ID NO: 80942 - protein, 9 aa, synthetic construct
  source 1..9: note = Seed: YVNTFSSTF
YQNTFSSTG

SEQ ID NO: 80943 - protein, 9 aa, synthetic construct
  source 1..9: note = Seed: YVNTFSSTF
YQNTFSSTH

SEQ ID NO: 80944 - protein, 9 aa, synthetic construct
  source 1..9: note = Seed: YVNTFSSTF
YQNTFSSTI

SEQ ID NO: 80945 - protein, 9 aa, synthetic construct
  source 1..9: note = Seed: YVNTFSSTF
YQNTFSSTL

SEQ ID NO: 80946 - protein, 9 aa, synthetic construct
  source 1..9: note = Seed: YVNTFSSTF
YQNTFSSTM

SEQ ID NO: 80947 - protein, 9 aa, synthetic construct
  source 1..9: note = Seed: YVNTFSSTF
YQNTFSSTV

SEQ ID NO: 80948 - protein, 9 aa, synthetic construct
  source 1..9: note = Seed: YVNTFSSTF
YQNTFSSTW

SEQ ID NO: 80949 - protein, 9 aa, synthetic construct
  source 1..9: note = Seed: YVNTFSSTF
YQNTFSSTY

SEQ ID NO: 80950 - protein, 10 aa, synthetic construct
  source 1..10: note = Seed: YTPHTVLQAV
YQPHTVLQAA

SEQ ID NO: 80951 - protein, 10 aa, synthetic construct
  source 1..10: note = Seed: YTPHTVLQAV
YQPHTVLQAI

SEQ ID NO: 80952 - protein, 10 aa, synthetic construct
  source 1..10: note = Seed: YTPHTVLQAV
YQPHTVLQAL

SEQ ID NO: 80953 - protein, 10 aa, synthetic construct
  source 1..10: note = Seed: YTPHTVLQAV
YQPHTVLQAM

SEQ ID NO: 80954 - protein, 10 aa, synthetic construct
  source 1..10: note = Seed: YTPHTVLQAV
YQPHTVLQAV

SEQ ID NO: 80955 - protein, 9 aa, synthetic construct
  source 1..9: note = Seed: YTPHTVLQA
YQPHTVLQI

SEQ ID NO: 80956 - protein, 9 aa, synthetic construct
  source 1..9: note = Seed: YTPHTVLQA
YQPHTVLQV

SEQ ID NO: 80957 - protein, 10 aa, synthetic construct
  source 1..10: note = Seed: YLPIDKCSRI
YQPIDKCSRV

SEQ ID NO: 80958 - protein, 9 aa, synthetic construct
  source 1..9: note = Seed: YVPLKSATC
YQPLKSATL

SEQ ID NO: 80959 - protein, 8 aa, synthetic construct
  source 1..8: note = Seed: YMPYFFTL
YQPYFFTF

SEQ ID NO: 80960 - protein, 8 aa, synthetic construct
  source 1..8: note = Seed: YMPYFFTL
YQPYFFTI

SEQ ID NO: 80961 - protein, 8 aa, synthetic construct
  source 1..8: note = Seed: YMPYFFTL
YQPYFFTL

SEQ ID NO: 80962 - protein, 9 aa, synthetic construct
  source 1..9: note = Seed: YMPYFFTLL
YQPYFFTLA

SEQ ID NO: 80963 - protein, 9 aa, synthetic construct
  source 1..9: note = Seed: YMPYFFTLL
YQPYFFTLF

SEQ ID NO: 80964 - protein, 9 aa, synthetic construct
  source 1..9: note = Seed: YMPYFFTLL
YQPYFFTLI

SEQ ID NO: 80965 - protein, 9 aa, synthetic construct
  source 1..9: note = Seed: YMPYFFTLL
YQPYFFTLL

SEQ ID NO: 80966 - protein, 10 aa, synthetic construct
  source 1..10: note = Seed: YMPYFFTLLL
YQPYFFTLLA

SEQ ID NO: 80967 - protein, 10 aa, synthetic construct
  source 1..10: note = Seed: YMPYFFTLLL
YQPYFFTLLF

SEQ ID NO: 80968 - protein, 10 aa, synthetic construct
  source 1..10: note = Seed: YMPYFFTLLL
YQPYFFTLLI

SEQ ID NO: 80969 - protein, 10 aa, synthetic construct
  source 1..10: note = Seed: YMPYFFTLLL
YQPYFFTLLL

SEQ ID NO: 80970 - protein, 10 aa, synthetic construct
  source 1..10: note = Seed: YMPYFFTLLL
YQPYFFTLLM

SEQ ID NO: 80971 - protein, 10 aa, synthetic construct
  source 1..10: note = Seed: YMPYFFTLLL
YQPYFFTLLT

SEQ ID NO: 80972 - protein, 10 aa, synthetic construct
  source 1..10: note = Seed: YMPYFFTLLL
YQPYFFTLLV

SEQ ID NO: 80973 - protein, 10 aa, synthetic construct
  source 1..10: note = Seed: YMPYFFTLLL
YQPYFFTLLW

SEQ ID NO: 80974 - protein, 10 aa, synthetic construct
  source 1..10: note = Seed: YMPYFFTLLL
YQPYFFTLLY

SEQ ID NO: 80975 - protein, 9 aa, synthetic construct
  source 1..9: note = Seed: YMPYFFTLL
YQPYFFTLM

SEQ ID NO: 80976 - protein, 9 aa, synthetic construct
  source 1..9: note = Seed: YMPYFFTLL
YQPYFFTLV

SEQ ID NO: 80977 - protein, 9 aa, synthetic construct
  source 1..9: note = Seed: YMPYFFTLL
YQPYFFTLW

SEQ ID NO: 80978 - protein, 9 aa, synthetic construct
  source 1..9: note = Seed: YMPYFFTLL
YQPYFFTLY

SEQ ID NO: 80979 - protein, 8 aa, synthetic construct
  source 1..8: note = Seed: YMPYFFTL
YQPYFFTV

SEQ ID NO: 80980 - protein, 8 aa, synthetic construct
  source 1..8: note = Seed: YMPYFFTL
YQPYFFTW

SEQ ID NO: 80981 - protein, 9 aa, synthetic construct
  source 1..9: note = Seed: YQPYRVVVL
YQPYRVVVF

SEQ ID NO: 80982 - protein, 10 aa, synthetic construct
  source 1..10: note = Seed: YQPYRVVVLS
YQPYRVVVLA

SEQ ID NO: 80983 - protein, 9 aa, synthetic construct
  source 1..9: note = Seed: YQPYRVVVL
YQPYRVVVM

SEQ ID NO: 80984 - protein, 9 aa, synthetic construct
  source 1..9: note = Seed: YQPYRVVVL
YQPYRVVVY

SEQ ID NO: 80985 - protein, 9 aa, synthetic construct
  source 1..9: note = Seed: YKQFDTYNL
YQQFDTYNF

SEQ ID NO: 80986 - protein, 9 aa, synthetic construct
  source 1..9: note = Seed: YKQFDTYNL
YQQFDTYNL

SEQ ID NO: 80987 - protein, 10 aa, synthetic construct
  source 1..10: note = Seed: YKQFDTYNLW
YQQFDTYNLF

SEQ ID NO: 80988 - protein, 10 aa, synthetic construct
  source 1..10: note = Seed: YKQFDTYNLW
YQQFDTYNLM

SEQ ID NO: 80989 - protein, 10 aa, synthetic construct
  source 1..10: note = Seed: YKQFDTYNLW
YQQFDTYNLY

SEQ ID NO: 80990 - protein, 9 aa, synthetic construct
  source 1..9: note = Seed: YKQFDTYNL
YQQFDTYNM

SEQ ID NO: 80991 - protein, 9 aa, synthetic construct
  source 1..9: note = Seed: YKQFDTYNL
YQQFDTYNY

SEQ ID NO: 80992 - protein, 9 aa, synthetic construct
  source 1..9: note = Seed: YSQLMCQPI
YQQLMCQPI

SEQ ID NO: 80993 - protein, 10 aa, synthetic construct
  source 1..10: note = Seed: YSQLMCQPIL
YQQLMCQPIF

SEQ ID NO: 80994 - protein, 11 aa, synthetic construct
  source 1..11: note = Seed: YSQLMCQPILL
YQQLMCQPILA

SEQ ID NO: 80995 - protein, 11 aa, synthetic construct
  source 1..11: note = Seed: YSQLMCQPILL
YQQLMCQPILI

SEQ ID NO: 80996 - protein, 11 aa, synthetic construct
  source 1..11: note = Seed: YSQLMCQPILL
YQQLMCQPILL

SEQ ID NO: 80997 - protein, 11 aa, synthetic construct
  source 1..11: note = Seed: YSQLMCQPILL
YQQLMCQPILM

SEQ ID NO: 80998 - protein, 11 aa, synthetic construct
  source 1..11: note = Seed: YSQLMCQPILL
YQQLMCQPILV

SEQ ID NO: 80999 - protein, 10 aa, synthetic construct
  source 1..10: note = Seed: YSQLMCQPIL
YQQLMCQPIM

SEQ ID NO: 81000 - protein, 10 aa, synthetic construct
  source 1..10: note = Seed: YSQLMCQPIL
YQQLMCQPIY

SEQ ID NO: 81001 - protein, 9 aa, synthetic construct
  source 1..9: note = Seed: YSQLMCQPI
YQQLMCQPL

SEQ ID NO: 81002 - protein, 9 aa, synthetic construct
  source 1..9: note = Seed: YSQLMCQPI
YQQLMCQPV

SEQ ID NO: 81003 - protein, 9 aa, synthetic construct
  source 1..9: note = Seed: YYQNNVFMS
YQQNNVFMF

SEQ ID NO: 81004 - protein, 9 aa, synthetic construct
  source 1..9: note = Seed: YYQNNVFMS
YQQNNVFMW

SEQ ID NO: 81005 - protein, 9 aa, synthetic construct
  source 1..9: note = Seed: YLQPRTFLL
YQQPRTFLA

SEQ ID NO: 81006 - protein, 9 aa, synthetic construct
  source 1..9: note = Seed: YLQPRTFLL
YQQPRTFLF

SEQ ID NO: 81007 - protein, 9 aa, synthetic construct
  source 1..9: note = Seed: YLQPRTFLL
YQQPRTFLI

SEQ ID NO: 81008 - protein, 9 aa, synthetic construct
  source 1..9: note = Seed: YLQPRTFLL
YQQPRTFLL

SEQ ID NO: 81009 - protein, 10 aa, synthetic construct
  source 1..10: note = Seed: YLQPRTFLLK
YQQPRTFLLR

SEQ ID NO: 81010 - protein, 10 aa, synthetic construct
  source 1..10: note = Seed: YLQPRTFLLK
YQQPRTFLLV

SEQ ID NO: 81011 - protein, 9 aa, synthetic construct
  source 1..9: note = Seed: YLQPRTFLL
YQQPRTFLM

SEQ ID NO: 81012 - protein, 9 aa, synthetic construct
  source 1..9: note = Seed: YLQPRTFLL
YQQPRTFLV

SEQ ID NO: 81013 - protein, 9 aa, synthetic construct
  source 1..9: note = Seed: YLQPRTFLL
YQQPRTFLW

SEQ ID NO: 81014 - protein, 9 aa, synthetic construct
  source 1..9: note = Seed: YLQPRTFLL
YQQPRTFLY

SEQ ID NO: 81015 - protein, 10 aa, synthetic construct
  source 1..10: note = Seed: YPQVNGLTSI
YQQVNGLTSF

SEQ ID NO: 81016 - protein, 10 aa, synthetic construct
  source 1..10: note = Seed: YPQVNGLTSI
YQQVNGLTSI

SEQ ID NO: 81017 - protein, 10 aa, synthetic construct
  source 1..10: note = Seed: YPQVNGLTSI
YQQVNGLTSL

SEQ ID NO: 81018 - protein, 10 aa, synthetic construct
  source 1..10: note = Seed: YPQVNGLTSI
YQQVNGLTSM

SEQ ID NO: 81019 - protein, 10 aa, synthetic construct
  source 1..10: note = Seed: YPQVNGLTSI
YQQVNGLTSV

SEQ ID NO: 81020 - protein, 10 aa, synthetic construct
  source 1..10: note = Seed: YPQVNGLTSI
YQQVNGLTSY

SEQ ID NO: 81021 - protein, 9 aa, synthetic construct
  source 1..9: note = Seed: YKRDAPAHI
YQRDAPAHF

SEQ ID NO: 81022 - protein, 9 aa, synthetic construct
  source 1..9: note = Seed: YKRDAPAHI
YQRDAPAHI

SEQ ID NO: 81023 - protein, 9 aa, synthetic construct
  source 1..9: note = Seed: YKRDAPAHI
YQRDAPAHL

SEQ ID NO: 81024 - protein, 9 aa, synthetic construct
  source 1..9: note = Seed: YKRDAPAHI
YQRDAPAHM

SEQ ID NO: 81025 - protein, 9 aa, synthetic construct
  source 1..9: note = Seed: YKRDAPAHI
YQRDAPAHW

SEQ ID NO: 81026 - protein, 9 aa, synthetic construct
  source 1..9: note = Seed: YKRDAPAHI
YQRDAPAHY

SEQ ID NO: 81027 - protein, 10 aa, synthetic construct
  source 1..10: note = Seed: YRRLISMMGF
YQRLISMMGF

SEQ ID NO: 81028 - protein, 10 aa, synthetic construct
  source 1..10: note = Seed: YRRLISMMGF
YQRLISMMGI

SEQ ID NO: 81029 - protein, 10 aa, synthetic construct
  source 1..10: note = Seed: YRRLISMMGF
YQRLISMMGL

SEQ ID NO: 81030 - protein, 10 aa, synthetic construct
  source 1..10: note = Seed: YRRLISMMGF
YQRLISMMGM

SEQ ID NO: 81031 - protein, 10 aa, synthetic construct
  source 1..10: note = Seed: YRRLISMMGF
YQRLISMMGY

SEQ ID NO: 81032 - protein, 9 aa, synthetic construct
  source 1..9: note = Seed: YFRLTLGVY
YQRLTLGVF

SEQ ID NO: 81033 - protein, 9 aa, synthetic construct
  source 1..9: note = Seed: YFRLTLGVY
YQRLTLGVH

SEQ ID NO: 81034 - protein, 9 aa, synthetic construct
  source 1..9: note = Seed: YFRLTLGVY
YQRLTLGVI

SEQ ID NO: 81035 - protein, 9 aa, synthetic construct
  source 1..9: note = Seed: YFRLTLGVY
YQRLTLGVL

SEQ ID NO: 81036 - protein, 9 aa, synthetic construct
  source 1..9: note = Seed: YFRLTLGVY
YQRLTLGVM

SEQ ID NO: 81037 - protein, 9 aa, synthetic construct
  source 1..9: note = Seed: YFRLTLGVY
YQRLTLGVV

SEQ ID NO: 81038 - protein, 9 aa, synthetic construct
  source 1..9: note = Seed: YFRLTLGVY
YQRLTLGVW

SEQ ID NO: 81039 - protein, 9 aa, synthetic construct
  source 1..9: note = Seed: YFRLTLGVY
YQRLTLGVY

SEQ ID NO: 81040 - protein, 10 aa, synthetic construct
  source 1..10: note = Seed: YVRNLQHRLY
YQRNLQHRLF

SEQ ID NO: 81041 - protein, 10 aa, synthetic construct
  source 1..10: note = Seed: YVRNLQHRLY
YQRNLQHRLY

SEQ ID NO: 81042 - protein, 9 aa, synthetic construct
  source 1..9: note = Seed: YKRNRATRV
YQRNRATRL

SEQ ID NO: 81043 - protein, 9 aa, synthetic construct
  source 1..9: note = Seed: YYRSLPGVF
YQRSLPGVF

SEQ ID NO: 81044 - protein, 9 aa, synthetic construct
  source 1..9: note = Seed: YYRSLPGVF
YQRSLPGVH

SEQ ID NO: 81045 - protein, 9 aa, synthetic construct
  source 1..9: note = Seed: YYRSLPGVF
YQRSLPGVI

SEQ ID NO: 81046 - protein, 9 aa, synthetic construct
  source 1..9: note = Seed: YYRSLPGVF
YQRSLPGVL

SEQ ID NO: 81047 - protein, 9 aa, synthetic construct
  source 1..9: note = Seed: YYRSLPGVF
YQRSLPGVM

SEQ ID NO: 81048 - protein, 9 aa, synthetic construct
  source 1..9: note = Seed: YYRSLPGVF
YQRSLPGVV

SEQ ID NO: 81049 - protein, 9 aa, synthetic construct
  source 1..9: note = Seed: YYRSLPGVF
YQRSLPGVW

SEQ ID NO: 81050 - protein, 9 aa, synthetic construct
  source 1..9: note = Seed: YYRSLPGVF
YQRSLPGVY

SEQ ID NO: 81051 - protein, 9 aa, synthetic construct
  source 1..9: note = Seed: YYRYNLPTM
YQRYNLPTA

SEQ ID NO: 81052 - protein, 9 aa, synthetic construct
  source 1..9: note = Seed: YYRYNLPTM
YQRYNLPTF

SEQ ID NO: 81053 - protein, 9 aa, synthetic construct
  source 1..9: note = Seed: YYRYNLPTM
YQRYNLPTH

SEQ ID NO: 81054 - protein, 9 aa, synthetic construct
  source 1..9: note = Seed: YYRYNLPTM
YQRYNLPTI

SEQ ID NO: 81055 - protein, 9 aa, synthetic construct
  source 1..9: note = Seed: YYRYNLPTM
YQRYNLPTK

SEQ ID NO: 81056 - protein, 9 aa, synthetic construct
  source 1..9: note = Seed: YYRYNLPTM
YQRYNLPTL

SEQ ID NO: 81057 - protein, 9 aa, synthetic construct
  source 1..9: note = Seed: YYRYNLPTM
YQRYNLPTM

SEQ ID NO: 81058 - protein, 10 aa, synthetic construct
  source 1..10: note = Seed: YYRYNLPTMC
YQRYNLPTMF

SEQ ID NO: 81059 - protein, 10 aa, synthetic construct
  source 1..10: note = Seed: YYRYNLPTMC
YQRYNLPTMI

SEQ ID NO: 81060 - protein, 10 aa, synthetic construct
  source 1..10: note = Seed: YYRYNLPTMC
YQRYNLPTML

SEQ ID NO: 81061 - protein, 10 aa, synthetic construct
  source 1..10: note = Seed: YYRYNLPTMC
YQRYNLPTMM

SEQ ID NO: 81062 - protein, 10 aa, synthetic construct
  source 1..10: note = Seed: YYRYNLPTMC
YQRYNLPTMV

SEQ ID NO: 81063 - protein, 9 aa, synthetic construct
  source 1..9: note = Seed: YYRYNLPTM
YQRYNLPTV

SEQ ID NO: 81064 - protein, 9 aa, synthetic construct
  source 1..9: note = Seed: YYRYNLPTM
YQRYNLPTW

SEQ ID NO: 81065 - protein, 9 aa, synthetic construct
  source 1..9: note = Seed: YYRYNLPTM
YQRYNLPTY

SEQ ID NO: 81066 - protein, 9 aa, synthetic construct
  source 1..9: note = Seed: YSRYRIGNY
YQRYRIGNF

SEQ ID NO: 81067 - protein, 9 aa, synthetic construct
  source 1..9: note = Seed: YSRYRIGNY
YQRYRIGNM

SEQ ID NO: 81068 - protein, 9 aa, synthetic construct
  source 1..9: note = Seed: YSRYRIGNY
YQRYRIGNY

SEQ ID NO: 81069 - protein, 10 aa, synthetic construct
  source 1..10: note = Seed: YSRYRIGNYK
YQRYRIGNYF

SEQ ID NO: 81070 - protein, 10 aa, synthetic construct
  source 1..10: note = Seed: YSRYRIGNYK
YQRYRIGNYK

SEQ ID NO: 81071 - protein, 11 aa, synthetic construct
  source 1..11: note = Seed: YSRYRIGNYKL
YQRYRIGNYKF

SEQ ID NO: 81072 - protein, 10 aa, synthetic construct
  source 1..10: note = Seed: YSRYRIGNYK
YQRYRIGNYL

SEQ ID NO: 81073 - protein, 10 aa, synthetic construct
  source 1..10: note = Seed: YSRYRIGNYK
YQRYRIGNYM

SEQ ID NO: 81074 - protein, 10 aa, synthetic construct
  source 1..10: note = Seed: YSRYRIGNYK
YQRYRIGNYR

SEQ ID NO: 81075 - protein, 9 aa, synthetic construct
  source 1..9: note = Seed: YSSANNCTF
YQSANNCTF

SEQ ID NO: 81076 - protein, 11 aa, synthetic construct
  source 1..11: note = Seed: YSSANNCTFEY
YQSANNCTFEF

SEQ ID NO: 81077 - protein, 11 aa, synthetic construct
  source 1..11: note = Seed: YSSANNCTFEY
YQSANNCTFEW

SEQ ID NO: 81078 - protein, 11 aa, synthetic construct
  source 1..11: note = Seed: YSSANNCTFEY
YQSANNCTFEY

SEQ ID NO: 81079 - protein, 9 aa, synthetic construct
  source 1..9: note = Seed: YSSANNCTF
YQSANNCTH

SEQ ID NO: 81080 - protein, 9 aa, synthetic construct
  source 1..9: note = Seed: YSSANNCTF
YQSANNCTI

SEQ ID NO: 81081 - protein, 9 aa, synthetic construct
  source 1..9: note = Seed: YSSANNCTF
YQSANNCTL

SEQ ID NO: 81082 - protein, 9 aa, synthetic construct
  source 1..9: note = Seed: YSSANNCTF
YQSANNCTM

SEQ ID NO: 81083 - protein, 9 aa, synthetic construct
  source 1..9: note = Seed: YSSANNCTF
YQSANNCTV

SEQ ID NO: 81084 - protein, 9 aa, synthetic construct
  source 1..9: note = Seed: YSSANNCTF
YQSANNCTW

SEQ ID NO: 81085 - protein, 9 aa, synthetic construct
  source 1..9: note = Seed: YSSANNCTF
YQSANNCTY

SEQ ID NO: 81086 - protein, 9 aa, synthetic construct
  source 1..9: note = Seed: YNSASFSTF
YQSASFSTA

SEQ ID NO: 81087 - protein, 9 aa, synthetic construct
  source 1..9: note = Seed: YNSASFSTF
YQSASFSTF

SEQ ID NO: 81088 - protein, 10 aa, synthetic construct
  source 1..10: note = Seed: YNSASFSTFK
YQSASFSTFK

SEQ ID NO: 81089 - protein, 10 aa, synthetic construct
  source 1..10: note = Seed: YNSASFSTFK
YQSASFSTFR

SEQ ID NO: 81090 - protein, 9 aa, synthetic construct
  source 1..9: note = Seed: YNSASFSTF
YQSASFSTG

SEQ ID NO: 81091 - protein, 9 aa, synthetic construct
  source 1..9: note = Seed: YNSASFSTF
YQSASFSTH

SEQ ID NO: 81092 - protein, 9 aa, synthetic construct
  source 1..9: note = Seed: YNSASFSTF
YQSASFSTI

SEQ ID NO: 81093 - protein, 9 aa, synthetic construct
  source 1..9: note = Seed: YNSASFSTF
YQSASFSTL

SEQ ID NO: 81094 - protein, 9 aa, synthetic construct
  source 1..9: note = Seed: YNSASFSTF
YQSASFSTM

SEQ ID NO: 81095 - protein, 9 aa, synthetic construct
  source 1..9: note = Seed: YNSASFSTF
YQSASFSTT

SEQ ID NO: 81096 - protein, 9 aa, synthetic construct
  source 1..9: note = Seed: YNSASFSTF
YQSASFSTV

SEQ ID NO: 81097 - protein, 9 aa, synthetic construct
  source 1..9: note = Seed: YNSASFSTF
YQSASFSTW

SEQ ID NO: 81098 - protein, 9 aa, synthetic construct
  source 1..9: note = Seed: YNSASFSTF
YQSASFSTY

SEQ ID NO: 81099 - protein, 9 aa, synthetic construct
  source 1..9: note = Seed: YASAVVLLI
YQSAVVLLA

SEQ ID NO: 81100 - protein, 9 aa, synthetic construct
  source 1..9: note = Seed: YASAVVLLI
YQSAVVLLF

SEQ ID NO: 81101 - protein, 9 aa, synthetic construct
  source 1..9: note = Seed: YASAVVLLI
YQSAVVLLH

SEQ ID NO: 81102 - protein, 9 aa, synthetic construct
  source 1..9: note = Seed: YASAVVLLI
YQSAVVLLI

SEQ ID NO: 81103 - protein, 10 aa, synthetic construct
  source 1..10: note = Seed: YASAVVLLIL
YQSAVVLLII

SEQ ID NO: 81104 - protein, 10 aa, synthetic construct
  source 1..10: note = Seed: YASAVVLLIL
YQSAVVLLIL

SEQ ID NO: 81105 - protein, 10 aa, synthetic construct
  source 1..10: note = Seed: YASAVVLLIL
YQSAVVLLIV

SEQ ID NO: 81106 - protein, 10 aa, synthetic construct
  source 1..10: note = Seed: YASAVVLLIL
YQSAVVLLIW

SEQ ID NO: 81107 - protein, 9 aa, synthetic construct
  source 1..9: note = Seed: YASAVVLLI
YQSAVVLLL

SEQ ID NO: 81108 - protein, 9 aa, synthetic construct
  source 1..9: note = Seed: YASAVVLLI
YQSAVVLLM

SEQ ID NO: 81109 - protein, 9 aa, synthetic construct
  source 1..9: note = Seed: YASAVVLLI
YQSAVVLLT

SEQ ID NO: 81110 - protein, 9 aa, synthetic construct
  source 1..9: note = Seed: YASAVVLLI
YQSAVVLLV

SEQ ID NO: 81111 - protein, 9 aa, synthetic construct
  source 1..9: note = Seed: YASAVVLLI
YQSAVVLLW

SEQ ID NO: 81112 - protein, 9 aa, synthetic construct
  source 1..9: note = Seed: YASAVVLLI
YQSAVVLLY

SEQ ID NO: 81113 - protein, 11 aa, synthetic construct
  source 1..11: note = Seed: YYSLLMPILTL
YQSLLMPILTV

SEQ ID NO: 81114 - protein, 11 aa, synthetic construct
  source 1..11: note = Seed: YRSLPGVFCGV
YQSLPGVFCGI

SEQ ID NO: 81115 - protein, 11 aa, synthetic construct
  source 1..11: note = Seed: YRSLPGVFCGV
YQSLPGVFCGV

SEQ ID NO: 81116 - protein, 10 aa, synthetic construct
  source 1..10: note = Seed: YESLRPDTRY
YQSLRPDTRF

SEQ ID NO: 81117 - protein, 10 aa, synthetic construct
  source 1..10: note = Seed: YESLRPDTRY
YQSLRPDTRW

SEQ ID NO: 81118 - protein, 9 aa, synthetic construct
  source 1..9: note = Seed: YTSNPTTFH
YQSNPTTFF

SEQ ID NO: 81119 - protein, 10 aa, synthetic construct
  source 1..10: note = Seed: YTSNPTTFHL
YQSNPTTFHF

SEQ ID NO: 81120 - protein, 10 aa, synthetic construct
  source 1..10: note = Seed: YTSNPTTFHL
YQSNPTTFHI

SEQ ID NO: 81121 - protein, 10 aa, synthetic construct
  source 1..10: note = Seed: YTSNPTTFHL
YQSNPTTFHL

SEQ ID NO: 81122 - protein, 10 aa, synthetic construct
  source 1..10: note = Seed: YTSNPTTFHL
YQSNPTTFHV

SEQ ID NO: 81123 - protein, 10 aa, synthetic construct
  source 1..10: note = Seed: YTSNPTTFHL
YQSNPTTFHW

SEQ ID NO: 81124 - protein, 10 aa, synthetic construct
  source 1..10: note = Seed: YTSNPTTFHL
YQSNPTTFHY

SEQ ID NO: 81125 - protein, 9 aa, synthetic construct
  source 1..9: note = Seed: YTSNPTTFH
YQSNPTTFM

SEQ ID NO: 81126 - protein, 9 aa, synthetic construct
  source 1..9: note = Seed: YTSNPTTFH
YQSNPTTFY

SEQ ID NO: 81127 - protein, 10 aa, synthetic construct
  source 1..10: note = Seed: YLTFYLTNDV
YQTFYLTNDV

SEQ ID NO: 81128 - protein, 9 aa, synthetic construct
  source 1..9: note = Seed: YITGGVVQL
YQTGGVVQA

SEQ ID NO: 81129 - protein, 9 aa, synthetic construct
  source 1..9: note = Seed: YITGGVVQL
YQTGGVVQI

SEQ ID NO: 81130 - protein, 9 aa, synthetic construct
  source 1..9: note = Seed: YITGGVVQL
YQTGGVVQL

SEQ ID NO: 81131 - protein, 9 aa, synthetic construct
  source 1..9: note = Seed: YITGGVVQL
YQTGGVVQM

SEQ ID NO: 81132 - protein, 9 aa, synthetic construct
  source 1..9: note = Seed: YITGGVVQL
YQTGGVVQV

SEQ ID NO: 81133 - protein, 8 aa, synthetic construct
  source 1..8: note = Seed: YSTGSNVF
YQTGSNVF

SEQ ID NO: 81134 - protein, 8 aa, synthetic construct
  source 1..8: note = Seed: YSTGSNVF
YQTGSNVY

SEQ ID NO: 81135 - protein, 9 aa, synthetic construct
  source 1..9: note = Seed: YLTNDVSFL
YQTNDVSFA

SEQ ID NO: 81136 - protein, 9 aa, synthetic construct
  source 1..9: note = Seed: YLTNDVSFL
YQTNDVSFI

SEQ ID NO: 81137 - protein, 9 aa, synthetic construct
  source 1..9: note = Seed: YLTNDVSFL
YQTNDVSFL

SEQ ID NO: 81138 - protein, 10 aa, synthetic construct
  source 1..10: note = Seed: YLTNDVSFLA
YQTNDVSFLA

SEQ ID NO: 81139 - protein, 10 aa, synthetic construct
  source 1..10: note = Seed: YLTNDVSFLA
YQTNDVSFLI

SEQ ID NO: 81140 - protein, 10 aa, synthetic construct
  source 1..10: note = Seed: YLTNDVSFLA
YQTNDVSFLL

SEQ ID NO: 81141 - protein, 10 aa, synthetic construct
  source 1..10: note = Seed: YLTNDVSFLA
YQTNDVSFLM

SEQ ID NO: 81142 - protein, 10 aa, synthetic construct
  source 1..10: note = Seed: YLTNDVSFLA
YQTNDVSFLV

SEQ ID NO: 81143 - protein, 9 aa, synthetic construct
  source 1..9: note = Seed: YLTNDVSFL
YQTNDVSFM

SEQ ID NO: 81144 - protein, 9 aa, synthetic construct
  source 1..9: note = Seed: YLTNDVSFL
YQTNDVSFV

SEQ ID NO: 81145 - protein, 9 aa, synthetic construct
  source 1..9: note = Seed: YVTQQLIRA
YQTQQLIRI

SEQ ID NO: 81146 - protein, 9 aa, synthetic construct
  source 1..9: note = Seed: YVTQQLIRA
YQTQQLIRL

SEQ ID NO: 81147 - protein, 9 aa, synthetic construct
  source 1..9: note = Seed: YVTQQLIRA
YQTQQLIRV

SEQ ID NO: 81148 - protein, 9 aa, synthetic construct
  source 1..9: note = Seed: YFTSDYYQL
YQTSDYYQF

SEQ ID NO: 81149 - protein, 10 aa, synthetic construct
  source 1..10: note = Seed: YFTSDYYQLY
YQTSDYYQLK

SEQ ID NO: 81150 - protein, 10 aa, synthetic construct
  source 1..10: note = Seed: YFTSDYYQLY
YQTSDYYQLR

SEQ ID NO: 81151 - protein, 10 aa, synthetic construct
  source 1..10: note = Seed: YFTSDYYQLY
YQTSDYYQLW

SEQ ID NO: 81152 - protein, 10 aa, synthetic construct
  source 1..10: note = Seed: YFTSDYYQLY
YQTSDYYQLY

SEQ ID NO: 81153 - protein, 11 aa, synthetic construct
  source 1..11: note = Seed: YFTSDYYQLYS
YQTSDYYQLYY

SEQ ID NO: 81154 - protein, 9 aa, synthetic construct
  source 1..9: note = Seed: YYTSNPTTF
YQTSNPTTF

SEQ ID NO: 81155 - protein, 11 aa, synthetic construct
  source 1..11: note = Seed: YYTSNPTTFHL
YQTSNPTTFHF

SEQ ID NO: 81156 - protein, 11 aa, synthetic construct
  source 1..11: note = Seed: YYTSNPTTFHL
YQTSNPTTFHW

SEQ ID NO: 81157 - protein, 9 aa, synthetic construct
  source 1..9: note = Seed: YYTSNPTTF
YQTSNPTTI

SEQ ID NO: 81158 - protein, 9 aa, synthetic construct
  source 1..9: note = Seed: YYTSNPTTF
YQTSNPTTL

SEQ ID NO: 81159 - protein, 9 aa, synthetic construct
  source 1..9: note = Seed: YYTSNPTTF
YQTSNPTTM

SEQ ID NO: 81160 - protein, 9 aa, synthetic construct
  source 1..9: note = Seed: YYTSNPTTF
YQTSNPTTW

SEQ ID NO: 81161 - protein, 9 aa, synthetic construct
  source 1..9: note = Seed: YYTSNPTTF
YQTSNPTTY

SEQ ID NO: 81162 - protein, 10 aa, synthetic construct
  source 1..10: note = Seed: YTTTIKPVTY
YQTTIKPVTW

SEQ ID NO: 81163 - protein, 10 aa, synthetic construct
  source 1..10: note = Seed: YTTTIKPVTY
YQTTIKPVTY

SEQ ID NO: 81164 - protein, 11 aa, synthetic construct
  source 1..11: note = Seed: YTTTIKPVTYK
YQTTIKPVTYR

SEQ ID NO: 81165 - protein, 9 aa, synthetic construct
  source 1..9: note = Seed: YTVEEAKTV
YQVEEAKTL

SEQ ID NO: 81166 - protein, 9 aa, synthetic construct
  source 1..9: note = Seed: YTVEEAKTV
YQVEEAKTV

SEQ ID NO: 81167 - protein, 9 aa, synthetic construct
  source 1..9: note = Seed: YTVELGTEV
YQVELGTEA

SEQ ID NO: 81168 - protein, 9 aa, synthetic construct
  source 1..9: note = Seed: YTVELGTEV
YQVELGTEF

SEQ ID NO: 81169 - protein, 9 aa, synthetic construct
  source 1..9: note = Seed: YTVELGTEV
YQVELGTEI

SEQ ID NO: 81170 - protein, 9 aa, synthetic construct
  source 1..9: note = Seed: YTVELGTEV
YQVELGTEL

SEQ ID NO: 81171 - protein, 9 aa, synthetic construct
  source 1..9: note = Seed: YTVELGTEV
YQVELGTEM

SEQ ID NO: 81172 - protein, 9 aa, synthetic construct
  source 1..9: note = Seed: YTVELGTEV
YQVELGTEV

SEQ ID NO: 81173 - protein, 9 aa, synthetic construct
  source 1..9: note = Seed: YTVELGTEV
YQVELGTEY

SEQ ID NO: 81174 - protein, 9 aa, synthetic construct
  source 1..9: note = Seed: YFVLTSHTV
YQVLTSHTV

SEQ ID NO: 81175 - protein, 9 aa, synthetic construct
  source 1..9: note = Seed: YQVNGYPNM
YQVNGYPNA

SEQ ID NO: 81176 - protein, 9 aa, synthetic construct
  source 1..9: note = Seed: YQVNGYPNM
YQVNGYPNF

SEQ ID NO: 81177 - protein, 9 aa, synthetic construct
  source 1..9: note = Seed: YQVNGYPNM
YQVNGYPNI

SEQ ID NO: 81178 - protein, 9 aa, synthetic construct
  source 1..9: note = Seed: YQVNGYPNM
YQVNGYPNL

SEQ ID NO: 81179 - protein, 11 aa, synthetic construct
  source 1..11: note = Seed: YQVNGYPNMFI
YQVNGYPNMFF

SEQ ID NO: 81180 - protein, 11 aa, synthetic construct
  source 1..11: note = Seed: YQVNGYPNMFI
YQVNGYPNMFL

SEQ ID NO: 81181 - protein, 11 aa, synthetic construct
  source 1..11: note = Seed: YQVNGYPNMFI
YQVNGYPNMFV

SEQ ID NO: 81182 - protein, 11 aa, synthetic construct
  source 1..11: note = Seed: YQVNGYPNMFI
YQVNGYPNMFY

SEQ ID NO: 81183 - protein, 10 aa, synthetic construct
  source 1..10: note = Seed: YQVNGYPNMF
YQVNGYPNMI

SEQ ID NO: 81184 - protein, 10 aa, synthetic construct
  source 1..10: note = Seed: YQVNGYPNMF
YQVNGYPNML

SEQ ID NO: 81185 - protein, 10 aa, synthetic construct
  source 1..10: note = Seed: YQVNGYPNMF
YQVNGYPNMM

SEQ ID NO: 81186 - protein, 10 aa, synthetic construct
  source 1..10: note = Seed: YQVNGYPNMF
YQVNGYPNMV

SEQ ID NO: 81187 - protein, 10 aa, synthetic construct
  source 1..10: note = Seed: YQVNGYPNMF
YQVNGYPNMY

SEQ ID NO: 81188 - protein, 9 aa, synthetic construct
  source 1..9: note = Seed: YQVNGYPNM
YQVNGYPNV

SEQ ID NO: 81189 - protein, 9 aa, synthetic construct
  source 1..9: note = Seed: YQVNGYPNM
YQVNGYPNW

SEQ ID NO: 81190 - protein, 9 aa, synthetic construct
  source 1..9: note = Seed: YQVNGYPNM
YQVNGYPNY

SEQ ID NO: 81191 - protein, 8 aa, synthetic construct
  source 1..8: note = Seed: YLVSTQEF
YQVSTQEF

SEQ ID NO: 81192 - protein, 10 aa, synthetic construct
  source 1..10: note = Seed: YLVSTQEFRY
YQVSTQEFRF

SEQ ID NO: 81193 - protein, 10 aa, synthetic construct
  source 1..10: note = Seed: YLVSTQEFRY
YQVSTQEFRY

SEQ ID NO: 81194 - protein, 8 aa, synthetic construct
  source 1..8: note = Seed: YLVSTQEF
YQVSTQEM

SEQ ID NO: 81195 - protein, 8 aa, synthetic construct
  source 1..8: note = Seed: YLVSTQEF
YQVSTQEY

SEQ ID NO: 81196 - protein, 9 aa, synthetic construct
  source 1..9: note = Seed: YFVVKRHTF
YQVVKRHTF

SEQ ID NO: 81197 - protein, 9 aa, synthetic construct
  source 1..9: note = Seed: YFVVKRHTF
YQVVKRHTL

SEQ ID NO: 81198 - protein, 9 aa, synthetic construct
  source 1..9: note = Seed: YFVVKRHTF
YQVVKRHTM

SEQ ID NO: 81199 - protein, 9 aa, synthetic construct
  source 1..9: note = Seed: YFVVKRHTF
YQVVKRHTY

SEQ ID NO: 81200 - protein, 8 aa, synthetic construct
  source 1..8: note = Seed: YRVVVLSF
YQVVVLSF

SEQ ID NO: 81201 - protein, 10 aa, synthetic construct
  source 1..10: note = Seed: YRVVVLSFEL
YQVVVLSFEA

SEQ ID NO: 81202 - protein, 10 aa, synthetic construct
  source 1..10: note = Seed: YRVVVLSFEL
YQVVVLSFEI

SEQ ID NO: 81203 - protein, 10 aa, synthetic construct
  source 1..10: note = Seed: YRVVVLSFEL
YQVVVLSFEL

SEQ ID NO: 81204 - protein, 10 aa, synthetic construct
  source 1..10: note = Seed: YRVVVLSFEL
YQVVVLSFEV

SEQ ID NO: 81205 - protein, 8 aa, synthetic construct
  source 1..8: note = Seed: YRVVVLSF
YQVVVLSM

SEQ ID NO: 81206 - protein, 8 aa, synthetic construct
  source 1..8: note = Seed: YRVVVLSF
YQVVVLSY

SEQ ID NO: 81207 - protein, 10 aa, synthetic construct
  source 1..10: note = Seed: YYVWKSYVHV
YQVWKSYVHI

SEQ ID NO: 81208 - protein, 10 aa, synthetic construct
  source 1..10: note = Seed: YYVWKSYVHV
YQVWKSYVHL

SEQ ID NO: 81209 - protein, 10 aa, synthetic construct
  source 1..10: note = Seed: YYVWKSYVHV
YQVWKSYVHV

SEQ ID NO: 81210 - protein, 9 aa, synthetic construct
  source 1..9: note = Seed: YYVWKSYVH
YQVWKSYVY

SEQ ID NO: 81211 - protein, 9 aa, synthetic construct
  source 1..9: note = Seed: YVWKSYVHV
YQWKSYVHA

SEQ ID NO: 81212 - protein, 9 aa, synthetic construct
  source 1..9: note = Seed: YVWKSYVHV
YQWKSYVHI

SEQ ID NO: 81213 - protein, 9 aa, synthetic construct
  source 1..9: note = Seed: YVWKSYVHV
YQWKSYVHL

SEQ ID NO: 81214 - protein, 9 aa, synthetic construct
  source 1..9: note = Seed: YVWKSYVHV
YQWKSYVHM

SEQ ID NO: 81215 - protein, 9 aa, synthetic construct
  source 1..9: note = Seed: YVWKSYVHV
YQWKSYVHT

SEQ ID NO: 81216 - protein, 9 aa, synthetic construct
  source 1..9: note = Seed: YVWKSYVHV
YQWKSYVHV

SEQ ID NO: 81217 - protein, 10 aa, synthetic construct
  source 1..10: note = Seed: YVWKSYVHVV
YQWKSYVHVA

SEQ ID NO: 81218 - protein, 10 aa, synthetic construct
  source 1..10: note = Seed: YVWKSYVHVV
YQWKSYVHVI

SEQ ID NO: 81219 - protein, 10 aa, synthetic construct
  source 1..10: note = Seed: YVWKSYVHVV
YQWKSYVHVL

SEQ ID NO: 81220 - protein, 10 aa, synthetic construct
  source 1..10: note = Seed: YVWKSYVHVV
YQWKSYVHVM

SEQ ID NO: 81221 - protein, 10 aa, synthetic construct
  source 1..10: note = Seed: YVWKSYVHVV
YQWKSYVHVV

SEQ ID NO: 81222 - protein, 10 aa, synthetic construct
  source 1..10: note = Seed: YVYANGGKGF
YQYANGGKGF

SEQ ID NO: 81223 - protein, 10 aa, synthetic construct
  source 1..10: note = Seed: YVYANGGKGF
YQYANGGKGL

SEQ ID NO: 81224 - protein, 10 aa, synthetic construct
  source 1..10: note = Seed: YVYANGGKGF
YQYANGGKGM

SEQ ID NO: 81225 - protein, 10 aa, synthetic construct
  source 1..10: note = Seed: YVYANGGKGF
YQYANGGKGY

SEQ ID NO: 81226 - protein, 11 aa, synthetic construct
  source 1..11: note = Seed: YLYFIKGLNNL
YQYFIKGLNNF

SEQ ID NO: 81227 - protein, 11 aa, synthetic construct
  source 1..11: note = Seed: YLYFIKGLNNL
YQYFIKGLNNI

SEQ ID NO: 81228 - protein, 11 aa, synthetic construct
  source 1..11: note = Seed: YLYFIKGLNNL
YQYFIKGLNNV

SEQ ID NO: 81229 - protein, 9 aa, synthetic construct
  source 1..9: note = Seed: YNYKLPDDF
YQYKLPDDF

SEQ ID NO: 81230 - protein, 9 aa, synthetic construct
  source 1..9: note = Seed: YNYKLPDDF
YQYKLPDDL

SEQ ID NO: 81231 - protein, 9 aa, synthetic construct
  source 1..9: note = Seed: YNYKLPDDF
YQYKLPDDM

SEQ ID NO: 81232 - protein, 9 aa, synthetic construct
  source 1..9: note = Seed: YNYKLPDDF
YQYKLPDDY

SEQ ID NO: 81233 - protein, 9 aa, synthetic construct
  source 1..9: note = Seed: YLYLTFYLT
YQYLTFYLA

SEQ ID NO: 81234 - protein, 9 aa, synthetic construct
  source 1..9: note = Seed: YLYLTFYLT
YQYLTFYLF

SEQ ID NO: 81235 - protein, 9 aa, synthetic construct
  source 1..9: note = Seed: YLYLTFYLT
YQYLTFYLI

SEQ ID NO: 81236 - protein, 9 aa, synthetic construct
  source 1..9: note = Seed: YLYLTFYLT
YQYLTFYLL

SEQ ID NO: 81237 - protein, 9 aa, synthetic construct
  source 1..9: note = Seed: YLYLTFYLT
YQYLTFYLM

SEQ ID NO: 81238 - protein, 9 aa, synthetic construct
  source 1..9: note = Seed: YLYLTFYLT
YQYLTFYLS

SEQ ID NO: 81239 - protein, 9 aa, synthetic construct
  source 1..9: note = Seed: YLYLTFYLT
YQYLTFYLT

SEQ ID NO: 81240 - protein, 9 aa, synthetic construct
  source 1..9: note = Seed: YLYLTFYLT
YQYLTFYLV

SEQ ID NO: 81241 - protein, 8 aa, synthetic construct
  source 1..8: note = Seed: YLYLTFYL
YQYLTFYV

SEQ ID NO: 81242 - protein, 10 aa, synthetic construct
  source 1..10: note = Seed: YDYLVSTQEF
YQYLVSTQEF

SEQ ID NO: 81243 - protein, 11 aa, synthetic construct
  source 1..11: note = Seed: YDYLVSTQEFR
YQYLVSTQEFF

SEQ ID NO: 81244 - protein, 10 aa, synthetic construct
  source 1..10: note = Seed: YDYLVSTQEF
YQYLVSTQEI

SEQ ID NO: 81245 - protein, 10 aa, synthetic construct
  source 1..10: note = Seed: YDYLVSTQEF
YQYLVSTQEL

SEQ ID NO: 81246 - protein, 10 aa, synthetic construct
  source 1..10: note = Seed: YDYLVSTQEF
YQYLVSTQEM

SEQ ID NO: 81247 - protein, 10 aa, synthetic construct
  source 1..10: note = Seed: YDYLVSTQEF
YQYLVSTQEW

SEQ ID NO: 81248 - protein, 10 aa, synthetic construct
  source 1..10: note = Seed: YDYLVSTQEF
YQYLVSTQEY

SEQ ID NO: 81249 - protein, 9 aa, synthetic construct
  source 1..9: note = Seed: YNYLYRLFR
YQYLYRLFK

SEQ ID NO: 81250 - protein, 9 aa, synthetic construct
  source 1..9: note = Seed: YNYLYRLFR
YQYLYRLFR

SEQ ID NO: 81251 - protein, 10 aa, synthetic construct
  source 1..10: note = Seed: YNYLYRLFRK
YQYLYRLFRK

SEQ ID NO: 81252 - protein, 10 aa, synthetic construct
  source 1..10: note = Seed: YNYLYRLFRK
YQYLYRLFRR

SEQ ID NO: 81253 - protein, 8 aa, synthetic construct
  source 1..8: note = Seed: YRYNLPTM
YQYNLPTF

SEQ ID NO: 81254 - protein, 8 aa, synthetic construct
  source 1..8: note = Seed: YRYNLPTM
YQYNLPTL

SEQ ID NO: 81255 - protein, 8 aa, synthetic construct
  source 1..8: note = Seed: YRYNLPTM
YQYNLPTM

SEQ ID NO: 81256 - protein, 9 aa, synthetic construct
  source 1..9: note = Seed: YRYNLPTMC
YQYNLPTML

SEQ ID NO: 81257 - protein, 8 aa, synthetic construct
  source 1..8: note = Seed: YRYNLPTM
YQYNLPTY

SEQ ID NO: 81258 - protein, 10 aa, synthetic construct
  source 1..10: note = Seed: YVYNPFMIDV
YQYNPFMIDA

SEQ ID NO: 81259 - protein, 10 aa, synthetic construct
  source 1..10: note = Seed: YVYNPFMIDV
YQYNPFMIDI

SEQ ID NO: 81260 - protein, 10 aa, synthetic construct
  source 1..10: note = Seed: YVYNPFMIDV
YQYNPFMIDL

SEQ ID NO: 81261 - protein, 10 aa, synthetic construct
  source 1..10: note = Seed: YVYNPFMIDV
YQYNPFMIDV

SEQ ID NO: 81262 - protein, 9 aa, synthetic construct
  source 1..9: note = Seed: YLYRLFRKS
YQYRLFRKV

SEQ ID NO: 81263 - protein, 11 aa, synthetic construct
  source 1..11: note = Seed: YDYYRYNLPTM
YQYYRYNLPTF

SEQ ID NO: 81264 - protein, 11 aa, synthetic construct
  source 1..11: note = Seed: YDYYRYNLPTM
YQYYRYNLPTW

SEQ ID NO: 81265 - protein, 10 aa, synthetic construct
  source 1..10: note = Seed: YGANKDGIIW
YRANKDGIIW

SEQ ID NO: 81266 - protein, 10 aa, synthetic construct
  source 1..10: note = Seed: YPANSIVCRF
YRANSIVCRW

SEQ ID NO: 81267 - protein, 9 aa, synthetic construct
  source 1..9: note = Seed: YRARAGEAA
YRARAGEAF

SEQ ID NO: 81268 - protein, 9 aa, synthetic construct
  source 1..9: note = Seed: YRARAGEAA
YRARAGEAI

SEQ ID NO: 81269 - protein, 9 aa, synthetic construct
  source 1..9: note = Seed: YRARAGEAA
YRARAGEAL

SEQ ID NO: 81270 - protein, 9 aa, synthetic construct
  source 1..9: note = Seed: YRARAGEAA
YRARAGEAM

SEQ ID NO: 81271 - protein, 9 aa, synthetic construct
  source 1..9: note = Seed: YRARAGEAA
YRARAGEAV

SEQ ID NO: 81272 - protein, 10 aa, synthetic construct
  source 1..10: note = Seed: YKENSYTTTI
YRENSYTTTA

SEQ ID NO: 81273 - protein, 10 aa, synthetic construct
  source 1..10: note = Seed: YKENSYTTTI
YRENSYTTTF

SEQ ID NO: 81274 - protein, 10 aa, synthetic construct
  source 1..10: note = Seed: YKENSYTTTI
YRENSYTTTL

SEQ ID NO: 81275 - protein, 10 aa, synthetic construct
  source 1..10: note = Seed: YKENSYTTTI
YRENSYTTTM

SEQ ID NO: 81276 - protein, 10 aa, synthetic construct
  source 1..10: note = Seed: YKENSYTTTI
YRENSYTTTY

SEQ ID NO: 81277 - protein, 9 aa, synthetic construct
  source 1..9: note = Seed: YVFCTVNAL
YRFCTVNAF

SEQ ID NO: 81278 - protein, 9 aa, synthetic construct
  source 1..9: note = Seed: YVFCTVNAL
YRFCTVNAI

SEQ ID NO: 81279 - protein, 9 aa, synthetic construct
  source 1..9: note = Seed: YVFCTVNAL
YRFCTVNAL

SEQ ID NO: 81280 - protein, 9 aa, synthetic construct
  source 1..9: note = Seed: YVFCTVNAL
YRFCTVNAM

SEQ ID NO: 81281 - protein, 9 aa, synthetic construct
  source 1..9: note = Seed: YVFCTVNAL
YRFCTVNAV

SEQ ID NO: 81282 - protein, 9 aa, synthetic construct
  source 1..9: note = Seed: YVFCTVNAL
YRFCTVNAY

SEQ ID NO: 81283 - protein, 9 aa, synthetic construct
  source 1..9: note = Seed: YIFFASFYY
YRFFASFYF

SEQ ID NO: 81284 - protein, 9 aa, synthetic construct
  source 1..9: note = Seed: YIFFASFYY
YRFFASFYL

SEQ ID NO: 81285 - protein, 9 aa, synthetic construct
  source 1..9: note = Seed: YIFFASFYY
YRFFASFYM

SEQ ID NO: 81286 - protein, 9 aa, synthetic construct
  source 1..9: note = Seed: YIFFASFYY
YRFFASFYR

SEQ ID NO: 81287 - protein, 9 aa, synthetic construct
  source 1..9: note = Seed: YIFFASFYY
YRFFASFYY

SEQ ID NO: 81288 - protein, 10 aa, synthetic construct
  source 1..10: note = Seed: YIFFASFYYV
YRFFASFYYF

SEQ ID NO: 81289 - protein, 10 aa, synthetic construct
  source 1..10: note = Seed: YIFFASFYYV
YRFFASFYYH

SEQ ID NO: 81290 - protein, 10 aa, synthetic construct
  source 1..10: note = Seed: YIFFASFYYV
YRFFASFYYI

SEQ ID NO: 81291 - protein, 10 aa, synthetic construct
  source 1..10: note = Seed: YIFFASFYYV
YRFFASFYYK

SEQ ID NO: 81292 - protein, 10 aa, synthetic construct
  source 1..10: note = Seed: YIFFASFYYV
YRFFASFYYL

SEQ ID NO: 81293 - protein, 10 aa, synthetic construct
  source 1..10: note = Seed: YIFFASFYYV
YRFFASFYYM

SEQ ID NO: 81294 - protein, 10 aa, synthetic construct
  source 1..10: note = Seed: YIFFASFYYV
YRFFASFYYR

SEQ ID NO: 81295 - protein, 10 aa, synthetic construct
  source 1..10: note = Seed: YIFFASFYYV
YRFFASFYYV

SEQ ID NO: 81296 - protein, 11 aa, synthetic construct
  source 1..11: note = Seed: YIFFASFYYVW
YRFFASFYYVF

SEQ ID NO: 81297 - protein, 11 aa, synthetic construct
  source 1..11: note = Seed: YIFFASFYYVW
YRFFASFYYVY

SEQ ID NO: 81298 - protein, 10 aa, synthetic construct
  source 1..10: note = Seed: YIFFASFYYV
YRFFASFYYW

SEQ ID NO: 81299 - protein, 10 aa, synthetic construct
  source 1..10: note = Seed: YIFFASFYYV
YRFFASFYYY

SEQ ID NO: 81300 - protein, 10 aa, synthetic construct
  source 1..10: note = Seed: YWFFSNYLKR
YRFFSNYLKR

SEQ ID NO: 81301 - protein, 9 aa, synthetic construct
  source 1..9: note = Seed: YWFFSNYLK
YRFFSNYLR

SEQ ID NO: 81302 - protein, 9 aa, synthetic construct
  source 1..9: note = Seed: YWFFSNYLK
YRFFSNYLY

SEQ ID NO: 81303 - protein, 10 aa, synthetic construct
  source 1..10: note = Seed: YSFLPGVYSV
YRFLPGVYSF

SEQ ID NO: 81304 - protein, 10 aa, synthetic construct
  source 1..10: note = Seed: YSFLPGVYSV
YRFLPGVYSI

SEQ ID NO: 81305 - protein, 10 aa, synthetic construct
  source 1..10: note = Seed: YSFLPGVYSV
YRFLPGVYSL

SEQ ID NO: 81306 - protein, 10 aa, synthetic construct
  source 1..10: note = Seed: YSFLPGVYSV
YRFLPGVYSM

SEQ ID NO: 81307 - protein, 10 aa, synthetic construct
  source 1..10: note = Seed: YSFLPGVYSV
YRFLPGVYSW

SEQ ID NO: 81308 - protein, 8 aa, synthetic construct
  source 1..8: note = Seed: YRFNGIGV
YRFNGIGL

SEQ ID NO: 81309 - protein, 9 aa, synthetic construct
  source 1..9: note = Seed: YRFNGIGVT
YRFNGIGVA

SEQ ID NO: 81310 - protein, 9 aa, synthetic construct
  source 1..9: note = Seed: YRFNGIGVT
YRFNGIGVF

SEQ ID NO: 81311 - protein, 9 aa, synthetic construct
  source 1..9: note = Seed: YRFNGIGVT
YRFNGIGVI

SEQ ID NO: 81312 - protein, 9 aa, synthetic construct
  source 1..9: note = Seed: YRFNGIGVT
YRFNGIGVL

SEQ ID NO: 81313 - protein, 9 aa, synthetic construct
  source 1..9: note = Seed: YRFNGIGVT
YRFNGIGVM

SEQ ID NO: 81314 - protein, 10 aa, synthetic construct
  source 1..10: note = Seed: YRFNGIGVTQ
YRFNGIGVTF

SEQ ID NO: 81315 - protein, 10 aa, synthetic construct
  source 1..10: note = Seed: YRFNGIGVTQ
YRFNGIGVTI

SEQ ID NO: 81316 - protein, 10 aa, synthetic construct
  source 1..10: note = Seed: YRFNGIGVTQ
YRFNGIGVTK

SEQ ID NO: 81317 - protein, 10 aa, synthetic construct
  source 1..10: note = Seed: YRFNGIGVTQ
YRFNGIGVTL

SEQ ID NO: 81318 - protein, 10 aa, synthetic construct
  source 1..10: note = Seed: YRFNGIGVTQ
YRFNGIGVTM

SEQ ID NO: 81319 - protein, 10 aa, synthetic construct
  source 1..10: note = Seed: YRFNGIGVTQ
YRFNGIGVTR

SEQ ID NO: 81320 - protein, 10 aa, synthetic construct
  source 1..10: note = Seed: YRFNGIGVTQ
YRFNGIGVTY

SEQ ID NO: 81321 - protein, 9 aa, synthetic construct
  source 1..9: note = Seed: YRFNGIGVT
YRFNGIGVV

SEQ ID NO: 81322 - protein, 9 aa, synthetic construct
  source 1..9: note = Seed: YHFRELGVV
YRFRELGVA

SEQ ID NO: 81323 - protein, 9 aa, synthetic construct
  source 1..9: note = Seed: YHFRELGVV
YRFRELGVL

SEQ ID NO: 81324 - protein, 10 aa, synthetic construct
  source 1..10: note = Seed: YHFRELGVVH
YRFRELGVVF

SEQ ID NO: 81325 - protein, 10 aa, synthetic construct
  source 1..10: note = Seed: YHFRELGVVH
YRFRELGVVY

SEQ ID NO: 81326 - protein, 10 aa, synthetic construct
  source 1..10: note = Seed: YVFTGYRVTK
YRFTGYRVTR

SEQ ID NO: 81327 - protein, 9 aa, synthetic construct
  source 1..9: note = Seed: YRGTTTYKL
YRGTTTYKF

SEQ ID NO: 81328 - protein, 9 aa, synthetic construct
  source 1..9: note = Seed: YRGTTTYKL
YRGTTTYKI

SEQ ID NO: 81329 - protein, 9 aa, synthetic construct
  source 1..9: note = Seed: YRGTTTYKL
YRGTTTYKM

SEQ ID NO: 81330 - protein, 11 aa, synthetic construct
  source 1..11: note = Seed: YVGYLQPRTFL
YRGYLQPRTFF

SEQ ID NO: 81331 - protein, 11 aa, synthetic construct
  source 1..11: note = Seed: YVGYLQPRTFL
YRGYLQPRTFW

SEQ ID NO: 81332 - protein, 9 aa, synthetic construct
  source 1..9: note = Seed: YMHHMELPT
YRHHMELPF

SEQ ID NO: 81333 - protein, 9 aa, synthetic construct
  source 1..9: note = Seed: YMHHMELPT
YRHHMELPM

SEQ ID NO: 81334 - protein, 9 aa, synthetic construct
  source 1..9: note = Seed: YMHHMELPT
YRHHMELPY

SEQ ID NO: 81335 - protein, 9 aa, synthetic construct
  source 1..9: note = Seed: YFIASFRLF
YRIASFRLF

SEQ ID NO: 81336 - protein, 11 aa, synthetic construct
  source 1..11: note = Seed: YFIASFRLFAR
YRIASFRLFAR

SEQ ID NO: 81337 - protein, 10 aa, synthetic construct
  source 1..10: note = Seed: YFIASFRLFA
YRIASFRLFI

SEQ ID NO: 81338 - protein, 10 aa, synthetic construct
  source 1..10: note = Seed: YFIASFRLFA
YRIASFRLFL

SEQ ID NO: 81339 - protein, 10 aa, synthetic construct
  source 1..10: note = Seed: YFIASFRLFA
YRIASFRLFV

SEQ ID NO: 81340 - protein, 9 aa, synthetic construct
  source 1..9: note = Seed: YFIASFRLF
YRIASFRLI

SEQ ID NO: 81341 - protein, 9 aa, synthetic construct
  source 1..9: note = Seed: YFIASFRLF
YRIASFRLL

SEQ ID NO: 81342 - protein, 9 aa, synthetic construct
  source 1..9: note = Seed: YFIASFRLF
YRIASFRLM

SEQ ID NO: 81343 - protein, 9 aa, synthetic construct
  source 1..9: note = Seed: YFIASFRLF
YRIASFRLV

SEQ ID NO: 81344 - protein, 9 aa, synthetic construct
  source 1..9: note = Seed: YFIASFRLF
YRIASFRLY

SEQ ID NO: 81345 - protein, 9 aa, synthetic construct
  source 1..9: note = Seed: YGIATVREV
YRIATVREF

SEQ ID NO: 81346 - protein, 9 aa, synthetic construct
  source 1..9: note = Seed: YGIATVREV
YRIATVREI

SEQ ID NO: 81347 - protein, 9 aa, synthetic construct
  source 1..9: note = Seed: YGIATVREV
YRIATVREL

SEQ ID NO: 81348 - protein, 9 aa, synthetic construct
  source 1..9: note = Seed: YGIATVREV
YRIATVREM

SEQ ID NO: 81349 - protein, 9 aa, synthetic construct
  source 1..9: note = Seed: YGIATVREV
YRIATVREV

SEQ ID NO: 81350 - protein, 9 aa, synthetic construct
  source 1..9: note = Seed: YGIATVREV
YRIATVREY

SEQ ID NO: 81351 - protein, 9 aa, synthetic construct
  source 1..9: note = Seed: YDKLQFTSL
YRKLQFTSL

SEQ ID NO: 81352 - protein, 11 aa, synthetic construct
  source 1..11: note = Seed: YDKLQFTSLEI
YRKLQFTSLEV

SEQ ID NO: 81353 - protein, 9 aa, synthetic construct
  source 1..9: note = Seed: YDKLQFTSL
YRKLQFTSM

SEQ ID NO: 81354 - protein, 8 aa, synthetic construct
  source 1..8: note = Seed: YLKRRVVF
YRKRRVVL

SEQ ID NO: 81355 - protein, 9 aa, synthetic construct
  source 1..9: note = Seed: YNKYKYFSG
YRKYKYFSL

SEQ ID NO: 81356 - protein, 9 aa, synthetic construct
  source 1..9: note = Seed: YNKYKYFSG
YRKYKYFSM

SEQ ID NO: 81357 - protein, 10 aa, synthetic construct
  source 1..10: note = Seed: YRLFRKSNLK
YRLFRKSNLF

SEQ ID NO: 81358 - protein, 10 aa, synthetic construct
  source 1..10: note = Seed: YRLFRKSNLK
YRLFRKSNLL

SEQ ID NO: 81359 - protein, 10 aa, synthetic construct
  source 1..10: note = Seed: YRLFRKSNLK
YRLFRKSNLM

SEQ ID NO: 81360 - protein, 10 aa, synthetic construct
  source 1..10: note = Seed: YRLFRKSNLK
YRLFRKSNLR

SEQ ID NO: 81361 - protein, 9 aa, synthetic construct
  source 1..9: note = Seed: YILFTRFFY
YRLFTRFFF

SEQ ID NO: 81362 - protein, 9 aa, synthetic construct
  source 1..9: note = Seed: YILFTRFFY
YRLFTRFFR

SEQ ID NO: 81363 - protein, 9 aa, synthetic construct
  source 1..9: note = Seed: YILFTRFFY
YRLFTRFFY

SEQ ID NO: 81364 - protein, 10 aa, synthetic construct
  source 1..10: note = Seed: YILFTRFFYV
YRLFTRFFYA

SEQ ID NO: 81365 - protein, 10 aa, synthetic construct
  source 1..10: note = Seed: YILFTRFFYV
YRLFTRFFYC

SEQ ID NO: 81366 - protein, 10 aa, synthetic construct
  source 1..10: note = Seed: YILFTRFFYV
YRLFTRFFYF

SEQ ID NO: 81367 - protein, 10 aa, synthetic construct
  source 1..10: note = Seed: YILFTRFFYV
YRLFTRFFYH

SEQ ID NO: 81368 - protein, 10 aa, synthetic construct
  source 1..10: note = Seed: YILFTRFFYV
YRLFTRFFYI

SEQ ID NO: 81369 - protein, 10 aa, synthetic construct
  source 1..10: note = Seed: YILFTRFFYV
YRLFTRFFYK

SEQ ID NO: 81370 - protein, 10 aa, synthetic construct
  source 1..10: note = Seed: YILFTRFFYV
YRLFTRFFYL

SEQ ID NO: 81371 - protein, 10 aa, synthetic construct
  source 1..10: note = Seed: YILFTRFFYV
YRLFTRFFYM

SEQ ID NO: 81372 - protein, 10 aa, synthetic construct
  source 1..10: note = Seed: YILFTRFFYV
YRLFTRFFYR

SEQ ID NO: 81373 - protein, 10 aa, synthetic construct
  source 1..10: note = Seed: YILFTRFFYV
YRLFTRFFYS

SEQ ID NO: 81374 - protein, 10 aa, synthetic construct
  source 1..10: note = Seed: YILFTRFFYV
YRLFTRFFYT

SEQ ID NO: 81375 - protein, 10 aa, synthetic construct
  source 1..10: note = Seed: YILFTRFFYV
YRLFTRFFYV

SEQ ID NO: 81376 - protein, 11 aa, synthetic construct
  source 1..11: note = Seed: YILFTRFFYVL
YRLFTRFFYVA

SEQ ID NO: 81377 - protein, 11 aa, synthetic construct
  source 1..11: note = Seed: YILFTRFFYVL
YRLFTRFFYVC

SEQ ID NO: 81378 - protein, 11 aa, synthetic construct
  source 1..11: note = Seed: YILFTRFFYVL
YRLFTRFFYVD

SEQ ID NO: 81379 - protein, 11 aa, synthetic construct
  source 1..11: note = Seed: YILFTRFFYVL
YRLFTRFFYVE

SEQ ID NO: 81380 - protein, 11 aa, synthetic construct
  source 1..11: note = Seed: YILFTRFFYVL
YRLFTRFFYVF

SEQ ID NO: 81381 - protein, 11 aa, synthetic construct
  source 1..11: note = Seed: YILFTRFFYVL
YRLFTRFFYVG

SEQ ID NO: 81382 - protein, 11 aa, synthetic construct
  source 1..11: note = Seed: YILFTRFFYVL
YRLFTRFFYVH

SEQ ID NO: 81383 - protein, 11 aa, synthetic construct
  source 1..11: note = Seed: YILFTRFFYVL
YRLFTRFFYVI

SEQ ID NO: 81384 - protein, 11 aa, synthetic construct
  source 1..11: note = Seed: YILFTRFFYVL
YRLFTRFFYVK

SEQ ID NO: 81385 - protein, 11 aa, synthetic construct
  source 1..11: note = Seed: YILFTRFFYVL
YRLFTRFFYVL

SEQ ID NO: 81386 - protein, 11 aa, synthetic construct
  source 1..11: note = Seed: YILFTRFFYVL
YRLFTRFFYVM

SEQ ID NO: 81387 - protein, 11 aa, synthetic construct
  source 1..11: note = Seed: YILFTRFFYVL
YRLFTRFFYVN

SEQ ID NO: 81388 - protein, 11 aa, synthetic construct
  source 1..11: note = Seed: YILFTRFFYVL
YRLFTRFFYVP

SEQ ID NO: 81389 - protein, 11 aa, synthetic construct
  source 1..11: note = Seed: YILFTRFFYVL
YRLFTRFFYVQ

SEQ ID NO: 81390 - protein, 11 aa, synthetic construct
  source 1..11: note = Seed: YILFTRFFYVL
YRLFTRFFYVR

SEQ ID NO: 81391 - protein, 11 aa, synthetic construct
  source 1..11: note = Seed: YILFTRFFYVL
YRLFTRFFYVS

SEQ ID NO: 81392 - protein, 11 aa, synthetic construct
  source 1..11: note = Seed: YILFTRFFYVL
YRLFTRFFYVT

SEQ ID NO: 81393 - protein, 11 aa, synthetic construct
  source 1..11: note = Seed: YILFTRFFYVL
YRLFTRFFYVV

SEQ ID NO: 81394 - protein, 11 aa, synthetic construct
  source 1..11: note = Seed: YILFTRFFYVL
YRLFTRFFYVW

SEQ ID NO: 81395 - protein, 11 aa, synthetic construct
  source 1..11: note = Seed: YILFTRFFYVL
YRLFTRFFYVY

SEQ ID NO: 81396 - protein, 10 aa, synthetic construct
  source 1..10: note = Seed: YILFTRFFYV
YRLFTRFFYY

SEQ ID NO: 81397 - protein, 9 aa, synthetic construct
  source 1..9: note = Seed: YKLGASQRV
YRLGASQRF

SEQ ID NO: 81398 - protein, 9 aa, synthetic construct
  source 1..9: note = Seed: YKLGASQRV
YRLGASQRY

SEQ ID NO: 81399 - protein, 10 aa, synthetic construct
  source 1..10: note = Seed: YSLLMPILTL
YRLLMPILTA

SEQ ID NO: 81400 - protein, 10 aa, synthetic construct
  source 1..10: note = Seed: YSLLMPILTL
YRLLMPILTI

SEQ ID NO: 81401 - protein, 10 aa, synthetic construct
  source 1..10: note = Seed: YSLLMPILTL
YRLLMPILTL

SEQ ID NO: 81402 - protein, 10 aa, synthetic construct
  source 1..10: note = Seed: YSLLMPILTL
YRLLMPILTV

SEQ ID NO: 81403 - protein, 10 aa, synthetic construct
  source 1..10: note = Seed: YHLMSFPQSA
YRLMSFPQSA

SEQ ID NO: 81404 - protein, 11 aa, synthetic construct
  source 1..11: note = Seed: YHLMSFPQSAP
YRLMSFPQSAV

SEQ ID NO: 81405 - protein, 10 aa, synthetic construct
  source 1..10: note = Seed: YHLMSFPQSA
YRLMSFPQSI

SEQ ID NO: 81406 - protein, 10 aa, synthetic construct
  source 1..10: note = Seed: YHLMSFPQSA
YRLMSFPQSL

SEQ ID NO: 81407 - protein, 10 aa, synthetic construct
  source 1..10: note = Seed: YHLMSFPQSA
YRLMSFPQSM

SEQ ID NO: 81408 - protein, 10 aa, synthetic construct
  source 1..10: note = Seed: YHLMSFPQSA
YRLMSFPQST

SEQ ID NO: 81409 - protein, 10 aa, synthetic construct
  source 1..10: note = Seed: YHLMSFPQSA
YRLMSFPQSV

SEQ ID NO: 81410 - protein, 10 aa, synthetic construct
  source 1..10: note = Seed: YDLSVVNARL
YRLSVVNARA

SEQ ID NO: 81411 - protein, 10 aa, synthetic construct
  source 1..10: note = Seed: YDLSVVNARL
YRLSVVNARI

SEQ ID NO: 81412 - protein, 10 aa, synthetic construct
  source 1..10: note = Seed: YDLSVVNARL
YRLSVVNARL

SEQ ID NO: 81413 - protein, 10 aa, synthetic construct
  source 1..10: note = Seed: YDLSVVNARL
YRLSVVNARM

SEQ ID NO: 81414 - protein, 10 aa, synthetic construct
  source 1..10: note = Seed: YDLSVVNARL
YRLSVVNARV

SEQ ID NO: 81415 - protein, 8 aa, synthetic construct
  source 1..8: note = Seed: YTMADLVY
YRMADLVF

SEQ ID NO: 81416 - protein, 8 aa, synthetic construct
  source 1..8: note = Seed: YTMADLVY
YRMADLVY

SEQ ID NO: 81417 - protein, 10 aa, synthetic construct
  source 1..10: note = Seed: YTMADLVYAL
YRMADLVYAA

SEQ ID NO: 81418 - protein, 10 aa, synthetic construct
  source 1..10: note = Seed: YTMADLVYAL
YRMADLVYAC

SEQ ID NO: 81419 - protein, 10 aa, synthetic construct
  source 1..10: note = Seed: YTMADLVYAL
YRMADLVYAF

SEQ ID NO: 81420 - protein, 10 aa, synthetic construct
  source 1..10: note = Seed: YTMADLVYAL
YRMADLVYAG

SEQ ID NO: 81421 - protein, 10 aa, synthetic construct
  source 1..10: note = Seed: YTMADLVYAL
YRMADLVYAI

SEQ ID NO: 81422 - protein, 10 aa, synthetic construct
  source 1..10: note = Seed: YTMADLVYAL
YRMADLVYAL

SEQ ID NO: 81423 - protein, 11 aa, synthetic construct
  source 1..11: note = Seed: YTMADLVYALR
YRMADLVYALA

SEQ ID NO: 81424 - protein, 11 aa, synthetic construct
  source 1..11: note = Seed: YTMADLVYALR
YRMADLVYALC

SEQ ID NO: 81425 - protein, 11 aa, synthetic construct
  source 1..11: note = Seed: YTMADLVYALR
YRMADLVYALD

SEQ ID NO: 81426 - protein, 11 aa, synthetic construct
  source 1..11: note = Seed: YTMADLVYALR
YRMADLVYALE

SEQ ID NO: 81427 - protein, 11 aa, synthetic construct
  source 1..11: note = Seed: YTMADLVYALR
YRMADLVYALF

SEQ ID NO: 81428 - protein, 11 aa, synthetic construct
  source 1..11: note = Seed: YTMADLVYALR
YRMADLVYALG

SEQ ID NO: 81429 - protein, 11 aa, synthetic construct
  source 1..11: note = Seed: YTMADLVYALR
YRMADLVYALH

SEQ ID NO: 81430 - protein, 11 aa, synthetic construct
  source 1..11: note = Seed: YTMADLVYALR
YRMADLVYALI

SEQ ID NO: 81431 - protein, 11 aa, synthetic construct
  source 1..11: note = Seed: YTMADLVYALR
YRMADLVYALK

SEQ ID NO: 81432 - protein, 11 aa, synthetic construct
  source 1..11: note = Seed: YTMADLVYALR
YRMADLVYALL

SEQ ID NO: 81433 - protein, 11 aa, synthetic construct
  source 1..11: note = Seed: YTMADLVYALR
YRMADLVYALM

SEQ ID NO: 81434 - protein, 11 aa, synthetic construct
  source 1..11: note = Seed: YTMADLVYALR
YRMADLVYALN

SEQ ID NO: 81435 - protein, 11 aa, synthetic construct
  source 1..11: note = Seed: YTMADLVYALR
YRMADLVYALP

SEQ ID NO: 81436 - protein, 11 aa, synthetic construct
  source 1..11: note = Seed: YTMADLVYALR
YRMADLVYALQ

SEQ ID NO: 81437 - protein, 11 aa, synthetic construct
  source 1..11: note = Seed: YTMADLVYALR
YRMADLVYALR

SEQ ID NO: 81438 - protein, 11 aa, synthetic construct
  source 1..11: note = Seed: YTMADLVYALR
YRMADLVYALS

SEQ ID NO: 81439 - protein, 11 aa, synthetic construct
  source 1..11: note = Seed: YTMADLVYALR
YRMADLVYALT

SEQ ID NO: 81440 - protein, 11 aa, synthetic construct
  source 1..11: note = Seed: YTMADLVYALR
YRMADLVYALV

SEQ ID NO: 81441 - protein, 11 aa, synthetic construct
  source 1..11: note = Seed: YTMADLVYALR
YRMADLVYALW

SEQ ID NO: 81442 - protein, 11 aa, synthetic construct
  source 1..11: note = Seed: YTMADLVYALR
YRMADLVYALY

SEQ ID NO: 81443 - protein, 10 aa, synthetic construct
  source 1..10: note = Seed: YTMADLVYAL
YRMADLVYAM

SEQ ID NO: 81444 - protein, 10 aa, synthetic construct
  source 1..10: note = Seed: YTMADLVYAL
YRMADLVYAS

SEQ ID NO: 81445 - protein, 10 aa, synthetic construct
  source 1..10: note = Seed: YTMADLVYAL
YRMADLVYAT

SEQ ID NO: 81446 - protein, 10 aa, synthetic construct
  source 1..10: note = Seed: YTMADLVYAL
YRMADLVYAV

SEQ ID NO: 81447 - protein, 10 aa, synthetic construct
  source 1..10: note = Seed: YTMADLVYAL
YRMADLVYAY

SEQ ID NO: 81448 - protein, 9 aa, synthetic construct
  source 1..9: note = Seed: YTMADLVYA
YRMADLVYV

SEQ ID NO: 81449 - protein, 9 aa, synthetic construct
  source 1..9: note = Seed: YVMHANYIF
YRMHANYIF

SEQ ID NO: 81450 - protein, 10 aa, synthetic construct
  source 1..10: note = Seed: YVMHANYIFW
YRMHANYIFF

SEQ ID NO: 81451 - protein, 10 aa, synthetic construct
  source 1..10: note = Seed: YVMHANYIFW
YRMHANYIFY

SEQ ID NO: 81452 - protein, 9 aa, synthetic construct
  source 1..9: note = Seed: YVMHANYIF
YRMHANYIL

SEQ ID NO: 81453 - protein, 9 aa, synthetic construct
  source 1..9: note = Seed: YVMHANYIF
YRMHANYIM

SEQ ID NO: 81454 - protein, 9 aa, synthetic construct
  source 1..9: note = Seed: YVMHANYIF
YRMHANYIY

SEQ ID NO: 81455 - protein, 9 aa, synthetic construct
  source 1..9: note = Seed: YTNDKACPL
YRNDKACPF

SEQ ID NO: 81456 - protein, 9 aa, synthetic construct
  source 1..9: note = Seed: YTNDKACPL
YRNDKACPY

SEQ ID NO: 81457 - protein, 9 aa, synthetic construct
  source 1..9: note = Seed: YFNMVYMPA
YRNMVYMPM

SEQ ID NO: 81458 - protein, 10 aa, synthetic construct
  source 1..10: note = Seed: YQNNVFMSEA
YRNNVFMSEF

SEQ ID NO: 81459 - protein, 10 aa, synthetic construct
  source 1..10: note = Seed: YQNNVFMSEA
YRNNVFMSEY

SEQ ID NO: 81460 - protein, 9 aa, synthetic construct
  source 1..9: note = Seed: YQNNVFMSE
YRNNVFMSF

SEQ ID NO: 81461 - protein, 9 aa, synthetic construct
  source 1..9: note = Seed: YQNNVFMSE
YRNNVFMSL

SEQ ID NO: 81462 - protein, 9 aa, synthetic construct
  source 1..9: note = Seed: YQNNVFMSE
YRNNVFMSM

SEQ ID NO: 81463 - protein, 9 aa, synthetic construct
  source 1..9: note = Seed: YQNNVFMSE
YRNNVFMSY

SEQ ID NO: 81464 - protein, 9 aa, synthetic construct
  source 1..9: note = Seed: YVNTFSSTF
YRNTFSSTF

SEQ ID NO: 81465 - protein, 9 aa, synthetic construct
  source 1..9: note = Seed: YVNTFSSTF
YRNTFSSTI

SEQ ID NO: 81466 - protein, 9 aa, synthetic construct
  source 1..9: note = Seed: YVNTFSSTF
YRNTFSSTL

SEQ ID NO: 81467 - protein, 9 aa, synthetic construct
  source 1..9: note = Seed: YVNTFSSTF
YRNTFSSTM

SEQ ID NO: 81468 - protein, 9 aa, synthetic construct
  source 1..9: note = Seed: YVNTFSSTF
YRNTFSSTV

SEQ ID NO: 81469 - protein, 9 aa, synthetic construct
  source 1..9: note = Seed: YVNTFSSTF
YRNTFSSTY

SEQ ID NO: 81470 - protein, 10 aa, synthetic construct
  source 1..10: note = Seed: YTPHTVLQAV
YRPHTVLQAA

SEQ ID NO: 81471 - protein, 10 aa, synthetic construct
  source 1..10: note = Seed: YTPHTVLQAV
YRPHTVLQAI

SEQ ID NO: 81472 - protein, 10 aa, synthetic construct
  source 1..10: note = Seed: YTPHTVLQAV
YRPHTVLQAL

SEQ ID NO: 81473 - protein, 10 aa, synthetic construct
  source 1..10: note = Seed: YTPHTVLQAV
YRPHTVLQAM

SEQ ID NO: 81474 - protein, 10 aa, synthetic construct
  source 1..10: note = Seed: YTPHTVLQAV
YRPHTVLQAV

SEQ ID NO: 81475 - protein, 9 aa, synthetic construct
  source 1..9: note = Seed: YMPYFFTLL
YRPYFFTLF

SEQ ID NO: 81476 - protein, 9 aa, synthetic construct
  source 1..9: note = Seed: YMPYFFTLL
YRPYFFTLL

SEQ ID NO: 81477 - protein, 10 aa, synthetic construct
  source 1..10: note = Seed: YMPYFFTLLL
YRPYFFTLLA

SEQ ID NO: 81478 - protein, 10 aa, synthetic construct
  source 1..10: note = Seed: YMPYFFTLLL
YRPYFFTLLF

SEQ ID NO: 81479 - protein, 10 aa, synthetic construct
  source 1..10: note = Seed: YMPYFFTLLL
YRPYFFTLLL

SEQ ID NO: 81480 - protein, 10 aa, synthetic construct
  source 1..10: note = Seed: YMPYFFTLLL
YRPYFFTLLM

SEQ ID NO: 81481 - protein, 10 aa, synthetic construct
  source 1..10: note = Seed: YMPYFFTLLL
YRPYFFTLLT

SEQ ID NO: 81482 - protein, 10 aa, synthetic construct
  source 1..10: note = Seed: YMPYFFTLLL
YRPYFFTLLV

SEQ ID NO: 81483 - protein, 10 aa, synthetic construct
  source 1..10: note = Seed: YMPYFFTLLL
YRPYFFTLLW

SEQ ID NO: 81484 - protein, 10 aa, synthetic construct
  source 1..10: note = Seed: YMPYFFTLLL
YRPYFFTLLY

SEQ ID NO: 81485 - protein, 9 aa, synthetic construct
  source 1..9: note = Seed: YMPYFFTLL
YRPYFFTLM

SEQ ID NO: 81486 - protein, 9 aa, synthetic construct
  source 1..9: note = Seed: YMPYFFTLL
YRPYFFTLY

SEQ ID NO: 81487 - protein, 9 aa, synthetic construct
  source 1..9: note = Seed: YQPYRVVVL
YRPYRVVVF

SEQ ID NO: 81488 - protein, 9 aa, synthetic construct
  source 1..9: note = Seed: YQPYRVVVL
YRPYRVVVI

SEQ ID NO: 81489 - protein, 9 aa, synthetic construct
  source 1..9: note = Seed: YQPYRVVVL
YRPYRVVVL

SEQ ID NO: 81490 - protein, 10 aa, synthetic construct
  source 1..10: note = Seed: YQPYRVVVLS
YRPYRVVVLA

SEQ ID NO: 81491 - protein, 9 aa, synthetic construct
  source 1..9: note = Seed: YQPYRVVVL
YRPYRVVVM

SEQ ID NO: 81492 - protein, 9 aa, synthetic construct
  source 1..9: note = Seed: YQPYRVVVL
YRPYRVVVY

SEQ ID NO: 81493 - protein, 9 aa, synthetic construct
  source 1..9: note = Seed: YKQFDTYNL
YRQFDTYNL

SEQ ID NO: 81494 - protein, 10 aa, synthetic construct
  source 1..10: note = Seed: YKQFDTYNLW
YRQFDTYNLF

SEQ ID NO: 81495 - protein, 10 aa, synthetic construct
  source 1..10: note = Seed: YKQFDTYNLW
YRQFDTYNLM

SEQ ID NO: 81496 - protein, 10 aa, synthetic construct
  source 1..10: note = Seed: YKQFDTYNLW
YRQFDTYNLY

SEQ ID NO: 81497 - protein, 10 aa, synthetic construct
  source 1..10: note = Seed: YSQLMCQPIL
YRQLMCQPIF

SEQ ID NO: 81498 - protein, 11 aa, synthetic construct
  source 1..11: note = Seed: YSQLMCQPILL
YRQLMCQPILA

SEQ ID NO: 81499 - protein, 11 aa, synthetic construct
  source 1..11: note = Seed: YSQLMCQPILL
YRQLMCQPILI

SEQ ID NO: 81500 - protein, 11 aa, synthetic construct
  source 1..11: note = Seed: YSQLMCQPILL
YRQLMCQPILL

SEQ ID NO: 81501 - protein, 11 aa, synthetic construct
  source 1..11: note = Seed: YSQLMCQPILL
YRQLMCQPILM

SEQ ID NO: 81502 - protein, 11 aa, synthetic construct
  source 1..11: note = Seed: YSQLMCQPILL
YRQLMCQPILV

SEQ ID NO: 81503 - protein, 10 aa, synthetic construct
  source 1..10: note = Seed: YSQLMCQPIL
YRQLMCQPIY

SEQ ID NO: 81504 - protein, 9 aa, synthetic construct
  source 1..9: note = Seed: YLQPRTFLL
YRQPRTFLA

SEQ ID NO: 81505 - protein, 9 aa, synthetic construct
  source 1..9: note = Seed: YLQPRTFLL
YRQPRTFLF

SEQ ID NO: 81506 - protein, 9 aa, synthetic construct
  source 1..9: note = Seed: YLQPRTFLL
YRQPRTFLI

SEQ ID NO: 81507 - protein, 9 aa, synthetic construct
  source 1..9: note = Seed: YLQPRTFLL
YRQPRTFLL

SEQ ID NO: 81508 - protein, 9 aa, synthetic construct
  source 1..9: note = Seed: YLQPRTFLL
YRQPRTFLM

SEQ ID NO: 81509 - protein, 9 aa, synthetic construct
  source 1..9: note = Seed: YLQPRTFLL
YRQPRTFLV

SEQ ID NO: 81510 - protein, 9 aa, synthetic construct
  source 1..9: note = Seed: YLQPRTFLL
YRQPRTFLY

SEQ ID NO: 81511 - protein, 10 aa, synthetic construct
  source 1..10: note = Seed: YPQVNGLTSI
YRQVNGLTSF

SEQ ID NO: 81512 - protein, 10 aa, synthetic construct
  source 1..10: note = Seed: YPQVNGLTSI
YRQVNGLTSI

SEQ ID NO: 81513 - protein, 10 aa, synthetic construct
  source 1..10: note = Seed: YPQVNGLTSI
YRQVNGLTSL

SEQ ID NO: 81514 - protein, 10 aa, synthetic construct
  source 1..10: note = Seed: YPQVNGLTSI
YRQVNGLTSM

SEQ ID NO: 81515 - protein, 10 aa, synthetic construct
  source 1..10: note = Seed: YPQVNGLTSI
YRQVNGLTSV

SEQ ID NO: 81516 - protein, 10 aa, synthetic construct
  source 1..10: note = Seed: YPQVNGLTSI
YRQVNGLTSY

SEQ ID NO: 81517 - protein, 9 aa, synthetic construct
  source 1..9: note = Seed: YKRDAPAHI
YRRDAPAHY

SEQ ID NO: 81518 - protein, 10 aa, synthetic construct
  source 1..10: note = Seed: YRRLISMMGF
YRRLISMMGI

SEQ ID NO: 81519 - protein, 10 aa, synthetic construct
  source 1..10: note = Seed: YRRLISMMGF
YRRLISMMGK

SEQ ID NO: 81520 - protein, 10 aa, synthetic construct
  source 1..10: note = Seed: YRRLISMMGF
YRRLISMMGL

SEQ ID NO: 81521 - protein, 10 aa, synthetic construct
  source 1..10: note = Seed: YRRLISMMGF
YRRLISMMGM

SEQ ID NO: 81522 - protein, 9 aa, synthetic construct
  source 1..9: note = Seed: YFRLTLGVY
YRRLTLGVF

SEQ ID NO: 81523 - protein, 9 aa, synthetic construct
  source 1..9: note = Seed: YFRLTLGVY
YRRLTLGVY

SEQ ID NO: 81524 - protein, 9 aa, synthetic construct
  source 1..9: note = Seed: YYRSLPGVF
YRRSLPGVF

SEQ ID NO: 81525 - protein, 9 aa, synthetic construct
  source 1..9: note = Seed: YYRSLPGVF
YRRSLPGVL

SEQ ID NO: 81526 - protein, 9 aa, synthetic construct
  source 1..9: note = Seed: YYRSLPGVF
YRRSLPGVM

SEQ ID NO: 81527 - protein, 9 aa, synthetic construct
  source 1..9: note = Seed: YYRSLPGVF
YRRSLPGVY

SEQ ID NO: 81528 - protein, 9 aa, synthetic construct
  source 1..9: note = Seed: YYRYNLPTM
YRRYNLPTF

SEQ ID NO: 81529 - protein, 9 aa, synthetic construct
  source 1..9: note = Seed: YYRYNLPTM
YRRYNLPTL

SEQ ID NO: 81530 - protein, 9 aa, synthetic construct
  source 1..9: note = Seed: YYRYNLPTM
YRRYNLPTM

SEQ ID NO: 81531 - protein, 10 aa, synthetic construct
  source 1..10: note = Seed: YYRYNLPTMC
YRRYNLPTMF

SEQ ID NO: 81532 - protein, 10 aa, synthetic construct
  source 1..10: note = Seed: YYRYNLPTMC
YRRYNLPTMI

SEQ ID NO: 81533 - protein, 10 aa, synthetic construct
  source 1..10: note = Seed: YYRYNLPTMC
YRRYNLPTML

SEQ ID NO: 81534 - protein, 10 aa, synthetic construct
  source 1..10: note = Seed: YYRYNLPTMC
YRRYNLPTMM

SEQ ID NO: 81535 - protein, 10 aa, synthetic construct
  source 1..10: note = Seed: YYRYNLPTMC
YRRYNLPTMV

SEQ ID NO: 81536 - protein, 9 aa, synthetic construct
  source 1..9: note = Seed: YYRYNLPTM
YRRYNLPTY

SEQ ID NO: 81537 - protein, 10 aa, synthetic construct
  source 1..10: note = Seed: YSRYRIGNYK
YRRYRIGNYF

SEQ ID NO: 81538 - protein, 10 aa, synthetic construct
  source 1..10: note = Seed: YSRYRIGNYK
YRRYRIGNYK

SEQ ID NO: 81539 - protein, 11 aa, synthetic construct
  source 1..11: note = Seed: YSRYRIGNYKL
YRRYRIGNYKF

SEQ ID NO: 81540 - protein, 10 aa, synthetic construct
  source 1..10: note = Seed: YSRYRIGNYK
YRRYRIGNYL

SEQ ID NO: 81541 - protein, 10 aa, synthetic construct
  source 1..10: note = Seed: YSRYRIGNYK
YRRYRIGNYM

SEQ ID NO: 81542 - protein, 10 aa, synthetic construct
  source 1..10: note = Seed: YSRYRIGNYK
YRRYRIGNYR

SEQ ID NO: 81543 - protein, 9 aa, synthetic construct
  source 1..9: note = Seed: YSSANNCTF
YRSANNCTF

SEQ ID NO: 81544 - protein, 11 aa, synthetic construct
  source 1..11: note = Seed: YSSANNCTFEY
YRSANNCTFEW

SEQ ID NO: 81545 - protein, 9 aa, synthetic construct
  source 1..9: note = Seed: YSSANNCTF
YRSANNCTM

SEQ ID NO: 81546 - protein, 9 aa, synthetic construct
  source 1..9: note = Seed: YSSANNCTF
YRSANNCTY

SEQ ID NO: 81547 - protein, 9 aa, synthetic construct
  source 1..9: note = Seed: YNSASFSTF
YRSASFSTF

SEQ ID NO: 81548 - protein, 10 aa, synthetic construct
  source 1..10: note = Seed: YNSASFSTFK
YRSASFSTFK

SEQ ID NO: 81549 - protein, 10 aa, synthetic construct
  source 1..10: note = Seed: YNSASFSTFK
YRSASFSTFR

SEQ ID NO: 81550 - protein, 9 aa, synthetic construct
  source 1..9: note = Seed: YNSASFSTF
YRSASFSTL

SEQ ID NO: 81551 - protein, 9 aa, synthetic construct
  source 1..9: note = Seed: YNSASFSTF
YRSASFSTM

SEQ ID NO: 81552 - protein, 9 aa, synthetic construct
  source 1..9: note = Seed: YNSASFSTF
YRSASFSTY

SEQ ID NO: 81553 - protein, 9 aa, synthetic construct
  source 1..9: note = Seed: YASAVVLLI
YRSAVVLLF

SEQ ID NO: 81554 - protein, 10 aa, synthetic construct
  source 1..10: note = Seed: YASAVVLLIL
YRSAVVLLIW

SEQ ID NO: 81555 - protein, 9 aa, synthetic construct
  source 1..9: note = Seed: YASAVVLLI
YRSAVVLLM

SEQ ID NO: 81556 - protein, 9 aa, synthetic construct
  source 1..9: note = Seed: YASAVVLLI
YRSAVVLLY

SEQ ID NO: 81557 - protein, 9 aa, synthetic construct
  source 1..9: note = Seed: YYSLLMPIL
YRSLLMPIL

SEQ ID NO: 81558 - protein, 11 aa, synthetic construct
  source 1..11: note = Seed: YYSLLMPILTL
YRSLLMPILTV

SEQ ID NO: 81559 - protein, 9 aa, synthetic construct
  source 1..9: note = Seed: YYSLLMPIL
YRSLLMPIM

SEQ ID NO: 81560 - protein, 11 aa, synthetic construct
  source 1..11: note = Seed: YRSLPGVFCGV
YRSLPGVFCGI

SEQ ID NO: 81561 - protein, 11 aa, synthetic construct
  source 1..11: note = Seed: YRSLPGVFCGV
YRSLPGVFCGL

SEQ ID NO: 81562 - protein, 10 aa, synthetic construct
  source 1..10: note = Seed: YESLRPDTRY
YRSLRPDTRF

SEQ ID NO: 81563 - protein, 10 aa, synthetic construct
  source 1..10: note = Seed: YESLRPDTRY
YRSLRPDTRW

SEQ ID NO: 81564 - protein, 10 aa, synthetic construct
  source 1..10: note = Seed: YTSNPTTFHL
YRSNPTTFHF

SEQ ID NO: 81565 - protein, 10 aa, synthetic construct
  source 1..10: note = Seed: YTSNPTTFHL
YRSNPTTFHW

SEQ ID NO: 81566 - protein, 10 aa, synthetic construct
  source 1..10: note = Seed: YTSNPTTFHL
YRSNPTTFHY

SEQ ID NO: 81567 - protein, 10 aa, synthetic construct
  source 1..10: note = Seed: YLTFYLTNDV
YRTFYLTNDV

SEQ ID NO: 81568 - protein, 10 aa, synthetic construct
  source 1..10: note = Seed: YLTNDVSFLA
YRTNDVSFLA

SEQ ID NO: 81569 - protein, 10 aa, synthetic construct
  source 1..10: note = Seed: YLTNDVSFLA
YRTNDVSFLI

SEQ ID NO: 81570 - protein, 10 aa, synthetic construct
  source 1..10: note = Seed: YLTNDVSFLA
YRTNDVSFLL

SEQ ID NO: 81571 - protein, 10 aa, synthetic construct
  source 1..10: note = Seed: YLTNDVSFLA
YRTNDVSFLM

SEQ ID NO: 81572 - protein, 10 aa, synthetic construct
  source 1..10: note = Seed: YLTNDVSFLA
YRTNDVSFLV

SEQ ID NO: 81573 - protein, 9 aa, synthetic construct
  source 1..9: note = Seed: YFTSDYYQL
YRTSDYYQF

SEQ ID NO: 81574 - protein, 10 aa, synthetic construct
  source 1..10: note = Seed: YFTSDYYQLY
YRTSDYYQLK

SEQ ID NO: 81575 - protein, 10 aa, synthetic construct
  source 1..10: note = Seed: YFTSDYYQLY
YRTSDYYQLR

SEQ ID NO: 81576 - protein, 10 aa, synthetic construct
  source 1..10: note = Seed: YFTSDYYQLY
YRTSDYYQLW

SEQ ID NO: 81577 - protein, 10 aa, synthetic construct
  source 1..10: note = Seed: YFTSDYYQLY
YRTSDYYQLY

SEQ ID NO: 81578 - protein, 9 aa, synthetic construct
  source 1..9: note = Seed: YFTSDYYQL
YRTSDYYQM

SEQ ID NO: 81579 - protein, 9 aa, synthetic construct
  source 1..9: note = Seed: YFTSDYYQL
YRTSDYYQY

SEQ ID NO: 81580 - protein, 9 aa, synthetic construct
  source 1..9: note = Seed: YYTSNPTTF
YRTSNPTTF

SEQ ID NO: 81581 - protein, 11 aa, synthetic construct
  source 1..11: note = Seed: YYTSNPTTFHL
YRTSNPTTFHF

SEQ ID NO: 81582 - protein, 11 aa, synthetic construct
  source 1..11: note = Seed: YYTSNPTTFHL
YRTSNPTTFHW

SEQ ID NO: 81583 - protein, 9 aa, synthetic construct
  source 1..9: note = Seed: YYTSNPTTF
YRTSNPTTL

SEQ ID NO: 81584 - protein, 9 aa, synthetic construct
  source 1..9: note = Seed: YYTSNPTTF
YRTSNPTTM

SEQ ID NO: 81585 - protein, 9 aa, synthetic construct
  source 1..9: note = Seed: YYTSNPTTF
YRTSNPTTY

SEQ ID NO: 81586 - protein, 10 aa, synthetic construct
  source 1..10: note = Seed: YTTTIKPVTY
YRTTIKPVTW

SEQ ID NO: 81587 - protein, 11 aa, synthetic construct
  source 1..11: note = Seed: YTTTIKPVTYK
YRTTIKPVTYR

SEQ ID NO: 81588 - protein, 9 aa, synthetic construct
  source 1..9: note = Seed: YQVNGYPNM
YRVNGYPNF

SEQ ID NO: 81589 - protein, 9 aa, synthetic construct
  source 1..9: note = Seed: YQVNGYPNM
YRVNGYPNI

SEQ ID NO: 81590 - protein, 9 aa, synthetic construct
  source 1..9: note = Seed: YQVNGYPNM
YRVNGYPNL

SEQ ID NO: 81591 - protein, 9 aa, synthetic construct
  source 1..9: note = Seed: YQVNGYPNM
YRVNGYPNM

SEQ ID NO: 81592 - protein, 9 aa, synthetic construct
  source 1..9: note = Seed: YQVNGYPNM
YRVNGYPNV

SEQ ID NO: 81593 - protein, 9 aa, synthetic construct
  source 1..9: note = Seed: YQVNGYPNM
YRVNGYPNY

SEQ ID NO: 81594 - protein, 9 aa, synthetic construct
  source 1..9: note = Seed: YFVVKRHTF
YRVVKRHTF

SEQ ID NO: 81595 - protein, 9 aa, synthetic construct
  source 1..9: note = Seed: YFVVKRHTF
YRVVKRHTL

SEQ ID NO: 81596 - protein, 9 aa, synthetic construct
  source 1..9: note = Seed: YFVVKRHTF
YRVVKRHTM

SEQ ID NO: 81597 - protein, 10 aa, synthetic construct
  source 1..10: note = Seed: YRVVVLSFEL
YRVVVLSFEF

SEQ ID NO: 81598 - protein, 10 aa, synthetic construct
  source 1..10: note = Seed: YRVVVLSFEL
YRVVVLSFEI

SEQ ID NO: 81599 - protein, 10 aa, synthetic construct
  source 1..10: note = Seed: YRVVVLSFEL
YRVVVLSFEK

SEQ ID NO: 81600 - protein, 10 aa, synthetic construct
  source 1..10: note = Seed: YRVVVLSFEL
YRVVVLSFEM

SEQ ID NO: 81601 - protein, 10 aa, synthetic construct
  source 1..10: note = Seed: YRVVVLSFEL
YRVVVLSFEV

SEQ ID NO: 81602 - protein, 9 aa, synthetic construct
  source 1..9: note = Seed: YYVWKSYVH
YRVWKSYVF

SEQ ID NO: 81603 - protein, 10 aa, synthetic construct
  source 1..10: note = Seed: YYVWKSYVHV
YRVWKSYVHV

SEQ ID NO: 81604 - protein, 9 aa, synthetic construct
  source 1..9: note = Seed: YYVWKSYVH
YRVWKSYVL

SEQ ID NO: 81605 - protein, 9 aa, synthetic construct
  source 1..9: note = Seed: YYVWKSYVH
YRVWKSYVM

SEQ ID NO: 81606 - protein, 9 aa, synthetic construct
  source 1..9: note = Seed: YYVWKSYVH
YRVWKSYVY

SEQ ID NO: 81607 - protein, 10 aa, synthetic construct
  source 1..10: note = Seed: YVYANGGKGF
YRYANGGKGF

SEQ ID NO: 81608 - protein, 10 aa, synthetic construct
  source 1..10: note = Seed: YVYANGGKGF
YRYANGGKGM

SEQ ID NO: 81609 - protein, 11 aa, synthetic construct
  source 1..11: note = Seed: YLYFIKGLNNL
YRYFIKGLNNF

SEQ ID NO: 81610 - protein, 10 aa, synthetic construct
  source 1..10: note = Seed: YDYLVSTQEF
YRYLVSTQEF

SEQ ID NO: 81611 - protein, 11 aa, synthetic construct
  source 1..11: note = Seed: YDYLVSTQEFR
YRYLVSTQEFF

SEQ ID NO: 81612 - protein, 11 aa, synthetic construct
  source 1..11: note = Seed: YDYLVSTQEFR
YRYLVSTQEFI

SEQ ID NO: 81613 - protein, 11 aa, synthetic construct
  source 1..11: note = Seed: YDYLVSTQEFR
YRYLVSTQEFL

SEQ ID NO: 81614 - protein, 11 aa, synthetic construct
  source 1..11: note = Seed: YDYLVSTQEFR
YRYLVSTQEFW

SEQ ID NO: 81615 - protein, 10 aa, synthetic construct
  source 1..10: note = Seed: YDYLVSTQEF
YRYLVSTQEI

SEQ ID NO: 81616 - protein, 10 aa, synthetic construct
  source 1..10: note = Seed: YDYLVSTQEF
YRYLVSTQEL

SEQ ID NO: 81617 - protein, 10 aa, synthetic construct
  source 1..10: note = Seed: YDYLVSTQEF
YRYLVSTQEM

SEQ ID NO: 81618 - protein, 10 aa, synthetic construct
  source 1..10: note = Seed: YDYLVSTQEF
YRYLVSTQEW

SEQ ID NO: 81619 - protein, 10 aa, synthetic construct
  source 1..10: note = Seed: YDYLVSTQEF
YRYLVSTQEY

SEQ ID NO: 81620 - protein, 10 aa, synthetic construct
  source 1..10: note = Seed: YNYLYRLFRK
YRYLYRLFRR

SEQ ID NO: 81621 - protein, 8 aa, synthetic construct
  source 1..8: note = Seed: YRYNLPTM
YRYNLPTL

SEQ ID NO: 81622 - protein, 9 aa, synthetic construct
  source 1..9: note = Seed: YRYNLPTMC
YRYNLPTMA

SEQ ID NO: 81623 - protein, 11 aa, synthetic construct
  source 1..11: note = Seed: YRYNLPTMCDI
YRYNLPTMCDL

SEQ ID NO: 81624 - protein, 11 aa, synthetic construct
  source 1..11: note = Seed: YRYNLPTMCDI
YRYNLPTMCDM

SEQ ID NO: 81625 - protein, 9 aa, synthetic construct
  source 1..9: note = Seed: YRYNLPTMC
YRYNLPTMF

SEQ ID NO: 81626 - protein, 9 aa, synthetic construct
  source 1..9: note = Seed: YRYNLPTMC
YRYNLPTMI

SEQ ID NO: 81627 - protein, 9 aa, synthetic construct
  source 1..9: note = Seed: YRYNLPTMC
YRYNLPTMK

SEQ ID NO: 81628 - protein, 9 aa, synthetic construct
  source 1..9: note = Seed: YRYNLPTMC
YRYNLPTML

SEQ ID NO: 81629 - protein, 9 aa, synthetic construct
  source 1..9: note = Seed: YRYNLPTMC
YRYNLPTMM

SEQ ID NO: 81630 - protein, 9 aa, synthetic construct
  source 1..9: note = Seed: YRYNLPTMC
YRYNLPTMR

SEQ ID NO: 81631 - protein, 9 aa, synthetic construct
  source 1..9: note = Seed: YRYNLPTMC
YRYNLPTMV

SEQ ID NO: 81632 - protein, 9 aa, synthetic construct
  source 1..9: note = Seed: YRYNLPTMC
YRYNLPTMY

SEQ ID NO: 81633 - protein, 11 aa, synthetic construct
  source 1..11: note = Seed: YDYYRYNLPTM
YRYYRYNLPTF

SEQ ID NO: 81634 - protein, 11 aa, synthetic construct
  source 1..11: note = Seed: YDYYRYNLPTM
YRYYRYNLPTW

SEQ ID NO: 81635 - protein, 10 aa, synthetic construct
  source 1..10: note = Seed: YGANKDGIIW
YSANKDGIIF

SEQ ID NO: 81636 - protein, 10 aa, synthetic construct
  source 1..10: note = Seed: YGANKDGIIW
YSANKDGIIW

SEQ ID NO: 81637 - protein, 9 aa, synthetic construct
  source 1..9: note = Seed: YPANSIVCR
YSANSIVCK

SEQ ID NO: 81638 - protein, 9 aa, synthetic construct
  source 1..9: note = Seed: YPANSIVCR
YSANSIVCR

SEQ ID NO: 81639 - protein, 10 aa, synthetic construct
  source 1..10: note = Seed: YPANSIVCRF
YSANSIVCRF

SEQ ID NO: 81640 - protein, 10 aa, synthetic construct
  source 1..10: note = Seed: YPANSIVCRF
YSANSIVCRW

SEQ ID NO: 81641 - protein, 10 aa, synthetic construct
  source 1..10: note = Seed: YPANSIVCRF
YSANSIVCRY

SEQ ID NO: 81642 - protein, 9 aa, synthetic construct
  source 1..9: note = Seed: YIATNGPLK
YSATNGPLR

SEQ ID NO: 81643 - protein, 9 aa, synthetic construct
  source 1..9: note = Seed: YAAVINGDR
YSAVINGDK

SEQ ID NO: 81644 - protein, 9 aa, synthetic construct
  source 1..9: note = Seed: YAAVINGDR
YSAVINGDR

SEQ ID NO: 81645 - protein, 10 aa, synthetic construct
  source 1..10: note = Seed: YAAVINGDRW
YSAVINGDRW

SEQ ID NO: 81646 - protein, 10 aa, synthetic construct
  source 1..10: note = Seed: YFCTCYFGLF
YSCTCYFGLY

SEQ ID NO: 81647 - protein, 8 aa, synthetic construct
  source 1..8: note = Seed: YACWHHSI
YSCWHHSF

SEQ ID NO: 81648 - protein, 8 aa, synthetic construct
  source 1..8: note = Seed: YACWHHSI
YSCWHHSL

SEQ ID NO: 81649 - protein, 8 aa, synthetic construct
  source 1..8: note = Seed: YACWHHSI
YSCWHHSM

SEQ ID NO: 81650 - protein, 8 aa, synthetic construct
  source 1..8: note = Seed: YACWHHSI
YSCWHHSY

SEQ ID NO: 81651 - protein, 10 aa, synthetic construct
  source 1..10: note = Seed: YVDTPNNTDF
YSDTPNNTDF

SEQ ID NO: 81652 - protein, 10 aa, synthetic construct
  source 1..10: note = Seed: YVDTPNNTDF
YSDTPNNTDL

SEQ ID NO: 81653 - protein, 10 aa, synthetic construct
  source 1..10: note = Seed: YVDTPNNTDF
YSDTPNNTDM

SEQ ID NO: 81654 - protein, 10 aa, synthetic construct
  source 1..10: note = Seed: YKENSYTTTI
YSENSYTTTA

SEQ ID NO: 81655 - protein, 10 aa, synthetic construct
  source 1..10: note = Seed: YKENSYTTTI
YSENSYTTTF

SEQ ID NO: 81656 - protein, 10 aa, synthetic construct
  source 1..10: note = Seed: YKENSYTTTI
YSENSYTTTL

SEQ ID NO: 81657 - protein, 10 aa, synthetic construct
  source 1..10: note = Seed: YKENSYTTTI
YSENSYTTTM

SEQ ID NO: 81658 - protein, 10 aa, synthetic construct
  source 1..10: note = Seed: YKENSYTTTI
YSENSYTTTY

SEQ ID NO: 81659 - protein, 9 aa, synthetic construct
  source 1..9: note = Seed: YVFCTVNAL
YSFCTVNAA

SEQ ID NO: 81660 - protein, 9 aa, synthetic construct
  source 1..9: note = Seed: YVFCTVNAL
YSFCTVNAF

SEQ ID NO: 81661 - protein, 9 aa, synthetic construct
  source 1..9: note = Seed: YVFCTVNAL
YSFCTVNAI

SEQ ID NO: 81662 - protein, 9 aa, synthetic construct
  source 1..9: note = Seed: YVFCTVNAL
YSFCTVNAL

SEQ ID NO: 81663 - protein, 9 aa, synthetic construct
  source 1..9: note = Seed: YVFCTVNAL
YSFCTVNAM

SEQ ID NO: 81664 - protein, 9 aa, synthetic construct
  source 1..9: note = Seed: YVFCTVNAL
YSFCTVNAV

SEQ ID NO: 81665 - protein, 9 aa, synthetic construct
  source 1..9: note = Seed: YVFCTVNAL
YSFCTVNAW

SEQ ID NO: 81666 - protein, 9 aa, synthetic construct
  source 1..9: note = Seed: YVFCTVNAL
YSFCTVNAY

SEQ ID NO: 81667 - protein, 8 aa, synthetic construct
  source 1..8: note = Seed: YIFFASFY
YSFFASFY

SEQ ID NO: 81668 - protein, 9 aa, synthetic construct
  source 1..9: note = Seed: YIFFASFYY
YSFFASFYA

SEQ ID NO: 81669 - protein, 9 aa, synthetic construct
  source 1..9: note = Seed: YIFFASFYY
YSFFASFYF

SEQ ID NO: 81670 - protein, 9 aa, synthetic construct
  source 1..9: note = Seed: YIFFASFYY
YSFFASFYH

SEQ ID NO: 81671 - protein, 9 aa, synthetic construct
  source 1..9: note = Seed: YIFFASFYY
YSFFASFYI

SEQ ID NO: 81672 - protein, 9 aa, synthetic construct
  source 1..9: note = Seed: YIFFASFYY
YSFFASFYK

SEQ ID NO: 81673 - protein, 9 aa, synthetic construct
  source 1..9: note = Seed: YIFFASFYY
YSFFASFYL

SEQ ID NO: 81674 - protein, 9 aa, synthetic construct
  source 1..9: note = Seed: YIFFASFYY
YSFFASFYM

SEQ ID NO: 81675 - protein, 9 aa, synthetic construct
  source 1..9: note = Seed: YIFFASFYY
YSFFASFYQ

SEQ ID NO: 81676 - protein, 9 aa, synthetic construct
  source 1..9: note = Seed: YIFFASFYY
YSFFASFYR

SEQ ID NO: 81677 - protein, 9 aa, synthetic construct
  source 1..9: note = Seed: YIFFASFYY
YSFFASFYV

SEQ ID NO: 81678 - protein, 9 aa, synthetic construct
  source 1..9: note = Seed: YIFFASFYY
YSFFASFYW

SEQ ID NO: 81679 - protein, 9 aa, synthetic construct
  source 1..9: note = Seed: YIFFASFYY
YSFFASFYY

SEQ ID NO: 81680 - protein, 10 aa, synthetic construct
  source 1..10: note = Seed: YIFFASFYYV
YSFFASFYYA

SEQ ID NO: 81681 - protein, 10 aa, synthetic construct
  source 1..10: note = Seed: YIFFASFYYV
YSFFASFYYC

SEQ ID NO: 81682 - protein, 10 aa, synthetic construct
  source 1..10: note = Seed: YIFFASFYYV
YSFFASFYYD

SEQ ID NO: 81683 - protein, 10 aa, synthetic construct
  source 1..10: note = Seed: YIFFASFYYV
YSFFASFYYE

SEQ ID NO: 81684 - protein, 10 aa, synthetic construct
  source 1..10: note = Seed: YIFFASFYYV
YSFFASFYYF

SEQ ID NO: 81685 - protein, 10 aa, synthetic construct
  source 1..10: note = Seed: YIFFASFYYV
YSFFASFYYG

SEQ ID NO: 81686 - protein, 10 aa, synthetic construct
  source 1..10: note = Seed: YIFFASFYYV
YSFFASFYYH

SEQ ID NO: 81687 - protein, 10 aa, synthetic construct
  source 1..10: note = Seed: YIFFASFYYV
YSFFASFYYI

SEQ ID NO: 81688 - protein, 10 aa, synthetic construct
  source 1..10: note = Seed: YIFFASFYYV
YSFFASFYYK

SEQ ID NO: 81689 - protein, 10 aa, synthetic construct
  source 1..10: note = Seed: YIFFASFYYV
YSFFASFYYL

SEQ ID NO: 81690 - protein, 10 aa, synthetic construct
  source 1..10: note = Seed: YIFFASFYYV
YSFFASFYYM

SEQ ID NO: 81691 - protein, 10 aa, synthetic construct
  source 1..10: note = Seed: YIFFASFYYV
YSFFASFYYN

SEQ ID NO: 81692 - protein, 10 aa, synthetic construct
  source 1..10: note = Seed: YIFFASFYYV
YSFFASFYYP

SEQ ID NO: 81693 - protein, 10 aa, synthetic construct
  source 1..10: note = Seed: YIFFASFYYV
YSFFASFYYQ

SEQ ID NO: 81694 - protein, 10 aa, synthetic construct
  source 1..10: note = Seed: YIFFASFYYV
YSFFASFYYR

SEQ ID NO: 81695 - protein, 10 aa, synthetic construct
  source 1..10: note = Seed: YIFFASFYYV
YSFFASFYYS

SEQ ID NO: 81696 - protein, 10 aa, synthetic construct
  source 1..10: note = Seed: YIFFASFYYV
YSFFASFYYT

SEQ ID NO: 81697 - protein, 10 aa, synthetic construct
  source 1..10: note = Seed: YIFFASFYYV
YSFFASFYYV

SEQ ID NO: 81698 - protein, 11 aa, synthetic construct
  source 1..11: note = Seed: YIFFASFYYVW
YSFFASFYYVW

SEQ ID NO: 81699 - protein, 11 aa, synthetic construct
  source 1..11: note = Seed: YIFFASFYYVW
YSFFASFYYVY

SEQ ID NO: 81700 - protein, 10 aa, synthetic construct
  source 1..10: note = Seed: YIFFASFYYV
YSFFASFYYW

SEQ ID NO: 81701 - protein, 10 aa, synthetic construct
  source 1..10: note = Seed: YIFFASFYYV
YSFFASFYYY

SEQ ID NO: 81702 - protein, 9 aa, synthetic construct
  source 1..9: note = Seed: YWFFSNYLK
YSFFSNYLF

SEQ ID NO: 81703 - protein, 9 aa, synthetic construct
  source 1..9: note = Seed: YWFFSNYLK
YSFFSNYLK

SEQ ID NO: 81704 - protein, 10 aa, synthetic construct
  source 1..10: note = Seed: YWFFSNYLKR
YSFFSNYLKK

SEQ ID NO: 81705 - protein, 10 aa, synthetic construct
  source 1..10: note = Seed: YWFFSNYLKR
YSFFSNYLKR

SEQ ID NO: 81706 - protein, 11 aa, synthetic construct
  source 1..11: note = Seed: YWFFSNYLKRR
YSFFSNYLKRR

SEQ ID NO: 81707 - protein, 10 aa, synthetic construct
  source 1..10: note = Seed: YWFFSNYLKR
YSFFSNYLKY

SEQ ID NO: 81708 - protein, 9 aa, synthetic construct
  source 1..9: note = Seed: YWFFSNYLK
YSFFSNYLM

SEQ ID NO: 81709 - protein, 9 aa, synthetic construct
  source 1..9: note = Seed: YWFFSNYLK
YSFFSNYLR

SEQ ID NO: 81710 - protein, 9 aa, synthetic construct
  source 1..9: note = Seed: YWFFSNYLK
YSFFSNYLY

SEQ ID NO: 81711 - protein, 8 aa, synthetic construct
  source 1..8: note = Seed: YSFLPGVY
YSFLPGVF

SEQ ID NO: 81712 - protein, 8 aa, synthetic construct
  source 1..8: note = Seed: YSFLPGVY
YSFLPGVL

SEQ ID NO: 81713 - protein, 8 aa, synthetic construct
  source 1..8: note = Seed: YSFLPGVY
YSFLPGVM

SEQ ID NO: 81714 - protein, 8 aa, synthetic construct
  source 1..8: note = Seed: YSFLPGVY
YSFLPGVW

SEQ ID NO: 81715 - protein, 9 aa, synthetic construct
  source 1..9: note = Seed: YSFLPGVYS
YSFLPGVYA

SEQ ID NO: 81716 - protein, 9 aa, synthetic construct
  source 1..9: note = Seed: YSFLPGVYS
YSFLPGVYI

SEQ ID NO: 81717 - protein, 10 aa, synthetic construct
  source 1..10: note = Seed: YSFLPGVYSV
YSFLPGVYSF

SEQ ID NO: 81718 - protein, 10 aa, synthetic construct
  source 1..10: note = Seed: YSFLPGVYSV
YSFLPGVYSI

SEQ ID NO: 81719 - protein, 10 aa, synthetic construct
  source 1..10: note = Seed: YSFLPGVYSV
YSFLPGVYSL

SEQ ID NO: 81720 - protein, 10 aa, synthetic construct
  source 1..10: note = Seed: YSFLPGVYSV
YSFLPGVYSM

SEQ ID NO: 81721 - protein, 10 aa, synthetic construct
  source 1..10: note = Seed: YSFLPGVYSV
YSFLPGVYSW

SEQ ID NO: 81722 - protein, 10 aa, synthetic construct
  source 1..10: note = Seed: YSFLPGVYSV
YSFLPGVYSY

SEQ ID NO: 81723 - protein, 9 aa, synthetic construct
  source 1..9: note = Seed: YSFLPGVYS
YSFLPGVYV

SEQ ID NO: 81724 - protein, 9 aa, synthetic construct
  source 1..9: note = Seed: YGFQPTNGV
YSFQPTNGA

SEQ ID NO: 81725 - protein, 9 aa, synthetic construct
  source 1..9: note = Seed: YGFQPTNGV
YSFQPTNGF

SEQ ID NO: 81726 - protein, 9 aa, synthetic construct
  source 1..9: note = Seed: YGFQPTNGV
YSFQPTNGI

SEQ ID NO: 81727 - protein, 9 aa, synthetic construct
  source 1..9: note = Seed: YGFQPTNGV
YSFQPTNGL

SEQ ID NO: 81728 - protein, 9 aa, synthetic construct
  source 1..9: note = Seed: YGFQPTNGV
YSFQPTNGM

SEQ ID NO: 81729 - protein, 9 aa, synthetic construct
  source 1..9: note = Seed: YGFQPTNGV
YSFQPTNGV

SEQ ID NO: 81730 - protein, 9 aa, synthetic construct
  source 1..9: note = Seed: YGFQPTNGV
YSFQPTNGY

SEQ ID NO: 81731 - protein, 10 aa, synthetic construct
  source 1..10: note = Seed: YHFRELGVVH
YSFRELGVVF

SEQ ID NO: 81732 - protein, 10 aa, synthetic construct
  source 1..10: note = Seed: YHFRELGVVH
YSFRELGVVY

SEQ ID NO: 81733 - protein, 9 aa, synthetic construct
  source 1..9: note = Seed: YVFTGYRVT
YSFTGYRVA

SEQ ID NO: 81734 - protein, 9 aa, synthetic construct
  source 1..9: note = Seed: YVFTGYRVT
YSFTGYRVF

SEQ ID NO: 81735 - protein, 9 aa, synthetic construct
  source 1..9: note = Seed: YVFTGYRVT
YSFTGYRVI

SEQ ID NO: 81736 - protein, 9 aa, synthetic construct
  source 1..9: note = Seed: YVFTGYRVT
YSFTGYRVL

SEQ ID NO: 81737 - protein, 9 aa, synthetic construct
  source 1..9: note = Seed: YVFTGYRVT
YSFTGYRVM

SEQ ID NO: 81738 - protein, 10 aa, synthetic construct
  source 1..10: note = Seed: YVFTGYRVTK
YSFTGYRVTK

SEQ ID NO: 81739 - protein, 10 aa, synthetic construct
  source 1..10: note = Seed: YVFTGYRVTK
YSFTGYRVTR

SEQ ID NO: 81740 - protein, 9 aa, synthetic construct
  source 1..9: note = Seed: YVFTGYRVT
YSFTGYRVV

SEQ ID NO: 81741 - protein, 9 aa, synthetic construct
  source 1..9: note = Seed: YVFTGYRVT
YSFTGYRVW

SEQ ID NO: 81742 - protein, 9 aa, synthetic construct
  source 1..9: note = Seed: YVFTGYRVT
YSFTGYRVY

SEQ ID NO: 81743 - protein, 9 aa, synthetic construct
  source 1..9: note = Seed: YFFTLLLQL
YSFTLLLQI

SEQ ID NO: 81744 - protein, 9 aa, synthetic construct
  source 1..9: note = Seed: YFFTLLLQL
YSFTLLLQV

SEQ ID NO: 81745 - protein, 9 aa, synthetic construct
  source 1..9: note = Seed: YFFTLLLQL
YSFTLLLQY

SEQ ID NO: 81746 - protein, 10 aa, synthetic construct
  source 1..10: note = Seed: YLGGMSYYCK
YSGGMSYYCK

SEQ ID NO: 81747 - protein, 10 aa, synthetic construct
  source 1..10: note = Seed: YLGGMSYYCK
YSGGMSYYCR

SEQ ID NO: 81748 - protein, 9 aa, synthetic construct
  source 1..9: note = Seed: YLGGMSYYC
YSGGMSYYI

SEQ ID NO: 81749 - protein, 9 aa, synthetic construct
  source 1..9: note = Seed: YLGGMSYYC
YSGGMSYYL

SEQ ID NO: 81750 - protein, 9 aa, synthetic construct
  source 1..9: note = Seed: YLGGMSYYC
YSGGMSYYV

SEQ ID NO: 81751 - protein, 10 aa, synthetic construct
  source 1..10: note = Seed: YTGNYQCGHY
YSGNYQCGHY

SEQ ID NO: 81752 - protein, 11 aa, synthetic construct
  source 1..11: note = Seed: YTGNYQCGHYK
YSGNYQCGHYR

SEQ ID NO: 81753 - protein, 10 aa, synthetic construct
  source 1..10: note = Seed: YVGYLQPRTF
YSGYLQPRTF

SEQ ID NO: 81754 - protein, 11 aa, synthetic construct
  source 1..11: note = Seed: YVGYLQPRTFL
YSGYLQPRTFF

SEQ ID NO: 81755 - protein, 11 aa, synthetic construct
  source 1..11: note = Seed: YVGYLQPRTFL
YSGYLQPRTFW

SEQ ID NO: 81756 - protein, 10 aa, synthetic construct
  source 1..10: note = Seed: YVGYLQPRTF
YSGYLQPRTM

SEQ ID NO: 81757 - protein, 10 aa, synthetic construct
  source 1..10: note = Seed: YVGYLQPRTF
YSGYLQPRTW

SEQ ID NO: 81758 - protein, 10 aa, synthetic construct
  source 1..10: note = Seed: YVGYLQPRTF
YSGYLQPRTY

SEQ ID NO: 81759 - protein, 9 aa, synthetic construct
  source 1..9: note = Seed: YMHHMELPT
YSHHMELPF

SEQ ID NO: 81760 - protein, 9 aa, synthetic construct
  source 1..9: note = Seed: YMHHMELPT
YSHHMELPM

SEQ ID NO: 81761 - protein, 9 aa, synthetic construct
  source 1..9: note = Seed: YMHHMELPT
YSHHMELPY

SEQ ID NO: 81762 - protein, 9 aa, synthetic construct
  source 1..9: note = Seed: YFIASFRLF
YSIASFRLA

SEQ ID NO: 81763 - protein, 9 aa, synthetic construct
  source 1..9: note = Seed: YFIASFRLF
YSIASFRLF

SEQ ID NO: 81764 - protein, 11 aa, synthetic construct
  source 1..11: note = Seed: YFIASFRLFAR
YSIASFRLFAR

SEQ ID NO: 81765 - protein, 10 aa, synthetic construct
  source 1..10: note = Seed: YFIASFRLFA
YSIASFRLFI

SEQ ID NO: 81766 - protein, 10 aa, synthetic construct
  source 1..10: note = Seed: YFIASFRLFA
YSIASFRLFL

SEQ ID NO: 81767 - protein, 10 aa, synthetic construct
  source 1..10: note = Seed: YFIASFRLFA
YSIASFRLFV

SEQ ID NO: 81768 - protein, 9 aa, synthetic construct
  source 1..9: note = Seed: YFIASFRLF
YSIASFRLI

SEQ ID NO: 81769 - protein, 9 aa, synthetic construct
  source 1..9: note = Seed: YFIASFRLF
YSIASFRLL

SEQ ID NO: 81770 - protein, 9 aa, synthetic construct
  source 1..9: note = Seed: YFIASFRLF
YSIASFRLM

SEQ ID NO: 81771 - protein, 9 aa, synthetic construct
  source 1..9: note = Seed: YFIASFRLF
YSIASFRLV

SEQ ID NO: 81772 - protein, 9 aa, synthetic construct
  source 1..9: note = Seed: YFIASFRLF
YSIASFRLY

SEQ ID NO: 81773 - protein, 9 aa, synthetic construct
  source 1..9: note = Seed: YGIATVREV
YSIATVREA

SEQ ID NO: 81774 - protein, 9 aa, synthetic construct
  source 1..9: note = Seed: YGIATVREV
YSIATVREF

SEQ ID NO: 81775 - protein, 9 aa, synthetic construct
  source 1..9: note = Seed: YGIATVREV
YSIATVREI

SEQ ID NO: 81776 - protein, 9 aa, synthetic construct
  source 1..9: note = Seed: YGIATVREV
YSIATVREL

SEQ ID NO: 81777 - protein, 9 aa, synthetic construct
  source 1..9: note = Seed: YGIATVREV
YSIATVREM

SEQ ID NO: 81778 - protein, 9 aa, synthetic construct
  source 1..9: note = Seed: YGIATVREV
YSIATVREV

SEQ ID NO: 81779 - protein, 9 aa, synthetic construct
  source 1..9: note = Seed: YGIATVREV
YSIATVREY

SEQ ID NO: 81780 - protein, 10 aa, synthetic construct
  source 1..10: note = Seed: YIICISTKHF
YSICISTKHF

SEQ ID NO: 81781 - protein, 10 aa, synthetic construct
  source 1..10: note = Seed: YIICISTKHF
YSICISTKHY

SEQ ID NO: 81782 - protein, 9 aa, synthetic construct
  source 1..9: note = Seed: YFIKGLNNL
YSIKGLNNA

SEQ ID NO: 81783 - protein, 9 aa, synthetic construct
  source 1..9: note = Seed: YFIKGLNNL
YSIKGLNNI

SEQ ID NO: 81784 - protein, 9 aa, synthetic construct
  source 1..9: note = Seed: YFIKGLNNL
YSIKGLNNL

SEQ ID NO: 81785 - protein, 9 aa, synthetic construct
  source 1..9: note = Seed: YFIKGLNNL
YSIKGLNNV

SEQ ID NO: 81786 - protein, 10 aa, synthetic construct
  source 1..10: note = Seed: YAISAKNRAR
YSISAKNRAR

SEQ ID NO: 81787 - protein, 9 aa, synthetic construct
  source 1..9: note = Seed: YAISAKNRA
YSISAKNRY

SEQ ID NO: 81788 - protein, 9 aa, synthetic construct
  source 1..9: note = Seed: YSKHTPINL
YSKHTPINF

SEQ ID NO: 81789 - protein, 9 aa, synthetic construct
  source 1..9: note = Seed: YSKHTPINL
YSKHTPINM

SEQ ID NO: 81790 - protein, 9 aa, synthetic construct
  source 1..9: note = Seed: YSKHTPINL
YSKHTPINV

SEQ ID NO: 81791 - protein, 9 aa, synthetic construct
  source 1..9: note = Seed: YSKHTPINL
YSKHTPINW

SEQ ID NO: 81792 - protein, 9 aa, synthetic construct
  source 1..9: note = Seed: YSKHTPINL
YSKHTPINY

SEQ ID NO: 81793 - protein, 9 aa, synthetic construct
  source 1..9: note = Seed: YYKKDNSYF
YSKKDNSYF

SEQ ID NO: 81794 - protein, 9 aa, synthetic construct
  source 1..9: note = Seed: YDKLQFTSL
YSKLQFTSI

SEQ ID NO: 81795 - protein, 9 aa, synthetic construct
  source 1..9: note = Seed: YDKLQFTSL
YSKLQFTSL

SEQ ID NO: 81796 - protein, 11 aa, synthetic construct
  source 1..11: note = Seed: YDKLQFTSLEI
YSKLQFTSLEV

SEQ ID NO: 81797 - protein, 9 aa, synthetic construct
  source 1..9: note = Seed: YDKLQFTSL
YSKLQFTSM

SEQ ID NO: 81798 - protein, 9 aa, synthetic construct
  source 1..9: note = Seed: YDKLQFTSL
YSKLQFTSV

SEQ ID NO: 81799 - protein, 9 aa, synthetic construct
  source 1..9: note = Seed: YLKLRSDVL
YSKLRSDVF

SEQ ID NO: 81800 - protein, 9 aa, synthetic construct
  source 1..9: note = Seed: YLKLRSDVL
YSKLRSDVL

SEQ ID NO: 81801 - protein, 9 aa, synthetic construct
  source 1..9: note = Seed: YLKLRSDVL
YSKLRSDVM

SEQ ID NO: 81802 - protein, 9 aa, synthetic construct
  source 1..9: note = Seed: YLKLRSDVL
YSKLRSDVV

SEQ ID NO: 81803 - protein, 9 aa, synthetic construct
  source 1..9: note = Seed: YLKLRSDVL
YSKLRSDVY

SEQ ID NO: 81804 - protein, 8 aa, synthetic construct
  source 1..8: note = Seed: YLKRRVVF
YSKRRVVL

SEQ ID NO: 81805 - protein, 8 aa, synthetic construct
  source 1..8: note = Seed: YLKRRVVF
YSKRRVVM

SEQ ID NO: 81806 - protein, 9 aa, synthetic construct
  source 1..9: note = Seed: YLKSPNFSK
YSKSPNFSA

SEQ ID NO: 81807 - protein, 9 aa, synthetic construct
  source 1..9: note = Seed: YLKSPNFSK
YSKSPNFSK

SEQ ID NO: 81808 - protein, 9 aa, synthetic construct
  source 1..9: note = Seed: YLKSPNFSK
YSKSPNFSR

SEQ ID NO: 81809 - protein, 9 aa, synthetic construct
  source 1..9: note = Seed: YIKWDLLKY
YSKWDLLKF

SEQ ID NO: 81810 - protein, 9 aa, synthetic construct
  source 1..9: note = Seed: YIKWDLLKY
YSKWDLLKL

SEQ ID NO: 81811 - protein, 9 aa, synthetic construct
  source 1..9: note = Seed: YIKWDLLKY
YSKWDLLKM

SEQ ID NO: 81812 - protein, 9 aa, synthetic construct
  source 1..9: note = Seed: YIKWDLLKY
YSKWDLLKW

SEQ ID NO: 81813 - protein, 9 aa, synthetic construct
  source 1..9: note = Seed: YIKWDLLKY
YSKWDLLKY

SEQ ID NO: 81814 - protein, 9 aa, synthetic construct
  source 1..9: note = Seed: YIKWPWYIW
YSKWPWYIF

SEQ ID NO: 81815 - protein, 9 aa, synthetic construct
  source 1..9: note = Seed: YIKWPWYIW
YSKWPWYIM

SEQ ID NO: 81816 - protein, 9 aa, synthetic construct
  source 1..9: note = Seed: YIKWPWYIW
YSKWPWYIW

SEQ ID NO: 81817 - protein, 9 aa, synthetic construct
  source 1..9: note = Seed: YIKWPWYIW
YSKWPWYIY

SEQ ID NO: 81818 - protein, 9 aa, synthetic construct
  source 1..9: note = Seed: YNKYKYFSG
YSKYKYFSA

SEQ ID NO: 81819 - protein, 9 aa, synthetic construct
  source 1..9: note = Seed: YNKYKYFSG
YSKYKYFSF

SEQ ID NO: 81820 - protein, 9 aa, synthetic construct
  source 1..9: note = Seed: YNKYKYFSG
YSKYKYFSI

SEQ ID NO: 81821 - protein, 9 aa, synthetic construct
  source 1..9: note = Seed: YNKYKYFSG
YSKYKYFSL

SEQ ID NO: 81822 - protein, 9 aa, synthetic construct
  source 1..9: note = Seed: YNKYKYFSG
YSKYKYFSM

SEQ ID NO: 81823 - protein, 9 aa, synthetic construct
  source 1..9: note = Seed: YNKYKYFSG
YSKYKYFSV

SEQ ID NO: 81824 - protein, 10 aa, synthetic construct
  source 1..10: note = Seed: YFLCWHTNCY
YSLCWHTNCY

SEQ ID NO: 81825 - protein, 10 aa, synthetic construct
  source 1..10: note = Seed: YRLFRKSNLK
YSLFRKSNLK

SEQ ID NO: 81826 - protein, 10 aa, synthetic construct
  source 1..10: note = Seed: YRLFRKSNLK
YSLFRKSNLR

SEQ ID NO: 81827 - protein, 9 aa, synthetic construct
  source 1..9: note = Seed: YILFTRFFY
YSLFTRFFF

SEQ ID NO: 81828 - protein, 9 aa, synthetic construct
  source 1..9: note = Seed: YILFTRFFY
YSLFTRFFI

SEQ ID NO: 81829 - protein, 9 aa, synthetic construct
  source 1..9: note = Seed: YILFTRFFY
YSLFTRFFK

SEQ ID NO: 81830 - protein, 9 aa, synthetic construct
  source 1..9: note = Seed: YILFTRFFY
YSLFTRFFL

SEQ ID NO: 81831 - protein, 9 aa, synthetic construct
  source 1..9: note = Seed: YILFTRFFY
YSLFTRFFM

SEQ ID NO: 81832 - protein, 9 aa, synthetic construct
  source 1..9: note = Seed: YILFTRFFY
YSLFTRFFR

SEQ ID NO: 81833 - protein, 9 aa, synthetic construct
  source 1..9: note = Seed: YILFTRFFY
YSLFTRFFW

SEQ ID NO: 81834 - protein, 9 aa, synthetic construct
  source 1..9: note = Seed: YILFTRFFY
YSLFTRFFY

SEQ ID NO: 81835 - protein, 10 aa, synthetic construct
  source 1..10: note = Seed: YILFTRFFYV
YSLFTRFFYA

SEQ ID NO: 81836 - protein, 10 aa, synthetic construct
  source 1..10: note = Seed: YILFTRFFYV
YSLFTRFFYC

SEQ ID NO: 81837 - protein, 10 aa, synthetic construct
  source 1..10: note = Seed: YILFTRFFYV
YSLFTRFFYF

SEQ ID NO: 81838 - protein, 10 aa, synthetic construct
  source 1..10: note = Seed: YILFTRFFYV
YSLFTRFFYH

SEQ ID NO: 81839 - protein, 10 aa, synthetic construct
  source 1..10: note = Seed: YILFTRFFYV
YSLFTRFFYI

SEQ ID NO: 81840 - protein, 10 aa, synthetic construct
  source 1..10: note = Seed: YILFTRFFYV
YSLFTRFFYK

SEQ ID NO: 81841 - protein, 10 aa, synthetic construct
  source 1..10: note = Seed: YILFTRFFYV
YSLFTRFFYL

SEQ ID NO: 81842 - protein, 10 aa, synthetic construct
  source 1..10: note = Seed: YILFTRFFYV
YSLFTRFFYM

SEQ ID NO: 81843 - protein, 10 aa, synthetic construct
  source 1..10: note = Seed: YILFTRFFYV
YSLFTRFFYR

SEQ ID NO: 81844 - protein, 10 aa, synthetic construct
  source 1..10: note = Seed: YILFTRFFYV
YSLFTRFFYS

SEQ ID NO: 81845 - protein, 10 aa, synthetic construct
  source 1..10: note = Seed: YILFTRFFYV
YSLFTRFFYT

SEQ ID NO: 81846 - protein, 10 aa, synthetic construct
  source 1..10: note = Seed: YILFTRFFYV
YSLFTRFFYV

SEQ ID NO: 81847 - protein, 11 aa, synthetic construct
  source 1..11: note = Seed: YILFTRFFYVL
YSLFTRFFYVA

SEQ ID NO: 81848 - protein, 11 aa, synthetic construct
  source 1..11: note = Seed: YILFTRFFYVL
YSLFTRFFYVC

SEQ ID NO: 81849 - protein, 11 aa, synthetic construct
  source 1..11: note = Seed: YILFTRFFYVL
YSLFTRFFYVD

SEQ ID NO: 81850 - protein, 11 aa, synthetic construct
  source 1..11: note = Seed: YILFTRFFYVL
YSLFTRFFYVE

SEQ ID NO: 81851 - protein, 11 aa, synthetic construct
  source 1..11: note = Seed: YILFTRFFYVL
YSLFTRFFYVF

SEQ ID NO: 81852 - protein, 11 aa, synthetic construct
  source 1..11: note = Seed: YILFTRFFYVL
YSLFTRFFYVG

SEQ ID NO: 81853 - protein, 11 aa, synthetic construct
  source 1..11: note = Seed: YILFTRFFYVL
YSLFTRFFYVH

SEQ ID NO: 81854 - protein, 11 aa, synthetic construct
  source 1..11: note = Seed: YILFTRFFYVL
YSLFTRFFYVI

SEQ ID NO: 81855 - protein, 11 aa, synthetic construct
  source 1..11: note = Seed: YILFTRFFYVL
YSLFTRFFYVK

SEQ ID NO: 81856 - protein, 11 aa, synthetic construct
  source 1..11: note = Seed: YILFTRFFYVL
YSLFTRFFYVL

SEQ ID NO: 81857 - protein, 11 aa, synthetic construct
  source 1..11: note = Seed: YILFTRFFYVL
YSLFTRFFYVM

SEQ ID NO: 81858 - protein, 11 aa, synthetic construct
  source 1..11: note = Seed: YILFTRFFYVL
YSLFTRFFYVN

SEQ ID NO: 81859 - protein, 11 aa, synthetic construct
  source 1..11: note = Seed: YILFTRFFYVL
YSLFTRFFYVP

SEQ ID NO: 81860 - protein, 11 aa, synthetic construct
  source 1..11: note = Seed: YILFTRFFYVL
YSLFTRFFYVQ

SEQ ID NO: 81861 - protein, 11 aa, synthetic construct
  source 1..11: note = Seed: YILFTRFFYVL
YSLFTRFFYVR

SEQ ID NO: 81862 - protein, 11 aa, synthetic construct
  source 1..11: note = Seed: YILFTRFFYVL
YSLFTRFFYVS

SEQ ID NO: 81863 - protein, 11 aa, synthetic construct
  source 1..11: note = Seed: YILFTRFFYVL
YSLFTRFFYVT

SEQ ID NO: 81864 - protein, 11 aa, synthetic construct
  source 1..11: note = Seed: YILFTRFFYVL
YSLFTRFFYVV

SEQ ID NO: 81865 - protein, 11 aa, synthetic construct
  source 1..11: note = Seed: YILFTRFFYVL
YSLFTRFFYVW

SEQ ID NO: 81866 - protein, 11 aa, synthetic construct
  source 1..11: note = Seed: YILFTRFFYVL
YSLFTRFFYVY

SEQ ID NO: 81867 - protein, 10 aa, synthetic construct
  source 1..10: note = Seed: YILFTRFFYV
YSLFTRFFYY

SEQ ID NO: 81868 - protein, 9 aa, synthetic construct
  source 1..9: note = Seed: YKLGASQRV
YSLGASQRF

SEQ ID NO: 81869 - protein, 9 aa, synthetic construct
  source 1..9: note = Seed: YKLGASQRV
YSLGASQRY

SEQ ID NO: 81870 - protein, 10 aa, synthetic construct
  source 1..10: note = Seed: YSLLMPILTL
YSLLMPILTA

SEQ ID NO: 81871 - protein, 10 aa, synthetic construct
  source 1..10: note = Seed: YSLLMPILTL
YSLLMPILTF

SEQ ID NO: 81872 - protein, 10 aa, synthetic construct
  source 1..10: note = Seed: YSLLMPILTL
YSLLMPILTI

SEQ ID NO: 81873 - protein, 10 aa, synthetic construct
  source 1..10: note = Seed: YSLLMPILTL
YSLLMPILTM

SEQ ID NO: 81874 - protein, 10 aa, synthetic construct
  source 1..10: note = Seed: YSLLMPILTL
YSLLMPILTV

SEQ ID NO: 81875 - protein, 10 aa, synthetic construct
  source 1..10: note = Seed: YSLLMPILTL
YSLLMPILTW

SEQ ID NO: 81876 - protein, 10 aa, synthetic construct
  source 1..10: note = Seed: YSLLMPILTL
YSLLMPILTY

SEQ ID NO: 81877 - protein, 10 aa, synthetic construct
  source 1..10: note = Seed: YHLMSFPQSA
YSLMSFPQSA

SEQ ID NO: 81878 - protein, 11 aa, synthetic construct
  source 1..11: note = Seed: YHLMSFPQSAP
YSLMSFPQSAV

SEQ ID NO: 81879 - protein, 10 aa, synthetic construct
  source 1..10: note = Seed: YHLMSFPQSA
YSLMSFPQSI

SEQ ID NO: 81880 - protein, 10 aa, synthetic construct
  source 1..10: note = Seed: YHLMSFPQSA
YSLMSFPQSL

SEQ ID NO: 81881 - protein, 10 aa, synthetic construct
  source 1..10: note = Seed: YHLMSFPQSA
YSLMSFPQSM

SEQ ID NO: 81882 - protein, 10 aa, synthetic construct
  source 1..10: note = Seed: YHLMSFPQSA
YSLMSFPQST

SEQ ID NO: 81883 - protein, 10 aa, synthetic construct
  source 1..10: note = Seed: YHLMSFPQSA
YSLMSFPQSV

SEQ ID NO: 81884 - protein, 9 aa, synthetic construct
  source 1..9: note = Seed: YELQTPFEI
YSLQTPFEI

SEQ ID NO: 81885 - protein, 9 aa, synthetic construct
  source 1..9: note = Seed: YELQTPFEI
YSLQTPFEV

SEQ ID NO: 81886 - protein, 10 aa, synthetic construct
  source 1..10: note = Seed: YDLSVVNARL
YSLSVVNARA

SEQ ID NO: 81887 - protein, 10 aa, synthetic construct
  source 1..10: note = Seed: YDLSVVNARL
YSLSVVNARI

SEQ ID NO: 81888 - protein, 10 aa, synthetic construct
  source 1..10: note = Seed: YDLSVVNARL
YSLSVVNARL

SEQ ID NO: 81889 - protein, 10 aa, synthetic construct
  source 1..10: note = Seed: YDLSVVNARL
YSLSVVNARM

SEQ ID NO: 81890 - protein, 10 aa, synthetic construct
  source 1..10: note = Seed: YDLSVVNARL
YSLSVVNARV

SEQ ID NO: 81891 - protein, 8 aa, synthetic construct
  source 1..8: note = Seed: YTMADLVY
YSMADLVF

SEQ ID NO: 81892 - protein, 8 aa, synthetic construct
  source 1..8: note = Seed: YTMADLVY
YSMADLVL

SEQ ID NO: 81893 - protein, 8 aa, synthetic construct
  source 1..8: note = Seed: YTMADLVY
YSMADLVM

SEQ ID NO: 81894 - protein, 8 aa, synthetic construct
  source 1..8: note = Seed: YTMADLVY
YSMADLVW

SEQ ID NO: 81895 - protein, 8 aa, synthetic construct
  source 1..8: note = Seed: YTMADLVY
YSMADLVY

SEQ ID NO: 81896 - protein, 9 aa, synthetic construct
  source 1..9: note = Seed: YTMADLVYA
YSMADLVYA

SEQ ID NO: 81897 - protein, 10 aa, synthetic construct
  source 1..10: note = Seed: YTMADLVYAL
YSMADLVYAA

SEQ ID NO: 81898 - protein, 10 aa, synthetic construct
  source 1..10: note = Seed: YTMADLVYAL
YSMADLVYAC

SEQ ID NO: 81899 - protein, 10 aa, synthetic construct
  source 1..10: note = Seed: YTMADLVYAL
YSMADLVYAF

SEQ ID NO: 81900 - protein, 10 aa, synthetic construct
  source 1..10: note = Seed: YTMADLVYAL
YSMADLVYAG

SEQ ID NO: 81901 - protein, 10 aa, synthetic construct
  source 1..10: note = Seed: YTMADLVYAL
YSMADLVYAI

SEQ ID NO: 81902 - protein, 10 aa, synthetic construct
  source 1..10: note = Seed: YTMADLVYAL
YSMADLVYAL

SEQ ID NO: 81903 - protein, 11 aa, synthetic construct
  source 1..11: note = Seed: YTMADLVYALR
YSMADLVYALA

SEQ ID NO: 81904 - protein, 11 aa, synthetic construct
  source 1..11: note = Seed: YTMADLVYALR
YSMADLVYALC

SEQ ID NO: 81905 - protein, 11 aa, synthetic construct
  source 1..11: note = Seed: YTMADLVYALR
YSMADLVYALD

SEQ ID NO: 81906 - protein, 11 aa, synthetic construct
  source 1..11: note = Seed: YTMADLVYALR
YSMADLVYALE

SEQ ID NO: 81907 - protein, 11 aa, synthetic construct
  source 1..11: note = Seed: YTMADLVYALR
YSMADLVYALF

SEQ ID NO: 81908 - protein, 11 aa, synthetic construct
  source 1..11: note = Seed: YTMADLVYALR
YSMADLVYALG

SEQ ID NO: 81909 - protein, 11 aa, synthetic construct
  source 1..11: note = Seed: YTMADLVYALR
YSMADLVYALH

SEQ ID NO: 81910 - protein, 11 aa, synthetic construct
  source 1..11: note = Seed: YTMADLVYALR
YSMADLVYALI

SEQ ID NO: 81911 - protein, 11 aa, synthetic construct
  source 1..11: note = Seed: YTMADLVYALR
YSMADLVYALK

SEQ ID NO: 81912 - protein, 11 aa, synthetic construct
  source 1..11: note = Seed: YTMADLVYALR
YSMADLVYALL

SEQ ID NO: 81913 - protein, 11 aa, synthetic construct
  source 1..11: note = Seed: YTMADLVYALR
YSMADLVYALM

SEQ ID NO: 81914 - protein, 11 aa, synthetic construct
  source 1..11: note = Seed: YTMADLVYALR
YSMADLVYALN

SEQ ID NO: 81915 - protein, 11 aa, synthetic construct
  source 1..11: note = Seed: YTMADLVYALR
YSMADLVYALP

SEQ ID NO: 81916 - protein, 11 aa, synthetic construct
  source 1..11: note = Seed: YTMADLVYALR
YSMADLVYALQ

SEQ ID NO: 81917 - protein, 11 aa, synthetic construct
  source 1..11: note = Seed: YTMADLVYALR
YSMADLVYALR

SEQ ID NO: 81918 - protein, 11 aa, synthetic construct
  source 1..11: note = Seed: YTMADLVYALR
YSMADLVYALS

SEQ ID NO: 81919 - protein, 11 aa, synthetic construct
  source 1..11: note = Seed: YTMADLVYALR
YSMADLVYALT

SEQ ID NO: 81920 - protein, 11 aa, synthetic construct
  source 1..11: note = Seed: YTMADLVYALR
YSMADLVYALV

SEQ ID NO: 81921 - protein, 11 aa, synthetic construct
  source 1..11: note = Seed: YTMADLVYALR
YSMADLVYALW

SEQ ID NO: 81922 - protein, 11 aa, synthetic construct
  source 1..11: note = Seed: YTMADLVYALR
YSMADLVYALY

SEQ ID NO: 81923 - protein, 10 aa, synthetic construct
  source 1..10: note = Seed: YTMADLVYAL
YSMADLVYAM

SEQ ID NO: 81924 - protein, 10 aa, synthetic construct
  source 1..10: note = Seed: YTMADLVYAL
YSMADLVYAS

SEQ ID NO: 81925 - protein, 10 aa, synthetic construct
  source 1..10: note = Seed: YTMADLVYAL
YSMADLVYAT

SEQ ID NO: 81926 - protein, 10 aa, synthetic construct
  source 1..10: note = Seed: YTMADLVYAL
YSMADLVYAV

SEQ ID NO: 81927 - protein, 10 aa, synthetic construct
  source 1..10: note = Seed: YTMADLVYAL
YSMADLVYAW

SEQ ID NO: 81928 - protein, 10 aa, synthetic construct
  source 1..10: note = Seed: YTMADLVYAL
YSMADLVYAY

SEQ ID NO: 81929 - protein, 9 aa, synthetic construct
  source 1..9: note = Seed: YTMADLVYA
YSMADLVYC

SEQ ID NO: 81930 - protein, 9 aa, synthetic construct
  source 1..9: note = Seed: YTMADLVYA
YSMADLVYF

SEQ ID NO: 81931 - protein, 9 aa, synthetic construct
  source 1..9: note = Seed: YTMADLVYA
YSMADLVYI

SEQ ID NO: 81932 - protein, 9 aa, synthetic construct
  source 1..9: note = Seed: YTMADLVYA
YSMADLVYK

SEQ ID NO: 81933 - protein, 9 aa, synthetic construct
  source 1..9: note = Seed: YTMADLVYA
YSMADLVYL

SEQ ID NO: 81934 - protein, 9 aa, synthetic construct
  source 1..9: note = Seed: YTMADLVYA
YSMADLVYM

SEQ ID NO: 81935 - protein, 9 aa, synthetic construct
  source 1..9: note = Seed: YTMADLVYA
YSMADLVYR

SEQ ID NO: 81936 - protein, 9 aa, synthetic construct
  source 1..9: note = Seed: YTMADLVYA
YSMADLVYT

SEQ ID NO: 81937 - protein, 9 aa, synthetic construct
  source 1..9: note = Seed: YTMADLVYA
YSMADLVYV

SEQ ID NO: 81938 - protein, 9 aa, synthetic construct
  source 1..9: note = Seed: YTMADLVYA
YSMADLVYY

SEQ ID NO: 81939 - protein, 9 aa, synthetic construct
  source 1..9: note = Seed: YVMHANYIF
YSMHANYIF

SEQ ID NO: 81940 - protein, 10 aa, synthetic construct
  source 1..10: note = Seed: YVMHANYIFW
YSMHANYIFF

SEQ ID NO: 81941 - protein, 10 aa, synthetic construct
  source 1..10: note = Seed: YVMHANYIFW
YSMHANYIFL

SEQ ID NO: 81942 - protein, 10 aa, synthetic construct
  source 1..10: note = Seed: YVMHANYIFW
YSMHANYIFM

SEQ ID NO: 81943 - protein, 10 aa, synthetic construct
  source 1..10: note = Seed: YVMHANYIFW
YSMHANYIFW

SEQ ID NO: 81944 - protein, 10 aa, synthetic construct
  source 1..10: note = Seed: YVMHANYIFW
YSMHANYIFY

SEQ ID NO: 81945 - protein, 9 aa, synthetic construct
  source 1..9: note = Seed: YVMHANYIF
YSMHANYII

SEQ ID NO: 81946 - protein, 9 aa, synthetic construct
  source 1..9: note = Seed: YVMHANYIF
YSMHANYIL

SEQ ID NO: 81947 - protein, 9 aa, synthetic construct
  source 1..9: note = Seed: YVMHANYIF
YSMHANYIM

SEQ ID NO: 81948 - protein, 9 aa, synthetic construct
  source 1..9: note = Seed: YVMHANYIF
YSMHANYIV

SEQ ID NO: 81949 - protein, 9 aa, synthetic construct
  source 1..9: note = Seed: YVMHANYIF
YSMHANYIW

SEQ ID NO: 81950 - protein, 9 aa, synthetic construct
  source 1..9: note = Seed: YVMHANYIF
YSMHANYIY

SEQ ID NO: 81951 - protein, 9 aa, synthetic construct
  source 1..9: note = Seed: YTNDKACPL
YSNDKACPF

SEQ ID NO: 81952 - protein, 9 aa, synthetic construct
  source 1..9: note = Seed: YTNDKACPL
YSNDKACPI

SEQ ID NO: 81953 - protein, 9 aa, synthetic construct
  source 1..9: note = Seed: YTNDKACPL
YSNDKACPL

SEQ ID NO: 81954 - protein, 9 aa, synthetic construct
  source 1..9: note = Seed: YTNDKACPL
YSNDKACPM

SEQ ID NO: 81955 - protein, 9 aa, synthetic construct
  source 1..9: note = Seed: YTNDKACPL
YSNDKACPV

SEQ ID NO: 81956 - protein, 9 aa, synthetic construct
  source 1..9: note = Seed: YTNDKACPL
YSNDKACPW

SEQ ID NO: 81957 - protein, 9 aa, synthetic construct
  source 1..9: note = Seed: YTNDKACPL
YSNDKACPY

SEQ ID NO: 81958 - protein, 9 aa, synthetic construct
  source 1..9: note = Seed: YFNMVYMPA
YSNMVYMPM

SEQ ID NO: 81959 - protein, 8 aa, synthetic construct
  source 1..8: note = Seed: YSNNSIAI
YSNNSIAF

SEQ ID NO: 81960 - protein, 8 aa, synthetic construct
  source 1..8: note = Seed: YSNNSIAI
YSNNSIAL

SEQ ID NO: 81961 - protein, 8 aa, synthetic construct
  source 1..8: note = Seed: YSNNSIAI
YSNNSIAM

SEQ ID NO: 81962 - protein, 8 aa, synthetic construct
  source 1..8: note = Seed: YSNNSIAI
YSNNSIAY

SEQ ID NO: 81963 - protein, 10 aa, synthetic construct
  source 1..10: note = Seed: YQNNVFMSEA
YSNNVFMSEF

SEQ ID NO: 81964 - protein, 10 aa, synthetic construct
  source 1..10: note = Seed: YQNNVFMSEA
YSNNVFMSEV

SEQ ID NO: 81965 - protein, 10 aa, synthetic construct
  source 1..10: note = Seed: YQNNVFMSEA
YSNNVFMSEY

SEQ ID NO: 81966 - protein, 9 aa, synthetic construct
  source 1..9: note = Seed: YQNNVFMSE
YSNNVFMSF

SEQ ID NO: 81967 - protein, 9 aa, synthetic construct
  source 1..9: note = Seed: YQNNVFMSE
YSNNVFMSL

SEQ ID NO: 81968 - protein, 9 aa, synthetic construct
  source 1..9: note = Seed: YQNNVFMSE
YSNNVFMSM

SEQ ID NO: 81969 - protein, 9 aa, synthetic construct
  source 1..9: note = Seed: YQNNVFMSE
YSNNVFMSY

SEQ ID NO: 81970 - protein, 9 aa, synthetic construct
  source 1..9: note = Seed: YANSVFNIC
YSNSVFNIF

SEQ ID NO: 81971 - protein, 9 aa, synthetic construct
  source 1..9: note = Seed: YANSVFNIC
YSNSVFNII

SEQ ID NO: 81972 - protein, 9 aa, synthetic construct
  source 1..9: note = Seed: YANSVFNIC
YSNSVFNIL

SEQ ID NO: 81973 - protein, 9 aa, synthetic construct
  source 1..9: note = Seed: YANSVFNIC
YSNSVFNIM

SEQ ID NO: 81974 - protein, 9 aa, synthetic construct
  source 1..9: note = Seed: YANSVFNIC
YSNSVFNIV

SEQ ID NO: 81975 - protein, 9 aa, synthetic construct
  source 1..9: note = Seed: YANSVFNIC
YSNSVFNIY

SEQ ID NO: 81976 - protein, 9 aa, synthetic construct
  source 1..9: note = Seed: YVNTFSSTF
YSNTFSSTF

SEQ ID NO: 81977 - protein, 9 aa, synthetic construct
  source 1..9: note = Seed: YVNTFSSTF
YSNTFSSTH

SEQ ID NO: 81978 - protein, 9 aa, synthetic construct
  source 1..9: note = Seed: YVNTFSSTF
YSNTFSSTI

SEQ ID NO: 81979 - protein, 9 aa, synthetic construct
  source 1..9: note = Seed: YVNTFSSTF
YSNTFSSTL

SEQ ID NO: 81980 - protein, 9 aa, synthetic construct
  source 1..9: note = Seed: YVNTFSSTF
YSNTFSSTM

SEQ ID NO: 81981 - protein, 9 aa, synthetic construct
  source 1..9: note = Seed: YVNTFSSTF
YSNTFSSTV

SEQ ID NO: 81982 - protein, 9 aa, synthetic construct
  source 1..9: note = Seed: YVNTFSSTF
YSNTFSSTW

SEQ ID NO: 81983 - protein, 9 aa, synthetic construct
  source 1..9: note = Seed: YVNTFSSTF
YSNTFSSTY

SEQ ID NO: 81984 - protein, 10 aa, synthetic construct
  source 1..10: note = Seed: YTPHTVLQAV
YSPHTVLQAA

SEQ ID NO: 81985 - protein, 10 aa, synthetic construct
  source 1..10: note = Seed: YTPHTVLQAV
YSPHTVLQAI

SEQ ID NO: 81986 - protein, 10 aa, synthetic construct
  source 1..10: note = Seed: YTPHTVLQAV
YSPHTVLQAL

SEQ ID NO: 81987 - protein, 10 aa, synthetic construct
  source 1..10: note = Seed: YTPHTVLQAV
YSPHTVLQAM

SEQ ID NO: 81988 - protein, 10 aa, synthetic construct
  source 1..10: note = Seed: YTPHTVLQAV
YSPHTVLQAV

SEQ ID NO: 81989 - protein, 10 aa, synthetic construct
  source 1..10: note = Seed: YVPLKSATCI
YSPLKSATCL

SEQ ID NO: 81990 - protein, 9 aa, synthetic construct
  source 1..9: note = Seed: YVPLKSATC
YSPLKSATF

SEQ ID NO: 81991 - protein, 9 aa, synthetic construct
  source 1..9: note = Seed: YVPLKSATC
YSPLKSATI

SEQ ID NO: 81992 - protein, 9 aa, synthetic construct
  source 1..9: note = Seed: YVPLKSATC
YSPLKSATL

SEQ ID NO: 81993 - protein, 9 aa, synthetic construct
  source 1..9: note = Seed: YVPLKSATC
YSPLKSATM

SEQ ID NO: 81994 - protein, 9 aa, synthetic construct
  source 1..9: note = Seed: YVPLKSATC
YSPLKSATV

SEQ ID NO: 81995 - protein, 8 aa, synthetic construct
  source 1..8: note = Seed: YMPYFFTL
YSPYFFTF

SEQ ID NO: 81996 - protein, 9 aa, synthetic construct
  source 1..9: note = Seed: YMPYFFTLL
YSPYFFTLF

SEQ ID NO: 81997 - protein, 9 aa, synthetic construct
  source 1..9: note = Seed: YMPYFFTLL
YSPYFFTLI

SEQ ID NO: 81998 - protein, 9 aa, synthetic construct
  source 1..9: note = Seed: YMPYFFTLL
YSPYFFTLL

SEQ ID NO: 81999 - protein, 10 aa, synthetic construct
  source 1..10: note = Seed: YMPYFFTLLL
YSPYFFTLLA

SEQ ID NO: 82000 - protein, 10 aa, synthetic construct
  source 1..10: note = Seed: YMPYFFTLLL
YSPYFFTLLF

SEQ ID NO: 82001 - protein, 10 aa, synthetic construct
  source 1..10: note = Seed: YMPYFFTLLL
YSPYFFTLLL

SEQ ID NO: 82002 - protein, 10 aa, synthetic construct
  source 1..10: note = Seed: YMPYFFTLLL
YSPYFFTLLM

SEQ ID NO: 82003 - protein, 10 aa, synthetic construct
  source 1..10: note = Seed: YMPYFFTLLL
YSPYFFTLLT

SEQ ID NO: 82004 - protein, 10 aa, synthetic construct
  source 1..10: note = Seed: YMPYFFTLLL
YSPYFFTLLV

SEQ ID NO: 82005 - protein, 10 aa, synthetic construct
  source 1..10: note = Seed: YMPYFFTLLL
YSPYFFTLLW

SEQ ID NO: 82006 - protein, 10 aa, synthetic construct
  source 1..10: note = Seed: YMPYFFTLLL
YSPYFFTLLY

SEQ ID NO: 82007 - protein, 9 aa, synthetic construct
  source 1..9: note = Seed: YMPYFFTLL
YSPYFFTLM

SEQ ID NO: 82008 - protein, 9 aa, synthetic construct
  source 1..9: note = Seed: YMPYFFTLL
YSPYFFTLV

SEQ ID NO: 82009 - protein, 9 aa, synthetic construct
  source 1..9: note = Seed: YMPYFFTLL
YSPYFFTLY

SEQ ID NO: 82010 - protein, 9 aa, synthetic construct
  source 1..9: note = Seed: YQPYRVVVL
YSPYRVVVF

SEQ ID NO: 82011 - protein, 9 aa, synthetic construct
  source 1..9: note = Seed: YQPYRVVVL
YSPYRVVVI

SEQ ID NO: 82012 - protein, 9 aa, synthetic construct
  source 1..9: note = Seed: YQPYRVVVL
YSPYRVVVL

SEQ ID NO: 82013 - protein, 10 aa, synthetic construct
  source 1..10: note = Seed: YQPYRVVVLS
YSPYRVVVLA

SEQ ID NO: 82014 - protein, 9 aa, synthetic construct
  source 1..9: note = Seed: YQPYRVVVL
YSPYRVVVM

SEQ ID NO: 82015 - protein, 9 aa, synthetic construct
  source 1..9: note = Seed: YQPYRVVVL
YSPYRVVVV

SEQ ID NO: 82016 - protein, 9 aa, synthetic construct
  source 1..9: note = Seed: YQPYRVVVL
YSPYRVVVY

SEQ ID NO: 82017 - protein, 10 aa, synthetic construct
  source 1..10: note = Seed: YKQFDTYNLW
YSQFDTYNLF

SEQ ID NO: 82018 - protein, 10 aa, synthetic construct
  source 1..10: note = Seed: YKQFDTYNLW
YSQFDTYNLM

SEQ ID NO: 82019 - protein, 10 aa, synthetic construct
  source 1..10: note = Seed: YKQFDTYNLW
YSQFDTYNLW

SEQ ID NO: 82020 - protein, 10 aa, synthetic construct
  source 1..10: note = Seed: YKQFDTYNLW
YSQFDTYNLY

SEQ ID NO: 82021 - protein, 9 aa, synthetic construct
  source 1..9: note = Seed: YSQLMCQPI
YSQLMCQPF

SEQ ID NO: 82022 - protein, 10 aa, synthetic construct
  source 1..10: note = Seed: YSQLMCQPIL
YSQLMCQPIF

SEQ ID NO: 82023 - protein, 11 aa, synthetic construct
  source 1..11: note = Seed: YSQLMCQPILL
YSQLMCQPILA

SEQ ID NO: 82024 - protein, 11 aa, synthetic construct
  source 1..11: note = Seed: YSQLMCQPILL
YSQLMCQPILF

SEQ ID NO: 82025 - protein, 11 aa, synthetic construct
  source 1..11: note = Seed: YSQLMCQPILL
YSQLMCQPILI

SEQ ID NO: 82026 - protein, 11 aa, synthetic construct
  source 1..11: note = Seed: YSQLMCQPILL
YSQLMCQPILM

SEQ ID NO: 82027 - protein, 11 aa, synthetic construct
  source 1..11: note = Seed: YSQLMCQPILL
YSQLMCQPILV

SEQ ID NO: 82028 - protein, 11 aa, synthetic construct
  source 1..11: note = Seed: YSQLMCQPILL
YSQLMCQPILW

SEQ ID NO: 82029 - protein, 11 aa, synthetic construct
  source 1..11: note = Seed: YSQLMCQPILL
YSQLMCQPILY

SEQ ID NO: 82030 - protein, 10 aa, synthetic construct
  source 1..10: note = Seed: YSQLMCQPIL
YSQLMCQPIW

SEQ ID NO: 82031 - protein, 10 aa, synthetic construct
  source 1..10: note = Seed: YSQLMCQPIL
YSQLMCQPIY

SEQ ID NO: 82032 - protein, 9 aa, synthetic construct
  source 1..9: note = Seed: YSQLMCQPI
YSQLMCQPL

SEQ ID NO: 82033 - protein, 9 aa, synthetic construct
  source 1..9: note = Seed: YSQLMCQPI
YSQLMCQPM

SEQ ID NO: 82034 - protein, 9 aa, synthetic construct
  source 1..9: note = Seed: YSQLMCQPI
YSQLMCQPW

SEQ ID NO: 82035 - protein, 9 aa, synthetic construct
  source 1..9: note = Seed: YSQLMCQPI
YSQLMCQPY

SEQ ID NO: 82036 - protein, 9 aa, synthetic construct
  source 1..9: note = Seed: YYQNNVFMS
YSQNNVFMF

SEQ ID NO: 82037 - protein, 9 aa, synthetic construct
  source 1..9: note = Seed: YLQPRTFLL
YSQPRTFLF

SEQ ID NO: 82038 - protein, 9 aa, synthetic construct
  source 1..9: note = Seed: YLQPRTFLL
YSQPRTFLI

SEQ ID NO: 82039 - protein, 9 aa, synthetic construct
  source 1..9: note = Seed: YLQPRTFLL
YSQPRTFLL

SEQ ID NO: 82040 - protein, 10 aa, synthetic construct
  source 1..10: note = Seed: YLQPRTFLLK
YSQPRTFLLK

SEQ ID NO: 82041 - protein, 10 aa, synthetic construct
  source 1..10: note = Seed: YLQPRTFLLK
YSQPRTFLLR

SEQ ID NO: 82042 - protein, 9 aa, synthetic construct
  source 1..9: note = Seed: YLQPRTFLL
YSQPRTFLM

SEQ ID NO: 82043 - protein, 9 aa, synthetic construct
  source 1..9: note = Seed: YLQPRTFLL
YSQPRTFLV

SEQ ID NO: 82044 - protein, 9 aa, synthetic construct
  source 1..9: note = Seed: YLQPRTFLL
YSQPRTFLY

SEQ ID NO: 82045 - protein, 9 aa, synthetic construct
  source 1..9: note = Seed: YPQVNGLTS
YSQVNGLTF

SEQ ID NO: 82046 - protein, 10 aa, synthetic construct
  source 1..10: note = Seed: YPQVNGLTSI
YSQVNGLTSF

SEQ ID NO: 82047 - protein, 10 aa, synthetic construct
  source 1..10: note = Seed: YPQVNGLTSI
YSQVNGLTSI

SEQ ID NO: 82048 - protein, 10 aa, synthetic construct
  source 1..10: note = Seed: YPQVNGLTSI
YSQVNGLTSL

SEQ ID NO: 82049 - protein, 10 aa, synthetic construct
  source 1..10: note = Seed: YPQVNGLTSI
YSQVNGLTSM

SEQ ID NO: 82050 - protein, 10 aa, synthetic construct
  source 1..10: note = Seed: YPQVNGLTSI
YSQVNGLTSV

SEQ ID NO: 82051 - protein, 10 aa, synthetic construct
  source 1..10: note = Seed: YPQVNGLTSI
YSQVNGLTSY

SEQ ID NO: 82052 - protein, 9 aa, synthetic construct
  source 1..9: note = Seed: YPQVNGLTS
YSQVNGLTY

SEQ ID NO: 82053 - protein, 9 aa, synthetic construct
  source 1..9: note = Seed: YYRARAGEA
YSRARAGEK

SEQ ID NO: 82054 - protein, 9 aa, synthetic construct
  source 1..9: note = Seed: YKRDAPAHI
YSRDAPAHF

SEQ ID NO: 82055 - protein, 9 aa, synthetic construct
  source 1..9: note = Seed: YKRDAPAHI
YSRDAPAHY

SEQ ID NO: 82056 - protein, 10 aa, synthetic construct
  source 1..10: note = Seed: YRRLISMMGF
YSRLISMMGF

SEQ ID NO: 82057 - protein, 10 aa, synthetic construct
  source 1..10: note = Seed: YRRLISMMGF
YSRLISMMGI

SEQ ID NO: 82058 - protein, 10 aa, synthetic construct
  source 1..10: note = Seed: YRRLISMMGF
YSRLISMMGL

SEQ ID NO: 82059 - protein, 10 aa, synthetic construct
  source 1..10: note = Seed: YRRLISMMGF
YSRLISMMGM

SEQ ID NO: 82060 - protein, 9 aa, synthetic construct
  source 1..9: note = Seed: YFRLTLGVY
YSRLTLGVF

SEQ ID NO: 82061 - protein, 9 aa, synthetic construct
  source 1..9: note = Seed: YFRLTLGVY
YSRLTLGVM

SEQ ID NO: 82062 - protein, 9 aa, synthetic construct
  source 1..9: note = Seed: YFRLTLGVY
YSRLTLGVY

SEQ ID NO: 82063 - protein, 9 aa, synthetic construct
  source 1..9: note = Seed: YVRNLQHRL
YSRNLQHRF

SEQ ID NO: 82064 - protein, 10 aa, synthetic construct
  source 1..10: note = Seed: YVRNLQHRLY
YSRNLQHRLF

SEQ ID NO: 82065 - protein, 10 aa, synthetic construct
  source 1..10: note = Seed: YVRNLQHRLY
YSRNLQHRLW

SEQ ID NO: 82066 - protein, 10 aa, synthetic construct
  source 1..10: note = Seed: YVRNLQHRLY
YSRNLQHRLY

SEQ ID NO: 82067 - protein, 9 aa, synthetic construct
  source 1..9: note = Seed: YVRNLQHRL
YSRNLQHRM

SEQ ID NO: 82068 - protein, 9 aa, synthetic construct
  source 1..9: note = Seed: YVRNLQHRL
YSRNLQHRY

SEQ ID NO: 82069 - protein, 9 aa, synthetic construct
  source 1..9: note = Seed: YYRSLPGVF
YSRSLPGVF

SEQ ID NO: 82070 - protein, 9 aa, synthetic construct
  source 1..9: note = Seed: YYRSLPGVF
YSRSLPGVM

SEQ ID NO: 82071 - protein, 9 aa, synthetic construct
  source 1..9: note = Seed: YYRSLPGVF
YSRSLPGVY

SEQ ID NO: 82072 - protein, 9 aa, synthetic construct
  source 1..9: note = Seed: YYRYNLPTM
YSRYNLPTA

SEQ ID NO: 82073 - protein, 9 aa, synthetic construct
  source 1..9: note = Seed: YYRYNLPTM
YSRYNLPTF

SEQ ID NO: 82074 - protein, 9 aa, synthetic construct
  source 1..9: note = Seed: YYRYNLPTM
YSRYNLPTI

SEQ ID NO: 82075 - protein, 9 aa, synthetic construct
  source 1..9: note = Seed: YYRYNLPTM
YSRYNLPTK

SEQ ID NO: 82076 - protein, 9 aa, synthetic construct
  source 1..9: note = Seed: YYRYNLPTM
YSRYNLPTL

SEQ ID NO: 82077 - protein, 9 aa, synthetic construct
  source 1..9: note = Seed: YYRYNLPTM
YSRYNLPTM

SEQ ID NO: 82078 - protein, 10 aa, synthetic construct
  source 1..10: note = Seed: YYRYNLPTMC
YSRYNLPTMF

SEQ ID NO: 82079 - protein, 10 aa, synthetic construct
  source 1..10: note = Seed: YYRYNLPTMC
YSRYNLPTMI

SEQ ID NO: 82080 - protein, 10 aa, synthetic construct
  source 1..10: note = Seed: YYRYNLPTMC
YSRYNLPTML

SEQ ID NO: 82081 - protein, 10 aa, synthetic construct
  source 1..10: note = Seed: YYRYNLPTMC
YSRYNLPTMM

SEQ ID NO: 82082 - protein, 10 aa, synthetic construct
  source 1..10: note = Seed: YYRYNLPTMC
YSRYNLPTMV

SEQ ID NO: 82083 - protein, 9 aa, synthetic construct
  source 1..9: note = Seed: YYRYNLPTM
YSRYNLPTV

SEQ ID NO: 82084 - protein, 9 aa, synthetic construct
  source 1..9: note = Seed: YYRYNLPTM
YSRYNLPTY

SEQ ID NO: 82085 - protein, 9 aa, synthetic construct
  source 1..9: note = Seed: YSRYRIGNY
YSRYRIGNA

SEQ ID NO: 82086 - protein, 9 aa, synthetic construct
  source 1..9: note = Seed: YSRYRIGNY
YSRYRIGNF

SEQ ID NO: 82087 - protein, 9 aa, synthetic construct
  source 1..9: note = Seed: YSRYRIGNY
YSRYRIGNK

SEQ ID NO: 82088 - protein, 9 aa, synthetic construct
  source 1..9: note = Seed: YSRYRIGNY
YSRYRIGNW

SEQ ID NO: 82089 - protein, 10 aa, synthetic construct
  source 1..10: note = Seed: YSRYRIGNYK
YSRYRIGNYF

SEQ ID NO: 82090 - protein, 11 aa, synthetic construct
  source 1..11: note = Seed: YSRYRIGNYKL
YSRYRIGNYKF

SEQ ID NO: 82091 - protein, 10 aa, synthetic construct
  source 1..10: note = Seed: YSRYRIGNYK
YSRYRIGNYL

SEQ ID NO: 82092 - protein, 10 aa, synthetic construct
  source 1..10: note = Seed: YSRYRIGNYK
YSRYRIGNYM

SEQ ID NO: 82093 - protein, 10 aa, synthetic construct
  source 1..10: note = Seed: YSRYRIGNYK
YSRYRIGNYR

SEQ ID NO: 82094 - protein, 11 aa, synthetic construct
  source 1..11: note = Seed: YSSANNCTFEY
YSSANNCTFEW

SEQ ID NO: 82095 - protein, 9 aa, synthetic construct
  source 1..9: note = Seed: YSSANNCTF
YSSANNCTI

SEQ ID NO: 82096 - protein, 9 aa, synthetic construct
  source 1..9: note = Seed: YSSANNCTF
YSSANNCTL

SEQ ID NO: 82097 - protein, 9 aa, synthetic construct
  source 1..9: note = Seed: YSSANNCTF
YSSANNCTM

SEQ ID NO: 82098 - protein, 9 aa, synthetic construct
  source 1..9: note = Seed: YSSANNCTF
YSSANNCTV

SEQ ID NO: 82099 - protein, 9 aa, synthetic construct
  source 1..9: note = Seed: YSSANNCTF
YSSANNCTW

SEQ ID NO: 82100 - protein, 9 aa, synthetic construct
  source 1..9: note = Seed: YSSANNCTF
YSSANNCTY

SEQ ID NO: 82101 - protein, 9 aa, synthetic construct
  source 1..9: note = Seed: YNSASFSTF
YSSASFSTF

SEQ ID NO: 82102 - protein, 10 aa, synthetic construct
  source 1..10: note = Seed: YNSASFSTFK
YSSASFSTFK

SEQ ID NO: 82103 - protein, 10 aa, synthetic construct
  source 1..10: note = Seed: YNSASFSTFK
YSSASFSTFR

SEQ ID NO: 82104 - protein, 9 aa, synthetic construct
  source 1..9: note = Seed: YNSASFSTF
YSSASFSTH

SEQ ID NO: 82105 - protein, 9 aa, synthetic construct
  source 1..9: note = Seed: YNSASFSTF
YSSASFSTI

SEQ ID NO: 82106 - protein, 9 aa, synthetic construct
  source 1..9: note = Seed: YNSASFSTF
YSSASFSTL

SEQ ID NO: 82107 - protein, 9 aa, synthetic construct
  source 1..9: note = Seed: YNSASFSTF
YSSASFSTM

SEQ ID NO: 82108 - protein, 9 aa, synthetic construct
  source 1..9: note = Seed: YNSASFSTF
YSSASFSTV

SEQ ID NO: 82109 - protein, 9 aa, synthetic construct
  source 1..9: note = Seed: YNSASFSTF
YSSASFSTW

SEQ ID NO: 82110 - protein, 9 aa, synthetic construct
  source 1..9: note = Seed: YNSASFSTF
YSSASFSTY

SEQ ID NO: 82111 - protein, 9 aa, synthetic construct
  source 1..9: note = Seed: YASAVVLLI
YSSAVVLLA

SEQ ID NO: 82112 - protein, 9 aa, synthetic construct
  source 1..9: note = Seed: YASAVVLLI
YSSAVVLLF

SEQ ID NO: 82113 - protein, 9 aa, synthetic construct
  source 1..9: note = Seed: YASAVVLLI
YSSAVVLLI

SEQ ID NO: 82114 - protein, 10 aa, synthetic construct
  source 1..10: note = Seed: YASAVVLLIL
YSSAVVLLIF

SEQ ID NO: 82115 - protein, 10 aa, synthetic construct
  source 1..10: note = Seed: YASAVVLLIL
YSSAVVLLII

SEQ ID NO: 82116 - protein, 10 aa, synthetic construct
  source 1..10: note = Seed: YASAVVLLIL
YSSAVVLLIL

SEQ ID NO: 82117 - protein, 10 aa, synthetic construct
  source 1..10: note = Seed: YASAVVLLIL
YSSAVVLLIM

SEQ ID NO: 82118 - protein, 10 aa, synthetic construct
  source 1..10: note = Seed: YASAVVLLIL
YSSAVVLLIV

SEQ ID NO: 82119 - protein, 10 aa, synthetic construct
  source 1..10: note = Seed: YASAVVLLIL
YSSAVVLLIW

SEQ ID NO: 82120 - protein, 10 aa, synthetic construct
  source 1..10: note = Seed: YASAVVLLIL
YSSAVVLLIY

SEQ ID NO: 82121 - protein, 9 aa, synthetic construct
  source 1..9: note = Seed: YASAVVLLI
YSSAVVLLL

SEQ ID NO: 82122 - protein, 9 aa, synthetic construct
  source 1..9: note = Seed: YASAVVLLI
YSSAVVLLM

SEQ ID NO: 82123 - protein, 9 aa, synthetic construct
  source 1..9: note = Seed: YASAVVLLI
YSSAVVLLV

SEQ ID NO: 82124 - protein, 9 aa, synthetic construct
  source 1..9: note = Seed: YASAVVLLI
YSSAVVLLW

SEQ ID NO: 82125 - protein, 9 aa, synthetic construct
  source 1..9: note = Seed: YASAVVLLI
YSSAVVLLY

SEQ ID NO: 82126 - protein, 11 aa, synthetic construct
  source 1..11: note = Seed: YYSLLMPILTL
YSSLLMPILTV

SEQ ID NO: 82127 - protein, 11 aa, synthetic construct
  source 1..11: note = Seed: YRSLPGVFCGV
YSSLPGVFCGI

SEQ ID NO: 82128 - protein, 11 aa, synthetic construct
  source 1..11: note = Seed: YRSLPGVFCGV
YSSLPGVFCGV

SEQ ID NO: 82129 - protein, 10 aa, synthetic construct
  source 1..10: note = Seed: YESLRPDTRY
YSSLRPDTRF

SEQ ID NO: 82130 - protein, 10 aa, synthetic construct
  source 1..10: note = Seed: YESLRPDTRY
YSSLRPDTRW

SEQ ID NO: 82131 - protein, 8 aa, synthetic construct
  source 1..8: note = Seed: YTSNPTTF
YSSNPTTF

SEQ ID NO: 82132 - protein, 9 aa, synthetic construct
  source 1..9: note = Seed: YTSNPTTFH
YSSNPTTFF

SEQ ID NO: 82133 - protein, 10 aa, synthetic construct
  source 1..10: note = Seed: YTSNPTTFHL
YSSNPTTFHF

SEQ ID NO: 82134 - protein, 10 aa, synthetic construct
  source 1..10: note = Seed: YTSNPTTFHL
YSSNPTTFHM

SEQ ID NO: 82135 - protein, 10 aa, synthetic construct
  source 1..10: note = Seed: YTSNPTTFHL
YSSNPTTFHV

SEQ ID NO: 82136 - protein, 10 aa, synthetic construct
  source 1..10: note = Seed: YTSNPTTFHL
YSSNPTTFHW

SEQ ID NO: 82137 - protein, 10 aa, synthetic construct
  source 1..10: note = Seed: YTSNPTTFHL
YSSNPTTFHY

SEQ ID NO: 82138 - protein, 9 aa, synthetic construct
  source 1..9: note = Seed: YTSNPTTFH
YSSNPTTFI

SEQ ID NO: 82139 - protein, 9 aa, synthetic construct
  source 1..9: note = Seed: YTSNPTTFH
YSSNPTTFK

SEQ ID NO: 82140 - protein, 9 aa, synthetic construct
  source 1..9: note = Seed: YTSNPTTFH
YSSNPTTFL

SEQ ID NO: 82141 - protein, 9 aa, synthetic construct
  source 1..9: note = Seed: YTSNPTTFH
YSSNPTTFM

SEQ ID NO: 82142 - protein, 9 aa, synthetic construct
  source 1..9: note = Seed: YTSNPTTFH
YSSNPTTFR

SEQ ID NO: 82143 - protein, 9 aa, synthetic construct
  source 1..9: note = Seed: YTSNPTTFH
YSSNPTTFV

SEQ ID NO: 82144 - protein, 9 aa, synthetic construct
  source 1..9: note = Seed: YTSNPTTFH
YSSNPTTFY

SEQ ID NO: 82145 - protein, 8 aa, synthetic construct
  source 1..8: note = Seed: YTSNPTTF
YSSNPTTL

SEQ ID NO: 82146 - protein, 8 aa, synthetic construct
  source 1..8: note = Seed: YTSNPTTF
YSSNPTTM

SEQ ID NO: 82147 - protein, 8 aa, synthetic construct
  source 1..8: note = Seed: YTSNPTTF
YSSNPTTY

SEQ ID NO: 82148 - protein, 10 aa, synthetic construct
  source 1..10: note = Seed: YLTFYLTNDV
YSTFYLTNDV

SEQ ID NO: 82149 - protein, 9 aa, synthetic construct
  source 1..9: note = Seed: YITGGVVQL
YSTGGVVQF

SEQ ID NO: 82150 - protein, 9 aa, synthetic construct
  source 1..9: note = Seed: YITGGVVQL
YSTGGVVQI

SEQ ID NO: 82151 - protein, 9 aa, synthetic construct
  source 1..9: note = Seed: YITGGVVQL
YSTGGVVQL

SEQ ID NO: 82152 - protein, 9 aa, synthetic construct
  source 1..9: note = Seed: YITGGVVQL
YSTGGVVQM

SEQ ID NO: 82153 - protein, 9 aa, synthetic construct
  source 1..9: note = Seed: YITGGVVQL
YSTGGVVQV

SEQ ID NO: 82154 - protein, 9 aa, synthetic construct
  source 1..9: note = Seed: YITGGVVQL
YSTGGVVQY

SEQ ID NO: 82155 - protein, 9 aa, synthetic construct
  source 1..9: note = Seed: YLTNDVSFL
YSTNDVSFF

SEQ ID NO: 82156 - protein, 9 aa, synthetic construct
  source 1..9: note = Seed: YLTNDVSFL
YSTNDVSFL

SEQ ID NO: 82157 - protein, 10 aa, synthetic construct
  source 1..10: note = Seed: YLTNDVSFLA
YSTNDVSFLA

SEQ ID NO: 82158 - protein, 10 aa, synthetic construct
  source 1..10: note = Seed: YLTNDVSFLA
YSTNDVSFLI

SEQ ID NO: 82159 - protein, 10 aa, synthetic construct
  source 1..10: note = Seed: YLTNDVSFLA
YSTNDVSFLL

SEQ ID NO: 82160 - protein, 10 aa, synthetic construct
  source 1..10: note = Seed: YLTNDVSFLA
YSTNDVSFLM

SEQ ID NO: 82161 - protein, 10 aa, synthetic construct
  source 1..10: note = Seed: YLTNDVSFLA
YSTNDVSFLV

SEQ ID NO: 82162 - protein, 9 aa, synthetic construct
  source 1..9: note = Seed: YLTNDVSFL
YSTNDVSFM

SEQ ID NO: 82163 - protein, 9 aa, synthetic construct
  source 1..9: note = Seed: YLTNDVSFL
YSTNDVSFV

SEQ ID NO: 82164 - protein, 9 aa, synthetic construct
  source 1..9: note = Seed: YLTNDVSFL
YSTNDVSFY

SEQ ID NO: 82165 - protein, 9 aa, synthetic construct
  source 1..9: note = Seed: YFTSDYYQL
YSTSDYYQF

SEQ ID NO: 82166 - protein, 10 aa, synthetic construct
  source 1..10: note = Seed: YFTSDYYQLY
YSTSDYYQLF

SEQ ID NO: 82167 - protein, 10 aa, synthetic construct
  source 1..10: note = Seed: YFTSDYYQLY
YSTSDYYQLK

SEQ ID NO: 82168 - protein, 10 aa, synthetic construct
  source 1..10: note = Seed: YFTSDYYQLY
YSTSDYYQLR

SEQ ID NO: 82169 - protein, 10 aa, synthetic construct
  source 1..10: note = Seed: YFTSDYYQLY
YSTSDYYQLW

SEQ ID NO: 82170 - protein, 10 aa, synthetic construct
  source 1..10: note = Seed: YFTSDYYQLY
YSTSDYYQLY

SEQ ID NO: 82171 - protein, 11 aa, synthetic construct
  source 1..11: note = Seed: YFTSDYYQLYS
YSTSDYYQLYY

SEQ ID NO: 82172 - protein, 9 aa, synthetic construct
  source 1..9: note = Seed: YYTSNPTTF
YSTSNPTTF

SEQ ID NO: 82173 - protein, 11 aa, synthetic construct
  source 1..11: note = Seed: YYTSNPTTFHL
YSTSNPTTFHF

SEQ ID NO: 82174 - protein, 11 aa, synthetic construct
  source 1..11: note = Seed: YYTSNPTTFHL
YSTSNPTTFHW

SEQ ID NO: 82175 - protein, 11 aa, synthetic construct
  source 1..11: note = Seed: YYTSNPTTFHL
YSTSNPTTFHY

SEQ ID NO: 82176 - protein, 9 aa, synthetic construct
  source 1..9: note = Seed: YYTSNPTTF
YSTSNPTTI

SEQ ID NO: 82177 - protein, 9 aa, synthetic construct
  source 1..9: note = Seed: YYTSNPTTF
YSTSNPTTL

SEQ ID NO: 82178 - protein, 9 aa, synthetic construct
  source 1..9: note = Seed: YYTSNPTTF
YSTSNPTTM

SEQ ID NO: 82179 - protein, 9 aa, synthetic construct
  source 1..9: note = Seed: YYTSNPTTF
YSTSNPTTV

SEQ ID NO: 82180 - protein, 9 aa, synthetic construct
  source 1..9: note = Seed: YYTSNPTTF
YSTSNPTTY

SEQ ID NO: 82181 - protein, 10 aa, synthetic construct
  source 1..10: note = Seed: YTTTIKPVTY
YSTTIKPVTF

SEQ ID NO: 82182 - protein, 10 aa, synthetic construct
  source 1..10: note = Seed: YTTTIKPVTY
YSTTIKPVTW

SEQ ID NO: 82183 - protein, 10 aa, synthetic construct
  source 1..10: note = Seed: YTTTIKPVTY
YSTTIKPVTY

SEQ ID NO: 82184 - protein, 11 aa, synthetic construct
  source 1..11: note = Seed: YTTTIKPVTYK
YSTTIKPVTYR

SEQ ID NO: 82185 - protein, 9 aa, synthetic construct
  source 1..9: note = Seed: YIVDSVTVK
YSVDSVTVR

SEQ ID NO: 82186 - protein, 9 aa, synthetic construct
  source 1..9: note = Seed: YTVEEAKTV
YSVEEAKTF

SEQ ID NO: 82187 - protein, 9 aa, synthetic construct
  source 1..9: note = Seed: YTVEEAKTV
YSVEEAKTL

SEQ ID NO: 82188 - protein, 9 aa, synthetic construct
  source 1..9: note = Seed: YTVEEAKTV
YSVEEAKTM

SEQ ID NO: 82189 - protein, 9 aa, synthetic construct
  source 1..9: note = Seed: YTVEEAKTV
YSVEEAKTV

SEQ ID NO: 82190 - protein, 10 aa, synthetic construct
  source 1..10: note = Seed: YTVEEAKTVL
YSVEEAKTVF

SEQ ID NO: 82191 - protein, 10 aa, synthetic construct
  source 1..10: note = Seed: YTVEEAKTVL
YSVEEAKTVW

SEQ ID NO: 82192 - protein, 10 aa, synthetic construct
  source 1..10: note = Seed: YTVEEAKTVL
YSVEEAKTVY

SEQ ID NO: 82193 - protein, 9 aa, synthetic construct
  source 1..9: note = Seed: YTVEEAKTV
YSVEEAKTY

SEQ ID NO: 82194 - protein, 9 aa, synthetic construct
  source 1..9: note = Seed: YTVELGTEV
YSVELGTEF

SEQ ID NO: 82195 - protein, 9 aa, synthetic construct
  source 1..9: note = Seed: YTVELGTEV
YSVELGTEI

SEQ ID NO: 82196 - protein, 9 aa, synthetic construct
  source 1..9: note = Seed: YTVELGTEV
YSVELGTEL

SEQ ID NO: 82197 - protein, 9 aa, synthetic construct
  source 1..9: note = Seed: YTVELGTEV
YSVELGTEM

SEQ ID NO: 82198 - protein, 9 aa, synthetic construct
  source 1..9: note = Seed: YTVELGTEV
YSVELGTEV

SEQ ID NO: 82199 - protein, 9 aa, synthetic construct
  source 1..9: note = Seed: YTVELGTEV
YSVELGTEW

SEQ ID NO: 82200 - protein, 9 aa, synthetic construct
  source 1..9: note = Seed: YTVELGTEV
YSVELGTEY

SEQ ID NO: 82201 - protein, 9 aa, synthetic construct
  source 1..9: note = Seed: YYVGYLQPR
YSVGYLQPK

SEQ ID NO: 82202 - protein, 9 aa, synthetic construct
  source 1..9: note = Seed: YYVGYLQPR
YSVGYLQPM

SEQ ID NO: 82203 - protein, 9 aa, synthetic construct
  source 1..9: note = Seed: YYVGYLQPR
YSVGYLQPR

SEQ ID NO: 82204 - protein, 9 aa, synthetic construct
  source 1..9: note = Seed: YYVGYLQPR
YSVGYLQPY

SEQ ID NO: 82205 - protein, 9 aa, synthetic construct
  source 1..9: note = Seed: YFVKIGPER
YSVKIGPER

SEQ ID NO: 82206 - protein, 9 aa, synthetic construct
  source 1..9: note = Seed: YQVNGYPNM
YSVNGYPNF

SEQ ID NO: 82207 - protein, 9 aa, synthetic construct
  source 1..9: note = Seed: YQVNGYPNM
YSVNGYPNI

SEQ ID NO: 82208 - protein, 9 aa, synthetic construct
  source 1..9: note = Seed: YQVNGYPNM
YSVNGYPNL

SEQ ID NO: 82209 - protein, 9 aa, synthetic construct
  source 1..9: note = Seed: YQVNGYPNM
YSVNGYPNM

SEQ ID NO: 82210 - protein, 9 aa, synthetic construct
  source 1..9: note = Seed: YQVNGYPNM
YSVNGYPNV

SEQ ID NO: 82211 - protein, 9 aa, synthetic construct
  source 1..9: note = Seed: YQVNGYPNM
YSVNGYPNY

SEQ ID NO: 82212 - protein, 8 aa, synthetic construct
  source 1..8: note = Seed: YLVSTQEF
YSVSTQEF

SEQ ID NO: 82213 - protein, 9 aa, synthetic construct
  source 1..9: note = Seed: YLVSTQEFR
YSVSTQEFK

SEQ ID NO: 82214 - protein, 9 aa, synthetic construct
  source 1..9: note = Seed: YLVSTQEFR
YSVSTQEFR

SEQ ID NO: 82215 - protein, 10 aa, synthetic construct
  source 1..10: note = Seed: YLVSTQEFRY
YSVSTQEFRY

SEQ ID NO: 82216 - protein, 8 aa, synthetic construct
  source 1..8: note = Seed: YLVSTQEF
YSVSTQEY

SEQ ID NO: 82217 - protein, 9 aa, synthetic construct
  source 1..9: note = Seed: YNVTQAFGR
YSVTQAFGK

SEQ ID NO: 82218 - protein, 9 aa, synthetic construct
  source 1..9: note = Seed: YNVTQAFGR
YSVTQAFGR

SEQ ID NO: 82219 - protein, 10 aa, synthetic construct
  source 1..10: note = Seed: YNVTQAFGRR
YSVTQAFGRR

SEQ ID NO: 82220 - protein, 9 aa, synthetic construct
  source 1..9: note = Seed: YFVVKRHTF
YSVVKRHTF

SEQ ID NO: 82221 - protein, 9 aa, synthetic construct
  source 1..9: note = Seed: YFVVKRHTF
YSVVKRHTL

SEQ ID NO: 82222 - protein, 9 aa, synthetic construct
  source 1..9: note = Seed: YFVVKRHTF
YSVVKRHTM

SEQ ID NO: 82223 - protein, 9 aa, synthetic construct
  source 1..9: note = Seed: YFVVKRHTF
YSVVKRHTY

SEQ ID NO: 82224 - protein, 10 aa, synthetic construct
  source 1..10: note = Seed: YRVVVLSFEL
YSVVVLSFEV

SEQ ID NO: 82225 - protein, 10 aa, synthetic construct
  source 1..10: note = Seed: YYVWKSYVHV
YSVWKSYVHV

SEQ ID NO: 82226 - protein, 9 aa, synthetic construct
  source 1..9: note = Seed: YYVWKSYVH
YSVWKSYVY

SEQ ID NO: 82227 - protein, 9 aa, synthetic construct
  source 1..9: note = Seed: YVWKSYVHV
YSWKSYVHV

SEQ ID NO: 82228 - protein, 10 aa, synthetic construct
  source 1..10: note = Seed: YVWKSYVHVV
YSWKSYVHVV

SEQ ID NO: 82229 - protein, 9 aa, synthetic construct
  source 1..9: note = Seed: YVWKSYVHV
YSWKSYVHY

SEQ ID NO: 82230 - protein, 10 aa, synthetic construct
  source 1..10: note = Seed: YVYANGGKGF
YSYANGGKGF

SEQ ID NO: 82231 - protein, 10 aa, synthetic construct
  source 1..10: note = Seed: YVYANGGKGF
YSYANGGKGM

SEQ ID NO: 82232 - protein, 10 aa, synthetic construct
  source 1..10: note = Seed: YVYANGGKGF
YSYANGGKGW

SEQ ID NO: 82233 - protein, 10 aa, synthetic construct
  source 1..10: note = Seed: YVYANGGKGF
YSYANGGKGY

SEQ ID NO: 82234 - protein, 11 aa, synthetic construct
  source 1..11: note = Seed: YLYFIKGLNNL
YSYFIKGLNNF

SEQ ID NO: 82235 - protein, 9 aa, synthetic construct
  source 1..9: note = Seed: YNYKLPDDF
YSYKLPDDF

SEQ ID NO: 82236 - protein, 9 aa, synthetic construct
  source 1..9: note = Seed: YNYKLPDDF
YSYKLPDDY

SEQ ID NO: 82237 - protein, 9 aa, synthetic construct
  source 1..9: note = Seed: YLYLTFYLT
YSYLTFYLA

SEQ ID NO: 82238 - protein, 9 aa, synthetic construct
  source 1..9: note = Seed: YLYLTFYLT
YSYLTFYLI

SEQ ID NO: 82239 - protein, 9 aa, synthetic construct
  source 1..9: note = Seed: YLYLTFYLT
YSYLTFYLL

SEQ ID NO: 82240 - protein, 9 aa, synthetic construct
  source 1..9: note = Seed: YLYLTFYLT
YSYLTFYLV

SEQ ID NO: 82241 - protein, 10 aa, synthetic construct
  source 1..10: note = Seed: YDYLVSTQEF
YSYLVSTQEF

SEQ ID NO: 82242 - protein, 11 aa, synthetic construct
  source 1..11: note = Seed: YDYLVSTQEFR
YSYLVSTQEFF

SEQ ID NO: 82243 - protein, 11 aa, synthetic construct
  source 1..11: note = Seed: YDYLVSTQEFR
YSYLVSTQEFR

SEQ ID NO: 82244 - protein, 11 aa, synthetic construct
  source 1..11: note = Seed: YDYLVSTQEFR
YSYLVSTQEFW

SEQ ID NO: 82245 - protein, 10 aa, synthetic construct
  source 1..10: note = Seed: YDYLVSTQEF
YSYLVSTQEI

SEQ ID NO: 82246 - protein, 10 aa, synthetic construct
  source 1..10: note = Seed: YDYLVSTQEF
YSYLVSTQEL

SEQ ID NO: 82247 - protein, 10 aa, synthetic construct
  source 1..10: note = Seed: YDYLVSTQEF
YSYLVSTQEM

SEQ ID NO: 82248 - protein, 10 aa, synthetic construct
  source 1..10: note = Seed: YDYLVSTQEF
YSYLVSTQEW

SEQ ID NO: 82249 - protein, 10 aa, synthetic construct
  source 1..10: note = Seed: YDYLVSTQEF
YSYLVSTQEY

SEQ ID NO: 82250 - protein, 9 aa, synthetic construct
  source 1..9: note = Seed: YNYLYRLFR
YSYLYRLFK

SEQ ID NO: 82251 - protein, 9 aa, synthetic construct
  source 1..9: note = Seed: YNYLYRLFR
YSYLYRLFR

SEQ ID NO: 82252 - protein, 10 aa, synthetic construct
  source 1..10: note = Seed: YNYLYRLFRK
YSYLYRLFRK

SEQ ID NO: 82253 - protein, 10 aa, synthetic construct
  source 1..10: note = Seed: YNYLYRLFRK
YSYLYRLFRR

SEQ ID NO: 82254 - protein, 8 aa, synthetic construct
  source 1..8: note = Seed: YRYNLPTM
YSYNLPTF

SEQ ID NO: 82255 - protein, 8 aa, synthetic construct
  source 1..8: note = Seed: YRYNLPTM
YSYNLPTY

SEQ ID NO: 82256 - protein, 10 aa, synthetic construct
  source 1..10: note = Seed: YVYNPFMIDV
YSYNPFMIDM

SEQ ID NO: 82257 - protein, 10 aa, synthetic construct
  source 1..10: note = Seed: YVYNPFMIDV
YSYNPFMIDV

SEQ ID NO: 82258 - protein, 10 aa, synthetic construct
  source 1..10: note = Seed: YVYNPFMIDV
YSYNPFMIDY

SEQ ID NO: 82259 - protein, 11 aa, synthetic construct
  source 1..11: note = Seed: YDYYRYNLPTM
YSYYRYNLPTF

SEQ ID NO: 82260 - protein, 11 aa, synthetic construct
  source 1..11: note = Seed: YDYYRYNLPTM
YSYYRYNLPTM

SEQ ID NO: 82261 - protein, 11 aa, synthetic construct
  source 1..11: note = Seed: YDYYRYNLPTM
YSYYRYNLPTW

SEQ ID NO: 82262 - protein, 10 aa, synthetic construct
  source 1..10: note = Seed: YGANKDGIIW
YTANKDGIIF

SEQ ID NO: 82263 - protein, 10 aa, synthetic construct
  source 1..10: note = Seed: YGANKDGIIW
YTANKDGIIW

SEQ ID NO: 82264 - protein, 9 aa, synthetic construct
  source 1..9: note = Seed: YPANSIVCR
YTANSIVCK

SEQ ID NO: 82265 - protein, 9 aa, synthetic construct
  source 1..9: note = Seed: YPANSIVCR
YTANSIVCR

SEQ ID NO: 82266 - protein, 10 aa, synthetic construct
  source 1..10: note = Seed: YPANSIVCRF
YTANSIVCRF

SEQ ID NO: 82267 - protein, 10 aa, synthetic construct
  source 1..10: note = Seed: YPANSIVCRF
YTANSIVCRW

SEQ ID NO: 82268 - protein, 10 aa, synthetic construct
  source 1..10: note = Seed: YPANSIVCRF
YTANSIVCRY

SEQ ID NO: 82269 - protein, 9 aa, synthetic construct
  source 1..9: note = Seed: YIATNGPLK
YTATNGPLK

SEQ ID NO: 82270 - protein, 9 aa, synthetic construct
  source 1..9: note = Seed: YIATNGPLK
YTATNGPLR

SEQ ID NO: 82271 - protein, 9 aa, synthetic construct
  source 1..9: note = Seed: YAAVINGDR
YTAVINGDK

SEQ ID NO: 82272 - protein, 9 aa, synthetic construct
  source 1..9: note = Seed: YAAVINGDR
YTAVINGDR

SEQ ID NO: 82273 - protein, 10 aa, synthetic construct
  source 1..10: note = Seed: YAAVINGDRW
YTAVINGDRW

SEQ ID NO: 82274 - protein, 10 aa, synthetic construct
  source 1..10: note = Seed: YFCTCYFGLF
YTCTCYFGLY

SEQ ID NO: 82275 - protein, 10 aa, synthetic construct
  source 1..10: note = Seed: YVDTPNNTDF
YTDTPNNTDF

SEQ ID NO: 82276 - protein, 10 aa, synthetic construct
  source 1..10: note = Seed: YVDTPNNTDF
YTDTPNNTDL

SEQ ID NO: 82277 - protein, 10 aa, synthetic construct
  source 1..10: note = Seed: YVDTPNNTDF
YTDTPNNTDM

SEQ ID NO: 82278 - protein, 10 aa, synthetic construct
  source 1..10: note = Seed: YKENSYTTTI
YTENSYTTTA

SEQ ID NO: 82279 - protein, 10 aa, synthetic construct
  source 1..10: note = Seed: YKENSYTTTI
YTENSYTTTF

SEQ ID NO: 82280 - protein, 10 aa, synthetic construct
  source 1..10: note = Seed: YKENSYTTTI
YTENSYTTTL

SEQ ID NO: 82281 - protein, 10 aa, synthetic construct
  source 1..10: note = Seed: YKENSYTTTI
YTENSYTTTM

SEQ ID NO: 82282 - protein, 10 aa, synthetic construct
  source 1..10: note = Seed: YKENSYTTTI
YTENSYTTTY

SEQ ID NO: 82283 - protein, 9 aa, synthetic construct
  source 1..9: note = Seed: YVFCTVNAL
YTFCTVNAA

SEQ ID NO: 82284 - protein, 9 aa, synthetic construct
  source 1..9: note = Seed: YVFCTVNAL
YTFCTVNAF

SEQ ID NO: 82285 - protein, 9 aa, synthetic construct
  source 1..9: note = Seed: YVFCTVNAL
YTFCTVNAI

SEQ ID NO: 82286 - protein, 9 aa, synthetic construct
  source 1..9: note = Seed: YVFCTVNAL
YTFCTVNAL

SEQ ID NO: 82287 - protein, 9 aa, synthetic construct
  source 1..9: note = Seed: YVFCTVNAL
YTFCTVNAR

SEQ ID NO: 82288 - protein, 9 aa, synthetic construct
  source 1..9: note = Seed: YVFCTVNAL
YTFCTVNAT

SEQ ID NO: 82289 - protein, 9 aa, synthetic construct
  source 1..9: note = Seed: YVFCTVNAL
YTFCTVNAV

SEQ ID NO: 82290 - protein, 9 aa, synthetic construct
  source 1..9: note = Seed: YVFCTVNAL
YTFCTVNAY

SEQ ID NO: 82291 - protein, 8 aa, synthetic construct
  source 1..8: note = Seed: YIFFASFY
YTFFASFY

SEQ ID NO: 82292 - protein, 9 aa, synthetic construct
  source 1..9: note = Seed: YIFFASFYY
YTFFASFYA

SEQ ID NO: 82293 - protein, 9 aa, synthetic construct
  source 1..9: note = Seed: YIFFASFYY
YTFFASFYE

SEQ ID NO: 82294 - protein, 9 aa, synthetic construct
  source 1..9: note = Seed: YIFFASFYY
YTFFASFYF

SEQ ID NO: 82295 - protein, 9 aa, synthetic construct
  source 1..9: note = Seed: YIFFASFYY
YTFFASFYH

SEQ ID NO: 82296 - protein, 9 aa, synthetic construct
  source 1..9: note = Seed: YIFFASFYY
YTFFASFYI

SEQ ID NO: 82297 - protein, 9 aa, synthetic construct
  source 1..9: note = Seed: YIFFASFYY
YTFFASFYK

SEQ ID NO: 82298 - protein, 9 aa, synthetic construct
  source 1..9: note = Seed: YIFFASFYY
YTFFASFYL

SEQ ID NO: 82299 - protein, 9 aa, synthetic construct
  source 1..9: note = Seed: YIFFASFYY
YTFFASFYM

SEQ ID NO: 82300 - protein, 9 aa, synthetic construct
  source 1..9: note = Seed: YIFFASFYY
YTFFASFYQ

SEQ ID NO: 82301 - protein, 9 aa, synthetic construct
  source 1..9: note = Seed: YIFFASFYY
YTFFASFYR

SEQ ID NO: 82302 - protein, 9 aa, synthetic construct
  source 1..9: note = Seed: YIFFASFYY
YTFFASFYS

SEQ ID NO: 82303 - protein, 9 aa, synthetic construct
  source 1..9: note = Seed: YIFFASFYY
YTFFASFYT

SEQ ID NO: 82304 - protein, 9 aa, synthetic construct
  source 1..9: note = Seed: YIFFASFYY
YTFFASFYV

SEQ ID NO: 82305 - protein, 9 aa, synthetic construct
  source 1..9: note = Seed: YIFFASFYY
YTFFASFYW

SEQ ID NO: 82306 - protein, 9 aa, synthetic construct
  source 1..9: note = Seed: YIFFASFYY
YTFFASFYY

SEQ ID NO: 82307 - protein, 10 aa, synthetic construct
  source 1..10: note = Seed: YIFFASFYYV
YTFFASFYYA

SEQ ID NO: 82308 - protein, 10 aa, synthetic construct
  source 1..10: note = Seed: YIFFASFYYV
YTFFASFYYC

SEQ ID NO: 82309 - protein, 10 aa, synthetic construct
  source 1..10: note = Seed: YIFFASFYYV
YTFFASFYYD

SEQ ID NO: 82310 - protein, 10 aa, synthetic construct
  source 1..10: note = Seed: YIFFASFYYV
YTFFASFYYE

SEQ ID NO: 82311 - protein, 10 aa, synthetic construct
  source 1..10: note = Seed: YIFFASFYYV
YTFFASFYYF

SEQ ID NO: 82312 - protein, 10 aa, synthetic construct
  source 1..10: note = Seed: YIFFASFYYV
YTFFASFYYG

SEQ ID NO: 82313 - protein, 10 aa, synthetic construct
  source 1..10: note = Seed: YIFFASFYYV
YTFFASFYYH

SEQ ID NO: 82314 - protein, 10 aa, synthetic construct
  source 1..10: note = Seed: YIFFASFYYV
YTFFASFYYI

SEQ ID NO: 82315 - protein, 10 aa, synthetic construct
  source 1..10: note = Seed: YIFFASFYYV
YTFFASFYYK

SEQ ID NO: 82316 - protein, 10 aa, synthetic construct
  source 1..10: note = Seed: YIFFASFYYV
YTFFASFYYL

SEQ ID NO: 82317 - protein, 10 aa, synthetic construct
  source 1..10: note = Seed: YIFFASFYYV
YTFFASFYYM

SEQ ID NO: 82318 - protein, 10 aa, synthetic construct
  source 1..10: note = Seed: YIFFASFYYV
YTFFASFYYN

SEQ ID NO: 82319 - protein, 10 aa, synthetic construct
  source 1..10: note = Seed: YIFFASFYYV
YTFFASFYYP

SEQ ID NO: 82320 - protein, 10 aa, synthetic construct
  source 1..10: note = Seed: YIFFASFYYV
YTFFASFYYQ

SEQ ID NO: 82321 - protein, 10 aa, synthetic construct
  source 1..10: note = Seed: YIFFASFYYV
YTFFASFYYR

SEQ ID NO: 82322 - protein, 10 aa, synthetic construct
  source 1..10: note = Seed: YIFFASFYYV
YTFFASFYYS

SEQ ID NO: 82323 - protein, 10 aa, synthetic construct
  source 1..10: note = Seed: YIFFASFYYV
YTFFASFYYT

SEQ ID NO: 82324 - protein, 10 aa, synthetic construct
  source 1..10: note = Seed: YIFFASFYYV
YTFFASFYYV

SEQ ID NO: 82325 - protein, 11 aa, synthetic construct
  source 1..11: note = Seed: YIFFASFYYVW
YTFFASFYYVI

SEQ ID NO: 82326 - protein, 11 aa, synthetic construct
  source 1..11: note = Seed: YIFFASFYYVW
YTFFASFYYVL

SEQ ID NO: 82327 - protein, 11 aa, synthetic construct
  source 1..11: note = Seed: YIFFASFYYVW
YTFFASFYYVV

SEQ ID NO: 82328 - protein, 11 aa, synthetic construct
  source 1..11: note = Seed: YIFFASFYYVW
YTFFASFYYVW

SEQ ID NO: 82329 - protein, 11 aa, synthetic construct
  source 1..11: note = Seed: YIFFASFYYVW
YTFFASFYYVY

SEQ ID NO: 82330 - protein, 10 aa, synthetic construct
  source 1..10: note = Seed: YIFFASFYYV
YTFFASFYYW

SEQ ID NO: 82331 - protein, 10 aa, synthetic construct
  source 1..10: note = Seed: YIFFASFYYV
YTFFASFYYY

SEQ ID NO: 82332 - protein, 9 aa, synthetic construct
  source 1..9: note = Seed: YWFFSNYLK
YTFFSNYLF

SEQ ID NO: 82333 - protein, 9 aa, synthetic construct
  source 1..9: note = Seed: YWFFSNYLK
YTFFSNYLH

SEQ ID NO: 82334 - protein, 9 aa, synthetic construct
  source 1..9: note = Seed: YWFFSNYLK
YTFFSNYLK

SEQ ID NO: 82335 - protein, 10 aa, synthetic construct
  source 1..10: note = Seed: YWFFSNYLKR
YTFFSNYLKA

SEQ ID NO: 82336 - protein, 10 aa, synthetic construct
  source 1..10: note = Seed: YWFFSNYLKR
YTFFSNYLKC

SEQ ID NO: 82337 - protein, 10 aa, synthetic construct
  source 1..10: note = Seed: YWFFSNYLKR
YTFFSNYLKD

SEQ ID NO: 82338 - protein, 10 aa, synthetic construct
  source 1..10: note = Seed: YWFFSNYLKR
YTFFSNYLKE

SEQ ID NO: 82339 - protein, 10 aa, synthetic construct
  source 1..10: note = Seed: YWFFSNYLKR
YTFFSNYLKF

SEQ ID NO: 82340 - protein, 10 aa, synthetic construct
  source 1..10: note = Seed: YWFFSNYLKR
YTFFSNYLKG

SEQ ID NO: 82341 - protein, 10 aa, synthetic construct
  source 1..10: note = Seed: YWFFSNYLKR
YTFFSNYLKH

SEQ ID NO: 82342 - protein, 10 aa, synthetic construct
  source 1..10: note = Seed: YWFFSNYLKR
YTFFSNYLKI

SEQ ID NO: 82343 - protein, 10 aa, synthetic construct
  source 1..10: note = Seed: YWFFSNYLKR
YTFFSNYLKK

SEQ ID NO: 82344 - protein, 10 aa, synthetic construct
  source 1..10: note = Seed: YWFFSNYLKR
YTFFSNYLKL

SEQ ID NO: 82345 - protein, 10 aa, synthetic construct
  source 1..10: note = Seed: YWFFSNYLKR
YTFFSNYLKM

SEQ ID NO: 82346 - protein, 10 aa, synthetic construct
  source 1..10: note = Seed: YWFFSNYLKR
YTFFSNYLKN

SEQ ID NO: 82347 - protein, 10 aa, synthetic construct
  source 1..10: note = Seed: YWFFSNYLKR
YTFFSNYLKP

SEQ ID NO: 82348 - protein, 10 aa, synthetic construct
  source 1..10: note = Seed: YWFFSNYLKR
YTFFSNYLKQ

SEQ ID NO: 82349 - protein, 10 aa, synthetic construct
  source 1..10: note = Seed: YWFFSNYLKR
YTFFSNYLKR

SEQ ID NO: 82350 - protein, 11 aa, synthetic construct
  source 1..11: note = Seed: YWFFSNYLKRR
YTFFSNYLKRR

SEQ ID NO: 82351 - protein, 10 aa, synthetic construct
  source 1..10: note = Seed: YWFFSNYLKR
YTFFSNYLKS

SEQ ID NO: 82352 - protein, 10 aa, synthetic construct
  source 1..10: note = Seed: YWFFSNYLKR
YTFFSNYLKT

SEQ ID NO: 82353 - protein, 10 aa, synthetic construct
  source 1..10: note = Seed: YWFFSNYLKR
YTFFSNYLKV

SEQ ID NO: 82354 - protein, 10 aa, synthetic construct
  source 1..10: note = Seed: YWFFSNYLKR
YTFFSNYLKW

SEQ ID NO: 82355 - protein, 10 aa, synthetic construct
  source 1..10: note = Seed: YWFFSNYLKR
YTFFSNYLKY

SEQ ID NO: 82356 - protein, 9 aa, synthetic construct
  source 1..9: note = Seed: YWFFSNYLK
YTFFSNYLM

SEQ ID NO: 82357 - protein, 9 aa, synthetic construct
  source 1..9: note = Seed: YWFFSNYLK
YTFFSNYLQ

SEQ ID NO: 82358 - protein, 9 aa, synthetic construct
  source 1..9: note = Seed: YWFFSNYLK
YTFFSNYLR

SEQ ID NO: 82359 - protein, 9 aa, synthetic construct
  source 1..9: note = Seed: YWFFSNYLK
YTFFSNYLY

SEQ ID NO: 82360 - protein, 8 aa, synthetic construct
  source 1..8: note = Seed: YSFLPGVY
YTFLPGVF

SEQ ID NO: 82361 - protein, 8 aa, synthetic construct
  source 1..8: note = Seed: YSFLPGVY
YTFLPGVM

SEQ ID NO: 82362 - protein, 8 aa, synthetic construct
  source 1..8: note = Seed: YSFLPGVY
YTFLPGVW

SEQ ID NO: 82363 - protein, 8 aa, synthetic construct
  source 1..8: note = Seed: YSFLPGVY
YTFLPGVY

SEQ ID NO: 82364 - protein, 9 aa, synthetic construct
  source 1..9: note = Seed: YSFLPGVYS
YTFLPGVYA

SEQ ID NO: 82365 - protein, 9 aa, synthetic construct
  source 1..9: note = Seed: YSFLPGVYS
YTFLPGVYI

SEQ ID NO: 82366 - protein, 9 aa, synthetic construct
  source 1..9: note = Seed: YSFLPGVYS
YTFLPGVYL

SEQ ID NO: 82367 - protein, 9 aa, synthetic construct
  source 1..9: note = Seed: YSFLPGVYS
YTFLPGVYM

SEQ ID NO: 82368 - protein, 10 aa, synthetic construct
  source 1..10: note = Seed: YSFLPGVYSV
YTFLPGVYSA

SEQ ID NO: 82369 - protein, 10 aa, synthetic construct
  source 1..10: note = Seed: YSFLPGVYSV
YTFLPGVYSF

SEQ ID NO: 82370 - protein, 10 aa, synthetic construct
  source 1..10: note = Seed: YSFLPGVYSV
YTFLPGVYSI

SEQ ID NO: 82371 - protein, 10 aa, synthetic construct
  source 1..10: note = Seed: YSFLPGVYSV
YTFLPGVYSL

SEQ ID NO: 82372 - protein, 10 aa, synthetic construct
  source 1..10: note = Seed: YSFLPGVYSV
YTFLPGVYSM

SEQ ID NO: 82373 - protein, 10 aa, synthetic construct
  source 1..10: note = Seed: YSFLPGVYSV
YTFLPGVYSV

SEQ ID NO: 82374 - protein, 10 aa, synthetic construct
  source 1..10: note = Seed: YSFLPGVYSV
YTFLPGVYSW

SEQ ID NO: 82375 - protein, 10 aa, synthetic construct
  source 1..10: note = Seed: YSFLPGVYSV
YTFLPGVYSY

SEQ ID NO: 82376 - protein, 9 aa, synthetic construct
  source 1..9: note = Seed: YSFLPGVYS
YTFLPGVYT

SEQ ID NO: 82377 - protein, 9 aa, synthetic construct
  source 1..9: note = Seed: YSFLPGVYS
YTFLPGVYV

SEQ ID NO: 82378 - protein, 8 aa, synthetic construct
  source 1..8: note = Seed: YYFMRFRR
YTFMRFRR

SEQ ID NO: 82379 - protein, 9 aa, synthetic construct
  source 1..9: note = Seed: YGFQPTNGV
YTFQPTNGA

SEQ ID NO: 82380 - protein, 9 aa, synthetic construct
  source 1..9: note = Seed: YGFQPTNGV
YTFQPTNGF

SEQ ID NO: 82381 - protein, 9 aa, synthetic construct
  source 1..9: note = Seed: YGFQPTNGV
YTFQPTNGI

SEQ ID NO: 82382 - protein, 9 aa, synthetic construct
  source 1..9: note = Seed: YGFQPTNGV
YTFQPTNGL

SEQ ID NO: 82383 - protein, 9 aa, synthetic construct
  source 1..9: note = Seed: YGFQPTNGV
YTFQPTNGM

SEQ ID NO: 82384 - protein, 9 aa, synthetic construct
  source 1..9: note = Seed: YGFQPTNGV
YTFQPTNGT

SEQ ID NO: 82385 - protein, 9 aa, synthetic construct
  source 1..9: note = Seed: YGFQPTNGV
YTFQPTNGV

SEQ ID NO: 82386 - protein, 9 aa, synthetic construct
  source 1..9: note = Seed: YGFQPTNGV
YTFQPTNGY

SEQ ID NO: 82387 - protein, 10 aa, synthetic construct
  source 1..10: note = Seed: YHFRELGVVH
YTFRELGVVF

SEQ ID NO: 82388 - protein, 10 aa, synthetic construct
  source 1..10: note = Seed: YHFRELGVVH
YTFRELGVVY

SEQ ID NO: 82389 - protein, 9 aa, synthetic construct
  source 1..9: note = Seed: YVFTGYRVT
YTFTGYRVA

SEQ ID NO: 82390 - protein, 9 aa, synthetic construct
  source 1..9: note = Seed: YVFTGYRVT
YTFTGYRVF

SEQ ID NO: 82391 - protein, 9 aa, synthetic construct
  source 1..9: note = Seed: YVFTGYRVT
YTFTGYRVI

SEQ ID NO: 82392 - protein, 9 aa, synthetic construct
  source 1..9: note = Seed: YVFTGYRVT
YTFTGYRVL

SEQ ID NO: 82393 - protein, 9 aa, synthetic construct
  source 1..9: note = Seed: YVFTGYRVT
YTFTGYRVM

SEQ ID NO: 82394 - protein, 10 aa, synthetic construct
  source 1..10: note = Seed: YVFTGYRVTK
YTFTGYRVTK

SEQ ID NO: 82395 - protein, 10 aa, synthetic construct
  source 1..10: note = Seed: YVFTGYRVTK
YTFTGYRVTR

SEQ ID NO: 82396 - protein, 9 aa, synthetic construct
  source 1..9: note = Seed: YVFTGYRVT
YTFTGYRVV

SEQ ID NO: 82397 - protein, 9 aa, synthetic construct
  source 1..9: note = Seed: YVFTGYRVT
YTFTGYRVW

SEQ ID NO: 82398 - protein, 9 aa, synthetic construct
  source 1..9: note = Seed: YVFTGYRVT
YTFTGYRVY

SEQ ID NO: 82399 - protein, 9 aa, synthetic construct
  source 1..9: note = Seed: YFFTLLLQL
YTFTLLLQA

SEQ ID NO: 82400 - protein, 9 aa, synthetic construct
  source 1..9: note = Seed: YFFTLLLQL
YTFTLLLQF

SEQ ID NO: 82401 - protein, 9 aa, synthetic construct
  source 1..9: note = Seed: YFFTLLLQL
YTFTLLLQI

SEQ ID NO: 82402 - protein, 9 aa, synthetic construct
  source 1..9: note = Seed: YFFTLLLQL
YTFTLLLQL

SEQ ID NO: 82403 - protein, 9 aa, synthetic construct
  source 1..9: note = Seed: YFFTLLLQL
YTFTLLLQV

SEQ ID NO: 82404 - protein, 9 aa, synthetic construct
  source 1..9: note = Seed: YFFTLLLQL
YTFTLLLQY

SEQ ID NO: 82405 - protein, 9 aa, synthetic construct
  source 1..9: note = Seed: YLGGMSYYC
YTGGMSYYA

SEQ ID NO: 82406 - protein, 10 aa, synthetic construct
  source 1..10: note = Seed: YLGGMSYYCK
YTGGMSYYCK

SEQ ID NO: 82407 - protein, 10 aa, synthetic construct
  source 1..10: note = Seed: YLGGMSYYCK
YTGGMSYYCR

SEQ ID NO: 82408 - protein, 9 aa, synthetic construct
  source 1..9: note = Seed: YLGGMSYYC
YTGGMSYYI

SEQ ID NO: 82409 - protein, 9 aa, synthetic construct
  source 1..9: note = Seed: YLGGMSYYC
YTGGMSYYL

SEQ ID NO: 82410 - protein, 9 aa, synthetic construct
  source 1..9: note = Seed: YLGGMSYYC
YTGGMSYYM

SEQ ID NO: 82411 - protein, 9 aa, synthetic construct
  source 1..9: note = Seed: YLGGMSYYC
YTGGMSYYV

SEQ ID NO: 82412 - protein, 11 aa, synthetic construct
  source 1..11: note = Seed: YTGNYQCGHYK
YTGNYQCGHYR

SEQ ID NO: 82413 - protein, 10 aa, synthetic construct
  source 1..10: note = Seed: YVGYLQPRTF
YTGYLQPRTF

SEQ ID NO: 82414 - protein, 11 aa, synthetic construct
  source 1..11: note = Seed: YVGYLQPRTFL
YTGYLQPRTFF

SEQ ID NO: 82415 - protein, 11 aa, synthetic construct
  source 1..11: note = Seed: YVGYLQPRTFL
YTGYLQPRTFW

SEQ ID NO: 82416 - protein, 10 aa, synthetic construct
  source 1..10: note = Seed: YVGYLQPRTF
YTGYLQPRTM

SEQ ID NO: 82417 - protein, 10 aa, synthetic construct
  source 1..10: note = Seed: YVGYLQPRTF
YTGYLQPRTW

SEQ ID NO: 82418 - protein, 10 aa, synthetic construct
  source 1..10: note = Seed: YVGYLQPRTF
YTGYLQPRTY

SEQ ID NO: 82419 - protein, 9 aa, synthetic construct
  source 1..9: note = Seed: YMHHMELPT
YTHHMELPF

SEQ ID NO: 82420 - protein, 9 aa, synthetic construct
  source 1..9: note = Seed: YMHHMELPT
YTHHMELPM

SEQ ID NO: 82421 - protein, 11 aa, synthetic construct
  source 1..11: note = Seed: YMHHMELPTGV
YTHHMELPTGV

SEQ ID NO: 82422 - protein, 9 aa, synthetic construct
  source 1..9: note = Seed: YMHHMELPT
YTHHMELPV

SEQ ID NO: 82423 - protein, 9 aa, synthetic construct
  source 1..9: note = Seed: YMHHMELPT
YTHHMELPY

SEQ ID NO: 82424 - protein, 9 aa, synthetic construct
  source 1..9: note = Seed: YFIASFRLF
YTIASFRLF

SEQ ID NO: 82425 - protein, 10 aa, synthetic construct
  source 1..10: note = Seed: YFIASFRLFA
YTIASFRLFA

SEQ ID NO: 82426 - protein, 11 aa, synthetic construct
  source 1..11: note = Seed: YFIASFRLFAR
YTIASFRLFAK

SEQ ID NO: 82427 - protein, 11 aa, synthetic construct
  source 1..11: note = Seed: YFIASFRLFAR
YTIASFRLFAR

SEQ ID NO: 82428 - protein, 10 aa, synthetic construct
  source 1..10: note = Seed: YFIASFRLFA
YTIASFRLFI

SEQ ID NO: 82429 - protein, 10 aa, synthetic construct
  source 1..10: note = Seed: YFIASFRLFA
YTIASFRLFL

SEQ ID NO: 82430 - protein, 10 aa, synthetic construct
  source 1..10: note = Seed: YFIASFRLFA
YTIASFRLFV

SEQ ID NO: 82431 - protein, 9 aa, synthetic construct
  source 1..9: note = Seed: YFIASFRLF
YTIASFRLI

SEQ ID NO: 82432 - protein, 9 aa, synthetic construct
  source 1..9: note = Seed: YFIASFRLF
YTIASFRLL

SEQ ID NO: 82433 - protein, 9 aa, synthetic construct
  source 1..9: note = Seed: YFIASFRLF
YTIASFRLM

SEQ ID NO: 82434 - protein, 9 aa, synthetic construct
  source 1..9: note = Seed: YFIASFRLF
YTIASFRLV

SEQ ID NO: 82435 - protein, 9 aa, synthetic construct
  source 1..9: note = Seed: YFIASFRLF
YTIASFRLY

SEQ ID NO: 82436 - protein, 9 aa, synthetic construct
  source 1..9: note = Seed: YGIATVREV
YTIATVREA

SEQ ID NO: 82437 - protein, 9 aa, synthetic construct
  source 1..9: note = Seed: YGIATVREV
YTIATVREF

SEQ ID NO: 82438 - protein, 9 aa, synthetic construct
  source 1..9: note = Seed: YGIATVREV
YTIATVREI

SEQ ID NO: 82439 - protein, 9 aa, synthetic construct
  source 1..9: note = Seed: YGIATVREV
YTIATVREL

SEQ ID NO: 82440 - protein, 9 aa, synthetic construct
  source 1..9: note = Seed: YGIATVREV
YTIATVREM

SEQ ID NO: 82441 - protein, 9 aa, synthetic construct
  source 1..9: note = Seed: YGIATVREV
YTIATVREV

SEQ ID NO: 82442 - protein, 9 aa, synthetic construct
  source 1..9: note = Seed: YGIATVREV
YTIATVREY

SEQ ID NO: 82443 - protein, 10 aa, synthetic construct
  source 1..10: note = Seed: YIICISTKHF
YTICISTKHF

SEQ ID NO: 82444 - protein, 11 aa, synthetic construct
  source 1..11: note = Seed: YIICISTKHFY
YTICISTKHFY

SEQ ID NO: 82445 - protein, 10 aa, synthetic construct
  source 1..10: note = Seed: YIICISTKHF
YTICISTKHY

SEQ ID NO: 82446 - protein, 9 aa, synthetic construct
  source 1..9: note = Seed: YFIKGLNNL
YTIKGLNNA

SEQ ID NO: 82447 - protein, 9 aa, synthetic construct
  source 1..9: note = Seed: YFIKGLNNL
YTIKGLNNI

SEQ ID NO: 82448 - protein, 9 aa, synthetic construct
  source 1..9: note = Seed: YFIKGLNNL
YTIKGLNNL

SEQ ID NO: 82449 - protein, 9 aa, synthetic construct
  source 1..9: note = Seed: YFIKGLNNL
YTIKGLNNM

SEQ ID NO: 82450 - protein, 9 aa, synthetic construct
  source 1..9: note = Seed: YFIKGLNNL
YTIKGLNNV

SEQ ID NO: 82451 - protein, 10 aa, synthetic construct
  source 1..10: note = Seed: YAISAKNRAR
YTISAKNRAK

SEQ ID NO: 82452 - protein, 10 aa, synthetic construct
  source 1..10: note = Seed: YAISAKNRAR
YTISAKNRAR

SEQ ID NO: 82453 - protein, 9 aa, synthetic construct
  source 1..9: note = Seed: YSKHTPINL
YTKHTPINF

SEQ ID NO: 82454 - protein, 10 aa, synthetic construct
  source 1..10: note = Seed: YSKHTPINLV
YTKHTPINLV

SEQ ID NO: 82455 - protein, 9 aa, synthetic construct
  source 1..9: note = Seed: YSKHTPINL
YTKHTPINW

SEQ ID NO: 82456 - protein, 9 aa, synthetic construct
  source 1..9: note = Seed: YSKHTPINL
YTKHTPINY

SEQ ID NO: 82457 - protein, 9 aa, synthetic construct
  source 1..9: note = Seed: YYKLGASQR
YTKLGASQR

SEQ ID NO: 82458 - protein, 9 aa, synthetic construct
  source 1..9: note = Seed: YDKLQFTSL
YTKLQFTSI

SEQ ID NO: 82459 - protein, 9 aa, synthetic construct
  source 1..9: note = Seed: YDKLQFTSL
YTKLQFTSL

SEQ ID NO: 82460 - protein, 11 aa, synthetic construct
  source 1..11: note = Seed: YDKLQFTSLEI
YTKLQFTSLEV

SEQ ID NO: 82461 - protein, 9 aa, synthetic construct
  source 1..9: note = Seed: YDKLQFTSL
YTKLQFTSM

SEQ ID NO: 82462 - protein, 9 aa, synthetic construct
  source 1..9: note = Seed: YLKLRSDVL
YTKLRSDVF

SEQ ID NO: 82463 - protein, 9 aa, synthetic construct
  source 1..9: note = Seed: YLKLRSDVL
YTKLRSDVL

SEQ ID NO: 82464 - protein, 9 aa, synthetic construct
  source 1..9: note = Seed: YLKLRSDVL
YTKLRSDVM

SEQ ID NO: 82465 - protein, 9 aa, synthetic construct
  source 1..9: note = Seed: YLKLRSDVL
YTKLRSDVY

SEQ ID NO: 82466 - protein, 8 aa, synthetic construct
  source 1..8: note = Seed: YLKRRVVF
YTKRRVVL

SEQ ID NO: 82467 - protein, 8 aa, synthetic construct
  source 1..8: note = Seed: YLKRRVVF
YTKRRVVM

SEQ ID NO: 82468 - protein, 9 aa, synthetic construct
  source 1..9: note = Seed: YLKSPNFSK
YTKSPNFSA

SEQ ID NO: 82469 - protein, 9 aa, synthetic construct
  source 1..9: note = Seed: YLKSPNFSK
YTKSPNFSK

SEQ ID NO: 82470 - protein, 9 aa, synthetic construct
  source 1..9: note = Seed: YLKSPNFSK
YTKSPNFSR

SEQ ID NO: 82471 - protein, 9 aa, synthetic construct
  source 1..9: note = Seed: YIKWDLLKY
YTKWDLLKF

SEQ ID NO: 82472 - protein, 9 aa, synthetic construct
  source 1..9: note = Seed: YIKWDLLKY
YTKWDLLKL

SEQ ID NO: 82473 - protein, 9 aa, synthetic construct
  source 1..9: note = Seed: YIKWDLLKY
YTKWDLLKM

SEQ ID NO: 82474 - protein, 9 aa, synthetic construct
  source 1..9: note = Seed: YIKWDLLKY
YTKWDLLKW

SEQ ID NO: 82475 - protein, 9 aa, synthetic construct
  source 1..9: note = Seed: YIKWDLLKY
YTKWDLLKY

SEQ ID NO: 82476 - protein, 9 aa, synthetic construct
  source 1..9: note = Seed: YIKWPWYIW
YTKWPWYIF

SEQ ID NO: 82477 - protein, 9 aa, synthetic construct
  source 1..9: note = Seed: YIKWPWYIW
YTKWPWYIW

SEQ ID NO: 82478 - protein, 10 aa, synthetic construct
  source 1..10: note = Seed: YIKWPWYIWL
YTKWPWYIWV

SEQ ID NO: 82479 - protein, 9 aa, synthetic construct
  source 1..9: note = Seed: YIKWPWYIW
YTKWPWYIY

SEQ ID NO: 82480 - protein, 8 aa, synthetic construct
  source 1..8: note = Seed: YIKWPWYI
YTKWPWYV

SEQ ID NO: 82481 - protein, 9 aa, synthetic construct
  source 1..9: note = Seed: YNKYKYFSG
YTKYKYFSA

SEQ ID NO: 82482 - protein, 9 aa, synthetic construct
  source 1..9: note = Seed: YNKYKYFSG
YTKYKYFSF

SEQ ID NO: 82483 - protein, 9 aa, synthetic construct
  source 1..9: note = Seed: YNKYKYFSG
YTKYKYFSI

SEQ ID NO: 82484 - protein, 9 aa, synthetic construct
  source 1..9: note = Seed: YNKYKYFSG
YTKYKYFSL

SEQ ID NO: 82485 - protein, 9 aa, synthetic construct
  source 1..9: note = Seed: YNKYKYFSG
YTKYKYFSM

SEQ ID NO: 82486 - protein, 9 aa, synthetic construct
  source 1..9: note = Seed: YNKYKYFSG
YTKYKYFSV

SEQ ID NO: 82487 - protein, 10 aa, synthetic construct
  source 1..10: note = Seed: YFLCWHTNCY
YTLCWHTNCY

SEQ ID NO: 82488 - protein, 10 aa, synthetic construct
  source 1..10: note = Seed: YPLECIKDLL
YTLECIKDLV

SEQ ID NO: 82489 - protein, 10 aa, synthetic construct
  source 1..10: note = Seed: YRLFRKSNLK
YTLFRKSNLK

SEQ ID NO: 82490 - protein, 10 aa, synthetic construct
  source 1..10: note = Seed: YRLFRKSNLK
YTLFRKSNLR

SEQ ID NO: 82491 - protein, 9 aa, synthetic construct
  source 1..9: note = Seed: YILFTRFFY
YTLFTRFFF

SEQ ID NO: 82492 - protein, 9 aa, synthetic construct
  source 1..9: note = Seed: YILFTRFFY
YTLFTRFFI

SEQ ID NO: 82493 - protein, 9 aa, synthetic construct
  source 1..9: note = Seed: YILFTRFFY
YTLFTRFFK

SEQ ID NO: 82494 - protein, 9 aa, synthetic construct
  source 1..9: note = Seed: YILFTRFFY
YTLFTRFFL

SEQ ID NO: 82495 - protein, 9 aa, synthetic construct
  source 1..9: note = Seed: YILFTRFFY
YTLFTRFFM

SEQ ID NO: 82496 - protein, 9 aa, synthetic construct
  source 1..9: note = Seed: YILFTRFFY
YTLFTRFFR

SEQ ID NO: 82497 - protein, 9 aa, synthetic construct
  source 1..9: note = Seed: YILFTRFFY
YTLFTRFFW

SEQ ID NO: 82498 - protein, 9 aa, synthetic construct
  source 1..9: note = Seed: YILFTRFFY
YTLFTRFFY

SEQ ID NO: 82499 - protein, 10 aa, synthetic construct
  source 1..10: note = Seed: YILFTRFFYV
YTLFTRFFYA

SEQ ID NO: 82500 - protein, 10 aa, synthetic construct
  source 1..10: note = Seed: YILFTRFFYV
YTLFTRFFYC

SEQ ID NO: 82501 - protein, 10 aa, synthetic construct
  source 1..10: note = Seed: YILFTRFFYV
YTLFTRFFYF

SEQ ID NO: 82502 - protein, 10 aa, synthetic construct
  source 1..10: note = Seed: YILFTRFFYV
YTLFTRFFYH

SEQ ID NO: 82503 - protein, 10 aa, synthetic construct
  source 1..10: note = Seed: YILFTRFFYV
YTLFTRFFYI

SEQ ID NO: 82504 - protein, 10 aa, synthetic construct
  source 1..10: note = Seed: YILFTRFFYV
YTLFTRFFYK

SEQ ID NO: 82505 - protein, 10 aa, synthetic construct
  source 1..10: note = Seed: YILFTRFFYV
YTLFTRFFYL

SEQ ID NO: 82506 - protein, 10 aa, synthetic construct
  source 1..10: note = Seed: YILFTRFFYV
YTLFTRFFYM

SEQ ID NO: 82507 - protein, 10 aa, synthetic construct
  source 1..10: note = Seed: YILFTRFFYV
YTLFTRFFYR

SEQ ID NO: 82508 - protein, 10 aa, synthetic construct
  source 1..10: note = Seed: YILFTRFFYV
YTLFTRFFYS

SEQ ID NO: 82509 - protein, 10 aa, synthetic construct
  source 1..10: note = Seed: YILFTRFFYV
YTLFTRFFYT

SEQ ID NO: 82510 - protein, 10 aa, synthetic construct
  source 1..10: note = Seed: YILFTRFFYV
YTLFTRFFYV

SEQ ID NO: 82511 - protein, 11 aa, synthetic construct
  source 1..11: note = Seed: YILFTRFFYVL
YTLFTRFFYVA

SEQ ID NO: 82512 - protein, 11 aa, synthetic construct
  source 1..11: note = Seed: YILFTRFFYVL
YTLFTRFFYVC

SEQ ID NO: 82513 - protein, 11 aa, synthetic construct
  source 1..11: note = Seed: YILFTRFFYVL
YTLFTRFFYVD

SEQ ID NO: 82514 - protein, 11 aa, synthetic construct
  source 1..11: note = Seed: YILFTRFFYVL
YTLFTRFFYVE

SEQ ID NO: 82515 - protein, 11 aa, synthetic construct
  source 1..11: note = Seed: YILFTRFFYVL
YTLFTRFFYVF

SEQ ID NO: 82516 - protein, 11 aa, synthetic construct
  source 1..11: note = Seed: YILFTRFFYVL
YTLFTRFFYVG

SEQ ID NO: 82517 - protein, 11 aa, synthetic construct
  source 1..11: note = Seed: YILFTRFFYVL
YTLFTRFFYVH

SEQ ID NO: 82518 - protein, 11 aa, synthetic construct
  source 1..11: note = Seed: YILFTRFFYVL
YTLFTRFFYVI

SEQ ID NO: 82519 - protein, 11 aa, synthetic construct
  source 1..11: note = Seed: YILFTRFFYVL
YTLFTRFFYVK

SEQ ID NO: 82520 - protein, 11 aa, synthetic construct
  source 1..11: note = Seed: YILFTRFFYVL
YTLFTRFFYVL

SEQ ID NO: 82521 - protein, 11 aa, synthetic construct
  source 1..11: note = Seed: YILFTRFFYVL
YTLFTRFFYVM

SEQ ID NO: 82522 - protein, 11 aa, synthetic construct
  source 1..11: note = Seed: YILFTRFFYVL
YTLFTRFFYVN

SEQ ID NO: 82523 - protein, 11 aa, synthetic construct
  source 1..11: note = Seed: YILFTRFFYVL
YTLFTRFFYVP

SEQ ID NO: 82524 - protein, 11 aa, synthetic construct
  source 1..11: note = Seed: YILFTRFFYVL
YTLFTRFFYVQ

SEQ ID NO: 82525 - protein, 11 aa, synthetic construct
  source 1..11: note = Seed: YILFTRFFYVL
YTLFTRFFYVR

SEQ ID NO: 82526 - protein, 11 aa, synthetic construct
  source 1..11: note = Seed: YILFTRFFYVL
YTLFTRFFYVS

SEQ ID NO: 82527 - protein, 11 aa, synthetic construct
  source 1..11: note = Seed: YILFTRFFYVL
YTLFTRFFYVT

SEQ ID NO: 82528 - protein, 11 aa, synthetic construct
  source 1..11: note = Seed: YILFTRFFYVL
YTLFTRFFYVV

SEQ ID NO: 82529 - protein, 11 aa, synthetic construct
  source 1..11: note = Seed: YILFTRFFYVL
YTLFTRFFYVW

SEQ ID NO: 82530 - protein, 11 aa, synthetic construct
  source 1..11: note = Seed: YILFTRFFYVL
YTLFTRFFYVY

SEQ ID NO: 82531 - protein, 10 aa, synthetic construct
  source 1..10: note = Seed: YILFTRFFYV
YTLFTRFFYW

SEQ ID NO: 82532 - protein, 10 aa, synthetic construct
  source 1..10: note = Seed: YILFTRFFYV
YTLFTRFFYY

SEQ ID NO: 82533 - protein, 9 aa, synthetic construct
  source 1..9: note = Seed: YKLGASQRV
YTLGASQRF

SEQ ID NO: 82534 - protein, 10 aa, synthetic construct
  source 1..10: note = Seed: YSLLMPILTL
YTLLMPILTA

SEQ ID NO: 82535 - protein, 10 aa, synthetic construct
  source 1..10: note = Seed: YSLLMPILTL
YTLLMPILTF

SEQ ID NO: 82536 - protein, 10 aa, synthetic construct
  source 1..10: note = Seed: YSLLMPILTL
YTLLMPILTI

SEQ ID NO: 82537 - protein, 10 aa, synthetic construct
  source 1..10: note = Seed: YSLLMPILTL
YTLLMPILTL

SEQ ID NO: 82538 - protein, 10 aa, synthetic construct
  source 1..10: note = Seed: YSLLMPILTL
YTLLMPILTM

SEQ ID NO: 82539 - protein, 10 aa, synthetic construct
  source 1..10: note = Seed: YSLLMPILTL
YTLLMPILTV

SEQ ID NO: 82540 - protein, 10 aa, synthetic construct
  source 1..10: note = Seed: YSLLMPILTL
YTLLMPILTW

SEQ ID NO: 82541 - protein, 10 aa, synthetic construct
  source 1..10: note = Seed: YSLLMPILTL
YTLLMPILTY

SEQ ID NO: 82542 - protein, 10 aa, synthetic construct
  source 1..10: note = Seed: YHLMSFPQSA
YTLMSFPQSA

SEQ ID NO: 82543 - protein, 11 aa, synthetic construct
  source 1..11: note = Seed: YHLMSFPQSAP
YTLMSFPQSAV

SEQ ID NO: 82544 - protein, 10 aa, synthetic construct
  source 1..10: note = Seed: YHLMSFPQSA
YTLMSFPQSI

SEQ ID NO: 82545 - protein, 10 aa, synthetic construct
  source 1..10: note = Seed: YHLMSFPQSA
YTLMSFPQSL

SEQ ID NO: 82546 - protein, 10 aa, synthetic construct
  source 1..10: note = Seed: YHLMSFPQSA
YTLMSFPQSM

SEQ ID NO: 82547 - protein, 10 aa, synthetic construct
  source 1..10: note = Seed: YHLMSFPQSA
YTLMSFPQST

SEQ ID NO: 82548 - protein, 10 aa, synthetic construct
  source 1..10: note = Seed: YHLMSFPQSA
YTLMSFPQSV

SEQ ID NO: 82549 - protein, 11 aa, synthetic construct
  source 1..11: note = Seed: YILPSIISNEK
YTLPSIISNER

SEQ ID NO: 82550 - protein, 9 aa, synthetic construct
  source 1..9: note = Seed: YELQTPFEI
YTLQTPFEA

SEQ ID NO: 82551 - protein, 9 aa, synthetic construct
  source 1..9: note = Seed: YELQTPFEI
YTLQTPFEI

SEQ ID NO: 82552 - protein, 9 aa, synthetic construct
  source 1..9: note = Seed: YELQTPFEI
YTLQTPFEL

SEQ ID NO: 82553 - protein, 9 aa, synthetic construct
  source 1..9: note = Seed: YELQTPFEI
YTLQTPFEM

SEQ ID NO: 82554 - protein, 9 aa, synthetic construct
  source 1..9: note = Seed: YELQTPFEI
YTLQTPFEV

SEQ ID NO: 82555 - protein, 10 aa, synthetic construct
  source 1..10: note = Seed: YDLSVVNARL
YTLSVVNARA

SEQ ID NO: 82556 - protein, 10 aa, synthetic construct
  source 1..10: note = Seed: YDLSVVNARL
YTLSVVNARI

SEQ ID NO: 82557 - protein, 10 aa, synthetic construct
  source 1..10: note = Seed: YDLSVVNARL
YTLSVVNARL

SEQ ID NO: 82558 - protein, 10 aa, synthetic construct
  source 1..10: note = Seed: YDLSVVNARL
YTLSVVNARM

SEQ ID NO: 82559 - protein, 10 aa, synthetic construct
  source 1..10: note = Seed: YDLSVVNARL
YTLSVVNARV

SEQ ID NO: 82560 - protein, 8 aa, synthetic construct
  source 1..8: note = Seed: YTMADLVY
YTMADLVF

SEQ ID NO: 82561 - protein, 8 aa, synthetic construct
  source 1..8: note = Seed: YTMADLVY
YTMADLVM

SEQ ID NO: 82562 - protein, 8 aa, synthetic construct
  source 1..8: note = Seed: YTMADLVY
YTMADLVW

SEQ ID NO: 82563 - protein, 10 aa, synthetic construct
  source 1..10: note = Seed: YTMADLVYAL
YTMADLVYAA

SEQ ID NO: 82564 - protein, 10 aa, synthetic construct
  source 1..10: note = Seed: YTMADLVYAL
YTMADLVYAC

SEQ ID NO: 82565 - protein, 10 aa, synthetic construct
  source 1..10: note = Seed: YTMADLVYAL
YTMADLVYAF

SEQ ID NO: 82566 - protein, 10 aa, synthetic construct
  source 1..10: note = Seed: YTMADLVYAL
YTMADLVYAG

SEQ ID NO: 82567 - protein, 10 aa, synthetic construct
  source 1..10: note = Seed: YTMADLVYAL
YTMADLVYAI

SEQ ID NO: 82568 - protein, 11 aa, synthetic construct
  source 1..11: note = Seed: YTMADLVYALR
YTMADLVYALA

SEQ ID NO: 82569 - protein, 11 aa, synthetic construct
  source 1..11: note = Seed: YTMADLVYALR
YTMADLVYALC

SEQ ID NO: 82570 - protein, 11 aa, synthetic construct
  source 1..11: note = Seed: YTMADLVYALR
YTMADLVYALD

SEQ ID NO: 82571 - protein, 11 aa, synthetic construct
  source 1..11: note = Seed: YTMADLVYALR
YTMADLVYALE

SEQ ID NO: 82572 - protein, 11 aa, synthetic construct
  source 1..11: note = Seed: YTMADLVYALR
YTMADLVYALF

SEQ ID NO: 82573 - protein, 11 aa, synthetic construct
  source 1..11: note = Seed: YTMADLVYALR
YTMADLVYALG

SEQ ID NO: 82574 - protein, 11 aa, synthetic construct
  source 1..11: note = Seed: YTMADLVYALR
YTMADLVYALH

SEQ ID NO: 82575 - protein, 11 aa, synthetic construct
  source 1..11: note = Seed: YTMADLVYALR
YTMADLVYALI

SEQ ID NO: 82576 - protein, 11 aa, synthetic construct
  source 1..11: note = Seed: YTMADLVYALR
YTMADLVYALK

SEQ ID NO: 82577 - protein, 11 aa, synthetic construct
  source 1..11: note = Seed: YTMADLVYALR
YTMADLVYALL

SEQ ID NO: 82578 - protein, 11 aa, synthetic construct
  source 1..11: note = Seed: YTMADLVYALR
YTMADLVYALM

SEQ ID NO: 82579 - protein, 11 aa, synthetic construct
  source 1..11: note = Seed: YTMADLVYALR
YTMADLVYALN

SEQ ID NO: 82580 - protein, 11 aa, synthetic construct
  source 1..11: note = Seed: YTMADLVYALR
YTMADLVYALP

SEQ ID NO: 82581 - protein, 11 aa, synthetic construct
  source 1..11: note = Seed: YTMADLVYALR
YTMADLVYALQ

SEQ ID NO: 82582 - protein, 11 aa, synthetic construct
  source 1..11: note = Seed: YTMADLVYALR
YTMADLVYALS

SEQ ID NO: 82583 - protein, 11 aa, synthetic construct
  source 1..11: note = Seed: YTMADLVYALR
YTMADLVYALT

SEQ ID NO: 82584 - protein, 11 aa, synthetic construct
  source 1..11: note = Seed: YTMADLVYALR
YTMADLVYALV

SEQ ID NO: 82585 - protein, 11 aa, synthetic construct
  source 1..11: note = Seed: YTMADLVYALR
YTMADLVYALW

SEQ ID NO: 82586 - protein, 11 aa, synthetic construct
  source 1..11: note = Seed: YTMADLVYALR
YTMADLVYALY

SEQ ID NO: 82587 - protein, 10 aa, synthetic construct
  source 1..10: note = Seed: YTMADLVYAL
YTMADLVYAM

SEQ ID NO: 82588 - protein, 10 aa, synthetic construct
  source 1..10: note = Seed: YTMADLVYAL
YTMADLVYAS

SEQ ID NO: 82589 - protein, 10 aa, synthetic construct
  source 1..10: note = Seed: YTMADLVYAL
YTMADLVYAT

SEQ ID NO: 82590 - protein, 10 aa, synthetic construct
  source 1..10: note = Seed: YTMADLVYAL
YTMADLVYAV

SEQ ID NO: 82591 - protein, 10 aa, synthetic construct
  source 1..10: note = Seed: YTMADLVYAL
YTMADLVYAW

SEQ ID NO: 82592 - protein, 10 aa, synthetic construct
  source 1..10: note = Seed: YTMADLVYAL
YTMADLVYAY

SEQ ID NO: 82593 - protein, 9 aa, synthetic construct
  source 1..9: note = Seed: YTMADLVYA
YTMADLVYC

SEQ ID NO: 82594 - protein, 9 aa, synthetic construct
  source 1..9: note = Seed: YTMADLVYA
YTMADLVYF

SEQ ID NO: 82595 - protein, 9 aa, synthetic construct
  source 1..9: note = Seed: YTMADLVYA
YTMADLVYI

SEQ ID NO: 82596 - protein, 9 aa, synthetic construct
  source 1..9: note = Seed: YTMADLVYA
YTMADLVYK

SEQ ID NO: 82597 - protein, 9 aa, synthetic construct
  source 1..9: note = Seed: YTMADLVYA
YTMADLVYL

SEQ ID NO: 82598 - protein, 9 aa, synthetic construct
  source 1..9: note = Seed: YTMADLVYA
YTMADLVYM

SEQ ID NO: 82599 - protein, 9 aa, synthetic construct
  source 1..9: note = Seed: YTMADLVYA
YTMADLVYR

SEQ ID NO: 82600 - protein, 9 aa, synthetic construct
  source 1..9: note = Seed: YTMADLVYA
YTMADLVYS

SEQ ID NO: 82601 - protein, 9 aa, synthetic construct
  source 1..9: note = Seed: YTMADLVYA
YTMADLVYT

SEQ ID NO: 82602 - protein, 9 aa, synthetic construct
  source 1..9: note = Seed: YTMADLVYA
YTMADLVYV

SEQ ID NO: 82603 - protein, 9 aa, synthetic construct
  source 1..9: note = Seed: YTMADLVYA
YTMADLVYY

SEQ ID NO: 82604 - protein, 9 aa, synthetic construct
  source 1..9: note = Seed: YVMHANYIF
YTMHANYIA

SEQ ID NO: 82605 - protein, 9 aa, synthetic construct
  source 1..9: note = Seed: YVMHANYIF
YTMHANYIF

SEQ ID NO: 82606 - protein, 10 aa, synthetic construct
  source 1..10: note = Seed: YVMHANYIFW
YTMHANYIFF

SEQ ID NO: 82607 - protein, 10 aa, synthetic construct
  source 1..10: note = Seed: YVMHANYIFW
YTMHANYIFM

SEQ ID NO: 82608 - protein, 10 aa, synthetic construct
  source 1..10: note = Seed: YVMHANYIFW
YTMHANYIFW

SEQ ID NO: 82609 - protein, 10 aa, synthetic construct
  source 1..10: note = Seed: YVMHANYIFW
YTMHANYIFY

SEQ ID NO: 82610 - protein, 9 aa, synthetic construct
  source 1..9: note = Seed: YVMHANYIF
YTMHANYII

SEQ ID NO: 82611 - protein, 9 aa, synthetic construct
  source 1..9: note = Seed: YVMHANYIF
YTMHANYIL

SEQ ID NO: 82612 - protein, 9 aa, synthetic construct
  source 1..9: note = Seed: YVMHANYIF
YTMHANYIM

SEQ ID NO: 82613 - protein, 9 aa, synthetic construct
  source 1..9: note = Seed: YVMHANYIF
YTMHANYIV

SEQ ID NO: 82614 - protein, 9 aa, synthetic construct
  source 1..9: note = Seed: YVMHANYIF
YTMHANYIW

SEQ ID NO: 82615 - protein, 9 aa, synthetic construct
  source 1..9: note = Seed: YVMHANYIF
YTMHANYIY

SEQ ID NO: 82616 - protein, 9 aa, synthetic construct
  source 1..9: note = Seed: YTNDKACPL
YTNDKACPF

SEQ ID NO: 82617 - protein, 9 aa, synthetic construct
  source 1..9: note = Seed: YTNDKACPL
YTNDKACPI

SEQ ID NO: 82618 - protein, 9 aa, synthetic construct
  source 1..9: note = Seed: YTNDKACPL
YTNDKACPM

SEQ ID NO: 82619 - protein, 9 aa, synthetic construct
  source 1..9: note = Seed: YTNDKACPL
YTNDKACPV

SEQ ID NO: 82620 - protein, 9 aa, synthetic construct
  source 1..9: note = Seed: YTNDKACPL
YTNDKACPW

SEQ ID NO: 82621 - protein, 9 aa, synthetic construct
  source 1..9: note = Seed: YTNDKACPL
YTNDKACPY

SEQ ID NO: 82622 - protein, 10 aa, synthetic construct
  source 1..10: note = Seed: YANGGKGFCK
YTNGGKGFCR

SEQ ID NO: 82623 - protein, 8 aa, synthetic construct
  source 1..8: note = Seed: YSNNSIAI
YTNNSIAF

SEQ ID NO: 82624 - protein, 8 aa, synthetic construct
  source 1..8: note = Seed: YSNNSIAI
YTNNSIAL

SEQ ID NO: 82625 - protein, 8 aa, synthetic construct
  source 1..8: note = Seed: YSNNSIAI
YTNNSIAM

SEQ ID NO: 82626 - protein, 11 aa, synthetic construct
  source 1..11: note = Seed: YQNNVFMSEAK
YTNNVFMSEAK

SEQ ID NO: 82627 - protein, 10 aa, synthetic construct
  source 1..10: note = Seed: YQNNVFMSEA
YTNNVFMSEL

SEQ ID NO: 82628 - protein, 10 aa, synthetic construct
  source 1..10: note = Seed: YQNNVFMSEA
YTNNVFMSEV

SEQ ID NO: 82629 - protein, 9 aa, synthetic construct
  source 1..9: note = Seed: YQNNVFMSE
YTNNVFMSF

SEQ ID NO: 82630 - protein, 9 aa, synthetic construct
  source 1..9: note = Seed: YQNNVFMSE
YTNNVFMSM

SEQ ID NO: 82631 - protein, 9 aa, synthetic construct
  source 1..9: note = Seed: YQNNVFMSE
YTNNVFMSY

SEQ ID NO: 82632 - protein, 9 aa, synthetic construct
  source 1..9: note = Seed: YANSVFNIC
YTNSVFNIF

SEQ ID NO: 82633 - protein, 9 aa, synthetic construct
  source 1..9: note = Seed: YANSVFNIC
YTNSVFNII

SEQ ID NO: 82634 - protein, 9 aa, synthetic construct
  source 1..9: note = Seed: YANSVFNIC
YTNSVFNIL

SEQ ID NO: 82635 - protein, 9 aa, synthetic construct
  source 1..9: note = Seed: YANSVFNIC
YTNSVFNIM

SEQ ID NO: 82636 - protein, 9 aa, synthetic construct
  source 1..9: note = Seed: YANSVFNIC
YTNSVFNIV

SEQ ID NO: 82637 - protein, 9 aa, synthetic construct
  source 1..9: note = Seed: YANSVFNIC
YTNSVFNIY

SEQ ID NO: 82638 - protein, 9 aa, synthetic construct
  source 1..9: note = Seed: YVNTFSSTF
YTNTFSSTF

SEQ ID NO: 82639 - protein, 9 aa, synthetic construct
  source 1..9: note = Seed: YVNTFSSTF
YTNTFSSTI

SEQ ID NO: 82640 - protein, 9 aa, synthetic construct
  source 1..9: note = Seed: YVNTFSSTF
YTNTFSSTL

SEQ ID NO: 82641 - protein, 9 aa, synthetic construct
  source 1..9: note = Seed: YVNTFSSTF
YTNTFSSTM

SEQ ID NO: 82642 - protein, 9 aa, synthetic construct
  source 1..9: note = Seed: YVNTFSSTF
YTNTFSSTV

SEQ ID NO: 82643 - protein, 9 aa, synthetic construct
  source 1..9: note = Seed: YVNTFSSTF
YTNTFSSTW

SEQ ID NO: 82644 - protein, 9 aa, synthetic construct
  source 1..9: note = Seed: YVNTFSSTF
YTNTFSSTY

SEQ ID NO: 82645 - protein, 10 aa, synthetic construct
  source 1..10: note = Seed: YTPHTVLQAV
YTPHTVLQAA

SEQ ID NO: 82646 - protein, 10 aa, synthetic construct
  source 1..10: note = Seed: YTPHTVLQAV
YTPHTVLQAI

SEQ ID NO: 82647 - protein, 10 aa, synthetic construct
  source 1..10: note = Seed: YTPHTVLQAV
YTPHTVLQAL

SEQ ID NO: 82648 - protein, 10 aa, synthetic construct
  source 1..10: note = Seed: YTPHTVLQAV
YTPHTVLQAM

SEQ ID NO: 82649 - protein, 9 aa, synthetic construct
  source 1..9: note = Seed: YTPHTVLQA
YTPHTVLQV

SEQ ID NO: 82650 - protein, 9 aa, synthetic construct
  source 1..9: note = Seed: YVPLKSATC
YTPLKSATF

SEQ ID NO: 82651 - protein, 9 aa, synthetic construct
  source 1..9: note = Seed: YVPLKSATC
YTPLKSATI

SEQ ID NO: 82652 - protein, 9 aa, synthetic construct
  source 1..9: note = Seed: YVPLKSATC
YTPLKSATL

SEQ ID NO: 82653 - protein, 9 aa, synthetic construct
  source 1..9: note = Seed: YVPLKSATC
YTPLKSATM

SEQ ID NO: 82654 - protein, 9 aa, synthetic construct
  source 1..9: note = Seed: YVPLKSATC
YTPLKSATV

SEQ ID NO: 82655 - protein, 8 aa, synthetic construct
  source 1..8: note = Seed: YMPYFFTL
YTPYFFTF

SEQ ID NO: 82656 - protein, 9 aa, synthetic construct
  source 1..9: note = Seed: YMPYFFTLL
YTPYFFTLA

SEQ ID NO: 82657 - protein, 9 aa, synthetic construct
  source 1..9: note = Seed: YMPYFFTLL
YTPYFFTLF

SEQ ID NO: 82658 - protein, 9 aa, synthetic construct
  source 1..9: note = Seed: YMPYFFTLL
YTPYFFTLI

SEQ ID NO: 82659 - protein, 9 aa, synthetic construct
  source 1..9: note = Seed: YMPYFFTLL
YTPYFFTLL

SEQ ID NO: 82660 - protein, 10 aa, synthetic construct
  source 1..10: note = Seed: YMPYFFTLLL
YTPYFFTLLA

SEQ ID NO: 82661 - protein, 10 aa, synthetic construct
  source 1..10: note = Seed: YMPYFFTLLL
YTPYFFTLLF

SEQ ID NO: 82662 - protein, 10 aa, synthetic construct
  source 1..10: note = Seed: YMPYFFTLLL
YTPYFFTLLI

SEQ ID NO: 82663 - protein, 10 aa, synthetic construct
  source 1..10: note = Seed: YMPYFFTLLL
YTPYFFTLLL

SEQ ID NO: 82664 - protein, 10 aa, synthetic construct
  source 1..10: note = Seed: YMPYFFTLLL
YTPYFFTLLM

SEQ ID NO: 82665 - protein, 10 aa, synthetic construct
  source 1..10: note = Seed: YMPYFFTLLL
YTPYFFTLLT

SEQ ID NO: 82666 - protein, 10 aa, synthetic construct
  source 1..10: note = Seed: YMPYFFTLLL
YTPYFFTLLV

SEQ ID NO: 82667 - protein, 10 aa, synthetic construct
  source 1..10: note = Seed: YMPYFFTLLL
YTPYFFTLLW

SEQ ID NO: 82668 - protein, 10 aa, synthetic construct
  source 1..10: note = Seed: YMPYFFTLLL
YTPYFFTLLY

SEQ ID NO: 82669 - protein, 9 aa, synthetic construct
  source 1..9: note = Seed: YMPYFFTLL
YTPYFFTLM

SEQ ID NO: 82670 - protein, 9 aa, synthetic construct
  source 1..9: note = Seed: YMPYFFTLL
YTPYFFTLV

SEQ ID NO: 82671 - protein, 9 aa, synthetic construct
  source 1..9: note = Seed: YMPYFFTLL
YTPYFFTLY

SEQ ID NO: 82672 - protein, 9 aa, synthetic construct
  source 1..9: note = Seed: YQPYRVVVL
YTPYRVVVF

SEQ ID NO: 82673 - protein, 9 aa, synthetic construct
  source 1..9: note = Seed: YQPYRVVVL
YTPYRVVVI

SEQ ID NO: 82674 - protein, 9 aa, synthetic construct
  source 1..9: note = Seed: YQPYRVVVL
YTPYRVVVL

SEQ ID NO: 82675 - protein, 10 aa, synthetic construct
  source 1..10: note = Seed: YQPYRVVVLS
YTPYRVVVLA

SEQ ID NO: 82676 - protein, 9 aa, synthetic construct
  source 1..9: note = Seed: YQPYRVVVL
YTPYRVVVM

SEQ ID NO: 82677 - protein, 9 aa, synthetic construct
  source 1..9: note = Seed: YQPYRVVVL
YTPYRVVVV

SEQ ID NO: 82678 - protein, 9 aa, synthetic construct
  source 1..9: note = Seed: YQPYRVVVL
YTPYRVVVY

SEQ ID NO: 82679 - protein, 10 aa, synthetic construct
  source 1..10: note = Seed: YKQFDTYNLW
YTQFDTYNLF

SEQ ID NO: 82680 - protein, 10 aa, synthetic construct
  source 1..10: note = Seed: YKQFDTYNLW
YTQFDTYNLM

SEQ ID NO: 82681 - protein, 10 aa, synthetic construct
  source 1..10: note = Seed: YKQFDTYNLW
YTQFDTYNLW

SEQ ID NO: 82682 - protein, 10 aa, synthetic construct
  source 1..10: note = Seed: YKQFDTYNLW
YTQFDTYNLY

SEQ ID NO: 82683 - protein, 9 aa, synthetic construct
  source 1..9: note = Seed: YSQLMCQPI
YTQLMCQPF

SEQ ID NO: 82684 - protein, 10 aa, synthetic construct
  source 1..10: note = Seed: YSQLMCQPIL
YTQLMCQPIF

SEQ ID NO: 82685 - protein, 11 aa, synthetic construct
  source 1..11: note = Seed: YSQLMCQPILL
YTQLMCQPILA

SEQ ID NO: 82686 - protein, 11 aa, synthetic construct
  source 1..11: note = Seed: YSQLMCQPILL
YTQLMCQPILI

SEQ ID NO: 82687 - protein, 11 aa, synthetic construct
  source 1..11: note = Seed: YSQLMCQPILL
YTQLMCQPILL

SEQ ID NO: 82688 - protein, 11 aa, synthetic construct
  source 1..11: note = Seed: YSQLMCQPILL
YTQLMCQPILM

SEQ ID NO: 82689 - protein, 11 aa, synthetic construct
  source 1..11: note = Seed: YSQLMCQPILL
YTQLMCQPILV

SEQ ID NO: 82690 - protein, 11 aa, synthetic construct
  source 1..11: note = Seed: YSQLMCQPILL
YTQLMCQPILW

SEQ ID NO: 82691 - protein, 10 aa, synthetic construct
  source 1..10: note = Seed: YSQLMCQPIL
YTQLMCQPIW

SEQ ID NO: 82692 - protein, 10 aa, synthetic construct
  source 1..10: note = Seed: YSQLMCQPIL
YTQLMCQPIY

SEQ ID NO: 82693 - protein, 9 aa, synthetic construct
  source 1..9: note = Seed: YSQLMCQPI
YTQLMCQPL

SEQ ID NO: 82694 - protein, 9 aa, synthetic construct
  source 1..9: note = Seed: YSQLMCQPI
YTQLMCQPM

SEQ ID NO: 82695 - protein, 9 aa, synthetic construct
  source 1..9: note = Seed: YSQLMCQPI
YTQLMCQPV

SEQ ID NO: 82696 - protein, 9 aa, synthetic construct
  source 1..9: note = Seed: YSQLMCQPI
YTQLMCQPW

SEQ ID NO: 82697 - protein, 9 aa, synthetic construct
  source 1..9: note = Seed: YSQLMCQPI
YTQLMCQPY

SEQ ID NO: 82698 - protein, 9 aa, synthetic construct
  source 1..9: note = Seed: YYQNNVFMS
YTQNNVFMF

SEQ ID NO: 82699 - protein, 9 aa, synthetic construct
  source 1..9: note = Seed: YYQNNVFMS
YTQNNVFMW

SEQ ID NO: 82700 - protein, 9 aa, synthetic construct
  source 1..9: note = Seed: YLQPRTFLL
YTQPRTFLF

SEQ ID NO: 82701 - protein, 9 aa, synthetic construct
  source 1..9: note = Seed: YLQPRTFLL
YTQPRTFLI

SEQ ID NO: 82702 - protein, 9 aa, synthetic construct
  source 1..9: note = Seed: YLQPRTFLL
YTQPRTFLL

SEQ ID NO: 82703 - protein, 10 aa, synthetic construct
  source 1..10: note = Seed: YLQPRTFLLK
YTQPRTFLLK

SEQ ID NO: 82704 - protein, 11 aa, synthetic construct
  source 1..11: note = Seed: YLQPRTFLLKY
YTQPRTFLLKY

SEQ ID NO: 82705 - protein, 10 aa, synthetic construct
  source 1..10: note = Seed: YLQPRTFLLK
YTQPRTFLLR

SEQ ID NO: 82706 - protein, 9 aa, synthetic construct
  source 1..9: note = Seed: YLQPRTFLL
YTQPRTFLM

SEQ ID NO: 82707 - protein, 9 aa, synthetic construct
  source 1..9: note = Seed: YLQPRTFLL
YTQPRTFLV

SEQ ID NO: 82708 - protein, 9 aa, synthetic construct
  source 1..9: note = Seed: YLQPRTFLL
YTQPRTFLW

SEQ ID NO: 82709 - protein, 9 aa, synthetic construct
  source 1..9: note = Seed: YLQPRTFLL
YTQPRTFLY

SEQ ID NO: 82710 - protein, 9 aa, synthetic construct
  source 1..9: note = Seed: YPQVNGLTS
YTQVNGLTF

SEQ ID NO: 82711 - protein, 10 aa, synthetic construct
  source 1..10: note = Seed: YPQVNGLTSI
YTQVNGLTSA

SEQ ID NO: 82712 - protein, 10 aa, synthetic construct
  source 1..10: note = Seed: YPQVNGLTSI
YTQVNGLTSF

SEQ ID NO: 82713 - protein, 10 aa, synthetic construct
  source 1..10: note = Seed: YPQVNGLTSI
YTQVNGLTSI

SEQ ID NO: 82714 - protein, 10 aa, synthetic construct
  source 1..10: note = Seed: YPQVNGLTSI
YTQVNGLTSL

SEQ ID NO: 82715 - protein, 10 aa, synthetic construct
  source 1..10: note = Seed: YPQVNGLTSI
YTQVNGLTSM

SEQ ID NO: 82716 - protein, 10 aa, synthetic construct
  source 1..10: note = Seed: YPQVNGLTSI
YTQVNGLTSV

SEQ ID NO: 82717 - protein, 10 aa, synthetic construct
  source 1..10: note = Seed: YPQVNGLTSI
YTQVNGLTSY

SEQ ID NO: 82718 - protein, 9 aa, synthetic construct
  source 1..9: note = Seed: YPQVNGLTS
YTQVNGLTY

SEQ ID NO: 82719 - protein, 9 aa, synthetic construct
  source 1..9: note = Seed: YYRARAGEA
YTRARAGEK

SEQ ID NO: 82720 - protein, 9 aa, synthetic construct
  source 1..9: note = Seed: YKRDAPAHI
YTRDAPAHF

SEQ ID NO: 82721 - protein, 10 aa, synthetic construct
  source 1..10: note = Seed: YRRLISMMGF
YTRLISMMGF

SEQ ID NO: 82722 - protein, 10 aa, synthetic construct
  source 1..10: note = Seed: YRRLISMMGF
YTRLISMMGI

SEQ ID NO: 82723 - protein, 10 aa, synthetic construct
  source 1..10: note = Seed: YRRLISMMGF
YTRLISMMGL

SEQ ID NO: 82724 - protein, 10 aa, synthetic construct
  source 1..10: note = Seed: YRRLISMMGF
YTRLISMMGM

SEQ ID NO: 82725 - protein, 9 aa, synthetic construct
  source 1..9: note = Seed: YFRLTLGVY
YTRLTLGVF

SEQ ID NO: 82726 - protein, 9 aa, synthetic construct
  source 1..9: note = Seed: YFRLTLGVY
YTRLTLGVY

SEQ ID NO: 82727 - protein, 10 aa, synthetic construct
  source 1..10: note = Seed: YVRNLQHRLY
YTRNLQHRLF

SEQ ID NO: 82728 - protein, 10 aa, synthetic construct
  source 1..10: note = Seed: YVRNLQHRLY
YTRNLQHRLW

SEQ ID NO: 82729 - protein, 10 aa, synthetic construct
  source 1..10: note = Seed: YVRNLQHRLY
YTRNLQHRLY

SEQ ID NO: 82730 - protein, 9 aa, synthetic construct
  source 1..9: note = Seed: YYRSLPGVF
YTRSLPGVF

SEQ ID NO: 82731 - protein, 9 aa, synthetic construct
  source 1..9: note = Seed: YYRSLPGVF
YTRSLPGVY

SEQ ID NO: 82732 - protein, 9 aa, synthetic construct
  source 1..9: note = Seed: YYRYNLPTM
YTRYNLPTA

SEQ ID NO: 82733 - protein, 9 aa, synthetic construct
  source 1..9: note = Seed: YYRYNLPTM
YTRYNLPTF

SEQ ID NO: 82734 - protein, 9 aa, synthetic construct
  source 1..9: note = Seed: YYRYNLPTM
YTRYNLPTI

SEQ ID NO: 82735 - protein, 9 aa, synthetic construct
  source 1..9: note = Seed: YYRYNLPTM
YTRYNLPTK

SEQ ID NO: 82736 - protein, 9 aa, synthetic construct
  source 1..9: note = Seed: YYRYNLPTM
YTRYNLPTL

SEQ ID NO: 82737 - protein, 9 aa, synthetic construct
  source 1..9: note = Seed: YYRYNLPTM
YTRYNLPTM

SEQ ID NO: 82738 - protein, 10 aa, synthetic construct
  source 1..10: note = Seed: YYRYNLPTMC
YTRYNLPTMF

SEQ ID NO: 82739 - protein, 10 aa, synthetic construct
  source 1..10: note = Seed: YYRYNLPTMC
YTRYNLPTMI

SEQ ID NO: 82740 - protein, 10 aa, synthetic construct
  source 1..10: note = Seed: YYRYNLPTMC
YTRYNLPTML

SEQ ID NO: 82741 - protein, 10 aa, synthetic construct
  source 1..10: note = Seed: YYRYNLPTMC
YTRYNLPTMM

SEQ ID NO: 82742 - protein, 10 aa, synthetic construct
  source 1..10: note = Seed: YYRYNLPTMC
YTRYNLPTMV

SEQ ID NO: 82743 - protein, 9 aa, synthetic construct
  source 1..9: note = Seed: YYRYNLPTM
YTRYNLPTV

SEQ ID NO: 82744 - protein, 9 aa, synthetic construct
  source 1..9: note = Seed: YYRYNLPTM
YTRYNLPTY

SEQ ID NO: 82745 - protein, 9 aa, synthetic construct
  source 1..9: note = Seed: YSRYRIGNY
YTRYRIGNA

SEQ ID NO: 82746 - protein, 9 aa, synthetic construct
  source 1..9: note = Seed: YSRYRIGNY
YTRYRIGNF

SEQ ID NO: 82747 - protein, 9 aa, synthetic construct
  source 1..9: note = Seed: YSRYRIGNY
YTRYRIGNK

SEQ ID NO: 82748 - protein, 9 aa, synthetic construct
  source 1..9: note = Seed: YSRYRIGNY
YTRYRIGNW

SEQ ID NO: 82749 - protein, 9 aa, synthetic construct
  source 1..9: note = Seed: YSRYRIGNY
YTRYRIGNY

SEQ ID NO: 82750 - protein, 10 aa, synthetic construct
  source 1..10: note = Seed: YSRYRIGNYK
YTRYRIGNYA

SEQ ID NO: 82751 - protein, 10 aa, synthetic construct
  source 1..10: note = Seed: YSRYRIGNYK
YTRYRIGNYF

SEQ ID NO: 82752 - protein, 10 aa, synthetic construct
  source 1..10: note = Seed: YSRYRIGNYK
YTRYRIGNYK

SEQ ID NO: 82753 - protein, 11 aa, synthetic construct
  source 1..11: note = Seed: YSRYRIGNYKL
YTRYRIGNYKF

SEQ ID NO: 82754 - protein, 10 aa, synthetic construct
  source 1..10: note = Seed: YSRYRIGNYK
YTRYRIGNYL

SEQ ID NO: 82755 - protein, 10 aa, synthetic construct
  source 1..10: note = Seed: YSRYRIGNYK
YTRYRIGNYM

SEQ ID NO: 82756 - protein, 10 aa, synthetic construct
  source 1..10: note = Seed: YSRYRIGNYK
YTRYRIGNYR

SEQ ID NO: 82757 - protein, 9 aa, synthetic construct
  source 1..9: note = Seed: YSSANNCTF
YTSANNCTF

SEQ ID NO: 82758 - protein, 11 aa, synthetic construct
  source 1..11: note = Seed: YSSANNCTFEY
YTSANNCTFEW

SEQ ID NO: 82759 - protein, 11 aa, synthetic construct
  source 1..11: note = Seed: YSSANNCTFEY
YTSANNCTFEY

SEQ ID NO: 82760 - protein, 9 aa, synthetic construct
  source 1..9: note = Seed: YSSANNCTF
YTSANNCTI

SEQ ID NO: 82761 - protein, 9 aa, synthetic construct
  source 1..9: note = Seed: YSSANNCTF
YTSANNCTL

SEQ ID NO: 82762 - protein, 9 aa, synthetic construct
  source 1..9: note = Seed: YSSANNCTF
YTSANNCTM

SEQ ID NO: 82763 - protein, 9 aa, synthetic construct
  source 1..9: note = Seed: YSSANNCTF
YTSANNCTV

SEQ ID NO: 82764 - protein, 9 aa, synthetic construct
  source 1..9: note = Seed: YSSANNCTF
YTSANNCTW

SEQ ID NO: 82765 - protein, 9 aa, synthetic construct
  source 1..9: note = Seed: YSSANNCTF
YTSANNCTY

SEQ ID NO: 82766 - protein, 9 aa, synthetic construct
  source 1..9: note = Seed: YNSASFSTF
YTSASFSTF

SEQ ID NO: 82767 - protein, 10 aa, synthetic construct
  source 1..10: note = Seed: YNSASFSTFK
YTSASFSTFK

SEQ ID NO: 82768 - protein, 10 aa, synthetic construct
  source 1..10: note = Seed: YNSASFSTFK
YTSASFSTFR

SEQ ID NO: 82769 - protein, 10 aa, synthetic construct
  source 1..10: note = Seed: YNSASFSTFK
YTSASFSTFY

SEQ ID NO: 82770 - protein, 9 aa, synthetic construct
  source 1..9: note = Seed: YNSASFSTF
YTSASFSTI

SEQ ID NO: 82771 - protein, 9 aa, synthetic construct
  source 1..9: note = Seed: YNSASFSTF
YTSASFSTL

SEQ ID NO: 82772 - protein, 9 aa, synthetic construct
  source 1..9: note = Seed: YNSASFSTF
YTSASFSTM

SEQ ID NO: 82773 - protein, 9 aa, synthetic construct
  source 1..9: note = Seed: YNSASFSTF
YTSASFSTV

SEQ ID NO: 82774 - protein, 9 aa, synthetic construct
  source 1..9: note = Seed: YNSASFSTF
YTSASFSTW

SEQ ID NO: 82775 - protein, 9 aa, synthetic construct
  source 1..9: note = Seed: YNSASFSTF
YTSASFSTY

SEQ ID NO: 82776 - protein, 9 aa, synthetic construct
  source 1..9: note = Seed: YASAVVLLI
YTSAVVLLA

SEQ ID NO: 82777 - protein, 9 aa, synthetic construct
  source 1..9: note = Seed: YASAVVLLI
YTSAVVLLF

SEQ ID NO: 82778 - protein, 9 aa, synthetic construct
  source 1..9: note = Seed: YASAVVLLI
YTSAVVLLI

SEQ ID NO: 82779 - protein, 10 aa, synthetic construct
  source 1..10: note = Seed: YASAVVLLIL
YTSAVVLLIF

SEQ ID NO: 82780 - protein, 10 aa, synthetic construct
  source 1..10: note = Seed: YASAVVLLIL
YTSAVVLLII

SEQ ID NO: 82781 - protein, 10 aa, synthetic construct
  source 1..10: note = Seed: YASAVVLLIL
YTSAVVLLIL

SEQ ID NO: 82782 - protein, 10 aa, synthetic construct
  source 1..10: note = Seed: YASAVVLLIL
YTSAVVLLIM

SEQ ID NO: 82783 - protein, 10 aa, synthetic construct
  source 1..10: note = Seed: YASAVVLLIL
YTSAVVLLIV

SEQ ID NO: 82784 - protein, 10 aa, synthetic construct
  source 1..10: note = Seed: YASAVVLLIL
YTSAVVLLIW

SEQ ID NO: 82785 - protein, 10 aa, synthetic construct
  source 1..10: note = Seed: YASAVVLLIL
YTSAVVLLIY

SEQ ID NO: 82786 - protein, 9 aa, synthetic construct
  source 1..9: note = Seed: YASAVVLLI
YTSAVVLLL

SEQ ID NO: 82787 - protein, 9 aa, synthetic construct
  source 1..9: note = Seed: YASAVVLLI
YTSAVVLLM

SEQ ID NO: 82788 - protein, 9 aa, synthetic construct
  source 1..9: note = Seed: YASAVVLLI
YTSAVVLLT

SEQ ID NO: 82789 - protein, 9 aa, synthetic construct
  source 1..9: note = Seed: YASAVVLLI
YTSAVVLLV

SEQ ID NO: 82790 - protein, 9 aa, synthetic construct
  source 1..9: note = Seed: YASAVVLLI
YTSAVVLLW

SEQ ID NO: 82791 - protein, 9 aa, synthetic construct
  source 1..9: note = Seed: YASAVVLLI
YTSAVVLLY

SEQ ID NO: 82792 - protein, 11 aa, synthetic construct
  source 1..11: note = Seed: YYSLLMPILTL
YTSLLMPILTV

SEQ ID NO: 82793 - protein, 11 aa, synthetic construct
  source 1..11: note = Seed: YRSLPGVFCGV
YTSLPGVFCGI

SEQ ID NO: 82794 - protein, 11 aa, synthetic construct
  source 1..11: note = Seed: YRSLPGVFCGV
YTSLPGVFCGV

SEQ ID NO: 82795 - protein, 10 aa, synthetic construct
  source 1..10: note = Seed: YESLRPDTRY
YTSLRPDTRF

SEQ ID NO: 82796 - protein, 10 aa, synthetic construct
  source 1..10: note = Seed: YESLRPDTRY
YTSLRPDTRW

SEQ ID NO: 82797 - protein, 9 aa, synthetic construct
  source 1..9: note = Seed: YTSNPTTFH
YTSNPTTFF

SEQ ID NO: 82798 - protein, 10 aa, synthetic construct
  source 1..10: note = Seed: YTSNPTTFHL
YTSNPTTFHA

SEQ ID NO: 82799 - protein, 10 aa, synthetic construct
  source 1..10: note = Seed: YTSNPTTFHL
YTSNPTTFHF

SEQ ID NO: 82800 - protein, 10 aa, synthetic construct
  source 1..10: note = Seed: YTSNPTTFHL
YTSNPTTFHI

SEQ ID NO: 82801 - protein, 10 aa, synthetic construct
  source 1..10: note = Seed: YTSNPTTFHL
YTSNPTTFHM

SEQ ID NO: 82802 - protein, 10 aa, synthetic construct
  source 1..10: note = Seed: YTSNPTTFHL
YTSNPTTFHV

SEQ ID NO: 82803 - protein, 10 aa, synthetic construct
  source 1..10: note = Seed: YTSNPTTFHL
YTSNPTTFHW

SEQ ID NO: 82804 - protein, 10 aa, synthetic construct
  source 1..10: note = Seed: YTSNPTTFHL
YTSNPTTFHY

SEQ ID NO: 82805 - protein, 9 aa, synthetic construct
  source 1..9: note = Seed: YTSNPTTFH
YTSNPTTFI

SEQ ID NO: 82806 - protein, 9 aa, synthetic construct
  source 1..9: note = Seed: YTSNPTTFH
YTSNPTTFK

SEQ ID NO: 82807 - protein, 9 aa, synthetic construct
  source 1..9: note = Seed: YTSNPTTFH
YTSNPTTFL

SEQ ID NO: 82808 - protein, 9 aa, synthetic construct
  source 1..9: note = Seed: YTSNPTTFH
YTSNPTTFM

SEQ ID NO: 82809 - protein, 9 aa, synthetic construct
  source 1..9: note = Seed: YTSNPTTFH
YTSNPTTFR

SEQ ID NO: 82810 - protein, 9 aa, synthetic construct
  source 1..9: note = Seed: YTSNPTTFH
YTSNPTTFV

SEQ ID NO: 82811 - protein, 9 aa, synthetic construct
  source 1..9: note = Seed: YTSNPTTFH
YTSNPTTFY

SEQ ID NO: 82812 - protein, 10 aa, synthetic construct
  source 1..10: note = Seed: YLTFYLTNDV
YTTFYLTNDI

SEQ ID NO: 82813 - protein, 10 aa, synthetic construct
  source 1..10: note = Seed: YLTFYLTNDV
YTTFYLTNDV

SEQ ID NO: 82814 - protein, 9 aa, synthetic construct
  source 1..9: note = Seed: YITGGVVQL
YTTGGVVQF

SEQ ID NO: 82815 - protein, 9 aa, synthetic construct
  source 1..9: note = Seed: YITGGVVQL
YTTGGVVQI

SEQ ID NO: 82816 - protein, 9 aa, synthetic construct
  source 1..9: note = Seed: YITGGVVQL
YTTGGVVQL

SEQ ID NO: 82817 - protein, 9 aa, synthetic construct
  source 1..9: note = Seed: YITGGVVQL
YTTGGVVQM

SEQ ID NO: 82818 - protein, 9 aa, synthetic construct
  source 1..9: note = Seed: YITGGVVQL
YTTGGVVQV

SEQ ID NO: 82819 - protein, 9 aa, synthetic construct
  source 1..9: note = Seed: YITGGVVQL
YTTGGVVQY

SEQ ID NO: 82820 - protein, 11 aa, synthetic construct
  source 1..11: note = Seed: YSTGSNVFQTR
YTTGSNVFQTR

SEQ ID NO: 82821 - protein, 9 aa, synthetic construct
  source 1..9: note = Seed: YLTNDVSFL
YTTNDVSFF

SEQ ID NO: 82822 - protein, 9 aa, synthetic construct
  source 1..9: note = Seed: YLTNDVSFL
YTTNDVSFL

SEQ ID NO: 82823 - protein, 10 aa, synthetic construct
  source 1..10: note = Seed: YLTNDVSFLA
YTTNDVSFLA

SEQ ID NO: 82824 - protein, 10 aa, synthetic construct
  source 1..10: note = Seed: YLTNDVSFLA
YTTNDVSFLI

SEQ ID NO: 82825 - protein, 10 aa, synthetic construct
  source 1..10: note = Seed: YLTNDVSFLA
YTTNDVSFLL

SEQ ID NO: 82826 - protein, 10 aa, synthetic construct
  source 1..10: note = Seed: YLTNDVSFLA
YTTNDVSFLM

SEQ ID NO: 82827 - protein, 10 aa, synthetic construct
  source 1..10: note = Seed: YLTNDVSFLA
YTTNDVSFLV

SEQ ID NO: 82828 - protein, 9 aa, synthetic construct
  source 1..9: note = Seed: YLTNDVSFL
YTTNDVSFM

SEQ ID NO: 82829 - protein, 9 aa, synthetic construct
  source 1..9: note = Seed: YLTNDVSFL
YTTNDVSFV

SEQ ID NO: 82830 - protein, 9 aa, synthetic construct
  source 1..9: note = Seed: YLTNDVSFL
YTTNDVSFY

SEQ ID NO: 82831 - protein, 10 aa, synthetic construct
  source 1..10: note = Seed: YDTNVLEGSV
YTTNVLEGSI

SEQ ID NO: 82832 - protein, 10 aa, synthetic construct
  source 1..10: note = Seed: YDTNVLEGSV
YTTNVLEGSV

SEQ ID NO: 82833 - protein, 9 aa, synthetic construct
  source 1..9: note = Seed: YFTSDYYQL
YTTSDYYQF

SEQ ID NO: 82834 - protein, 10 aa, synthetic construct
  source 1..10: note = Seed: YFTSDYYQLY
YTTSDYYQLF

SEQ ID NO: 82835 - protein, 10 aa, synthetic construct
  source 1..10: note = Seed: YFTSDYYQLY
YTTSDYYQLK

SEQ ID NO: 82836 - protein, 10 aa, synthetic construct
  source 1..10: note = Seed: YFTSDYYQLY
YTTSDYYQLR

SEQ ID NO: 82837 - protein, 10 aa, synthetic construct
  source 1..10: note = Seed: YFTSDYYQLY
YTTSDYYQLW

SEQ ID NO: 82838 - protein, 10 aa, synthetic construct
  source 1..10: note = Seed: YFTSDYYQLY
YTTSDYYQLY

SEQ ID NO: 82839 - protein, 11 aa, synthetic construct
  source 1..11: note = Seed: YFTSDYYQLYS
YTTSDYYQLYY

SEQ ID NO: 82840 - protein, 9 aa, synthetic construct
  source 1..9: note = Seed: YYTSNPTTF
YTTSNPTTF

SEQ ID NO: 82841 - protein, 11 aa, synthetic construct
  source 1..11: note = Seed: YYTSNPTTFHL
YTTSNPTTFHF

SEQ ID NO: 82842 - protein, 11 aa, synthetic construct
  source 1..11: note = Seed: YYTSNPTTFHL
YTTSNPTTFHW

SEQ ID NO: 82843 - protein, 11 aa, synthetic construct
  source 1..11: note = Seed: YYTSNPTTFHL
YTTSNPTTFHY

SEQ ID NO: 82844 - protein, 9 aa, synthetic construct
  source 1..9: note = Seed: YYTSNPTTF
YTTSNPTTL

SEQ ID NO: 82845 - protein, 9 aa, synthetic construct
  source 1..9: note = Seed: YYTSNPTTF
YTTSNPTTM

SEQ ID NO: 82846 - protein, 9 aa, synthetic construct
  source 1..9: note = Seed: YYTSNPTTF
YTTSNPTTV

SEQ ID NO: 82847 - protein, 9 aa, synthetic construct
  source 1..9: note = Seed: YYTSNPTTF
YTTSNPTTY

SEQ ID NO: 82848 - protein, 10 aa, synthetic construct
  source 1..10: note = Seed: YTTTIKPVTY
YTTTIKPVTF

SEQ ID NO: 82849 - protein, 10 aa, synthetic construct
  source 1..10: note = Seed: YTTTIKPVTY
YTTTIKPVTW

SEQ ID NO: 82850 - protein, 11 aa, synthetic construct
  source 1..11: note = Seed: YTTTIKPVTYK
YTTTIKPVTYR

SEQ ID NO: 82851 - protein, 9 aa, synthetic construct
  source 1..9: note = Seed: YIVDSVTVK
YTVDSVTVK

SEQ ID NO: 82852 - protein, 9 aa, synthetic construct
  source 1..9: note = Seed: YIVDSVTVK
YTVDSVTVR

SEQ ID NO: 82853 - protein, 9 aa, synthetic construct
  source 1..9: note = Seed: YTVEEAKTV
YTVEEAKTF

SEQ ID NO: 82854 - protein, 9 aa, synthetic construct
  source 1..9: note = Seed: YTVEEAKTV
YTVEEAKTL

SEQ ID NO: 82855 - protein, 9 aa, synthetic construct
  source 1..9: note = Seed: YTVEEAKTV
YTVEEAKTM

SEQ ID NO: 82856 - protein, 10 aa, synthetic construct
  source 1..10: note = Seed: YTVEEAKTVL
YTVEEAKTVF

SEQ ID NO: 82857 - protein, 11 aa, synthetic construct
  source 1..11: note = Seed: YTVEEAKTVLK
YTVEEAKTVLR

SEQ ID NO: 82858 - protein, 10 aa, synthetic construct
  source 1..10: note = Seed: YTVEEAKTVL
YTVEEAKTVW

SEQ ID NO: 82859 - protein, 9 aa, synthetic construct
  source 1..9: note = Seed: YTVEEAKTV
YTVEEAKTY

SEQ ID NO: 82860 - protein, 9 aa, synthetic construct
  source 1..9: note = Seed: YTVELGTEV
YTVELGTEF

SEQ ID NO: 82861 - protein, 9 aa, synthetic construct
  source 1..9: note = Seed: YTVELGTEV
YTVELGTEI

SEQ ID NO: 82862 - protein, 9 aa, synthetic construct
  source 1..9: note = Seed: YTVELGTEV
YTVELGTEL

SEQ ID NO: 82863 - protein, 9 aa, synthetic construct
  source 1..9: note = Seed: YTVELGTEV
YTVELGTEM

SEQ ID NO: 82864 - protein, 9 aa, synthetic construct
  source 1..9: note = Seed: YTVELGTEV
YTVELGTEY

SEQ ID NO: 82865 - protein, 9 aa, synthetic construct
  source 1..9: note = Seed: YYVGYLQPR
YTVGYLQPK

SEQ ID NO: 82866 - protein, 9 aa, synthetic construct
  source 1..9: note = Seed: YYVGYLQPR
YTVGYLQPM

SEQ ID NO: 82867 - protein, 9 aa, synthetic construct
  source 1..9: note = Seed: YYVGYLQPR
YTVGYLQPR

SEQ ID NO: 82868 - protein, 9 aa, synthetic construct
  source 1..9: note = Seed: YYVGYLQPR
YTVGYLQPY

SEQ ID NO: 82869 - protein, 9 aa, synthetic construct
  source 1..9: note = Seed: YFVKIGPER
YTVKIGPEK

SEQ ID NO: 82870 - protein, 9 aa, synthetic construct
  source 1..9: note = Seed: YFVKIGPER
YTVKIGPER

SEQ ID NO: 82871 - protein, 9 aa, synthetic construct
  source 1..9: note = Seed: YFVLTSHTV
YTVLTSHTV

SEQ ID NO: 82872 - protein, 9 aa, synthetic construct
  source 1..9: note = Seed: YQVNGYPNM
YTVNGYPNA

SEQ ID NO: 82873 - protein, 9 aa, synthetic construct
  source 1..9: note = Seed: YQVNGYPNM
YTVNGYPNF

SEQ ID NO: 82874 - protein, 9 aa, synthetic construct
  source 1..9: note = Seed: YQVNGYPNM
YTVNGYPNI

SEQ ID NO: 82875 - protein, 9 aa, synthetic construct
  source 1..9: note = Seed: YQVNGYPNM
YTVNGYPNL

SEQ ID NO: 82876 - protein, 9 aa, synthetic construct
  source 1..9: note = Seed: YQVNGYPNM
YTVNGYPNM

SEQ ID NO: 82877 - protein, 9 aa, synthetic construct
  source 1..9: note = Seed: YQVNGYPNM
YTVNGYPNV

SEQ ID NO: 82878 - protein, 9 aa, synthetic construct
  source 1..9: note = Seed: YQVNGYPNM
YTVNGYPNY

SEQ ID NO: 82879 - protein, 9 aa, synthetic construct
  source 1..9: note = Seed: YLVSTQEFR
YTVSTQEFK

SEQ ID NO: 82880 - protein, 9 aa, synthetic construct
  source 1..9: note = Seed: YLVSTQEFR
YTVSTQEFR

SEQ ID NO: 82881 - protein, 10 aa, synthetic construct
  source 1..10: note = Seed: YLVSTQEFRY
YTVSTQEFRY

SEQ ID NO: 82882 - protein, 9 aa, synthetic construct
  source 1..9: note = Seed: YNVTQAFGR
YTVTQAFGK

SEQ ID NO: 82883 - protein, 9 aa, synthetic construct
  source 1..9: note = Seed: YNVTQAFGR
YTVTQAFGR

SEQ ID NO: 82884 - protein, 10 aa, synthetic construct
  source 1..10: note = Seed: YNVTQAFGRR
YTVTQAFGRK

SEQ ID NO: 82885 - protein, 10 aa, synthetic construct
  source 1..10: note = Seed: YNVTQAFGRR
YTVTQAFGRR

SEQ ID NO: 82886 - protein, 9 aa, synthetic construct
  source 1..9: note = Seed: YFVVKRHTF
YTVVKRHTF

SEQ ID NO: 82887 - protein, 9 aa, synthetic construct
  source 1..9: note = Seed: YFVVKRHTF
YTVVKRHTM

SEQ ID NO: 82888 - protein, 9 aa, synthetic construct
  source 1..9: note = Seed: YFVVKRHTF
YTVVKRHTY

SEQ ID NO: 82889 - protein, 10 aa, synthetic construct
  source 1..10: note = Seed: YRVVVLSFEL
YTVVVLSFEA

SEQ ID NO: 82890 - protein, 10 aa, synthetic construct
  source 1..10: note = Seed: YRVVVLSFEL
YTVVVLSFEI

SEQ ID NO: 82891 - protein, 10 aa, synthetic construct
  source 1..10: note = Seed: YRVVVLSFEL
YTVVVLSFEL

SEQ ID NO: 82892 - protein, 10 aa, synthetic construct
  source 1..10: note = Seed: YRVVVLSFEL
YTVVVLSFEV

SEQ ID NO: 82893 - protein, 10 aa, synthetic construct
  source 1..10: note = Seed: YYVWKSYVHV
YTVWKSYVHA

SEQ ID NO: 82894 - protein, 10 aa, synthetic construct
  source 1..10: note = Seed: YYVWKSYVHV
YTVWKSYVHI

SEQ ID NO: 82895 - protein, 10 aa, synthetic construct
  source 1..10: note = Seed: YYVWKSYVHV
YTVWKSYVHV

SEQ ID NO: 82896 - protein, 9 aa, synthetic construct
  source 1..9: note = Seed: YYVWKSYVH
YTVWKSYVY

SEQ ID NO: 82897 - protein, 9 aa, synthetic construct
  source 1..9: note = Seed: YVWKSYVHV
YTWKSYVHA

SEQ ID NO: 82898 - protein, 9 aa, synthetic construct
  source 1..9: note = Seed: YVWKSYVHV
YTWKSYVHI

SEQ ID NO: 82899 - protein, 9 aa, synthetic construct
  source 1..9: note = Seed: YVWKSYVHV
YTWKSYVHL

SEQ ID NO: 82900 - protein, 9 aa, synthetic construct
  source 1..9: note = Seed: YVWKSYVHV
YTWKSYVHV

SEQ ID NO: 82901 - protein, 10 aa, synthetic construct
  source 1..10: note = Seed: YVWKSYVHVV
YTWKSYVHVI

SEQ ID NO: 82902 - protein, 10 aa, synthetic construct
  source 1..10: note = Seed: YVWKSYVHVV
YTWKSYVHVL

SEQ ID NO: 82903 - protein, 10 aa, synthetic construct
  source 1..10: note = Seed: YVWKSYVHVV
YTWKSYVHVV

SEQ ID NO: 82904 - protein, 10 aa, synthetic construct
  source 1..10: note = Seed: YVYANGGKGF
YTYANGGKGF

SEQ ID NO: 82905 - protein, 10 aa, synthetic construct
  source 1..10: note = Seed: YVYANGGKGF
YTYANGGKGM

SEQ ID NO: 82906 - protein, 10 aa, synthetic construct
  source 1..10: note = Seed: YVYANGGKGF
YTYANGGKGW

SEQ ID NO: 82907 - protein, 10 aa, synthetic construct
  source 1..10: note = Seed: YVYANGGKGF
YTYANGGKGY

SEQ ID NO: 82908 - protein, 11 aa, synthetic construct
  source 1..11: note = Seed: YLYFIKGLNNL
YTYFIKGLNNF

SEQ ID NO: 82909 - protein, 9 aa, synthetic construct
  source 1..9: note = Seed: YLYLTFYLT
YTYLTFYLA

SEQ ID NO: 82910 - protein, 9 aa, synthetic construct
  source 1..9: note = Seed: YLYLTFYLT
YTYLTFYLI

SEQ ID NO: 82911 - protein, 9 aa, synthetic construct
  source 1..9: note = Seed: YLYLTFYLT
YTYLTFYLL

SEQ ID NO: 82912 - protein, 9 aa, synthetic construct
  source 1..9: note = Seed: YLYLTFYLT
YTYLTFYLV

SEQ ID NO: 82913 - protein, 8 aa, synthetic construct
  source 1..8: note = Seed: YLYLTFYL
YTYLTFYV

SEQ ID NO: 82914 - protein, 10 aa, synthetic construct
  source 1..10: note = Seed: YDYLVSTQEF
YTYLVSTQEF

SEQ ID NO: 82915 - protein, 11 aa, synthetic construct
  source 1..11: note = Seed: YDYLVSTQEFR
YTYLVSTQEFF

SEQ ID NO: 82916 - protein, 11 aa, synthetic construct
  source 1..11: note = Seed: YDYLVSTQEFR
YTYLVSTQEFK

SEQ ID NO: 82917 - protein, 11 aa, synthetic construct
  source 1..11: note = Seed: YDYLVSTQEFR
YTYLVSTQEFR

SEQ ID NO: 82918 - protein, 10 aa, synthetic construct
  source 1..10: note = Seed: YDYLVSTQEF
YTYLVSTQEI

SEQ ID NO: 82919 - protein, 10 aa, synthetic construct
  source 1..10: note = Seed: YDYLVSTQEF
YTYLVSTQEL

SEQ ID NO: 82920 - protein, 10 aa, synthetic construct
  source 1..10: note = Seed: YDYLVSTQEF
YTYLVSTQEM

SEQ ID NO: 82921 - protein, 10 aa, synthetic construct
  source 1..10: note = Seed: YDYLVSTQEF
YTYLVSTQEW

SEQ ID NO: 82922 - protein, 10 aa, synthetic construct
  source 1..10: note = Seed: YDYLVSTQEF
YTYLVSTQEY

SEQ ID NO: 82923 - protein, 9 aa, synthetic construct
  source 1..9: note = Seed: YNYLYRLFR
YTYLYRLFK

SEQ ID NO: 82924 - protein, 9 aa, synthetic construct
  source 1..9: note = Seed: YNYLYRLFR
YTYLYRLFR

SEQ ID NO: 82925 - protein, 10 aa, synthetic construct
  source 1..10: note = Seed: YNYLYRLFRK
YTYLYRLFRA

SEQ ID NO: 82926 - protein, 10 aa, synthetic construct
  source 1..10: note = Seed: YNYLYRLFRK
YTYLYRLFRC

SEQ ID NO: 82927 - protein, 10 aa, synthetic construct
  source 1..10: note = Seed: YNYLYRLFRK
YTYLYRLFRD

SEQ ID NO: 82928 - protein, 10 aa, synthetic construct
  source 1..10: note = Seed: YNYLYRLFRK
YTYLYRLFRE

SEQ ID NO: 82929 - protein, 10 aa, synthetic construct
  source 1..10: note = Seed: YNYLYRLFRK
YTYLYRLFRF

SEQ ID NO: 82930 - protein, 10 aa, synthetic construct
  source 1..10: note = Seed: YNYLYRLFRK
YTYLYRLFRG

SEQ ID NO: 82931 - protein, 10 aa, synthetic construct
  source 1..10: note = Seed: YNYLYRLFRK
YTYLYRLFRH

SEQ ID NO: 82932 - protein, 10 aa, synthetic construct
  source 1..10: note = Seed: YNYLYRLFRK
YTYLYRLFRI

SEQ ID NO: 82933 - protein, 10 aa, synthetic construct
  source 1..10: note = Seed: YNYLYRLFRK
YTYLYRLFRK

SEQ ID NO: 82934 - protein, 10 aa, synthetic construct
  source 1..10: note = Seed: YNYLYRLFRK
YTYLYRLFRL

SEQ ID NO: 82935 - protein, 10 aa, synthetic construct
  source 1..10: note = Seed: YNYLYRLFRK
YTYLYRLFRM

SEQ ID NO: 82936 - protein, 10 aa, synthetic construct
  source 1..10: note = Seed: YNYLYRLFRK
YTYLYRLFRN

SEQ ID NO: 82937 - protein, 10 aa, synthetic construct
  source 1..10: note = Seed: YNYLYRLFRK
YTYLYRLFRP

SEQ ID NO: 82938 - protein, 10 aa, synthetic construct
  source 1..10: note = Seed: YNYLYRLFRK
YTYLYRLFRQ

SEQ ID NO: 82939 - protein, 10 aa, synthetic construct
  source 1..10: note = Seed: YNYLYRLFRK
YTYLYRLFRR

SEQ ID NO: 82940 - protein, 10 aa, synthetic construct
  source 1..10: note = Seed: YNYLYRLFRK
YTYLYRLFRS

SEQ ID NO: 82941 - protein, 10 aa, synthetic construct
  source 1..10: note = Seed: YNYLYRLFRK
YTYLYRLFRT

SEQ ID NO: 82942 - protein, 10 aa, synthetic construct
  source 1..10: note = Seed: YNYLYRLFRK
YTYLYRLFRV

SEQ ID NO: 82943 - protein, 10 aa, synthetic construct
  source 1..10: note = Seed: YNYLYRLFRK
YTYLYRLFRW

SEQ ID NO: 82944 - protein, 10 aa, synthetic construct
  source 1..10: note = Seed: YNYLYRLFRK
YTYLYRLFRY

SEQ ID NO: 82945 - protein, 9 aa, synthetic construct
  source 1..9: note = Seed: YNYLYRLFR
YTYLYRLFY

SEQ ID NO: 82946 - protein, 10 aa, synthetic construct
  source 1..10: note = Seed: YVYNPFMIDV
YTYNPFMIDV

SEQ ID NO: 82947 - protein, 9 aa, synthetic construct
  source 1..9: note = Seed: YLYRLFRKS
YTYRLFRKV

SEQ ID NO: 82948 - protein, 11 aa, synthetic construct
  source 1..11: note = Seed: YDYYRYNLPTM
YTYYRYNLPTF

SEQ ID NO: 82949 - protein, 11 aa, synthetic construct
  source 1..11: note = Seed: YDYYRYNLPTM
YTYYRYNLPTW

SEQ ID NO: 82950 - protein, 10 aa, synthetic construct
  source 1..10: note = Seed: YGANKDGIIW
YVANKDGIIW

SEQ ID NO: 82951 - protein, 9 aa, synthetic construct
  source 1..9: note = Seed: YPANSIVCR
YVANSIVCK

SEQ ID NO: 82952 - protein, 9 aa, synthetic construct
  source 1..9: note = Seed: YPANSIVCR
YVANSIVCR

SEQ ID NO: 82953 - protein, 10 aa, synthetic construct
  source 1..10: note = Seed: YPANSIVCRF
YVANSIVCRW

SEQ ID NO: 82954 - protein, 10 aa, synthetic construct
  source 1..10: note = Seed: YPANSIVCRF
YVANSIVCRY

SEQ ID NO: 82955 - protein, 9 aa, synthetic construct
  source 1..9: note = Seed: YIATNGPLK
YVATNGPLK

SEQ ID NO: 82956 - protein, 9 aa, synthetic construct
  source 1..9: note = Seed: YIATNGPLK
YVATNGPLR

SEQ ID NO: 82957 - protein, 9 aa, synthetic construct
  source 1..9: note = Seed: YAAVINGDR
YVAVINGDK

SEQ ID NO: 82958 - protein, 9 aa, synthetic construct
  source 1..9: note = Seed: YAAVINGDR
YVAVINGDR

SEQ ID NO: 82959 - protein, 10 aa, synthetic construct
  source 1..10: note = Seed: YAAVINGDRW
YVAVINGDRW

SEQ ID NO: 82960 - protein, 10 aa, synthetic construct
  source 1..10: note = Seed: YFCTCYFGLF
YVCTCYFGLY

SEQ ID NO: 82961 - protein, 10 aa, synthetic construct
  source 1..10: note = Seed: YVDTPNNTDF
YVDTPNNTDL

SEQ ID NO: 82962 - protein, 8 aa, synthetic construct
  source 1..8: note = Seed: YTEISFML
YVEISFMV

SEQ ID NO: 82963 - protein, 10 aa, synthetic construct
  source 1..10: note = Seed: YKENSYTTTI
YVENSYTTTA

SEQ ID NO: 82964 - protein, 10 aa, synthetic construct
  source 1..10: note = Seed: YKENSYTTTI
YVENSYTTTF

SEQ ID NO: 82965 - protein, 10 aa, synthetic construct
  source 1..10: note = Seed: YKENSYTTTI
YVENSYTTTL

SEQ ID NO: 82966 - protein, 10 aa, synthetic construct
  source 1..10: note = Seed: YKENSYTTTI
YVENSYTTTM

SEQ ID NO: 82967 - protein, 10 aa, synthetic construct
  source 1..10: note = Seed: YKENSYTTTI
YVENSYTTTY

SEQ ID NO: 82968 - protein, 9 aa, synthetic construct
  source 1..9: note = Seed: YVFCTVNAL
YVFCTVNAA

SEQ ID NO: 82969 - protein, 9 aa, synthetic construct
  source 1..9: note = Seed: YVFCTVNAL
YVFCTVNAF

SEQ ID NO: 82970 - protein, 9 aa, synthetic construct
  source 1..9: note = Seed: YVFCTVNAL
YVFCTVNAI

SEQ ID NO: 82971 - protein, 9 aa, synthetic construct
  source 1..9: note = Seed: YVFCTVNAL
YVFCTVNAM

SEQ ID NO: 82972 - protein, 9 aa, synthetic construct
  source 1..9: note = Seed: YVFCTVNAL
YVFCTVNAR

SEQ ID NO: 82973 - protein, 9 aa, synthetic construct
  source 1..9: note = Seed: YVFCTVNAL
YVFCTVNAV

SEQ ID NO: 82974 - protein, 9 aa, synthetic construct
  source 1..9: note = Seed: YVFCTVNAL
YVFCTVNAY

SEQ ID NO: 82975 - protein, 8 aa, synthetic construct
  source 1..8: note = Seed: YIFFASFY
YVFFASFY

SEQ ID NO: 82976 - protein, 9 aa, synthetic construct
  source 1..9: note = Seed: YIFFASFYY
YVFFASFYA

SEQ ID NO: 82977 - protein, 9 aa, synthetic construct
  source 1..9: note = Seed: YIFFASFYY
YVFFASFYE

SEQ ID NO: 82978 - protein, 9 aa, synthetic construct
  source 1..9: note = Seed: YIFFASFYY
YVFFASFYF

SEQ ID NO: 82979 - protein, 9 aa, synthetic construct
  source 1..9: note = Seed: YIFFASFYY
YVFFASFYH

SEQ ID NO: 82980 - protein, 9 aa, synthetic construct
  source 1..9: note = Seed: YIFFASFYY
YVFFASFYI

SEQ ID NO: 82981 - protein, 9 aa, synthetic construct
  source 1..9: note = Seed: YIFFASFYY
YVFFASFYK

SEQ ID NO: 82982 - protein, 9 aa, synthetic construct
  source 1..9: note = Seed: YIFFASFYY
YVFFASFYL

SEQ ID NO: 82983 - protein, 9 aa, synthetic construct
  source 1..9: note = Seed: YIFFASFYY
YVFFASFYM

SEQ ID NO: 82984 - protein, 9 aa, synthetic construct
  source 1..9: note = Seed: YIFFASFYY
YVFFASFYQ

SEQ ID NO: 82985 - protein, 9 aa, synthetic construct
  source 1..9: note = Seed: YIFFASFYY
YVFFASFYR

SEQ ID NO: 82986 - protein, 9 aa, synthetic construct
  source 1..9: note = Seed: YIFFASFYY
YVFFASFYT

SEQ ID NO: 82987 - protein, 9 aa, synthetic construct
  source 1..9: note = Seed: YIFFASFYY
YVFFASFYV

SEQ ID NO: 82988 - protein, 9 aa, synthetic construct
  source 1..9: note = Seed: YIFFASFYY
YVFFASFYW

SEQ ID NO: 82989 - protein, 9 aa, synthetic construct
  source 1..9: note = Seed: YIFFASFYY
YVFFASFYY

SEQ ID NO: 82990 - protein, 10 aa, synthetic construct
  source 1..10: note = Seed: YIFFASFYYV
YVFFASFYYA

SEQ ID NO: 82991 - protein, 10 aa, synthetic construct
  source 1..10: note = Seed: YIFFASFYYV
YVFFASFYYC

SEQ ID NO: 82992 - protein, 10 aa, synthetic construct
  source 1..10: note = Seed: YIFFASFYYV
YVFFASFYYD

SEQ ID NO: 82993 - protein, 10 aa, synthetic construct
  source 1..10: note = Seed: YIFFASFYYV
YVFFASFYYE

SEQ ID NO: 82994 - protein, 10 aa, synthetic construct
  source 1..10: note = Seed: YIFFASFYYV
YVFFASFYYF

SEQ ID NO: 82995 - protein, 10 aa, synthetic construct
  source 1..10: note = Seed: YIFFASFYYV
YVFFASFYYG

SEQ ID NO: 82996 - protein, 10 aa, synthetic construct
  source 1..10: note = Seed: YIFFASFYYV
YVFFASFYYH

SEQ ID NO: 82997 - protein, 10 aa, synthetic construct
  source 1..10: note = Seed: YIFFASFYYV
YVFFASFYYI

SEQ ID NO: 82998 - protein, 10 aa, synthetic construct
  source 1..10: note = Seed: YIFFASFYYV
YVFFASFYYK

SEQ ID NO: 82999 - protein, 10 aa, synthetic construct
  source 1..10: note = Seed: YIFFASFYYV
YVFFASFYYL

SEQ ID NO: 83000 - protein, 10 aa, synthetic construct
  source 1..10: note = Seed: YIFFASFYYV
YVFFASFYYM

SEQ ID NO: 83001 - protein, 10 aa, synthetic construct
  source 1..10: note = Seed: YIFFASFYYV
YVFFASFYYN

SEQ ID NO: 83002 - protein, 10 aa, synthetic construct
  source 1..10: note = Seed: YIFFASFYYV
YVFFASFYYP

SEQ ID NO: 83003 - protein, 10 aa, synthetic construct
  source 1..10: note = Seed: YIFFASFYYV
YVFFASFYYQ

SEQ ID NO: 83004 - protein, 10 aa, synthetic construct
  source 1..10: note = Seed: YIFFASFYYV
YVFFASFYYR

SEQ ID NO: 83005 - protein, 10 aa, synthetic construct
  source 1..10: note = Seed: YIFFASFYYV
YVFFASFYYS

SEQ ID NO: 83006 - protein, 10 aa, synthetic construct
  source 1..10: note = Seed: YIFFASFYYV
YVFFASFYYT

SEQ ID NO: 83007 - protein, 10 aa, synthetic construct
  source 1..10: note = Seed: YIFFASFYYV
YVFFASFYYV

SEQ ID NO: 83008 - protein, 11 aa, synthetic construct
  source 1..11: note = Seed: YIFFASFYYVW
YVFFASFYYVI

SEQ ID NO: 83009 - protein, 11 aa, synthetic construct
  source 1..11: note = Seed: YIFFASFYYVW
YVFFASFYYVL

SEQ ID NO: 83010 - protein, 11 aa, synthetic construct
  source 1..11: note = Seed: YIFFASFYYVW
YVFFASFYYVV

SEQ ID NO: 83011 - protein, 11 aa, synthetic construct
  source 1..11: note = Seed: YIFFASFYYVW
YVFFASFYYVY

SEQ ID NO: 83012 - protein, 10 aa, synthetic construct
  source 1..10: note = Seed: YIFFASFYYV
YVFFASFYYW

SEQ ID NO: 83013 - protein, 10 aa, synthetic construct
  source 1..10: note = Seed: YIFFASFYYV
YVFFASFYYY

SEQ ID NO: 83014 - protein, 9 aa, synthetic construct
  source 1..9: note = Seed: YWFFSNYLK
YVFFSNYLF

SEQ ID NO: 83015 - protein, 9 aa, synthetic construct
  source 1..9: note = Seed: YWFFSNYLK
YVFFSNYLH

SEQ ID NO: 83016 - protein, 9 aa, synthetic construct
  source 1..9: note = Seed: YWFFSNYLK
YVFFSNYLK

SEQ ID NO: 83017 - protein, 10 aa, synthetic construct
  source 1..10: note = Seed: YWFFSNYLKR
YVFFSNYLKA

SEQ ID NO: 83018 - protein, 10 aa, synthetic construct
  source 1..10: note = Seed: YWFFSNYLKR
YVFFSNYLKC

SEQ ID NO: 83019 - protein, 10 aa, synthetic construct
  source 1..10: note = Seed: YWFFSNYLKR
YVFFSNYLKD

SEQ ID NO: 83020 - protein, 10 aa, synthetic construct
  source 1..10: note = Seed: YWFFSNYLKR
YVFFSNYLKE

SEQ ID NO: 83021 - protein, 10 aa, synthetic construct
  source 1..10: note = Seed: YWFFSNYLKR
YVFFSNYLKF

SEQ ID NO: 83022 - protein, 10 aa, synthetic construct
  source 1..10: note = Seed: YWFFSNYLKR
YVFFSNYLKG

SEQ ID NO: 83023 - protein, 10 aa, synthetic construct
  source 1..10: note = Seed: YWFFSNYLKR
YVFFSNYLKH

SEQ ID NO: 83024 - protein, 10 aa, synthetic construct
  source 1..10: note = Seed: YWFFSNYLKR
YVFFSNYLKI

SEQ ID NO: 83025 - protein, 10 aa, synthetic construct
  source 1..10: note = Seed: YWFFSNYLKR
YVFFSNYLKK

SEQ ID NO: 83026 - protein, 10 aa, synthetic construct
  source 1..10: note = Seed: YWFFSNYLKR
YVFFSNYLKL

SEQ ID NO: 83027 - protein, 10 aa, synthetic construct
  source 1..10: note = Seed: YWFFSNYLKR
YVFFSNYLKM

SEQ ID NO: 83028 - protein, 10 aa, synthetic construct
  source 1..10: note = Seed: YWFFSNYLKR
YVFFSNYLKN

SEQ ID NO: 83029 - protein, 10 aa, synthetic construct
  source 1..10: note = Seed: YWFFSNYLKR
YVFFSNYLKP

SEQ ID NO: 83030 - protein, 10 aa, synthetic construct
  source 1..10: note = Seed: YWFFSNYLKR
YVFFSNYLKQ

SEQ ID NO: 83031 - protein, 10 aa, synthetic construct
  source 1..10: note = Seed: YWFFSNYLKR
YVFFSNYLKR

SEQ ID NO: 83032 - protein, 11 aa, synthetic construct
  source 1..11: note = Seed: YWFFSNYLKRR
YVFFSNYLKRR

SEQ ID NO: 83033 - protein, 10 aa, synthetic construct
  source 1..10: note = Seed: YWFFSNYLKR
YVFFSNYLKS

SEQ ID NO: 83034 - protein, 10 aa, synthetic construct
  source 1..10: note = Seed: YWFFSNYLKR
YVFFSNYLKT

SEQ ID NO: 83035 - protein, 10 aa, synthetic construct
  source 1..10: note = Seed: YWFFSNYLKR
YVFFSNYLKV

SEQ ID NO: 83036 - protein, 10 aa, synthetic construct
  source 1..10: note = Seed: YWFFSNYLKR
YVFFSNYLKW

SEQ ID NO: 83037 - protein, 10 aa, synthetic construct
  source 1..10: note = Seed: YWFFSNYLKR
YVFFSNYLKY

SEQ ID NO: 83038 - protein, 9 aa, synthetic construct
  source 1..9: note = Seed: YWFFSNYLK
YVFFSNYLM

SEQ ID NO: 83039 - protein, 9 aa, synthetic construct
  source 1..9: note = Seed: YWFFSNYLK
YVFFSNYLQ

SEQ ID NO: 83040 - protein, 9 aa, synthetic construct
  source 1..9: note = Seed: YWFFSNYLK
YVFFSNYLR

SEQ ID NO: 83041 - protein, 9 aa, synthetic construct
  source 1..9: note = Seed: YWFFSNYLK
YVFFSNYLY

SEQ ID NO: 83042 - protein, 9 aa, synthetic construct
  source 1..9: note = Seed: YSFLPGVYS
YVFLPGVYA

SEQ ID NO: 83043 - protein, 9 aa, synthetic construct
  source 1..9: note = Seed: YSFLPGVYS
YVFLPGVYI

SEQ ID NO: 83044 - protein, 10 aa, synthetic construct
  source 1..10: note = Seed: YSFLPGVYSV
YVFLPGVYSA

SEQ ID NO: 83045 - protein, 10 aa, synthetic construct
  source 1..10: note = Seed: YSFLPGVYSV
YVFLPGVYSF

SEQ ID NO: 83046 - protein, 10 aa, synthetic construct
  source 1..10: note = Seed: YSFLPGVYSV
YVFLPGVYSI

SEQ ID NO: 83047 - protein, 10 aa, synthetic construct
  source 1..10: note = Seed: YSFLPGVYSV
YVFLPGVYSL

SEQ ID NO: 83048 - protein, 10 aa, synthetic construct
  source 1..10: note = Seed: YSFLPGVYSV
YVFLPGVYSM

SEQ ID NO: 83049 - protein, 10 aa, synthetic construct
  source 1..10: note = Seed: YSFLPGVYSV
YVFLPGVYSV

SEQ ID NO: 83050 - protein, 10 aa, synthetic construct
  source 1..10: note = Seed: YSFLPGVYSV
YVFLPGVYSW

SEQ ID NO: 83051 - protein, 10 aa, synthetic construct
  source 1..10: note = Seed: YSFLPGVYSV
YVFLPGVYSY

SEQ ID NO: 83052 - protein, 9 aa, synthetic construct
  source 1..9: note = Seed: YSFLPGVYS
YVFLPGVYV

SEQ ID NO: 83053 - protein, 8 aa, synthetic construct
  source 1..8: note = Seed: YYFMRFRR
YVFMRFRR

SEQ ID NO: 83054 - protein, 9 aa, synthetic construct
  source 1..9: note = Seed: YGFQPTNGV
YVFQPTNGA

SEQ ID NO: 83055 - protein, 9 aa, synthetic construct
  source 1..9: note = Seed: YGFQPTNGV
YVFQPTNGI

SEQ ID NO: 83056 - protein, 9 aa, synthetic construct
  source 1..9: note = Seed: YGFQPTNGV
YVFQPTNGL

SEQ ID NO: 83057 - protein, 9 aa, synthetic construct
  source 1..9: note = Seed: YGFQPTNGV
YVFQPTNGM

SEQ ID NO: 83058 - protein, 9 aa, synthetic construct
  source 1..9: note = Seed: YGFQPTNGV
YVFQPTNGV

SEQ ID NO: 83059 - protein, 9 aa, synthetic construct
  source 1..9: note = Seed: YGFQPTNGV
YVFQPTNGY

SEQ ID NO: 83060 - protein, 10 aa, synthetic construct
  source 1..10: note = Seed: YHFRELGVVH
YVFRELGVVF

SEQ ID NO: 83061 - protein, 10 aa, synthetic construct
  source 1..10: note = Seed: YHFRELGVVH
YVFRELGVVY

SEQ ID NO: 83062 - protein, 9 aa, synthetic construct
  source 1..9: note = Seed: YVFTGYRVT
YVFTGYRVF

SEQ ID NO: 83063 - protein, 9 aa, synthetic construct
  source 1..9: note = Seed: YVFTGYRVT
YVFTGYRVI

SEQ ID NO: 83064 - protein, 9 aa, synthetic construct
  source 1..9: note = Seed: YVFTGYRVT
YVFTGYRVL

SEQ ID NO: 83065 - protein, 9 aa, synthetic construct
  source 1..9: note = Seed: YVFTGYRVT
YVFTGYRVM

SEQ ID NO: 83066 - protein, 10 aa, synthetic construct
  source 1..10: note = Seed: YVFTGYRVTK
YVFTGYRVTR

SEQ ID NO: 83067 - protein, 9 aa, synthetic construct
  source 1..9: note = Seed: YVFTGYRVT
YVFTGYRVV

SEQ ID NO: 83068 - protein, 9 aa, synthetic construct
  source 1..9: note = Seed: YVFTGYRVT
YVFTGYRVY

SEQ ID NO: 83069 - protein, 9 aa, synthetic construct
  source 1..9: note = Seed: YFFTLLLQL
YVFTLLLQA

SEQ ID NO: 83070 - protein, 9 aa, synthetic construct
  source 1..9: note = Seed: YFFTLLLQL
YVFTLLLQF

SEQ ID NO: 83071 - protein, 9 aa, synthetic construct
  source 1..9: note = Seed: YFFTLLLQL
YVFTLLLQI

SEQ ID NO: 83072 - protein, 9 aa, synthetic construct
  source 1..9: note = Seed: YFFTLLLQL
YVFTLLLQL

SEQ ID NO: 83073 - protein, 9 aa, synthetic construct
  source 1..9: note = Seed: YFFTLLLQL
YVFTLLLQM

SEQ ID NO: 83074 - protein, 9 aa, synthetic construct
  source 1..9: note = Seed: YFFTLLLQL
YVFTLLLQV

SEQ ID NO: 83075 - protein, 9 aa, synthetic construct
  source 1..9: note = Seed: YFFTLLLQL
YVFTLLLQY

SEQ ID NO: 83076 - protein, 9 aa, synthetic construct
  source 1..9: note = Seed: YLGGMSYYC
YVGGMSYYA

SEQ ID NO: 83077 - protein, 10 aa, synthetic construct
  source 1..10: note = Seed: YLGGMSYYCK
YVGGMSYYCK

SEQ ID NO: 83078 - protein, 10 aa, synthetic construct
  source 1..10: note = Seed: YLGGMSYYCK
YVGGMSYYCR

SEQ ID NO: 83079 - protein, 9 aa, synthetic construct
  source 1..9: note = Seed: YLGGMSYYC
YVGGMSYYI

SEQ ID NO: 83080 - protein, 9 aa, synthetic construct
  source 1..9: note = Seed: YLGGMSYYC
YVGGMSYYL

SEQ ID NO: 83081 - protein, 9 aa, synthetic construct
  source 1..9: note = Seed: YLGGMSYYC
YVGGMSYYM

SEQ ID NO: 83082 - protein, 9 aa, synthetic construct
  source 1..9: note = Seed: YLGGMSYYC
YVGGMSYYV

SEQ ID NO: 83083 - protein, 11 aa, synthetic construct
  source 1..11: note = Seed: YTGNYQCGHYK
YVGNYQCGHYR

SEQ ID NO: 83084 - protein, 11 aa, synthetic construct
  source 1..11: note = Seed: YVGYLQPRTFL
YVGYLQPRTFF

SEQ ID NO: 83085 - protein, 11 aa, synthetic construct
  source 1..11: note = Seed: YVGYLQPRTFL
YVGYLQPRTFW

SEQ ID NO: 83086 - protein, 9 aa, synthetic construct
  source 1..9: note = Seed: YMHHMELPT
YVHHMELPF

SEQ ID NO: 83087 - protein, 9 aa, synthetic construct
  source 1..9: note = Seed: YMHHMELPT
YVHHMELPI

SEQ ID NO: 83088 - protein, 9 aa, synthetic construct
  source 1..9: note = Seed: YMHHMELPT
YVHHMELPL

SEQ ID NO: 83089 - protein, 9 aa, synthetic construct
  source 1..9: note = Seed: YMHHMELPT
YVHHMELPM

SEQ ID NO: 83090 - protein, 11 aa, synthetic construct
  source 1..11: note = Seed: YMHHMELPTGV
YVHHMELPTGI

SEQ ID NO: 83091 - protein, 11 aa, synthetic construct
  source 1..11: note = Seed: YMHHMELPTGV
YVHHMELPTGV

SEQ ID NO: 83092 - protein, 9 aa, synthetic construct
  source 1..9: note = Seed: YMHHMELPT
YVHHMELPV

SEQ ID NO: 83093 - protein, 9 aa, synthetic construct
  source 1..9: note = Seed: YMHHMELPT
YVHHMELPY

SEQ ID NO: 83094 - protein, 9 aa, synthetic construct
  source 1..9: note = Seed: YFIASFRLF
YVIASFRLF

SEQ ID NO: 83095 - protein, 10 aa, synthetic construct
  source 1..10: note = Seed: YFIASFRLFA
YVIASFRLFA

SEQ ID NO: 83096 - protein, 11 aa, synthetic construct
  source 1..11: note = Seed: YFIASFRLFAR
YVIASFRLFAR

SEQ ID NO: 83097 - protein, 10 aa, synthetic construct
  source 1..10: note = Seed: YFIASFRLFA
YVIASFRLFI

SEQ ID NO: 83098 - protein, 10 aa, synthetic construct
  source 1..10: note = Seed: YFIASFRLFA
YVIASFRLFL

SEQ ID NO: 83099 - protein, 10 aa, synthetic construct
  source 1..10: note = Seed: YFIASFRLFA
YVIASFRLFV

SEQ ID NO: 83100 - protein, 9 aa, synthetic construct
  source 1..9: note = Seed: YFIASFRLF
YVIASFRLI

SEQ ID NO: 83101 - protein, 9 aa, synthetic construct
  source 1..9: note = Seed: YFIASFRLF
YVIASFRLL

SEQ ID NO: 83102 - protein, 9 aa, synthetic construct
  source 1..9: note = Seed: YFIASFRLF
YVIASFRLM

SEQ ID NO: 83103 - protein, 9 aa, synthetic construct
  source 1..9: note = Seed: YFIASFRLF
YVIASFRLV

SEQ ID NO: 83104 - protein, 9 aa, synthetic construct
  source 1..9: note = Seed: YFIASFRLF
YVIASFRLY

SEQ ID NO: 83105 - protein, 9 aa, synthetic construct
  source 1..9: note = Seed: YGIATVREV
YVIATVREA

SEQ ID NO: 83106 - protein, 9 aa, synthetic construct
  source 1..9: note = Seed: YGIATVREV
YVIATVREF

SEQ ID NO: 83107 - protein, 9 aa, synthetic construct
  source 1..9: note = Seed: YGIATVREV
YVIATVREI

SEQ ID NO: 83108 - protein, 9 aa, synthetic construct
  source 1..9: note = Seed: YGIATVREV
YVIATVREL

SEQ ID NO: 83109 - protein, 9 aa, synthetic construct
  source 1..9: note = Seed: YGIATVREV
YVIATVREM

SEQ ID NO: 83110 - protein, 9 aa, synthetic construct
  source 1..9: note = Seed: YGIATVREV
YVIATVREV

SEQ ID NO: 83111 - protein, 9 aa, synthetic construct
  source 1..9: note = Seed: YGIATVREV
YVIATVREY

SEQ ID NO: 83112 - protein, 10 aa, synthetic construct
  source 1..10: note = Seed: YIICISTKHF
YVICISTKHF

SEQ ID NO: 83113 - protein, 11 aa, synthetic construct
  source 1..11: note = Seed: YIICISTKHFY
YVICISTKHFY

SEQ ID NO: 83114 - protein, 10 aa, synthetic construct
  source 1..10: note = Seed: YIICISTKHF
YVICISTKHY

SEQ ID NO: 83115 - protein, 9 aa, synthetic construct
  source 1..9: note = Seed: YFIKGLNNL
YVIKGLNNA

SEQ ID NO: 83116 - protein, 9 aa, synthetic construct
  source 1..9: note = Seed: YFIKGLNNL
YVIKGLNNI

SEQ ID NO: 83117 - protein, 9 aa, synthetic construct
  source 1..9: note = Seed: YFIKGLNNL
YVIKGLNNL

SEQ ID NO: 83118 - protein, 9 aa, synthetic construct
  source 1..9: note = Seed: YFIKGLNNL
YVIKGLNNM

SEQ ID NO: 83119 - protein, 9 aa, synthetic construct
  source 1..9: note = Seed: YFIKGLNNL
YVIKGLNNT

SEQ ID NO: 83120 - protein, 9 aa, synthetic construct
  source 1..9: note = Seed: YFIKGLNNL
YVIKGLNNV

SEQ ID NO: 83121 - protein, 10 aa, synthetic construct
  source 1..10: note = Seed: YAISAKNRAR
YVISAKNRAK

SEQ ID NO: 83122 - protein, 10 aa, synthetic construct
  source 1..10: note = Seed: YAISAKNRAR
YVISAKNRAR

SEQ ID NO: 83123 - protein, 11 aa, synthetic construct
  source 1..11: note = Seed: YFKIYSKHTPI
YVKIYSKHTPL

SEQ ID NO: 83124 - protein, 9 aa, synthetic construct
  source 1..9: note = Seed: YYKKDNSYF
YVKKDNSYF

SEQ ID NO: 83125 - protein, 9 aa, synthetic construct
  source 1..9: note = Seed: YDKLQFTSL
YVKLQFTSA

SEQ ID NO: 83126 - protein, 9 aa, synthetic construct
  source 1..9: note = Seed: YDKLQFTSL
YVKLQFTSF

SEQ ID NO: 83127 - protein, 9 aa, synthetic construct
  source 1..9: note = Seed: YDKLQFTSL
YVKLQFTSI

SEQ ID NO: 83128 - protein, 9 aa, synthetic construct
  source 1..9: note = Seed: YDKLQFTSL
YVKLQFTSL

SEQ ID NO: 83129 - protein, 11 aa, synthetic construct
  source 1..11: note = Seed: YDKLQFTSLEI
YVKLQFTSLEV

SEQ ID NO: 83130 - protein, 9 aa, synthetic construct
  source 1..9: note = Seed: YDKLQFTSL
YVKLQFTSM

SEQ ID NO: 83131 - protein, 9 aa, synthetic construct
  source 1..9: note = Seed: YDKLQFTSL
YVKLQFTSV

SEQ ID NO: 83132 - protein, 8 aa, synthetic construct
  source 1..8: note = Seed: YLKLRSDV
YVKLRSDL

SEQ ID NO: 83133 - protein, 9 aa, synthetic construct
  source 1..9: note = Seed: YLKLRSDVL
YVKLRSDVI

SEQ ID NO: 83134 - protein, 9 aa, synthetic construct
  source 1..9: note = Seed: YLKLRSDVL
YVKLRSDVL

SEQ ID NO: 83135 - protein, 9 aa, synthetic construct
  source 1..9: note = Seed: YLKLRSDVL
YVKLRSDVM

SEQ ID NO: 83136 - protein, 9 aa, synthetic construct
  source 1..9: note = Seed: YLKLRSDVL
YVKLRSDVV

SEQ ID NO: 83137 - protein, 9 aa, synthetic construct
  source 1..9: note = Seed: YLKLRSDVL
YVKLRSDVY

SEQ ID NO: 83138 - protein, 8 aa, synthetic construct
  source 1..8: note = Seed: YLKRRVVF
YVKRRVVF

SEQ ID NO: 83139 - protein, 8 aa, synthetic construct
  source 1..8: note = Seed: YLKRRVVF
YVKRRVVI

SEQ ID NO: 83140 - protein, 8 aa, synthetic construct
  source 1..8: note = Seed: YLKRRVVF
YVKRRVVL

SEQ ID NO: 83141 - protein, 8 aa, synthetic construct
  source 1..8: note = Seed: YLKRRVVF
YVKRRVVM

SEQ ID NO: 83142 - protein, 8 aa, synthetic construct
  source 1..8: note = Seed: YLKRRVVF
YVKRRVVV

SEQ ID NO: 83143 - protein, 9 aa, synthetic construct
  source 1..9: note = Seed: YLKSPNFSK
YVKSPNFSK

SEQ ID NO: 83144 - protein, 10 aa, synthetic construct
  source 1..10: note = Seed: YLKSPNFSKL
YVKSPNFSKV

SEQ ID NO: 83145 - protein, 9 aa, synthetic construct
  source 1..9: note = Seed: YLKSPNFSK
YVKSPNFSR

SEQ ID NO: 83146 - protein, 9 aa, synthetic construct
  source 1..9: note = Seed: YIKWDLLKY
YVKWDLLKY

SEQ ID NO: 83147 - protein, 10 aa, synthetic construct
  source 1..10: note = Seed: YIKWPWYIWL
YVKWPWYIWV

SEQ ID NO: 83148 - protein, 8 aa, synthetic construct
  source 1..8: note = Seed: YIKWPWYI
YVKWPWYV

SEQ ID NO: 83149 - protein, 9 aa, synthetic construct
  source 1..9: note = Seed: YNKYKYFSG
YVKYKYFSA

SEQ ID NO: 83150 - protein, 9 aa, synthetic construct
  source 1..9: note = Seed: YNKYKYFSG
YVKYKYFSF

SEQ ID NO: 83151 - protein, 9 aa, synthetic construct
  source 1..9: note = Seed: YNKYKYFSG
YVKYKYFSI

SEQ ID NO: 83152 - protein, 9 aa, synthetic construct
  source 1..9: note = Seed: YNKYKYFSG
YVKYKYFSL

SEQ ID NO: 83153 - protein, 9 aa, synthetic construct
  source 1..9: note = Seed: YNKYKYFSG
YVKYKYFSM

SEQ ID NO: 83154 - protein, 9 aa, synthetic construct
  source 1..9: note = Seed: YNKYKYFSG
YVKYKYFSV

SEQ ID NO: 83155 - protein, 10 aa, synthetic construct
  source 1..10: note = Seed: YFLCWHTNCY
YVLCWHTNCY

SEQ ID NO: 83156 - protein, 10 aa, synthetic construct
  source 1..10: note = Seed: YPLECIKDLL
YVLECIKDLL

SEQ ID NO: 83157 - protein, 10 aa, synthetic construct
  source 1..10: note = Seed: YPLECIKDLL
YVLECIKDLV

SEQ ID NO: 83158 - protein, 9 aa, synthetic construct
  source 1..9: note = Seed: YRLFRKSNL
YVLFRKSNL

SEQ ID NO: 83159 - protein, 10 aa, synthetic construct
  source 1..10: note = Seed: YRLFRKSNLK
YVLFRKSNLK

SEQ ID NO: 83160 - protein, 10 aa, synthetic construct
  source 1..10: note = Seed: YRLFRKSNLK
YVLFRKSNLR

SEQ ID NO: 83161 - protein, 9 aa, synthetic construct
  source 1..9: note = Seed: YILFTRFFY
YVLFTRFFF

SEQ ID NO: 83162 - protein, 9 aa, synthetic construct
  source 1..9: note = Seed: YILFTRFFY
YVLFTRFFK

SEQ ID NO: 83163 - protein, 9 aa, synthetic construct
  source 1..9: note = Seed: YILFTRFFY
YVLFTRFFM

SEQ ID NO: 83164 - protein, 9 aa, synthetic construct
  source 1..9: note = Seed: YILFTRFFY
YVLFTRFFR

SEQ ID NO: 83165 - protein, 9 aa, synthetic construct
  source 1..9: note = Seed: YILFTRFFY
YVLFTRFFW

SEQ ID NO: 83166 - protein, 9 aa, synthetic construct
  source 1..9: note = Seed: YILFTRFFY
YVLFTRFFY

SEQ ID NO: 83167 - protein, 10 aa, synthetic construct
  source 1..10: note = Seed: YILFTRFFYV
YVLFTRFFYA

SEQ ID NO: 83168 - protein, 10 aa, synthetic construct
  source 1..10: note = Seed: YILFTRFFYV
YVLFTRFFYC

SEQ ID NO: 83169 - protein, 10 aa, synthetic construct
  source 1..10: note = Seed: YILFTRFFYV
YVLFTRFFYD

SEQ ID NO: 83170 - protein, 10 aa, synthetic construct
  source 1..10: note = Seed: YILFTRFFYV
YVLFTRFFYE

SEQ ID NO: 83171 - protein, 10 aa, synthetic construct
  source 1..10: note = Seed: YILFTRFFYV
YVLFTRFFYF

SEQ ID NO: 83172 - protein, 10 aa, synthetic construct
  source 1..10: note = Seed: YILFTRFFYV
YVLFTRFFYG

SEQ ID NO: 83173 - protein, 10 aa, synthetic construct
  source 1..10: note = Seed: YILFTRFFYV
YVLFTRFFYH

SEQ ID NO: 83174 - protein, 10 aa, synthetic construct
  source 1..10: note = Seed: YILFTRFFYV
YVLFTRFFYI

SEQ ID NO: 83175 - protein, 10 aa, synthetic construct
  source 1..10: note = Seed: YILFTRFFYV
YVLFTRFFYK

SEQ ID NO: 83176 - protein, 10 aa, synthetic construct
  source 1..10: note = Seed: YILFTRFFYV
YVLFTRFFYL

SEQ ID NO: 83177 - protein, 10 aa, synthetic construct
  source 1..10: note = Seed: YILFTRFFYV
YVLFTRFFYM

SEQ ID NO: 83178 - protein, 10 aa, synthetic construct
  source 1..10: note = Seed: YILFTRFFYV
YVLFTRFFYN

SEQ ID NO: 83179 - protein, 10 aa, synthetic construct
  source 1..10: note = Seed: YILFTRFFYV
YVLFTRFFYP

SEQ ID NO: 83180 - protein, 10 aa, synthetic construct
  source 1..10: note = Seed: YILFTRFFYV
YVLFTRFFYQ

SEQ ID NO: 83181 - protein, 10 aa, synthetic construct
  source 1..10: note = Seed: YILFTRFFYV
YVLFTRFFYR

SEQ ID NO: 83182 - protein, 10 aa, synthetic construct
  source 1..10: note = Seed: YILFTRFFYV
YVLFTRFFYS

SEQ ID NO: 83183 - protein, 10 aa, synthetic construct
  source 1..10: note = Seed: YILFTRFFYV
YVLFTRFFYT

SEQ ID NO: 83184 - protein, 10 aa, synthetic construct
  source 1..10: note = Seed: YILFTRFFYV
YVLFTRFFYV

SEQ ID NO: 83185 - protein, 11 aa, synthetic construct
  source 1..11: note = Seed: YILFTRFFYVL
YVLFTRFFYVA

SEQ ID NO: 83186 - protein, 11 aa, synthetic construct
  source 1..11: note = Seed: YILFTRFFYVL
YVLFTRFFYVC

SEQ ID NO: 83187 - protein, 11 aa, synthetic construct
  source 1..11: note = Seed: YILFTRFFYVL
YVLFTRFFYVD

SEQ ID NO: 83188 - protein, 11 aa, synthetic construct
  source 1..11: note = Seed: YILFTRFFYVL
YVLFTRFFYVE

SEQ ID NO: 83189 - protein, 11 aa, synthetic construct
  source 1..11: note = Seed: YILFTRFFYVL
YVLFTRFFYVF

SEQ ID NO: 83190 - protein, 11 aa, synthetic construct
  source 1..11: note = Seed: YILFTRFFYVL
YVLFTRFFYVG

SEQ ID NO: 83191 - protein, 11 aa, synthetic construct
  source 1..11: note = Seed: YILFTRFFYVL
YVLFTRFFYVH

SEQ ID NO: 83192 - protein, 11 aa, synthetic construct
  source 1..11: note = Seed: YILFTRFFYVL
YVLFTRFFYVI

SEQ ID NO: 83193 - protein, 11 aa, synthetic construct
  source 1..11: note = Seed: YILFTRFFYVL
YVLFTRFFYVK

SEQ ID NO: 83194 - protein, 11 aa, synthetic construct
  source 1..11: note = Seed: YILFTRFFYVL
YVLFTRFFYVL

SEQ ID NO: 83195 - protein, 11 aa, synthetic construct
  source 1..11: note = Seed: YILFTRFFYVL
YVLFTRFFYVM

SEQ ID NO: 83196 - protein, 11 aa, synthetic construct
  source 1..11: note = Seed: YILFTRFFYVL
YVLFTRFFYVN

SEQ ID NO: 83197 - protein, 11 aa, synthetic construct
  source 1..11: note = Seed: YILFTRFFYVL
YVLFTRFFYVP

SEQ ID NO: 83198 - protein, 11 aa, synthetic construct
  source 1..11: note = Seed: YILFTRFFYVL
YVLFTRFFYVQ

SEQ ID NO: 83199 - protein, 11 aa, synthetic construct
  source 1..11: note = Seed: YILFTRFFYVL
YVLFTRFFYVR

SEQ ID NO: 83200 - protein, 11 aa, synthetic construct
  source 1..11: note = Seed: YILFTRFFYVL
YVLFTRFFYVS

SEQ ID NO: 83201 - protein, 11 aa, synthetic construct
  source 1..11: note = Seed: YILFTRFFYVL
YVLFTRFFYVT

SEQ ID NO: 83202 - protein, 11 aa, synthetic construct
  source 1..11: note = Seed: YILFTRFFYVL
YVLFTRFFYVV

SEQ ID NO: 83203 - protein, 11 aa, synthetic construct
  source 1..11: note = Seed: YILFTRFFYVL
YVLFTRFFYVW

SEQ ID NO: 83204 - protein, 11 aa, synthetic construct
  source 1..11: note = Seed: YILFTRFFYVL
YVLFTRFFYVY

SEQ ID NO: 83205 - protein, 10 aa, synthetic construct
  source 1..10: note = Seed: YILFTRFFYV
YVLFTRFFYW

SEQ ID NO: 83206 - protein, 10 aa, synthetic construct
  source 1..10: note = Seed: YILFTRFFYV
YVLFTRFFYY

SEQ ID NO: 83207 - protein, 9 aa, synthetic construct
  source 1..9: note = Seed: YKLGASQRV
YVLGASQRF

SEQ ID NO: 83208 - protein, 9 aa, synthetic construct
  source 1..9: note = Seed: YKLGASQRV
YVLGASQRY

SEQ ID NO: 83209 - protein, 10 aa, synthetic construct
  source 1..10: note = Seed: YSLLMPILTL
YVLLMPILTA

SEQ ID NO: 83210 - protein, 10 aa, synthetic construct
  source 1..10: note = Seed: YSLLMPILTL
YVLLMPILTI

SEQ ID NO: 83211 - protein, 10 aa, synthetic construct
  source 1..10: note = Seed: YSLLMPILTL
YVLLMPILTL

SEQ ID NO: 83212 - protein, 10 aa, synthetic construct
  source 1..10: note = Seed: YSLLMPILTL
YVLLMPILTV

SEQ ID NO: 83213 - protein, 10 aa, synthetic construct
  source 1..10: note = Seed: YSLLMPILTL
YVLLMPILTW

SEQ ID NO: 83214 - protein, 10 aa, synthetic construct
  source 1..10: note = Seed: YHLMSFPQSA
YVLMSFPQSA

SEQ ID NO: 83215 - protein, 11 aa, synthetic construct
  source 1..11: note = Seed: YHLMSFPQSAP
YVLMSFPQSAV

SEQ ID NO: 83216 - protein, 10 aa, synthetic construct
  source 1..10: note = Seed: YHLMSFPQSA
YVLMSFPQSI

SEQ ID NO: 83217 - protein, 10 aa, synthetic construct
  source 1..10: note = Seed: YHLMSFPQSA
YVLMSFPQSL

SEQ ID NO: 83218 - protein, 10 aa, synthetic construct
  source 1..10: note = Seed: YHLMSFPQSA
YVLMSFPQSM

SEQ ID NO: 83219 - protein, 10 aa, synthetic construct
  source 1..10: note = Seed: YHLMSFPQSA
YVLMSFPQST

SEQ ID NO: 83220 - protein, 10 aa, synthetic construct
  source 1..10: note = Seed: YHLMSFPQSA
YVLMSFPQSV

SEQ ID NO: 83221 - protein, 9 aa, synthetic construct
  source 1..9: note = Seed: YELQTPFEI
YVLQTPFEA

SEQ ID NO: 83222 - protein, 9 aa, synthetic construct
  source 1..9: note = Seed: YELQTPFEI
YVLQTPFEI

SEQ ID NO: 83223 - protein, 9 aa, synthetic construct
  source 1..9: note = Seed: YELQTPFEI
YVLQTPFEL

SEQ ID NO: 83224 - protein, 9 aa, synthetic construct
  source 1..9: note = Seed: YELQTPFEI
YVLQTPFEM

SEQ ID NO: 83225 - protein, 9 aa, synthetic construct
  source 1..9: note = Seed: YELQTPFEI
YVLQTPFEV

SEQ ID NO: 83226 - protein, 10 aa, synthetic construct
  source 1..10: note = Seed: YDLSVVNARL
YVLSVVNARA

SEQ ID NO: 83227 - protein, 10 aa, synthetic construct
  source 1..10: note = Seed: YDLSVVNARL
YVLSVVNARI

SEQ ID NO: 83228 - protein, 10 aa, synthetic construct
  source 1..10: note = Seed: YDLSVVNARL
YVLSVVNARL

SEQ ID NO: 83229 - protein, 10 aa, synthetic construct
  source 1..10: note = Seed: YDLSVVNARL
YVLSVVNARM

SEQ ID NO: 83230 - protein, 10 aa, synthetic construct
  source 1..10: note = Seed: YDLSVVNARL
YVLSVVNARV

SEQ ID NO: 83231 - protein, 8 aa, synthetic construct
  source 1..8: note = Seed: YTMADLVY
YVMADLVY

SEQ ID NO: 83232 - protein, 9 aa, synthetic construct
  source 1..9: note = Seed: YTMADLVYA
YVMADLVYA

SEQ ID NO: 83233 - protein, 10 aa, synthetic construct
  source 1..10: note = Seed: YTMADLVYAL
YVMADLVYAA

SEQ ID NO: 83234 - protein, 10 aa, synthetic construct
  source 1..10: note = Seed: YTMADLVYAL
YVMADLVYAC

SEQ ID NO: 83235 - protein, 10 aa, synthetic construct
  source 1..10: note = Seed: YTMADLVYAL
YVMADLVYAD

SEQ ID NO: 83236 - protein, 10 aa, synthetic construct
  source 1..10: note = Seed: YTMADLVYAL
YVMADLVYAE

SEQ ID NO: 83237 - protein, 10 aa, synthetic construct
  source 1..10: note = Seed: YTMADLVYAL
YVMADLVYAF

SEQ ID NO: 83238 - protein, 10 aa, synthetic construct
  source 1..10: note = Seed: YTMADLVYAL
YVMADLVYAG

SEQ ID NO: 83239 - protein, 10 aa, synthetic construct
  source 1..10: note = Seed: YTMADLVYAL
YVMADLVYAH

SEQ ID NO: 83240 - protein, 10 aa, synthetic construct
  source 1..10: note = Seed: YTMADLVYAL
YVMADLVYAI

SEQ ID NO: 83241 - protein, 10 aa, synthetic construct
  source 1..10: note = Seed: YTMADLVYAL
YVMADLVYAK

SEQ ID NO: 83242 - protein, 10 aa, synthetic construct
  source 1..10: note = Seed: YTMADLVYAL
YVMADLVYAL

SEQ ID NO: 83243 - protein, 11 aa, synthetic construct
  source 1..11: note = Seed: YTMADLVYALR
YVMADLVYALA

SEQ ID NO: 83244 - protein, 11 aa, synthetic construct
  source 1..11: note = Seed: YTMADLVYALR
YVMADLVYALC

SEQ ID NO: 83245 - protein, 11 aa, synthetic construct
  source 1..11: note = Seed: YTMADLVYALR
YVMADLVYALD

SEQ ID NO: 83246 - protein, 11 aa, synthetic construct
  source 1..11: note = Seed: YTMADLVYALR
YVMADLVYALE

SEQ ID NO: 83247 - protein, 11 aa, synthetic construct
  source 1..11: note = Seed: YTMADLVYALR
YVMADLVYALF

SEQ ID NO: 83248 - protein, 11 aa, synthetic construct
  source 1..11: note = Seed: YTMADLVYALR
YVMADLVYALG

SEQ ID NO: 83249 - protein, 11 aa, synthetic construct
  source 1..11: note = Seed: YTMADLVYALR
YVMADLVYALH

SEQ ID NO: 83250 - protein, 11 aa, synthetic construct
  source 1..11: note = Seed: YTMADLVYALR
YVMADLVYALI

SEQ ID NO: 83251 - protein, 11 aa, synthetic construct
  source 1..11: note = Seed: YTMADLVYALR
YVMADLVYALK

SEQ ID NO: 83252 - protein, 11 aa, synthetic construct
  source 1..11: note = Seed: YTMADLVYALR
YVMADLVYALL

SEQ ID NO: 83253 - protein, 11 aa, synthetic construct
  source 1..11: note = Seed: YTMADLVYALR
YVMADLVYALM

SEQ ID NO: 83254 - protein, 11 aa, synthetic construct
  source 1..11: note = Seed: YTMADLVYALR
YVMADLVYALN

SEQ ID NO: 83255 - protein, 11 aa, synthetic construct
  source 1..11: note = Seed: YTMADLVYALR
YVMADLVYALP

SEQ ID NO: 83256 - protein, 11 aa, synthetic construct
  source 1..11: note = Seed: YTMADLVYALR
YVMADLVYALQ

SEQ ID NO: 83257 - protein, 11 aa, synthetic construct
  source 1..11: note = Seed: YTMADLVYALR
YVMADLVYALR

SEQ ID NO: 83258 - protein, 11 aa, synthetic construct
  source 1..11: note = Seed: YTMADLVYALR
YVMADLVYALS

SEQ ID NO: 83259 - protein, 11 aa, synthetic construct
  source 1..11: note = Seed: YTMADLVYALR
YVMADLVYALT

SEQ ID NO: 83260 - protein, 11 aa, synthetic construct
  source 1..11: note = Seed: YTMADLVYALR
YVMADLVYALV

SEQ ID NO: 83261 - protein, 11 aa, synthetic construct
  source 1..11: note = Seed: YTMADLVYALR
YVMADLVYALW

SEQ ID NO: 83262 - protein, 11 aa, synthetic construct
  source 1..11: note = Seed: YTMADLVYALR
YVMADLVYALY

SEQ ID NO: 83263 - protein, 10 aa, synthetic construct
  source 1..10: note = Seed: YTMADLVYAL
YVMADLVYAM

SEQ ID NO: 83264 - protein, 10 aa, synthetic construct
  source 1..10: note = Seed: YTMADLVYAL
YVMADLVYAN

SEQ ID NO: 83265 - protein, 10 aa, synthetic construct
  source 1..10: note = Seed: YTMADLVYAL
YVMADLVYAP

SEQ ID NO: 83266 - protein, 10 aa, synthetic construct
  source 1..10: note = Seed: YTMADLVYAL
YVMADLVYAQ

SEQ ID NO: 83267 - protein, 10 aa, synthetic construct
  source 1..10: note = Seed: YTMADLVYAL
YVMADLVYAR

SEQ ID NO: 83268 - protein, 10 aa, synthetic construct
  source 1..10: note = Seed: YTMADLVYAL
YVMADLVYAS

SEQ ID NO: 83269 - protein, 10 aa, synthetic construct
  source 1..10: note = Seed: YTMADLVYAL
YVMADLVYAT

SEQ ID NO: 83270 - protein, 10 aa, synthetic construct
  source 1..10: note = Seed: YTMADLVYAL
YVMADLVYAV

SEQ ID NO: 83271 - protein, 10 aa, synthetic construct
  source 1..10: note = Seed: YTMADLVYAL
YVMADLVYAW

SEQ ID NO: 83272 - protein, 10 aa, synthetic construct
  source 1..10: note = Seed: YTMADLVYAL
YVMADLVYAY

SEQ ID NO: 83273 - protein, 9 aa, synthetic construct
  source 1..9: note = Seed: YTMADLVYA
YVMADLVYC

SEQ ID NO: 83274 - protein, 9 aa, synthetic construct
  source 1..9: note = Seed: YTMADLVYA
YVMADLVYF

SEQ ID NO: 83275 - protein, 9 aa, synthetic construct
  source 1..9: note = Seed: YTMADLVYA
YVMADLVYG

SEQ ID NO: 83276 - protein, 9 aa, synthetic construct
  source 1..9: note = Seed: YTMADLVYA
YVMADLVYI

SEQ ID NO: 83277 - protein, 9 aa, synthetic construct
  source 1..9: note = Seed: YTMADLVYA
YVMADLVYK

SEQ ID NO: 83278 - protein, 9 aa, synthetic construct
  source 1..9: note = Seed: YTMADLVYA
YVMADLVYL

SEQ ID NO: 83279 - protein, 9 aa, synthetic construct
  source 1..9: note = Seed: YTMADLVYA
YVMADLVYM

SEQ ID NO: 83280 - protein, 9 aa, synthetic construct
  source 1..9: note = Seed: YTMADLVYA
YVMADLVYR

SEQ ID NO: 83281 - protein, 9 aa, synthetic construct
  source 1..9: note = Seed: YTMADLVYA
YVMADLVYS

SEQ ID NO: 83282 - protein, 9 aa, synthetic construct
  source 1..9: note = Seed: YTMADLVYA
YVMADLVYT

SEQ ID NO: 83283 - protein, 9 aa, synthetic construct
  source 1..9: note = Seed: YTMADLVYA
YVMADLVYV

SEQ ID NO: 83284 - protein, 9 aa, synthetic construct
  source 1..9: note = Seed: YTMADLVYA
YVMADLVYY

SEQ ID NO: 83285 - protein, 9 aa, synthetic construct
  source 1..9: note = Seed: YVMHANYIF
YVMHANYIA

SEQ ID NO: 83286 - protein, 10 aa, synthetic construct
  source 1..10: note = Seed: YVMHANYIFW
YVMHANYIFF

SEQ ID NO: 83287 - protein, 10 aa, synthetic construct
  source 1..10: note = Seed: YVMHANYIFW
YVMHANYIFY

SEQ ID NO: 83288 - protein, 9 aa, synthetic construct
  source 1..9: note = Seed: YVMHANYIF
YVMHANYII

SEQ ID NO: 83289 - protein, 9 aa, synthetic construct
  source 1..9: note = Seed: YVMHANYIF
YVMHANYIL

SEQ ID NO: 83290 - protein, 9 aa, synthetic construct
  source 1..9: note = Seed: YVMHANYIF
YVMHANYIM

SEQ ID NO: 83291 - protein, 9 aa, synthetic construct
  source 1..9: note = Seed: YVMHANYIF
YVMHANYIV

SEQ ID NO: 83292 - protein, 9 aa, synthetic construct
  source 1..9: note = Seed: YVMHANYIF
YVMHANYIW

SEQ ID NO: 83293 - protein, 9 aa, synthetic construct
  source 1..9: note = Seed: YVMHANYIF
YVMHANYIY

SEQ ID NO: 83294 - protein, 9 aa, synthetic construct
  source 1..9: note = Seed: YTNDKACPL
YVNDKACPA

SEQ ID NO: 83295 - protein, 9 aa, synthetic construct
  source 1..9: note = Seed: YTNDKACPL
YVNDKACPF

SEQ ID NO: 83296 - protein, 9 aa, synthetic construct
  source 1..9: note = Seed: YTNDKACPL
YVNDKACPI

SEQ ID NO: 83297 - protein, 9 aa, synthetic construct
  source 1..9: note = Seed: YTNDKACPL
YVNDKACPL

SEQ ID NO: 83298 - protein, 10 aa, synthetic construct
  source 1..10: note = Seed: YTNDKACPLI
YVNDKACPLV

SEQ ID NO: 83299 - protein, 9 aa, synthetic construct
  source 1..9: note = Seed: YTNDKACPL
YVNDKACPM

SEQ ID NO: 83300 - protein, 9 aa, synthetic construct
  source 1..9: note = Seed: YTNDKACPL
YVNDKACPV

SEQ ID NO: 83301 - protein, 9 aa, synthetic construct
  source 1..9: note = Seed: YTNDKACPL
YVNDKACPY

SEQ ID NO: 83302 - protein, 10 aa, synthetic construct
  source 1..10: note = Seed: YANGGKGFCK
YVNGGKGFCR

SEQ ID NO: 83303 - protein, 10 aa, synthetic construct
  source 1..10: note = Seed: YQNNVFMSEA
YVNNVFMSEA

SEQ ID NO: 83304 - protein, 10 aa, synthetic construct
  source 1..10: note = Seed: YQNNVFMSEA
YVNNVFMSEI

SEQ ID NO: 83305 - protein, 10 aa, synthetic construct
  source 1..10: note = Seed: YQNNVFMSEA
YVNNVFMSEL

SEQ ID NO: 83306 - protein, 10 aa, synthetic construct
  source 1..10: note = Seed: YQNNVFMSEA
YVNNVFMSEV

SEQ ID NO: 83307 - protein, 9 aa, synthetic construct
  source 1..9: note = Seed: YQNNVFMSE
YVNNVFMSF

SEQ ID NO: 83308 - protein, 9 aa, synthetic construct
  source 1..9: note = Seed: YQNNVFMSE
YVNNVFMSM

SEQ ID NO: 83309 - protein, 9 aa, synthetic construct
  source 1..9: note = Seed: YQNNVFMSE
YVNNVFMSY

SEQ ID NO: 83310 - protein, 9 aa, synthetic construct
  source 1..9: note = Seed: YANSVFNIC
YVNSVFNIF

SEQ ID NO: 83311 - protein, 9 aa, synthetic construct
  source 1..9: note = Seed: YANSVFNIC
YVNSVFNIL

SEQ ID NO: 83312 - protein, 9 aa, synthetic construct
  source 1..9: note = Seed: YANSVFNIC
YVNSVFNIM

SEQ ID NO: 83313 - protein, 9 aa, synthetic construct
  source 1..9: note = Seed: YANSVFNIC
YVNSVFNIV

SEQ ID NO: 83314 - protein, 9 aa, synthetic construct
  source 1..9: note = Seed: YANSVFNIC
YVNSVFNIY

SEQ ID NO: 83315 - protein, 9 aa, synthetic construct
  source 1..9: note = Seed: YVNTFSSTF
YVNTFSSTI

SEQ ID NO: 83316 - protein, 9 aa, synthetic construct
  source 1..9: note = Seed: YVNTFSSTF
YVNTFSSTL

SEQ ID NO: 83317 - protein, 9 aa, synthetic construct
  source 1..9: note = Seed: YVNTFSSTF
YVNTFSSTM

SEQ ID NO: 83318 - protein, 9 aa, synthetic construct
  source 1..9: note = Seed: YVNTFSSTF
YVNTFSSTV

SEQ ID NO: 83319 - protein, 9 aa, synthetic construct
  source 1..9: note = Seed: YVNTFSSTF
YVNTFSSTW

SEQ ID NO: 83320 - protein, 9 aa, synthetic construct
  source 1..9: note = Seed: YVNTFSSTF
YVNTFSSTY

SEQ ID NO: 83321 - protein, 10 aa, synthetic construct
  source 1..10: note = Seed: YTPHTVLQAV
YVPHTVLQAA

SEQ ID NO: 83322 - protein, 10 aa, synthetic construct
  source 1..10: note = Seed: YTPHTVLQAV
YVPHTVLQAI

SEQ ID NO: 83323 - protein, 10 aa, synthetic construct
  source 1..10: note = Seed: YTPHTVLQAV
YVPHTVLQAL

SEQ ID NO: 83324 - protein, 10 aa, synthetic construct
  source 1..10: note = Seed: YTPHTVLQAV
YVPHTVLQAM

SEQ ID NO: 83325 - protein, 10 aa, synthetic construct
  source 1..10: note = Seed: YTPHTVLQAV
YVPHTVLQAV

SEQ ID NO: 83326 - protein, 9 aa, synthetic construct
  source 1..9: note = Seed: YTPHTVLQA
YVPHTVLQI

SEQ ID NO: 83327 - protein, 9 aa, synthetic construct
  source 1..9: note = Seed: YTPHTVLQA
YVPHTVLQL

SEQ ID NO: 83328 - protein, 9 aa, synthetic construct
  source 1..9: note = Seed: YTPHTVLQA
YVPHTVLQV

SEQ ID NO: 83329 - protein, 10 aa, synthetic construct
  source 1..10: note = Seed: YLPIDKCSRI
YVPIDKCSRV

SEQ ID NO: 83330 - protein, 9 aa, synthetic construct
  source 1..9: note = Seed: YVPLKSATC
YVPLKSATF

SEQ ID NO: 83331 - protein, 9 aa, synthetic construct
  source 1..9: note = Seed: YVPLKSATC
YVPLKSATI

SEQ ID NO: 83332 - protein, 9 aa, synthetic construct
  source 1..9: note = Seed: YVPLKSATC
YVPLKSATL

SEQ ID NO: 83333 - protein, 9 aa, synthetic construct
  source 1..9: note = Seed: YVPLKSATC
YVPLKSATM

SEQ ID NO: 83334 - protein, 9 aa, synthetic construct
  source 1..9: note = Seed: YVPLKSATC
YVPLKSATV

SEQ ID NO: 83335 - protein, 8 aa, synthetic construct
  source 1..8: note = Seed: YMPYFFTL
YVPYFFTF

SEQ ID NO: 83336 - protein, 9 aa, synthetic construct
  source 1..9: note = Seed: YMPYFFTLL
YVPYFFTLA

SEQ ID NO: 83337 - protein, 9 aa, synthetic construct
  source 1..9: note = Seed: YMPYFFTLL
YVPYFFTLF

SEQ ID NO: 83338 - protein, 9 aa, synthetic construct
  source 1..9: note = Seed: YMPYFFTLL
YVPYFFTLI

SEQ ID NO: 83339 - protein, 9 aa, synthetic construct
  source 1..9: note = Seed: YMPYFFTLL
YVPYFFTLL

SEQ ID NO: 83340 - protein, 10 aa, synthetic construct
  source 1..10: note = Seed: YMPYFFTLLL
YVPYFFTLLA

SEQ ID NO: 83341 - protein, 10 aa, synthetic construct
  source 1..10: note = Seed: YMPYFFTLLL
YVPYFFTLLF

SEQ ID NO: 83342 - protein, 10 aa, synthetic construct
  source 1..10: note = Seed: YMPYFFTLLL
YVPYFFTLLL

SEQ ID NO: 83343 - protein, 10 aa, synthetic construct
  source 1..10: note = Seed: YMPYFFTLLL
YVPYFFTLLM

SEQ ID NO: 83344 - protein, 10 aa, synthetic construct
  source 1..10: note = Seed: YMPYFFTLLL
YVPYFFTLLT

SEQ ID NO: 83345 - protein, 10 aa, synthetic construct
  source 1..10: note = Seed: YMPYFFTLLL
YVPYFFTLLV

SEQ ID NO: 83346 - protein, 10 aa, synthetic construct
  source 1..10: note = Seed: YMPYFFTLLL
YVPYFFTLLW

SEQ ID NO: 83347 - protein, 10 aa, synthetic construct
  source 1..10: note = Seed: YMPYFFTLLL
YVPYFFTLLY

SEQ ID NO: 83348 - protein, 9 aa, synthetic construct
  source 1..9: note = Seed: YMPYFFTLL
YVPYFFTLM

SEQ ID NO: 83349 - protein, 9 aa, synthetic construct
  source 1..9: note = Seed: YMPYFFTLL
YVPYFFTLV

SEQ ID NO: 83350 - protein, 8 aa, synthetic construct
  source 1..8: note = Seed: YMPYFFTL
YVPYFFTV

SEQ ID NO: 83351 - protein, 9 aa, synthetic construct
  source 1..9: note = Seed: YQPYRVVVL
YVPYRVVVL

SEQ ID NO: 83352 - protein, 10 aa, synthetic construct
  source 1..10: note = Seed: YQPYRVVVLS
YVPYRVVVLA

SEQ ID NO: 83353 - protein, 9 aa, synthetic construct
  source 1..9: note = Seed: YQPYRVVVL
YVPYRVVVM

SEQ ID NO: 83354 - protein, 9 aa, synthetic construct
  source 1..9: note = Seed: YQPYRVVVL
YVPYRVVVV

SEQ ID NO: 83355 - protein, 9 aa, synthetic construct
  source 1..9: note = Seed: YQPYRVVVL
YVPYRVVVY

SEQ ID NO: 83356 - protein, 10 aa, synthetic construct
  source 1..10: note = Seed: YKQFDTYNLW
YVQFDTYNLF

SEQ ID NO: 83357 - protein, 10 aa, synthetic construct
  source 1..10: note = Seed: YKQFDTYNLW
YVQFDTYNLM

SEQ ID NO: 83358 - protein, 10 aa, synthetic construct
  source 1..10: note = Seed: YKQFDTYNLW
YVQFDTYNLW

SEQ ID NO: 83359 - protein, 10 aa, synthetic construct
  source 1..10: note = Seed: YKQFDTYNLW
YVQFDTYNLY

SEQ ID NO: 83360 - protein, 9 aa, synthetic construct
  source 1..9: note = Seed: YSQLMCQPI
YVQLMCQPF

SEQ ID NO: 83361 - protein, 10 aa, synthetic construct
  source 1..10: note = Seed: YSQLMCQPIL
YVQLMCQPIF

SEQ ID NO: 83362 - protein, 11 aa, synthetic construct
  source 1..11: note = Seed: YSQLMCQPILL
YVQLMCQPILA

SEQ ID NO: 83363 - protein, 11 aa, synthetic construct
  source 1..11: note = Seed: YSQLMCQPILL
YVQLMCQPILI

SEQ ID NO: 83364 - protein, 11 aa, synthetic construct
  source 1..11: note = Seed: YSQLMCQPILL
YVQLMCQPILL

SEQ ID NO: 83365 - protein, 11 aa, synthetic construct
  source 1..11: note = Seed: YSQLMCQPILL
YVQLMCQPILM

SEQ ID NO: 83366 - protein, 11 aa, synthetic construct
  source 1..11: note = Seed: YSQLMCQPILL
YVQLMCQPILV

SEQ ID NO: 83367 - protein, 10 aa, synthetic construct
  source 1..10: note = Seed: YSQLMCQPIL
YVQLMCQPIY

SEQ ID NO: 83368 - protein, 9 aa, synthetic construct
  source 1..9: note = Seed: YSQLMCQPI
YVQLMCQPM

SEQ ID NO: 83369 - protein, 9 aa, synthetic construct
  source 1..9: note = Seed: YSQLMCQPI
YVQLMCQPV

SEQ ID NO: 83370 - protein, 9 aa, synthetic construct
  source 1..9: note = Seed: YSQLMCQPI
YVQLMCQPY

SEQ ID NO: 83371 - protein, 9 aa, synthetic construct
  source 1..9: note = Seed: YYQNNVFMS
YVQNNVFMF

SEQ ID NO: 83372 - protein, 9 aa, synthetic construct
  source 1..9: note = Seed: YYQNNVFMS
YVQNNVFMW

SEQ ID NO: 83373 - protein, 9 aa, synthetic construct
  source 1..9: note = Seed: YLQPRTFLL
YVQPRTFLA

SEQ ID NO: 83374 - protein, 9 aa, synthetic construct
  source 1..9: note = Seed: YLQPRTFLL
YVQPRTFLF

SEQ ID NO: 83375 - protein, 9 aa, synthetic construct
  source 1..9: note = Seed: YLQPRTFLL
YVQPRTFLI

SEQ ID NO: 83376 - protein, 9 aa, synthetic construct
  source 1..9: note = Seed: YLQPRTFLL
YVQPRTFLL

SEQ ID NO: 83377 - protein, 10 aa, synthetic construct
  source 1..10: note = Seed: YLQPRTFLLK
YVQPRTFLLK

SEQ ID NO: 83378 - protein, 11 aa, synthetic construct
  source 1..11: note = Seed: YLQPRTFLLKY
YVQPRTFLLKY

SEQ ID NO: 83379 - protein, 10 aa, synthetic construct
  source 1..10: note = Seed: YLQPRTFLLK
YVQPRTFLLR

SEQ ID NO: 83380 - protein, 10 aa, synthetic construct
  source 1..10: note = Seed: YLQPRTFLLK
YVQPRTFLLV

SEQ ID NO: 83381 - protein, 9 aa, synthetic construct
  source 1..9: note = Seed: YLQPRTFLL
YVQPRTFLM

SEQ ID NO: 83382 - protein, 9 aa, synthetic construct
  source 1..9: note = Seed: YLQPRTFLL
YVQPRTFLV

SEQ ID NO: 83383 - protein, 9 aa, synthetic construct
  source 1..9: note = Seed: YLQPRTFLL
YVQPRTFLW

SEQ ID NO: 83384 - protein, 9 aa, synthetic construct
  source 1..9: note = Seed: YLQPRTFLL
YVQPRTFLY

SEQ ID NO: 83385 - protein, 9 aa, synthetic construct
  source 1..9: note = Seed: YPQVNGLTS
YVQVNGLTF

SEQ ID NO: 83386 - protein, 9 aa, synthetic construct
  source 1..9: note = Seed: YPQVNGLTS
YVQVNGLTM

SEQ ID NO: 83387 - protein, 10 aa, synthetic construct
  source 1..10: note = Seed: YPQVNGLTSI
YVQVNGLTSA

SEQ ID NO: 83388 - protein, 10 aa, synthetic construct
  source 1..10: note = Seed: YPQVNGLTSI
YVQVNGLTSF

SEQ ID NO: 83389 - protein, 10 aa, synthetic construct
  source 1..10: note = Seed: YPQVNGLTSI
YVQVNGLTSI

SEQ ID NO: 83390 - protein, 10 aa, synthetic construct
  source 1..10: note = Seed: YPQVNGLTSI
YVQVNGLTSL

SEQ ID NO: 83391 - protein, 10 aa, synthetic construct
  source 1..10: note = Seed: YPQVNGLTSI
YVQVNGLTSM

SEQ ID NO: 83392 - protein, 10 aa, synthetic construct
  source 1..10: note = Seed: YPQVNGLTSI
YVQVNGLTSV

SEQ ID NO: 83393 - protein, 10 aa, synthetic construct
  source 1..10: note = Seed: YPQVNGLTSI
YVQVNGLTSY

SEQ ID NO: 83394 - protein, 9 aa, synthetic construct
  source 1..9: note = Seed: YPQVNGLTS
YVQVNGLTY

SEQ ID NO: 83395 - protein, 9 aa, synthetic construct
  source 1..9: note = Seed: YYRARAGEA
YVRARAGEK

SEQ ID NO: 83396 - protein, 9 aa, synthetic construct
  source 1..9: note = Seed: YKRDAPAHI
YVRDAPAHF

SEQ ID NO: 83397 - protein, 9 aa, synthetic construct
  source 1..9: note = Seed: YKRDAPAHI
YVRDAPAHY

SEQ ID NO: 83398 - protein, 10 aa, synthetic construct
  source 1..10: note = Seed: YRRLISMMGF
YVRLISMMGF

SEQ ID NO: 83399 - protein, 10 aa, synthetic construct
  source 1..10: note = Seed: YRRLISMMGF
YVRLISMMGI

SEQ ID NO: 83400 - protein, 10 aa, synthetic construct
  source 1..10: note = Seed: YRRLISMMGF
YVRLISMMGL

SEQ ID NO: 83401 - protein, 10 aa, synthetic construct
  source 1..10: note = Seed: YRRLISMMGF
YVRLISMMGM

SEQ ID NO: 83402 - protein, 9 aa, synthetic construct
  source 1..9: note = Seed: YFRLTLGVY
YVRLTLGVF

SEQ ID NO: 83403 - protein, 9 aa, synthetic construct
  source 1..9: note = Seed: YFRLTLGVY
YVRLTLGVY

SEQ ID NO: 83404 - protein, 9 aa, synthetic construct
  source 1..9: note = Seed: YKRNRATRV
YVRNRATRL

SEQ ID NO: 83405 - protein, 9 aa, synthetic construct
  source 1..9: note = Seed: YKRNRATRV
YVRNRATRM

SEQ ID NO: 83406 - protein, 9 aa, synthetic construct
  source 1..9: note = Seed: YYRSLPGVF
YVRSLPGVF

SEQ ID NO: 83407 - protein, 9 aa, synthetic construct
  source 1..9: note = Seed: YYRSLPGVF
YVRSLPGVY

SEQ ID NO: 83408 - protein, 9 aa, synthetic construct
  source 1..9: note = Seed: YYRYNLPTM
YVRYNLPTF

SEQ ID NO: 83409 - protein, 9 aa, synthetic construct
  source 1..9: note = Seed: YYRYNLPTM
YVRYNLPTI

SEQ ID NO: 83410 - protein, 9 aa, synthetic construct
  source 1..9: note = Seed: YYRYNLPTM
YVRYNLPTK

SEQ ID NO: 83411 - protein, 9 aa, synthetic construct
  source 1..9: note = Seed: YYRYNLPTM
YVRYNLPTL

SEQ ID NO: 83412 - protein, 9 aa, synthetic construct
  source 1..9: note = Seed: YYRYNLPTM
YVRYNLPTM

SEQ ID NO: 83413 - protein, 10 aa, synthetic construct
  source 1..10: note = Seed: YYRYNLPTMC
YVRYNLPTMF

SEQ ID NO: 83414 - protein, 10 aa, synthetic construct
  source 1..10: note = Seed: YYRYNLPTMC
YVRYNLPTMI

SEQ ID NO: 83415 - protein, 10 aa, synthetic construct
  source 1..10: note = Seed: YYRYNLPTMC
YVRYNLPTML

SEQ ID NO: 83416 - protein, 10 aa, synthetic construct
  source 1..10: note = Seed: YYRYNLPTMC
YVRYNLPTMM

SEQ ID NO: 83417 - protein, 10 aa, synthetic construct
  source 1..10: note = Seed: YYRYNLPTMC
YVRYNLPTMV

SEQ ID NO: 83418 - protein, 9 aa, synthetic construct
  source 1..9: note = Seed: YYRYNLPTM
YVRYNLPTV

SEQ ID NO: 83419 - protein, 9 aa, synthetic construct
  source 1..9: note = Seed: YYRYNLPTM
YVRYNLPTY

SEQ ID NO: 83420 - protein, 9 aa, synthetic construct
  source 1..9: note = Seed: YSRYRIGNY
YVRYRIGNK

SEQ ID NO: 83421 - protein, 9 aa, synthetic construct
  source 1..9: note = Seed: YSRYRIGNY
YVRYRIGNY

SEQ ID NO: 83422 - protein, 10 aa, synthetic construct
  source 1..10: note = Seed: YSRYRIGNYK
YVRYRIGNYF

SEQ ID NO: 83423 - protein, 10 aa, synthetic construct
  source 1..10: note = Seed: YSRYRIGNYK
YVRYRIGNYK

SEQ ID NO: 83424 - protein, 11 aa, synthetic construct
  source 1..11: note = Seed: YSRYRIGNYKL
YVRYRIGNYKF

SEQ ID NO: 83425 - protein, 10 aa, synthetic construct
  source 1..10: note = Seed: YSRYRIGNYK
YVRYRIGNYL

SEQ ID NO: 83426 - protein, 10 aa, synthetic construct
  source 1..10: note = Seed: YSRYRIGNYK
YVRYRIGNYM

SEQ ID NO: 83427 - protein, 10 aa, synthetic construct
  source 1..10: note = Seed: YSRYRIGNYK
YVRYRIGNYR

SEQ ID NO: 83428 - protein, 9 aa, synthetic construct
  source 1..9: note = Seed: YSSANNCTF
YVSANNCTF

SEQ ID NO: 83429 - protein, 11 aa, synthetic construct
  source 1..11: note = Seed: YSSANNCTFEY
YVSANNCTFEW

SEQ ID NO: 83430 - protein, 11 aa, synthetic construct
  source 1..11: note = Seed: YSSANNCTFEY
YVSANNCTFEY

SEQ ID NO: 83431 - protein, 9 aa, synthetic construct
  source 1..9: note = Seed: YSSANNCTF
YVSANNCTL

SEQ ID NO: 83432 - protein, 9 aa, synthetic construct
  source 1..9: note = Seed: YSSANNCTF
YVSANNCTM

SEQ ID NO: 83433 - protein, 9 aa, synthetic construct
  source 1..9: note = Seed: YSSANNCTF
YVSANNCTW

SEQ ID NO: 83434 - protein, 9 aa, synthetic construct
  source 1..9: note = Seed: YSSANNCTF
YVSANNCTY

SEQ ID NO: 83435 - protein, 9 aa, synthetic construct
  source 1..9: note = Seed: YNSASFSTF
YVSASFSTF

SEQ ID NO: 83436 - protein, 10 aa, synthetic construct
  source 1..10: note = Seed: YNSASFSTFK
YVSASFSTFK

SEQ ID NO: 83437 - protein, 10 aa, synthetic construct
  source 1..10: note = Seed: YNSASFSTFK
YVSASFSTFR

SEQ ID NO: 83438 - protein, 9 aa, synthetic construct
  source 1..9: note = Seed: YNSASFSTF
YVSASFSTI

SEQ ID NO: 83439 - protein, 9 aa, synthetic construct
  source 1..9: note = Seed: YNSASFSTF
YVSASFSTL

SEQ ID NO: 83440 - protein, 9 aa, synthetic construct
  source 1..9: note = Seed: YNSASFSTF
YVSASFSTM

SEQ ID NO: 83441 - protein, 9 aa, synthetic construct
  source 1..9: note = Seed: YNSASFSTF
YVSASFSTV

SEQ ID NO: 83442 - protein, 9 aa, synthetic construct
  source 1..9: note = Seed: YNSASFSTF
YVSASFSTW

SEQ ID NO: 83443 - protein, 9 aa, synthetic construct
  source 1..9: note = Seed: YNSASFSTF
YVSASFSTY

SEQ ID NO: 83444 - protein, 9 aa, synthetic construct
  source 1..9: note = Seed: YASAVVLLI
YVSAVVLLA

SEQ ID NO: 83445 - protein, 9 aa, synthetic construct
  source 1..9: note = Seed: YASAVVLLI
YVSAVVLLF

SEQ ID NO: 83446 - protein, 9 aa, synthetic construct
  source 1..9: note = Seed: YASAVVLLI
YVSAVVLLI

SEQ ID NO: 83447 - protein, 10 aa, synthetic construct
  source 1..10: note = Seed: YASAVVLLIL
YVSAVVLLIL

SEQ ID NO: 83448 - protein, 10 aa, synthetic construct
  source 1..10: note = Seed: YASAVVLLIL
YVSAVVLLIV

SEQ ID NO: 83449 - protein, 10 aa, synthetic construct
  source 1..10: note = Seed: YASAVVLLIL
YVSAVVLLIW

SEQ ID NO: 83450 - protein, 9 aa, synthetic construct
  source 1..9: note = Seed: YASAVVLLI
YVSAVVLLL

SEQ ID NO: 83451 - protein, 9 aa, synthetic construct
  source 1..9: note = Seed: YASAVVLLI
YVSAVVLLM

SEQ ID NO: 83452 - protein, 9 aa, synthetic construct
  source 1..9: note = Seed: YASAVVLLI
YVSAVVLLV

SEQ ID NO: 83453 - protein, 9 aa, synthetic construct
  source 1..9: note = Seed: YASAVVLLI
YVSAVVLLW

SEQ ID NO: 83454 - protein, 9 aa, synthetic construct
  source 1..9: note = Seed: YASAVVLLI
YVSAVVLLY

SEQ ID NO: 83455 - protein, 11 aa, synthetic construct
  source 1..11: note = Seed: YYSLLMPILTL
YVSLLMPILTV

SEQ ID NO: 83456 - protein, 11 aa, synthetic construct
  source 1..11: note = Seed: YRSLPGVFCGV
YVSLPGVFCGI

SEQ ID NO: 83457 - protein, 11 aa, synthetic construct
  source 1..11: note = Seed: YRSLPGVFCGV
YVSLPGVFCGV

SEQ ID NO: 83458 - protein, 10 aa, synthetic construct
  source 1..10: note = Seed: YESLRPDTRY
YVSLRPDTRF

SEQ ID NO: 83459 - protein, 10 aa, synthetic construct
  source 1..10: note = Seed: YESLRPDTRY
YVSLRPDTRW

SEQ ID NO: 83460 - protein, 9 aa, synthetic construct
  source 1..9: note = Seed: YTSNPTTFH
YVSNPTTFF

SEQ ID NO: 83461 - protein, 10 aa, synthetic construct
  source 1..10: note = Seed: YTSNPTTFHL
YVSNPTTFHF

SEQ ID NO: 83462 - protein, 10 aa, synthetic construct
  source 1..10: note = Seed: YTSNPTTFHL
YVSNPTTFHI

SEQ ID NO: 83463 - protein, 10 aa, synthetic construct
  source 1..10: note = Seed: YTSNPTTFHL
YVSNPTTFHL

SEQ ID NO: 83464 - protein, 10 aa, synthetic construct
  source 1..10: note = Seed: YTSNPTTFHL
YVSNPTTFHV

SEQ ID NO: 83465 - protein, 10 aa, synthetic construct
  source 1..10: note = Seed: YTSNPTTFHL
YVSNPTTFHW

SEQ ID NO: 83466 - protein, 10 aa, synthetic construct
  source 1..10: note = Seed: YTSNPTTFHL
YVSNPTTFHY

SEQ ID NO: 83467 - protein, 9 aa, synthetic construct
  source 1..9: note = Seed: YTSNPTTFH
YVSNPTTFK

SEQ ID NO: 83468 - protein, 9 aa, synthetic construct
  source 1..9: note = Seed: YTSNPTTFH
YVSNPTTFL

SEQ ID NO: 83469 - protein, 9 aa, synthetic construct
  source 1..9: note = Seed: YTSNPTTFH
YVSNPTTFM

SEQ ID NO: 83470 - protein, 9 aa, synthetic construct
  source 1..9: note = Seed: YTSNPTTFH
YVSNPTTFR

SEQ ID NO: 83471 - protein, 9 aa, synthetic construct
  source 1..9: note = Seed: YTSNPTTFH
YVSNPTTFY

SEQ ID NO: 83472 - protein, 10 aa, synthetic construct
  source 1..10: note = Seed: YLTFYLTNDV
YVTFYLTNDI

SEQ ID NO: 83473 - protein, 10 aa, synthetic construct
  source 1..10: note = Seed: YLTFYLTNDV
YVTFYLTNDV

SEQ ID NO: 83474 - protein, 9 aa, synthetic construct
  source 1..9: note = Seed: YITGGVVQL
YVTGGVVQF

SEQ ID NO: 83475 - protein, 9 aa, synthetic construct
  source 1..9: note = Seed: YITGGVVQL
YVTGGVVQI

SEQ ID NO: 83476 - protein, 9 aa, synthetic construct
  source 1..9: note = Seed: YITGGVVQL
YVTGGVVQL

SEQ ID NO: 83477 - protein, 9 aa, synthetic construct
  source 1..9: note = Seed: YITGGVVQL
YVTGGVVQM

SEQ ID NO: 83478 - protein, 9 aa, synthetic construct
  source 1..9: note = Seed: YITGGVVQL
YVTGGVVQV

SEQ ID NO: 83479 - protein, 9 aa, synthetic construct
  source 1..9: note = Seed: YITGGVVQL
YVTGGVVQY

SEQ ID NO: 83480 - protein, 11 aa, synthetic construct
  source 1..11: note = Seed: YSTGSNVFQTR
YVTGSNVFQTR

SEQ ID NO: 83481 - protein, 9 aa, synthetic construct
  source 1..9: note = Seed: YLTNDVSFL
YVTNDVSFF

SEQ ID NO: 83482 - protein, 9 aa, synthetic construct
  source 1..9: note = Seed: YLTNDVSFL
YVTNDVSFI

SEQ ID NO: 83483 - protein, 9 aa, synthetic construct
  source 1..9: note = Seed: YLTNDVSFL
YVTNDVSFL

SEQ ID NO: 83484 - protein, 10 aa, synthetic construct
  source 1..10: note = Seed: YLTNDVSFLA
YVTNDVSFLA

SEQ ID NO: 83485 - protein, 10 aa, synthetic construct
  source 1..10: note = Seed: YLTNDVSFLA
YVTNDVSFLI

SEQ ID NO: 83486 - protein, 10 aa, synthetic construct
  source 1..10: note = Seed: YLTNDVSFLA
YVTNDVSFLL

SEQ ID NO: 83487 - protein, 10 aa, synthetic construct
  source 1..10: note = Seed: YLTNDVSFLA
YVTNDVSFLM

SEQ ID NO: 83488 - protein, 10 aa, synthetic construct
  source 1..10: note = Seed: YLTNDVSFLA
YVTNDVSFLV

SEQ ID NO: 83489 - protein, 9 aa, synthetic construct
  source 1..9: note = Seed: YLTNDVSFL
YVTNDVSFM

SEQ ID NO: 83490 - protein, 9 aa, synthetic construct
  source 1..9: note = Seed: YLTNDVSFL
YVTNDVSFV

SEQ ID NO: 83491 - protein, 9 aa, synthetic construct
  source 1..9: note = Seed: YLTNDVSFL
YVTNDVSFY

SEQ ID NO: 83492 - protein, 10 aa, synthetic construct
  source 1..10: note = Seed: YDTNVLEGSV
YVTNVLEGSV

SEQ ID NO: 83493 - protein, 9 aa, synthetic construct
  source 1..9: note = Seed: YVTQQLIRA
YVTQQLIRV

SEQ ID NO: 83494 - protein, 9 aa, synthetic construct
  source 1..9: note = Seed: YFTSDYYQL
YVTSDYYQF

SEQ ID NO: 83495 - protein, 10 aa, synthetic construct
  source 1..10: note = Seed: YFTSDYYQLY
YVTSDYYQLK

SEQ ID NO: 83496 - protein, 10 aa, synthetic construct
  source 1..10: note = Seed: YFTSDYYQLY
YVTSDYYQLR

SEQ ID NO: 83497 - protein, 10 aa, synthetic construct
  source 1..10: note = Seed: YFTSDYYQLY
YVTSDYYQLW

SEQ ID NO: 83498 - protein, 10 aa, synthetic construct
  source 1..10: note = Seed: YFTSDYYQLY
YVTSDYYQLY

SEQ ID NO: 83499 - protein, 11 aa, synthetic construct
  source 1..11: note = Seed: YFTSDYYQLYS
YVTSDYYQLYY

SEQ ID NO: 83500 - protein, 9 aa, synthetic construct
  source 1..9: note = Seed: YYTSNPTTF
YVTSNPTTF

SEQ ID NO: 83501 - protein, 11 aa, synthetic construct
  source 1..11: note = Seed: YYTSNPTTFHL
YVTSNPTTFHF

SEQ ID NO: 83502 - protein, 11 aa, synthetic construct
  source 1..11: note = Seed: YYTSNPTTFHL
YVTSNPTTFHW

SEQ ID NO: 83503 - protein, 9 aa, synthetic construct
  source 1..9: note = Seed: YYTSNPTTF
YVTSNPTTL

SEQ ID NO: 83504 - protein, 9 aa, synthetic construct
  source 1..9: note = Seed: YYTSNPTTF
YVTSNPTTM

SEQ ID NO: 83505 - protein, 9 aa, synthetic construct
  source 1..9: note = Seed: YYTSNPTTF
YVTSNPTTY

SEQ ID NO: 83506 - protein, 10 aa, synthetic construct
  source 1..10: note = Seed: YTTTIKPVTY
YVTTIKPVTW

SEQ ID NO: 83507 - protein, 11 aa, synthetic construct
  source 1..11: note = Seed: YTTTIKPVTYK
YVTTIKPVTYK

SEQ ID NO: 83508 - protein, 11 aa, synthetic construct
  source 1..11: note = Seed: YTTTIKPVTYK
YVTTIKPVTYR

SEQ ID NO: 83509 - protein, 9 aa, synthetic construct
  source 1..9: note = Seed: YIVDSVTVK
YVVDSVTVK

SEQ ID NO: 83510 - protein, 9 aa, synthetic construct
  source 1..9: note = Seed: YIVDSVTVK
YVVDSVTVR

SEQ ID NO: 83511 - protein, 9 aa, synthetic construct
  source 1..9: note = Seed: YTVEEAKTV
YVVEEAKTF

SEQ ID NO: 83512 - protein, 9 aa, synthetic construct
  source 1..9: note = Seed: YTVEEAKTV
YVVEEAKTL

SEQ ID NO: 83513 - protein, 9 aa, synthetic construct
  source 1..9: note = Seed: YTVEEAKTV
YVVEEAKTM

SEQ ID NO: 83514 - protein, 9 aa, synthetic construct
  source 1..9: note = Seed: YTVEEAKTV
YVVEEAKTY

SEQ ID NO: 83515 - protein, 9 aa, synthetic construct
  source 1..9: note = Seed: YTVELGTEV
YVVELGTEF

SEQ ID NO: 83516 - protein, 9 aa, synthetic construct
  source 1..9: note = Seed: YTVELGTEV
YVVELGTEI

SEQ ID NO: 83517 - protein, 9 aa, synthetic construct
  source 1..9: note = Seed: YTVELGTEV
YVVELGTEL

SEQ ID NO: 83518 - protein, 9 aa, synthetic construct
  source 1..9: note = Seed: YTVELGTEV
YVVELGTEM

SEQ ID NO: 83519 - protein, 9 aa, synthetic construct
  source 1..9: note = Seed: YTVELGTEV
YVVELGTEV

SEQ ID NO: 83520 - protein, 9 aa, synthetic construct
  source 1..9: note = Seed: YTVELGTEV
YVVELGTEY

SEQ ID NO: 83521 - protein, 9 aa, synthetic construct
  source 1..9: note = Seed: YYVGYLQPR
YVVGYLQPK

SEQ ID NO: 83522 - protein, 9 aa, synthetic construct
  source 1..9: note = Seed: YYVGYLQPR
YVVGYLQPM

SEQ ID NO: 83523 - protein, 9 aa, synthetic construct
  source 1..9: note = Seed: YYVGYLQPR
YVVGYLQPR

SEQ ID NO: 83524 - protein, 9 aa, synthetic construct
  source 1..9: note = Seed: YFVKIGPER
YVVKIGPEK

SEQ ID NO: 83525 - protein, 9 aa, synthetic construct
  source 1..9: note = Seed: YFVKIGPER
YVVKIGPER

SEQ ID NO: 83526 - protein, 9 aa, synthetic construct
  source 1..9: note = Seed: YFVLTSHTV
YVVLTSHTV

SEQ ID NO: 83527 - protein, 9 aa, synthetic construct
  source 1..9: note = Seed: YQVNGYPNM
YVVNGYPNA

SEQ ID NO: 83528 - protein, 9 aa, synthetic construct
  source 1..9: note = Seed: YQVNGYPNM
YVVNGYPNF

SEQ ID NO: 83529 - protein, 9 aa, synthetic construct
  source 1..9: note = Seed: YQVNGYPNM
YVVNGYPNI

SEQ ID NO: 83530 - protein, 9 aa, synthetic construct
  source 1..9: note = Seed: YQVNGYPNM
YVVNGYPNL

SEQ ID NO: 83531 - protein, 9 aa, synthetic construct
  source 1..9: note = Seed: YQVNGYPNM
YVVNGYPNM

SEQ ID NO: 83532 - protein, 11 aa, synthetic construct
  source 1..11: note = Seed: YQVNGYPNMFI
YVVNGYPNMFV

SEQ ID NO: 83533 - protein, 10 aa, synthetic construct
  source 1..10: note = Seed: YQVNGYPNMF
YVVNGYPNMV

SEQ ID NO: 83534 - protein, 9 aa, synthetic construct
  source 1..9: note = Seed: YQVNGYPNM
YVVNGYPNV

SEQ ID NO: 83535 - protein, 9 aa, synthetic construct
  source 1..9: note = Seed: YQVNGYPNM
YVVNGYPNY

SEQ ID NO: 83536 - protein, 9 aa, synthetic construct
  source 1..9: note = Seed: YLVSTQEFR
YVVSTQEFK

SEQ ID NO: 83537 - protein, 9 aa, synthetic construct
  source 1..9: note = Seed: YLVSTQEFR
YVVSTQEFR

SEQ ID NO: 83538 - protein, 10 aa, synthetic construct
  source 1..10: note = Seed: YLVSTQEFRY
YVVSTQEFRY

SEQ ID NO: 83539 - protein, 9 aa, synthetic construct
  source 1..9: note = Seed: YNVTQAFGR
YVVTQAFGK

SEQ ID NO: 83540 - protein, 9 aa, synthetic construct
  source 1..9: note = Seed: YNVTQAFGR
YVVTQAFGR

SEQ ID NO: 83541 - protein, 10 aa, synthetic construct
  source 1..10: note = Seed: YNVTQAFGRR
YVVTQAFGRK

SEQ ID NO: 83542 - protein, 10 aa, synthetic construct
  source 1..10: note = Seed: YNVTQAFGRR
YVVTQAFGRR

SEQ ID NO: 83543 - protein, 9 aa, synthetic construct
  source 1..9: note = Seed: YFVVKRHTF
YVVVKRHTF

SEQ ID NO: 83544 - protein, 9 aa, synthetic construct
  source 1..9: note = Seed: YFVVKRHTF
YVVVKRHTL

SEQ ID NO: 83545 - protein, 9 aa, synthetic construct
  source 1..9: note = Seed: YFVVKRHTF
YVVVKRHTM

SEQ ID NO: 83546 - protein, 9 aa, synthetic construct
  source 1..9: note = Seed: YFVVKRHTF
YVVVKRHTY

SEQ ID NO: 83547 - protein, 10 aa, synthetic construct
  source 1..10: note = Seed: YRVVVLSFEL
YVVVVLSFEV

SEQ ID NO: 83548 - protein, 10 aa, synthetic construct
  source 1..10: note = Seed: YYVWKSYVHV
YVVWKSYVHV

SEQ ID NO: 83549 - protein, 9 aa, synthetic construct
  source 1..9: note = Seed: YYVWKSYVH
YVVWKSYVY

SEQ ID NO: 83550 - protein, 9 aa, synthetic construct
  source 1..9: note = Seed: YVWKSYVHV
YVWKSYVHA

SEQ ID NO: 83551 - protein, 9 aa, synthetic construct
  source 1..9: note = Seed: YVWKSYVHV
YVWKSYVHI

SEQ ID NO: 83552 - protein, 9 aa, synthetic construct
  source 1..9: note = Seed: YVWKSYVHV
YVWKSYVHL

SEQ ID NO: 83553 - protein, 9 aa, synthetic construct
  source 1..9: note = Seed: YVWKSYVHV
YVWKSYVHM

SEQ ID NO: 83554 - protein, 10 aa, synthetic construct
  source 1..10: note = Seed: YVWKSYVHVV
YVWKSYVHVA

SEQ ID NO: 83555 - protein, 10 aa, synthetic construct
  source 1..10: note = Seed: YVWKSYVHVV
YVWKSYVHVI

SEQ ID NO: 83556 - protein, 10 aa, synthetic construct
  source 1..10: note = Seed: YVWKSYVHVV
YVWKSYVHVL

SEQ ID NO: 83557 - protein, 10 aa, synthetic construct
  source 1..10: note = Seed: YVYANGGKGF
YVYANGGKGM

SEQ ID NO: 83558 - protein, 10 aa, synthetic construct
  source 1..10: note = Seed: YVYANGGKGF
YVYANGGKGW

SEQ ID NO: 83559 - protein, 10 aa, synthetic construct
  source 1..10: note = Seed: YVYANGGKGF
YVYANGGKGY

SEQ ID NO: 83560 - protein, 11 aa, synthetic construct
  source 1..11: note = Seed: YLYFIKGLNNL
YVYFIKGLNNF

SEQ ID NO: 83561 - protein, 11 aa, synthetic construct
  source 1..11: note = Seed: YLYFIKGLNNL
YVYFIKGLNNV

SEQ ID NO: 83562 - protein, 9 aa, synthetic construct
  source 1..9: note = Seed: YLYLTFYLT
YVYLTFYLA

SEQ ID NO: 83563 - protein, 9 aa, synthetic construct
  source 1..9: note = Seed: YLYLTFYLT
YVYLTFYLI

SEQ ID NO: 83564 - protein, 9 aa, synthetic construct
  source 1..9: note = Seed: YLYLTFYLT
YVYLTFYLL

SEQ ID NO: 83565 - protein, 9 aa, synthetic construct
  source 1..9: note = Seed: YLYLTFYLT
YVYLTFYLM

SEQ ID NO: 83566 - protein, 9 aa, synthetic construct
  source 1..9: note = Seed: YLYLTFYLT
YVYLTFYLV

SEQ ID NO: 83567 - protein, 8 aa, synthetic construct
  source 1..8: note = Seed: YLYLTFYL
YVYLTFYV

SEQ ID NO: 83568 - protein, 10 aa, synthetic construct
  source 1..10: note = Seed: YDYLVSTQEF
YVYLVSTQEF

SEQ ID NO: 83569 - protein, 11 aa, synthetic construct
  source 1..11: note = Seed: YDYLVSTQEFR
YVYLVSTQEFF

SEQ ID NO: 83570 - protein, 11 aa, synthetic construct
  source 1..11: note = Seed: YDYLVSTQEFR
YVYLVSTQEFK

SEQ ID NO: 83571 - protein, 11 aa, synthetic construct
  source 1..11: note = Seed: YDYLVSTQEFR
YVYLVSTQEFR

SEQ ID NO: 83572 - protein, 10 aa, synthetic construct
  source 1..10: note = Seed: YDYLVSTQEF
YVYLVSTQEI

SEQ ID NO: 83573 - protein, 10 aa, synthetic construct
  source 1..10: note = Seed: YDYLVSTQEF
YVYLVSTQEL

SEQ ID NO: 83574 - protein, 10 aa, synthetic construct
  source 1..10: note = Seed: YDYLVSTQEF
YVYLVSTQEM

SEQ ID NO: 83575 - protein, 10 aa, synthetic construct
  source 1..10: note = Seed: YDYLVSTQEF
YVYLVSTQEW

SEQ ID NO: 83576 - protein, 10 aa, synthetic construct
  source 1..10: note = Seed: YDYLVSTQEF
YVYLVSTQEY

SEQ ID NO: 83577 - protein, 9 aa, synthetic construct
  source 1..9: note = Seed: YNYLYRLFR
YVYLYRLFK

SEQ ID NO: 83578 - protein, 9 aa, synthetic construct
  source 1..9: note = Seed: YNYLYRLFR
YVYLYRLFR

SEQ ID NO: 83579 - protein, 10 aa, synthetic construct
  source 1..10: note = Seed: YNYLYRLFRK
YVYLYRLFRK

SEQ ID NO: 83580 - protein, 10 aa, synthetic construct
  source 1..10: note = Seed: YNYLYRLFRK
YVYLYRLFRR

SEQ ID NO: 83581 - protein, 10 aa, synthetic construct
  source 1..10: note = Seed: YVYNPFMIDV
YVYNPFMIDA

SEQ ID NO: 83582 - protein, 8 aa, synthetic construct
  source 1..8: note = Seed: YVYNPFMI
YVYNPFMV

SEQ ID NO: 83583 - protein, 9 aa, synthetic construct
  source 1..9: note = Seed: YLYRLFRKS
YVYRLFRKV

SEQ ID NO: 83584 - protein, 11 aa, synthetic construct
  source 1..11: note = Seed: YDYYRYNLPTM
YVYYRYNLPTF

SEQ ID NO: 83585 - protein, 11 aa, synthetic construct
  source 1..11: note = Seed: YDYYRYNLPTM
YVYYRYNLPTW

SEQ ID NO: 83586 - protein, 10 aa, synthetic construct
  source 1..10: note = Seed: YGANKDGIIW
YWANKDGIIW

SEQ ID NO: 83587 - protein, 10 aa, synthetic construct
  source 1..10: note = Seed: YPANSIVCRF
YWANSIVCRW

SEQ ID NO: 83588 - protein, 11 aa, synthetic construct
  source 1..11: note = Seed: YFAVHFISNSW
YWAVHFISNSF

SEQ ID NO: 83589 - protein, 11 aa, synthetic construct
  source 1..11: note = Seed: YFAVHFISNSW
YWAVHFISNSW

SEQ ID NO: 83590 - protein, 9 aa, synthetic construct
  source 1..9: note = Seed: YFCTCYFGL
YWCTCYFGF

SEQ ID NO: 83591 - protein, 10 aa, synthetic construct
  source 1..10: note = Seed: YFCTCYFGLF
YWCTCYFGLF

SEQ ID NO: 83592 - protein, 10 aa, synthetic construct
  source 1..10: note = Seed: YFCTCYFGLF
YWCTCYFGLY

SEQ ID NO: 83593 - protein, 9 aa, synthetic construct
  source 1..9: note = Seed: YFCTCYFGL
YWCTCYFGW

SEQ ID NO: 83594 - protein, 10 aa, synthetic construct
  source 1..10: note = Seed: YKENSYTTTI
YWENSYTTTA

SEQ ID NO: 83595 - protein, 10 aa, synthetic construct
  source 1..10: note = Seed: YKENSYTTTI
YWENSYTTTL

SEQ ID NO: 83596 - protein, 10 aa, synthetic construct
  source 1..10: note = Seed: YKENSYTTTI
YWENSYTTTM

SEQ ID NO: 83597 - protein, 9 aa, synthetic construct
  source 1..9: note = Seed: YVFCTVNAL
YWFCTVNAF

SEQ ID NO: 83598 - protein, 9 aa, synthetic construct
  source 1..9: note = Seed: YVFCTVNAL
YWFCTVNAI

SEQ ID NO: 83599 - protein, 9 aa, synthetic construct
  source 1..9: note = Seed: YVFCTVNAL
YWFCTVNAL

SEQ ID NO: 83600 - protein, 9 aa, synthetic construct
  source 1..9: note = Seed: YVFCTVNAL
YWFCTVNAM

SEQ ID NO: 83601 - protein, 9 aa, synthetic construct
  source 1..9: note = Seed: YVFCTVNAL
YWFCTVNAV

SEQ ID NO: 83602 - protein, 9 aa, synthetic construct
  source 1..9: note = Seed: YVFCTVNAL
YWFCTVNAY

SEQ ID NO: 83603 - protein, 8 aa, synthetic construct
  source 1..8: note = Seed: YIFFASFY
YWFFASFY

SEQ ID NO: 83604 - protein, 9 aa, synthetic construct
  source 1..9: note = Seed: YIFFASFYY
YWFFASFYF

SEQ ID NO: 83605 - protein, 9 aa, synthetic construct
  source 1..9: note = Seed: YIFFASFYY
YWFFASFYH

SEQ ID NO: 83606 - protein, 9 aa, synthetic construct
  source 1..9: note = Seed: YIFFASFYY
YWFFASFYK

SEQ ID NO: 83607 - protein, 9 aa, synthetic construct
  source 1..9: note = Seed: YIFFASFYY
YWFFASFYL

SEQ ID NO: 83608 - protein, 9 aa, synthetic construct
  source 1..9: note = Seed: YIFFASFYY
YWFFASFYM

SEQ ID NO: 83609 - protein, 9 aa, synthetic construct
  source 1..9: note = Seed: YIFFASFYY
YWFFASFYR

SEQ ID NO: 83610 - protein, 9 aa, synthetic construct
  source 1..9: note = Seed: YIFFASFYY
YWFFASFYV

SEQ ID NO: 83611 - protein, 9 aa, synthetic construct
  source 1..9: note = Seed: YIFFASFYY
YWFFASFYY

SEQ ID NO: 83612 - protein, 10 aa, synthetic construct
  source 1..10: note = Seed: YIFFASFYYV
YWFFASFYYA

SEQ ID NO: 83613 - protein, 10 aa, synthetic construct
  source 1..10: note = Seed: YIFFASFYYV
YWFFASFYYC

SEQ ID NO: 83614 - protein, 10 aa, synthetic construct
  source 1..10: note = Seed: YIFFASFYYV
YWFFASFYYD

SEQ ID NO: 83615 - protein, 10 aa, synthetic construct
  source 1..10: note = Seed: YIFFASFYYV
YWFFASFYYE

SEQ ID NO: 83616 - protein, 10 aa, synthetic construct
  source 1..10: note = Seed: YIFFASFYYV
YWFFASFYYF

SEQ ID NO: 83617 - protein, 10 aa, synthetic construct
  source 1..10: note = Seed: YIFFASFYYV
YWFFASFYYG

SEQ ID NO: 83618 - protein, 10 aa, synthetic construct
  source 1..10: note = Seed: YIFFASFYYV
YWFFASFYYH

SEQ ID NO: 83619 - protein, 10 aa, synthetic construct
  source 1..10: note = Seed: YIFFASFYYV
YWFFASFYYI

SEQ ID NO: 83620 - protein, 10 aa, synthetic construct
  source 1..10: note = Seed: YIFFASFYYV
YWFFASFYYK

SEQ ID NO: 83621 - protein, 10 aa, synthetic construct
  source 1..10: note = Seed: YIFFASFYYV
YWFFASFYYL

SEQ ID NO: 83622 - protein, 10 aa, synthetic construct
  source 1..10: note = Seed: YIFFASFYYV
YWFFASFYYM

SEQ ID NO: 83623 - protein, 10 aa, synthetic construct
  source 1..10: note = Seed: YIFFASFYYV
YWFFASFYYN

SEQ ID NO: 83624 - protein, 10 aa, synthetic construct
  source 1..10: note = Seed: YIFFASFYYV
YWFFASFYYP

SEQ ID NO: 83625 - protein, 10 aa, synthetic construct
  source 1..10: note = Seed: YIFFASFYYV
YWFFASFYYQ

SEQ ID NO: 83626 - protein, 10 aa, synthetic construct
  source 1..10: note = Seed: YIFFASFYYV
YWFFASFYYR

SEQ ID NO: 83627 - protein, 10 aa, synthetic construct
  source 1..10: note = Seed: YIFFASFYYV
YWFFASFYYS

SEQ ID NO: 83628 - protein, 10 aa, synthetic construct
  source 1..10: note = Seed: YIFFASFYYV
YWFFASFYYT

SEQ ID NO: 83629 - protein, 10 aa, synthetic construct
  source 1..10: note = Seed: YIFFASFYYV
YWFFASFYYV

SEQ ID NO: 83630 - protein, 11 aa, synthetic construct
  source 1..11: note = Seed: YIFFASFYYVW
YWFFASFYYVF

SEQ ID NO: 83631 - protein, 11 aa, synthetic construct
  source 1..11: note = Seed: YIFFASFYYVW
YWFFASFYYVW

SEQ ID NO: 83632 - protein, 11 aa, synthetic construct
  source 1..11: note = Seed: YIFFASFYYVW
YWFFASFYYVY

SEQ ID NO: 83633 - protein, 10 aa, synthetic construct
  source 1..10: note = Seed: YIFFASFYYV
YWFFASFYYW

SEQ ID NO: 83634 - protein, 10 aa, synthetic construct
  source 1..10: note = Seed: YIFFASFYYV
YWFFASFYYY

SEQ ID NO: 83635 - protein, 8 aa, synthetic construct
  source 1..8: note = Seed: YWFFSNYL
YWFFSNYF

SEQ ID NO: 83636 - protein, 9 aa, synthetic construct
  source 1..9: note = Seed: YWFFSNYLK
YWFFSNYLF

SEQ ID NO: 83637 - protein, 9 aa, synthetic construct
  source 1..9: note = Seed: YWFFSNYLK
YWFFSNYLH

SEQ ID NO: 83638 - protein, 9 aa, synthetic construct
  source 1..9: note = Seed: YWFFSNYLK
YWFFSNYLI

SEQ ID NO: 83639 - protein, 10 aa, synthetic construct
  source 1..10: note = Seed: YWFFSNYLKR
YWFFSNYLKK

SEQ ID NO: 83640 - protein, 9 aa, synthetic construct
  source 1..9: note = Seed: YWFFSNYLK
YWFFSNYLL

SEQ ID NO: 83641 - protein, 9 aa, synthetic construct
  source 1..9: note = Seed: YWFFSNYLK
YWFFSNYLM

SEQ ID NO: 83642 - protein, 9 aa, synthetic construct
  source 1..9: note = Seed: YWFFSNYLK
YWFFSNYLR

SEQ ID NO: 83643 - protein, 9 aa, synthetic construct
  source 1..9: note = Seed: YWFFSNYLK
YWFFSNYLW

SEQ ID NO: 83644 - protein, 9 aa, synthetic construct
  source 1..9: note = Seed: YWFFSNYLK
YWFFSNYLY

SEQ ID NO: 83645 - protein, 10 aa, synthetic construct
  source 1..10: note = Seed: YSFLPGVYSV
YWFLPGVYSF

SEQ ID NO: 83646 - protein, 10 aa, synthetic construct
  source 1..10: note = Seed: YSFLPGVYSV
YWFLPGVYSI

SEQ ID NO: 83647 - protein, 10 aa, synthetic construct
  source 1..10: note = Seed: YSFLPGVYSV
YWFLPGVYSL

SEQ ID NO: 83648 - protein, 10 aa, synthetic construct
  source 1..10: note = Seed: YSFLPGVYSV
YWFLPGVYSM

SEQ ID NO: 83649 - protein, 10 aa, synthetic construct
  source 1..10: note = Seed: YSFLPGVYSV
YWFLPGVYSW

SEQ ID NO: 83650 - protein, 10 aa, synthetic construct
  source 1..10: note = Seed: YSFLPGVYSV
YWFLPGVYSY

SEQ ID NO: 83651 - protein, 10 aa, synthetic construct
  source 1..10: note = Seed: YVFTGYRVTK
YWFTGYRVTR

SEQ ID NO: 83652 - protein, 9 aa, synthetic construct
  source 1..9: note = Seed: YFFTLLLQL
YWFTLLLQF

SEQ ID NO: 83653 - protein, 9 aa, synthetic construct
  source 1..9: note = Seed: YFFTLLLQL
YWFTLLLQI

SEQ ID NO: 83654 - protein, 9 aa, synthetic construct
  source 1..9: note = Seed: YFFTLLLQL
YWFTLLLQL

SEQ ID NO: 83655 - protein, 9 aa, synthetic construct
  source 1..9: note = Seed: YFFTLLLQL
YWFTLLLQW

SEQ ID NO: 83656 - protein, 9 aa, synthetic construct
  source 1..9: note = Seed: YFFTLLLQL
YWFTLLLQY

SEQ ID NO: 83657 - protein, 11 aa, synthetic construct
  source 1..11: note = Seed: YVGYLQPRTFL
YWGYLQPRTFF

SEQ ID NO: 83658 - protein, 11 aa, synthetic construct
  source 1..11: note = Seed: YVGYLQPRTFL
YWGYLQPRTFW

SEQ ID NO: 83659 - protein, 8 aa, synthetic construct
  source 1..8: note = Seed: YFIASFRL
YWIASFRF

SEQ ID NO: 83660 - protein, 9 aa, synthetic construct
  source 1..9: note = Seed: YFIASFRLF
YWIASFRLF

SEQ ID NO: 83661 - protein, 10 aa, synthetic construct
  source 1..10: note = Seed: YFIASFRLFA
YWIASFRLFA

SEQ ID NO: 83662 - protein, 10 aa, synthetic construct
  source 1..10: note = Seed: YFIASFRLFA
YWIASFRLFC

SEQ ID NO: 83663 - protein, 10 aa, synthetic construct
  source 1..10: note = Seed: YFIASFRLFA
YWIASFRLFD

SEQ ID NO: 83664 - protein, 10 aa, synthetic construct
  source 1..10: note = Seed: YFIASFRLFA
YWIASFRLFE

SEQ ID NO: 83665 - protein, 10 aa, synthetic construct
  source 1..10: note = Seed: YFIASFRLFA
YWIASFRLFF

SEQ ID NO: 83666 - protein, 10 aa, synthetic construct
  source 1..10: note = Seed: YFIASFRLFA
YWIASFRLFG

SEQ ID NO: 83667 - protein, 10 aa, synthetic construct
  source 1..10: note = Seed: YFIASFRLFA
YWIASFRLFH

SEQ ID NO: 83668 - protein, 10 aa, synthetic construct
  source 1..10: note = Seed: YFIASFRLFA
YWIASFRLFI

SEQ ID NO: 83669 - protein, 10 aa, synthetic construct
  source 1..10: note = Seed: YFIASFRLFA
YWIASFRLFK

SEQ ID NO: 83670 - protein, 10 aa, synthetic construct
  source 1..10: note = Seed: YFIASFRLFA
YWIASFRLFL

SEQ ID NO: 83671 - protein, 10 aa, synthetic construct
  source 1..10: note = Seed: YFIASFRLFA
YWIASFRLFM

SEQ ID NO: 83672 - protein, 10 aa, synthetic construct
  source 1..10: note = Seed: YFIASFRLFA
YWIASFRLFN

SEQ ID NO: 83673 - protein, 10 aa, synthetic construct
  source 1..10: note = Seed: YFIASFRLFA
YWIASFRLFP

SEQ ID NO: 83674 - protein, 10 aa, synthetic construct
  source 1..10: note = Seed: YFIASFRLFA
YWIASFRLFQ

SEQ ID NO: 83675 - protein, 10 aa, synthetic construct
  source 1..10: note = Seed: YFIASFRLFA
YWIASFRLFR

SEQ ID NO: 83676 - protein, 10 aa, synthetic construct
  source 1..10: note = Seed: YFIASFRLFA
YWIASFRLFS

SEQ ID NO: 83677 - protein, 10 aa, synthetic construct
  source 1..10: note = Seed: YFIASFRLFA
YWIASFRLFT

SEQ ID NO: 83678 - protein, 10 aa, synthetic construct
  source 1..10: note = Seed: YFIASFRLFA
YWIASFRLFV

SEQ ID NO: 83679 - protein, 10 aa, synthetic construct
  source 1..10: note = Seed: YFIASFRLFA
YWIASFRLFW

SEQ ID NO: 83680 - protein, 10 aa, synthetic construct
  source 1..10: note = Seed: YFIASFRLFA
YWIASFRLFY

SEQ ID NO: 83681 - protein, 9 aa, synthetic construct
  source 1..9: note = Seed: YFIASFRLF
YWIASFRLI

SEQ ID NO: 83682 - protein, 9 aa, synthetic construct
  source 1..9: note = Seed: YFIASFRLF
YWIASFRLL

SEQ ID NO: 83683 - protein, 9 aa, synthetic construct
  source 1..9: note = Seed: YFIASFRLF
YWIASFRLM

SEQ ID NO: 83684 - protein, 9 aa, synthetic construct
  source 1..9: note = Seed: YFIASFRLF
YWIASFRLV

SEQ ID NO: 83685 - protein, 9 aa, synthetic construct
  source 1..9: note = Seed: YFIASFRLF
YWIASFRLW

SEQ ID NO: 83686 - protein, 9 aa, synthetic construct
  source 1..9: note = Seed: YFIASFRLF
YWIASFRLY

SEQ ID NO: 83687 - protein, 9 aa, synthetic construct
  source 1..9: note = Seed: YFIKGLNNL
YWIKGLNNF

SEQ ID NO: 83688 - protein, 9 aa, synthetic construct
  source 1..9: note = Seed: YFIKGLNNL
YWIKGLNNI

SEQ ID NO: 83689 - protein, 9 aa, synthetic construct
  source 1..9: note = Seed: YFIKGLNNL
YWIKGLNNL

SEQ ID NO: 83690 - protein, 9 aa, synthetic construct
  source 1..9: note = Seed: YFIKGLNNL
YWIKGLNNM

SEQ ID NO: 83691 - protein, 9 aa, synthetic construct
  source 1..9: note = Seed: YFIKGLNNL
YWIKGLNNW

SEQ ID NO: 83692 - protein, 9 aa, synthetic construct
  source 1..9: note = Seed: YFIKGLNNL
YWIKGLNNY

SEQ ID NO: 83693 - protein, 9 aa, synthetic construct
  source 1..9: note = Seed: YYKKDNSYF
YWKKDNSYF

SEQ ID NO: 83694 - protein, 10 aa, synthetic construct
  source 1..10: note = Seed: YYKKDNSYFT
YWKKDNSYFF

SEQ ID NO: 83695 - protein, 10 aa, synthetic construct
  source 1..10: note = Seed: YYKKDNSYFT
YWKKDNSYFW

SEQ ID NO: 83696 - protein, 9 aa, synthetic construct
  source 1..9: note = Seed: YYKKDNSYF
YWKKDNSYL

SEQ ID NO: 83697 - protein, 9 aa, synthetic construct
  source 1..9: note = Seed: YYKKDNSYF
YWKKDNSYM

SEQ ID NO: 83698 - protein, 9 aa, synthetic construct
  source 1..9: note = Seed: YYKKDNSYF
YWKKDNSYW

SEQ ID NO: 83699 - protein, 9 aa, synthetic construct
  source 1..9: note = Seed: YYKKVDGVV
YWKKVDGVF

SEQ ID NO: 83700 - protein, 9 aa, synthetic construct
  source 1..9: note = Seed: YYKKVDGVV
YWKKVDGVM

SEQ ID NO: 83701 - protein, 9 aa, synthetic construct
  source 1..9: note = Seed: YYKKVDGVV
YWKKVDGVW

SEQ ID NO: 83702 - protein, 10 aa, synthetic construct
  source 1..10: note = Seed: YYKLGASQRV
YWKLGASQRF

SEQ ID NO: 83703 - protein, 10 aa, synthetic construct
  source 1..10: note = Seed: YYKLGASQRV
YWKLGASQRW

SEQ ID NO: 83704 - protein, 9 aa, synthetic construct
  source 1..9: note = Seed: YDKLQFTSL
YWKLQFTSL

SEQ ID NO: 83705 - protein, 11 aa, synthetic construct
  source 1..11: note = Seed: YDKLQFTSLEI
YWKLQFTSLEV

SEQ ID NO: 83706 - protein, 9 aa, synthetic construct
  source 1..9: note = Seed: YLKSPNFSK
YWKSPNFSR

SEQ ID NO: 83707 - protein, 8 aa, synthetic construct
  source 1..8: note = Seed: YIKWPWYI
YWKWPWYF

SEQ ID NO: 83708 - protein, 9 aa, synthetic construct
  source 1..9: note = Seed: YIKWPWYIW
YWKWPWYIF

SEQ ID NO: 83709 - protein, 9 aa, synthetic construct
  source 1..9: note = Seed: YIKWPWYIW
YWKWPWYII

SEQ ID NO: 83710 - protein, 9 aa, synthetic construct
  source 1..9: note = Seed: YIKWPWYIW
YWKWPWYIL

SEQ ID NO: 83711 - protein, 9 aa, synthetic construct
  source 1..9: note = Seed: YIKWPWYIW
YWKWPWYIM

SEQ ID NO: 83712 - protein, 9 aa, synthetic construct
  source 1..9: note = Seed: YIKWPWYIW
YWKWPWYIV

SEQ ID NO: 83713 - protein, 9 aa, synthetic construct
  source 1..9: note = Seed: YIKWPWYIW
YWKWPWYIW

SEQ ID NO: 83714 - protein, 9 aa, synthetic construct
  source 1..9: note = Seed: YNKYKYFSG
YWKYKYFSL

SEQ ID NO: 83715 - protein, 10 aa, synthetic construct
  source 1..10: note = Seed: YFLCWHTNCY
YWLCWHTNCY

SEQ ID NO: 83716 - protein, 9 aa, synthetic construct
  source 1..9: note = Seed: YRLFRKSNL
YWLFRKSNF

SEQ ID NO: 83717 - protein, 10 aa, synthetic construct
  source 1..10: note = Seed: YRLFRKSNLK
YWLFRKSNLK

SEQ ID NO: 83718 - protein, 10 aa, synthetic construct
  source 1..10: note = Seed: YRLFRKSNLK
YWLFRKSNLR

SEQ ID NO: 83719 - protein, 9 aa, synthetic construct
  source 1..9: note = Seed: YRLFRKSNL
YWLFRKSNM

SEQ ID NO: 83720 - protein, 9 aa, synthetic construct
  source 1..9: note = Seed: YILFTRFFY
YWLFTRFFF

SEQ ID NO: 83721 - protein, 9 aa, synthetic construct
  source 1..9: note = Seed: YILFTRFFY
YWLFTRFFK

SEQ ID NO: 83722 - protein, 9 aa, synthetic construct
  source 1..9: note = Seed: YILFTRFFY
YWLFTRFFR

SEQ ID NO: 83723 - protein, 9 aa, synthetic construct
  source 1..9: note = Seed: YILFTRFFY
YWLFTRFFY

SEQ ID NO: 83724 - protein, 10 aa, synthetic construct
  source 1..10: note = Seed: YILFTRFFYV
YWLFTRFFYA

SEQ ID NO: 83725 - protein, 10 aa, synthetic construct
  source 1..10: note = Seed: YILFTRFFYV
YWLFTRFFYC

SEQ ID NO: 83726 - protein, 10 aa, synthetic construct
  source 1..10: note = Seed: YILFTRFFYV
YWLFTRFFYF

SEQ ID NO: 83727 - protein, 10 aa, synthetic construct
  source 1..10: note = Seed: YILFTRFFYV
YWLFTRFFYH

SEQ ID NO: 83728 - protein, 10 aa, synthetic construct
  source 1..10: note = Seed: YILFTRFFYV
YWLFTRFFYI

SEQ ID NO: 83729 - protein, 10 aa, synthetic construct
  source 1..10: note = Seed: YILFTRFFYV
YWLFTRFFYK

SEQ ID NO: 83730 - protein, 10 aa, synthetic construct
  source 1..10: note = Seed: YILFTRFFYV
YWLFTRFFYL

SEQ ID NO: 83731 - protein, 10 aa, synthetic construct
  source 1..10: note = Seed: YILFTRFFYV
YWLFTRFFYM

SEQ ID NO: 83732 - protein, 10 aa, synthetic construct
  source 1..10: note = Seed: YILFTRFFYV
YWLFTRFFYR

SEQ ID NO: 83733 - protein, 10 aa, synthetic construct
  source 1..10: note = Seed: YILFTRFFYV
YWLFTRFFYS

SEQ ID NO: 83734 - protein, 10 aa, synthetic construct
  source 1..10: note = Seed: YILFTRFFYV
YWLFTRFFYT

SEQ ID NO: 83735 - protein, 10 aa, synthetic construct
  source 1..10: note = Seed: YILFTRFFYV
YWLFTRFFYV

SEQ ID NO: 83736 - protein, 11 aa, synthetic construct
  source 1..11: note = Seed: YILFTRFFYVL
YWLFTRFFYVA

SEQ ID NO: 83737 - protein, 11 aa, synthetic construct
  source 1..11: note = Seed: YILFTRFFYVL
YWLFTRFFYVC

SEQ ID NO: 83738 - protein, 11 aa, synthetic construct
  source 1..11: note = Seed: YILFTRFFYVL
YWLFTRFFYVD

SEQ ID NO: 83739 - protein, 11 aa, synthetic construct
  source 1..11: note = Seed: YILFTRFFYVL
YWLFTRFFYVE

SEQ ID NO: 83740 - protein, 11 aa, synthetic construct
  source 1..11: note = Seed: YILFTRFFYVL
YWLFTRFFYVF

SEQ ID NO: 83741 - protein, 11 aa, synthetic construct
  source 1..11: note = Seed: YILFTRFFYVL
YWLFTRFFYVG

SEQ ID NO: 83742 - protein, 11 aa, synthetic construct
  source 1..11: note = Seed: YILFTRFFYVL
YWLFTRFFYVH

SEQ ID NO: 83743 - protein, 11 aa, synthetic construct
  source 1..11: note = Seed: YILFTRFFYVL
YWLFTRFFYVI

SEQ ID NO: 83744 - protein, 11 aa, synthetic construct
  source 1..11: note = Seed: YILFTRFFYVL
YWLFTRFFYVK

SEQ ID NO: 83745 - protein, 11 aa, synthetic construct
  source 1..11: note = Seed: YILFTRFFYVL
YWLFTRFFYVL

SEQ ID NO: 83746 - protein, 11 aa, synthetic construct
  source 1..11: note = Seed: YILFTRFFYVL
YWLFTRFFYVM

SEQ ID NO: 83747 - protein, 11 aa, synthetic construct
  source 1..11: note = Seed: YILFTRFFYVL
YWLFTRFFYVN

SEQ ID NO: 83748 - protein, 11 aa, synthetic construct
  source 1..11: note = Seed: YILFTRFFYVL
YWLFTRFFYVP

SEQ ID NO: 83749 - protein, 11 aa, synthetic construct
  source 1..11: note = Seed: YILFTRFFYVL
YWLFTRFFYVQ

SEQ ID NO: 83750 - protein, 11 aa, synthetic construct
  source 1..11: note = Seed: YILFTRFFYVL
YWLFTRFFYVR

SEQ ID NO: 83751 - protein, 11 aa, synthetic construct
  source 1..11: note = Seed: YILFTRFFYVL
YWLFTRFFYVS

SEQ ID NO: 83752 - protein, 11 aa, synthetic construct
  source 1..11: note = Seed: YILFTRFFYVL
YWLFTRFFYVT

SEQ ID NO: 83753 - protein, 11 aa, synthetic construct
  source 1..11: note = Seed: YILFTRFFYVL
YWLFTRFFYVV

SEQ ID NO: 83754 - protein, 11 aa, synthetic construct
  source 1..11: note = Seed: YILFTRFFYVL
YWLFTRFFYVW

SEQ ID NO: 83755 - protein, 11 aa, synthetic construct
  source 1..11: note = Seed: YILFTRFFYVL
YWLFTRFFYVY

SEQ ID NO: 83756 - protein, 10 aa, synthetic construct
  source 1..10: note = Seed: YILFTRFFYV
YWLFTRFFYY

SEQ ID NO: 83757 - protein, 10 aa, synthetic construct
  source 1..10: note = Seed: YSLLMPILTL
YWLLMPILTA

SEQ ID NO: 83758 - protein, 10 aa, synthetic construct
  source 1..10: note = Seed: YSLLMPILTL
YWLLMPILTI

SEQ ID NO: 83759 - protein, 10 aa, synthetic construct
  source 1..10: note = Seed: YSLLMPILTL
YWLLMPILTL

SEQ ID NO: 83760 - protein, 10 aa, synthetic construct
  source 1..10: note = Seed: YSLLMPILTL
YWLLMPILTV

SEQ ID NO: 83761 - protein, 10 aa, synthetic construct
  source 1..10: note = Seed: YHLMSFPQSA
YWLMSFPQSA

SEQ ID NO: 83762 - protein, 11 aa, synthetic construct
  source 1..11: note = Seed: YHLMSFPQSAP
YWLMSFPQSAV

SEQ ID NO: 83763 - protein, 10 aa, synthetic construct
  source 1..10: note = Seed: YHLMSFPQSA
YWLMSFPQSI

SEQ ID NO: 83764 - protein, 10 aa, synthetic construct
  source 1..10: note = Seed: YHLMSFPQSA
YWLMSFPQSL

SEQ ID NO: 83765 - protein, 10 aa, synthetic construct
  source 1..10: note = Seed: YHLMSFPQSA
YWLMSFPQSM

SEQ ID NO: 83766 - protein, 10 aa, synthetic construct
  source 1..10: note = Seed: YHLMSFPQSA
YWLMSFPQST

SEQ ID NO: 83767 - protein, 10 aa, synthetic construct
  source 1..10: note = Seed: YHLMSFPQSA
YWLMSFPQSV

SEQ ID NO: 83768 - protein, 10 aa, synthetic construct
  source 1..10: note = Seed: YDLSVVNARL
YWLSVVNARA

SEQ ID NO: 83769 - protein, 10 aa, synthetic construct
  source 1..10: note = Seed: YDLSVVNARL
YWLSVVNARI

SEQ ID NO: 83770 - protein, 10 aa, synthetic construct
  source 1..10: note = Seed: YDLSVVNARL
YWLSVVNARL

SEQ ID NO: 83771 - protein, 10 aa, synthetic construct
  source 1..10: note = Seed: YDLSVVNARL
YWLSVVNARM

SEQ ID NO: 83772 - protein, 10 aa, synthetic construct
  source 1..10: note = Seed: YDLSVVNARL
YWLSVVNARV

SEQ ID NO: 83773 - protein, 10 aa, synthetic construct
  source 1..10: note = Seed: YTMADLVYAL
YWMADLVYAA

SEQ ID NO: 83774 - protein, 10 aa, synthetic construct
  source 1..10: note = Seed: YTMADLVYAL
YWMADLVYAC

SEQ ID NO: 83775 - protein, 10 aa, synthetic construct
  source 1..10: note = Seed: YTMADLVYAL
YWMADLVYAF

SEQ ID NO: 83776 - protein, 10 aa, synthetic construct
  source 1..10: note = Seed: YTMADLVYAL
YWMADLVYAG

SEQ ID NO: 83777 - protein, 10 aa, synthetic construct
  source 1..10: note = Seed: YTMADLVYAL
YWMADLVYAI

SEQ ID NO: 83778 - protein, 10 aa, synthetic construct
  source 1..10: note = Seed: YTMADLVYAL
YWMADLVYAL

SEQ ID NO: 83779 - protein, 11 aa, synthetic construct
  source 1..11: note = Seed: YTMADLVYALR
YWMADLVYALA

SEQ ID NO: 83780 - protein, 11 aa, synthetic construct
  source 1..11: note = Seed: YTMADLVYALR
YWMADLVYALC

SEQ ID NO: 83781 - protein, 11 aa, synthetic construct
  source 1..11: note = Seed: YTMADLVYALR
YWMADLVYALD

SEQ ID NO: 83782 - protein, 11 aa, synthetic construct
  source 1..11: note = Seed: YTMADLVYALR
YWMADLVYALE

SEQ ID NO: 83783 - protein, 11 aa, synthetic construct
  source 1..11: note = Seed: YTMADLVYALR
YWMADLVYALF

SEQ ID NO: 83784 - protein, 11 aa, synthetic construct
  source 1..11: note = Seed: YTMADLVYALR
YWMADLVYALG

SEQ ID NO: 83785 - protein, 11 aa, synthetic construct
  source 1..11: note = Seed: YTMADLVYALR
YWMADLVYALH

SEQ ID NO: 83786 - protein, 11 aa, synthetic construct
  source 1..11: note = Seed: YTMADLVYALR
YWMADLVYALI

SEQ ID NO: 83787 - protein, 11 aa, synthetic construct
  source 1..11: note = Seed: YTMADLVYALR
YWMADLVYALK

SEQ ID NO: 83788 - protein, 11 aa, synthetic construct
  source 1..11: note = Seed: YTMADLVYALR
YWMADLVYALL

SEQ ID NO: 83789 - protein, 11 aa, synthetic construct
  source 1..11: note = Seed: YTMADLVYALR
YWMADLVYALM

SEQ ID NO: 83790 - protein, 11 aa, synthetic construct
  source 1..11: note = Seed: YTMADLVYALR
YWMADLVYALN

SEQ ID NO: 83791 - protein, 11 aa, synthetic construct
  source 1..11: note = Seed: YTMADLVYALR
YWMADLVYALP

SEQ ID NO: 83792 - protein, 11 aa, synthetic construct
  source 1..11: note = Seed: YTMADLVYALR
YWMADLVYALQ

SEQ ID NO: 83793 - protein, 11 aa, synthetic construct
  source 1..11: note = Seed: YTMADLVYALR
YWMADLVYALR

SEQ ID NO: 83794 - protein, 11 aa, synthetic construct
  source 1..11: note = Seed: YTMADLVYALR
YWMADLVYALS

SEQ ID NO: 83795 - protein, 11 aa, synthetic construct
  source 1..11: note = Seed: YTMADLVYALR
YWMADLVYALT

SEQ ID NO: 83796 - protein, 11 aa, synthetic construct
  source 1..11: note = Seed: YTMADLVYALR
YWMADLVYALV

SEQ ID NO: 83797 - protein, 11 aa, synthetic construct
  source 1..11: note = Seed: YTMADLVYALR
YWMADLVYALW

SEQ ID NO: 83798 - protein, 11 aa, synthetic construct
  source 1..11: note = Seed: YTMADLVYALR
YWMADLVYALY

SEQ ID NO: 83799 - protein, 10 aa, synthetic construct
  source 1..10: note = Seed: YTMADLVYAL
YWMADLVYAM

SEQ ID NO: 83800 - protein, 10 aa, synthetic construct
  source 1..10: note = Seed: YTMADLVYAL
YWMADLVYAS

SEQ ID NO: 83801 - protein, 10 aa, synthetic construct
  source 1..10: note = Seed: YTMADLVYAL
YWMADLVYAT

SEQ ID NO: 83802 - protein, 10 aa, synthetic construct
  source 1..10: note = Seed: YTMADLVYAL
YWMADLVYAV

SEQ ID NO: 83803 - protein, 10 aa, synthetic construct
  source 1..10: note = Seed: YTMADLVYAL
YWMADLVYAY

SEQ ID NO: 83804 - protein, 9 aa, synthetic construct
  source 1..9: note = Seed: YTMADLVYA
YWMADLVYI

SEQ ID NO: 83805 - protein, 9 aa, synthetic construct
  source 1..9: note = Seed: YTMADLVYA
YWMADLVYL

SEQ ID NO: 83806 - protein, 9 aa, synthetic construct
  source 1..9: note = Seed: YTMADLVYA
YWMADLVYV

SEQ ID NO: 83807 - protein, 9 aa, synthetic construct
  source 1..9: note = Seed: YVMHANYIF
YWMHANYIF

SEQ ID NO: 83808 - protein, 10 aa, synthetic construct
  source 1..10: note = Seed: YVMHANYIFW
YWMHANYIFA

SEQ ID NO: 83809 - protein, 10 aa, synthetic construct
  source 1..10: note = Seed: YVMHANYIFW
YWMHANYIFC

SEQ ID NO: 83810 - protein, 10 aa, synthetic construct
  source 1..10: note = Seed: YVMHANYIFW
YWMHANYIFD

SEQ ID NO: 83811 - protein, 10 aa, synthetic construct
  source 1..10: note = Seed: YVMHANYIFW
YWMHANYIFE

SEQ ID NO: 83812 - protein, 10 aa, synthetic construct
  source 1..10: note = Seed: YVMHANYIFW
YWMHANYIFF

SEQ ID NO: 83813 - protein, 10 aa, synthetic construct
  source 1..10: note = Seed: YVMHANYIFW
YWMHANYIFG

SEQ ID NO: 83814 - protein, 10 aa, synthetic construct
  source 1..10: note = Seed: YVMHANYIFW
YWMHANYIFH

SEQ ID NO: 83815 - protein, 10 aa, synthetic construct
  source 1..10: note = Seed: YVMHANYIFW
YWMHANYIFI

SEQ ID NO: 83816 - protein, 10 aa, synthetic construct
  source 1..10: note = Seed: YVMHANYIFW
YWMHANYIFK

SEQ ID NO: 83817 - protein, 10 aa, synthetic construct
  source 1..10: note = Seed: YVMHANYIFW
YWMHANYIFL

SEQ ID NO: 83818 - protein, 10 aa, synthetic construct
  source 1..10: note = Seed: YVMHANYIFW
YWMHANYIFM

SEQ ID NO: 83819 - protein, 10 aa, synthetic construct
  source 1..10: note = Seed: YVMHANYIFW
YWMHANYIFN

SEQ ID NO: 83820 - protein, 10 aa, synthetic construct
  source 1..10: note = Seed: YVMHANYIFW
YWMHANYIFP

SEQ ID NO: 83821 - protein, 10 aa, synthetic construct
  source 1..10: note = Seed: YVMHANYIFW
YWMHANYIFQ

SEQ ID NO: 83822 - protein, 10 aa, synthetic construct
  source 1..10: note = Seed: YVMHANYIFW
YWMHANYIFR

SEQ ID NO: 83823 - protein, 10 aa, synthetic construct
  source 1..10: note = Seed: YVMHANYIFW
YWMHANYIFS

SEQ ID NO: 83824 - protein, 10 aa, synthetic construct
  source 1..10: note = Seed: YVMHANYIFW
YWMHANYIFT

SEQ ID NO: 83825 - protein, 10 aa, synthetic construct
  source 1..10: note = Seed: YVMHANYIFW
YWMHANYIFV

SEQ ID NO: 83826 - protein, 10 aa, synthetic construct
  source 1..10: note = Seed: YVMHANYIFW
YWMHANYIFW

SEQ ID NO: 83827 - protein, 10 aa, synthetic construct
  source 1..10: note = Seed: YVMHANYIFW
YWMHANYIFY

SEQ ID NO: 83828 - protein, 9 aa, synthetic construct
  source 1..9: note = Seed: YVMHANYIF
YWMHANYII

SEQ ID NO: 83829 - protein, 9 aa, synthetic construct
  source 1..9: note = Seed: YVMHANYIF
YWMHANYIL

SEQ ID NO: 83830 - protein, 9 aa, synthetic construct
  source 1..9: note = Seed: YVMHANYIF
YWMHANYIM

SEQ ID NO: 83831 - protein, 9 aa, synthetic construct
  source 1..9: note = Seed: YVMHANYIF
YWMHANYIV

SEQ ID NO: 83832 - protein, 9 aa, synthetic construct
  source 1..9: note = Seed: YVMHANYIF
YWMHANYIW

SEQ ID NO: 83833 - protein, 9 aa, synthetic construct
  source 1..9: note = Seed: YVMHANYIF
YWMHANYIY

SEQ ID NO: 83834 - protein, 9 aa, synthetic construct
  source 1..9: note = Seed: YTNDKACPL
YWNDKACPF

SEQ ID NO: 83835 - protein, 9 aa, synthetic construct
  source 1..9: note = Seed: YTNDKACPL
YWNDKACPI

SEQ ID NO: 83836 - protein, 9 aa, synthetic construct
  source 1..9: note = Seed: YTNDKACPL
YWNDKACPL

SEQ ID NO: 83837 - protein, 9 aa, synthetic construct
  source 1..9: note = Seed: YTNDKACPL
YWNDKACPM

SEQ ID NO: 83838 - protein, 9 aa, synthetic construct
  source 1..9: note = Seed: YTNDKACPL
YWNDKACPV

SEQ ID NO: 83839 - protein, 9 aa, synthetic construct
  source 1..9: note = Seed: YTNDKACPL
YWNDKACPY

SEQ ID NO: 83840 - protein, 11 aa, synthetic construct
  source 1..11: note = Seed: YFNMVYMPASW
YWNMVYMPASF

SEQ ID NO: 83841 - protein, 9 aa, synthetic construct
  source 1..9: note = Seed: YFNMVYMPA
YWNMVYMPF

SEQ ID NO: 83842 - protein, 9 aa, synthetic construct
  source 1..9: note = Seed: YFNMVYMPA
YWNMVYMPL

SEQ ID NO: 83843 - protein, 9 aa, synthetic construct
  source 1..9: note = Seed: YFNMVYMPA
YWNMVYMPM

SEQ ID NO: 83844 - protein, 9 aa, synthetic construct
  source 1..9: note = Seed: YFNMVYMPA
YWNMVYMPY

SEQ ID NO: 83845 - protein, 9 aa, synthetic construct
  source 1..9: note = Seed: YVNTFSSTF
YWNTFSSTF

SEQ ID NO: 83846 - protein, 9 aa, synthetic construct
  source 1..9: note = Seed: YVNTFSSTF
YWNTFSSTI

SEQ ID NO: 83847 - protein, 9 aa, synthetic construct
  source 1..9: note = Seed: YVNTFSSTF
YWNTFSSTL

SEQ ID NO: 83848 - protein, 9 aa, synthetic construct
  source 1..9: note = Seed: YVNTFSSTF
YWNTFSSTM

SEQ ID NO: 83849 - protein, 9 aa, synthetic construct
  source 1..9: note = Seed: YVNTFSSTF
YWNTFSSTV

SEQ ID NO: 83850 - protein, 9 aa, synthetic construct
  source 1..9: note = Seed: YVNTFSSTF
YWNTFSSTW

SEQ ID NO: 83851 - protein, 9 aa, synthetic construct
  source 1..9: note = Seed: YVNTFSSTF
YWNTFSSTY

SEQ ID NO: 83852 - protein, 11 aa, synthetic construct
  source 1..11: note = Seed: YNPFMIDVQQW
YWPFMIDVQQF

SEQ ID NO: 83853 - protein, 10 aa, synthetic construct
  source 1..10: note = Seed: YTPHTVLQAV
YWPHTVLQAA

SEQ ID NO: 83854 - protein, 10 aa, synthetic construct
  source 1..10: note = Seed: YTPHTVLQAV
YWPHTVLQAI

SEQ ID NO: 83855 - protein, 10 aa, synthetic construct
  source 1..10: note = Seed: YTPHTVLQAV
YWPHTVLQAL

SEQ ID NO: 83856 - protein, 10 aa, synthetic construct
  source 1..10: note = Seed: YTPHTVLQAV
YWPHTVLQAM

SEQ ID NO: 83857 - protein, 10 aa, synthetic construct
  source 1..10: note = Seed: YTPHTVLQAV
YWPHTVLQAV

SEQ ID NO: 83858 - protein, 8 aa, synthetic construct
  source 1..8: note = Seed: YMPYFFTL
YWPYFFTF

SEQ ID NO: 83859 - protein, 8 aa, synthetic construct
  source 1..8: note = Seed: YMPYFFTL
YWPYFFTI

SEQ ID NO: 83860 - protein, 8 aa, synthetic construct
  source 1..8: note = Seed: YMPYFFTL
YWPYFFTL

SEQ ID NO: 83861 - protein, 9 aa, synthetic construct
  source 1..9: note = Seed: YMPYFFTLL
YWPYFFTLF

SEQ ID NO: 83862 - protein, 9 aa, synthetic construct
  source 1..9: note = Seed: YMPYFFTLL
YWPYFFTLI

SEQ ID NO: 83863 - protein, 9 aa, synthetic construct
  source 1..9: note = Seed: YMPYFFTLL
YWPYFFTLL

SEQ ID NO: 83864 - protein, 10 aa, synthetic construct
  source 1..10: note = Seed: YMPYFFTLLL
YWPYFFTLLA

SEQ ID NO: 83865 - protein, 10 aa, synthetic construct
  source 1..10: note = Seed: YMPYFFTLLL
YWPYFFTLLF

SEQ ID NO: 83866 - protein, 10 aa, synthetic construct
  source 1..10: note = Seed: YMPYFFTLLL
YWPYFFTLLI

SEQ ID NO: 83867 - protein, 10 aa, synthetic construct
  source 1..10: note = Seed: YMPYFFTLLL
YWPYFFTLLL

SEQ ID NO: 83868 - protein, 10 aa, synthetic construct
  source 1..10: note = Seed: YMPYFFTLLL
YWPYFFTLLM

SEQ ID NO: 83869 - protein, 10 aa, synthetic construct
  source 1..10: note = Seed: YMPYFFTLLL
YWPYFFTLLT

SEQ ID NO: 83870 - protein, 10 aa, synthetic construct
  source 1..10: note = Seed: YMPYFFTLLL
YWPYFFTLLV

SEQ ID NO: 83871 - protein, 10 aa, synthetic construct
  source 1..10: note = Seed: YMPYFFTLLL
YWPYFFTLLW

SEQ ID NO: 83872 - protein, 10 aa, synthetic construct
  source 1..10: note = Seed: YMPYFFTLLL
YWPYFFTLLY

SEQ ID NO: 83873 - protein, 9 aa, synthetic construct
  source 1..9: note = Seed: YMPYFFTLL
YWPYFFTLM

SEQ ID NO: 83874 - protein, 9 aa, synthetic construct
  source 1..9: note = Seed: YMPYFFTLL
YWPYFFTLV

SEQ ID NO: 83875 - protein, 9 aa, synthetic construct
  source 1..9: note = Seed: YMPYFFTLL
YWPYFFTLW

SEQ ID NO: 83876 - protein, 9 aa, synthetic construct
  source 1..9: note = Seed: YMPYFFTLL
YWPYFFTLY

SEQ ID NO: 83877 - protein, 8 aa, synthetic construct
  source 1..8: note = Seed: YMPYFFTL
YWPYFFTM

SEQ ID NO: 83878 - protein, 8 aa, synthetic construct
  source 1..8: note = Seed: YMPYFFTL
YWPYFFTW

SEQ ID NO: 83879 - protein, 9 aa, synthetic construct
  source 1..9: note = Seed: YQPYRVVVL
YWPYRVVVF

SEQ ID NO: 83880 - protein, 9 aa, synthetic construct
  source 1..9: note = Seed: YQPYRVVVL
YWPYRVVVL

SEQ ID NO: 83881 - protein, 10 aa, synthetic construct
  source 1..10: note = Seed: YQPYRVVVLS
YWPYRVVVLA

SEQ ID NO: 83882 - protein, 11 aa, synthetic construct
  source 1..11: note = Seed: YQPYRVVVLSF
YWPYRVVVLSF

SEQ ID NO: 83883 - protein, 9 aa, synthetic construct
  source 1..9: note = Seed: YQPYRVVVL
YWPYRVVVM

SEQ ID NO: 83884 - protein, 9 aa, synthetic construct
  source 1..9: note = Seed: YQPYRVVVL
YWPYRVVVY

SEQ ID NO: 83885 - protein, 10 aa, synthetic construct
  source 1..10: note = Seed: YKQFDTYNLW
YWQFDTYNLF

SEQ ID NO: 83886 - protein, 10 aa, synthetic construct
  source 1..10: note = Seed: YKQFDTYNLW
YWQFDTYNLI

SEQ ID NO: 83887 - protein, 10 aa, synthetic construct
  source 1..10: note = Seed: YKQFDTYNLW
YWQFDTYNLL

SEQ ID NO: 83888 - protein, 10 aa, synthetic construct
  source 1..10: note = Seed: YKQFDTYNLW
YWQFDTYNLM

SEQ ID NO: 83889 - protein, 10 aa, synthetic construct
  source 1..10: note = Seed: YKQFDTYNLW
YWQFDTYNLW

SEQ ID NO: 83890 - protein, 10 aa, synthetic construct
  source 1..10: note = Seed: YKQFDTYNLW
YWQFDTYNLY

SEQ ID NO: 83891 - protein, 9 aa, synthetic construct
  source 1..9: note = Seed: YSQLMCQPI
YWQLMCQPF

SEQ ID NO: 83892 - protein, 10 aa, synthetic construct
  source 1..10: note = Seed: YSQLMCQPIL
YWQLMCQPIF

SEQ ID NO: 83893 - protein, 11 aa, synthetic construct
  source 1..11: note = Seed: YSQLMCQPILL
YWQLMCQPILA

SEQ ID NO: 83894 - protein, 11 aa, synthetic construct
  source 1..11: note = Seed: YSQLMCQPILL
YWQLMCQPILI

SEQ ID NO: 83895 - protein, 11 aa, synthetic construct
  source 1..11: note = Seed: YSQLMCQPILL
YWQLMCQPILL

SEQ ID NO: 83896 - protein, 11 aa, synthetic construct
  source 1..11: note = Seed: YSQLMCQPILL
YWQLMCQPILM

SEQ ID NO: 83897 - protein, 11 aa, synthetic construct
  source 1..11: note = Seed: YSQLMCQPILL
YWQLMCQPILV

SEQ ID NO: 83898 - protein, 10 aa, synthetic construct
  source 1..10: note = Seed: YSQLMCQPIL
YWQLMCQPIY

SEQ ID NO: 83899 - protein, 9 aa, synthetic construct
  source 1..9: note = Seed: YSQLMCQPI
YWQLMCQPL

SEQ ID NO: 83900 - protein, 9 aa, synthetic construct
  source 1..9: note = Seed: YSQLMCQPI
YWQLMCQPM

SEQ ID NO: 83901 - protein, 9 aa, synthetic construct
  source 1..9: note = Seed: YSQLMCQPI
YWQLMCQPY

SEQ ID NO: 83902 - protein, 8 aa, synthetic construct
  source 1..8: note = Seed: YYQNNVFM
YWQNNVFF

SEQ ID NO: 83903 - protein, 9 aa, synthetic construct
  source 1..9: note = Seed: YYQNNVFMS
YWQNNVFMF

SEQ ID NO: 83904 - protein, 9 aa, synthetic construct
  source 1..9: note = Seed: YYQNNVFMS
YWQNNVFMI

SEQ ID NO: 83905 - protein, 9 aa, synthetic construct
  source 1..9: note = Seed: YYQNNVFMS
YWQNNVFML

SEQ ID NO: 83906 - protein, 9 aa, synthetic construct
  source 1..9: note = Seed: YYQNNVFMS
YWQNNVFMM

SEQ ID NO: 83907 - protein, 9 aa, synthetic construct
  source 1..9: note = Seed: YYQNNVFMS
YWQNNVFMV

SEQ ID NO: 83908 - protein, 9 aa, synthetic construct
  source 1..9: note = Seed: YYQNNVFMS
YWQNNVFMW

SEQ ID NO: 83909 - protein, 9 aa, synthetic construct
  source 1..9: note = Seed: YLQPRTFLL
YWQPRTFLF

SEQ ID NO: 83910 - protein, 9 aa, synthetic construct
  source 1..9: note = Seed: YLQPRTFLL
YWQPRTFLI

SEQ ID NO: 83911 - protein, 9 aa, synthetic construct
  source 1..9: note = Seed: YLQPRTFLL
YWQPRTFLL

SEQ ID NO: 83912 - protein, 10 aa, synthetic construct
  source 1..10: note = Seed: YLQPRTFLLK
YWQPRTFLLR

SEQ ID NO: 83913 - protein, 9 aa, synthetic construct
  source 1..9: note = Seed: YLQPRTFLL
YWQPRTFLM

SEQ ID NO: 83914 - protein, 9 aa, synthetic construct
  source 1..9: note = Seed: YLQPRTFLL
YWQPRTFLV

SEQ ID NO: 83915 - protein, 9 aa, synthetic construct
  source 1..9: note = Seed: YLQPRTFLL
YWQPRTFLW

SEQ ID NO: 83916 - protein, 9 aa, synthetic construct
  source 1..9: note = Seed: YLQPRTFLL
YWQPRTFLY

SEQ ID NO: 83917 - protein, 10 aa, synthetic construct
  source 1..10: note = Seed: YPQVNGLTSI
YWQVNGLTSF

SEQ ID NO: 83918 - protein, 10 aa, synthetic construct
  source 1..10: note = Seed: YPQVNGLTSI
YWQVNGLTSI

SEQ ID NO: 83919 - protein, 10 aa, synthetic construct
  source 1..10: note = Seed: YPQVNGLTSI
YWQVNGLTSL

SEQ ID NO: 83920 - protein, 10 aa, synthetic construct
  source 1..10: note = Seed: YPQVNGLTSI
YWQVNGLTSM

SEQ ID NO: 83921 - protein, 10 aa, synthetic construct
  source 1..10: note = Seed: YPQVNGLTSI
YWQVNGLTSV

SEQ ID NO: 83922 - protein, 10 aa, synthetic construct
  source 1..10: note = Seed: YPQVNGLTSI
YWQVNGLTSY

SEQ ID NO: 83923 - protein, 9 aa, synthetic construct
  source 1..9: note = Seed: YYRARAGEA
YWRARAGEF

SEQ ID NO: 83924 - protein, 9 aa, synthetic construct
  source 1..9: note = Seed: YYRARAGEA
YWRARAGEL

SEQ ID NO: 83925 - protein, 9 aa, synthetic construct
  source 1..9: note = Seed: YYRARAGEA
YWRARAGEM

SEQ ID NO: 83926 - protein, 9 aa, synthetic construct
  source 1..9: note = Seed: YYRARAGEA
YWRARAGEY

SEQ ID NO: 83927 - protein, 10 aa, synthetic construct
  source 1..10: note = Seed: YRRLISMMGF
YWRLISMMGF

SEQ ID NO: 83928 - protein, 10 aa, synthetic construct
  source 1..10: note = Seed: YRRLISMMGF
YWRLISMMGI

SEQ ID NO: 83929 - protein, 10 aa, synthetic construct
  source 1..10: note = Seed: YRRLISMMGF
YWRLISMMGL

SEQ ID NO: 83930 - protein, 10 aa, synthetic construct
  source 1..10: note = Seed: YRRLISMMGF
YWRLISMMGM

SEQ ID NO: 83931 - protein, 9 aa, synthetic construct
  source 1..9: note = Seed: YFRLTLGVY
YWRLTLGVF

SEQ ID NO: 83932 - protein, 9 aa, synthetic construct
  source 1..9: note = Seed: YFRLTLGVY
YWRLTLGVL

SEQ ID NO: 83933 - protein, 9 aa, synthetic construct
  source 1..9: note = Seed: YFRLTLGVY
YWRLTLGVM

SEQ ID NO: 83934 - protein, 9 aa, synthetic construct
  source 1..9: note = Seed: YYRRATRRI
YWRRATRRF

SEQ ID NO: 83935 - protein, 9 aa, synthetic construct
  source 1..9: note = Seed: YYRRATRRI
YWRRATRRM

SEQ ID NO: 83936 - protein, 9 aa, synthetic construct
  source 1..9: note = Seed: YYRSLPGVF
YWRSLPGVF

SEQ ID NO: 83937 - protein, 9 aa, synthetic construct
  source 1..9: note = Seed: YYRSLPGVF
YWRSLPGVL

SEQ ID NO: 83938 - protein, 9 aa, synthetic construct
  source 1..9: note = Seed: YYRSLPGVF
YWRSLPGVM

SEQ ID NO: 83939 - protein, 9 aa, synthetic construct
  source 1..9: note = Seed: YYRSLPGVF
YWRSLPGVY

SEQ ID NO: 83940 - protein, 8 aa, synthetic construct
  source 1..8: note = Seed: YYRYNLPT
YWRYNLPM

SEQ ID NO: 83941 - protein, 9 aa, synthetic construct
  source 1..9: note = Seed: YYRYNLPTM
YWRYNLPTF

SEQ ID NO: 83942 - protein, 9 aa, synthetic construct
  source 1..9: note = Seed: YYRYNLPTM
YWRYNLPTI

SEQ ID NO: 83943 - protein, 9 aa, synthetic construct
  source 1..9: note = Seed: YYRYNLPTM
YWRYNLPTL

SEQ ID NO: 83944 - protein, 9 aa, synthetic construct
  source 1..9: note = Seed: YYRYNLPTM
YWRYNLPTM

SEQ ID NO: 83945 - protein, 10 aa, synthetic construct
  source 1..10: note = Seed: YYRYNLPTMC
YWRYNLPTMF

SEQ ID NO: 83946 - protein, 10 aa, synthetic construct
  source 1..10: note = Seed: YYRYNLPTMC
YWRYNLPTMI

SEQ ID NO: 83947 - protein, 10 aa, synthetic construct
  source 1..10: note = Seed: YYRYNLPTMC
YWRYNLPTML

SEQ ID NO: 83948 - protein, 10 aa, synthetic construct
  source 1..10: note = Seed: YYRYNLPTMC
YWRYNLPTMM

SEQ ID NO: 83949 - protein, 10 aa, synthetic construct
  source 1..10: note = Seed: YYRYNLPTMC
YWRYNLPTMV

SEQ ID NO: 83950 - protein, 9 aa, synthetic construct
  source 1..9: note = Seed: YYRYNLPTM
YWRYNLPTW

SEQ ID NO: 83951 - protein, 9 aa, synthetic construct
  source 1..9: note = Seed: YYRYNLPTM
YWRYNLPTY

SEQ ID NO: 83952 - protein, 10 aa, synthetic construct
  source 1..10: note = Seed: YSRYRIGNYK
YWRYRIGNYF

SEQ ID NO: 83953 - protein, 10 aa, synthetic construct
  source 1..10: note = Seed: YSRYRIGNYK
YWRYRIGNYK

SEQ ID NO: 83954 - protein, 11 aa, synthetic construct
  source 1..11: note = Seed: YSRYRIGNYKL
YWRYRIGNYKF

SEQ ID NO: 83955 - protein, 10 aa, synthetic construct
  source 1..10: note = Seed: YSRYRIGNYK
YWRYRIGNYL

SEQ ID NO: 83956 - protein, 10 aa, synthetic construct
  source 1..10: note = Seed: YSRYRIGNYK
YWRYRIGNYM

SEQ ID NO: 83957 - protein, 10 aa, synthetic construct
  source 1..10: note = Seed: YSRYRIGNYK
YWRYRIGNYR

SEQ ID NO: 83958 - protein, 9 aa, synthetic construct
  source 1..9: note = Seed: YSSANNCTF
YWSANNCTF

SEQ ID NO: 83959 - protein, 11 aa, synthetic construct
  source 1..11: note = Seed: YSSANNCTFEY
YWSANNCTFEW

SEQ ID NO: 83960 - protein, 11 aa, synthetic construct
  source 1..11: note = Seed: YSSANNCTFEY
YWSANNCTFEY

SEQ ID NO: 83961 - protein, 9 aa, synthetic construct
  source 1..9: note = Seed: YSSANNCTF
YWSANNCTI

SEQ ID NO: 83962 - protein, 9 aa, synthetic construct
  source 1..9: note = Seed: YSSANNCTF
YWSANNCTL

SEQ ID NO: 83963 - protein, 9 aa, synthetic construct
  source 1..9: note = Seed: YSSANNCTF
YWSANNCTM

SEQ ID NO: 83964 - protein, 9 aa, synthetic construct
  source 1..9: note = Seed: YSSANNCTF
YWSANNCTW

SEQ ID NO: 83965 - protein, 9 aa, synthetic construct
  source 1..9: note = Seed: YSSANNCTF
YWSANNCTY

SEQ ID NO: 83966 - protein, 9 aa, synthetic construct
  source 1..9: note = Seed: YNSASFSTF
YWSASFSTF

SEQ ID NO: 83967 - protein, 10 aa, synthetic construct
  source 1..10: note = Seed: YNSASFSTFK
YWSASFSTFK

SEQ ID NO: 83968 - protein, 10 aa, synthetic construct
  source 1..10: note = Seed: YNSASFSTFK
YWSASFSTFR

SEQ ID NO: 83969 - protein, 9 aa, synthetic construct
  source 1..9: note = Seed: YNSASFSTF
YWSASFSTI

SEQ ID NO: 83970 - protein, 9 aa, synthetic construct
  source 1..9: note = Seed: YNSASFSTF
YWSASFSTL

SEQ ID NO: 83971 - protein, 9 aa, synthetic construct
  source 1..9: note = Seed: YNSASFSTF
YWSASFSTM

SEQ ID NO: 83972 - protein, 9 aa, synthetic construct
  source 1..9: note = Seed: YNSASFSTF
YWSASFSTV

SEQ ID NO: 83973 - protein, 9 aa, synthetic construct
  source 1..9: note = Seed: YNSASFSTF
YWSASFSTW

SEQ ID NO: 83974 - protein, 9 aa, synthetic construct
  source 1..9: note = Seed: YNSASFSTF
YWSASFSTY

SEQ ID NO: 83975 - protein, 10 aa, synthetic construct
  source 1..10: note = Seed: YASAVVLLIL
YWSAVVLLIW

SEQ ID NO: 83976 - protein, 9 aa, synthetic construct
  source 1..9: note = Seed: YYSLLMPIL
YWSLLMPIF

SEQ ID NO: 83977 - protein, 9 aa, synthetic construct
  source 1..9: note = Seed: YYSLLMPIL
YWSLLMPII

SEQ ID NO: 83978 - protein, 11 aa, synthetic construct
  source 1..11: note = Seed: YYSLLMPILTL
YWSLLMPILTF

SEQ ID NO: 83979 - protein, 11 aa, synthetic construct
  source 1..11: note = Seed: YYSLLMPILTL
YWSLLMPILTV

SEQ ID NO: 83980 - protein, 9 aa, synthetic construct
  source 1..9: note = Seed: YYSLLMPIL
YWSLLMPIW

SEQ ID NO: 83981 - protein, 11 aa, synthetic construct
  source 1..11: note = Seed: YRSLPGVFCGV
YWSLPGVFCGI

SEQ ID NO: 83982 - protein, 11 aa, synthetic construct
  source 1..11: note = Seed: YRSLPGVFCGV
YWSLPGVFCGV

SEQ ID NO: 83983 - protein, 10 aa, synthetic construct
  source 1..10: note = Seed: YESLRPDTRY
YWSLRPDTRF

SEQ ID NO: 83984 - protein, 10 aa, synthetic construct
  source 1..10: note = Seed: YESLRPDTRY
YWSLRPDTRW

SEQ ID NO: 83985 - protein, 10 aa, synthetic construct
  source 1..10: note = Seed: YTSNPTTFHL
YWSNPTTFHF

SEQ ID NO: 83986 - protein, 10 aa, synthetic construct
  source 1..10: note = Seed: YTSNPTTFHL
YWSNPTTFHW

SEQ ID NO: 83987 - protein, 10 aa, synthetic construct
  source 1..10: note = Seed: YTSNPTTFHL
YWSNPTTFHY

SEQ ID NO: 83988 - protein, 10 aa, synthetic construct
  source 1..10: note = Seed: YYSQLMCQPI
YWSQLMCQPF

SEQ ID NO: 83989 - protein, 10 aa, synthetic construct
  source 1..10: note = Seed: YYSQLMCQPI
YWSQLMCQPW

SEQ ID NO: 83990 - protein, 10 aa, synthetic construct
  source 1..10: note = Seed: YLTFYLTNDV
YWTFYLTNDV

SEQ ID NO: 83991 - protein, 9 aa, synthetic construct
  source 1..9: note = Seed: YITGGVVQL
YWTGGVVQF

SEQ ID NO: 83992 - protein, 9 aa, synthetic construct
  source 1..9: note = Seed: YITGGVVQL
YWTGGVVQL

SEQ ID NO: 83993 - protein, 9 aa, synthetic construct
  source 1..9: note = Seed: YITGGVVQL
YWTGGVVQM

SEQ ID NO: 83994 - protein, 10 aa, synthetic construct
  source 1..10: note = Seed: YLTNDVSFLA
YWTNDVSFLA

SEQ ID NO: 83995 - protein, 10 aa, synthetic construct
  source 1..10: note = Seed: YLTNDVSFLA
YWTNDVSFLI

SEQ ID NO: 83996 - protein, 10 aa, synthetic construct
  source 1..10: note = Seed: YLTNDVSFLA
YWTNDVSFLL

SEQ ID NO: 83997 - protein, 10 aa, synthetic construct
  source 1..10: note = Seed: YLTNDVSFLA
YWTNDVSFLM

SEQ ID NO: 83998 - protein, 10 aa, synthetic construct
  source 1..10: note = Seed: YLTNDVSFLA
YWTNDVSFLV

SEQ ID NO: 83999 - protein, 11 aa, synthetic construct
  source 1..11: note = Seed: YFTQSRNLQEF
YWTQSRNLQEF

SEQ ID NO: 84000 - protein, 9 aa, synthetic construct
  source 1..9: note = Seed: YFTSDYYQL
YWTSDYYQF

SEQ ID NO: 84001 - protein, 9 aa, synthetic construct
  source 1..9: note = Seed: YFTSDYYQL
YWTSDYYQI

SEQ ID NO: 84002 - protein, 9 aa, synthetic construct
  source 1..9: note = Seed: YFTSDYYQL
YWTSDYYQL

SEQ ID NO: 84003 - protein, 10 aa, synthetic construct
  source 1..10: note = Seed: YFTSDYYQLY
YWTSDYYQLK

SEQ ID NO: 84004 - protein, 10 aa, synthetic construct
  source 1..10: note = Seed: YFTSDYYQLY
YWTSDYYQLR

SEQ ID NO: 84005 - protein, 10 aa, synthetic construct
  source 1..10: note = Seed: YFTSDYYQLY
YWTSDYYQLW

SEQ ID NO: 84006 - protein, 10 aa, synthetic construct
  source 1..10: note = Seed: YFTSDYYQLY
YWTSDYYQLY

SEQ ID NO: 84007 - protein, 11 aa, synthetic construct
  source 1..11: note = Seed: YFTSDYYQLYS
YWTSDYYQLYY

SEQ ID NO: 84008 - protein, 9 aa, synthetic construct
  source 1..9: note = Seed: YFTSDYYQL
YWTSDYYQM

SEQ ID NO: 84009 - protein, 9 aa, synthetic construct
  source 1..9: note = Seed: YFTSDYYQL
YWTSDYYQW

SEQ ID NO: 84010 - protein, 9 aa, synthetic construct
  source 1..9: note = Seed: YYTSNPTTF
YWTSNPTTF

SEQ ID NO: 84011 - protein, 10 aa, synthetic construct
  source 1..10: note = Seed: YYTSNPTTFH
YWTSNPTTFF

SEQ ID NO: 84012 - protein, 11 aa, synthetic construct
  source 1..11: note = Seed: YYTSNPTTFHL
YWTSNPTTFHF

SEQ ID NO: 84013 - protein, 11 aa, synthetic construct
  source 1..11: note = Seed: YYTSNPTTFHL
YWTSNPTTFHW

SEQ ID NO: 84014 - protein, 10 aa, synthetic construct
  source 1..10: note = Seed: YYTSNPTTFH
YWTSNPTTFW

SEQ ID NO: 84015 - protein, 9 aa, synthetic construct
  source 1..9: note = Seed: YYTSNPTTF
YWTSNPTTI

SEQ ID NO: 84016 - protein, 9 aa, synthetic construct
  source 1..9: note = Seed: YYTSNPTTF
YWTSNPTTL

SEQ ID NO: 84017 - protein, 9 aa, synthetic construct
  source 1..9: note = Seed: YYTSNPTTF
YWTSNPTTM

SEQ ID NO: 84018 - protein, 9 aa, synthetic construct
  source 1..9: note = Seed: YYTSNPTTF
YWTSNPTTW

SEQ ID NO: 84019 - protein, 9 aa, synthetic construct
  source 1..9: note = Seed: YYTSNPTTF
YWTSNPTTY

SEQ ID NO: 84020 - protein, 10 aa, synthetic construct
  source 1..10: note = Seed: YTTTIKPVTY
YWTTIKPVTW

SEQ ID NO: 84021 - protein, 11 aa, synthetic construct
  source 1..11: note = Seed: YTTTIKPVTYK
YWTTIKPVTYR

SEQ ID NO: 84022 - protein, 9 aa, synthetic construct
  source 1..9: note = Seed: YYVGYLQPR
YWVGYLQPF

SEQ ID NO: 84023 - protein, 9 aa, synthetic construct
  source 1..9: note = Seed: YYVGYLQPR
YWVGYLQPI

SEQ ID NO: 84024 - protein, 9 aa, synthetic construct
  source 1..9: note = Seed: YYVGYLQPR
YWVGYLQPL

SEQ ID NO: 84025 - protein, 9 aa, synthetic construct
  source 1..9: note = Seed: YYVGYLQPR
YWVGYLQPM

SEQ ID NO: 84026 - protein, 11 aa, synthetic construct
  source 1..11: note = Seed: YYVGYLQPRTF
YWVGYLQPRTF

SEQ ID NO: 84027 - protein, 9 aa, synthetic construct
  source 1..9: note = Seed: YYVGYLQPR
YWVGYLQPV

SEQ ID NO: 84028 - protein, 9 aa, synthetic construct
  source 1..9: note = Seed: YYVGYLQPR
YWVGYLQPY

SEQ ID NO: 84029 - protein, 9 aa, synthetic construct
  source 1..9: note = Seed: YFVLTSHTV
YWVLTSHTF

SEQ ID NO: 84030 - protein, 9 aa, synthetic construct
  source 1..9: note = Seed: YFVLTSHTV
YWVLTSHTI

SEQ ID NO: 84031 - protein, 9 aa, synthetic construct
  source 1..9: note = Seed: YFVLTSHTV
YWVLTSHTL

SEQ ID NO: 84032 - protein, 9 aa, synthetic construct
  source 1..9: note = Seed: YFVLTSHTV
YWVLTSHTM

SEQ ID NO: 84033 - protein, 9 aa, synthetic construct
  source 1..9: note = Seed: YFVLTSHTV
YWVLTSHTV

SEQ ID NO: 84034 - protein, 9 aa, synthetic construct
  source 1..9: note = Seed: YFVLTSHTV
YWVLTSHTW

SEQ ID NO: 84035 - protein, 9 aa, synthetic construct
  source 1..9: note = Seed: YFVLTSHTV
YWVLTSHTY

SEQ ID NO: 84036 - protein, 9 aa, synthetic construct
  source 1..9: note = Seed: YQVNGYPNM
YWVNGYPNF

SEQ ID NO: 84037 - protein, 9 aa, synthetic construct
  source 1..9: note = Seed: YQVNGYPNM
YWVNGYPNL

SEQ ID NO: 84038 - protein, 9 aa, synthetic construct
  source 1..9: note = Seed: YQVNGYPNM
YWVNGYPNM

SEQ ID NO: 84039 - protein, 10 aa, synthetic construct
  source 1..10: note = Seed: YQVNGYPNMF
YWVNGYPNMF

SEQ ID NO: 84040 - protein, 10 aa, synthetic construct
  source 1..10: note = Seed: YQVNGYPNMF
YWVNGYPNMW

SEQ ID NO: 84041 - protein, 9 aa, synthetic construct
  source 1..9: note = Seed: YQVNGYPNM
YWVNGYPNY

SEQ ID NO: 84042 - protein, 8 aa, synthetic construct
  source 1..8: note = Seed: YLVSTQEF
YWVSTQEF

SEQ ID NO: 84043 - protein, 10 aa, synthetic construct
  source 1..10: note = Seed: YLVSTQEFRY
YWVSTQEFRY

SEQ ID NO: 84044 - protein, 8 aa, synthetic construct
  source 1..8: note = Seed: YLVSTQEF
YWVSTQEM

SEQ ID NO: 84045 - protein, 9 aa, synthetic construct
  source 1..9: note = Seed: YFVVKRHTF
YWVVKRHTF

SEQ ID NO: 84046 - protein, 9 aa, synthetic construct
  source 1..9: note = Seed: YFVVKRHTF
YWVVKRHTI

SEQ ID NO: 84047 - protein, 9 aa, synthetic construct
  source 1..9: note = Seed: YFVVKRHTF
YWVVKRHTL

SEQ ID NO: 84048 - protein, 9 aa, synthetic construct
  source 1..9: note = Seed: YFVVKRHTF
YWVVKRHTM

SEQ ID NO: 84049 - protein, 9 aa, synthetic construct
  source 1..9: note = Seed: YFVVKRHTF
YWVVKRHTW

SEQ ID NO: 84050 - protein, 9 aa, synthetic construct
  source 1..9: note = Seed: YFVVKRHTF
YWVVKRHTY

SEQ ID NO: 84051 - protein, 9 aa, synthetic construct
  source 1..9: note = Seed: YYVWKSYVH
YWVWKSYVF

SEQ ID NO: 84052 - protein, 10 aa, synthetic construct
  source 1..10: note = Seed: YYVWKSYVHV
YWVWKSYVHF

SEQ ID NO: 84053 - protein, 10 aa, synthetic construct
  source 1..10: note = Seed: YYVWKSYVHV
YWVWKSYVHI

SEQ ID NO: 84054 - protein, 10 aa, synthetic construct
  source 1..10: note = Seed: YYVWKSYVHV
YWVWKSYVHL

SEQ ID NO: 84055 - protein, 10 aa, synthetic construct
  source 1..10: note = Seed: YYVWKSYVHV
YWVWKSYVHV

SEQ ID NO: 84056 - protein, 11 aa, synthetic construct
  source 1..11: note = Seed: YYVWKSYVHVV
YWVWKSYVHVF

SEQ ID NO: 84057 - protein, 10 aa, synthetic construct
  source 1..10: note = Seed: YYVWKSYVHV
YWVWKSYVHW

SEQ ID NO: 84058 - protein, 9 aa, synthetic construct
  source 1..9: note = Seed: YYVWKSYVH
YWVWKSYVL

SEQ ID NO: 84059 - protein, 9 aa, synthetic construct
  source 1..9: note = Seed: YYVWKSYVH
YWVWKSYVM

SEQ ID NO: 84060 - protein, 9 aa, synthetic construct
  source 1..9: note = Seed: YYVWKSYVH
YWVWKSYVY

SEQ ID NO: 84061 - protein, 10 aa, synthetic construct
  source 1..10: note = Seed: YVYANGGKGF
YWYANGGKGF

SEQ ID NO: 84062 - protein, 10 aa, synthetic construct
  source 1..10: note = Seed: YVYANGGKGF
YWYANGGKGL

SEQ ID NO: 84063 - protein, 10 aa, synthetic construct
  source 1..10: note = Seed: YVYANGGKGF
YWYANGGKGM

SEQ ID NO: 84064 - protein, 10 aa, synthetic construct
  source 1..10: note = Seed: YVYANGGKGF
YWYANGGKGW

SEQ ID NO: 84065 - protein, 10 aa, synthetic construct
  source 1..10: note = Seed: YVYANGGKGF
YWYANGGKGY

SEQ ID NO: 84066 - protein, 11 aa, synthetic construct
  source 1..11: note = Seed: YLYFIKGLNNL
YWYFIKGLNNF

SEQ ID NO: 84067 - protein, 10 aa, synthetic construct
  source 1..10: note = Seed: YDYLVSTQEF
YWYLVSTQEF

SEQ ID NO: 84068 - protein, 11 aa, synthetic construct
  source 1..11: note = Seed: YDYLVSTQEFR
YWYLVSTQEFF

SEQ ID NO: 84069 - protein, 11 aa, synthetic construct
  source 1..11: note = Seed: YDYLVSTQEFR
YWYLVSTQEFI

SEQ ID NO: 84070 - protein, 11 aa, synthetic construct
  source 1..11: note = Seed: YDYLVSTQEFR
YWYLVSTQEFL

SEQ ID NO: 84071 - protein, 11 aa, synthetic construct
  source 1..11: note = Seed: YDYLVSTQEFR
YWYLVSTQEFM

SEQ ID NO: 84072 - protein, 11 aa, synthetic construct
  source 1..11: note = Seed: YDYLVSTQEFR
YWYLVSTQEFV

SEQ ID NO: 84073 - protein, 11 aa, synthetic construct
  source 1..11: note = Seed: YDYLVSTQEFR
YWYLVSTQEFW

SEQ ID NO: 84074 - protein, 10 aa, synthetic construct
  source 1..10: note = Seed: YDYLVSTQEF
YWYLVSTQEI

SEQ ID NO: 84075 - protein, 10 aa, synthetic construct
  source 1..10: note = Seed: YDYLVSTQEF
YWYLVSTQEL

SEQ ID NO: 84076 - protein, 10 aa, synthetic construct
  source 1..10: note = Seed: YDYLVSTQEF
YWYLVSTQEM

SEQ ID NO: 84077 - protein, 10 aa, synthetic construct
  source 1..10: note = Seed: YDYLVSTQEF
YWYLVSTQEW

SEQ ID NO: 84078 - protein, 10 aa, synthetic construct
  source 1..10: note = Seed: YDYLVSTQEF
YWYLVSTQEY

SEQ ID NO: 84079 - protein, 9 aa, synthetic construct
  source 1..9: note = Seed: YNYLYRLFR
YWYLYRLFK

SEQ ID NO: 84080 - protein, 9 aa, synthetic construct
  source 1..9: note = Seed: YNYLYRLFR
YWYLYRLFR

SEQ ID NO: 84081 - protein, 10 aa, synthetic construct
  source 1..10: note = Seed: YNYLYRLFRK
YWYLYRLFRK

SEQ ID NO: 84082 - protein, 10 aa, synthetic construct
  source 1..10: note = Seed: YNYLYRLFRK
YWYLYRLFRR

SEQ ID NO: 84083 - protein, 8 aa, synthetic construct
  source 1..8: note = Seed: YRYNLPTM
YWYNLPTF

SEQ ID NO: 84084 - protein, 8 aa, synthetic construct
  source 1..8: note = Seed: YRYNLPTM
YWYNLPTL

SEQ ID NO: 84085 - protein, 8 aa, synthetic construct
  source 1..8: note = Seed: YRYNLPTM
YWYNLPTM

SEQ ID NO: 84086 - protein, 11 aa, synthetic construct
  source 1..11: note = Seed: YDYYRYNLPTM
YWYYRYNLPTF

SEQ ID NO: 84087 - protein, 11 aa, synthetic construct
  source 1..11: note = Seed: YDYYRYNLPTM
YWYYRYNLPTI

SEQ ID NO: 84088 - protein, 11 aa, synthetic construct
  source 1..11: note = Seed: YDYYRYNLPTM
YWYYRYNLPTL

SEQ ID NO: 84089 - protein, 11 aa, synthetic construct
  source 1..11: note = Seed: YDYYRYNLPTM
YWYYRYNLPTM

SEQ ID NO: 84090 - protein, 11 aa, synthetic construct
  source 1..11: note = Seed: YDYYRYNLPTM
YWYYRYNLPTW

SEQ ID NO: 84091 - protein, 10 aa, synthetic construct
  source 1..10: note = Seed: YGANKDGIIW
YYANKDGIIW

SEQ ID NO: 84092 - protein, 9 aa, synthetic construct
  source 1..9: note = Seed: YPANSIVCR
YYANSIVCR

SEQ ID NO: 84093 - protein, 10 aa, synthetic construct
  source 1..10: note = Seed: YPANSIVCRF
YYANSIVCRW

SEQ ID NO: 84094 - protein, 11 aa, synthetic construct
  source 1..11: note = Seed: YFAVHFISNSW
YYAVHFISNSF

SEQ ID NO: 84095 - protein, 11 aa, synthetic construct
  source 1..11: note = Seed: YFAVHFISNSW
YYAVHFISNSI

SEQ ID NO: 84096 - protein, 11 aa, synthetic construct
  source 1..11: note = Seed: YFAVHFISNSW
YYAVHFISNSL

SEQ ID NO: 84097 - protein, 11 aa, synthetic construct
  source 1..11: note = Seed: YFAVHFISNSW
YYAVHFISNSM

SEQ ID NO: 84098 - protein, 11 aa, synthetic construct
  source 1..11: note = Seed: YFAVHFISNSW
YYAVHFISNSW

SEQ ID NO: 84099 - protein, 9 aa, synthetic construct
  source 1..9: note = Seed: YFCTCYFGL
YYCTCYFGF

SEQ ID NO: 84100 - protein, 9 aa, synthetic construct
  source 1..9: note = Seed: YFCTCYFGL
YYCTCYFGI

SEQ ID NO: 84101 - protein, 9 aa, synthetic construct
  source 1..9: note = Seed: YFCTCYFGL
YYCTCYFGL

SEQ ID NO: 84102 - protein, 10 aa, synthetic construct
  source 1..10: note = Seed: YFCTCYFGLF
YYCTCYFGLF

SEQ ID NO: 84103 - protein, 10 aa, synthetic construct
  source 1..10: note = Seed: YFCTCYFGLF
YYCTCYFGLI

SEQ ID NO: 84104 - protein, 10 aa, synthetic construct
  source 1..10: note = Seed: YFCTCYFGLF
YYCTCYFGLL

SEQ ID NO: 84105 - protein, 10 aa, synthetic construct
  source 1..10: note = Seed: YFCTCYFGLF
YYCTCYFGLM

SEQ ID NO: 84106 - protein, 10 aa, synthetic construct
  source 1..10: note = Seed: YFCTCYFGLF
YYCTCYFGLW

SEQ ID NO: 84107 - protein, 10 aa, synthetic construct
  source 1..10: note = Seed: YFCTCYFGLF
YYCTCYFGLY

SEQ ID NO: 84108 - protein, 9 aa, synthetic construct
  source 1..9: note = Seed: YFCTCYFGL
YYCTCYFGM

SEQ ID NO: 84109 - protein, 9 aa, synthetic construct
  source 1..9: note = Seed: YFCTCYFGL
YYCTCYFGW

SEQ ID NO: 84110 - protein, 10 aa, synthetic construct
  source 1..10: note = Seed: YKENSYTTTI
YYENSYTTTA

SEQ ID NO: 84111 - protein, 10 aa, synthetic construct
  source 1..10: note = Seed: YKENSYTTTI
YYENSYTTTF

SEQ ID NO: 84112 - protein, 10 aa, synthetic construct
  source 1..10: note = Seed: YKENSYTTTI
YYENSYTTTL

SEQ ID NO: 84113 - protein, 10 aa, synthetic construct
  source 1..10: note = Seed: YKENSYTTTI
YYENSYTTTM

SEQ ID NO: 84114 - protein, 9 aa, synthetic construct
  source 1..9: note = Seed: YVFCTVNAL
YYFCTVNAA

SEQ ID NO: 84115 - protein, 9 aa, synthetic construct
  source 1..9: note = Seed: YVFCTVNAL
YYFCTVNAF

SEQ ID NO: 84116 - protein, 9 aa, synthetic construct
  source 1..9: note = Seed: YVFCTVNAL
YYFCTVNAH

SEQ ID NO: 84117 - protein, 9 aa, synthetic construct
  source 1..9: note = Seed: YVFCTVNAL
YYFCTVNAI

SEQ ID NO: 84118 - protein, 9 aa, synthetic construct
  source 1..9: note = Seed: YVFCTVNAL
YYFCTVNAL

SEQ ID NO: 84119 - protein, 9 aa, synthetic construct
  source 1..9: note = Seed: YVFCTVNAL
YYFCTVNAM

SEQ ID NO: 84120 - protein, 9 aa, synthetic construct
  source 1..9: note = Seed: YVFCTVNAL
YYFCTVNAV

SEQ ID NO: 84121 - protein, 9 aa, synthetic construct
  source 1..9: note = Seed: YVFCTVNAL
YYFCTVNAW

SEQ ID NO: 84122 - protein, 9 aa, synthetic construct
  source 1..9: note = Seed: YVFCTVNAL
YYFCTVNAY

SEQ ID NO: 84123 - protein, 8 aa, synthetic construct
  source 1..8: note = Seed: YIFFASFY
YYFFASFY

SEQ ID NO: 84124 - protein, 9 aa, synthetic construct
  source 1..9: note = Seed: YIFFASFYY
YYFFASFYF

SEQ ID NO: 84125 - protein, 9 aa, synthetic construct
  source 1..9: note = Seed: YIFFASFYY
YYFFASFYH

SEQ ID NO: 84126 - protein, 9 aa, synthetic construct
  source 1..9: note = Seed: YIFFASFYY
YYFFASFYI

SEQ ID NO: 84127 - protein, 9 aa, synthetic construct
  source 1..9: note = Seed: YIFFASFYY
YYFFASFYK

SEQ ID NO: 84128 - protein, 9 aa, synthetic construct
  source 1..9: note = Seed: YIFFASFYY
YYFFASFYL

SEQ ID NO: 84129 - protein, 9 aa, synthetic construct
  source 1..9: note = Seed: YIFFASFYY
YYFFASFYM

SEQ ID NO: 84130 - protein, 9 aa, synthetic construct
  source 1..9: note = Seed: YIFFASFYY
YYFFASFYR

SEQ ID NO: 84131 - protein, 9 aa, synthetic construct
  source 1..9: note = Seed: YIFFASFYY
YYFFASFYV

SEQ ID NO: 84132 - protein, 9 aa, synthetic construct
  source 1..9: note = Seed: YIFFASFYY
YYFFASFYY

SEQ ID NO: 84133 - protein, 10 aa, synthetic construct
  source 1..10: note = Seed: YIFFASFYYV
YYFFASFYYA

SEQ ID NO: 84134 - protein, 10 aa, synthetic construct
  source 1..10: note = Seed: YIFFASFYYV
YYFFASFYYC

SEQ ID NO: 84135 - protein, 10 aa, synthetic construct
  source 1..10: note = Seed: YIFFASFYYV
YYFFASFYYD

SEQ ID NO: 84136 - protein, 10 aa, synthetic construct
  source 1..10: note = Seed: YIFFASFYYV
YYFFASFYYE

SEQ ID NO: 84137 - protein, 10 aa, synthetic construct
  source 1..10: note = Seed: YIFFASFYYV
YYFFASFYYF

SEQ ID NO: 84138 - protein, 10 aa, synthetic construct
  source 1..10: note = Seed: YIFFASFYYV
YYFFASFYYG

SEQ ID NO: 84139 - protein, 10 aa, synthetic construct
  source 1..10: note = Seed: YIFFASFYYV
YYFFASFYYH

SEQ ID NO: 84140 - protein, 10 aa, synthetic construct
  source 1..10: note = Seed: YIFFASFYYV
YYFFASFYYI

SEQ ID NO: 84141 - protein, 10 aa, synthetic construct
  source 1..10: note = Seed: YIFFASFYYV
YYFFASFYYK

SEQ ID NO: 84142 - protein, 10 aa, synthetic construct
  source 1..10: note = Seed: YIFFASFYYV
YYFFASFYYL

SEQ ID NO: 84143 - protein, 10 aa, synthetic construct
  source 1..10: note = Seed: YIFFASFYYV
YYFFASFYYM

SEQ ID NO: 84144 - protein, 10 aa, synthetic construct
  source 1..10: note = Seed: YIFFASFYYV
YYFFASFYYN

SEQ ID NO: 84145 - protein, 10 aa, synthetic construct
  source 1..10: note = Seed: YIFFASFYYV
YYFFASFYYP

SEQ ID NO: 84146 - protein, 10 aa, synthetic construct
  source 1..10: note = Seed: YIFFASFYYV
YYFFASFYYQ

SEQ ID NO: 84147 - protein, 10 aa, synthetic construct
  source 1..10: note = Seed: YIFFASFYYV
YYFFASFYYR

SEQ ID NO: 84148 - protein, 10 aa, synthetic construct
  source 1..10: note = Seed: YIFFASFYYV
YYFFASFYYS

SEQ ID NO: 84149 - protein, 10 aa, synthetic construct
  source 1..10: note = Seed: YIFFASFYYV
YYFFASFYYT

SEQ ID NO: 84150 - protein, 10 aa, synthetic construct
  source 1..10: note = Seed: YIFFASFYYV
YYFFASFYYV

SEQ ID NO: 84151 - protein, 11 aa, synthetic construct
  source 1..11: note = Seed: YIFFASFYYVW
YYFFASFYYVF

SEQ ID NO: 84152 - protein, 11 aa, synthetic construct
  source 1..11: note = Seed: YIFFASFYYVW
YYFFASFYYVI

SEQ ID NO: 84153 - protein, 11 aa, synthetic construct
  source 1..11: note = Seed: YIFFASFYYVW
YYFFASFYYVL

SEQ ID NO: 84154 - protein, 11 aa, synthetic construct
  source 1..11: note = Seed: YIFFASFYYVW
YYFFASFYYVM

SEQ ID NO: 84155 - protein, 11 aa, synthetic construct
  source 1..11: note = Seed: YIFFASFYYVW
YYFFASFYYVW

SEQ ID NO: 84156 - protein, 11 aa, synthetic construct
  source 1..11: note = Seed: YIFFASFYYVW
YYFFASFYYVY

SEQ ID NO: 84157 - protein, 10 aa, synthetic construct
  source 1..10: note = Seed: YIFFASFYYV
YYFFASFYYW

SEQ ID NO: 84158 - protein, 10 aa, synthetic construct
  source 1..10: note = Seed: YIFFASFYYV
YYFFASFYYY

SEQ ID NO: 84159 - protein, 8 aa, synthetic construct
  source 1..8: note = Seed: YWFFSNYL
YYFFSNYF

SEQ ID NO: 84160 - protein, 8 aa, synthetic construct
  source 1..8: note = Seed: YWFFSNYL
YYFFSNYI

SEQ ID NO: 84161 - protein, 8 aa, synthetic construct
  source 1..8: note = Seed: YWFFSNYL
YYFFSNYL

SEQ ID NO: 84162 - protein, 9 aa, synthetic construct
  source 1..9: note = Seed: YWFFSNYLK
YYFFSNYLF

SEQ ID NO: 84163 - protein, 9 aa, synthetic construct
  source 1..9: note = Seed: YWFFSNYLK
YYFFSNYLH

SEQ ID NO: 84164 - protein, 9 aa, synthetic construct
  source 1..9: note = Seed: YWFFSNYLK
YYFFSNYLI

SEQ ID NO: 84165 - protein, 9 aa, synthetic construct
  source 1..9: note = Seed: YWFFSNYLK
YYFFSNYLK

SEQ ID NO: 84166 - protein, 10 aa, synthetic construct
  source 1..10: note = Seed: YWFFSNYLKR
YYFFSNYLKK

SEQ ID NO: 84167 - protein, 10 aa, synthetic construct
  source 1..10: note = Seed: YWFFSNYLKR
YYFFSNYLKR

SEQ ID NO: 84168 - protein, 11 aa, synthetic construct
  source 1..11: note = Seed: YWFFSNYLKRR
YYFFSNYLKRK

SEQ ID NO: 84169 - protein, 11 aa, synthetic construct
  source 1..11: note = Seed: YWFFSNYLKRR
YYFFSNYLKRR

SEQ ID NO: 84170 - protein, 9 aa, synthetic construct
  source 1..9: note = Seed: YWFFSNYLK
YYFFSNYLL

SEQ ID NO: 84171 - protein, 9 aa, synthetic construct
  source 1..9: note = Seed: YWFFSNYLK
YYFFSNYLM

SEQ ID NO: 84172 - protein, 9 aa, synthetic construct
  source 1..9: note = Seed: YWFFSNYLK
YYFFSNYLR

SEQ ID NO: 84173 - protein, 9 aa, synthetic construct
  source 1..9: note = Seed: YWFFSNYLK
YYFFSNYLY

SEQ ID NO: 84174 - protein, 8 aa, synthetic construct
  source 1..8: note = Seed: YWFFSNYL
YYFFSNYM

SEQ ID NO: 84175 - protein, 8 aa, synthetic construct
  source 1..8: note = Seed: YWFFSNYL
YYFFSNYW

SEQ ID NO: 84176 - protein, 8 aa, synthetic construct
  source 1..8: note = Seed: YWFFSNYL
YYFFSNYY

SEQ ID NO: 84177 - protein, 10 aa, synthetic construct
  source 1..10: note = Seed: YSFLPGVYSV
YYFLPGVYSF

SEQ ID NO: 84178 - protein, 10 aa, synthetic construct
  source 1..10: note = Seed: YSFLPGVYSV
YYFLPGVYSI

SEQ ID NO: 84179 - protein, 10 aa, synthetic construct
  source 1..10: note = Seed: YSFLPGVYSV
YYFLPGVYSL

SEQ ID NO: 84180 - protein, 10 aa, synthetic construct
  source 1..10: note = Seed: YSFLPGVYSV
YYFLPGVYSM

SEQ ID NO: 84181 - protein, 10 aa, synthetic construct
  source 1..10: note = Seed: YSFLPGVYSV
YYFLPGVYSV

SEQ ID NO: 84182 - protein, 10 aa, synthetic construct
  source 1..10: note = Seed: YSFLPGVYSV
YYFLPGVYSW

SEQ ID NO: 84183 - protein, 10 aa, synthetic construct
  source 1..10: note = Seed: YSFLPGVYSV
YYFLPGVYSY

SEQ ID NO: 84184 - protein, 10 aa, synthetic construct
  source 1..10: note = Seed: YVFTGYRVTK
YYFTGYRVTR

SEQ ID NO: 84185 - protein, 9 aa, synthetic construct
  source 1..9: note = Seed: YFFTLLLQL
YYFTLLLQF

SEQ ID NO: 84186 - protein, 9 aa, synthetic construct
  source 1..9: note = Seed: YFFTLLLQL
YYFTLLLQI

SEQ ID NO: 84187 - protein, 9 aa, synthetic construct
  source 1..9: note = Seed: YFFTLLLQL
YYFTLLLQL

SEQ ID NO: 84188 - protein, 9 aa, synthetic construct
  source 1..9: note = Seed: YFFTLLLQL
YYFTLLLQM

SEQ ID NO: 84189 - protein, 9 aa, synthetic construct
  source 1..9: note = Seed: YFFTLLLQL
YYFTLLLQV

SEQ ID NO: 84190 - protein, 9 aa, synthetic construct
  source 1..9: note = Seed: YFFTLLLQL
YYFTLLLQW

SEQ ID NO: 84191 - protein, 9 aa, synthetic construct
  source 1..9: note = Seed: YFFTLLLQL
YYFTLLLQY

SEQ ID NO: 84192 - protein, 10 aa, synthetic construct
  source 1..10: note = Seed: YLGGMSYYCK
YYGGMSYYCR

SEQ ID NO: 84193 - protein, 11 aa, synthetic construct
  source 1..11: note = Seed: YTGNYQCGHYK
YYGNYQCGHYR

SEQ ID NO: 84194 - protein, 11 aa, synthetic construct
  source 1..11: note = Seed: YVGYLQPRTFL
YYGYLQPRTFF

SEQ ID NO: 84195 - protein, 11 aa, synthetic construct
  source 1..11: note = Seed: YVGYLQPRTFL
YYGYLQPRTFI

SEQ ID NO: 84196 - protein, 11 aa, synthetic construct
  source 1..11: note = Seed: YVGYLQPRTFL
YYGYLQPRTFL

SEQ ID NO: 84197 - protein, 11 aa, synthetic construct
  source 1..11: note = Seed: YVGYLQPRTFL
YYGYLQPRTFW

SEQ ID NO: 84198 - protein, 9 aa, synthetic construct
  source 1..9: note = Seed: YMHHMELPT
YYHHMELPF

SEQ ID NO: 84199 - protein, 8 aa, synthetic construct
  source 1..8: note = Seed: YFIASFRL
YYIASFRF

SEQ ID NO: 84200 - protein, 8 aa, synthetic construct
  source 1..8: note = Seed: YFIASFRL
YYIASFRI

SEQ ID NO: 84201 - protein, 8 aa, synthetic construct
  source 1..8: note = Seed: YFIASFRL
YYIASFRL

SEQ ID NO: 84202 - protein, 9 aa, synthetic construct
  source 1..9: note = Seed: YFIASFRLF
YYIASFRLA

SEQ ID NO: 84203 - protein, 9 aa, synthetic construct
  source 1..9: note = Seed: YFIASFRLF
YYIASFRLF

SEQ ID NO: 84204 - protein, 10 aa, synthetic construct
  source 1..10: note = Seed: YFIASFRLFA
YYIASFRLFA

SEQ ID NO: 84205 - protein, 11 aa, synthetic construct
  source 1..11: note = Seed: YFIASFRLFAR
YYIASFRLFAR

SEQ ID NO: 84206 - protein, 10 aa, synthetic construct
  source 1..10: note = Seed: YFIASFRLFA
YYIASFRLFC

SEQ ID NO: 84207 - protein, 10 aa, synthetic construct
  source 1..10: note = Seed: YFIASFRLFA
YYIASFRLFD

SEQ ID NO: 84208 - protein, 10 aa, synthetic construct
  source 1..10: note = Seed: YFIASFRLFA
YYIASFRLFE

SEQ ID NO: 84209 - protein, 10 aa, synthetic construct
  source 1..10: note = Seed: YFIASFRLFA
YYIASFRLFF

SEQ ID NO: 84210 - protein, 10 aa, synthetic construct
  source 1..10: note = Seed: YFIASFRLFA
YYIASFRLFG

SEQ ID NO: 84211 - protein, 10 aa, synthetic construct
  source 1..10: note = Seed: YFIASFRLFA
YYIASFRLFH

SEQ ID NO: 84212 - protein, 10 aa, synthetic construct
  source 1..10: note = Seed: YFIASFRLFA
YYIASFRLFI

SEQ ID NO: 84213 - protein, 10 aa, synthetic construct
  source 1..10: note = Seed: YFIASFRLFA
YYIASFRLFK

SEQ ID NO: 84214 - protein, 10 aa, synthetic construct
  source 1..10: note = Seed: YFIASFRLFA
YYIASFRLFL

SEQ ID NO: 84215 - protein, 10 aa, synthetic construct
  source 1..10: note = Seed: YFIASFRLFA
YYIASFRLFM

SEQ ID NO: 84216 - protein, 10 aa, synthetic construct
  source 1..10: note = Seed: YFIASFRLFA
YYIASFRLFN

SEQ ID NO: 84217 - protein, 10 aa, synthetic construct
  source 1..10: note = Seed: YFIASFRLFA
YYIASFRLFP

SEQ ID NO: 84218 - protein, 10 aa, synthetic construct
  source 1..10: note = Seed: YFIASFRLFA
YYIASFRLFQ

SEQ ID NO: 84219 - protein, 10 aa, synthetic construct
  source 1..10: note = Seed: YFIASFRLFA
YYIASFRLFR

SEQ ID NO: 84220 - protein, 10 aa, synthetic construct
  source 1..10: note = Seed: YFIASFRLFA
YYIASFRLFS

SEQ ID NO: 84221 - protein, 10 aa, synthetic construct
  source 1..10: note = Seed: YFIASFRLFA
YYIASFRLFT

SEQ ID NO: 84222 - protein, 10 aa, synthetic construct
  source 1..10: note = Seed: YFIASFRLFA
YYIASFRLFV

SEQ ID NO: 84223 - protein, 10 aa, synthetic construct
  source 1..10: note = Seed: YFIASFRLFA
YYIASFRLFW

SEQ ID NO: 84224 - protein, 10 aa, synthetic construct
  source 1..10: note = Seed: YFIASFRLFA
YYIASFRLFY

SEQ ID NO: 84225 - protein, 9 aa, synthetic construct
  source 1..9: note = Seed: YFIASFRLF
YYIASFRLH

SEQ ID NO: 84226 - protein, 9 aa, synthetic construct
  source 1..9: note = Seed: YFIASFRLF
YYIASFRLI

SEQ ID NO: 84227 - protein, 9 aa, synthetic construct
  source 1..9: note = Seed: YFIASFRLF
YYIASFRLL

SEQ ID NO: 84228 - protein, 9 aa, synthetic construct
  source 1..9: note = Seed: YFIASFRLF
YYIASFRLM

SEQ ID NO: 84229 - protein, 9 aa, synthetic construct
  source 1..9: note = Seed: YFIASFRLF
YYIASFRLV

SEQ ID NO: 84230 - protein, 9 aa, synthetic construct
  source 1..9: note = Seed: YFIASFRLF
YYIASFRLW

SEQ ID NO: 84231 - protein, 9 aa, synthetic construct
  source 1..9: note = Seed: YFIASFRLF
YYIASFRLY

SEQ ID NO: 84232 - protein, 8 aa, synthetic construct
  source 1..8: note = Seed: YFIASFRL
YYIASFRM

SEQ ID NO: 84233 - protein, 8 aa, synthetic construct
  source 1..8: note = Seed: YFIASFRL
YYIASFRW

SEQ ID NO: 84234 - protein, 8 aa, synthetic construct
  source 1..8: note = Seed: YFIASFRL
YYIASFRY

SEQ ID NO: 84235 - protein, 9 aa, synthetic construct
  source 1..9: note = Seed: YGIATVREV
YYIATVREI

SEQ ID NO: 84236 - protein, 9 aa, synthetic construct
  source 1..9: note = Seed: YGIATVREV
YYIATVREL

SEQ ID NO: 84237 - protein, 9 aa, synthetic construct
  source 1..9: note = Seed: YGIATVREV
YYIATVREM

SEQ ID NO: 84238 - protein, 9 aa, synthetic construct
  source 1..9: note = Seed: YGIATVREV
YYIATVREV

SEQ ID NO: 84239 - protein, 11 aa, synthetic construct
  source 1..11: note = Seed: YIICISTKHFY
YYICISTKHFY

SEQ ID NO: 84240 - protein, 9 aa, synthetic construct
  source 1..9: note = Seed: YFIKGLNNL
YYIKGLNNF

SEQ ID NO: 84241 - protein, 9 aa, synthetic construct
  source 1..9: note = Seed: YFIKGLNNL
YYIKGLNNI

SEQ ID NO: 84242 - protein, 9 aa, synthetic construct
  source 1..9: note = Seed: YFIKGLNNL
YYIKGLNNL

SEQ ID NO: 84243 - protein, 9 aa, synthetic construct
  source 1..9: note = Seed: YFIKGLNNL
YYIKGLNNM

SEQ ID NO: 84244 - protein, 9 aa, synthetic construct
  source 1..9: note = Seed: YFIKGLNNL
YYIKGLNNV

SEQ ID NO: 84245 - protein, 9 aa, synthetic construct
  source 1..9: note = Seed: YFIKGLNNL
YYIKGLNNW

SEQ ID NO: 84246 - protein, 9 aa, synthetic construct
  source 1..9: note = Seed: YFIKGLNNL
YYIKGLNNY

SEQ ID NO: 84247 - protein, 11 aa, synthetic construct
  source 1..11: note = Seed: YFKIYSKHTPI
YYKIYSKHTPF

SEQ ID NO: 84248 - protein, 11 aa, synthetic construct
  source 1..11: note = Seed: YFKIYSKHTPI
YYKIYSKHTPL

SEQ ID NO: 84249 - protein, 11 aa, synthetic construct
  source 1..11: note = Seed: YFKIYSKHTPI
YYKIYSKHTPM

SEQ ID NO: 84250 - protein, 11 aa, synthetic construct
  source 1..11: note = Seed: YFKIYSKHTPI
YYKIYSKHTPY

SEQ ID NO: 84251 - protein, 8 aa, synthetic construct
  source 1..8: note = Seed: YYKKDNSY
YYKKDNSF

SEQ ID NO: 84252 - protein, 8 aa, synthetic construct
  source 1..8: note = Seed: YYKKDNSY
YYKKDNSL

SEQ ID NO: 84253 - protein, 8 aa, synthetic construct
  source 1..8: note = Seed: YYKKDNSY
YYKKDNSM

SEQ ID NO: 84254 - protein, 10 aa, synthetic construct
  source 1..10: note = Seed: YYKKDNSYFT
YYKKDNSYFF

SEQ ID NO: 84255 - protein, 10 aa, synthetic construct
  source 1..10: note = Seed: YYKKDNSYFT
YYKKDNSYFI

SEQ ID NO: 84256 - protein, 10 aa, synthetic construct
  source 1..10: note = Seed: YYKKDNSYFT
YYKKDNSYFL

SEQ ID NO: 84257 - protein, 10 aa, synthetic construct
  source 1..10: note = Seed: YYKKDNSYFT
YYKKDNSYFM

SEQ ID NO: 84258 - protein, 10 aa, synthetic construct
  source 1..10: note = Seed: YYKKDNSYFT
YYKKDNSYFW

SEQ ID NO: 84259 - protein, 9 aa, synthetic construct
  source 1..9: note = Seed: YYKKDNSYF
YYKKDNSYI

SEQ ID NO: 84260 - protein, 9 aa, synthetic construct
  source 1..9: note = Seed: YYKKDNSYF
YYKKDNSYL

SEQ ID NO: 84261 - protein, 9 aa, synthetic construct
  source 1..9: note = Seed: YYKKDNSYF
YYKKDNSYM

SEQ ID NO: 84262 - protein, 9 aa, synthetic construct
  source 1..9: note = Seed: YYKKDNSYF
YYKKDNSYV

SEQ ID NO: 84263 - protein, 9 aa, synthetic construct
  source 1..9: note = Seed: YYKKDNSYF
YYKKDNSYW

SEQ ID NO: 84264 - protein, 9 aa, synthetic construct
  source 1..9: note = Seed: YYKKDNSYF
YYKKDNSYY

SEQ ID NO: 84265 - protein, 9 aa, synthetic construct
  source 1..9: note = Seed: YYKKVDGVV
YYKKVDGVF

SEQ ID NO: 84266 - protein, 9 aa, synthetic construct
  source 1..9: note = Seed: YYKKVDGVV
YYKKVDGVI

SEQ ID NO: 84267 - protein, 9 aa, synthetic construct
  source 1..9: note = Seed: YYKKVDGVV
YYKKVDGVL

SEQ ID NO: 84268 - protein, 9 aa, synthetic construct
  source 1..9: note = Seed: YYKKVDGVV
YYKKVDGVM

SEQ ID NO: 84269 - protein, 9 aa, synthetic construct
  source 1..9: note = Seed: YYKKVDGVV
YYKKVDGVW

SEQ ID NO: 84270 - protein, 9 aa, synthetic construct
  source 1..9: note = Seed: YYKKVDGVV
YYKKVDGVY

SEQ ID NO: 84271 - protein, 10 aa, synthetic construct
  source 1..10: note = Seed: YYKLGASQRV
YYKLGASQRF

SEQ ID NO: 84272 - protein, 10 aa, synthetic construct
  source 1..10: note = Seed: YYKLGASQRV
YYKLGASQRI

SEQ ID NO: 84273 - protein, 10 aa, synthetic construct
  source 1..10: note = Seed: YYKLGASQRV
YYKLGASQRL

SEQ ID NO: 84274 - protein, 10 aa, synthetic construct
  source 1..10: note = Seed: YYKLGASQRV
YYKLGASQRM

SEQ ID NO: 84275 - protein, 10 aa, synthetic construct
  source 1..10: note = Seed: YYKLGASQRV
YYKLGASQRW

SEQ ID NO: 84276 - protein, 10 aa, synthetic construct
  source 1..10: note = Seed: YYKLGASQRV
YYKLGASQRY

SEQ ID NO: 84277 - protein, 11 aa, synthetic construct
  source 1..11: note = Seed: YDKLQFTSLEI
YYKLQFTSLEV

SEQ ID NO: 84278 - protein, 9 aa, synthetic construct
  source 1..9: note = Seed: YLKSPNFSK
YYKSPNFSK

SEQ ID NO: 84279 - protein, 9 aa, synthetic construct
  source 1..9: note = Seed: YLKSPNFSK
YYKSPNFSR

SEQ ID NO: 84280 - protein, 9 aa, synthetic construct
  source 1..9: note = Seed: YIKWDLLKY
YYKWDLLKY

SEQ ID NO: 84281 - protein, 8 aa, synthetic construct
  source 1..8: note = Seed: YIKWPWYI
YYKWPWYF

SEQ ID NO: 84282 - protein, 8 aa, synthetic construct
  source 1..8: note = Seed: YIKWPWYI
YYKWPWYI

SEQ ID NO: 84283 - protein, 9 aa, synthetic construct
  source 1..9: note = Seed: YIKWPWYIW
YYKWPWYIF

SEQ ID NO: 84284 - protein, 9 aa, synthetic construct
  source 1..9: note = Seed: YIKWPWYIW
YYKWPWYII

SEQ ID NO: 84285 - protein, 9 aa, synthetic construct
  source 1..9: note = Seed: YIKWPWYIW
YYKWPWYIL

SEQ ID NO: 84286 - protein, 9 aa, synthetic construct
  source 1..9: note = Seed: YIKWPWYIW
YYKWPWYIM

SEQ ID NO: 84287 - protein, 9 aa, synthetic construct
  source 1..9: note = Seed: YIKWPWYIW
YYKWPWYIV

SEQ ID NO: 84288 - protein, 9 aa, synthetic construct
  source 1..9: note = Seed: YIKWPWYIW
YYKWPWYIW

SEQ ID NO: 84289 - protein, 9 aa, synthetic construct
  source 1..9: note = Seed: YIKWPWYIW
YYKWPWYIY

SEQ ID NO: 84290 - protein, 8 aa, synthetic construct
  source 1..8: note = Seed: YIKWPWYI
YYKWPWYL

SEQ ID NO: 84291 - protein, 8 aa, synthetic construct
  source 1..8: note = Seed: YIKWPWYI
YYKWPWYM

SEQ ID NO: 84292 - protein, 8 aa, synthetic construct
  source 1..8: note = Seed: YIKWPWYI
YYKWPWYW

SEQ ID NO: 84293 - protein, 10 aa, synthetic construct
  source 1..10: note = Seed: YFLCWHTNCY
YYLCWHTNCF

SEQ ID NO: 84294 - protein, 10 aa, synthetic construct
  source 1..10: note = Seed: YFLCWHTNCY
YYLCWHTNCL

SEQ ID NO: 84295 - protein, 10 aa, synthetic construct
  source 1..10: note = Seed: YFLCWHTNCY
YYLCWHTNCM

SEQ ID NO: 84296 - protein, 10 aa, synthetic construct
  source 1..10: note = Seed: YFLCWHTNCY
YYLCWHTNCY

SEQ ID NO: 84297 - protein, 9 aa, synthetic construct
  source 1..9: note = Seed: YRLFRKSNL
YYLFRKSNF

SEQ ID NO: 84298 - protein, 9 aa, synthetic construct
  source 1..9: note = Seed: YRLFRKSNL
YYLFRKSNI

SEQ ID NO: 84299 - protein, 9 aa, synthetic construct
  source 1..9: note = Seed: YRLFRKSNL
YYLFRKSNL

SEQ ID NO: 84300 - protein, 10 aa, synthetic construct
  source 1..10: note = Seed: YRLFRKSNLK
YYLFRKSNLK

SEQ ID NO: 84301 - protein, 10 aa, synthetic construct
  source 1..10: note = Seed: YRLFRKSNLK
YYLFRKSNLR

SEQ ID NO: 84302 - protein, 9 aa, synthetic construct
  source 1..9: note = Seed: YRLFRKSNL
YYLFRKSNM

SEQ ID NO: 84303 - protein, 9 aa, synthetic construct
  source 1..9: note = Seed: YRLFRKSNL
YYLFRKSNV

SEQ ID NO: 84304 - protein, 9 aa, synthetic construct
  source 1..9: note = Seed: YRLFRKSNL
YYLFRKSNY

SEQ ID NO: 84305 - protein, 9 aa, synthetic construct
  source 1..9: note = Seed: YILFTRFFY
YYLFTRFFF

SEQ ID NO: 84306 - protein, 9 aa, synthetic construct
  source 1..9: note = Seed: YILFTRFFY
YYLFTRFFK

SEQ ID NO: 84307 - protein, 9 aa, synthetic construct
  source 1..9: note = Seed: YILFTRFFY
YYLFTRFFM

SEQ ID NO: 84308 - protein, 9 aa, synthetic construct
  source 1..9: note = Seed: YILFTRFFY
YYLFTRFFR

SEQ ID NO: 84309 - protein, 9 aa, synthetic construct
  source 1..9: note = Seed: YILFTRFFY
YYLFTRFFY

SEQ ID NO: 84310 - protein, 10 aa, synthetic construct
  source 1..10: note = Seed: YILFTRFFYV
YYLFTRFFYA

SEQ ID NO: 84311 - protein, 10 aa, synthetic construct
  source 1..10: note = Seed: YILFTRFFYV
YYLFTRFFYC

SEQ ID NO: 84312 - protein, 10 aa, synthetic construct
  source 1..10: note = Seed: YILFTRFFYV
YYLFTRFFYD

SEQ ID NO: 84313 - protein, 10 aa, synthetic construct
  source 1..10: note = Seed: YILFTRFFYV
YYLFTRFFYE

SEQ ID NO: 84314 - protein, 10 aa, synthetic construct
  source 1..10: note = Seed: YILFTRFFYV
YYLFTRFFYF

SEQ ID NO: 84315 - protein, 10 aa, synthetic construct
  source 1..10: note = Seed: YILFTRFFYV
YYLFTRFFYG

SEQ ID NO: 84316 - protein, 10 aa, synthetic construct
  source 1..10: note = Seed: YILFTRFFYV
YYLFTRFFYH

SEQ ID NO: 84317 - protein, 10 aa, synthetic construct
  source 1..10: note = Seed: YILFTRFFYV
YYLFTRFFYI

SEQ ID NO: 84318 - protein, 10 aa, synthetic construct
  source 1..10: note = Seed: YILFTRFFYV
YYLFTRFFYK

SEQ ID NO: 84319 - protein, 10 aa, synthetic construct
  source 1..10: note = Seed: YILFTRFFYV
YYLFTRFFYL

SEQ ID NO: 84320 - protein, 10 aa, synthetic construct
  source 1..10: note = Seed: YILFTRFFYV
YYLFTRFFYM

SEQ ID NO: 84321 - protein, 10 aa, synthetic construct
  source 1..10: note = Seed: YILFTRFFYV
YYLFTRFFYN

SEQ ID NO: 84322 - protein, 10 aa, synthetic construct
  source 1..10: note = Seed: YILFTRFFYV
YYLFTRFFYP

SEQ ID NO: 84323 - protein, 10 aa, synthetic construct
  source 1..10: note = Seed: YILFTRFFYV
YYLFTRFFYQ

SEQ ID NO: 84324 - protein, 10 aa, synthetic construct
  source 1..10: note = Seed: YILFTRFFYV
YYLFTRFFYR

SEQ ID NO: 84325 - protein, 10 aa, synthetic construct
  source 1..10: note = Seed: YILFTRFFYV
YYLFTRFFYS

SEQ ID NO: 84326 - protein, 10 aa, synthetic construct
  source 1..10: note = Seed: YILFTRFFYV
YYLFTRFFYT

SEQ ID NO: 84327 - protein, 10 aa, synthetic construct
  source 1..10: note = Seed: YILFTRFFYV
YYLFTRFFYV

SEQ ID NO: 84328 - protein, 11 aa, synthetic construct
  source 1..11: note = Seed: YILFTRFFYVL
YYLFTRFFYVA

SEQ ID NO: 84329 - protein, 11 aa, synthetic construct
  source 1..11: note = Seed: YILFTRFFYVL
YYLFTRFFYVC

SEQ ID NO: 84330 - protein, 11 aa, synthetic construct
  source 1..11: note = Seed: YILFTRFFYVL
YYLFTRFFYVD

SEQ ID NO: 84331 - protein, 11 aa, synthetic construct
  source 1..11: note = Seed: YILFTRFFYVL
YYLFTRFFYVE

SEQ ID NO: 84332 - protein, 11 aa, synthetic construct
  source 1..11: note = Seed: YILFTRFFYVL
YYLFTRFFYVF

SEQ ID NO: 84333 - protein, 11 aa, synthetic construct
  source 1..11: note = Seed: YILFTRFFYVL
YYLFTRFFYVG

SEQ ID NO: 84334 - protein, 11 aa, synthetic construct
  source 1..11: note = Seed: YILFTRFFYVL
YYLFTRFFYVH

SEQ ID NO: 84335 - protein, 11 aa, synthetic construct
  source 1..11: note = Seed: YILFTRFFYVL
YYLFTRFFYVI

SEQ ID NO: 84336 - protein, 11 aa, synthetic construct
  source 1..11: note = Seed: YILFTRFFYVL
YYLFTRFFYVK

SEQ ID NO: 84337 - protein, 11 aa, synthetic construct
  source 1..11: note = Seed: YILFTRFFYVL
YYLFTRFFYVL

SEQ ID NO: 84338 - protein, 11 aa, synthetic construct
  source 1..11: note = Seed: YILFTRFFYVL
YYLFTRFFYVM

SEQ ID NO: 84339 - protein, 11 aa, synthetic construct
  source 1..11: note = Seed: YILFTRFFYVL
YYLFTRFFYVN

SEQ ID NO: 84340 - protein, 11 aa, synthetic construct
  source 1..11: note = Seed: YILFTRFFYVL
YYLFTRFFYVP

SEQ ID NO: 84341 - protein, 11 aa, synthetic construct
  source 1..11: note = Seed: YILFTRFFYVL
YYLFTRFFYVQ

SEQ ID NO: 84342 - protein, 11 aa, synthetic construct
  source 1..11: note = Seed: YILFTRFFYVL
YYLFTRFFYVR

SEQ ID NO: 84343 - protein, 11 aa, synthetic construct
  source 1..11: note = Seed: YILFTRFFYVL
YYLFTRFFYVS

SEQ ID NO: 84344 - protein, 11 aa, synthetic construct
  source 1..11: note = Seed: YILFTRFFYVL
YYLFTRFFYVT

SEQ ID NO: 84345 - protein, 11 aa, synthetic construct
  source 1..11: note = Seed: YILFTRFFYVL
YYLFTRFFYVV

SEQ ID NO: 84346 - protein, 11 aa, synthetic construct
  source 1..11: note = Seed: YILFTRFFYVL
YYLFTRFFYVW

SEQ ID NO: 84347 - protein, 11 aa, synthetic construct
  source 1..11: note = Seed: YILFTRFFYVL
YYLFTRFFYVY

SEQ ID NO: 84348 - protein, 10 aa, synthetic construct
  source 1..10: note = Seed: YILFTRFFYV
YYLFTRFFYW

SEQ ID NO: 84349 - protein, 10 aa, synthetic construct
  source 1..10: note = Seed: YILFTRFFYV
YYLFTRFFYY

SEQ ID NO: 84350 - protein, 10 aa, synthetic construct
  source 1..10: note = Seed: YSLLMPILTL
YYLLMPILTA

SEQ ID NO: 84351 - protein, 10 aa, synthetic construct
  source 1..10: note = Seed: YSLLMPILTL
YYLLMPILTI

SEQ ID NO: 84352 - protein, 10 aa, synthetic construct
  source 1..10: note = Seed: YSLLMPILTL
YYLLMPILTL

SEQ ID NO: 84353 - protein, 10 aa, synthetic construct
  source 1..10: note = Seed: YSLLMPILTL
YYLLMPILTV

SEQ ID NO: 84354 - protein, 10 aa, synthetic construct
  source 1..10: note = Seed: YHLMSFPQSA
YYLMSFPQSA

SEQ ID NO: 84355 - protein, 11 aa, synthetic construct
  source 1..11: note = Seed: YHLMSFPQSAP
YYLMSFPQSAI

SEQ ID NO: 84356 - protein, 11 aa, synthetic construct
  source 1..11: note = Seed: YHLMSFPQSAP
YYLMSFPQSAL

SEQ ID NO: 84357 - protein, 11 aa, synthetic construct
  source 1..11: note = Seed: YHLMSFPQSAP
YYLMSFPQSAV

SEQ ID NO: 84358 - protein, 10 aa, synthetic construct
  source 1..10: note = Seed: YHLMSFPQSA
YYLMSFPQSI

SEQ ID NO: 84359 - protein, 10 aa, synthetic construct
  source 1..10: note = Seed: YHLMSFPQSA
YYLMSFPQSL

SEQ ID NO: 84360 - protein, 10 aa, synthetic construct
  source 1..10: note = Seed: YHLMSFPQSA
YYLMSFPQSM

SEQ ID NO: 84361 - protein, 10 aa, synthetic construct
  source 1..10: note = Seed: YHLMSFPQSA
YYLMSFPQST

SEQ ID NO: 84362 - protein, 10 aa, synthetic construct
  source 1..10: note = Seed: YHLMSFPQSA
YYLMSFPQSV

SEQ ID NO: 84363 - protein, 8 aa, synthetic construct
  source 1..8: note = Seed: YFLQSINF
YYLQSINF

SEQ ID NO: 84364 - protein, 8 aa, synthetic construct
  source 1..8: note = Seed: YFLQSINF
YYLQSINI

SEQ ID NO: 84365 - protein, 8 aa, synthetic construct
  source 1..8: note = Seed: YFLQSINF
YYLQSINL

SEQ ID NO: 84366 - protein, 8 aa, synthetic construct
  source 1..8: note = Seed: YFLQSINF
YYLQSINM

SEQ ID NO: 84367 - protein, 8 aa, synthetic construct
  source 1..8: note = Seed: YFLQSINF
YYLQSINW

SEQ ID NO: 84368 - protein, 8 aa, synthetic construct
  source 1..8: note = Seed: YFLQSINF
YYLQSINY

SEQ ID NO: 84369 - protein, 10 aa, synthetic construct
  source 1..10: note = Seed: YDLSVVNARL
YYLSVVNARA

SEQ ID NO: 84370 - protein, 10 aa, synthetic construct
  source 1..10: note = Seed: YDLSVVNARL
YYLSVVNARI

SEQ ID NO: 84371 - protein, 10 aa, synthetic construct
  source 1..10: note = Seed: YDLSVVNARL
YYLSVVNARL

SEQ ID NO: 84372 - protein, 10 aa, synthetic construct
  source 1..10: note = Seed: YDLSVVNARL
YYLSVVNARM

SEQ ID NO: 84373 - protein, 10 aa, synthetic construct
  source 1..10: note = Seed: YDLSVVNARL
YYLSVVNARV

SEQ ID NO: 84374 - protein, 10 aa, synthetic construct
  source 1..10: note = Seed: YTMADLVYAL
YYMADLVYAA

SEQ ID NO: 84375 - protein, 10 aa, synthetic construct
  source 1..10: note = Seed: YTMADLVYAL
YYMADLVYAC

SEQ ID NO: 84376 - protein, 10 aa, synthetic construct
  source 1..10: note = Seed: YTMADLVYAL
YYMADLVYAF

SEQ ID NO: 84377 - protein, 10 aa, synthetic construct
  source 1..10: note = Seed: YTMADLVYAL
YYMADLVYAG

SEQ ID NO: 84378 - protein, 10 aa, synthetic construct
  source 1..10: note = Seed: YTMADLVYAL
YYMADLVYAI

SEQ ID NO: 84379 - protein, 10 aa, synthetic construct
  source 1..10: note = Seed: YTMADLVYAL
YYMADLVYAL

SEQ ID NO: 84380 - protein, 11 aa, synthetic construct
  source 1..11: note = Seed: YTMADLVYALR
YYMADLVYALA

SEQ ID NO: 84381 - protein, 11 aa, synthetic construct
  source 1..11: note = Seed: YTMADLVYALR
YYMADLVYALC

SEQ ID NO: 84382 - protein, 11 aa, synthetic construct
  source 1..11: note = Seed: YTMADLVYALR
YYMADLVYALD

SEQ ID NO: 84383 - protein, 11 aa, synthetic construct
  source 1..11: note = Seed: YTMADLVYALR
YYMADLVYALE

SEQ ID NO: 84384 - protein, 11 aa, synthetic construct
  source 1..11: note = Seed: YTMADLVYALR
YYMADLVYALF

SEQ ID NO: 84385 - protein, 11 aa, synthetic construct
  source 1..11: note = Seed: YTMADLVYALR
YYMADLVYALG

SEQ ID NO: 84386 - protein, 11 aa, synthetic construct
  source 1..11: note = Seed: YTMADLVYALR
YYMADLVYALH

SEQ ID NO: 84387 - protein, 11 aa, synthetic construct
  source 1..11: note = Seed: YTMADLVYALR
YYMADLVYALI

SEQ ID NO: 84388 - protein, 11 aa, synthetic construct
  source 1..11: note = Seed: YTMADLVYALR
YYMADLVYALK

SEQ ID NO: 84389 - protein, 11 aa, synthetic construct
  source 1..11: note = Seed: YTMADLVYALR
YYMADLVYALL

SEQ ID NO: 84390 - protein, 11 aa, synthetic construct
  source 1..11: note = Seed: YTMADLVYALR
YYMADLVYALM

SEQ ID NO: 84391 - protein, 11 aa, synthetic construct
  source 1..11: note = Seed: YTMADLVYALR
YYMADLVYALN

SEQ ID NO: 84392 - protein, 11 aa, synthetic construct
  source 1..11: note = Seed: YTMADLVYALR
YYMADLVYALP

SEQ ID NO: 84393 - protein, 11 aa, synthetic construct
  source 1..11: note = Seed: YTMADLVYALR
YYMADLVYALQ

SEQ ID NO: 84394 - protein, 11 aa, synthetic construct
  source 1..11: note = Seed: YTMADLVYALR
YYMADLVYALR

SEQ ID NO: 84395 - protein, 11 aa, synthetic construct
  source 1..11: note = Seed: YTMADLVYALR
YYMADLVYALS

SEQ ID NO: 84396 - protein, 11 aa, synthetic construct
  source 1..11: note = Seed: YTMADLVYALR
YYMADLVYALT

SEQ ID NO: 84397 - protein, 11 aa, synthetic construct
  source 1..11: note = Seed: YTMADLVYALR
YYMADLVYALV

SEQ ID NO: 84398 - protein, 11 aa, synthetic construct
  source 1..11: note = Seed: YTMADLVYALR
YYMADLVYALW

SEQ ID NO: 84399 - protein, 11 aa, synthetic construct
  source 1..11: note = Seed: YTMADLVYALR
YYMADLVYALY

SEQ ID NO: 84400 - protein, 10 aa, synthetic construct
  source 1..10: note = Seed: YTMADLVYAL
YYMADLVYAM

SEQ ID NO: 84401 - protein, 10 aa, synthetic construct
  source 1..10: note = Seed: YTMADLVYAL
YYMADLVYAS

SEQ ID NO: 84402 - protein, 10 aa, synthetic construct
  source 1..10: note = Seed: YTMADLVYAL
YYMADLVYAT

SEQ ID NO: 84403 - protein, 10 aa, synthetic construct
  source 1..10: note = Seed: YTMADLVYAL
YYMADLVYAV

SEQ ID NO: 84404 - protein, 10 aa, synthetic construct
  source 1..10: note = Seed: YTMADLVYAL
YYMADLVYAY

SEQ ID NO: 84405 - protein, 9 aa, synthetic construct
  source 1..9: note = Seed: YTMADLVYA
YYMADLVYI

SEQ ID NO: 84406 - protein, 9 aa, synthetic construct
  source 1..9: note = Seed: YTMADLVYA
YYMADLVYV

SEQ ID NO: 84407 - protein, 9 aa, synthetic construct
  source 1..9: note = Seed: YVMHANYIF
YYMHANYIA

SEQ ID NO: 84408 - protein, 9 aa, synthetic construct
  source 1..9: note = Seed: YVMHANYIF
YYMHANYIF

SEQ ID NO: 84409 - protein, 10 aa, synthetic construct
  source 1..10: note = Seed: YVMHANYIFW
YYMHANYIFA

SEQ ID NO: 84410 - protein, 10 aa, synthetic construct
  source 1..10: note = Seed: YVMHANYIFW
YYMHANYIFC

SEQ ID NO: 84411 - protein, 10 aa, synthetic construct
  source 1..10: note = Seed: YVMHANYIFW
YYMHANYIFD

SEQ ID NO: 84412 - protein, 10 aa, synthetic construct
  source 1..10: note = Seed: YVMHANYIFW
YYMHANYIFE

SEQ ID NO: 84413 - protein, 10 aa, synthetic construct
  source 1..10: note = Seed: YVMHANYIFW
YYMHANYIFF

SEQ ID NO: 84414 - protein, 10 aa, synthetic construct
  source 1..10: note = Seed: YVMHANYIFW
YYMHANYIFG

SEQ ID NO: 84415 - protein, 10 aa, synthetic construct
  source 1..10: note = Seed: YVMHANYIFW
YYMHANYIFH

SEQ ID NO: 84416 - protein, 10 aa, synthetic construct
  source 1..10: note = Seed: YVMHANYIFW
YYMHANYIFI

SEQ ID NO: 84417 - protein, 10 aa, synthetic construct
  source 1..10: note = Seed: YVMHANYIFW
YYMHANYIFK

SEQ ID NO: 84418 - protein, 10 aa, synthetic construct
  source 1..10: note = Seed: YVMHANYIFW
YYMHANYIFL

SEQ ID NO: 84419 - protein, 10 aa, synthetic construct
  source 1..10: note = Seed: YVMHANYIFW
YYMHANYIFM

SEQ ID NO: 84420 - protein, 10 aa, synthetic construct
  source 1..10: note = Seed: YVMHANYIFW
YYMHANYIFN

SEQ ID NO: 84421 - protein, 10 aa, synthetic construct
  source 1..10: note = Seed: YVMHANYIFW
YYMHANYIFP

SEQ ID NO: 84422 - protein, 10 aa, synthetic construct
  source 1..10: note = Seed: YVMHANYIFW
YYMHANYIFQ

SEQ ID NO: 84423 - protein, 10 aa, synthetic construct
  source 1..10: note = Seed: YVMHANYIFW
YYMHANYIFR

SEQ ID NO: 84424 - protein, 10 aa, synthetic construct
  source 1..10: note = Seed: YVMHANYIFW
YYMHANYIFS

SEQ ID NO: 84425 - protein, 10 aa, synthetic construct
  source 1..10: note = Seed: YVMHANYIFW
YYMHANYIFT

SEQ ID NO: 84426 - protein, 10 aa, synthetic construct
  source 1..10: note = Seed: YVMHANYIFW
YYMHANYIFV

SEQ ID NO: 84427 - protein, 10 aa, synthetic construct
  source 1..10: note = Seed: YVMHANYIFW
YYMHANYIFW

SEQ ID NO: 84428 - protein, 10 aa, synthetic construct
  source 1..10: note = Seed: YVMHANYIFW
YYMHANYIFY

SEQ ID NO: 84429 - protein, 9 aa, synthetic construct
  source 1..9: note = Seed: YVMHANYIF
YYMHANYII

SEQ ID NO: 84430 - protein, 9 aa, synthetic construct
  source 1..9: note = Seed: YVMHANYIF
YYMHANYIL

SEQ ID NO: 84431 - protein, 9 aa, synthetic construct
  source 1..9: note = Seed: YVMHANYIF
YYMHANYIM

SEQ ID NO: 84432 - protein, 9 aa, synthetic construct
  source 1..9: note = Seed: YVMHANYIF
YYMHANYIV

SEQ ID NO: 84433 - protein, 9 aa, synthetic construct
  source 1..9: note = Seed: YVMHANYIF
YYMHANYIW

SEQ ID NO: 84434 - protein, 9 aa, synthetic construct
  source 1..9: note = Seed: YVMHANYIF
YYMHANYIY

SEQ ID NO: 84435 - protein, 9 aa, synthetic construct
  source 1..9: note = Seed: YTNDKACPL
YYNDKACPA

SEQ ID NO: 84436 - protein, 9 aa, synthetic construct
  source 1..9: note = Seed: YTNDKACPL
YYNDKACPF

SEQ ID NO: 84437 - protein, 9 aa, synthetic construct
  source 1..9: note = Seed: YTNDKACPL
YYNDKACPI

SEQ ID NO: 84438 - protein, 9 aa, synthetic construct
  source 1..9: note = Seed: YTNDKACPL
YYNDKACPL

SEQ ID NO: 84439 - protein, 9 aa, synthetic construct
  source 1..9: note = Seed: YTNDKACPL
YYNDKACPM

SEQ ID NO: 84440 - protein, 9 aa, synthetic construct
  source 1..9: note = Seed: YTNDKACPL
YYNDKACPV

SEQ ID NO: 84441 - protein, 9 aa, synthetic construct
  source 1..9: note = Seed: YTNDKACPL
YYNDKACPW

SEQ ID NO: 84442 - protein, 9 aa, synthetic construct
  source 1..9: note = Seed: YTNDKACPL
YYNDKACPY

SEQ ID NO: 84443 - protein, 9 aa, synthetic construct
  source 1..9: note = Seed: YFNMVYMPA
YYNMVYMPA

SEQ ID NO: 84444 - protein, 11 aa, synthetic construct
  source 1..11: note = Seed: YFNMVYMPASW
YYNMVYMPASF

SEQ ID NO: 84445 - protein, 11 aa, synthetic construct
  source 1..11: note = Seed: YFNMVYMPASW
YYNMVYMPASI

SEQ ID NO: 84446 - protein, 11 aa, synthetic construct
  source 1..11: note = Seed: YFNMVYMPASW
YYNMVYMPASL

SEQ ID NO: 84447 - protein, 11 aa, synthetic construct
  source 1..11: note = Seed: YFNMVYMPASW
YYNMVYMPASW

SEQ ID NO: 84448 - protein, 9 aa, synthetic construct
  source 1..9: note = Seed: YFNMVYMPA
YYNMVYMPF

SEQ ID NO: 84449 - protein, 9 aa, synthetic construct
  source 1..9: note = Seed: YFNMVYMPA
YYNMVYMPI

SEQ ID NO: 84450 - protein, 9 aa, synthetic construct
  source 1..9: note = Seed: YFNMVYMPA
YYNMVYMPL

SEQ ID NO: 84451 - protein, 9 aa, synthetic construct
  source 1..9: note = Seed: YFNMVYMPA
YYNMVYMPM

SEQ ID NO: 84452 - protein, 9 aa, synthetic construct
  source 1..9: note = Seed: YFNMVYMPA
YYNMVYMPV

SEQ ID NO: 84453 - protein, 9 aa, synthetic construct
  source 1..9: note = Seed: YFNMVYMPA
YYNMVYMPY

SEQ ID NO: 84454 - protein, 9 aa, synthetic construct
  source 1..9: note = Seed: YQNNVFMSE
YYNNVFMSF

SEQ ID NO: 84455 - protein, 9 aa, synthetic construct
  source 1..9: note = Seed: YQNNVFMSE
YYNNVFMSY

SEQ ID NO: 84456 - protein, 9 aa, synthetic construct
  source 1..9: note = Seed: YVNTFSSTF
YYNTFSSTA

SEQ ID NO: 84457 - protein, 9 aa, synthetic construct
  source 1..9: note = Seed: YVNTFSSTF
YYNTFSSTC

SEQ ID NO: 84458 - protein, 9 aa, synthetic construct
  source 1..9: note = Seed: YVNTFSSTF
YYNTFSSTF

SEQ ID NO: 84459 - protein, 9 aa, synthetic construct
  source 1..9: note = Seed: YVNTFSSTF
YYNTFSSTH

SEQ ID NO: 84460 - protein, 9 aa, synthetic construct
  source 1..9: note = Seed: YVNTFSSTF
YYNTFSSTI

SEQ ID NO: 84461 - protein, 9 aa, synthetic construct
  source 1..9: note = Seed: YVNTFSSTF
YYNTFSSTL

SEQ ID NO: 84462 - protein, 9 aa, synthetic construct
  source 1..9: note = Seed: YVNTFSSTF
YYNTFSSTM

SEQ ID NO: 84463 - protein, 9 aa, synthetic construct
  source 1..9: note = Seed: YVNTFSSTF
YYNTFSSTT

SEQ ID NO: 84464 - protein, 9 aa, synthetic construct
  source 1..9: note = Seed: YVNTFSSTF
YYNTFSSTV

SEQ ID NO: 84465 - protein, 9 aa, synthetic construct
  source 1..9: note = Seed: YVNTFSSTF
YYNTFSSTW

SEQ ID NO: 84466 - protein, 9 aa, synthetic construct
  source 1..9: note = Seed: YVNTFSSTF
YYNTFSSTY

SEQ ID NO: 84467 - protein, 11 aa, synthetic construct
  source 1..11: note = Seed: YNPFMIDVQQW
YYPFMIDVQQF

SEQ ID NO: 84468 - protein, 11 aa, synthetic construct
  source 1..11: note = Seed: YNPFMIDVQQW
YYPFMIDVQQI

SEQ ID NO: 84469 - protein, 11 aa, synthetic construct
  source 1..11: note = Seed: YNPFMIDVQQW
YYPFMIDVQQL

SEQ ID NO: 84470 - protein, 11 aa, synthetic construct
  source 1..11: note = Seed: YNPFMIDVQQW
YYPFMIDVQQM

SEQ ID NO: 84471 - protein, 11 aa, synthetic construct
  source 1..11: note = Seed: YNPFMIDVQQW
YYPFMIDVQQW

SEQ ID NO: 84472 - protein, 10 aa, synthetic construct
  source 1..10: note = Seed: YTPHTVLQAV
YYPHTVLQAA

SEQ ID NO: 84473 - protein, 10 aa, synthetic construct
  source 1..10: note = Seed: YTPHTVLQAV
YYPHTVLQAI

SEQ ID NO: 84474 - protein, 10 aa, synthetic construct
  source 1..10: note = Seed: YTPHTVLQAV
YYPHTVLQAL

SEQ ID NO: 84475 - protein, 10 aa, synthetic construct
  source 1..10: note = Seed: YTPHTVLQAV
YYPHTVLQAM

SEQ ID NO: 84476 - protein, 10 aa, synthetic construct
  source 1..10: note = Seed: YTPHTVLQAV
YYPHTVLQAV

SEQ ID NO: 84477 - protein, 8 aa, synthetic construct
  source 1..8: note = Seed: YMPYFFTL
YYPYFFTF

SEQ ID NO: 84478 - protein, 8 aa, synthetic construct
  source 1..8: note = Seed: YMPYFFTL
YYPYFFTI

SEQ ID NO: 84479 - protein, 8 aa, synthetic construct
  source 1..8: note = Seed: YMPYFFTL
YYPYFFTL

SEQ ID NO: 84480 - protein, 9 aa, synthetic construct
  source 1..9: note = Seed: YMPYFFTLL
YYPYFFTLF

SEQ ID NO: 84481 - protein, 9 aa, synthetic construct
  source 1..9: note = Seed: YMPYFFTLL
YYPYFFTLI

SEQ ID NO: 84482 - protein, 9 aa, synthetic construct
  source 1..9: note = Seed: YMPYFFTLL
YYPYFFTLL

SEQ ID NO: 84483 - protein, 10 aa, synthetic construct
  source 1..10: note = Seed: YMPYFFTLLL
YYPYFFTLLA

SEQ ID NO: 84484 - protein, 10 aa, synthetic construct
  source 1..10: note = Seed: YMPYFFTLLL
YYPYFFTLLF

SEQ ID NO: 84485 - protein, 10 aa, synthetic construct
  source 1..10: note = Seed: YMPYFFTLLL
YYPYFFTLLI

SEQ ID NO: 84486 - protein, 10 aa, synthetic construct
  source 1..10: note = Seed: YMPYFFTLLL
YYPYFFTLLL

SEQ ID NO: 84487 - protein, 10 aa, synthetic construct
  source 1..10: note = Seed: YMPYFFTLLL
YYPYFFTLLM

SEQ ID NO: 84488 - protein, 10 aa, synthetic construct
  source 1..10: note = Seed: YMPYFFTLLL
YYPYFFTLLT

SEQ ID NO: 84489 - protein, 10 aa, synthetic construct
  source 1..10: note = Seed: YMPYFFTLLL
YYPYFFTLLV

SEQ ID NO: 84490 - protein, 10 aa, synthetic construct
  source 1..10: note = Seed: YMPYFFTLLL
YYPYFFTLLW

SEQ ID NO: 84491 - protein, 10 aa, synthetic construct
  source 1..10: note = Seed: YMPYFFTLLL
YYPYFFTLLY

SEQ ID NO: 84492 - protein, 9 aa, synthetic construct
  source 1..9: note = Seed: YMPYFFTLL
YYPYFFTLM

SEQ ID NO: 84493 - protein, 9 aa, synthetic construct
  source 1..9: note = Seed: YMPYFFTLL
YYPYFFTLV

SEQ ID NO: 84494 - protein, 9 aa, synthetic construct
  source 1..9: note = Seed: YMPYFFTLL
YYPYFFTLW

SEQ ID NO: 84495 - protein, 9 aa, synthetic construct
  source 1..9: note = Seed: YMPYFFTLL
YYPYFFTLY

SEQ ID NO: 84496 - protein, 8 aa, synthetic construct
  source 1..8: note = Seed: YMPYFFTL
YYPYFFTM

SEQ ID NO: 84497 - protein, 8 aa, synthetic construct
  source 1..8: note = Seed: YMPYFFTL
YYPYFFTV

SEQ ID NO: 84498 - protein, 8 aa, synthetic construct
  source 1..8: note = Seed: YMPYFFTL
YYPYFFTW

SEQ ID NO: 84499 - protein, 8 aa, synthetic construct
  source 1..8: note = Seed: YMPYFFTL
YYPYFFTY

SEQ ID NO: 84500 - protein, 9 aa, synthetic construct
  source 1..9: note = Seed: YQPYRVVVL
YYPYRVVVA

SEQ ID NO: 84501 - protein, 9 aa, synthetic construct
  source 1..9: note = Seed: YQPYRVVVL
YYPYRVVVF

SEQ ID NO: 84502 - protein, 9 aa, synthetic construct
  source 1..9: note = Seed: YQPYRVVVL
YYPYRVVVH

SEQ ID NO: 84503 - protein, 9 aa, synthetic construct
  source 1..9: note = Seed: YQPYRVVVL
YYPYRVVVI

SEQ ID NO: 84504 - protein, 9 aa, synthetic construct
  source 1..9: note = Seed: YQPYRVVVL
YYPYRVVVL

SEQ ID NO: 84505 - protein, 10 aa, synthetic construct
  source 1..10: note = Seed: YQPYRVVVLS
YYPYRVVVLA

SEQ ID NO: 84506 - protein, 11 aa, synthetic construct
  source 1..11: note = Seed: YQPYRVVVLSF
YYPYRVVVLSF

SEQ ID NO: 84507 - protein, 11 aa, synthetic construct
  source 1..11: note = Seed: YQPYRVVVLSF
YYPYRVVVLSI

SEQ ID NO: 84508 - protein, 11 aa, synthetic construct
  source 1..11: note = Seed: YQPYRVVVLSF
YYPYRVVVLSL

SEQ ID NO: 84509 - protein, 11 aa, synthetic construct
  source 1..11: note = Seed: YQPYRVVVLSF
YYPYRVVVLSW

SEQ ID NO: 84510 - protein, 9 aa, synthetic construct
  source 1..9: note = Seed: YQPYRVVVL
YYPYRVVVM

SEQ ID NO: 84511 - protein, 9 aa, synthetic construct
  source 1..9: note = Seed: YQPYRVVVL
YYPYRVVVV

SEQ ID NO: 84512 - protein, 9 aa, synthetic construct
  source 1..9: note = Seed: YQPYRVVVL
YYPYRVVVW

SEQ ID NO: 84513 - protein, 9 aa, synthetic construct
  source 1..9: note = Seed: YQPYRVVVL
YYPYRVVVY

SEQ ID NO: 84514 - protein, 10 aa, synthetic construct
  source 1..10: note = Seed: YKQFDTYNLW
YYQFDTYNLF

SEQ ID NO: 84515 - protein, 10 aa, synthetic construct
  source 1..10: note = Seed: YKQFDTYNLW
YYQFDTYNLI

SEQ ID NO: 84516 - protein, 10 aa, synthetic construct
  source 1..10: note = Seed: YKQFDTYNLW
YYQFDTYNLL

SEQ ID NO: 84517 - protein, 10 aa, synthetic construct
  source 1..10: note = Seed: YKQFDTYNLW
YYQFDTYNLM

SEQ ID NO: 84518 - protein, 10 aa, synthetic construct
  source 1..10: note = Seed: YKQFDTYNLW
YYQFDTYNLV

SEQ ID NO: 84519 - protein, 10 aa, synthetic construct
  source 1..10: note = Seed: YKQFDTYNLW
YYQFDTYNLW

SEQ ID NO: 84520 - protein, 10 aa, synthetic construct
  source 1..10: note = Seed: YKQFDTYNLW
YYQFDTYNLY

SEQ ID NO: 84521 - protein, 9 aa, synthetic construct
  source 1..9: note = Seed: YSQLMCQPI
YYQLMCQPF

SEQ ID NO: 84522 - protein, 9 aa, synthetic construct
  source 1..9: note = Seed: YSQLMCQPI
YYQLMCQPI

SEQ ID NO: 84523 - protein, 10 aa, synthetic construct
  source 1..10: note = Seed: YSQLMCQPIL
YYQLMCQPIF

SEQ ID NO: 84524 - protein, 11 aa, synthetic construct
  source 1..11: note = Seed: YSQLMCQPILL
YYQLMCQPILA

SEQ ID NO: 84525 - protein, 11 aa, synthetic construct
  source 1..11: note = Seed: YSQLMCQPILL
YYQLMCQPILI

SEQ ID NO: 84526 - protein, 11 aa, synthetic construct
  source 1..11: note = Seed: YSQLMCQPILL
YYQLMCQPILL

SEQ ID NO: 84527 - protein, 11 aa, synthetic construct
  source 1..11: note = Seed: YSQLMCQPILL
YYQLMCQPILM

SEQ ID NO: 84528 - protein, 11 aa, synthetic construct
  source 1..11: note = Seed: YSQLMCQPILL
YYQLMCQPILV

SEQ ID NO: 84529 - protein, 10 aa, synthetic construct
  source 1..10: note = Seed: YSQLMCQPIL
YYQLMCQPIY

SEQ ID NO: 84530 - protein, 9 aa, synthetic construct
  source 1..9: note = Seed: YSQLMCQPI
YYQLMCQPL

SEQ ID NO: 84531 - protein, 9 aa, synthetic construct
  source 1..9: note = Seed: YSQLMCQPI
YYQLMCQPM

SEQ ID NO: 84532 - protein, 9 aa, synthetic construct
  source 1..9: note = Seed: YSQLMCQPI
YYQLMCQPV

SEQ ID NO: 84533 - protein, 9 aa, synthetic construct
  source 1..9: note = Seed: YSQLMCQPI
YYQLMCQPY

SEQ ID NO: 84534 - protein, 8 aa, synthetic construct
  source 1..8: note = Seed: YYQNNVFM
YYQNNVFF

SEQ ID NO: 84535 - protein, 8 aa, synthetic construct
  source 1..8: note = Seed: YYQNNVFM
YYQNNVFI

SEQ ID NO: 84536 - protein, 8 aa, synthetic construct
  source 1..8: note = Seed: YYQNNVFM
YYQNNVFL

SEQ ID NO: 84537 - protein, 9 aa, synthetic construct
  source 1..9: note = Seed: YYQNNVFMS
YYQNNVFMF

SEQ ID NO: 84538 - protein, 9 aa, synthetic construct
  source 1..9: note = Seed: YYQNNVFMS
YYQNNVFMI

SEQ ID NO: 84539 - protein, 9 aa, synthetic construct
  source 1..9: note = Seed: YYQNNVFMS
YYQNNVFML

SEQ ID NO: 84540 - protein, 9 aa, synthetic construct
  source 1..9: note = Seed: YYQNNVFMS
YYQNNVFMM

SEQ ID NO: 84541 - protein, 9 aa, synthetic construct
  source 1..9: note = Seed: YYQNNVFMS
YYQNNVFMV

SEQ ID NO: 84542 - protein, 9 aa, synthetic construct
  source 1..9: note = Seed: YYQNNVFMS
YYQNNVFMW

SEQ ID NO: 84543 - protein, 9 aa, synthetic construct
  source 1..9: note = Seed: YYQNNVFMS
YYQNNVFMY

SEQ ID NO: 84544 - protein, 8 aa, synthetic construct
  source 1..8: note = Seed: YYQNNVFM
YYQNNVFW

SEQ ID NO: 84545 - protein, 8 aa, synthetic construct
  source 1..8: note = Seed: YYQNNVFM
YYQNNVFY

SEQ ID NO: 84546 - protein, 9 aa, synthetic construct
  source 1..9: note = Seed: YLQPRTFLL
YYQPRTFLA

SEQ ID NO: 84547 - protein, 9 aa, synthetic construct
  source 1..9: note = Seed: YLQPRTFLL
YYQPRTFLF

SEQ ID NO: 84548 - protein, 9 aa, synthetic construct
  source 1..9: note = Seed: YLQPRTFLL
YYQPRTFLG

SEQ ID NO: 84549 - protein, 9 aa, synthetic construct
  source 1..9: note = Seed: YLQPRTFLL
YYQPRTFLH

SEQ ID NO: 84550 - protein, 9 aa, synthetic construct
  source 1..9: note = Seed: YLQPRTFLL
YYQPRTFLI

SEQ ID NO: 84551 - protein, 9 aa, synthetic construct
  source 1..9: note = Seed: YLQPRTFLL
YYQPRTFLL

SEQ ID NO: 84552 - protein, 10 aa, synthetic construct
  source 1..10: note = Seed: YLQPRTFLLK
YYQPRTFLLK

SEQ ID NO: 84553 - protein, 11 aa, synthetic construct
  source 1..11: note = Seed: YLQPRTFLLKY
YYQPRTFLLKY

SEQ ID NO: 84554 - protein, 10 aa, synthetic construct
  source 1..10: note = Seed: YLQPRTFLLK
YYQPRTFLLR

SEQ ID NO: 84555 - protein, 9 aa, synthetic construct
  source 1..9: note = Seed: YLQPRTFLL
YYQPRTFLM

SEQ ID NO: 84556 - protein, 9 aa, synthetic construct
  source 1..9: note = Seed: YLQPRTFLL
YYQPRTFLV

SEQ ID NO: 84557 - protein, 9 aa, synthetic construct
  source 1..9: note = Seed: YLQPRTFLL
YYQPRTFLW

SEQ ID NO: 84558 - protein, 9 aa, synthetic construct
  source 1..9: note = Seed: YLQPRTFLL
YYQPRTFLY

SEQ ID NO: 84559 - protein, 10 aa, synthetic construct
  source 1..10: note = Seed: YPQVNGLTSI
YYQVNGLTSF

SEQ ID NO: 84560 - protein, 10 aa, synthetic construct
  source 1..10: note = Seed: YPQVNGLTSI
YYQVNGLTSI

SEQ ID NO: 84561 - protein, 10 aa, synthetic construct
  source 1..10: note = Seed: YPQVNGLTSI
YYQVNGLTSL

SEQ ID NO: 84562 - protein, 10 aa, synthetic construct
  source 1..10: note = Seed: YPQVNGLTSI
YYQVNGLTSM

SEQ ID NO: 84563 - protein, 10 aa, synthetic construct
  source 1..10: note = Seed: YPQVNGLTSI
YYQVNGLTSV

SEQ ID NO: 84564 - protein, 10 aa, synthetic construct
  source 1..10: note = Seed: YPQVNGLTSI
YYQVNGLTSY

SEQ ID NO: 84565 - protein, 9 aa, synthetic construct
  source 1..9: note = Seed: YYRARAGEA
YYRARAGEF

SEQ ID NO: 84566 - protein, 9 aa, synthetic construct
  source 1..9: note = Seed: YYRARAGEA
YYRARAGEI

SEQ ID NO: 84567 - protein, 9 aa, synthetic construct
  source 1..9: note = Seed: YYRARAGEA
YYRARAGEL

SEQ ID NO: 84568 - protein, 9 aa, synthetic construct
  source 1..9: note = Seed: YYRARAGEA
YYRARAGEM

SEQ ID NO: 84569 - protein, 9 aa, synthetic construct
  source 1..9: note = Seed: YYRARAGEA
YYRARAGEV

SEQ ID NO: 84570 - protein, 9 aa, synthetic construct
  source 1..9: note = Seed: YYRARAGEA
YYRARAGEY

SEQ ID NO: 84571 - protein, 10 aa, synthetic construct
  source 1..10: note = Seed: YRRLISMMGF
YYRLISMMGF

SEQ ID NO: 84572 - protein, 10 aa, synthetic construct
  source 1..10: note = Seed: YRRLISMMGF
YYRLISMMGI

SEQ ID NO: 84573 - protein, 10 aa, synthetic construct
  source 1..10: note = Seed: YRRLISMMGF
YYRLISMMGL

SEQ ID NO: 84574 - protein, 10 aa, synthetic construct
  source 1..10: note = Seed: YRRLISMMGF
YYRLISMMGM

SEQ ID NO: 84575 - protein, 9 aa, synthetic construct
  source 1..9: note = Seed: YFRLTLGVY
YYRLTLGVF

SEQ ID NO: 84576 - protein, 9 aa, synthetic construct
  source 1..9: note = Seed: YFRLTLGVY
YYRLTLGVI

SEQ ID NO: 84577 - protein, 9 aa, synthetic construct
  source 1..9: note = Seed: YFRLTLGVY
YYRLTLGVL

SEQ ID NO: 84578 - protein, 9 aa, synthetic construct
  source 1..9: note = Seed: YFRLTLGVY
YYRLTLGVM

SEQ ID NO: 84579 - protein, 9 aa, synthetic construct
  source 1..9: note = Seed: YFRLTLGVY
YYRLTLGVV

SEQ ID NO: 84580 - protein, 9 aa, synthetic construct
  source 1..9: note = Seed: YFRLTLGVY
YYRLTLGVY

SEQ ID NO: 84581 - protein, 10 aa, synthetic construct
  source 1..10: note = Seed: YVRNLQHRLY
YYRNLQHRLY

SEQ ID NO: 84582 - protein, 9 aa, synthetic construct
  source 1..9: note = Seed: YYRRATRRI
YYRRATRRF

SEQ ID NO: 84583 - protein, 9 aa, synthetic construct
  source 1..9: note = Seed: YYRRATRRI
YYRRATRRL

SEQ ID NO: 84584 - protein, 9 aa, synthetic construct
  source 1..9: note = Seed: YYRRATRRI
YYRRATRRM

SEQ ID NO: 84585 - protein, 9 aa, synthetic construct
  source 1..9: note = Seed: YYRRATRRI
YYRRATRRW

SEQ ID NO: 84586 - protein, 9 aa, synthetic construct
  source 1..9: note = Seed: YYRRATRRI
YYRRATRRY

SEQ ID NO: 84587 - protein, 8 aa, synthetic construct
  source 1..8: note = Seed: YYRSLPGV
YYRSLPGF

SEQ ID NO: 84588 - protein, 8 aa, synthetic construct
  source 1..8: note = Seed: YYRSLPGV
YYRSLPGL

SEQ ID NO: 84589 - protein, 8 aa, synthetic construct
  source 1..8: note = Seed: YYRSLPGV
YYRSLPGM

SEQ ID NO: 84590 - protein, 10 aa, synthetic construct
  source 1..10: note = Seed: YYRSLPGVFC
YYRSLPGVFF

SEQ ID NO: 84591 - protein, 10 aa, synthetic construct
  source 1..10: note = Seed: YYRSLPGVFC
YYRSLPGVFL

SEQ ID NO: 84592 - protein, 10 aa, synthetic construct
  source 1..10: note = Seed: YYRSLPGVFC
YYRSLPGVFM

SEQ ID NO: 84593 - protein, 10 aa, synthetic construct
  source 1..10: note = Seed: YYRSLPGVFC
YYRSLPGVFY

SEQ ID NO: 84594 - protein, 9 aa, synthetic construct
  source 1..9: note = Seed: YYRSLPGVF
YYRSLPGVI

SEQ ID NO: 84595 - protein, 9 aa, synthetic construct
  source 1..9: note = Seed: YYRSLPGVF
YYRSLPGVL

SEQ ID NO: 84596 - protein, 9 aa, synthetic construct
  source 1..9: note = Seed: YYRSLPGVF
YYRSLPGVM

SEQ ID NO: 84597 - protein, 9 aa, synthetic construct
  source 1..9: note = Seed: YYRSLPGVF
YYRSLPGVV

SEQ ID NO: 84598 - protein, 9 aa, synthetic construct
  source 1..9: note = Seed: YYRSLPGVF
YYRSLPGVW

SEQ ID NO: 84599 - protein, 9 aa, synthetic construct
  source 1..9: note = Seed: YYRSLPGVF
YYRSLPGVY

SEQ ID NO: 84600 - protein, 8 aa, synthetic construct
  source 1..8: note = Seed: YYRYNLPT
YYRYNLPF

SEQ ID NO: 84601 - protein, 8 aa, synthetic construct
  source 1..8: note = Seed: YYRYNLPT
YYRYNLPI

SEQ ID NO: 84602 - protein, 8 aa, synthetic construct
  source 1..8: note = Seed: YYRYNLPT
YYRYNLPL

SEQ ID NO: 84603 - protein, 8 aa, synthetic construct
  source 1..8: note = Seed: YYRYNLPT
YYRYNLPM

SEQ ID NO: 84604 - protein, 9 aa, synthetic construct
  source 1..9: note = Seed: YYRYNLPTM
YYRYNLPTA

SEQ ID NO: 84605 - protein, 9 aa, synthetic construct
  source 1..9: note = Seed: YYRYNLPTM
YYRYNLPTF

SEQ ID NO: 84606 - protein, 9 aa, synthetic construct
  source 1..9: note = Seed: YYRYNLPTM
YYRYNLPTH

SEQ ID NO: 84607 - protein, 9 aa, synthetic construct
  source 1..9: note = Seed: YYRYNLPTM
YYRYNLPTI

SEQ ID NO: 84608 - protein, 9 aa, synthetic construct
  source 1..9: note = Seed: YYRYNLPTM
YYRYNLPTK

SEQ ID NO: 84609 - protein, 9 aa, synthetic construct
  source 1..9: note = Seed: YYRYNLPTM
YYRYNLPTL

SEQ ID NO: 84610 - protein, 10 aa, synthetic construct
  source 1..10: note = Seed: YYRYNLPTMC
YYRYNLPTMF

SEQ ID NO: 84611 - protein, 10 aa, synthetic construct
  source 1..10: note = Seed: YYRYNLPTMC
YYRYNLPTMI

SEQ ID NO: 84612 - protein, 10 aa, synthetic construct
  source 1..10: note = Seed: YYRYNLPTMC
YYRYNLPTML

SEQ ID NO: 84613 - protein, 10 aa, synthetic construct
  source 1..10: note = Seed: YYRYNLPTMC
YYRYNLPTMM

SEQ ID NO: 84614 - protein, 10 aa, synthetic construct
  source 1..10: note = Seed: YYRYNLPTMC
YYRYNLPTMV

SEQ ID NO: 84615 - protein, 10 aa, synthetic construct
  source 1..10: note = Seed: YYRYNLPTMC
YYRYNLPTMY

SEQ ID NO: 84616 - protein, 9 aa, synthetic construct
  source 1..9: note = Seed: YYRYNLPTM
YYRYNLPTV

SEQ ID NO: 84617 - protein, 9 aa, synthetic construct
  source 1..9: note = Seed: YYRYNLPTM
YYRYNLPTW

SEQ ID NO: 84618 - protein, 9 aa, synthetic construct
  source 1..9: note = Seed: YYRYNLPTM
YYRYNLPTY

SEQ ID NO: 84619 - protein, 8 aa, synthetic construct
  source 1..8: note = Seed: YYRYNLPT
YYRYNLPV

SEQ ID NO: 84620 - protein, 8 aa, synthetic construct
  source 1..8: note = Seed: YYRYNLPT
YYRYNLPY

SEQ ID NO: 84621 - protein, 9 aa, synthetic construct
  source 1..9: note = Seed: YSRYRIGNY
YYRYRIGNF

SEQ ID NO: 84622 - protein, 9 aa, synthetic construct
  source 1..9: note = Seed: YSRYRIGNY
YYRYRIGNK

SEQ ID NO: 84623 - protein, 9 aa, synthetic construct
  source 1..9: note = Seed: YSRYRIGNY
YYRYRIGNL

SEQ ID NO: 84624 - protein, 9 aa, synthetic construct
  source 1..9: note = Seed: YSRYRIGNY
YYRYRIGNM

SEQ ID NO: 84625 - protein, 9 aa, synthetic construct
  source 1..9: note = Seed: YSRYRIGNY
YYRYRIGNY

SEQ ID NO: 84626 - protein, 10 aa, synthetic construct
  source 1..10: note = Seed: YSRYRIGNYK
YYRYRIGNYF

SEQ ID NO: 84627 - protein, 10 aa, synthetic construct
  source 1..10: note = Seed: YSRYRIGNYK
YYRYRIGNYK

SEQ ID NO: 84628 - protein, 11 aa, synthetic construct
  source 1..11: note = Seed: YSRYRIGNYKL
YYRYRIGNYKF

SEQ ID NO: 84629 - protein, 10 aa, synthetic construct
  source 1..10: note = Seed: YSRYRIGNYK
YYRYRIGNYL

SEQ ID NO: 84630 - protein, 10 aa, synthetic construct
  source 1..10: note = Seed: YSRYRIGNYK
YYRYRIGNYM

SEQ ID NO: 84631 - protein, 10 aa, synthetic construct
  source 1..10: note = Seed: YSRYRIGNYK
YYRYRIGNYR

SEQ ID NO: 84632 - protein, 9 aa, synthetic construct
  source 1..9: note = Seed: YSSANNCTF
YYSANNCTF

SEQ ID NO: 84633 - protein, 11 aa, synthetic construct
  source 1..11: note = Seed: YSSANNCTFEY
YYSANNCTFEW

SEQ ID NO: 84634 - protein, 11 aa, synthetic construct
  source 1..11: note = Seed: YSSANNCTFEY
YYSANNCTFEY

SEQ ID NO: 84635 - protein, 9 aa, synthetic construct
  source 1..9: note = Seed: YSSANNCTF
YYSANNCTI

SEQ ID NO: 84636 - protein, 9 aa, synthetic construct
  source 1..9: note = Seed: YSSANNCTF
YYSANNCTL

SEQ ID NO: 84637 - protein, 9 aa, synthetic construct
  source 1..9: note = Seed: YSSANNCTF
YYSANNCTM

SEQ ID NO: 84638 - protein, 9 aa, synthetic construct
  source 1..9: note = Seed: YSSANNCTF
YYSANNCTV

SEQ ID NO: 84639 - protein, 9 aa, synthetic construct
  source 1..9: note = Seed: YSSANNCTF
YYSANNCTW

SEQ ID NO: 84640 - protein, 9 aa, synthetic construct
  source 1..9: note = Seed: YSSANNCTF
YYSANNCTY

SEQ ID NO: 84641 - protein, 9 aa, synthetic construct
  source 1..9: note = Seed: YNSASFSTF
YYSASFSTA

SEQ ID NO: 84642 - protein, 9 aa, synthetic construct
  source 1..9: note = Seed: YNSASFSTF
YYSASFSTC

SEQ ID NO: 84643 - protein, 9 aa, synthetic construct
  source 1..9: note = Seed: YNSASFSTF
YYSASFSTF

SEQ ID NO: 84644 - protein, 10 aa, synthetic construct
  source 1..10: note = Seed: YNSASFSTFK
YYSASFSTFK

SEQ ID NO: 84645 - protein, 10 aa, synthetic construct
  source 1..10: note = Seed: YNSASFSTFK
YYSASFSTFR

SEQ ID NO: 84646 - protein, 9 aa, synthetic construct
  source 1..9: note = Seed: YNSASFSTF
YYSASFSTH

SEQ ID NO: 84647 - protein, 9 aa, synthetic construct
  source 1..9: note = Seed: YNSASFSTF
YYSASFSTI

SEQ ID NO: 84648 - protein, 9 aa, synthetic construct
  source 1..9: note = Seed: YNSASFSTF
YYSASFSTL

SEQ ID NO: 84649 - protein, 9 aa, synthetic construct
  source 1..9: note = Seed: YNSASFSTF
YYSASFSTM

SEQ ID NO: 84650 - protein, 9 aa, synthetic construct
  source 1..9: note = Seed: YNSASFSTF
YYSASFSTT

SEQ ID NO: 84651 - protein, 9 aa, synthetic construct
  source 1..9: note = Seed: YNSASFSTF
YYSASFSTV

SEQ ID NO: 84652 - protein, 9 aa, synthetic construct
  source 1..9: note = Seed: YNSASFSTF
YYSASFSTW

SEQ ID NO: 84653 - protein, 9 aa, synthetic construct
  source 1..9: note = Seed: YNSASFSTF
YYSASFSTY

SEQ ID NO: 84654 - protein, 10 aa, synthetic construct
  source 1..10: note = Seed: YASAVVLLIL
YYSAVVLLIW

SEQ ID NO: 84655 - protein, 8 aa, synthetic construct
  source 1..8: note = Seed: YYSLLMPI
YYSLLMPF

SEQ ID NO: 84656 - protein, 9 aa, synthetic construct
  source 1..9: note = Seed: YYSLLMPIL
YYSLLMPIF

SEQ ID NO: 84657 - protein, 9 aa, synthetic construct
  source 1..9: note = Seed: YYSLLMPIL
YYSLLMPII

SEQ ID NO: 84658 - protein, 11 aa, synthetic construct
  source 1..11: note = Seed: YYSLLMPILTL
YYSLLMPILTF

SEQ ID NO: 84659 - protein, 11 aa, synthetic construct
  source 1..11: note = Seed: YYSLLMPILTL
YYSLLMPILTI

SEQ ID NO: 84660 - protein, 11 aa, synthetic construct
  source 1..11: note = Seed: YYSLLMPILTL
YYSLLMPILTV

SEQ ID NO: 84661 - protein, 11 aa, synthetic construct
  source 1..11: note = Seed: YYSLLMPILTL
YYSLLMPILTW

SEQ ID NO: 84662 - protein, 9 aa, synthetic construct
  source 1..9: note = Seed: YYSLLMPIL
YYSLLMPIM

SEQ ID NO: 84663 - protein, 9 aa, synthetic construct
  source 1..9: note = Seed: YYSLLMPIL
YYSLLMPIW

SEQ ID NO: 84664 - protein, 9 aa, synthetic construct
  source 1..9: note = Seed: YYSLLMPIL
YYSLLMPIY

SEQ ID NO: 84665 - protein, 8 aa, synthetic construct
  source 1..8: note = Seed: YYSLLMPI
YYSLLMPL

SEQ ID NO: 84666 - protein, 8 aa, synthetic construct
  source 1..8: note = Seed: YYSLLMPI
YYSLLMPM

SEQ ID NO: 84667 - protein, 8 aa, synthetic construct
  source 1..8: note = Seed: YYSLLMPI
YYSLLMPW

SEQ ID NO: 84668 - protein, 8 aa, synthetic construct
  source 1..8: note = Seed: YYSLLMPI
YYSLLMPY

SEQ ID NO: 84669 - protein, 11 aa, synthetic construct
  source 1..11: note = Seed: YRSLPGVFCGV
YYSLPGVFCGI

SEQ ID NO: 84670 - protein, 11 aa, synthetic construct
  source 1..11: note = Seed: YRSLPGVFCGV
YYSLPGVFCGV

SEQ ID NO: 84671 - protein, 10 aa, synthetic construct
  source 1..10: note = Seed: YESLRPDTRY
YYSLRPDTRF

SEQ ID NO: 84672 - protein, 10 aa, synthetic construct
  source 1..10: note = Seed: YESLRPDTRY
YYSLRPDTRW

SEQ ID NO: 84673 - protein, 10 aa, synthetic construct
  source 1..10: note = Seed: YTSNPTTFHL
YYSNPTTFHF

SEQ ID NO: 84674 - protein, 10 aa, synthetic construct
  source 1..10: note = Seed: YTSNPTTFHL
YYSNPTTFHW

SEQ ID NO: 84675 - protein, 10 aa, synthetic construct
  source 1..10: note = Seed: YTSNPTTFHL
YYSNPTTFHY

SEQ ID NO: 84676 - protein, 10 aa, synthetic construct
  source 1..10: note = Seed: YYSQLMCQPI
YYSQLMCQPF

SEQ ID NO: 84677 - protein, 11 aa, synthetic construct
  source 1..11: note = Seed: YYSQLMCQPIL
YYSQLMCQPIF

SEQ ID NO: 84678 - protein, 11 aa, synthetic construct
  source 1..11: note = Seed: YYSQLMCQPIL
YYSQLMCQPIW

SEQ ID NO: 84679 - protein, 10 aa, synthetic construct
  source 1..10: note = Seed: YYSQLMCQPI
YYSQLMCQPL

SEQ ID NO: 84680 - protein, 10 aa, synthetic construct
  source 1..10: note = Seed: YYSQLMCQPI
YYSQLMCQPM

SEQ ID NO: 84681 - protein, 10 aa, synthetic construct
  source 1..10: note = Seed: YYSQLMCQPI
YYSQLMCQPW

SEQ ID NO: 84682 - protein, 10 aa, synthetic construct
  source 1..10: note = Seed: YYSQLMCQPI
YYSQLMCQPY

SEQ ID NO: 84683 - protein, 9 aa, synthetic construct
  source 1..9: note = Seed: YFTEQPIDL
YYTEQPIDF

SEQ ID NO: 84684 - protein, 9 aa, synthetic construct
  source 1..9: note = Seed: YFTEQPIDL
YYTEQPIDL

SEQ ID NO: 84685 - protein, 9 aa, synthetic construct
  source 1..9: note = Seed: YFTEQPIDL
YYTEQPIDM

SEQ ID NO: 84686 - protein, 9 aa, synthetic construct
  source 1..9: note = Seed: YFTEQPIDL
YYTEQPIDY

SEQ ID NO: 84687 - protein, 10 aa, synthetic construct
  source 1..10: note = Seed: YLTFYLTNDV
YYTFYLTNDV

SEQ ID NO: 84688 - protein, 9 aa, synthetic construct
  source 1..9: note = Seed: YITGGVVQL
YYTGGVVQF

SEQ ID NO: 84689 - protein, 9 aa, synthetic construct
  source 1..9: note = Seed: YITGGVVQL
YYTGGVVQI

SEQ ID NO: 84690 - protein, 9 aa, synthetic construct
  source 1..9: note = Seed: YITGGVVQL
YYTGGVVQL

SEQ ID NO: 84691 - protein, 9 aa, synthetic construct
  source 1..9: note = Seed: YITGGVVQL
YYTGGVVQM

SEQ ID NO: 84692 - protein, 9 aa, synthetic construct
  source 1..9: note = Seed: YITGGVVQL
YYTGGVVQV

SEQ ID NO: 84693 - protein, 9 aa, synthetic construct
  source 1..9: note = Seed: YITGGVVQL
YYTGGVVQY

SEQ ID NO: 84694 - protein, 10 aa, synthetic construct
  source 1..10: note = Seed: YLTNDVSFLA
YYTNDVSFLA

SEQ ID NO: 84695 - protein, 10 aa, synthetic construct
  source 1..10: note = Seed: YLTNDVSFLA
YYTNDVSFLI

SEQ ID NO: 84696 - protein, 10 aa, synthetic construct
  source 1..10: note = Seed: YLTNDVSFLA
YYTNDVSFLL

SEQ ID NO: 84697 - protein, 10 aa, synthetic construct
  source 1..10: note = Seed: YLTNDVSFLA
YYTNDVSFLM

SEQ ID NO: 84698 - protein, 10 aa, synthetic construct
  source 1..10: note = Seed: YLTNDVSFLA
YYTNDVSFLV

SEQ ID NO: 84699 - protein, 8 aa, synthetic construct
  source 1..8: note = Seed: YFTQSRNL
YYTQSRNF

SEQ ID NO: 84700 - protein, 8 aa, synthetic construct
  source 1..8: note = Seed: YFTQSRNL
YYTQSRNL

SEQ ID NO: 84701 - protein, 11 aa, synthetic construct
  source 1..11: note = Seed: YFTQSRNLQEF
YYTQSRNLQEF

SEQ ID NO: 84702 - protein, 11 aa, synthetic construct
  source 1..11: note = Seed: YFTQSRNLQEF
YYTQSRNLQEI

SEQ ID NO: 84703 - protein, 11 aa, synthetic construct
  source 1..11: note = Seed: YFTQSRNLQEF
YYTQSRNLQEL

SEQ ID NO: 84704 - protein, 11 aa, synthetic construct
  source 1..11: note = Seed: YFTQSRNLQEF
YYTQSRNLQEM

SEQ ID NO: 84705 - protein, 11 aa, synthetic construct
  source 1..11: note = Seed: YFTQSRNLQEF
YYTQSRNLQEW

SEQ ID NO: 84706 - protein, 8 aa, synthetic construct
  source 1..8: note = Seed: YFTQSRNL
YYTQSRNM

SEQ ID NO: 84707 - protein, 8 aa, synthetic construct
  source 1..8: note = Seed: YFTQSRNL
YYTQSRNY

SEQ ID NO: 84708 - protein, 9 aa, synthetic construct
  source 1..9: note = Seed: YFTSDYYQL
YYTSDYYQF

SEQ ID NO: 84709 - protein, 9 aa, synthetic construct
  source 1..9: note = Seed: YFTSDYYQL
YYTSDYYQI

SEQ ID NO: 84710 - protein, 9 aa, synthetic construct
  source 1..9: note = Seed: YFTSDYYQL
YYTSDYYQL

SEQ ID NO: 84711 - protein, 10 aa, synthetic construct
  source 1..10: note = Seed: YFTSDYYQLY
YYTSDYYQLF

SEQ ID NO: 84712 - protein, 10 aa, synthetic construct
  source 1..10: note = Seed: YFTSDYYQLY
YYTSDYYQLK

SEQ ID NO: 84713 - protein, 10 aa, synthetic construct
  source 1..10: note = Seed: YFTSDYYQLY
YYTSDYYQLL

SEQ ID NO: 84714 - protein, 10 aa, synthetic construct
  source 1..10: note = Seed: YFTSDYYQLY
YYTSDYYQLM

SEQ ID NO: 84715 - protein, 10 aa, synthetic construct
  source 1..10: note = Seed: YFTSDYYQLY
YYTSDYYQLR

SEQ ID NO: 84716 - protein, 10 aa, synthetic construct
  source 1..10: note = Seed: YFTSDYYQLY
YYTSDYYQLW

SEQ ID NO: 84717 - protein, 10 aa, synthetic construct
  source 1..10: note = Seed: YFTSDYYQLY
YYTSDYYQLY

SEQ ID NO: 84718 - protein, 11 aa, synthetic construct
  source 1..11: note = Seed: YFTSDYYQLYS
YYTSDYYQLYY

SEQ ID NO: 84719 - protein, 9 aa, synthetic construct
  source 1..9: note = Seed: YFTSDYYQL
YYTSDYYQM

SEQ ID NO: 84720 - protein, 9 aa, synthetic construct
  source 1..9: note = Seed: YFTSDYYQL
YYTSDYYQV

SEQ ID NO: 84721 - protein, 9 aa, synthetic construct
  source 1..9: note = Seed: YFTSDYYQL
YYTSDYYQW

SEQ ID NO: 84722 - protein, 9 aa, synthetic construct
  source 1..9: note = Seed: YFTSDYYQL
YYTSDYYQY

SEQ ID NO: 84723 - protein, 9 aa, synthetic construct
  source 1..9: note = Seed: YYTSNPTTF
YYTSNPTTA

SEQ ID NO: 84724 - protein, 10 aa, synthetic construct
  source 1..10: note = Seed: YYTSNPTTFH
YYTSNPTTFF

SEQ ID NO: 84725 - protein, 11 aa, synthetic construct
  source 1..11: note = Seed: YYTSNPTTFHL
YYTSNPTTFHF

SEQ ID NO: 84726 - protein, 11 aa, synthetic construct
  source 1..11: note = Seed: YYTSNPTTFHL
YYTSNPTTFHI

SEQ ID NO: 84727 - protein, 11 aa, synthetic construct
  source 1..11: note = Seed: YYTSNPTTFHL
YYTSNPTTFHM

SEQ ID NO: 84728 - protein, 11 aa, synthetic construct
  source 1..11: note = Seed: YYTSNPTTFHL
YYTSNPTTFHV

SEQ ID NO: 84729 - protein, 11 aa, synthetic construct
  source 1..11: note = Seed: YYTSNPTTFHL
YYTSNPTTFHW

SEQ ID NO: 84730 - protein, 10 aa, synthetic construct
  source 1..10: note = Seed: YYTSNPTTFH
YYTSNPTTFI

SEQ ID NO: 84731 - protein, 10 aa, synthetic construct
  source 1..10: note = Seed: YYTSNPTTFH
YYTSNPTTFL

SEQ ID NO: 84732 - protein, 10 aa, synthetic construct
  source 1..10: note = Seed: YYTSNPTTFH
YYTSNPTTFM

SEQ ID NO: 84733 - protein, 10 aa, synthetic construct
  source 1..10: note = Seed: YYTSNPTTFH
YYTSNPTTFV

SEQ ID NO: 84734 - protein, 10 aa, synthetic construct
  source 1..10: note = Seed: YYTSNPTTFH
YYTSNPTTFW

SEQ ID NO: 84735 - protein, 10 aa, synthetic construct
  source 1..10: note = Seed: YYTSNPTTFH
YYTSNPTTFY

SEQ ID NO: 84736 - protein, 9 aa, synthetic construct
  source 1..9: note = Seed: YYTSNPTTF
YYTSNPTTH

SEQ ID NO: 84737 - protein, 9 aa, synthetic construct
  source 1..9: note = Seed: YYTSNPTTF
YYTSNPTTI

SEQ ID NO: 84738 - protein, 9 aa, synthetic construct
  source 1..9: note = Seed: YYTSNPTTF
YYTSNPTTL

SEQ ID NO: 84739 - protein, 9 aa, synthetic construct
  source 1..9: note = Seed: YYTSNPTTF
YYTSNPTTM

SEQ ID NO: 84740 - protein, 9 aa, synthetic construct
  source 1..9: note = Seed: YYTSNPTTF
YYTSNPTTV

SEQ ID NO: 84741 - protein, 9 aa, synthetic construct
  source 1..9: note = Seed: YYTSNPTTF
YYTSNPTTW

SEQ ID NO: 84742 - protein, 9 aa, synthetic construct
  source 1..9: note = Seed: YYTSNPTTF
YYTSNPTTY

SEQ ID NO: 84743 - protein, 10 aa, synthetic construct
  source 1..10: note = Seed: YTTTIKPVTY
YYTTIKPVTW

SEQ ID NO: 84744 - protein, 10 aa, synthetic construct
  source 1..10: note = Seed: YTTTIKPVTY
YYTTIKPVTY

SEQ ID NO: 84745 - protein, 11 aa, synthetic construct
  source 1..11: note = Seed: YTTTIKPVTYK
YYTTIKPVTYR

SEQ ID NO: 84746 - protein, 9 aa, synthetic construct
  source 1..9: note = Seed: YYVGYLQPR
YYVGYLQPA

SEQ ID NO: 84747 - protein, 9 aa, synthetic construct
  source 1..9: note = Seed: YYVGYLQPR
YYVGYLQPF

SEQ ID NO: 84748 - protein, 9 aa, synthetic construct
  source 1..9: note = Seed: YYVGYLQPR
YYVGYLQPH

SEQ ID NO: 84749 - protein, 9 aa, synthetic construct
  source 1..9: note = Seed: YYVGYLQPR
YYVGYLQPI

SEQ ID NO: 84750 - protein, 9 aa, synthetic construct
  source 1..9: note = Seed: YYVGYLQPR
YYVGYLQPL

SEQ ID NO: 84751 - protein, 9 aa, synthetic construct
  source 1..9: note = Seed: YYVGYLQPR
YYVGYLQPM

SEQ ID NO: 84752 - protein, 11 aa, synthetic construct
  source 1..11: note = Seed: YYVGYLQPRTF
YYVGYLQPRTI

SEQ ID NO: 84753 - protein, 11 aa, synthetic construct
  source 1..11: note = Seed: YYVGYLQPRTF
YYVGYLQPRTL

SEQ ID NO: 84754 - protein, 11 aa, synthetic construct
  source 1..11: note = Seed: YYVGYLQPRTF
YYVGYLQPRTM

SEQ ID NO: 84755 - protein, 11 aa, synthetic construct
  source 1..11: note = Seed: YYVGYLQPRTF
YYVGYLQPRTW

SEQ ID NO: 84756 - protein, 11 aa, synthetic construct
  source 1..11: note = Seed: YYVGYLQPRTF
YYVGYLQPRTY

SEQ ID NO: 84757 - protein, 9 aa, synthetic construct
  source 1..9: note = Seed: YYVGYLQPR
YYVGYLQPV

SEQ ID NO: 84758 - protein, 9 aa, synthetic construct
  source 1..9: note = Seed: YYVGYLQPR
YYVGYLQPW

SEQ ID NO: 84759 - protein, 9 aa, synthetic construct
  source 1..9: note = Seed: YYVGYLQPR
YYVGYLQPY

SEQ ID NO: 84760 - protein, 9 aa, synthetic construct
  source 1..9: note = Seed: YFVLTSHTV
YYVLTSHTA

SEQ ID NO: 84761 - protein, 9 aa, synthetic construct
  source 1..9: note = Seed: YFVLTSHTV
YYVLTSHTF

SEQ ID NO: 84762 - protein, 9 aa, synthetic construct
  source 1..9: note = Seed: YFVLTSHTV
YYVLTSHTH

SEQ ID NO: 84763 - protein, 9 aa, synthetic construct
  source 1..9: note = Seed: YFVLTSHTV
YYVLTSHTI

SEQ ID NO: 84764 - protein, 9 aa, synthetic construct
  source 1..9: note = Seed: YFVLTSHTV
YYVLTSHTL

SEQ ID NO: 84765 - protein, 9 aa, synthetic construct
  source 1..9: note = Seed: YFVLTSHTV
YYVLTSHTM

SEQ ID NO: 84766 - protein, 9 aa, synthetic construct
  source 1..9: note = Seed: YFVLTSHTV
YYVLTSHTV

SEQ ID NO: 84767 - protein, 9 aa, synthetic construct
  source 1..9: note = Seed: YFVLTSHTV
YYVLTSHTW

SEQ ID NO: 84768 - protein, 9 aa, synthetic construct
  source 1..9: note = Seed: YFVLTSHTV
YYVLTSHTY

SEQ ID NO: 84769 - protein, 9 aa, synthetic construct
  source 1..9: note = Seed: YQVNGYPNM
YYVNGYPNF

SEQ ID NO: 84770 - protein, 9 aa, synthetic construct
  source 1..9: note = Seed: YQVNGYPNM
YYVNGYPNI

SEQ ID NO: 84771 - protein, 9 aa, synthetic construct
  source 1..9: note = Seed: YQVNGYPNM
YYVNGYPNL

SEQ ID NO: 84772 - protein, 9 aa, synthetic construct
  source 1..9: note = Seed: YQVNGYPNM
YYVNGYPNM

SEQ ID NO: 84773 - protein, 10 aa, synthetic construct
  source 1..10: note = Seed: YQVNGYPNMF
YYVNGYPNMF

SEQ ID NO: 84774 - protein, 10 aa, synthetic construct
  source 1..10: note = Seed: YQVNGYPNMF
YYVNGYPNMI

SEQ ID NO: 84775 - protein, 10 aa, synthetic construct
  source 1..10: note = Seed: YQVNGYPNMF
YYVNGYPNML

SEQ ID NO: 84776 - protein, 10 aa, synthetic construct
  source 1..10: note = Seed: YQVNGYPNMF
YYVNGYPNMM

SEQ ID NO: 84777 - protein, 10 aa, synthetic construct
  source 1..10: note = Seed: YQVNGYPNMF
YYVNGYPNMW

SEQ ID NO: 84778 - protein, 9 aa, synthetic construct
  source 1..9: note = Seed: YQVNGYPNM
YYVNGYPNV

SEQ ID NO: 84779 - protein, 9 aa, synthetic construct
  source 1..9: note = Seed: YQVNGYPNM
YYVNGYPNY

SEQ ID NO: 84780 - protein, 8 aa, synthetic construct
  source 1..8: note = Seed: YLVSTQEF
YYVSTQEF

SEQ ID NO: 84781 - protein, 9 aa, synthetic construct
  source 1..9: note = Seed: YLVSTQEFR
YYVSTQEFR

SEQ ID NO: 84782 - protein, 10 aa, synthetic construct
  source 1..10: note = Seed: YLVSTQEFRY
YYVSTQEFRY

SEQ ID NO: 84783 - protein, 8 aa, synthetic construct
  source 1..8: note = Seed: YLVSTQEF
YYVSTQEI

SEQ ID NO: 84784 - protein, 8 aa, synthetic construct
  source 1..8: note = Seed: YLVSTQEF
YYVSTQEL

SEQ ID NO: 84785 - protein, 8 aa, synthetic construct
  source 1..8: note = Seed: YLVSTQEF
YYVSTQEM

SEQ ID NO: 84786 - protein, 8 aa, synthetic construct
  source 1..8: note = Seed: YLVSTQEF
YYVSTQEV

SEQ ID NO: 84787 - protein, 8 aa, synthetic construct
  source 1..8: note = Seed: YLVSTQEF
YYVSTQEW

SEQ ID NO: 84788 - protein, 8 aa, synthetic construct
  source 1..8: note = Seed: YLVSTQEF
YYVSTQEY

SEQ ID NO: 84789 - protein, 9 aa, synthetic construct
  source 1..9: note = Seed: YNVTQAFGR
YYVTQAFGR

SEQ ID NO: 84790 - protein, 9 aa, synthetic construct
  source 1..9: note = Seed: YFVVKRHTF
YYVVKRHTF

SEQ ID NO: 84791 - protein, 9 aa, synthetic construct
  source 1..9: note = Seed: YFVVKRHTF
YYVVKRHTI

SEQ ID NO: 84792 - protein, 9 aa, synthetic construct
  source 1..9: note = Seed: YFVVKRHTF
YYVVKRHTL

SEQ ID NO: 84793 - protein, 9 aa, synthetic construct
  source 1..9: note = Seed: YFVVKRHTF
YYVVKRHTM

SEQ ID NO: 84794 - protein, 9 aa, synthetic construct
  source 1..9: note = Seed: YFVVKRHTF
YYVVKRHTV

SEQ ID NO: 84795 - protein, 9 aa, synthetic construct
  source 1..9: note = Seed: YFVVKRHTF
YYVVKRHTW

SEQ ID NO: 84796 - protein, 9 aa, synthetic construct
  source 1..9: note = Seed: YFVVKRHTF
YYVVKRHTY

SEQ ID NO: 84797 - protein, 10 aa, synthetic construct
  source 1..10: note = Seed: YRVVVLSFEL
YYVVVLSFEV

SEQ ID NO: 84798 - protein, 8 aa, synthetic construct
  source 1..8: note = Seed: YYVWKSYV
YYVWKSYF

SEQ ID NO: 84799 - protein, 8 aa, synthetic construct
  source 1..8: note = Seed: YYVWKSYV
YYVWKSYL

SEQ ID NO: 84800 - protein, 8 aa, synthetic construct
  source 1..8: note = Seed: YYVWKSYV
YYVWKSYM

SEQ ID NO: 84801 - protein, 9 aa, synthetic construct
  source 1..9: note = Seed: YYVWKSYVH
YYVWKSYVA

SEQ ID NO: 84802 - protein, 9 aa, synthetic construct
  source 1..9: note = Seed: YYVWKSYVH
YYVWKSYVF

SEQ ID NO: 84803 - protein, 10 aa, synthetic construct
  source 1..10: note = Seed: YYVWKSYVHV
YYVWKSYVHF

SEQ ID NO: 84804 - protein, 10 aa, synthetic construct
  source 1..10: note = Seed: YYVWKSYVHV
YYVWKSYVHI

SEQ ID NO: 84805 - protein, 10 aa, synthetic construct
  source 1..10: note = Seed: YYVWKSYVHV
YYVWKSYVHL

SEQ ID NO: 84806 - protein, 10 aa, synthetic construct
  source 1..10: note = Seed: YYVWKSYVHV
YYVWKSYVHM

SEQ ID NO: 84807 - protein, 11 aa, synthetic construct
  source 1..11: note = Seed: YYVWKSYVHVV
YYVWKSYVHVF

SEQ ID NO: 84808 - protein, 11 aa, synthetic construct
  source 1..11: note = Seed: YYVWKSYVHVV
YYVWKSYVHVI

SEQ ID NO: 84809 - protein, 11 aa, synthetic construct
  source 1..11: note = Seed: YYVWKSYVHVV
YYVWKSYVHVL

SEQ ID NO: 84810 - protein, 11 aa, synthetic construct
  source 1..11: note = Seed: YYVWKSYVHVV
YYVWKSYVHVM

SEQ ID NO: 84811 - protein, 11 aa, synthetic construct
  source 1..11: note = Seed: YYVWKSYVHVV
YYVWKSYVHVW

SEQ ID NO: 84812 - protein, 10 aa, synthetic construct
  source 1..10: note = Seed: YYVWKSYVHV
YYVWKSYVHW

SEQ ID NO: 84813 - protein, 10 aa, synthetic construct
  source 1..10: note = Seed: YYVWKSYVHV
YYVWKSYVHY

SEQ ID NO: 84814 - protein, 9 aa, synthetic construct
  source 1..9: note = Seed: YYVWKSYVH
YYVWKSYVI

SEQ ID NO: 84815 - protein, 9 aa, synthetic construct
  source 1..9: note = Seed: YYVWKSYVH
YYVWKSYVL

SEQ ID NO: 84816 - protein, 9 aa, synthetic construct
  source 1..9: note = Seed: YYVWKSYVH
YYVWKSYVM

SEQ ID NO: 84817 - protein, 9 aa, synthetic construct
  source 1..9: note = Seed: YYVWKSYVH
YYVWKSYVV

SEQ ID NO: 84818 - protein, 9 aa, synthetic construct
  source 1..9: note = Seed: YYVWKSYVH
YYVWKSYVY

SEQ ID NO: 84819 - protein, 8 aa, synthetic construct
  source 1..8: note = Seed: YYVWKSYV
YYVWKSYY

SEQ ID NO: 84820 - protein, 10 aa, synthetic construct
  source 1..10: note = Seed: YVYANGGKGF
YYYANGGKGF

SEQ ID NO: 84821 - protein, 10 aa, synthetic construct
  source 1..10: note = Seed: YVYANGGKGF
YYYANGGKGL

SEQ ID NO: 84822 - protein, 10 aa, synthetic construct
  source 1..10: note = Seed: YVYANGGKGF
YYYANGGKGM

SEQ ID NO: 84823 - protein, 10 aa, synthetic construct
  source 1..10: note = Seed: YVYANGGKGF
YYYANGGKGW

SEQ ID NO: 84824 - protein, 10 aa, synthetic construct
  source 1..10: note = Seed: YVYANGGKGF
YYYANGGKGY

SEQ ID NO: 84825 - protein, 11 aa, synthetic construct
  source 1..11: note = Seed: YLYFIKGLNNL
YYYFIKGLNNF

SEQ ID NO: 84826 - protein, 11 aa, synthetic construct
  source 1..11: note = Seed: YLYFIKGLNNL
YYYFIKGLNNI

SEQ ID NO: 84827 - protein, 11 aa, synthetic construct
  source 1..11: note = Seed: YLYFIKGLNNL
YYYFIKGLNNL

SEQ ID NO: 84828 - protein, 11 aa, synthetic construct
  source 1..11: note = Seed: YLYFIKGLNNL
YYYFIKGLNNM

SEQ ID NO: 84829 - protein, 11 aa, synthetic construct
  source 1..11: note = Seed: YLYFIKGLNNL
YYYFIKGLNNW

SEQ ID NO: 84830 - protein, 10 aa, synthetic construct
  source 1..10: note = Seed: YDYLVSTQEF
YYYLVSTQEF

SEQ ID NO: 84831 - protein, 11 aa, synthetic construct
  source 1..11: note = Seed: YDYLVSTQEFR
YYYLVSTQEFA

SEQ ID NO: 84832 - protein, 11 aa, synthetic construct
  source 1..11: note = Seed: YDYLVSTQEFR
YYYLVSTQEFC

SEQ ID NO: 84833 - protein, 11 aa, synthetic construct
  source 1..11: note = Seed: YDYLVSTQEFR
YYYLVSTQEFD

SEQ ID NO: 84834 - protein, 11 aa, synthetic construct
  source 1..11: note = Seed: YDYLVSTQEFR
YYYLVSTQEFE

SEQ ID NO: 84835 - protein, 11 aa, synthetic construct
  source 1..11: note = Seed: YDYLVSTQEFR
YYYLVSTQEFF

SEQ ID NO: 84836 - protein, 11 aa, synthetic construct
  source 1..11: note = Seed: YDYLVSTQEFR
YYYLVSTQEFG

SEQ ID NO: 84837 - protein, 11 aa, synthetic construct
  source 1..11: note = Seed: YDYLVSTQEFR
YYYLVSTQEFH

SEQ ID NO: 84838 - protein, 11 aa, synthetic construct
  source 1..11: note = Seed: YDYLVSTQEFR
YYYLVSTQEFI

SEQ ID NO: 84839 - protein, 11 aa, synthetic construct
  source 1..11: note = Seed: YDYLVSTQEFR
YYYLVSTQEFK

SEQ ID NO: 84840 - protein, 11 aa, synthetic construct
  source 1..11: note = Seed: YDYLVSTQEFR
YYYLVSTQEFL

SEQ ID NO: 84841 - protein, 11 aa, synthetic construct
  source 1..11: note = Seed: YDYLVSTQEFR
YYYLVSTQEFM

SEQ ID NO: 84842 - protein, 11 aa, synthetic construct
  source 1..11: note = Seed: YDYLVSTQEFR
YYYLVSTQEFN

SEQ ID NO: 84843 - protein, 11 aa, synthetic construct
  source 1..11: note = Seed: YDYLVSTQEFR
YYYLVSTQEFP

SEQ ID NO: 84844 - protein, 11 aa, synthetic construct
  source 1..11: note = Seed: YDYLVSTQEFR
YYYLVSTQEFQ

SEQ ID NO: 84845 - protein, 11 aa, synthetic construct
  source 1..11: note = Seed: YDYLVSTQEFR
YYYLVSTQEFR

SEQ ID NO: 84846 - protein, 11 aa, synthetic construct
  source 1..11: note = Seed: YDYLVSTQEFR
YYYLVSTQEFS

SEQ ID NO: 84847 - protein, 11 aa, synthetic construct
  source 1..11: note = Seed: YDYLVSTQEFR
YYYLVSTQEFT

SEQ ID NO: 84848 - protein, 11 aa, synthetic construct
  source 1..11: note = Seed: YDYLVSTQEFR
YYYLVSTQEFV

SEQ ID NO: 84849 - protein, 11 aa, synthetic construct
  source 1..11: note = Seed: YDYLVSTQEFR
YYYLVSTQEFW

SEQ ID NO: 84850 - protein, 11 aa, synthetic construct
  source 1..11: note = Seed: YDYLVSTQEFR
YYYLVSTQEFY

SEQ ID NO: 84851 - protein, 10 aa, synthetic construct
  source 1..10: note = Seed: YDYLVSTQEF
YYYLVSTQEI

SEQ ID NO: 84852 - protein, 10 aa, synthetic construct
  source 1..10: note = Seed: YDYLVSTQEF
YYYLVSTQEL

SEQ ID NO: 84853 - protein, 10 aa, synthetic construct
  source 1..10: note = Seed: YDYLVSTQEF
YYYLVSTQEM

SEQ ID NO: 84854 - protein, 10 aa, synthetic construct
  source 1..10: note = Seed: YDYLVSTQEF
YYYLVSTQEV

SEQ ID NO: 84855 - protein, 10 aa, synthetic construct
  source 1..10: note = Seed: YDYLVSTQEF
YYYLVSTQEW

SEQ ID NO: 84856 - protein, 10 aa, synthetic construct
  source 1..10: note = Seed: YDYLVSTQEF
YYYLVSTQEY

SEQ ID NO: 84857 - protein, 9 aa, synthetic construct
  source 1..9: note = Seed: YNYLYRLFR
YYYLYRLFK

SEQ ID NO: 84858 - protein, 9 aa, synthetic construct
  source 1..9: note = Seed: YNYLYRLFR
YYYLYRLFR

SEQ ID NO: 84859 - protein, 10 aa, synthetic construct
  source 1..10: note = Seed: YNYLYRLFRK
YYYLYRLFRK

SEQ ID NO: 84860 - protein, 10 aa, synthetic construct
  source 1..10: note = Seed: YNYLYRLFRK
YYYLYRLFRR

SEQ ID NO: 84861 - protein, 8 aa, synthetic construct
  source 1..8: note = Seed: YRYNLPTM
YYYNLPTF

SEQ ID NO: 84862 - protein, 8 aa, synthetic construct
  source 1..8: note = Seed: YRYNLPTM
YYYNLPTI

SEQ ID NO: 84863 - protein, 8 aa, synthetic construct
  source 1..8: note = Seed: YRYNLPTM
YYYNLPTL

SEQ ID NO: 84864 - protein, 8 aa, synthetic construct
  source 1..8: note = Seed: YRYNLPTM
YYYNLPTM

SEQ ID NO: 84865 - protein, 9 aa, synthetic construct
  source 1..9: note = Seed: YRYNLPTMC
YYYNLPTMF

SEQ ID NO: 84866 - protein, 9 aa, synthetic construct
  source 1..9: note = Seed: YRYNLPTMC
YYYNLPTMI

SEQ ID NO: 84867 - protein, 9 aa, synthetic construct
  source 1..9: note = Seed: YRYNLPTMC
YYYNLPTML

SEQ ID NO: 84868 - protein, 9 aa, synthetic construct
  source 1..9: note = Seed: YRYNLPTMC
YYYNLPTMM

SEQ ID NO: 84869 - protein, 9 aa, synthetic construct
  source 1..9: note = Seed: YRYNLPTMC
YYYNLPTMV

SEQ ID NO: 84870 - protein, 9 aa, synthetic construct
  source 1..9: note = Seed: YRYNLPTMC
YYYNLPTMY

SEQ ID NO: 84871 - protein, 8 aa, synthetic construct
  source 1..8: note = Seed: YRYNLPTM
YYYNLPTV

SEQ ID NO: 84872 - protein, 8 aa, synthetic construct
  source 1..8: note = Seed: YRYNLPTM
YYYNLPTY

SEQ ID NO: 84873 - protein, 11 aa, synthetic construct
  source 1..11: note = Seed: YDYYRYNLPTM
YYYYRYNLPTF

SEQ ID NO: 84874 - protein, 11 aa, synthetic construct
  source 1..11: note = Seed: YDYYRYNLPTM
YYYYRYNLPTI

SEQ ID NO: 84875 - protein, 11 aa, synthetic construct
  source 1..11: note = Seed: YDYYRYNLPTM
YYYYRYNLPTL

SEQ ID NO: 84876 - protein, 11 aa, synthetic construct
  source 1..11: note = Seed: YDYYRYNLPTM
YYYYRYNLPTM

SEQ ID NO: 84877 - protein, 11 aa, synthetic construct
  source 1..11: note = Seed: YDYYRYNLPTM
YYYYRYNLPTW

SEQ ID NO: 84878 - protein, 11 aa, synthetic construct
  source 1..11: note = Seed: YDYYRYNLPTM
YYYYRYNLPTY

SEQ ID NO: 84879 - protein, 13 aa, Severe acute respiratory syndrome coronavirus 2
ETGTLIVNSVLLF

SEQ ID NO: 84880 - protein, 13 aa, Severe acute respiratory syndrome coronavirus 2
TGTLIVNSVLLFL

SEQ ID NO: 84881 - protein, 13 aa, Severe acute respiratory syndrome coronavirus 2
GTLIVNSVLLFLA

SEQ ID NO: 84882 - protein, 13 aa, Severe acute respiratory syndrome coronavirus 2
TLIVNSVLLFLAF

SEQ ID NO: 84883 - protein, 13 aa, Severe acute respiratory syndrome coronavirus 2
SVLLFLAFVVFLL

SEQ ID NO: 84884 - protein, 13 aa, Severe acute respiratory syndrome coronavirus 2
VLLFLAFVVFLLV

SEQ ID NO: 84885 - protein, 13 aa, Severe acute respiratory syndrome coronavirus 2
LLFLAFVVFLLVT

SEQ ID NO: 84886 - protein, 13 aa, Severe acute respiratory syndrome coronavirus 2
LFLAFVVFLLVTL

SEQ ID NO: 84887 - protein, 13 aa, Severe acute respiratory syndrome coronavirus 2
FLAFVVFLLVTLA

SEQ ID NO: 84888 - protein, 13 aa, Severe acute respiratory syndrome coronavirus 2
LAFVVFLLVTLAI

SEQ ID NO: 84889 - protein, 13 aa, Severe acute respiratory syndrome coronavirus 2
AFVVFLLVTLAIL

SEQ ID NO: 84890 - protein, 13 aa, Severe acute respiratory syndrome coronavirus 2
FVVFLLVTLAILT

SEQ ID NO: 84891 - protein, 13 aa, Severe acute respiratory syndrome coronavirus 2
VVFLLVTLAILTA

SEQ ID NO: 84892 - protein, 13 aa, Severe acute respiratory syndrome coronavirus 2
VFLLVTLAILTAL

SEQ ID NO: 84893 - protein, 13 aa, Severe acute respiratory syndrome coronavirus 2
FLLVTLAILTALR

SEQ ID NO: 84894 - protein, 13 aa, Severe acute respiratory syndrome coronavirus 2
LAILTALRLCAYC

SEQ ID NO: 84895 - protein, 13 aa, Severe acute respiratory syndrome coronavirus 2
AILTALRLCAYCC

SEQ ID NO: 84896 - protein, 13 aa, Severe acute respiratory syndrome coronavirus 2
ILTALRLCAYCCN

SEQ ID NO: 84897 - protein, 14 aa, Severe acute respiratory syndrome coronavirus 2
ETGTLIVNSVLLFL

SEQ ID NO: 84898 - protein, 14 aa, Severe acute respiratory syndrome coronavirus 2
TGTLIVNSVLLFLA

SEQ ID NO: 84899 - protein, 14 aa, Severe acute respiratory syndrome coronavirus 2
GTLIVNSVLLFLAF

SEQ ID NO: 84900 - protein, 14 aa, Severe acute respiratory syndrome coronavirus 2
TLIVNSVLLFLAFV

SEQ ID NO: 84901 - protein, 14 aa, Severe acute respiratory syndrome coronavirus 2
LIVNSVLLFLAFVV

SEQ ID NO: 84902 - protein, 14 aa, Severe acute respiratory syndrome coronavirus 2
IVNSVLLFLAFVVF

SEQ ID NO: 84903 - protein, 14 aa, Severe acute respiratory syndrome coronavirus 2
VNSVLLFLAFVVFL

SEQ ID NO: 84904 - protein, 14 aa, Severe acute respiratory syndrome coronavirus 2
NSVLLFLAFVVFLL

SEQ ID NO: 84905 - protein, 14 aa, Severe acute respiratory syndrome coronavirus 2
SVLLFLAFVVFLLV

SEQ ID NO: 84906 - protein, 14 aa, Severe acute respiratory syndrome coronavirus 2
VLLFLAFVVFLLVT

SEQ ID NO: 84907 - protein, 14 aa, Severe acute respiratory syndrome coronavirus 2
LLFLAFVVFLLVTL

SEQ ID NO: 84908 - protein, 14 aa, Severe acute respiratory syndrome coronavirus 2
LFLAFVVFLLVTLA

SEQ ID NO: 84909 - protein, 14 aa, Severe acute respiratory syndrome coronavirus 2
FLAFVVFLLVTLAI

SEQ ID NO: 84910 - protein, 14 aa, Severe acute respiratory syndrome coronavirus 2
LAFVVFLLVTLAIL

SEQ ID NO: 84911 - protein, 14 aa, Severe acute respiratory syndrome coronavirus 2
AFVVFLLVTLAILT

SEQ ID NO: 84912 - protein, 14 aa, Severe acute respiratory syndrome coronavirus 2
FVVFLLVTLAILTA

SEQ ID NO: 84913 - protein, 14 aa, Severe acute respiratory syndrome coronavirus 2
VVFLLVTLAILTAL

SEQ ID NO: 84914 - protein, 14 aa, Severe acute respiratory syndrome coronavirus 2
VFLLVTLAILTALR

SEQ ID NO: 84915 - protein, 14 aa, Severe acute respiratory syndrome coronavirus 2
LAILTALRLCAYCC

SEQ ID NO: 84916 - protein, 14 aa, Severe acute respiratory syndrome coronavirus 2
AILTALRLCAYCCN

SEQ ID NO: 84917 - protein, 14 aa, Severe acute respiratory syndrome coronavirus 2
ILTALRLCAYCCNI

SEQ ID NO: 84918 - protein, 14 aa, Severe acute respiratory syndrome coronavirus 2
LTALRLCAYCCNIV

SEQ ID NO: 84919 - protein, 15 aa, Severe acute respiratory syndrome coronavirus 2
ETGTLIVNSVLLFLA

SEQ ID NO: 84920 - protein, 15 aa, Severe acute respiratory syndrome coronavirus 2
TGTLIVNSVLLFLAF

SEQ ID NO: 84921 - protein, 15 aa, Severe acute respiratory syndrome coronavirus 2
GTLIVNSVLLFLAFV

SEQ ID NO: 84922 - protein, 15 aa, Severe acute respiratory syndrome coronavirus 2
TLIVNSVLLFLAFVV

SEQ ID NO: 84923 - protein, 15 aa, Severe acute respiratory syndrome coronavirus 2
LIVNSVLLFLAFVVF

SEQ ID NO: 84924 - protein, 15 aa, Severe acute respiratory syndrome coronavirus 2
IVNSVLLFLAFVVFL

SEQ ID NO: 84925 - protein, 15 aa, Severe acute respiratory syndrome coronavirus 2
VNSVLLFLAFVVFLL

SEQ ID NO: 84926 - protein, 15 aa, Severe acute respiratory syndrome coronavirus 2
NSVLLFLAFVVFLLV

SEQ ID NO: 84927 - protein, 15 aa, Severe acute respiratory syndrome coronavirus 2
SVLLFLAFVVFLLVT

SEQ ID NO: 84928 - protein, 15 aa, Severe acute respiratory syndrome coronavirus 2
VLLFLAFVVFLLVTL

SEQ ID NO: 84929 - protein, 15 aa, Severe acute respiratory syndrome coronavirus 2
LLFLAFVVFLLVTLA

SEQ ID NO: 84930 - protein, 15 aa, Severe acute respiratory syndrome coronavirus 2
LFLAFVVFLLVTLAI

SEQ ID NO: 84931 - protein, 15 aa, Severe acute respiratory syndrome coronavirus 2
FLAFVVFLLVTLAIL

SEQ ID NO: 84932 - protein, 15 aa, Severe acute respiratory syndrome coronavirus 2
LAFVVFLLVTLAILT

SEQ ID NO: 84933 - protein, 15 aa, Severe acute respiratory syndrome coronavirus 2
AFVVFLLVTLAILTA

SEQ ID NO: 84934 - protein, 15 aa, Severe acute respiratory syndrome coronavirus 2
FVVFLLVTLAILTAL

SEQ ID NO: 84935 - protein, 15 aa, Severe acute respiratory syndrome coronavirus 2
VVFLLVTLAILTALR

SEQ ID NO: 84936 - protein, 15 aa, Severe acute respiratory syndrome coronavirus 2
LAILTALRLCAYCCN

SEQ ID NO: 84937 - protein, 15 aa, Severe acute respiratory syndrome coronavirus 2
AILTALRLCAYCCNI

SEQ ID NO: 84938 - protein, 15 aa, Severe acute respiratory syndrome coronavirus 2
ILTALRLCAYCCNIV

SEQ ID NO: 84939 - protein, 16 aa, Severe acute respiratory syndrome coronavirus 2
ETGTLIVNSVLLFLAF

SEQ ID NO: 84940 - protein, 16 aa, Severe acute respiratory syndrome coronavirus 2
TGTLIVNSVLLFLAFV

SEQ ID NO: 84941 - protein, 16 aa, Severe acute respiratory syndrome coronavirus 2
GTLIVNSVLLFLAFVV

SEQ ID NO: 84942 - protein, 16 aa, Severe acute respiratory syndrome coronavirus 2
TLIVNSVLLFLAFVVF

SEQ ID NO: 84943 - protein, 16 aa, Severe acute respiratory syndrome coronavirus 2
LIVNSVLLFLAFVVFL

SEQ ID NO: 84944 - protein, 16 aa, Severe acute respiratory syndrome coronavirus 2
IVNSVLLFLAFVVFLL

SEQ ID NO: 84945 - protein, 16 aa, Severe acute respiratory syndrome coronavirus 2
VNSVLLFLAFVVFLLV

SEQ ID NO: 84946 - protein, 16 aa, Severe acute respiratory syndrome coronavirus 2
NSVLLFLAFVVFLLVT

SEQ ID NO: 84947 - protein, 16 aa, Severe acute respiratory syndrome coronavirus 2
SVLLFLAFVVFLLVTL

SEQ ID NO: 84948 - protein, 16 aa, Severe acute respiratory syndrome coronavirus 2
VLLFLAFVVFLLVTLA

SEQ ID NO: 84949 - protein, 16 aa, Severe acute respiratory syndrome coronavirus 2
LLFLAFVVFLLVTLAI

SEQ ID NO: 84950 - protein, 16 aa, Severe acute respiratory syndrome coronavirus 2
LFLAFVVFLLVTLAIL

SEQ ID NO: 84951 - protein, 16 aa, Severe acute respiratory syndrome coronavirus 2
FLAFVVFLLVTLAILT

SEQ ID NO: 84952 - protein, 16 aa, Severe acute respiratory syndrome coronavirus 2
LAFVVFLLVTLAILTA

SEQ ID NO: 84953 - protein, 16 aa, Severe acute respiratory syndrome coronavirus 2
AFVVFLLVTLAILTAL

SEQ ID NO: 84954 - protein, 16 aa, Severe acute respiratory syndrome coronavirus 2
FVVFLLVTLAILTALR

SEQ ID NO: 84955 - protein, 16 aa, Severe acute respiratory syndrome coronavirus 2
LAILTALRLCAYCCNI

SEQ ID NO: 84956 - protein, 16 aa, Severe acute respiratory syndrome coronavirus 2
AILTALRLCAYCCNIV

SEQ ID NO: 84957 - protein, 17 aa, Severe acute respiratory syndrome coronavirus 2
ETGTLIVNSVLLFLAFV

SEQ ID NO: 84958 - protein, 17 aa, Severe acute respiratory syndrome coronavirus 2
TGTLIVNSVLLFLAFVV

SEQ ID NO: 84959 - protein, 17 aa, Severe acute respiratory syndrome coronavirus 2
GTLIVNSVLLFLAFVVF

SEQ ID NO: 84960 - protein, 17 aa, Severe acute respiratory syndrome coronavirus 2
TLIVNSVLLFLAFVVFL

SEQ ID NO: 84961 - protein, 17 aa, Severe acute respiratory syndrome coronavirus 2
LIVNSVLLFLAFVVFLL

SEQ ID NO: 84962 - protein, 17 aa, Severe acute respiratory syndrome coronavirus 2
IVNSVLLFLAFVVFLLV

SEQ ID NO: 84963 - protein, 17 aa, Severe acute respiratory syndrome coronavirus 2
VNSVLLFLAFVVFLLVT

SEQ ID NO: 84964 - protein, 17 aa, Severe acute respiratory syndrome coronavirus 2
NSVLLFLAFVVFLLVTL

SEQ ID NO: 84965 - protein, 17 aa, Severe acute respiratory syndrome coronavirus 2
SVLLFLAFVVFLLVTLA

SEQ ID NO: 84966 - protein, 17 aa, Severe acute respiratory syndrome coronavirus 2
VLLFLAFVVFLLVTLAI

SEQ ID NO: 84967 - protein, 17 aa, Severe acute respiratory syndrome coronavirus 2
LLFLAFVVFLLVTLAIL

SEQ ID NO: 84968 - protein, 17 aa, Severe acute respiratory syndrome coronavirus 2
LFLAFVVFLLVTLAILT

SEQ ID NO: 84969 - protein, 17 aa, Severe acute respiratory syndrome coronavirus 2
FLAFVVFLLVTLAILTA

SEQ ID NO: 84970 - protein, 17 aa, Severe acute respiratory syndrome coronavirus 2
LAFVVFLLVTLAILTAL

SEQ ID NO: 84971 - protein, 17 aa, Severe acute respiratory syndrome coronavirus 2
AFVVFLLVTLAILTALR

SEQ ID NO: 84972 - protein, 17 aa, Severe acute respiratory syndrome coronavirus 2
LAILTALRLCAYCCNIV

SEQ ID NO: 84973 - protein, 18 aa, Severe acute respiratory syndrome coronavirus 2
ETGTLIVNSVLLFLAFVV

SEQ ID NO: 84974 - protein, 18 aa, Severe acute respiratory syndrome coronavirus 2
TGTLIVNSVLLFLAFVVF

SEQ ID NO: 84975 - protein, 18 aa, Severe acute respiratory syndrome coronavirus 2
GTLIVNSVLLFLAFVVFL

SEQ ID NO: 84976 - protein, 18 aa, Severe acute respiratory syndrome coronavirus 2
TLIVNSVLLFLAFVVFLL

SEQ ID NO: 84977 - protein, 18 aa, Severe acute respiratory syndrome coronavirus 2
LIVNSVLLFLAFVVFLLV

SEQ ID NO: 84978 - protein, 18 aa, Severe acute respiratory syndrome coronavirus 2
IVNSVLLFLAFVVFLLVT

SEQ ID NO: 84979 - protein, 18 aa, Severe acute respiratory syndrome coronavirus 2
VNSVLLFLAFVVFLLVTL

SEQ ID NO: 84980 - protein, 18 aa, Severe acute respiratory syndrome coronavirus 2
NSVLLFLAFVVFLLVTLA

SEQ ID NO: 84981 - protein, 18 aa, Severe acute respiratory syndrome coronavirus 2
SVLLFLAFVVFLLVTLAI

SEQ ID NO: 84982 - protein, 18 aa, Severe acute respiratory syndrome coronavirus 2
VLLFLAFVVFLLVTLAIL

SEQ ID NO: 84983 - protein, 18 aa, Severe acute respiratory syndrome coronavirus 2
LLFLAFVVFLLVTLAILT

SEQ ID NO: 84984 - protein, 18 aa, Severe acute respiratory syndrome coronavirus 2
LFLAFVVFLLVTLAILTA

SEQ ID NO: 84985 - protein, 18 aa, Severe acute respiratory syndrome coronavirus 2
FLAFVVFLLVTLAILTAL

SEQ ID NO: 84986 - protein, 18 aa, Severe acute respiratory syndrome coronavirus 2
LAFVVFLLVTLAILTALR

SEQ ID NO: 84987 - protein, 19 aa, Severe acute respiratory syndrome coronavirus 2
ETGTLIVNSVLLFLAFVVF

SEQ ID NO: 84988 - protein, 19 aa, Severe acute respiratory syndrome coronavirus 2
TGTLIVNSVLLFLAFVVFL

SEQ ID NO: 84989 - protein, 19 aa, Severe acute respiratory syndrome coronavirus 2
GTLIVNSVLLFLAFVVFLL

SEQ ID NO: 84990 - protein, 19 aa, Severe acute respiratory syndrome coronavirus 2
TLIVNSVLLFLAFVVFLLV

SEQ ID NO: 84991 - protein, 19 aa, Severe acute respiratory syndrome coronavirus 2
LIVNSVLLFLAFVVFLLVT

SEQ ID NO: 84992 - protein, 19 aa, Severe acute respiratory syndrome coronavirus 2
IVNSVLLFLAFVVFLLVTL

SEQ ID NO: 84993 - protein, 19 aa, Severe acute respiratory syndrome coronavirus 2
VNSVLLFLAFVVFLLVTLA

SEQ ID NO: 84994 - protein, 19 aa, Severe acute respiratory syndrome coronavirus 2
NSVLLFLAFVVFLLVTLAI

SEQ ID NO: 84995 - protein, 19 aa, Severe acute respiratory syndrome coronavirus 2
SVLLFLAFVVFLLVTLAIL

SEQ ID NO: 84996 - protein, 19 aa, Severe acute respiratory syndrome coronavirus 2
VLLFLAFVVFLLVTLAILT

SEQ ID NO: 84997 - protein, 19 aa, Severe acute respiratory syndrome coronavirus 2
LLFLAFVVFLLVTLAILTA

SEQ ID NO: 84998 - protein, 19 aa, Severe acute respiratory syndrome coronavirus 2
LFLAFVVFLLVTLAILTAL

SEQ ID NO: 84999 - protein, 19 aa, Severe acute respiratory syndrome coronavirus 2
FLAFVVFLLVTLAILTALR

SEQ ID NO: 85000 - protein, 20 aa, Severe acute respiratory syndrome coronavirus 2
ETGTLIVNSVLLFLAFVVFL

SEQ ID NO: 85001 - protein, 20 aa, Severe acute respiratory syndrome coronavirus 2
TGTLIVNSVLLFLAFVVFLL

SEQ ID NO: 85002 - protein, 20 aa, Severe acute respiratory syndrome coronavirus 2
GTLIVNSVLLFLAFVVFLLV

SEQ ID NO: 85003 - protein, 20 aa, Severe acute respiratory syndrome coronavirus 2
TLIVNSVLLFLAFVVFLLVT

SEQ ID NO: 85004 - protein, 20 aa, Severe acute respiratory syndrome coronavirus 2
LIVNSVLLFLAFVVFLLVTL

SEQ ID NO: 85005 - protein, 20 aa, Severe acute respiratory syndrome coronavirus 2
IVNSVLLFLAFVVFLLVTLA

SEQ ID NO: 85006 - protein, 20 aa, Severe acute respiratory syndrome coronavirus 2
VNSVLLFLAFVVFLLVTLAI

SEQ ID NO: 85007 - protein, 20 aa, Severe acute respiratory syndrome coronavirus 2
NSVLLFLAFVVFLLVTLAIL

SEQ ID NO: 85008 - protein, 20 aa, Severe acute respiratory syndrome coronavirus 2
SVLLFLAFVVFLLVTLAILT

SEQ ID NO: 85009 - protein, 20 aa, Severe acute respiratory syndrome coronavirus 2
VLLFLAFVVFLLVTLAILTA

SEQ ID NO: 85010 - protein, 20 aa, Severe acute respiratory syndrome coronavirus 2
LLFLAFVVFLLVTLAILTAL

SEQ ID NO: 85011 - protein, 20 aa, Severe acute respiratory syndrome coronavirus 2
LFLAFVVFLLVTLAILTALR

SEQ ID NO: 85012 - protein, 21 aa, Severe acute respiratory syndrome coronavirus 2
ETGTLIVNSVLLFLAFVVFLL

SEQ ID NO: 85013 - protein, 21 aa, Severe acute respiratory syndrome coronavirus 2
TGTLIVNSVLLFLAFVVFLLV

SEQ ID NO: 85014 - protein, 21 aa, Severe acute respiratory syndrome coronavirus 2
GTLIVNSVLLFLAFVVFLLVT

SEQ ID NO: 85015 - protein, 21 aa, Severe acute respiratory syndrome coronavirus 2
TLIVNSVLLFLAFVVFLLVTL

SEQ ID NO: 85016 - protein, 21 aa, Severe acute respiratory syndrome coronavirus 2
LIVNSVLLFLAFVVFLLVTLA

SEQ ID NO: 85017 - protein, 21 aa, Severe acute respiratory syndrome coronavirus 2
IVNSVLLFLAFVVFLLVTLAI

SEQ ID NO: 85018 - protein, 21 aa, Severe acute respiratory syndrome coronavirus 2
VNSVLLFLAFVVFLLVTLAIL

SEQ ID NO: 85019 - protein, 21 aa, Severe acute respiratory syndrome coronavirus 2
NSVLLFLAFVVFLLVTLAILT

SEQ ID NO: 85020 - protein, 21 aa, Severe acute respiratory syndrome coronavirus 2
SVLLFLAFVVFLLVTLAILTA

SEQ ID NO: 85021 - protein, 21 aa, Severe acute respiratory syndrome coronavirus 2
VLLFLAFVVFLLVTLAILTAL

SEQ ID NO: 85022 - protein, 21 aa, Severe acute respiratory syndrome coronavirus 2
LLFLAFVVFLLVTLAILTALR

SEQ ID NO: 85023 - protein, 22 aa, Severe acute respiratory syndrome coronavirus 2
ETGTLIVNSVLLFLAFVVFLLV

SEQ ID NO: 85024 - protein, 22 aa, Severe acute respiratory syndrome coronavirus 2
GTLIVNSVLLFLAFVVFLLVTL

SEQ ID NO: 85025 - protein, 22 aa, Severe acute respiratory syndrome coronavirus 2
TLIVNSVLLFLAFVVFLLVTLA

SEQ ID NO: 85026 - protein, 22 aa, Severe acute respiratory syndrome coronavirus 2
LIVNSVLLFLAFVVFLLVTLAI

SEQ ID NO: 85027 - protein, 22 aa, Severe acute respiratory syndrome coronavirus 2
IVNSVLLFLAFVVFLLVTLAIL

SEQ ID NO: 85028 - protein, 22 aa, Severe acute respiratory syndrome coronavirus 2
VNSVLLFLAFVVFLLVTLAILT

SEQ ID NO: 85029 - protein, 22 aa, Severe acute respiratory syndrome coronavirus 2
NSVLLFLAFVVFLLVTLAILTA

SEQ ID NO: 85030 - protein, 22 aa, Severe acute respiratory syndrome coronavirus 2
SVLLFLAFVVFLLVTLAILTAL

SEQ ID NO: 85031 - protein, 22 aa, Severe acute respiratory syndrome coronavirus 2
VLLFLAFVVFLLVTLAILTALR

SEQ ID NO: 85032 - protein, 23 aa, Severe acute respiratory syndrome coronavirus 2
GTLIVNSVLLFLAFVVFLLVTLA

SEQ ID NO: 85033 - protein, 23 aa, Severe acute respiratory syndrome coronavirus 2
TLIVNSVLLFLAFVVFLLVTLAI

SEQ ID NO: 85034 - protein, 23 aa, Severe acute respiratory syndrome coronavirus 2
LIVNSVLLFLAFVVFLLVTLAIL

SEQ ID NO: 85035 - protein, 23 aa, Severe acute respiratory syndrome coronavirus 2
IVNSVLLFLAFVVFLLVTLAILT

SEQ ID NO: 85036 - protein, 23 aa, Severe acute respiratory syndrome coronavirus 2
VNSVLLFLAFVVFLLVTLAILTA

SEQ ID NO: 85037 - protein, 23 aa, Severe acute respiratory syndrome coronavirus 2
NSVLLFLAFVVFLLVTLAILTAL

SEQ ID NO: 85038 - protein, 23 aa, Severe acute respiratory syndrome coronavirus 2
SVLLFLAFVVFLLVTLAILTALR

SEQ ID NO: 85039 - protein, 24 aa, Severe acute respiratory syndrome coronavirus 2
GTLIVNSVLLFLAFVVFLLVTLAI

SEQ ID NO: 85040 - protein, 24 aa, Severe acute respiratory syndrome coronavirus 2
TLIVNSVLLFLAFVVFLLVTLAIL

SEQ ID NO: 85041 - protein, 24 aa, Severe acute respiratory syndrome coronavirus 2
LIVNSVLLFLAFVVFLLVTLAILT

SEQ ID NO: 85042 - protein, 24 aa, Severe acute respiratory syndrome coronavirus 2
IVNSVLLFLAFVVFLLVTLAILTA

SEQ ID NO: 85043 - protein, 24 aa, Severe acute respiratory syndrome coronavirus 2
VNSVLLFLAFVVFLLVTLAILTAL

SEQ ID NO: 85044 - protein, 24 aa, Severe acute respiratory syndrome coronavirus 2
NSVLLFLAFVVFLLVTLAILTALR

SEQ ID NO: 85045 - protein, 25 aa, Severe acute respiratory syndrome coronavirus 2
GTLIVNSVLLFLAFVVFLLVTLAIL

SEQ ID NO: 85046 - protein, 25 aa, Severe acute respiratory syndrome coronavirus 2
TLIVNSVLLFLAFVVFLLVTLAILT

SEQ ID NO: 85047 - protein, 25 aa, Severe acute respiratory syndrome coronavirus 2
LIVNSVLLFLAFVVFLLVTLAILTA

SEQ ID NO: 85048 - protein, 25 aa, Severe acute respiratory syndrome coronavirus 2
IVNSVLLFLAFVVFLLVTLAILTAL

SEQ ID NO: 85049 - protein, 25 aa, Severe acute respiratory syndrome coronavirus 2
VNSVLLFLAFVVFLLVTLAILTALR

SEQ ID NO: 85050 - protein, 13 aa, Severe acute respiratory syndrome coronavirus 2
EELKKLLEQWNLV

SEQ ID NO: 85051 - protein, 13 aa, Severe acute respiratory syndrome coronavirus 2
ELKKLLEQWNLVI

SEQ ID NO: 85052 - protein, 13 aa, Severe acute respiratory syndrome coronavirus 2
LKKLLEQWNLVIG

SEQ ID NO: 85053 - protein, 13 aa, Severe acute respiratory syndrome coronavirus 2
KKLLEQWNLVIGF

SEQ ID NO: 85054 - protein, 13 aa, Severe acute respiratory syndrome coronavirus 2
KLLEQWNLVIGFL

SEQ ID NO: 85055 - protein, 13 aa, Severe acute respiratory syndrome coronavirus 2
LLEQWNLVIGFLF

SEQ ID NO: 85056 - protein, 13 aa, Severe acute respiratory syndrome coronavirus 2
LEQWNLVIGFLFL

SEQ ID NO: 85057 - protein, 13 aa, Severe acute respiratory syndrome coronavirus 2
EQWNLVIGFLFLT

SEQ ID NO: 85058 - protein, 13 aa, Severe acute respiratory syndrome coronavirus 2
VIGFLFLTWICLL

SEQ ID NO: 85059 - protein, 13 aa, Severe acute respiratory syndrome coronavirus 2
IGFLFLTWICLLQ

SEQ ID NO: 85060 - protein, 13 aa, Severe acute respiratory syndrome coronavirus 2
GFLFLTWICLLQF

SEQ ID NO: 85061 - protein, 13 aa, Severe acute respiratory syndrome coronavirus 2
FLFLTWICLLQFA

SEQ ID NO: 85062 - protein, 13 aa, Severe acute respiratory syndrome coronavirus 2
LFLTWICLLQFAY

SEQ ID NO: 85063 - protein, 13 aa, Severe acute respiratory syndrome coronavirus 2
FLWLLWPVTLACF

SEQ ID NO: 85064 - protein, 13 aa, Severe acute respiratory syndrome coronavirus 2
AMACLVGLMWLSY

SEQ ID NO: 85065 - protein, 13 aa, Severe acute respiratory syndrome coronavirus 2
MACLVGLMWLSYF

SEQ ID NO: 85066 - protein, 13 aa, Severe acute respiratory syndrome coronavirus 2
ACLVGLMWLSYFI

SEQ ID NO: 85067 - protein, 13 aa, Severe acute respiratory syndrome coronavirus 2
CLVGLMWLSYFIA

SEQ ID NO: 85068 - protein, 13 aa, Severe acute respiratory syndrome coronavirus 2
LVGLMWLSYFIAS

SEQ ID NO: 85069 - protein, 13 aa, Severe acute respiratory syndrome coronavirus 2
VGLMWLSYFIASF

SEQ ID NO: 85070 - protein, 13 aa, Severe acute respiratory syndrome coronavirus 2
GLMWLSYFIASFR

SEQ ID NO: 85071 - protein, 13 aa, Severe acute respiratory syndrome coronavirus 2
LMWLSYFIASFRL

SEQ ID NO: 85072 - protein, 13 aa, Severe acute respiratory syndrome coronavirus 2
MWLSYFIASFRLF

SEQ ID NO: 85073 - protein, 13 aa, Severe acute respiratory syndrome coronavirus 2
WLSYFIASFRLFA

SEQ ID NO: 85074 - protein, 13 aa, Severe acute respiratory syndrome coronavirus 2
LSYFIASFRLFAR

SEQ ID NO: 85075 - protein, 13 aa, Severe acute respiratory syndrome coronavirus 2
SYFIASFRLFART

SEQ ID NO: 85076 - protein, 13 aa, Severe acute respiratory syndrome coronavirus 2
YFIASFRLFARTR

SEQ ID NO: 85077 - protein, 13 aa, Severe acute respiratory syndrome coronavirus 2
FIASFRLFARTRS

SEQ ID NO: 85078 - protein, 13 aa, Severe acute respiratory syndrome coronavirus 2
SFRLFARTRSMWS

SEQ ID NO: 85079 - protein, 13 aa, Severe acute respiratory syndrome coronavirus 2
FRLFARTRSMWSF

SEQ ID NO: 85080 - protein, 13 aa, Severe acute respiratory syndrome coronavirus 2
RLFARTRSMWSFN

SEQ ID NO: 85081 - protein, 13 aa, Severe acute respiratory syndrome coronavirus 2
LFARTRSMWSFNP

SEQ ID NO: 85082 - protein, 13 aa, Severe acute respiratory syndrome coronavirus 2
MWSFNPETNILLN

SEQ ID NO: 85083 - protein, 13 aa, Severe acute respiratory syndrome coronavirus 2
WSFNPETNILLNV

SEQ ID NO: 85084 - protein, 13 aa, Severe acute respiratory syndrome coronavirus 2
SFNPETNILLNVP

SEQ ID NO: 85085 - protein, 13 aa, Severe acute respiratory syndrome coronavirus 2
PETNILLNVPLHG

SEQ ID NO: 85086 - protein, 13 aa, Severe acute respiratory syndrome coronavirus 2
ETNILLNVPLHGT

SEQ ID NO: 85087 - protein, 13 aa, Severe acute respiratory syndrome coronavirus 2
TNILLNVPLHGTI

SEQ ID NO: 85088 - protein, 13 aa, Severe acute respiratory syndrome coronavirus 2
RPLLESELVIGAV

SEQ ID NO: 85089 - protein, 13 aa, Severe acute respiratory syndrome coronavirus 2
PLLESELVIGAVI

SEQ ID NO: 85090 - protein, 13 aa, Severe acute respiratory syndrome coronavirus 2
LLESELVIGAVIL

SEQ ID NO: 85091 - protein, 13 aa, Severe acute respiratory syndrome coronavirus 2
LESELVIGAVILR

SEQ ID NO: 85092 - protein, 13 aa, Severe acute respiratory syndrome coronavirus 2
ESELVIGAVILRG

SEQ ID NO: 85093 - protein, 13 aa, Severe acute respiratory syndrome coronavirus 2
SELVIGAVILRGH

SEQ ID NO: 85094 - protein, 13 aa, Severe acute respiratory syndrome coronavirus 2
ELVIGAVILRGHL

SEQ ID NO: 85095 - protein, 13 aa, Severe acute respiratory syndrome coronavirus 2
LVIGAVILRGHLR

SEQ ID NO: 85096 - protein, 13 aa, Severe acute respiratory syndrome coronavirus 2
VIGAVILRGHLRI

SEQ ID NO: 85097 - protein, 13 aa, Severe acute respiratory syndrome coronavirus 2
IGAVILRGHLRIA

SEQ ID NO: 85098 - protein, 13 aa, Severe acute respiratory syndrome coronavirus 2
GAVILRGHLRIAG

SEQ ID NO: 85099 - protein, 13 aa, Severe acute respiratory syndrome coronavirus 2
AVILRGHLRIAGH

SEQ ID NO: 85100 - protein, 13 aa, Severe acute respiratory syndrome coronavirus 2
LSYYKLGASQRVA

SEQ ID NO: 85101 - protein, 13 aa, Severe acute respiratory syndrome coronavirus 2
SYYKLGASQRVAG

SEQ ID NO: 85102 - protein, 13 aa, Severe acute respiratory syndrome coronavirus 2
YYKLGASQRVAGD

SEQ ID NO: 85103 - protein, 13 aa, Severe acute respiratory syndrome coronavirus 2
YKLGASQRVAGDS

SEQ ID NO: 85104 - protein, 13 aa, Severe acute respiratory syndrome coronavirus 2
RVAGDSGFAAYSR

SEQ ID NO: 85105 - protein, 13 aa, Severe acute respiratory syndrome coronavirus 2
VAGDSGFAAYSRY

SEQ ID NO: 85106 - protein, 14 aa, Severe acute respiratory syndrome coronavirus 2
EELKKLLEQWNLVI

SEQ ID NO: 85107 - protein, 14 aa, Severe acute respiratory syndrome coronavirus 2
ELKKLLEQWNLVIG

SEQ ID NO: 85108 - protein, 14 aa, Severe acute respiratory syndrome coronavirus 2
LKKLLEQWNLVIGF

SEQ ID NO: 85109 - protein, 14 aa, Severe acute respiratory syndrome coronavirus 2
KKLLEQWNLVIGFL

SEQ ID NO: 85110 - protein, 14 aa, Severe acute respiratory syndrome coronavirus 2
KLLEQWNLVIGFLF

SEQ ID NO: 85111 - protein, 14 aa, Severe acute respiratory syndrome coronavirus 2
LLEQWNLVIGFLFL

SEQ ID NO: 85112 - protein, 14 aa, Severe acute respiratory syndrome coronavirus 2
LEQWNLVIGFLFLT

SEQ ID NO: 85113 - protein, 14 aa, Severe acute respiratory syndrome coronavirus 2
EQWNLVIGFLFLTW

SEQ ID NO: 85114 - protein, 14 aa, Severe acute respiratory syndrome coronavirus 2
QWNLVIGFLFLTWI

SEQ ID NO: 85115 - protein, 14 aa, Severe acute respiratory syndrome coronavirus 2
NLVIGFLFLTWICL

SEQ ID NO: 85116 - protein, 14 aa, Severe acute respiratory syndrome coronavirus 2
LVIGFLFLTWICLL

SEQ ID NO: 85117 - protein, 14 aa, Severe acute respiratory syndrome coronavirus 2
VIGFLFLTWICLLQ

SEQ ID NO: 85118 - protein, 14 aa, Severe acute respiratory syndrome coronavirus 2
IGFLFLTWICLLQF

SEQ ID NO: 85119 - protein, 14 aa, Severe acute respiratory syndrome coronavirus 2
GFLFLTWICLLQFA

SEQ ID NO: 85120 - protein, 14 aa, Severe acute respiratory syndrome coronavirus 2
FLFLTWICLLQFAY

SEQ ID NO: 85121 - protein, 14 aa, Severe acute respiratory syndrome coronavirus 2
IAMACLVGLMWLSY

SEQ ID NO: 85122 - protein, 14 aa, Severe acute respiratory syndrome coronavirus 2
AMACLVGLMWLSYF

SEQ ID NO: 85123 - protein, 14 aa, Severe acute respiratory syndrome coronavirus 2
MACLVGLMWLSYFI

SEQ ID NO: 85124 - protein, 14 aa, Severe acute respiratory syndrome coronavirus 2
ACLVGLMWLSYFIA

SEQ ID NO: 85125 - protein, 14 aa, Severe acute respiratory syndrome coronavirus 2
CLVGLMWLSYFIAS

SEQ ID NO: 85126 - protein, 14 aa, Severe acute respiratory syndrome coronavirus 2
LVGLMWLSYFIASF

SEQ ID NO: 85127 - protein, 14 aa, Severe acute respiratory syndrome coronavirus 2
VGLMWLSYFIASFR

SEQ ID NO: 85128 - protein, 14 aa, Severe acute respiratory syndrome coronavirus 2
GLMWLSYFIASFRL

SEQ ID NO: 85129 - protein, 14 aa, Severe acute respiratory syndrome coronavirus 2
LMWLSYFIASFRLF

SEQ ID NO: 85130 - protein, 14 aa, Severe acute respiratory syndrome coronavirus 2
MWLSYFIASFRLFA

SEQ ID NO: 85131 - protein, 14 aa, Severe acute respiratory syndrome coronavirus 2
WLSYFIASFRLFAR

SEQ ID NO: 85132 - protein, 14 aa, Severe acute respiratory syndrome coronavirus 2
LSYFIASFRLFART

SEQ ID NO: 85133 - protein, 14 aa, Severe acute respiratory syndrome coronavirus 2
SYFIASFRLFARTR

SEQ ID NO: 85134 - protein, 14 aa, Severe acute respiratory syndrome coronavirus 2
YFIASFRLFARTRS

SEQ ID NO: 85135 - protein, 14 aa, Severe acute respiratory syndrome coronavirus 2
SFRLFARTRSMWSF

SEQ ID NO: 85136 - protein, 14 aa, Severe acute respiratory syndrome coronavirus 2
FRLFARTRSMWSFN

SEQ ID NO: 85137 - protein, 14 aa, Severe acute respiratory syndrome coronavirus 2
RLFARTRSMWSFNP

SEQ ID NO: 85138 - protein, 14 aa, Severe acute respiratory syndrome coronavirus 2
LFARTRSMWSFNPE

SEQ ID NO: 85139 - protein, 14 aa, Severe acute respiratory syndrome coronavirus 2
FARTRSMWSFNPET

SEQ ID NO: 85140 - protein, 14 aa, Severe acute respiratory syndrome coronavirus 2
RTRSMWSFNPETNI

SEQ ID NO: 85141 - protein, 14 aa, Severe acute respiratory syndrome coronavirus 2
TRSMWSFNPETNIL

SEQ ID NO: 85142 - protein, 14 aa, Severe acute respiratory syndrome coronavirus 2
RSMWSFNPETNILL

SEQ ID NO: 85143 - protein, 14 aa, Severe acute respiratory syndrome coronavirus 2
SMWSFNPETNILLN

SEQ ID NO: 85144 - protein, 14 aa, Severe acute respiratory syndrome coronavirus 2
MWSFNPETNILLNV

SEQ ID NO: 85145 - protein, 14 aa, Severe acute respiratory syndrome coronavirus 2
WSFNPETNILLNVP

SEQ ID NO: 85146 - protein, 14 aa, Severe acute respiratory syndrome coronavirus 2
SFNPETNILLNVPL

SEQ ID NO: 85147 - protein, 14 aa, Severe acute respiratory syndrome coronavirus 2
FNPETNILLNVPLH

SEQ ID NO: 85148 - protein, 14 aa, Severe acute respiratory syndrome coronavirus 2
NPETNILLNVPLHG

SEQ ID NO: 85149 - protein, 14 aa, Severe acute respiratory syndrome coronavirus 2
PETNILLNVPLHGT

SEQ ID NO: 85150 - protein, 14 aa, Severe acute respiratory syndrome coronavirus 2
ETNILLNVPLHGTI

SEQ ID NO: 85151 - protein, 14 aa, Severe acute respiratory syndrome coronavirus 2
TRPLLESELVIGAV

SEQ ID NO: 85152 - protein, 14 aa, Severe acute respiratory syndrome coronavirus 2
RPLLESELVIGAVI

SEQ ID NO: 85153 - protein, 14 aa, Severe acute respiratory syndrome coronavirus 2
PLLESELVIGAVIL

SEQ ID NO: 85154 - protein, 14 aa, Severe acute respiratory syndrome coronavirus 2
LLESELVIGAVILR

SEQ ID NO: 85155 - protein, 14 aa, Severe acute respiratory syndrome coronavirus 2
LESELVIGAVILRG

SEQ ID NO: 85156 - protein, 14 aa, Severe acute respiratory syndrome coronavirus 2
ESELVIGAVILRGH

SEQ ID NO: 85157 - protein, 14 aa, Severe acute respiratory syndrome coronavirus 2
SELVIGAVILRGHL

SEQ ID NO: 85158 - protein, 14 aa, Severe acute respiratory syndrome coronavirus 2
ELVIGAVILRGHLR

SEQ ID NO: 85159 - protein, 14 aa, Severe acute respiratory syndrome coronavirus 2
LVIGAVILRGHLRI

SEQ ID NO: 85160 - protein, 14 aa, Severe acute respiratory syndrome coronavirus 2
VIGAVILRGHLRIA

SEQ ID NO: 85161 - protein, 14 aa, Severe acute respiratory syndrome coronavirus 2
IGAVILRGHLRIAG

SEQ ID NO: 85162 - protein, 14 aa, Severe acute respiratory syndrome coronavirus 2
GAVILRGHLRIAGH

SEQ ID NO: 85163 - protein, 14 aa, Severe acute respiratory syndrome coronavirus 2
LSYYKLGASQRVAG

SEQ ID NO: 85164 - protein, 14 aa, Severe acute respiratory syndrome coronavirus 2
SYYKLGASQRVAGD

SEQ ID NO: 85165 - protein, 14 aa, Severe acute respiratory syndrome coronavirus 2
YYKLGASQRVAGDS

SEQ ID NO: 85166 - protein, 14 aa, Severe acute respiratory syndrome coronavirus 2
YKLGASQRVAGDSG

SEQ ID NO: 85167 - protein, 14 aa, Severe acute respiratory syndrome coronavirus 2
SQRVAGDSGFAAYS

SEQ ID NO: 85168 - protein, 14 aa, Severe acute respiratory syndrome coronavirus 2
QRVAGDSGFAAYSR

SEQ ID NO: 85169 - protein, 14 aa, Severe acute respiratory syndrome coronavirus 2
RVAGDSGFAAYSRY

SEQ ID NO: 85170 - protein, 14 aa, Severe acute respiratory syndrome coronavirus 2
VAGDSGFAAYSRYR

SEQ ID NO: 85171 - protein, 14 aa, Severe acute respiratory syndrome coronavirus 2
AGDSGFAAYSRYRI

SEQ ID NO: 85172 - protein, 14 aa, Severe acute respiratory syndrome coronavirus 2
GDSGFAAYSRYRIG

SEQ ID NO: 85173 - protein, 14 aa, Severe acute respiratory syndrome coronavirus 2
DSGFAAYSRYRIGN

SEQ ID NO: 85174 - protein, 14 aa, Severe acute respiratory syndrome coronavirus 2
SGFAAYSRYRIGNY

SEQ ID NO: 85175 - protein, 14 aa, Severe acute respiratory syndrome coronavirus 2
GFAAYSRYRIGNYK

SEQ ID NO: 85176 - protein, 14 aa, Severe acute respiratory syndrome coronavirus 2
FAAYSRYRIGNYKL

SEQ ID NO: 85177 - protein, 15 aa, Severe acute respiratory syndrome coronavirus 2
EELKKLLEQWNLVIG

SEQ ID NO: 85178 - protein, 15 aa, Severe acute respiratory syndrome coronavirus 2
ELKKLLEQWNLVIGF

SEQ ID NO: 85179 - protein, 15 aa, Severe acute respiratory syndrome coronavirus 2
LKKLLEQWNLVIGFL

SEQ ID NO: 85180 - protein, 15 aa, Severe acute respiratory syndrome coronavirus 2
KKLLEQWNLVIGFLF

SEQ ID NO: 85181 - protein, 15 aa, Severe acute respiratory syndrome coronavirus 2
KLLEQWNLVIGFLFL

SEQ ID NO: 85182 - protein, 15 aa, Severe acute respiratory syndrome coronavirus 2
LLEQWNLVIGFLFLT

SEQ ID NO: 85183 - protein, 15 aa, Severe acute respiratory syndrome coronavirus 2
LEQWNLVIGFLFLTW

SEQ ID NO: 85184 - protein, 15 aa, Severe acute respiratory syndrome coronavirus 2
EQWNLVIGFLFLTWI

SEQ ID NO: 85185 - protein, 15 aa, Severe acute respiratory syndrome coronavirus 2
QWNLVIGFLFLTWIC

SEQ ID NO: 85186 - protein, 15 aa, Severe acute respiratory syndrome coronavirus 2
WNLVIGFLFLTWICL

SEQ ID NO: 85187 - protein, 15 aa, Severe acute respiratory syndrome coronavirus 2
NLVIGFLFLTWICLL

SEQ ID NO: 85188 - protein, 15 aa, Severe acute respiratory syndrome coronavirus 2
LVIGFLFLTWICLLQ

SEQ ID NO: 85189 - protein, 15 aa, Severe acute respiratory syndrome coronavirus 2
VIGFLFLTWICLLQF

SEQ ID NO: 85190 - protein, 15 aa, Severe acute respiratory syndrome coronavirus 2
IGFLFLTWICLLQFA

SEQ ID NO: 85191 - protein, 15 aa, Severe acute respiratory syndrome coronavirus 2
GFLFLTWICLLQFAY

SEQ ID NO: 85192 - protein, 15 aa, Severe acute respiratory syndrome coronavirus 2
IAMACLVGLMWLSYF

SEQ ID NO: 85193 - protein, 15 aa, Severe acute respiratory syndrome coronavirus 2
AMACLVGLMWLSYFI

SEQ ID NO: 85194 - protein, 15 aa, Severe acute respiratory syndrome coronavirus 2
MACLVGLMWLSYFIA

SEQ ID NO: 85195 - protein, 15 aa, Severe acute respiratory syndrome coronavirus 2
ACLVGLMWLSYFIAS

SEQ ID NO: 85196 - protein, 15 aa, Severe acute respiratory syndrome coronavirus 2
CLVGLMWLSYFIASF

SEQ ID NO: 85197 - protein, 15 aa, Severe acute respiratory syndrome coronavirus 2
LVGLMWLSYFIASFR

SEQ ID NO: 85198 - protein, 15 aa, Severe acute respiratory syndrome coronavirus 2
VGLMWLSYFIASFRL

SEQ ID NO: 85199 - protein, 15 aa, Severe acute respiratory syndrome coronavirus 2
GLMWLSYFIASFRLF

SEQ ID NO: 85200 - protein, 15 aa, Severe acute respiratory syndrome coronavirus 2
LMWLSYFIASFRLFA

SEQ ID NO: 85201 - protein, 15 aa, Severe acute respiratory syndrome coronavirus 2
MWLSYFIASFRLFAR

SEQ ID NO: 85202 - protein, 15 aa, Severe acute respiratory syndrome coronavirus 2
WLSYFIASFRLFART

SEQ ID NO: 85203 - protein, 15 aa, Severe acute respiratory syndrome coronavirus 2
LSYFIASFRLFARTR

SEQ ID NO: 85204 - protein, 15 aa, Severe acute respiratory syndrome coronavirus 2
SYFIASFRLFARTRS

SEQ ID NO: 85205 - protein, 15 aa, Severe acute respiratory syndrome coronavirus 2
SFRLFARTRSMWSFN

SEQ ID NO: 85206 - protein, 15 aa, Severe acute respiratory syndrome coronavirus 2
FRLFARTRSMWSFNP

SEQ ID NO: 85207 - protein, 15 aa, Severe acute respiratory syndrome coronavirus 2
RLFARTRSMWSFNPE

SEQ ID NO: 85208 - protein, 15 aa, Severe acute respiratory syndrome coronavirus 2
LFARTRSMWSFNPET

SEQ ID NO: 85209 - protein, 15 aa, Severe acute respiratory syndrome coronavirus 2
FARTRSMWSFNPETN

SEQ ID NO: 85210 - protein, 15 aa, Severe acute respiratory syndrome coronavirus 2
ARTRSMWSFNPETNI

SEQ ID NO: 85211 - protein, 15 aa, Severe acute respiratory syndrome coronavirus 2
RTRSMWSFNPETNIL

SEQ ID NO: 85212 - protein, 15 aa, Severe acute respiratory syndrome coronavirus 2
TRSMWSFNPETNILL

SEQ ID NO: 85213 - protein, 15 aa, Severe acute respiratory syndrome coronavirus 2
RSMWSFNPETNILLN

SEQ ID NO: 85214 - protein, 15 aa, Severe acute respiratory syndrome coronavirus 2
SMWSFNPETNILLNV

SEQ ID NO: 85215 - protein, 15 aa, Severe acute respiratory syndrome coronavirus 2
MWSFNPETNILLNVP

SEQ ID NO: 85216 - protein, 15 aa, Severe acute respiratory syndrome coronavirus 2
WSFNPETNILLNVPL

SEQ ID NO: 85217 - protein, 15 aa, Severe acute respiratory syndrome coronavirus 2
SFNPETNILLNVPLH

SEQ ID NO: 85218 - protein, 15 aa, Severe acute respiratory syndrome coronavirus 2
FNPETNILLNVPLHG

SEQ ID NO: 85219 - protein, 15 aa, Severe acute respiratory syndrome coronavirus 2
NPETNILLNVPLHGT

SEQ ID NO: 85220 - protein, 15 aa, Severe acute respiratory syndrome coronavirus 2
PETNILLNVPLHGTI

SEQ ID NO: 85221 - protein, 15 aa, Severe acute respiratory syndrome coronavirus 2
TRPLLESELVIGAVI

SEQ ID NO: 85222 - protein, 15 aa, Severe acute respiratory syndrome coronavirus 2
RPLLESELVIGAVIL

SEQ ID NO: 85223 - protein, 15 aa, Severe acute respiratory syndrome coronavirus 2
PLLESELVIGAVILR

SEQ ID NO: 85224 - protein, 15 aa, Severe acute respiratory syndrome coronavirus 2
LLESELVIGAVILRG

SEQ ID NO: 85225 - protein, 15 aa, Severe acute respiratory syndrome coronavirus 2
LESELVIGAVILRGH

SEQ ID NO: 85226 - protein, 15 aa, Severe acute respiratory syndrome coronavirus 2
ESELVIGAVILRGHL

SEQ ID NO: 85227 - protein, 15 aa, Severe acute respiratory syndrome coronavirus 2
SELVIGAVILRGHLR

SEQ ID NO: 85228 - protein, 15 aa, Severe acute respiratory syndrome coronavirus 2
ELVIGAVILRGHLRI

SEQ ID NO: 85229 - protein, 15 aa, Severe acute respiratory syndrome coronavirus 2
LVIGAVILRGHLRIA

SEQ ID NO: 85230 - protein, 15 aa, Severe acute respiratory syndrome coronavirus 2
VIGAVILRGHLRIAG

SEQ ID NO: 85231 - protein, 15 aa, Severe acute respiratory syndrome coronavirus 2
IGAVILRGHLRIAGH

SEQ ID NO: 85232 - protein, 15 aa, Severe acute respiratory syndrome coronavirus 2
CDIKDLPKEITVATS

SEQ ID NO: 85233 - protein, 15 aa, Severe acute respiratory syndrome coronavirus 2
LSYYKLGASQRVAGD

SEQ ID NO: 85234 - protein, 15 aa, Severe acute respiratory syndrome coronavirus 2
SYYKLGASQRVAGDS

SEQ ID NO: 85235 - protein, 15 aa, Severe acute respiratory syndrome coronavirus 2
YYKLGASQRVAGDSG

SEQ ID NO: 85236 - protein, 15 aa, Severe acute respiratory syndrome coronavirus 2
YKLGASQRVAGDSGF

SEQ ID NO: 85237 - protein, 15 aa, Severe acute respiratory syndrome coronavirus 2
GASQRVAGDSGFAAY

SEQ ID NO: 85238 - protein, 15 aa, Severe acute respiratory syndrome coronavirus 2
ASQRVAGDSGFAAYS

SEQ ID NO: 85239 - protein, 15 aa, Severe acute respiratory syndrome coronavirus 2
SQRVAGDSGFAAYSR

SEQ ID NO: 85240 - protein, 15 aa, Severe acute respiratory syndrome coronavirus 2
QRVAGDSGFAAYSRY

SEQ ID NO: 85241 - protein, 15 aa, Severe acute respiratory syndrome coronavirus 2
RVAGDSGFAAYSRYR

SEQ ID NO: 85242 - protein, 15 aa, Severe acute respiratory syndrome coronavirus 2
VAGDSGFAAYSRYRI

SEQ ID NO: 85243 - protein, 15 aa, Severe acute respiratory syndrome coronavirus 2
AGDSGFAAYSRYRIG

SEQ ID NO: 85244 - protein, 15 aa, Severe acute respiratory syndrome coronavirus 2
GDSGFAAYSRYRIGN

SEQ ID NO: 85245 - protein, 15 aa, Severe acute respiratory syndrome coronavirus 2
DSGFAAYSRYRIGNY

SEQ ID NO: 85246 - protein, 15 aa, Severe acute respiratory syndrome coronavirus 2
SGFAAYSRYRIGNYK

SEQ ID NO: 85247 - protein, 15 aa, Severe acute respiratory syndrome coronavirus 2
GFAAYSRYRIGNYKL

SEQ ID NO: 85248 - protein, 15 aa, Severe acute respiratory syndrome coronavirus 2
FAAYSRYRIGNYKLN

SEQ ID NO: 85249 - protein, 16 aa, Severe acute respiratory syndrome coronavirus 2
EELKKLLEQWNLVIGF

SEQ ID NO: 85250 - protein, 16 aa, Severe acute respiratory syndrome coronavirus 2
ELKKLLEQWNLVIGFL

SEQ ID NO: 85251 - protein, 16 aa, Severe acute respiratory syndrome coronavirus 2
LKKLLEQWNLVIGFLF

SEQ ID NO: 85252 - protein, 16 aa, Severe acute respiratory syndrome coronavirus 2
KKLLEQWNLVIGFLFL

SEQ ID NO: 85253 - protein, 16 aa, Severe acute respiratory syndrome coronavirus 2
KLLEQWNLVIGFLFLT

SEQ ID NO: 85254 - protein, 16 aa, Severe acute respiratory syndrome coronavirus 2
LLEQWNLVIGFLFLTW

SEQ ID NO: 85255 - protein, 16 aa, Severe acute respiratory syndrome coronavirus 2
LEQWNLVIGFLFLTWI

SEQ ID NO: 85256 - protein, 16 aa, Severe acute respiratory syndrome coronavirus 2
EQWNLVIGFLFLTWIC

SEQ ID NO: 85257 - protein, 16 aa, Severe acute respiratory syndrome coronavirus 2
QWNLVIGFLFLTWICL

SEQ ID NO: 85258 - protein, 16 aa, Severe acute respiratory syndrome coronavirus 2
WNLVIGFLFLTWICLL

SEQ ID NO: 85259 - protein, 16 aa, Severe acute respiratory syndrome coronavirus 2
NLVIGFLFLTWICLLQ

SEQ ID NO: 85260 - protein, 16 aa, Severe acute respiratory syndrome coronavirus 2
LVIGFLFLTWICLLQF

SEQ ID NO: 85261 - protein, 16 aa, Severe acute respiratory syndrome coronavirus 2
VIGFLFLTWICLLQFA

SEQ ID NO: 85262 - protein, 16 aa, Severe acute respiratory syndrome coronavirus 2
IGFLFLTWICLLQFAY

SEQ ID NO: 85263 - protein, 16 aa, Severe acute respiratory syndrome coronavirus 2
IAMACLVGLMWLSYFI

SEQ ID NO: 85264 - protein, 16 aa, Severe acute respiratory syndrome coronavirus 2
AMACLVGLMWLSYFIA

SEQ ID NO: 85265 - protein, 16 aa, Severe acute respiratory syndrome coronavirus 2
MACLVGLMWLSYFIAS

SEQ ID NO: 85266 - protein, 16 aa, Severe acute respiratory syndrome coronavirus 2
ACLVGLMWLSYFIASF

SEQ ID NO: 85267 - protein, 16 aa, Severe acute respiratory syndrome coronavirus 2
CLVGLMWLSYFIASFR

SEQ ID NO: 85268 - protein, 16 aa, Severe acute respiratory syndrome coronavirus 2
LVGLMWLSYFIASFRL

SEQ ID NO: 85269 - protein, 16 aa, Severe acute respiratory syndrome coronavirus 2
VGLMWLSYFIASFRLF

SEQ ID NO: 85270 - protein, 16 aa, Severe acute respiratory syndrome coronavirus 2
GLMWLSYFIASFRLFA

SEQ ID NO: 85271 - protein, 16 aa, Severe acute respiratory syndrome coronavirus 2
LMWLSYFIASFRLFAR

SEQ ID NO: 85272 - protein, 16 aa, Severe acute respiratory syndrome coronavirus 2
MWLSYFIASFRLFART

SEQ ID NO: 85273 - protein, 16 aa, Severe acute respiratory syndrome coronavirus 2
WLSYFIASFRLFARTR

SEQ ID NO: 85274 - protein, 16 aa, Severe acute respiratory syndrome coronavirus 2
LSYFIASFRLFARTRS

SEQ ID NO: 85275 - protein, 16 aa, Severe acute respiratory syndrome coronavirus 2
SFRLFARTRSMWSFNP

SEQ ID NO: 85276 - protein, 16 aa, Severe acute respiratory syndrome coronavirus 2
FRLFARTRSMWSFNPE

SEQ ID NO: 85277 - protein, 16 aa, Severe acute respiratory syndrome coronavirus 2
RLFARTRSMWSFNPET

SEQ ID NO: 85278 - protein, 16 aa, Severe acute respiratory syndrome coronavirus 2
LFARTRSMWSFNPETN

SEQ ID NO: 85279 - protein, 16 aa, Severe acute respiratory syndrome coronavirus 2
FARTRSMWSFNPETNI

SEQ ID NO: 85280 - protein, 16 aa, Severe acute respiratory syndrome coronavirus 2
ARTRSMWSFNPETNIL

SEQ ID NO: 85281 - protein, 16 aa, Severe acute respiratory syndrome coronavirus 2
RTRSMWSFNPETNILL

SEQ ID NO: 85282 - protein, 16 aa, Severe acute respiratory syndrome coronavirus 2
TRSMWSFNPETNILLN

SEQ ID NO: 85283 - protein, 16 aa, Severe acute respiratory syndrome coronavirus 2
RSMWSFNPETNILLNV

SEQ ID NO: 85284 - protein, 16 aa, Severe acute respiratory syndrome coronavirus 2
SMWSFNPETNILLNVP

SEQ ID NO: 85285 - protein, 16 aa, Severe acute respiratory syndrome coronavirus 2
MWSFNPETNILLNVPL

SEQ ID NO: 85286 - protein, 16 aa, Severe acute respiratory syndrome coronavirus 2
WSFNPETNILLNVPLH

SEQ ID NO: 85287 - protein, 16 aa, Severe acute respiratory syndrome coronavirus 2
SFNPETNILLNVPLHG

SEQ ID NO: 85288 - protein, 16 aa, Severe acute respiratory syndrome coronavirus 2
FNPETNILLNVPLHGT

SEQ ID NO: 85289 - protein, 16 aa, Severe acute respiratory syndrome coronavirus 2
NPETNILLNVPLHGTI

SEQ ID NO: 85290 - protein, 16 aa, Severe acute respiratory syndrome coronavirus 2
TRPLLESELVIGAVIL

SEQ ID NO: 85291 - protein, 16 aa, Severe acute respiratory syndrome coronavirus 2
RPLLESELVIGAVILR

SEQ ID NO: 85292 - protein, 16 aa, Severe acute respiratory syndrome coronavirus 2
PLLESELVIGAVILRG

SEQ ID NO: 85293 - protein, 16 aa, Severe acute respiratory syndrome coronavirus 2
LLESELVIGAVILRGH

SEQ ID NO: 85294 - protein, 16 aa, Severe acute respiratory syndrome coronavirus 2
LESELVIGAVILRGHL

SEQ ID NO: 85295 - protein, 16 aa, Severe acute respiratory syndrome coronavirus 2
ESELVIGAVILRGHLR

SEQ ID NO: 85296 - protein, 16 aa, Severe acute respiratory syndrome coronavirus 2
SELVIGAVILRGHLRI

SEQ ID NO: 85297 - protein, 16 aa, Severe acute respiratory syndrome coronavirus 2
ELVIGAVILRGHLRIA

SEQ ID NO: 85298 - protein, 16 aa, Severe acute respiratory syndrome coronavirus 2
LVIGAVILRGHLRIAG

SEQ ID NO: 85299 - protein, 16 aa, Severe acute respiratory syndrome coronavirus 2
VIGAVILRGHLRIAGH

SEQ ID NO: 85300 - protein, 16 aa, Severe acute respiratory syndrome coronavirus 2
LSYYKLGASQRVAGDS

SEQ ID NO: 85301 - protein, 16 aa, Severe acute respiratory syndrome coronavirus 2
SYYKLGASQRVAGDSG

SEQ ID NO: 85302 - protein, 16 aa, Severe acute respiratory syndrome coronavirus 2
YYKLGASQRVAGDSGF

SEQ ID NO: 85303 - protein, 16 aa, Severe acute respiratory syndrome coronavirus 2
YKLGASQRVAGDSGFA

SEQ ID NO: 85304 - protein, 16 aa, Severe acute respiratory syndrome coronavirus 2
LGASQRVAGDSGFAAY

SEQ ID NO: 85305 - protein, 16 aa, Severe acute respiratory syndrome coronavirus 2
GASQRVAGDSGFAAYS

SEQ ID NO: 85306 - protein, 16 aa, Severe acute respiratory syndrome coronavirus 2
ASQRVAGDSGFAAYSR

SEQ ID NO: 85307 - protein, 16 aa, Severe acute respiratory syndrome coronavirus 2
SQRVAGDSGFAAYSRY

SEQ ID NO: 85308 - protein, 16 aa, Severe acute respiratory syndrome coronavirus 2
QRVAGDSGFAAYSRYR

SEQ ID NO: 85309 - protein, 16 aa, Severe acute respiratory syndrome coronavirus 2
RVAGDSGFAAYSRYRI

SEQ ID NO: 85310 - protein, 16 aa, Severe acute respiratory syndrome coronavirus 2
VAGDSGFAAYSRYRIG

SEQ ID NO: 85311 - protein, 16 aa, Severe acute respiratory syndrome coronavirus 2
AGDSGFAAYSRYRIGN

SEQ ID NO: 85312 - protein, 16 aa, Severe acute respiratory syndrome coronavirus 2
GDSGFAAYSRYRIGNY

SEQ ID NO: 85313 - protein, 16 aa, Severe acute respiratory syndrome coronavirus 2
DSGFAAYSRYRIGNYK

SEQ ID NO: 85314 - protein, 16 aa, Severe acute respiratory syndrome coronavirus 2
SGFAAYSRYRIGNYKL

SEQ ID NO: 85315 - protein, 16 aa, Severe acute respiratory syndrome coronavirus 2
GFAAYSRYRIGNYKLN

SEQ ID NO: 85316 - protein, 17 aa, Severe acute respiratory syndrome coronavirus 2
EELKKLLEQWNLVIGFL

SEQ ID NO: 85317 - protein, 17 aa, Severe acute respiratory syndrome coronavirus 2
ELKKLLEQWNLVIGFLF

SEQ ID NO: 85318 - protein, 17 aa, Severe acute respiratory syndrome coronavirus 2
LKKLLEQWNLVIGFLFL

SEQ ID NO: 85319 - protein, 17 aa, Severe acute respiratory syndrome coronavirus 2
KKLLEQWNLVIGFLFLT

SEQ ID NO: 85320 - protein, 17 aa, Severe acute respiratory syndrome coronavirus 2
KLLEQWNLVIGFLFLTW

SEQ ID NO: 85321 - protein, 17 aa, Severe acute respiratory syndrome coronavirus 2
LLEQWNLVIGFLFLTWI

SEQ ID NO: 85322 - protein, 17 aa, Severe acute respiratory syndrome coronavirus 2
LEQWNLVIGFLFLTWIC

SEQ ID NO: 85323 - protein, 17 aa, Severe acute respiratory syndrome coronavirus 2
EQWNLVIGFLFLTWICL

SEQ ID NO: 85324 - protein, 17 aa, Severe acute respiratory syndrome coronavirus 2
QWNLVIGFLFLTWICLL

SEQ ID NO: 85325 - protein, 17 aa, Severe acute respiratory syndrome coronavirus 2
WNLVIGFLFLTWICLLQ

SEQ ID NO: 85326 - protein, 17 aa, Severe acute respiratory syndrome coronavirus 2
NLVIGFLFLTWICLLQF

SEQ ID NO: 85327 - protein, 17 aa, Severe acute respiratory syndrome coronavirus 2
LVIGFLFLTWICLLQFA

SEQ ID NO: 85328 - protein, 17 aa, Severe acute respiratory syndrome coronavirus 2
VIGFLFLTWICLLQFAY

SEQ ID NO: 85329 - protein, 17 aa, Severe acute respiratory syndrome coronavirus 2
IAMACLVGLMWLSYFIA

SEQ ID NO: 85330 - protein, 17 aa, Severe acute respiratory syndrome coronavirus 2
AMACLVGLMWLSYFIAS

SEQ ID NO: 85331 - protein, 17 aa, Severe acute respiratory syndrome coronavirus 2
MACLVGLMWLSYFIASF

SEQ ID NO: 85332 - protein, 17 aa, Severe acute respiratory syndrome coronavirus 2
ACLVGLMWLSYFIASFR

SEQ ID NO: 85333 - protein, 17 aa, Severe acute respiratory syndrome coronavirus 2
CLVGLMWLSYFIASFRL

SEQ ID NO: 85334 - protein, 17 aa, Severe acute respiratory syndrome coronavirus 2
LVGLMWLSYFIASFRLF

SEQ ID NO: 85335 - protein, 17 aa, Severe acute respiratory syndrome coronavirus 2
VGLMWLSYFIASFRLFA

SEQ ID NO: 85336 - protein, 17 aa, Severe acute respiratory syndrome coronavirus 2
GLMWLSYFIASFRLFAR

SEQ ID NO: 85337 - protein, 17 aa, Severe acute respiratory syndrome coronavirus 2
LMWLSYFIASFRLFART

SEQ ID NO: 85338 - protein, 17 aa, Severe acute respiratory syndrome coronavirus 2
MWLSYFIASFRLFARTR

SEQ ID NO: 85339 - protein, 17 aa, Severe acute respiratory syndrome coronavirus 2
WLSYFIASFRLFARTRS

SEQ ID NO: 85340 - protein, 17 aa, Severe acute respiratory syndrome coronavirus 2
SFRLFARTRSMWSFNPE

SEQ ID NO: 85341 - protein, 17 aa, Severe acute respiratory syndrome coronavirus 2
FRLFARTRSMWSFNPET

SEQ ID NO: 85342 - protein, 17 aa, Severe acute respiratory syndrome coronavirus 2
RLFARTRSMWSFNPETN

SEQ ID NO: 85343 - protein, 17 aa, Severe acute respiratory syndrome coronavirus 2
LFARTRSMWSFNPETNI

SEQ ID NO: 85344 - protein, 17 aa, Severe acute respiratory syndrome coronavirus 2
FARTRSMWSFNPETNIL

SEQ ID NO: 85345 - protein, 17 aa, Severe acute respiratory syndrome coronavirus 2
ARTRSMWSFNPETNILL

SEQ ID NO: 85346 - protein, 17 aa, Severe acute respiratory syndrome coronavirus 2
RTRSMWSFNPETNILLN

SEQ ID NO: 85347 - protein, 17 aa, Severe acute respiratory syndrome coronavirus 2
TRSMWSFNPETNILLNV

SEQ ID NO: 85348 - protein, 17 aa, Severe acute respiratory syndrome coronavirus 2
RSMWSFNPETNILLNVP

SEQ ID NO: 85349 - protein, 17 aa, Severe acute respiratory syndrome coronavirus 2
SMWSFNPETNILLNVPL

SEQ ID NO: 85350 - protein, 17 aa, Severe acute respiratory syndrome coronavirus 2
WSFNPETNILLNVPLHG

SEQ ID NO: 85351 - protein, 17 aa, Severe acute respiratory syndrome coronavirus 2
SFNPETNILLNVPLHGT

SEQ ID NO: 85352 - protein, 17 aa, Severe acute respiratory syndrome coronavirus 2
FNPETNILLNVPLHGTI

SEQ ID NO: 85353 - protein, 17 aa, Severe acute respiratory syndrome coronavirus 2
TRPLLESELVIGAVILR

SEQ ID NO: 85354 - protein, 17 aa, Severe acute respiratory syndrome coronavirus 2
RPLLESELVIGAVILRG

SEQ ID NO: 85355 - protein, 17 aa, Severe acute respiratory syndrome coronavirus 2
LLESELVIGAVILRGHL

SEQ ID NO: 85356 - protein, 17 aa, Severe acute respiratory syndrome coronavirus 2
LESELVIGAVILRGHLR

SEQ ID NO: 85357 - protein, 17 aa, Severe acute respiratory syndrome coronavirus 2
ESELVIGAVILRGHLRI

SEQ ID NO: 85358 - protein, 17 aa, Severe acute respiratory syndrome coronavirus 2
SELVIGAVILRGHLRIA

SEQ ID NO: 85359 - protein, 17 aa, Severe acute respiratory syndrome coronavirus 2
ELVIGAVILRGHLRIAG

SEQ ID NO: 85360 - protein, 17 aa, Severe acute respiratory syndrome coronavirus 2
LVIGAVILRGHLRIAGH

SEQ ID NO: 85361 - protein, 17 aa, Severe acute respiratory syndrome coronavirus 2
LSYYKLGASQRVAGDSG

SEQ ID NO: 85362 - protein, 17 aa, Severe acute respiratory syndrome coronavirus 2
SYYKLGASQRVAGDSGF

SEQ ID NO: 85363 - protein, 17 aa, Severe acute respiratory syndrome coronavirus 2
YYKLGASQRVAGDSGFA

SEQ ID NO: 85364 - protein, 17 aa, Severe acute respiratory syndrome coronavirus 2
YKLGASQRVAGDSGFAA

SEQ ID NO: 85365 - protein, 17 aa, Severe acute respiratory syndrome coronavirus 2
LGASQRVAGDSGFAAYS

SEQ ID NO: 85366 - protein, 17 aa, Severe acute respiratory syndrome coronavirus 2
GASQRVAGDSGFAAYSR

SEQ ID NO: 85367 - protein, 17 aa, Severe acute respiratory syndrome coronavirus 2
ASQRVAGDSGFAAYSRY

SEQ ID NO: 85368 - protein, 17 aa, Severe acute respiratory syndrome coronavirus 2
SQRVAGDSGFAAYSRYR

SEQ ID NO: 85369 - protein, 17 aa, Severe acute respiratory syndrome coronavirus 2
QRVAGDSGFAAYSRYRI

SEQ ID NO: 85370 - protein, 17 aa, Severe acute respiratory syndrome coronavirus 2
RVAGDSGFAAYSRYRIG

SEQ ID NO: 85371 - protein, 17 aa, Severe acute respiratory syndrome coronavirus 2
VAGDSGFAAYSRYRIGN

SEQ ID NO: 85372 - protein, 17 aa, Severe acute respiratory syndrome coronavirus 2
AGDSGFAAYSRYRIGNY

SEQ ID NO: 85373 - protein, 17 aa, Severe acute respiratory syndrome coronavirus 2
GDSGFAAYSRYRIGNYK

SEQ ID NO: 85374 - protein, 17 aa, Severe acute respiratory syndrome coronavirus 2
DSGFAAYSRYRIGNYKL

SEQ ID NO: 85375 - protein, 17 aa, Severe acute respiratory syndrome coronavirus 2
SGFAAYSRYRIGNYKLN

SEQ ID NO: 85376 - protein, 18 aa, Severe acute respiratory syndrome coronavirus 2
EELKKLLEQWNLVIGFLF

SEQ ID NO: 85377 - protein, 18 aa, Severe acute respiratory syndrome coronavirus 2
ELKKLLEQWNLVIGFLFL

SEQ ID NO: 85378 - protein, 18 aa, Severe acute respiratory syndrome coronavirus 2
LKKLLEQWNLVIGFLFLT

SEQ ID NO: 85379 - protein, 18 aa, Severe acute respiratory syndrome coronavirus 2
KKLLEQWNLVIGFLFLTW

SEQ ID NO: 85380 - protein, 18 aa, Severe acute respiratory syndrome coronavirus 2
KLLEQWNLVIGFLFLTWI

SEQ ID NO: 85381 - protein, 18 aa, Severe acute respiratory syndrome coronavirus 2
LLEQWNLVIGFLFLTWIC

SEQ ID NO: 85382 - protein, 18 aa, Severe acute respiratory syndrome coronavirus 2
LEQWNLVIGFLFLTWICL

SEQ ID NO: 85383 - protein, 18 aa, Severe acute respiratory syndrome coronavirus 2
EQWNLVIGFLFLTWICLL

SEQ ID NO: 85384 - protein, 18 aa, Severe acute respiratory syndrome coronavirus 2
QWNLVIGFLFLTWICLLQ

SEQ ID NO: 85385 - protein, 18 aa, Severe acute respiratory syndrome coronavirus 2
WNLVIGFLFLTWICLLQF

SEQ ID NO: 85386 - protein, 18 aa, Severe acute respiratory syndrome coronavirus 2
NLVIGFLFLTWICLLQFA

SEQ ID NO: 85387 - protein, 18 aa, Severe acute respiratory syndrome coronavirus 2
LVIGFLFLTWICLLQFAY

SEQ ID NO: 85388 - protein, 18 aa, Severe acute respiratory syndrome coronavirus 2
IAMACLVGLMWLSYFIAS

SEQ ID NO: 85389 - protein, 18 aa, Severe acute respiratory syndrome coronavirus 2
AMACLVGLMWLSYFIASF

SEQ ID NO: 85390 - protein, 18 aa, Severe acute respiratory syndrome coronavirus 2
MACLVGLMWLSYFIASFR

SEQ ID NO: 85391 - protein, 18 aa, Severe acute respiratory syndrome coronavirus 2
ACLVGLMWLSYFIASFRL

SEQ ID NO: 85392 - protein, 18 aa, Severe acute respiratory syndrome coronavirus 2
CLVGLMWLSYFIASFRLF

SEQ ID NO: 85393 - protein, 18 aa, Severe acute respiratory syndrome coronavirus 2
LVGLMWLSYFIASFRLFA

SEQ ID NO: 85394 - protein, 18 aa, Severe acute respiratory syndrome coronavirus 2
VGLMWLSYFIASFRLFAR

SEQ ID NO: 85395 - protein, 18 aa, Severe acute respiratory syndrome coronavirus 2
GLMWLSYFIASFRLFART

SEQ ID NO: 85396 - protein, 18 aa, Severe acute respiratory syndrome coronavirus 2
LMWLSYFIASFRLFARTR

SEQ ID NO: 85397 - protein, 18 aa, Severe acute respiratory syndrome coronavirus 2
MWLSYFIASFRLFARTRS

SEQ ID NO: 85398 - protein, 18 aa, Severe acute respiratory syndrome coronavirus 2
SFRLFARTRSMWSFNPET

SEQ ID NO: 85399 - protein, 18 aa, Severe acute respiratory syndrome coronavirus 2
FRLFARTRSMWSFNPETN

SEQ ID NO: 85400 - protein, 18 aa, Severe acute respiratory syndrome coronavirus 2
RLFARTRSMWSFNPETNI

SEQ ID NO: 85401 - protein, 18 aa, Severe acute respiratory syndrome coronavirus 2
LFARTRSMWSFNPETNIL

SEQ ID NO: 85402 - protein, 18 aa, Severe acute respiratory syndrome coronavirus 2
FARTRSMWSFNPETNILL

SEQ ID NO: 85403 - protein, 18 aa, Severe acute respiratory syndrome coronavirus 2
ARTRSMWSFNPETNILLN

SEQ ID NO: 85404 - protein, 18 aa, Severe acute respiratory syndrome coronavirus 2
RTRSMWSFNPETNILLNV

SEQ ID NO: 85405 - protein, 18 aa, Severe acute respiratory syndrome coronavirus 2
TRSMWSFNPETNILLNVP

SEQ ID NO: 85406 - protein, 18 aa, Severe acute respiratory syndrome coronavirus 2
RSMWSFNPETNILLNVPL

SEQ ID NO: 85407 - protein, 18 aa, Severe acute respiratory syndrome coronavirus 2
WSFNPETNILLNVPLHGT

SEQ ID NO: 85408 - protein, 18 aa, Severe acute respiratory syndrome coronavirus 2
SFNPETNILLNVPLHGTI

SEQ ID NO: 85409 - protein, 18 aa, Severe acute respiratory syndrome coronavirus 2
TRPLLESELVIGAVILRG

SEQ ID NO: 85410 - protein, 18 aa, Severe acute respiratory syndrome coronavirus 2
LLESELVIGAVILRGHLR

SEQ ID NO: 85411 - protein, 18 aa, Severe acute respiratory syndrome coronavirus 2
LESELVIGAVILRGHLRI

SEQ ID NO: 85412 - protein, 18 aa, Severe acute respiratory syndrome coronavirus 2
ESELVIGAVILRGHLRIA

SEQ ID NO: 85413 - protein, 18 aa, Severe acute respiratory syndrome coronavirus 2
SELVIGAVILRGHLRIAG

SEQ ID NO: 85414 - protein, 18 aa, Severe acute respiratory syndrome coronavirus 2
ELVIGAVILRGHLRIAGH

SEQ ID NO: 85415 - protein, 18 aa, Severe acute respiratory syndrome coronavirus 2
LSYYKLGASQRVAGDSGF

SEQ ID NO: 85416 - protein, 18 aa, Severe acute respiratory syndrome coronavirus 2
SYYKLGASQRVAGDSGFA

SEQ ID NO: 85417 - protein, 18 aa, Severe acute respiratory syndrome coronavirus 2
YYKLGASQRVAGDSGFAA

SEQ ID NO: 85418 - protein, 18 aa, Severe acute respiratory syndrome coronavirus 2
YKLGASQRVAGDSGFAAY

SEQ ID NO: 85419 - protein, 18 aa, Severe acute respiratory syndrome coronavirus 2
LGASQRVAGDSGFAAYSR

SEQ ID NO: 85420 - protein, 18 aa, Severe acute respiratory syndrome coronavirus 2
GASQRVAGDSGFAAYSRY

SEQ ID NO: 85421 - protein, 18 aa, Severe acute respiratory syndrome coronavirus 2
ASQRVAGDSGFAAYSRYR

SEQ ID NO: 85422 - protein, 18 aa, Severe acute respiratory syndrome coronavirus 2
SQRVAGDSGFAAYSRYRI

SEQ ID NO: 85423 - protein, 18 aa, Severe acute respiratory syndrome coronavirus 2
QRVAGDSGFAAYSRYRIG

SEQ ID NO: 85424 - protein, 18 aa, Severe acute respiratory syndrome coronavirus 2
RVAGDSGFAAYSRYRIGN

SEQ ID NO: 85425 - protein, 18 aa, Severe acute respiratory syndrome coronavirus 2
VAGDSGFAAYSRYRIGNY

SEQ ID NO: 85426 - protein, 18 aa, Severe acute respiratory syndrome coronavirus 2
GDSGFAAYSRYRIGNYKL

SEQ ID NO: 85427 - protein, 18 aa, Severe acute respiratory syndrome coronavirus 2
DSGFAAYSRYRIGNYKLN

SEQ ID NO: 85428 - protein, 19 aa, Severe acute respiratory syndrome coronavirus 2
EELKKLLEQWNLVIGFLFL

SEQ ID NO: 85429 - protein, 19 aa, Severe acute respiratory syndrome coronavirus 2
ELKKLLEQWNLVIGFLFLT

SEQ ID NO: 85430 - protein, 19 aa, Severe acute respiratory syndrome coronavirus 2
LKKLLEQWNLVIGFLFLTW

SEQ ID NO: 85431 - protein, 19 aa, Severe acute respiratory syndrome coronavirus 2
KKLLEQWNLVIGFLFLTWI

SEQ ID NO: 85432 - protein, 19 aa, Severe acute respiratory syndrome coronavirus 2
KLLEQWNLVIGFLFLTWIC

SEQ ID NO: 85433 - protein, 19 aa, Severe acute respiratory syndrome coronavirus 2
LLEQWNLVIGFLFLTWICL

SEQ ID NO: 85434 - protein, 19 aa, Severe acute respiratory syndrome coronavirus 2
LEQWNLVIGFLFLTWICLL

SEQ ID NO: 85435 - protein, 19 aa, Severe acute respiratory syndrome coronavirus 2
EQWNLVIGFLFLTWICLLQ

SEQ ID NO: 85436 - protein, 19 aa, Severe acute respiratory syndrome coronavirus 2
QWNLVIGFLFLTWICLLQF

SEQ ID NO: 85437 - protein, 19 aa, Severe acute respiratory syndrome coronavirus 2
WNLVIGFLFLTWICLLQFA

SEQ ID NO: 85438 - protein, 19 aa, Severe acute respiratory syndrome coronavirus 2
NLVIGFLFLTWICLLQFAY

SEQ ID NO: 85439 - protein, 19 aa, Severe acute respiratory syndrome coronavirus 2
IAMACLVGLMWLSYFIASF

SEQ ID NO: 85440 - protein, 19 aa, Severe acute respiratory syndrome coronavirus 2
AMACLVGLMWLSYFIASFR

SEQ ID NO: 85441 - protein, 19 aa, Severe acute respiratory syndrome coronavirus 2
MACLVGLMWLSYFIASFRL

SEQ ID NO: 85442 - protein, 19 aa, Severe acute respiratory syndrome coronavirus 2
ACLVGLMWLSYFIASFRLF

SEQ ID NO: 85443 - protein, 19 aa, Severe acute respiratory syndrome coronavirus 2
CLVGLMWLSYFIASFRLFA

SEQ ID NO: 85444 - protein, 19 aa, Severe acute respiratory syndrome coronavirus 2
LVGLMWLSYFIASFRLFAR

SEQ ID NO: 85445 - protein, 19 aa, Severe acute respiratory syndrome coronavirus 2
VGLMWLSYFIASFRLFART

SEQ ID NO: 85446 - protein, 19 aa, Severe acute respiratory syndrome coronavirus 2
GLMWLSYFIASFRLFARTR

SEQ ID NO: 85447 - protein, 19 aa, Severe acute respiratory syndrome coronavirus 2
LMWLSYFIASFRLFARTRS

SEQ ID NO: 85448 - protein, 19 aa, Severe acute respiratory syndrome coronavirus 2
FRLFARTRSMWSFNPETNI

SEQ ID NO: 85449 - protein, 19 aa, Severe acute respiratory syndrome coronavirus 2
RLFARTRSMWSFNPETNIL

SEQ ID NO: 85450 - protein, 19 aa, Severe acute respiratory syndrome coronavirus 2
LFARTRSMWSFNPETNILL

SEQ ID NO: 85451 - protein, 19 aa, Severe acute respiratory syndrome coronavirus 2
FARTRSMWSFNPETNILLN

SEQ ID NO: 85452 - protein, 19 aa, Severe acute respiratory syndrome coronavirus 2
ARTRSMWSFNPETNILLNV

SEQ ID NO: 85453 - protein, 19 aa, Severe acute respiratory syndrome coronavirus 2
RTRSMWSFNPETNILLNVP

SEQ ID NO: 85454 - protein, 19 aa, Severe acute respiratory syndrome coronavirus 2
TRSMWSFNPETNILLNVPL

SEQ ID NO: 85455 - protein, 19 aa, Severe acute respiratory syndrome coronavirus 2
WSFNPETNILLNVPLHGTI

SEQ ID NO: 85456 - protein, 19 aa, Severe acute respiratory syndrome coronavirus 2
LLESELVIGAVILRGHLRI

SEQ ID NO: 85457 - protein, 19 aa, Severe acute respiratory syndrome coronavirus 2
LESELVIGAVILRGHLRIA

SEQ ID NO: 85458 - protein, 19 aa, Severe acute respiratory syndrome coronavirus 2
ESELVIGAVILRGHLRIAG

SEQ ID NO: 85459 - protein, 19 aa, Severe acute respiratory syndrome coronavirus 2
SELVIGAVILRGHLRIAGH

SEQ ID NO: 85460 - protein, 19 aa, Severe acute respiratory syndrome coronavirus 2
LSYYKLGASQRVAGDSGFA

SEQ ID NO: 85461 - protein, 19 aa, Severe acute respiratory syndrome coronavirus 2
SYYKLGASQRVAGDSGFAA

SEQ ID NO: 85462 - protein, 19 aa, Severe acute respiratory syndrome coronavirus 2
YYKLGASQRVAGDSGFAAY

SEQ ID NO: 85463 - protein, 19 aa, Severe acute respiratory syndrome coronavirus 2
YKLGASQRVAGDSGFAAYS

SEQ ID NO: 85464 - protein, 19 aa, Severe acute respiratory syndrome coronavirus 2
KLGASQRVAGDSGFAAYSR

SEQ ID NO: 85465 - protein, 19 aa, Severe acute respiratory syndrome coronavirus 2
LGASQRVAGDSGFAAYSRY

SEQ ID NO: 85466 - protein, 19 aa, Severe acute respiratory syndrome coronavirus 2
GASQRVAGDSGFAAYSRYR

SEQ ID NO: 85467 - protein, 19 aa, Severe acute respiratory syndrome coronavirus 2
ASQRVAGDSGFAAYSRYRI

SEQ ID NO: 85468 - protein, 19 aa, Severe acute respiratory syndrome coronavirus 2
SQRVAGDSGFAAYSRYRIG

SEQ ID NO: 85469 - protein, 19 aa, Severe acute respiratory syndrome coronavirus 2
QRVAGDSGFAAYSRYRIGN

SEQ ID NO: 85470 - protein, 19 aa, Severe acute respiratory syndrome coronavirus 2
RVAGDSGFAAYSRYRIGNY

SEQ ID NO: 85471 - protein, 19 aa, Severe acute respiratory syndrome coronavirus 2
VAGDSGFAAYSRYRIGNYK

SEQ ID NO: 85472 - protein, 19 aa, Severe acute respiratory syndrome coronavirus 2
AGDSGFAAYSRYRIGNYKL

SEQ ID NO: 85473 - protein, 19 aa, Severe acute respiratory syndrome coronavirus 2
GDSGFAAYSRYRIGNYKLN

SEQ ID NO: 85474 - protein, 20 aa, Severe acute respiratory syndrome coronavirus 2
EELKKLLEQWNLVIGFLFLT

SEQ ID NO: 85475 - protein, 20 aa, Severe acute respiratory syndrome coronavirus 2
ELKKLLEQWNLVIGFLFLTW

SEQ ID NO: 85476 - protein, 20 aa, Severe acute respiratory syndrome coronavirus 2
LKKLLEQWNLVIGFLFLTWI

SEQ ID NO: 85477 - protein, 20 aa, Severe acute respiratory syndrome coronavirus 2
KKLLEQWNLVIGFLFLTWIC

SEQ ID NO: 85478 - protein, 20 aa, Severe acute respiratory syndrome coronavirus 2
KLLEQWNLVIGFLFLTWICL

SEQ ID NO: 85479 - protein, 20 aa, Severe acute respiratory syndrome coronavirus 2
LLEQWNLVIGFLFLTWICLL

SEQ ID NO: 85480 - protein, 20 aa, Severe acute respiratory syndrome coronavirus 2
LEQWNLVIGFLFLTWICLLQ

SEQ ID NO: 85481 - protein, 20 aa, Severe acute respiratory syndrome coronavirus 2
EQWNLVIGFLFLTWICLLQF

SEQ ID NO: 85482 - protein, 20 aa, Severe acute respiratory syndrome coronavirus 2
QWNLVIGFLFLTWICLLQFA

SEQ ID NO: 85483 - protein, 20 aa, Severe acute respiratory syndrome coronavirus 2
WNLVIGFLFLTWICLLQFAY

SEQ ID NO: 85484 - protein, 20 aa, Severe acute respiratory syndrome coronavirus 2
IAMACLVGLMWLSYFIASFR

SEQ ID NO: 85485 - protein, 20 aa, Severe acute respiratory syndrome coronavirus 2
AMACLVGLMWLSYFIASFRL

SEQ ID NO: 85486 - protein, 20 aa, Severe acute respiratory syndrome coronavirus 2
MACLVGLMWLSYFIASFRLF

SEQ ID NO: 85487 - protein, 20 aa, Severe acute respiratory syndrome coronavirus 2
ACLVGLMWLSYFIASFRLFA

SEQ ID NO: 85488 - protein, 20 aa, Severe acute respiratory syndrome coronavirus 2
CLVGLMWLSYFIASFRLFAR

SEQ ID NO: 85489 - protein, 20 aa, Severe acute respiratory syndrome coronavirus 2
LVGLMWLSYFIASFRLFART

SEQ ID NO: 85490 - protein, 20 aa, Severe acute respiratory syndrome coronavirus 2
VGLMWLSYFIASFRLFARTR

SEQ ID NO: 85491 - protein, 20 aa, Severe acute respiratory syndrome coronavirus 2
GLMWLSYFIASFRLFARTRS

SEQ ID NO: 85492 - protein, 20 aa, Severe acute respiratory syndrome coronavirus 2
SFRLFARTRSMWSFNPETNI

SEQ ID NO: 85493 - protein, 20 aa, Severe acute respiratory syndrome coronavirus 2
FRLFARTRSMWSFNPETNIL

SEQ ID NO: 85494 - protein, 20 aa, Severe acute respiratory syndrome coronavirus 2
RLFARTRSMWSFNPETNILL

SEQ ID NO: 85495 - protein, 20 aa, Severe acute respiratory syndrome coronavirus 2
LFARTRSMWSFNPETNILLN

SEQ ID NO: 85496 - protein, 20 aa, Severe acute respiratory syndrome coronavirus 2
FARTRSMWSFNPETNILLNV

SEQ ID NO: 85497 - protein, 20 aa, Severe acute respiratory syndrome coronavirus 2
ARTRSMWSFNPETNILLNVP

SEQ ID NO: 85498 - protein, 20 aa, Severe acute respiratory syndrome coronavirus 2
RTRSMWSFNPETNILLNVPL

SEQ ID NO: 85499 - protein, 20 aa, Severe acute respiratory syndrome coronavirus 2
LLESELVIGAVILRGHLRIA

SEQ ID NO: 85500 - protein, 20 aa, Severe acute respiratory syndrome coronavirus 2
LESELVIGAVILRGHLRIAG

SEQ ID NO: 85501 - protein, 20 aa, Severe acute respiratory syndrome coronavirus 2
ESELVIGAVILRGHLRIAGH

SEQ ID NO: 85502 - protein, 20 aa, Severe acute respiratory syndrome coronavirus 2
LSYYKLGASQRVAGDSGFAA

SEQ ID NO: 85503 - protein, 20 aa, Severe acute respiratory syndrome coronavirus 2
SYYKLGASQRVAGDSGFAAY

SEQ ID NO: 85504 - protein, 20 aa, Severe acute respiratory syndrome coronavirus 2
YYKLGASQRVAGDSGFAAYS

SEQ ID NO: 85505 - protein, 20 aa, Severe acute respiratory syndrome coronavirus 2
YKLGASQRVAGDSGFAAYSR

SEQ ID NO: 85506 - protein, 20 aa, Severe acute respiratory syndrome coronavirus 2
KLGASQRVAGDSGFAAYSRY

SEQ ID NO: 85507 - protein, 20 aa, Severe acute respiratory syndrome coronavirus 2
LGASQRVAGDSGFAAYSRYR

SEQ ID NO: 85508 - protein, 20 aa, Severe acute respiratory syndrome coronavirus 2
GASQRVAGDSGFAAYSRYRI

SEQ ID NO: 85509 - protein, 20 aa, Severe acute respiratory syndrome coronavirus 2
ASQRVAGDSGFAAYSRYRIG

SEQ ID NO: 85510 - protein, 20 aa, Severe acute respiratory syndrome coronavirus 2
SQRVAGDSGFAAYSRYRIGN

SEQ ID NO: 85511 - protein, 20 aa, Severe acute respiratory syndrome coronavirus 2
QRVAGDSGFAAYSRYRIGNY

SEQ ID NO: 85512 - protein, 20 aa, Severe acute respiratory syndrome coronavirus 2
RVAGDSGFAAYSRYRIGNYK

SEQ ID NO: 85513 - protein, 20 aa, Severe acute respiratory syndrome coronavirus 2
VAGDSGFAAYSRYRIGNYKL

SEQ ID NO: 85514 - protein, 20 aa, Severe acute respiratory syndrome coronavirus 2
AGDSGFAAYSRYRIGNYKLN

SEQ ID NO: 85515 - protein, 21 aa, Severe acute respiratory syndrome coronavirus 2
EELKKLLEQWNLVIGFLFLTW

SEQ ID NO: 85516 - protein, 21 aa, Severe acute respiratory syndrome coronavirus 2
ELKKLLEQWNLVIGFLFLTWI

SEQ ID NO: 85517 - protein, 21 aa, Severe acute respiratory syndrome coronavirus 2
LKKLLEQWNLVIGFLFLTWIC

SEQ ID NO: 85518 - protein, 21 aa, Severe acute respiratory syndrome coronavirus 2
KKLLEQWNLVIGFLFLTWICL

SEQ ID NO: 85519 - protein, 21 aa, Severe acute respiratory syndrome coronavirus 2
KLLEQWNLVIGFLFLTWICLL

SEQ ID NO: 85520 - protein, 21 aa, Severe acute respiratory syndrome coronavirus 2
LLEQWNLVIGFLFLTWICLLQ

SEQ ID NO: 85521 - protein, 21 aa, Severe acute respiratory syndrome coronavirus 2
LEQWNLVIGFLFLTWICLLQF

SEQ ID NO: 85522 - protein, 21 aa, Severe acute respiratory syndrome coronavirus 2
EQWNLVIGFLFLTWICLLQFA

SEQ ID NO: 85523 - protein, 21 aa, Severe acute respiratory syndrome coronavirus 2
QWNLVIGFLFLTWICLLQFAY

SEQ ID NO: 85524 - protein, 21 aa, Severe acute respiratory syndrome coronavirus 2
IAMACLVGLMWLSYFIASFRL

SEQ ID NO: 85525 - protein, 21 aa, Severe acute respiratory syndrome coronavirus 2
AMACLVGLMWLSYFIASFRLF

SEQ ID NO: 85526 - protein, 21 aa, Severe acute respiratory syndrome coronavirus 2
MACLVGLMWLSYFIASFRLFA

SEQ ID NO: 85527 - protein, 21 aa, Severe acute respiratory syndrome coronavirus 2
ACLVGLMWLSYFIASFRLFAR

SEQ ID NO: 85528 - protein, 21 aa, Severe acute respiratory syndrome coronavirus 2
CLVGLMWLSYFIASFRLFART

SEQ ID NO: 85529 - protein, 21 aa, Severe acute respiratory syndrome coronavirus 2
LVGLMWLSYFIASFRLFARTR

SEQ ID NO: 85530 - protein, 21 aa, Severe acute respiratory syndrome coronavirus 2
VGLMWLSYFIASFRLFARTRS

SEQ ID NO: 85531 - protein, 21 aa, Severe acute respiratory syndrome coronavirus 2
SFRLFARTRSMWSFNPETNIL

SEQ ID NO: 85532 - protein, 21 aa, Severe acute respiratory syndrome coronavirus 2
FRLFARTRSMWSFNPETNILL

SEQ ID NO: 85533 - protein, 21 aa, Severe acute respiratory syndrome coronavirus 2
RLFARTRSMWSFNPETNILLN

SEQ ID NO: 85534 - protein, 21 aa, Severe acute respiratory syndrome coronavirus 2
LFARTRSMWSFNPETNILLNV

SEQ ID NO: 85535 - protein, 21 aa, Severe acute respiratory syndrome coronavirus 2
FARTRSMWSFNPETNILLNVP

SEQ ID NO: 85536 - protein, 21 aa, Severe acute respiratory syndrome coronavirus 2
ARTRSMWSFNPETNILLNVPL

SEQ ID NO: 85537 - protein, 21 aa, Severe acute respiratory syndrome coronavirus 2
LLESELVIGAVILRGHLRIAG

SEQ ID NO: 85538 - protein, 21 aa, Severe acute respiratory syndrome coronavirus 2
LESELVIGAVILRGHLRIAGH

SEQ ID NO: 85539 - protein, 21 aa, Severe acute respiratory syndrome coronavirus 2
LSYYKLGASQRVAGDSGFAAY

SEQ ID NO: 85540 - protein, 21 aa, Severe acute respiratory syndrome coronavirus 2
SYYKLGASQRVAGDSGFAAYS

SEQ ID NO: 85541 - protein, 21 aa, Severe acute respiratory syndrome coronavirus 2
YYKLGASQRVAGDSGFAAYSR

SEQ ID NO: 85542 - protein, 21 aa, Severe acute respiratory syndrome coronavirus 2
YKLGASQRVAGDSGFAAYSRY

SEQ ID NO: 85543 - protein, 21 aa, Severe acute respiratory syndrome coronavirus 2
KLGASQRVAGDSGFAAYSRYR

SEQ ID NO: 85544 - protein, 21 aa, Severe acute respiratory syndrome coronavirus 2
LGASQRVAGDSGFAAYSRYRI

SEQ ID NO: 85545 - protein, 21 aa, Severe acute respiratory syndrome coronavirus 2
GASQRVAGDSGFAAYSRYRIG

SEQ ID NO: 85546 - protein, 21 aa, Severe acute respiratory syndrome coronavirus 2
ASQRVAGDSGFAAYSRYRIGN

SEQ ID NO: 85547 - protein, 21 aa, Severe acute respiratory syndrome coronavirus 2
SQRVAGDSGFAAYSRYRIGNY

SEQ ID NO: 85548 - protein, 21 aa, Severe acute respiratory syndrome coronavirus 2
QRVAGDSGFAAYSRYRIGNYK

SEQ ID NO: 85549 - protein, 21 aa, Severe acute respiratory syndrome coronavirus 2
RVAGDSGFAAYSRYRIGNYKL

SEQ ID NO: 85550 - protein, 21 aa, Severe acute respiratory syndrome coronavirus 2
VAGDSGFAAYSRYRIGNYKLN

SEQ ID NO: 85551 - protein, 22 aa, Severe acute respiratory syndrome coronavirus 2
EELKKLLEQWNLVIGFLFLTWI

SEQ ID NO: 85552 - protein, 22 aa, Severe acute respiratory syndrome coronavirus 2
ELKKLLEQWNLVIGFLFLTWIC

SEQ ID NO: 85553 - protein, 22 aa, Severe acute respiratory syndrome coronavirus 2
LKKLLEQWNLVIGFLFLTWICL

SEQ ID NO: 85554 - protein, 22 aa, Severe acute respiratory syndrome coronavirus 2
KKLLEQWNLVIGFLFLTWICLL

SEQ ID NO: 85555 - protein, 22 aa, Severe acute respiratory syndrome coronavirus 2
KLLEQWNLVIGFLFLTWICLLQ

SEQ ID NO: 85556 - protein, 22 aa, Severe acute respiratory syndrome coronavirus 2
LLEQWNLVIGFLFLTWICLLQF

SEQ ID NO: 85557 - protein, 22 aa, Severe acute respiratory syndrome coronavirus 2
LEQWNLVIGFLFLTWICLLQFA

SEQ ID NO: 85558 - protein, 22 aa, Severe acute respiratory syndrome coronavirus 2
EQWNLVIGFLFLTWICLLQFAY

SEQ ID NO: 85559 - protein, 22 aa, Severe acute respiratory syndrome coronavirus 2
IAMACLVGLMWLSYFIASFRLF

SEQ ID NO: 85560 - protein, 22 aa, Severe acute respiratory syndrome coronavirus 2
AMACLVGLMWLSYFIASFRLFA

SEQ ID NO: 85561 - protein, 22 aa, Severe acute respiratory syndrome coronavirus 2
MACLVGLMWLSYFIASFRLFAR

SEQ ID NO: 85562 - protein, 22 aa, Severe acute respiratory syndrome coronavirus 2
ACLVGLMWLSYFIASFRLFART

SEQ ID NO: 85563 - protein, 22 aa, Severe acute respiratory syndrome coronavirus 2
CLVGLMWLSYFIASFRLFARTR

SEQ ID NO: 85564 - protein, 22 aa, Severe acute respiratory syndrome coronavirus 2
LVGLMWLSYFIASFRLFARTRS

SEQ ID NO: 85565 - protein, 22 aa, Severe acute respiratory syndrome coronavirus 2
SFRLFARTRSMWSFNPETNILL

SEQ ID NO: 85566 - protein, 22 aa, Severe acute respiratory syndrome coronavirus 2
FRLFARTRSMWSFNPETNILLN

SEQ ID NO: 85567 - protein, 22 aa, Severe acute respiratory syndrome coronavirus 2
RLFARTRSMWSFNPETNILLNV

SEQ ID NO: 85568 - protein, 22 aa, Severe acute respiratory syndrome coronavirus 2
LFARTRSMWSFNPETNILLNVP

SEQ ID NO: 85569 - protein, 22 aa, Severe acute respiratory syndrome coronavirus 2
FARTRSMWSFNPETNILLNVPL

SEQ ID NO: 85570 - protein, 22 aa, Severe acute respiratory syndrome coronavirus 2
LLESELVIGAVILRGHLRIAGH

SEQ ID NO: 85571 - protein, 22 aa, Severe acute respiratory syndrome coronavirus 2
LSYYKLGASQRVAGDSGFAAYS

SEQ ID NO: 85572 - protein, 22 aa, Severe acute respiratory syndrome coronavirus 2
SYYKLGASQRVAGDSGFAAYSR

SEQ ID NO: 85573 - protein, 22 aa, Severe acute respiratory syndrome coronavirus 2
YYKLGASQRVAGDSGFAAYSRY

SEQ ID NO: 85574 - protein, 22 aa, Severe acute respiratory syndrome coronavirus 2
YKLGASQRVAGDSGFAAYSRYR

SEQ ID NO: 85575 - protein, 22 aa, Severe acute respiratory syndrome coronavirus 2
KLGASQRVAGDSGFAAYSRYRI

SEQ ID NO: 85576 - protein, 22 aa, Severe acute respiratory syndrome coronavirus 2
LGASQRVAGDSGFAAYSRYRIG

SEQ ID NO: 85577 - protein, 22 aa, Severe acute respiratory syndrome coronavirus 2
GASQRVAGDSGFAAYSRYRIGN

SEQ ID NO: 85578 - protein, 22 aa, Severe acute respiratory syndrome coronavirus 2
ASQRVAGDSGFAAYSRYRIGNY

SEQ ID NO: 85579 - protein, 22 aa, Severe acute respiratory syndrome coronavirus 2
SQRVAGDSGFAAYSRYRIGNYK

SEQ ID NO: 85580 - protein, 22 aa, Severe acute respiratory syndrome coronavirus 2
QRVAGDSGFAAYSRYRIGNYKL

SEQ ID NO: 85581 - protein, 22 aa, Severe acute respiratory syndrome coronavirus 2
RVAGDSGFAAYSRYRIGNYKLN

SEQ ID NO: 85582 - protein, 23 aa, Severe acute respiratory syndrome coronavirus 2
EELKKLLEQWNLVIGFLFLTWIC

SEQ ID NO: 85583 - protein, 23 aa, Severe acute respiratory syndrome coronavirus 2
ELKKLLEQWNLVIGFLFLTWICL

SEQ ID NO: 85584 - protein, 23 aa, Severe acute respiratory syndrome coronavirus 2
LKKLLEQWNLVIGFLFLTWICLL

SEQ ID NO: 85585 - protein, 23 aa, Severe acute respiratory syndrome coronavirus 2
KKLLEQWNLVIGFLFLTWICLLQ

SEQ ID NO: 85586 - protein, 23 aa, Severe acute respiratory syndrome coronavirus 2
KLLEQWNLVIGFLFLTWICLLQF

SEQ ID NO: 85587 - protein, 23 aa, Severe acute respiratory syndrome coronavirus 2
LLEQWNLVIGFLFLTWICLLQFA

SEQ ID NO: 85588 - protein, 23 aa, Severe acute respiratory syndrome coronavirus 2
LEQWNLVIGFLFLTWICLLQFAY

SEQ ID NO: 85589 - protein, 23 aa, Severe acute respiratory syndrome coronavirus 2
IAMACLVGLMWLSYFIASFRLFA

SEQ ID NO: 85590 - protein, 23 aa, Severe acute respiratory syndrome coronavirus 2
AMACLVGLMWLSYFIASFRLFAR

SEQ ID NO: 85591 - protein, 23 aa, Severe acute respiratory syndrome coronavirus 2
MACLVGLMWLSYFIASFRLFART

SEQ ID NO: 85592 - protein, 23 aa, Severe acute respiratory syndrome coronavirus 2
ACLVGLMWLSYFIASFRLFARTR

SEQ ID NO: 85593 - protein, 23 aa, Severe acute respiratory syndrome coronavirus 2
CLVGLMWLSYFIASFRLFARTRS

SEQ ID NO: 85594 - protein, 23 aa, Severe acute respiratory syndrome coronavirus 2
SFRLFARTRSMWSFNPETNILLN

SEQ ID NO: 85595 - protein, 23 aa, Severe acute respiratory syndrome coronavirus 2
FRLFARTRSMWSFNPETNILLNV

SEQ ID NO: 85596 - protein, 23 aa, Severe acute respiratory syndrome coronavirus 2
RLFARTRSMWSFNPETNILLNVP

SEQ ID NO: 85597 - protein, 23 aa, Severe acute respiratory syndrome coronavirus 2
LFARTRSMWSFNPETNILLNVPL

SEQ ID NO: 85598 - protein, 23 aa, Severe acute respiratory syndrome coronavirus 2
LSYYKLGASQRVAGDSGFAAYSR

SEQ ID NO: 85599 - protein, 23 aa, Severe acute respiratory syndrome coronavirus 2
SYYKLGASQRVAGDSGFAAYSRY

SEQ ID NO: 85600 - protein, 23 aa, Severe acute respiratory syndrome coronavirus 2
YYKLGASQRVAGDSGFAAYSRYR

SEQ ID NO: 85601 - protein, 23 aa, Severe acute respiratory syndrome coronavirus 2
YKLGASQRVAGDSGFAAYSRYRI

SEQ ID NO: 85602 - protein, 23 aa, Severe acute respiratory syndrome coronavirus 2
KLGASQRVAGDSGFAAYSRYRIG

SEQ ID NO: 85603 - protein, 23 aa, Severe acute respiratory syndrome coronavirus 2
LGASQRVAGDSGFAAYSRYRIGN

SEQ ID NO: 85604 - protein, 23 aa, Severe acute respiratory syndrome coronavirus 2
GASQRVAGDSGFAAYSRYRIGNY

SEQ ID NO: 85605 - protein, 23 aa, Severe acute respiratory syndrome coronavirus 2
ASQRVAGDSGFAAYSRYRIGNYK

SEQ ID NO: 85606 - protein, 23 aa, Severe acute respiratory syndrome coronavirus 2
SQRVAGDSGFAAYSRYRIGNYKL

SEQ ID NO: 85607 - protein, 23 aa, Severe acute respiratory syndrome coronavirus 2
QRVAGDSGFAAYSRYRIGNYKLN

SEQ ID NO: 85608 - protein, 24 aa, Severe acute respiratory syndrome coronavirus 2
EELKKLLEQWNLVIGFLFLTWICL

SEQ ID NO: 85609 - protein, 24 aa, Severe acute respiratory syndrome coronavirus 2
ELKKLLEQWNLVIGFLFLTWICLL

SEQ ID NO: 85610 - protein, 24 aa, Severe acute respiratory syndrome coronavirus 2
LKKLLEQWNLVIGFLFLTWICLLQ

SEQ ID NO: 85611 - protein, 24 aa, Severe acute respiratory syndrome coronavirus 2
KKLLEQWNLVIGFLFLTWICLLQF

SEQ ID NO: 85612 - protein, 24 aa, Severe acute respiratory syndrome coronavirus 2
KLLEQWNLVIGFLFLTWICLLQFA

SEQ ID NO: 85613 - protein, 24 aa, Severe acute respiratory syndrome coronavirus 2
LLEQWNLVIGFLFLTWICLLQFAY

SEQ ID NO: 85614 - protein, 24 aa, Severe acute respiratory syndrome coronavirus 2
IAMACLVGLMWLSYFIASFRLFAR

SEQ ID NO: 85615 - protein, 24 aa, Severe acute respiratory syndrome coronavirus 2
AMACLVGLMWLSYFIASFRLFART

SEQ ID NO: 85616 - protein, 24 aa, Severe acute respiratory syndrome coronavirus 2
MACLVGLMWLSYFIASFRLFARTR

SEQ ID NO: 85617 - protein, 24 aa, Severe acute respiratory syndrome coronavirus 2
ACLVGLMWLSYFIASFRLFARTRS

SEQ ID NO: 85618 - protein, 24 aa, Severe acute respiratory syndrome coronavirus 2
SFRLFARTRSMWSFNPETNILLNV

SEQ ID NO: 85619 - protein, 24 aa, Severe acute respiratory syndrome coronavirus 2
FRLFARTRSMWSFNPETNILLNVP

SEQ ID NO: 85620 - protein, 24 aa, Severe acute respiratory syndrome coronavirus 2
RLFARTRSMWSFNPETNILLNVPL

SEQ ID NO: 85621 - protein, 24 aa, Severe acute respiratory syndrome coronavirus 2
LSYYKLGASQRVAGDSGFAAYSRY

SEQ ID NO: 85622 - protein, 24 aa, Severe acute respiratory syndrome coronavirus 2
SYYKLGASQRVAGDSGFAAYSRYR

SEQ ID NO: 85623 - protein, 24 aa, Severe acute respiratory syndrome coronavirus 2
YYKLGASQRVAGDSGFAAYSRYRI

SEQ ID NO: 85624 - protein, 24 aa, Severe acute respiratory syndrome coronavirus 2
YKLGASQRVAGDSGFAAYSRYRIG

SEQ ID NO: 85625 - protein, 24 aa, Severe acute respiratory syndrome coronavirus 2
KLGASQRVAGDSGFAAYSRYRIGN

SEQ ID NO: 85626 - protein, 24 aa, Severe acute respiratory syndrome coronavirus 2
LGASQRVAGDSGFAAYSRYRIGNY

SEQ ID NO: 85627 - protein, 24 aa, Severe acute respiratory syndrome coronavirus 2
GASQRVAGDSGFAAYSRYRIGNYK

SEQ ID NO: 85628 - protein, 24 aa, Severe acute respiratory syndrome coronavirus 2
ASQRVAGDSGFAAYSRYRIGNYKL

SEQ ID NO: 85629 - protein, 24 aa, Severe acute respiratory syndrome coronavirus 2
SQRVAGDSGFAAYSRYRIGNYKLN

SEQ ID NO: 85630 - protein, 25 aa, Severe acute respiratory syndrome coronavirus 2
EELKKLLEQWNLVIGFLFLTWICLL

SEQ ID NO: 85631 - protein, 25 aa, Severe acute respiratory syndrome coronavirus 2
ELKKLLEQWNLVIGFLFLTWICLLQ

SEQ ID NO: 85632 - protein, 25 aa, Severe acute respiratory syndrome coronavirus 2
LKKLLEQWNLVIGFLFLTWICLLQF

SEQ ID NO: 85633 - protein, 25 aa, Severe acute respiratory syndrome coronavirus 2
KKLLEQWNLVIGFLFLTWICLLQFA

SEQ ID NO: 85634 - protein, 25 aa, Severe acute respiratory syndrome coronavirus 2
KLLEQWNLVIGFLFLTWICLLQFAY

SEQ ID NO: 85635 - protein, 25 aa, Severe acute respiratory syndrome coronavirus 2
IAMACLVGLMWLSYFIASFRLFART

SEQ ID NO: 85636 - protein, 25 aa, Severe acute respiratory syndrome coronavirus 2
AMACLVGLMWLSYFIASFRLFARTR

SEQ ID NO: 85637 - protein, 25 aa, Severe acute respiratory syndrome coronavirus 2
MACLVGLMWLSYFIASFRLFARTRS

SEQ ID NO: 85638 - protein, 25 aa, Severe acute respiratory syndrome coronavirus 2
SFRLFARTRSMWSFNPETNILLNVP

SEQ ID NO: 85639 - protein, 25 aa, Severe acute respiratory syndrome coronavirus 2
FRLFARTRSMWSFNPETNILLNVPL

SEQ ID NO: 85640 - protein, 25 aa, Severe acute respiratory syndrome coronavirus 2
LSYYKLGASQRVAGDSGFAAYSRYR

SEQ ID NO: 85641 - protein, 25 aa, Severe acute respiratory syndrome coronavirus 2
SYYKLGASQRVAGDSGFAAYSRYRI

SEQ ID NO: 85642 - protein, 25 aa, Severe acute respiratory syndrome coronavirus 2
YYKLGASQRVAGDSGFAAYSRYRIG

SEQ ID NO: 85643 - protein, 25 aa, Severe acute respiratory syndrome coronavirus 2
YKLGASQRVAGDSGFAAYSRYRIGN

SEQ ID NO: 85644 - protein, 25 aa, Severe acute respiratory syndrome coronavirus 2
KLGASQRVAGDSGFAAYSRYRIGNY

SEQ ID NO: 85645 - protein, 25 aa, Severe acute respiratory syndrome coronavirus 2
LGASQRVAGDSGFAAYSRYRIGNYK

SEQ ID NO: 85646 - protein, 25 aa, Severe acute respiratory syndrome coronavirus 2
GASQRVAGDSGFAAYSRYRIGNYKL

SEQ ID NO: 85647 - protein, 25 aa, Severe acute respiratory syndrome coronavirus 2
ASQRVAGDSGFAAYSRYRIGNYKLN

SEQ ID NO: 85648 - protein, 13 aa, Severe acute respiratory syndrome coronavirus 2
NTASWFTALTQHG

SEQ ID NO: 85649 - protein, 13 aa, Severe acute respiratory syndrome coronavirus 2
TASWFTALTQHGK

SEQ ID NO: 85650 - protein, 13 aa, Severe acute respiratory syndrome coronavirus 2
ASWFTALTQHGKE

SEQ ID NO: 85651 - protein, 13 aa, Severe acute respiratory syndrome coronavirus 2
SWFTALTQHGKED

SEQ ID NO: 85652 - protein, 13 aa, Severe acute respiratory syndrome coronavirus 2
QIGYYRRATRRIR

SEQ ID NO: 85653 - protein, 13 aa, Severe acute respiratory syndrome coronavirus 2
IGYYRRATRRIRG

SEQ ID NO: 85654 - protein, 13 aa, Severe acute respiratory syndrome coronavirus 2
GYYRRATRRIRGG

SEQ ID NO: 85655 - protein, 13 aa, Severe acute respiratory syndrome coronavirus 2
YYRRATRRIRGGD

SEQ ID NO: 85656 - protein, 13 aa, Severe acute respiratory syndrome coronavirus 2
LSPRWYFYYLGTG

SEQ ID NO: 85657 - protein, 13 aa, Severe acute respiratory syndrome coronavirus 2
PRWYFYYLGTGPE

SEQ ID NO: 85658 - protein, 13 aa, Severe acute respiratory syndrome coronavirus 2
GDAALALLLLDRL

SEQ ID NO: 85659 - protein, 13 aa, Severe acute respiratory syndrome coronavirus 2
LALLLLDRLNQLE

SEQ ID NO: 85660 - protein, 13 aa, Severe acute respiratory syndrome coronavirus 2
WPQIAQFAPSASA

SEQ ID NO: 85661 - protein, 13 aa, Severe acute respiratory syndrome coronavirus 2
PQIAQFAPSASAF

SEQ ID NO: 85662 - protein, 13 aa, Severe acute respiratory syndrome coronavirus 2
QIAQFAPSASAFF

SEQ ID NO: 85663 - protein, 13 aa, Severe acute respiratory syndrome coronavirus 2
IAQFAPSASAFFG

SEQ ID NO: 85664 - protein, 13 aa, Severe acute respiratory syndrome coronavirus 2
AQFAPSASAFFGM

SEQ ID NO: 85665 - protein, 13 aa, Severe acute respiratory syndrome coronavirus 2
QFAPSASAFFGMS

SEQ ID NO: 85666 - protein, 13 aa, Severe acute respiratory syndrome coronavirus 2
NFKDQVILLNKHI

SEQ ID NO: 85667 - protein, 13 aa, Severe acute respiratory syndrome coronavirus 2
FKDQVILLNKHID

SEQ ID NO: 85668 - protein, 13 aa, Severe acute respiratory syndrome coronavirus 2
KDQVILLNKHIDA

SEQ ID NO: 85669 - protein, 13 aa, Severe acute respiratory syndrome coronavirus 2
DQVILLNKHIDAY

SEQ ID NO: 85670 - protein, 13 aa, Severe acute respiratory syndrome coronavirus 2
QVILLNKHIDAYK

SEQ ID NO: 85671 - protein, 13 aa, Severe acute respiratory syndrome coronavirus 2
VILLNKHIDAYKT

SEQ ID NO: 85672 - protein, 13 aa, Severe acute respiratory syndrome coronavirus 2
ILLNKHIDAYKTF

SEQ ID NO: 85673 - protein, 13 aa, Severe acute respiratory syndrome coronavirus 2
NKHIDAYKTFPPT

SEQ ID NO: 85674 - protein, 14 aa, Severe acute respiratory syndrome coronavirus 2
NTASWFTALTQHGK

SEQ ID NO: 85675 - protein, 14 aa, Severe acute respiratory syndrome coronavirus 2
TASWFTALTQHGKE

SEQ ID NO: 85676 - protein, 14 aa, Severe acute respiratory syndrome coronavirus 2
ASWFTALTQHGKED

SEQ ID NO: 85677 - protein, 14 aa, Severe acute respiratory syndrome coronavirus 2
SWFTALTQHGKEDL

SEQ ID NO: 85678 - protein, 14 aa, Severe acute respiratory syndrome coronavirus 2
QIGYYRRATRRIRG

SEQ ID NO: 85679 - protein, 14 aa, Severe acute respiratory syndrome coronavirus 2
IGYYRRATRRIRGG

SEQ ID NO: 85680 - protein, 14 aa, Severe acute respiratory syndrome coronavirus 2
GYYRRATRRIRGGD

SEQ ID NO: 85681 - protein, 14 aa, Severe acute respiratory syndrome coronavirus 2
YYRRATRRIRGGDG

SEQ ID NO: 85682 - protein, 14 aa, Severe acute respiratory syndrome coronavirus 2
YRRATRRIRGGDGK

SEQ ID NO: 85683 - protein, 14 aa, Severe acute respiratory syndrome coronavirus 2
LSPRWYFYYLGTGP

SEQ ID NO: 85684 - protein, 14 aa, Severe acute respiratory syndrome coronavirus 2
SPRWYFYYLGTGPE

SEQ ID NO: 85685 - protein, 14 aa, Severe acute respiratory syndrome coronavirus 2
KHWPQIAQFAPSAS

SEQ ID NO: 85686 - protein, 14 aa, Severe acute respiratory syndrome coronavirus 2
HWPQIAQFAPSASA

SEQ ID NO: 85687 - protein, 14 aa, Severe acute respiratory syndrome coronavirus 2
WPQIAQFAPSASAF

SEQ ID NO: 85688 - protein, 14 aa, Severe acute respiratory syndrome coronavirus 2
PQIAQFAPSASAFF

SEQ ID NO: 85689 - protein, 14 aa, Severe acute respiratory syndrome coronavirus 2
QIAQFAPSASAFFG

SEQ ID NO: 85690 - protein, 14 aa, Severe acute respiratory syndrome coronavirus 2
IAQFAPSASAFFGM

SEQ ID NO: 85691 - protein, 14 aa, Severe acute respiratory syndrome coronavirus 2
AQFAPSASAFFGMS

SEQ ID NO: 85692 - protein, 14 aa, Severe acute respiratory syndrome coronavirus 2
NFKDQVILLNKHID

SEQ ID NO: 85693 - protein, 14 aa, Severe acute respiratory syndrome coronavirus 2
FKDQVILLNKHIDA

SEQ ID NO: 85694 - protein, 14 aa, Severe acute respiratory syndrome coronavirus 2
KDQVILLNKHIDAY

SEQ ID NO: 85695 - protein, 14 aa, Severe acute respiratory syndrome coronavirus 2
DQVILLNKHIDAYK

SEQ ID NO: 85696 - protein, 14 aa, Severe acute respiratory syndrome coronavirus 2
QVILLNKHIDAYKT

SEQ ID NO: 85697 - protein, 14 aa, Severe acute respiratory syndrome coronavirus 2
VILLNKHIDAYKTF

SEQ ID NO: 85698 - protein, 14 aa, Severe acute respiratory syndrome coronavirus 2
ILLNKHIDAYKTFP

SEQ ID NO: 85699 - protein, 14 aa, Severe acute respiratory syndrome coronavirus 2
LLNKHIDAYKTFPP

SEQ ID NO: 85700 - protein, 14 aa, Severe acute respiratory syndrome coronavirus 2
LNKHIDAYKTFPPT

SEQ ID NO: 85701 - protein, 15 aa, Severe acute respiratory syndrome coronavirus 2
NTASWFTALTQHGKE

SEQ ID NO: 85702 - protein, 15 aa, Severe acute respiratory syndrome coronavirus 2
TASWFTALTQHGKED

SEQ ID NO: 85703 - protein, 15 aa, Severe acute respiratory syndrome coronavirus 2
ASWFTALTQHGKEDL

SEQ ID NO: 85704 - protein, 15 aa, Severe acute respiratory syndrome coronavirus 2
SWFTALTQHGKEDLK

SEQ ID NO: 85705 - protein, 15 aa, Severe acute respiratory syndrome coronavirus 2
WFTALTQHGKEDLKF

SEQ ID NO: 85706 - protein, 15 aa, Severe acute respiratory syndrome coronavirus 2
QIGYYRRATRRIRGG

SEQ ID NO: 85707 - protein, 15 aa, Severe acute respiratory syndrome coronavirus 2
IGYYRRATRRIRGGD

SEQ ID NO: 85708 - protein, 15 aa, Severe acute respiratory syndrome coronavirus 2
GYYRRATRRIRGGDG

SEQ ID NO: 85709 - protein, 15 aa, Severe acute respiratory syndrome coronavirus 2
YYRRATRRIRGGDGK

SEQ ID NO: 85710 - protein, 15 aa, Severe acute respiratory syndrome coronavirus 2
YRRATRRIRGGDGKM

SEQ ID NO: 85711 - protein, 15 aa, Severe acute respiratory syndrome coronavirus 2
LSPRWYFYYLGTGPE

SEQ ID NO: 85712 - protein, 15 aa, Severe acute respiratory syndrome coronavirus 2
KHWPQIAQFAPSASA

SEQ ID NO: 85713 - protein, 15 aa, Severe acute respiratory syndrome coronavirus 2
HWPQIAQFAPSASAF

SEQ ID NO: 85714 - protein, 15 aa, Severe acute respiratory syndrome coronavirus 2
WPQIAQFAPSASAFF

SEQ ID NO: 85715 - protein, 15 aa, Severe acute respiratory syndrome coronavirus 2
PQIAQFAPSASAFFG

SEQ ID NO: 85716 - protein, 15 aa, Severe acute respiratory syndrome coronavirus 2
QIAQFAPSASAFFGM

SEQ ID NO: 85717 - protein, 15 aa, Severe acute respiratory syndrome coronavirus 2
IAQFAPSASAFFGMS

SEQ ID NO: 85718 - protein, 15 aa, Severe acute respiratory syndrome coronavirus 2
NFKDQVILLNKHIDA

SEQ ID NO: 85719 - protein, 15 aa, Severe acute respiratory syndrome coronavirus 2
FKDQVILLNKHIDAY

SEQ ID NO: 85720 - protein, 15 aa, Severe acute respiratory syndrome coronavirus 2
KDQVILLNKHIDAYK

SEQ ID NO: 85721 - protein, 15 aa, Severe acute respiratory syndrome coronavirus 2
DQVILLNKHIDAYKT

SEQ ID NO: 85722 - protein, 15 aa, Severe acute respiratory syndrome coronavirus 2
QVILLNKHIDAYKTF

SEQ ID NO: 85723 - protein, 15 aa, Severe acute respiratory syndrome coronavirus 2
VILLNKHIDAYKTFP

SEQ ID NO: 85724 - protein, 15 aa, Severe acute respiratory syndrome coronavirus 2
ILLNKHIDAYKTFPP

SEQ ID NO: 85725 - protein, 15 aa, Severe acute respiratory syndrome coronavirus 2
LLNKHIDAYKTFPPT

SEQ ID NO: 85726 - protein, 16 aa, Severe acute respiratory syndrome coronavirus 2
NTASWFTALTQHGKED

SEQ ID NO: 85727 - protein, 16 aa, Severe acute respiratory syndrome coronavirus 2
TASWFTALTQHGKEDL

SEQ ID NO: 85728 - protein, 16 aa, Severe acute respiratory syndrome coronavirus 2
ASWFTALTQHGKEDLK

SEQ ID NO: 85729 - protein, 16 aa, Severe acute respiratory syndrome coronavirus 2
SWFTALTQHGKEDLKF

SEQ ID NO: 85730 - protein, 16 aa, Severe acute respiratory syndrome coronavirus 2
QIGYYRRATRRIRGGD

SEQ ID NO: 85731 - protein, 16 aa, Severe acute respiratory syndrome coronavirus 2
IGYYRRATRRIRGGDG

SEQ ID NO: 85732 - protein, 16 aa, Severe acute respiratory syndrome coronavirus 2
GYYRRATRRIRGGDGK

SEQ ID NO: 85733 - protein, 16 aa, Severe acute respiratory syndrome coronavirus 2
YYRRATRRIRGGDGKM

SEQ ID NO: 85734 - protein, 16 aa, Severe acute respiratory syndrome coronavirus 2
YRRATRRIRGGDGKMK

SEQ ID NO: 85735 - protein, 16 aa, Severe acute respiratory syndrome coronavirus 2
KHWPQIAQFAPSASAF

SEQ ID NO: 85736 - protein, 16 aa, Severe acute respiratory syndrome coronavirus 2
HWPQIAQFAPSASAFF

SEQ ID NO: 85737 - protein, 16 aa, Severe acute respiratory syndrome coronavirus 2
WPQIAQFAPSASAFFG

SEQ ID NO: 85738 - protein, 16 aa, Severe acute respiratory syndrome coronavirus 2
PQIAQFAPSASAFFGM

SEQ ID NO: 85739 - protein, 16 aa, Severe acute respiratory syndrome coronavirus 2
QIAQFAPSASAFFGMS

SEQ ID NO: 85740 - protein, 16 aa, Severe acute respiratory syndrome coronavirus 2
NFKDQVILLNKHIDAY

SEQ ID NO: 85741 - protein, 16 aa, Severe acute respiratory syndrome coronavirus 2
FKDQVILLNKHIDAYK

SEQ ID NO: 85742 - protein, 16 aa, Severe acute respiratory syndrome coronavirus 2
DQVILLNKHIDAYKTF

SEQ ID NO: 85743 - protein, 16 aa, Severe acute respiratory syndrome coronavirus 2
QVILLNKHIDAYKTFP

SEQ ID NO: 85744 - protein, 16 aa, Severe acute respiratory syndrome coronavirus 2
ILLNKHIDAYKTFPPT

SEQ ID NO: 85745 - protein, 17 aa, Severe acute respiratory syndrome coronavirus 2
NTASWFTALTQHGKEDL

SEQ ID NO: 85746 - protein, 17 aa, Severe acute respiratory syndrome coronavirus 2
TASWFTALTQHGKEDLK

SEQ ID NO: 85747 - protein, 17 aa, Severe acute respiratory syndrome coronavirus 2
ASWFTALTQHGKEDLKF

SEQ ID NO: 85748 - protein, 17 aa, Severe acute respiratory syndrome coronavirus 2
QIGYYRRATRRIRGGDG

SEQ ID NO: 85749 - protein, 17 aa, Severe acute respiratory syndrome coronavirus 2
IGYYRRATRRIRGGDGK

SEQ ID NO: 85750 - protein, 17 aa, Severe acute respiratory syndrome coronavirus 2
GYYRRATRRIRGGDGKM

SEQ ID NO: 85751 - protein, 17 aa, Severe acute respiratory syndrome coronavirus 2
YYRRATRRIRGGDGKMK

SEQ ID NO: 85752 - protein, 17 aa, Severe acute respiratory syndrome coronavirus 2
KHWPQIAQFAPSASAFF

SEQ ID NO: 85753 - protein, 17 aa, Severe acute respiratory syndrome coronavirus 2
WPQIAQFAPSASAFFGM

SEQ ID NO: 85754 - protein, 17 aa, Severe acute respiratory syndrome coronavirus 2
PQIAQFAPSASAFFGMS

SEQ ID NO: 85755 - protein, 17 aa, Severe acute respiratory syndrome coronavirus 2
NFKDQVILLNKHIDAYK

SEQ ID NO: 85756 - protein, 17 aa, Severe acute respiratory syndrome coronavirus 2
DQVILLNKHIDAYKTFP

SEQ ID NO: 85757 - protein, 18 aa, Severe acute respiratory syndrome coronavirus 2
NTASWFTALTQHGKEDLK

SEQ ID NO: 85758 - protein, 18 aa, Severe acute respiratory syndrome coronavirus 2
TASWFTALTQHGKEDLKF

SEQ ID NO: 85759 - protein, 18 aa, Severe acute respiratory syndrome coronavirus 2
QIGYYRRATRRIRGGDGK

SEQ ID NO: 85760 - protein, 18 aa, Severe acute respiratory syndrome coronavirus 2
IGYYRRATRRIRGGDGKM

SEQ ID NO: 85761 - protein, 18 aa, Severe acute respiratory syndrome coronavirus 2
GYYRRATRRIRGGDGKMK

SEQ ID NO: 85762 - protein, 18 aa, Severe acute respiratory syndrome coronavirus 2
WPQIAQFAPSASAFFGMS

SEQ ID NO: 85763 - protein, 19 aa, Severe acute respiratory syndrome coronavirus 2
NTASWFTALTQHGKEDLKF

SEQ ID NO: 85764 - protein, 19 aa, Severe acute respiratory syndrome coronavirus 2
QIGYYRRATRRIRGGDGKM

SEQ ID NO: 85765 - protein, 19 aa, Severe acute respiratory syndrome coronavirus 2
IGYYRRATRRIRGGDGKMK

SEQ ID NO: 85766 - protein, 20 aa, Severe acute respiratory syndrome coronavirus 2
QIGYYRRATRRIRGGDGKMK

SEQ ID NO: 85767 - protein, 13 aa, Severe acute respiratory syndrome coronavirus 2
DGYPLECIKDLLA

SEQ ID NO: 85768 - protein, 13 aa, Severe acute respiratory syndrome coronavirus 2
SEKSYELQTPFEI

SEQ ID NO: 85769 - protein, 13 aa, Severe acute respiratory syndrome coronavirus 2
EKSYELQTPFEIK

SEQ ID NO: 85770 - protein, 13 aa, Severe acute respiratory syndrome coronavirus 2
KSYELQTPFEIKL

SEQ ID NO: 85771 - protein, 13 aa, Severe acute respiratory syndrome coronavirus 2
SYELQTPFEIKLA

SEQ ID NO: 85772 - protein, 13 aa, Severe acute respiratory syndrome coronavirus 2
IAFGGCVFSYVGC

SEQ ID NO: 85773 - protein, 13 aa, Severe acute respiratory syndrome coronavirus 2
QKEKVNINIVGDF

SEQ ID NO: 85774 - protein, 13 aa, Severe acute respiratory syndrome coronavirus 2
KEKVNINIVGDFK

SEQ ID NO: 85775 - protein, 13 aa, Severe acute respiratory syndrome coronavirus 2
EKVNINIVGDFKL

SEQ ID NO: 85776 - protein, 13 aa, Severe acute respiratory syndrome coronavirus 2
KVNINIVGDFKLN

SEQ ID NO: 85777 - protein, 13 aa, Severe acute respiratory syndrome coronavirus 2
VNINIVGDFKLNE

SEQ ID NO: 85778 - protein, 13 aa, Severe acute respiratory syndrome coronavirus 2
NINIVGDFKLNEE

SEQ ID NO: 85779 - protein, 13 aa, Severe acute respiratory syndrome coronavirus 2
INIVGDFKLNEEI

SEQ ID NO: 85780 - protein, 13 aa, Severe acute respiratory syndrome coronavirus 2
NIVGDFKLNEEIA

SEQ ID NO: 85781 - protein, 13 aa, Severe acute respiratory syndrome coronavirus 2
IVGDFKLNEEIAI

SEQ ID NO: 85782 - protein, 13 aa, Severe acute respiratory syndrome coronavirus 2
VGDFKLNEEIAII

SEQ ID NO: 85783 - protein, 13 aa, Severe acute respiratory syndrome coronavirus 2
GDFKLNEEIAIIL

SEQ ID NO: 85784 - protein, 13 aa, Severe acute respiratory syndrome coronavirus 2
DFKLNEEIAIILA

SEQ ID NO: 85785 - protein, 13 aa, Severe acute respiratory syndrome coronavirus 2
FKLNEEIAIILAS

SEQ ID NO: 85786 - protein, 13 aa, Severe acute respiratory syndrome coronavirus 2
KLNEEIAIILASF

SEQ ID NO: 85787 - protein, 13 aa, Severe acute respiratory syndrome coronavirus 2
FTSDLATNNLVVM

SEQ ID NO: 85788 - protein, 13 aa, Severe acute respiratory syndrome coronavirus 2
TSDLATNNLVVMA

SEQ ID NO: 85789 - protein, 13 aa, Severe acute respiratory syndrome coronavirus 2
SDLATNNLVVMAY

SEQ ID NO: 85790 - protein, 13 aa, Severe acute respiratory syndrome coronavirus 2
DLATNNLVVMAYI

SEQ ID NO: 85791 - protein, 13 aa, Severe acute respiratory syndrome coronavirus 2
LATNNLVVMAYIT

SEQ ID NO: 85792 - protein, 13 aa, Severe acute respiratory syndrome coronavirus 2
ATNNLVVMAYITG

SEQ ID NO: 85793 - protein, 13 aa, Severe acute respiratory syndrome coronavirus 2
TNNLVVMAYITGG

SEQ ID NO: 85794 - protein, 13 aa, Severe acute respiratory syndrome coronavirus 2
NNLVVMAYITGGV

SEQ ID NO: 85795 - protein, 13 aa, Severe acute respiratory syndrome coronavirus 2
NLVVMAYITGGVV

SEQ ID NO: 85796 - protein, 13 aa, Severe acute respiratory syndrome coronavirus 2
LVVMAYITGGVVQ

SEQ ID NO: 85797 - protein, 13 aa, Severe acute respiratory syndrome coronavirus 2
VVMAYITGGVVQL

SEQ ID NO: 85798 - protein, 13 aa, Severe acute respiratory syndrome coronavirus 2
TVYEKLKPVLDWL

SEQ ID NO: 85799 - protein, 13 aa, Severe acute respiratory syndrome coronavirus 2
EEKFKEGVEFLRD

SEQ ID NO: 85800 - protein, 13 aa, Severe acute respiratory syndrome coronavirus 2
KFKEGVEFLRDGW

SEQ ID NO: 85801 - protein, 13 aa, Severe acute respiratory syndrome coronavirus 2
EGVEFLRDGWEIV

SEQ ID NO: 85802 - protein, 13 aa, Severe acute respiratory syndrome coronavirus 2
GVEFLRDGWEIVK

SEQ ID NO: 85803 - protein, 13 aa, Severe acute respiratory syndrome coronavirus 2
VEFLRDGWEIVKF

SEQ ID NO: 85804 - protein, 13 aa, Severe acute respiratory syndrome coronavirus 2
IVGGQIVTCAKEI

SEQ ID NO: 85805 - protein, 13 aa, Severe acute respiratory syndrome coronavirus 2
NKFLALCADSIII

SEQ ID NO: 85806 - protein, 13 aa, Severe acute respiratory syndrome coronavirus 2
KFLALCADSIIIG

SEQ ID NO: 85807 - protein, 13 aa, Severe acute respiratory syndrome coronavirus 2
FLALCADSIIIGG

SEQ ID NO: 85808 - protein, 13 aa, Severe acute respiratory syndrome coronavirus 2
LALCADSIIIGGA

SEQ ID NO: 85809 - protein, 13 aa, Severe acute respiratory syndrome coronavirus 2
DSIIIGGAKLKAL

SEQ ID NO: 85810 - protein, 13 aa, Severe acute respiratory syndrome coronavirus 2
SIIIGGAKLKALN

SEQ ID NO: 85811 - protein, 13 aa, Severe acute respiratory syndrome coronavirus 2
IIIGGAKLKALNL

SEQ ID NO: 85812 - protein, 13 aa, Severe acute respiratory syndrome coronavirus 2
IIGGAKLKALNLG

SEQ ID NO: 85813 - protein, 13 aa, Severe acute respiratory syndrome coronavirus 2
VEAPLVGTPVCIN

SEQ ID NO: 85814 - protein, 13 aa, Severe acute respiratory syndrome coronavirus 2
GTPVCINGLMLLE

SEQ ID NO: 85815 - protein, 13 aa, Severe acute respiratory syndrome coronavirus 2
TPVCINGLMLLEI

SEQ ID NO: 85816 - protein, 13 aa, Severe acute respiratory syndrome coronavirus 2
PVCINGLMLLEIK

SEQ ID NO: 85817 - protein, 13 aa, Severe acute respiratory syndrome coronavirus 2
VCINGLMLLEIKD

SEQ ID NO: 85818 - protein, 13 aa, Severe acute respiratory syndrome coronavirus 2
CINGLMLLEIKDT

SEQ ID NO: 85819 - protein, 13 aa, Severe acute respiratory syndrome coronavirus 2
INGLMLLEIKDTE

SEQ ID NO: 85820 - protein, 13 aa, Severe acute respiratory syndrome coronavirus 2
FKLASHMYCSFYP

SEQ ID NO: 85821 - protein, 13 aa, Severe acute respiratory syndrome coronavirus 2
TIEVNSFSGYLKL

SEQ ID NO: 85822 - protein, 13 aa, Severe acute respiratory syndrome coronavirus 2
IEVNSFSGYLKLT

SEQ ID NO: 85823 - protein, 13 aa, Severe acute respiratory syndrome coronavirus 2
KPTVVVNAANVYL

SEQ ID NO: 85824 - protein, 13 aa, Severe acute respiratory syndrome coronavirus 2
PTVVVNAANVYLK

SEQ ID NO: 85825 - protein, 13 aa, Severe acute respiratory syndrome coronavirus 2
TVVVNAANVYLKH

SEQ ID NO: 85826 - protein, 13 aa, Severe acute respiratory syndrome coronavirus 2
VVVNAANVYLKHG

SEQ ID NO: 85827 - protein, 13 aa, Severe acute respiratory syndrome coronavirus 2
NVYLKHGGGVAGA

SEQ ID NO: 85828 - protein, 13 aa, Severe acute respiratory syndrome coronavirus 2
VYLKHGGGVAGAL

SEQ ID NO: 85829 - protein, 13 aa, Severe acute respiratory syndrome coronavirus 2
YLKHGGGVAGALN

SEQ ID NO: 85830 - protein, 13 aa, Severe acute respiratory syndrome coronavirus 2
LKHGGGVAGALNK

SEQ ID NO: 85831 - protein, 13 aa, Severe acute respiratory syndrome coronavirus 2
KHGGGVAGALNKA

SEQ ID NO: 85832 - protein, 13 aa, Severe acute respiratory syndrome coronavirus 2
HGGGVAGALNKAT

SEQ ID NO: 85833 - protein, 13 aa, Severe acute respiratory syndrome coronavirus 2
GGGVAGALNKATN

SEQ ID NO: 85834 - protein, 13 aa, Severe acute respiratory syndrome coronavirus 2
GGVAGALNKATNN

SEQ ID NO: 85835 - protein, 13 aa, Severe acute respiratory syndrome coronavirus 2
GVAGALNKATNNA

SEQ ID NO: 85836 - protein, 13 aa, Severe acute respiratory syndrome coronavirus 2
IQLLKSAYENFNQ

SEQ ID NO: 85837 - protein, 13 aa, Severe acute respiratory syndrome coronavirus 2
QLLKSAYENFNQH

SEQ ID NO: 85838 - protein, 13 aa, Severe acute respiratory syndrome coronavirus 2
TNVYLAVFDKNLY

SEQ ID NO: 85839 - protein, 13 aa, Severe acute respiratory syndrome coronavirus 2
NVYLAVFDKNLYD

SEQ ID NO: 85840 - protein, 13 aa, Severe acute respiratory syndrome coronavirus 2
VYLAVFDKNLYDK

SEQ ID NO: 85841 - protein, 13 aa, Severe acute respiratory syndrome coronavirus 2
DKNLYDKLVSSFL

SEQ ID NO: 85842 - protein, 13 aa, Severe acute respiratory syndrome coronavirus 2
KNLYDKLVSSFLE

SEQ ID NO: 85843 - protein, 13 aa, Severe acute respiratory syndrome coronavirus 2
KFLTENLLLYIDI

SEQ ID NO: 85844 - protein, 13 aa, Severe acute respiratory syndrome coronavirus 2
FLTENLLLYIDIN

SEQ ID NO: 85845 - protein, 13 aa, Severe acute respiratory syndrome coronavirus 2
LTENLLLYIDING

SEQ ID NO: 85846 - protein, 13 aa, Severe acute respiratory syndrome coronavirus 2
DSATLVSDIDITF

SEQ ID NO: 85847 - protein, 13 aa, Severe acute respiratory syndrome coronavirus 2
SATLVSDIDITFL

SEQ ID NO: 85848 - protein, 13 aa, Severe acute respiratory syndrome coronavirus 2
ATLVSDIDITFLK

SEQ ID NO: 85849 - protein, 13 aa, Severe acute respiratory syndrome coronavirus 2
TLVSDIDITFLKK

SEQ ID NO: 85850 - protein, 13 aa, Severe acute respiratory syndrome coronavirus 2
YITTYPGQGLNGY

SEQ ID NO: 85851 - protein, 13 aa, Severe acute respiratory syndrome coronavirus 2
GQGLNGYTVEEAK

SEQ ID NO: 85852 - protein, 13 aa, Severe acute respiratory syndrome coronavirus 2
QGLNGYTVEEAKT

SEQ ID NO: 85853 - protein, 13 aa, Severe acute respiratory syndrome coronavirus 2
GLNGYTVEEAKTV

SEQ ID NO: 85854 - protein, 13 aa, Severe acute respiratory syndrome coronavirus 2
LNGYTVEEAKTVL

SEQ ID NO: 85855 - protein, 13 aa, Severe acute respiratory syndrome coronavirus 2
NGYTVEEAKTVLK

SEQ ID NO: 85856 - protein, 13 aa, Severe acute respiratory syndrome coronavirus 2
GYTVEEAKTVLKK

SEQ ID NO: 85857 - protein, 13 aa, Severe acute respiratory syndrome coronavirus 2
FYILPSIISNEKQ

SEQ ID NO: 85858 - protein, 13 aa, Severe acute respiratory syndrome coronavirus 2
LPSIISNEKQEIL

SEQ ID NO: 85859 - protein, 13 aa, Severe acute respiratory syndrome coronavirus 2
TKAIVSTIQRKYK

SEQ ID NO: 85860 - protein, 13 aa, Severe acute respiratory syndrome coronavirus 2
VSTIQRKYKGIKI

SEQ ID NO: 85861 - protein, 13 aa, Severe acute respiratory syndrome coronavirus 2
STIQRKYKGIKIQ

SEQ ID NO: 85862 - protein, 13 aa, Severe acute respiratory syndrome coronavirus 2
IQRKYKGIKIQEG

SEQ ID NO: 85863 - protein, 13 aa, Severe acute respiratory syndrome coronavirus 2
QRKYKGIKIQEGV

SEQ ID NO: 85864 - protein, 13 aa, Severe acute respiratory syndrome coronavirus 2
RKYKGIKIQEGVV

SEQ ID NO: 85865 - protein, 13 aa, Severe acute respiratory syndrome coronavirus 2
KYKGIKIQEGVVD

SEQ ID NO: 85866 - protein, 13 aa, Severe acute respiratory syndrome coronavirus 2
AVTAYNGYLTSSS

SEQ ID NO: 85867 - protein, 13 aa, Severe acute respiratory syndrome coronavirus 2
PEEHFIETISLAG

SEQ ID NO: 85868 - protein, 13 aa, Severe acute respiratory syndrome coronavirus 2
EEHFIETISLAGS

SEQ ID NO: 85869 - protein, 13 aa, Severe acute respiratory syndrome coronavirus 2
EHFIETISLAGSY

SEQ ID NO: 85870 - protein, 13 aa, Severe acute respiratory syndrome coronavirus 2
HFIETISLAGSYK

SEQ ID NO: 85871 - protein, 13 aa, Severe acute respiratory syndrome coronavirus 2
FIETISLAGSYKD

SEQ ID NO: 85872 - protein, 13 aa, Severe acute respiratory syndrome coronavirus 2
VITFDNLKTLLSL

SEQ ID NO: 85873 - protein, 13 aa, Severe acute respiratory syndrome coronavirus 2
ITFDNLKTLLSLR

SEQ ID NO: 85874 - protein, 13 aa, Severe acute respiratory syndrome coronavirus 2
VRTIKVFTTVDNI

SEQ ID NO: 85875 - protein, 13 aa, Severe acute respiratory syndrome coronavirus 2
RTIKVFTTVDNIN

SEQ ID NO: 85876 - protein, 13 aa, Severe acute respiratory syndrome coronavirus 2
TIKVFTTVDNINL

SEQ ID NO: 85877 - protein, 13 aa, Severe acute respiratory syndrome coronavirus 2
IKVFTTVDNINLH

SEQ ID NO: 85878 - protein, 13 aa, Severe acute respiratory syndrome coronavirus 2
LTSIKWADNNCYL

SEQ ID NO: 85879 - protein, 13 aa, Severe acute respiratory syndrome coronavirus 2
TSIKWADNNCYLA

SEQ ID NO: 85880 - protein, 13 aa, Severe acute respiratory syndrome coronavirus 2
SIKWADNNCYLAT

SEQ ID NO: 85881 - protein, 13 aa, Severe acute respiratory syndrome coronavirus 2
QQIELKFNPPALQ

SEQ ID NO: 85882 - protein, 13 aa, Severe acute respiratory syndrome coronavirus 2
QIELKFNPPALQD

SEQ ID NO: 85883 - protein, 13 aa, Severe acute respiratory syndrome coronavirus 2
ELKFNPPALQDAY

SEQ ID NO: 85884 - protein, 13 aa, Severe acute respiratory syndrome coronavirus 2
QDAYYRARAGEAA

SEQ ID NO: 85885 - protein, 13 aa, Severe acute respiratory syndrome coronavirus 2
DAYYRARAGEAAN

SEQ ID NO: 85886 - protein, 13 aa, Severe acute respiratory syndrome coronavirus 2
AYYRARAGEAANF

SEQ ID NO: 85887 - protein, 13 aa, Severe acute respiratory syndrome coronavirus 2
YYRARAGEAANFC

SEQ ID NO: 85888 - protein, 13 aa, Severe acute respiratory syndrome coronavirus 2
YRARAGEAANFCA

SEQ ID NO: 85889 - protein, 13 aa, Severe acute respiratory syndrome coronavirus 2
RARAGEAANFCAL

SEQ ID NO: 85890 - protein, 13 aa, Severe acute respiratory syndrome coronavirus 2
AGEAANFCALILA

SEQ ID NO: 85891 - protein, 13 aa, Severe acute respiratory syndrome coronavirus 2
GEAANFCALILAY

SEQ ID NO: 85892 - protein, 13 aa, Severe acute respiratory syndrome coronavirus 2
EAANFCALILAYC

SEQ ID NO: 85893 - protein, 13 aa, Severe acute respiratory syndrome coronavirus 2
MSYLFQHANLDSC

SEQ ID NO: 85894 - protein, 13 aa, Severe acute respiratory syndrome coronavirus 2
SYLFQHANLDSCK

SEQ ID NO: 85895 - protein, 13 aa, Severe acute respiratory syndrome coronavirus 2
YLFQHANLDSCKR

SEQ ID NO: 85896 - protein, 13 aa, Severe acute respiratory syndrome coronavirus 2
MGTLSYEQFKKGV

SEQ ID NO: 85897 - protein, 13 aa, Severe acute respiratory syndrome coronavirus 2
GTLSYEQFKKGVQ

SEQ ID NO: 85898 - protein, 13 aa, Severe acute respiratory syndrome coronavirus 2
TLSYEQFKKGVQI

SEQ ID NO: 85899 - protein, 13 aa, Severe acute respiratory syndrome coronavirus 2
SKETLYCIDGALL

SEQ ID NO: 85900 - protein, 13 aa, Severe acute respiratory syndrome coronavirus 2
PVTYKLDGVVCTE

SEQ ID NO: 85901 - protein, 13 aa, Severe acute respiratory syndrome coronavirus 2
VTYKLDGVVCTEI

SEQ ID NO: 85902 - protein, 13 aa, Severe acute respiratory syndrome coronavirus 2
DNSYFTEQPIDLV

SEQ ID NO: 85903 - protein, 13 aa, Severe acute respiratory syndrome coronavirus 2
NSYFTEQPIDLVP

SEQ ID NO: 85904 - protein, 13 aa, Severe acute respiratory syndrome coronavirus 2
NFKFVCDNIKFAD

SEQ ID NO: 85905 - protein, 13 aa, Severe acute respiratory syndrome coronavirus 2
ASRELKVTFFPDL

SEQ ID NO: 85906 - protein, 13 aa, Severe acute respiratory syndrome coronavirus 2
SRELKVTFFPDLN

SEQ ID NO: 85907 - protein, 13 aa, Severe acute respiratory syndrome coronavirus 2
RELKVTFFPDLNG

SEQ ID NO: 85908 - protein, 13 aa, Severe acute respiratory syndrome coronavirus 2
ELKVTFFPDLNGD

SEQ ID NO: 85909 - protein, 13 aa, Severe acute respiratory syndrome coronavirus 2
LKVTFFPDLNGDV

SEQ ID NO: 85910 - protein, 13 aa, Severe acute respiratory syndrome coronavirus 2
KVTFFPDLNGDVV

SEQ ID NO: 85911 - protein, 13 aa, Severe acute respiratory syndrome coronavirus 2
VTFFPDLNGDVVA

SEQ ID NO: 85912 - protein, 13 aa, Severe acute respiratory syndrome coronavirus 2
LKTLATHGLAAVN

SEQ ID NO: 85913 - protein, 13 aa, Severe acute respiratory syndrome coronavirus 2
NKVVSTTTNIVTR

SEQ ID NO: 85914 - protein, 13 aa, Severe acute respiratory syndrome coronavirus 2
KVVSTTTNIVTRC

SEQ ID NO: 85915 - protein, 13 aa, Severe acute respiratory syndrome coronavirus 2
NYMPYFFTLLLQL

SEQ ID NO: 85916 - protein, 13 aa, Severe acute respiratory syndrome coronavirus 2
YMPYFFTLLLQLC

SEQ ID NO: 85917 - protein, 13 aa, Severe acute respiratory syndrome coronavirus 2
MPYFFTLLLQLCT

SEQ ID NO: 85918 - protein, 13 aa, Severe acute respiratory syndrome coronavirus 2
PYFFTLLLQLCTF

SEQ ID NO: 85919 - protein, 13 aa, Severe acute respiratory syndrome coronavirus 2
VGKFCLEASFNYL

SEQ ID NO: 85920 - protein, 13 aa, Severe acute respiratory syndrome coronavirus 2
GKFCLEASFNYLK

SEQ ID NO: 85921 - protein, 13 aa, Severe acute respiratory syndrome coronavirus 2
KFCLEASFNYLKS

SEQ ID NO: 85922 - protein, 13 aa, Severe acute respiratory syndrome coronavirus 2
TYCTGSIPCSVCL

SEQ ID NO: 85923 - protein, 13 aa, Severe acute respiratory syndrome coronavirus 2
YCTGSIPCSVCLS

SEQ ID NO: 85924 - protein, 13 aa, Severe acute respiratory syndrome coronavirus 2
LETIQITISSFKW

SEQ ID NO: 85925 - protein, 13 aa, Severe acute respiratory syndrome coronavirus 2
TIQITISSFKWDL

SEQ ID NO: 85926 - protein, 13 aa, Severe acute respiratory syndrome coronavirus 2
IQITISSFKWDLT

SEQ ID NO: 85927 - protein, 13 aa, Severe acute respiratory syndrome coronavirus 2
QITISSFKWDLTA

SEQ ID NO: 85928 - protein, 13 aa, Severe acute respiratory syndrome coronavirus 2
ITISSFKWDLTAF

SEQ ID NO: 85929 - protein, 13 aa, Severe acute respiratory syndrome coronavirus 2
TISSFKWDLTAFG

SEQ ID NO: 85930 - protein, 13 aa, Severe acute respiratory syndrome coronavirus 2
ISSFKWDLTAFGL

SEQ ID NO: 85931 - protein, 13 aa, Severe acute respiratory syndrome coronavirus 2
SSFKWDLTAFGLV

SEQ ID NO: 85932 - protein, 13 aa, Severe acute respiratory syndrome coronavirus 2
SFKWDLTAFGLVA

SEQ ID NO: 85933 - protein, 13 aa, Severe acute respiratory syndrome coronavirus 2
FKWDLTAFGLVAE

SEQ ID NO: 85934 - protein, 13 aa, Severe acute respiratory syndrome coronavirus 2
KWDLTAFGLVAEW

SEQ ID NO: 85935 - protein, 13 aa, Severe acute respiratory syndrome coronavirus 2
WDLTAFGLVAEWF

SEQ ID NO: 85936 - protein, 13 aa, Severe acute respiratory syndrome coronavirus 2
DLTAFGLVAEWFL

SEQ ID NO: 85937 - protein, 13 aa, Severe acute respiratory syndrome coronavirus 2
LTAFGLVAEWFLA

SEQ ID NO: 85938 - protein, 13 aa, Severe acute respiratory syndrome coronavirus 2
TAFGLVAEWFLAY

SEQ ID NO: 85939 - protein, 13 aa, Severe acute respiratory syndrome coronavirus 2
AFGLVAEWFLAYI

SEQ ID NO: 85940 - protein, 13 aa, Severe acute respiratory syndrome coronavirus 2
FGLVAEWFLAYIL

SEQ ID NO: 85941 - protein, 13 aa, Severe acute respiratory syndrome coronavirus 2
GLVAEWFLAYILF

SEQ ID NO: 85942 - protein, 13 aa, Severe acute respiratory syndrome coronavirus 2
LVAEWFLAYILFT

SEQ ID NO: 85943 - protein, 13 aa, Severe acute respiratory syndrome coronavirus 2
VAEWFLAYILFTR

SEQ ID NO: 85944 - protein, 13 aa, Severe acute respiratory syndrome coronavirus 2
AEWFLAYILFTRF

SEQ ID NO: 85945 - protein, 13 aa, Severe acute respiratory syndrome coronavirus 2
EWFLAYILFTRFF

SEQ ID NO: 85946 - protein, 13 aa, Severe acute respiratory syndrome coronavirus 2
WFLAYILFTRFFY

SEQ ID NO: 85947 - protein, 13 aa, Severe acute respiratory syndrome coronavirus 2
FLAYILFTRFFYV

SEQ ID NO: 85948 - protein, 13 aa, Severe acute respiratory syndrome coronavirus 2
LAYILFTRFFYVL

SEQ ID NO: 85949 - protein, 13 aa, Severe acute respiratory syndrome coronavirus 2
AYILFTRFFYVLG

SEQ ID NO: 85950 - protein, 13 aa, Severe acute respiratory syndrome coronavirus 2
YILFTRFFYVLGL

SEQ ID NO: 85951 - protein, 13 aa, Severe acute respiratory syndrome coronavirus 2
ILFTRFFYVLGLA

SEQ ID NO: 85952 - protein, 13 aa, Severe acute respiratory syndrome coronavirus 2
LFTRFFYVLGLAA

SEQ ID NO: 85953 - protein, 13 aa, Severe acute respiratory syndrome coronavirus 2
FTRFFYVLGLAAI

SEQ ID NO: 85954 - protein, 13 aa, Severe acute respiratory syndrome coronavirus 2
TRFFYVLGLAAIM

SEQ ID NO: 85955 - protein, 13 aa, Severe acute respiratory syndrome coronavirus 2
RFFYVLGLAAIMQ

SEQ ID NO: 85956 - protein, 13 aa, Severe acute respiratory syndrome coronavirus 2
LGLAAIMQLFFSY

SEQ ID NO: 85957 - protein, 13 aa, Severe acute respiratory syndrome coronavirus 2
GLAAIMQLFFSYF

SEQ ID NO: 85958 - protein, 13 aa, Severe acute respiratory syndrome coronavirus 2
LAAIMQLFFSYFA

SEQ ID NO: 85959 - protein, 13 aa, Severe acute respiratory syndrome coronavirus 2
AAIMQLFFSYFAV

SEQ ID NO: 85960 - protein, 13 aa, Severe acute respiratory syndrome coronavirus 2
IMQLFFSYFAVHF

SEQ ID NO: 85961 - protein, 13 aa, Severe acute respiratory syndrome coronavirus 2
MQLFFSYFAVHFI

SEQ ID NO: 85962 - protein, 13 aa, Severe acute respiratory syndrome coronavirus 2
QLFFSYFAVHFIS

SEQ ID NO: 85963 - protein, 13 aa, Severe acute respiratory syndrome coronavirus 2
LFFSYFAVHFISN

SEQ ID NO: 85964 - protein, 13 aa, Severe acute respiratory syndrome coronavirus 2
FFSYFAVHFISNS

SEQ ID NO: 85965 - protein, 13 aa, Severe acute respiratory syndrome coronavirus 2
FSYFAVHFISNSW

SEQ ID NO: 85966 - protein, 13 aa, Severe acute respiratory syndrome coronavirus 2
SYFAVHFISNSWL

SEQ ID NO: 85967 - protein, 13 aa, Severe acute respiratory syndrome coronavirus 2
YFAVHFISNSWLM

SEQ ID NO: 85968 - protein, 13 aa, Severe acute respiratory syndrome coronavirus 2
FAVHFISNSWLMW

SEQ ID NO: 85969 - protein, 13 aa, Severe acute respiratory syndrome coronavirus 2
AVHFISNSWLMWL

SEQ ID NO: 85970 - protein, 13 aa, Severe acute respiratory syndrome coronavirus 2
VHFISNSWLMWLI

SEQ ID NO: 85971 - protein, 13 aa, Severe acute respiratory syndrome coronavirus 2
HFISNSWLMWLII

SEQ ID NO: 85972 - protein, 13 aa, Severe acute respiratory syndrome coronavirus 2
FISNSWLMWLIIN

SEQ ID NO: 85973 - protein, 13 aa, Severe acute respiratory syndrome coronavirus 2
ISNSWLMWLIINL

SEQ ID NO: 85974 - protein, 13 aa, Severe acute respiratory syndrome coronavirus 2
SNSWLMWLIINLV

SEQ ID NO: 85975 - protein, 13 aa, Severe acute respiratory syndrome coronavirus 2
NSWLMWLIINLVQ

SEQ ID NO: 85976 - protein, 13 aa, Severe acute respiratory syndrome coronavirus 2
SWLMWLIINLVQM

SEQ ID NO: 85977 - protein, 13 aa, Severe acute respiratory syndrome coronavirus 2
WLMWLIINLVQMA

SEQ ID NO: 85978 - protein, 13 aa, Severe acute respiratory syndrome coronavirus 2
ISAMVRMYIFFAS

SEQ ID NO: 85979 - protein, 13 aa, Severe acute respiratory syndrome coronavirus 2
SAMVRMYIFFASF

SEQ ID NO: 85980 - protein, 13 aa, Severe acute respiratory syndrome coronavirus 2
AMVRMYIFFASFY

SEQ ID NO: 85981 - protein, 13 aa, Severe acute respiratory syndrome coronavirus 2
MVRMYIFFASFYY

SEQ ID NO: 85982 - protein, 13 aa, Severe acute respiratory syndrome coronavirus 2
VRMYIFFASFYYV

SEQ ID NO: 85983 - protein, 13 aa, Severe acute respiratory syndrome coronavirus 2
RMYIFFASFYYVW

SEQ ID NO: 85984 - protein, 13 aa, Severe acute respiratory syndrome coronavirus 2
MYIFFASFYYVWK

SEQ ID NO: 85985 - protein, 13 aa, Severe acute respiratory syndrome coronavirus 2
YIFFASFYYVWKS

SEQ ID NO: 85986 - protein, 13 aa, Severe acute respiratory syndrome coronavirus 2
IFFASFYYVWKSY

SEQ ID NO: 85987 - protein, 13 aa, Severe acute respiratory syndrome coronavirus 2
FFASFYYVWKSYV

SEQ ID NO: 85988 - protein, 13 aa, Severe acute respiratory syndrome coronavirus 2
FASFYYVWKSYVH

SEQ ID NO: 85989 - protein, 13 aa, Severe acute respiratory syndrome coronavirus 2
ASFYYVWKSYVHV

SEQ ID NO: 85990 - protein, 13 aa, Severe acute respiratory syndrome coronavirus 2
SFYYVWKSYVHVV

SEQ ID NO: 85991 - protein, 13 aa, Severe acute respiratory syndrome coronavirus 2
FYYVWKSYVHVVD

SEQ ID NO: 85992 - protein, 13 aa, Severe acute respiratory syndrome coronavirus 2
STCMMCYKRNRAT

SEQ ID NO: 85993 - protein, 13 aa, Severe acute respiratory syndrome coronavirus 2
TCMMCYKRNRATR

SEQ ID NO: 85994 - protein, 13 aa, Severe acute respiratory syndrome coronavirus 2
CMMCYKRNRATRV

SEQ ID NO: 85995 - protein, 13 aa, Severe acute respiratory syndrome coronavirus 2
MMCYKRNRATRVE

SEQ ID NO: 85996 - protein, 13 aa, Severe acute respiratory syndrome coronavirus 2
MCYKRNRATRVEC

SEQ ID NO: 85997 - protein, 13 aa, Severe acute respiratory syndrome coronavirus 2
CYKRNRATRVECT

SEQ ID NO: 85998 - protein, 13 aa, Severe acute respiratory syndrome coronavirus 2
YKRNRATRVECTT

SEQ ID NO: 85999 - protein, 13 aa, Severe acute respiratory syndrome coronavirus 2
KRNRATRVECTTI

SEQ ID NO: 86000 - protein, 13 aa, Severe acute respiratory syndrome coronavirus 2
RNRATRVECTTIV

SEQ ID NO: 86001 - protein, 13 aa, Severe acute respiratory syndrome coronavirus 2
SFYVYANGGKGFC

SEQ ID NO: 86002 - protein, 13 aa, Severe acute respiratory syndrome coronavirus 2
FYVYANGGKGFCK

SEQ ID NO: 86003 - protein, 13 aa, Severe acute respiratory syndrome coronavirus 2
NCDTFCAGSTFIS

SEQ ID NO: 86004 - protein, 13 aa, Severe acute respiratory syndrome coronavirus 2
CDTFCAGSTFISD

SEQ ID NO: 86005 - protein, 13 aa, Severe acute respiratory syndrome coronavirus 2
DTFCAGSTFISDE

SEQ ID NO: 86006 - protein, 13 aa, Severe acute respiratory syndrome coronavirus 2
TFCAGSTFISDEV

SEQ ID NO: 86007 - protein, 13 aa, Severe acute respiratory syndrome coronavirus 2
FCAGSTFISDEVA

SEQ ID NO: 86008 - protein, 13 aa, Severe acute respiratory syndrome coronavirus 2
AGSTFISDEVARD

SEQ ID NO: 86009 - protein, 13 aa, Severe acute respiratory syndrome coronavirus 2
GSTFISDEVARDL

SEQ ID NO: 86010 - protein, 13 aa, Severe acute respiratory syndrome coronavirus 2
STFISDEVARDLS

SEQ ID NO: 86011 - protein, 13 aa, Severe acute respiratory syndrome coronavirus 2
TFISDEVARDLSL

SEQ ID NO: 86012 - protein, 13 aa, Severe acute respiratory syndrome coronavirus 2
SDEVARDLSLQFK

SEQ ID NO: 86013 - protein, 13 aa, Severe acute respiratory syndrome coronavirus 2
DEVARDLSLQFKR

SEQ ID NO: 86014 - protein, 13 aa, Severe acute respiratory syndrome coronavirus 2
EVARDLSLQFKRP

SEQ ID NO: 86015 - protein, 13 aa, Severe acute respiratory syndrome coronavirus 2
VARDLSLQFKRPI

SEQ ID NO: 86016 - protein, 13 aa, Severe acute respiratory syndrome coronavirus 2
INVIVFDGKSKCE

SEQ ID NO: 86017 - protein, 13 aa, Severe acute respiratory syndrome coronavirus 2
KSASVYYSQLMCQ

SEQ ID NO: 86018 - protein, 13 aa, Severe acute respiratory syndrome coronavirus 2
SASVYYSQLMCQP

SEQ ID NO: 86019 - protein, 13 aa, Severe acute respiratory syndrome coronavirus 2
ASVYYSQLMCQPI

SEQ ID NO: 86020 - protein, 13 aa, Severe acute respiratory syndrome coronavirus 2
SVYYSQLMCQPIL

SEQ ID NO: 86021 - protein, 13 aa, Severe acute respiratory syndrome coronavirus 2
VYYSQLMCQPILL

SEQ ID NO: 86022 - protein, 13 aa, Severe acute respiratory syndrome coronavirus 2
YYSQLMCQPILLL

SEQ ID NO: 86023 - protein, 13 aa, Severe acute respiratory syndrome coronavirus 2
YSQLMCQPILLLD

SEQ ID NO: 86024 - protein, 13 aa, Severe acute respiratory syndrome coronavirus 2
SQLMCQPILLLDQ

SEQ ID NO: 86025 - protein, 13 aa, Severe acute respiratory syndrome coronavirus 2
QLMCQPILLLDQA

SEQ ID NO: 86026 - protein, 13 aa, Severe acute respiratory syndrome coronavirus 2
LMCQPILLLDQAL

SEQ ID NO: 86027 - protein, 13 aa, Severe acute respiratory syndrome coronavirus 2
MCQPILLLDQALV

SEQ ID NO: 86028 - protein, 13 aa, Severe acute respiratory syndrome coronavirus 2
CQPILLLDQALVS

SEQ ID NO: 86029 - protein, 13 aa, Severe acute respiratory syndrome coronavirus 2
QPILLLDQALVSD

SEQ ID NO: 86030 - protein, 13 aa, Severe acute respiratory syndrome coronavirus 2
MFDAYVNTFSSTF

SEQ ID NO: 86031 - protein, 13 aa, Severe acute respiratory syndrome coronavirus 2
LDNVLSTFISAAR

SEQ ID NO: 86032 - protein, 13 aa, Severe acute respiratory syndrome coronavirus 2
DNVLSTFISAARQ

SEQ ID NO: 86033 - protein, 13 aa, Severe acute respiratory syndrome coronavirus 2
NVLSTFISAARQG

SEQ ID NO: 86034 - protein, 13 aa, Severe acute respiratory syndrome coronavirus 2
VLSTFISAARQGF

SEQ ID NO: 86035 - protein, 13 aa, Severe acute respiratory syndrome coronavirus 2
LSTFISAARQGFV

SEQ ID NO: 86036 - protein, 13 aa, Severe acute respiratory syndrome coronavirus 2
LSEQLRKQIRSAA

SEQ ID NO: 86037 - protein, 13 aa, Severe acute respiratory syndrome coronavirus 2
SEQLRKQIRSAAK

SEQ ID NO: 86038 - protein, 13 aa, Severe acute respiratory syndrome coronavirus 2
EQLRKQIRSAAKK

SEQ ID NO: 86039 - protein, 13 aa, Severe acute respiratory syndrome coronavirus 2
QLRKQIRSAAKKN

SEQ ID NO: 86040 - protein, 13 aa, Severe acute respiratory syndrome coronavirus 2
LRKQIRSAAKKNN

SEQ ID NO: 86041 - protein, 13 aa, Severe acute respiratory syndrome coronavirus 2
RKQIRSAAKKNNL

SEQ ID NO: 86042 - protein, 13 aa, Severe acute respiratory syndrome coronavirus 2
LPFKLTCATTRQV

SEQ ID NO: 86043 - protein, 13 aa, Severe acute respiratory syndrome coronavirus 2
PFKLTCATTRQVV

SEQ ID NO: 86044 - protein, 13 aa, Severe acute respiratory syndrome coronavirus 2
FKLTCATTRQVVN

SEQ ID NO: 86045 - protein, 13 aa, Severe acute respiratory syndrome coronavirus 2
TRQVVNVVTTKIA

SEQ ID NO: 86046 - protein, 13 aa, Severe acute respiratory syndrome coronavirus 2
RQVVNVVTTKIAL

SEQ ID NO: 86047 - protein, 13 aa, Severe acute respiratory syndrome coronavirus 2
QVVNVVTTKIALK

SEQ ID NO: 86048 - protein, 13 aa, Severe acute respiratory syndrome coronavirus 2
KIVNNWLKQLIKV

SEQ ID NO: 86049 - protein, 13 aa, Severe acute respiratory syndrome coronavirus 2
IVNNWLKQLIKVT

SEQ ID NO: 86050 - protein, 13 aa, Severe acute respiratory syndrome coronavirus 2
NNWLKQLIKVTLV

SEQ ID NO: 86051 - protein, 13 aa, Severe acute respiratory syndrome coronavirus 2
NWLKQLIKVTLVF

SEQ ID NO: 86052 - protein, 13 aa, Severe acute respiratory syndrome coronavirus 2
LKQLIKVTLVFLF

SEQ ID NO: 86053 - protein, 13 aa, Severe acute respiratory syndrome coronavirus 2
KQLIKVTLVFLFV

SEQ ID NO: 86054 - protein, 13 aa, Severe acute respiratory syndrome coronavirus 2
LVFLFVAAIFYLI

SEQ ID NO: 86055 - protein, 13 aa, Severe acute respiratory syndrome coronavirus 2
FLFVAAIFYLITP

SEQ ID NO: 86056 - protein, 13 aa, Severe acute respiratory syndrome coronavirus 2
LFVAAIFYLITPV

SEQ ID NO: 86057 - protein, 13 aa, Severe acute respiratory syndrome coronavirus 2
FVAAIFYLITPVH

SEQ ID NO: 86058 - protein, 13 aa, Severe acute respiratory syndrome coronavirus 2
VAAIFYLITPVHV

SEQ ID NO: 86059 - protein, 13 aa, Severe acute respiratory syndrome coronavirus 2
EIIGYKAIDGGVT

SEQ ID NO: 86060 - protein, 13 aa, Severe acute respiratory syndrome coronavirus 2
IGYKAIDGGVTRD

SEQ ID NO: 86061 - protein, 13 aa, Severe acute respiratory syndrome coronavirus 2
GYKAIDGGVTRDI

SEQ ID NO: 86062 - protein, 13 aa, Severe acute respiratory syndrome coronavirus 2
YKAIDGGVTRDIA

SEQ ID NO: 86063 - protein, 13 aa, Severe acute respiratory syndrome coronavirus 2
ACPLIAAVITREV

SEQ ID NO: 86064 - protein, 13 aa, Severe acute respiratory syndrome coronavirus 2
TNGDFLHFLPRVF

SEQ ID NO: 86065 - protein, 13 aa, Severe acute respiratory syndrome coronavirus 2
NGDFLHFLPRVFS

SEQ ID NO: 86066 - protein, 13 aa, Severe acute respiratory syndrome coronavirus 2
GDFLHFLPRVFSA

SEQ ID NO: 86067 - protein, 13 aa, Severe acute respiratory syndrome coronavirus 2
DFLHFLPRVFSAV

SEQ ID NO: 86068 - protein, 13 aa, Severe acute respiratory syndrome coronavirus 2
FLHFLPRVFSAVG

SEQ ID NO: 86069 - protein, 13 aa, Severe acute respiratory syndrome coronavirus 2
LHFLPRVFSAVGN

SEQ ID NO: 86070 - protein, 13 aa, Severe acute respiratory syndrome coronavirus 2
HFLPRVFSAVGNI

SEQ ID NO: 86071 - protein, 13 aa, Severe acute respiratory syndrome coronavirus 2
FLPRVFSAVGNIC

SEQ ID NO: 86072 - protein, 13 aa, Severe acute respiratory syndrome coronavirus 2
LPRVFSAVGNICY

SEQ ID NO: 86073 - protein, 13 aa, Severe acute respiratory syndrome coronavirus 2
PRVFSAVGNICYT

SEQ ID NO: 86074 - protein, 13 aa, Severe acute respiratory syndrome coronavirus 2
RVFSAVGNICYTP

SEQ ID NO: 86075 - protein, 13 aa, Severe acute respiratory syndrome coronavirus 2
ATSACVLAAECTI

SEQ ID NO: 86076 - protein, 13 aa, Severe acute respiratory syndrome coronavirus 2
TIFKDASGKPVPY

SEQ ID NO: 86077 - protein, 13 aa, Severe acute respiratory syndrome coronavirus 2
DTNVLEGSVAYES

SEQ ID NO: 86078 - protein, 13 aa, Severe acute respiratory syndrome coronavirus 2
TNVLEGSVAYESL

SEQ ID NO: 86079 - protein, 13 aa, Severe acute respiratory syndrome coronavirus 2
NVLEGSVAYESLR

SEQ ID NO: 86080 - protein, 13 aa, Severe acute respiratory syndrome coronavirus 2
VLEGSVAYESLRP

SEQ ID NO: 86081 - protein, 13 aa, Severe acute respiratory syndrome coronavirus 2
LEGSVAYESLRPD

SEQ ID NO: 86082 - protein, 13 aa, Severe acute respiratory syndrome coronavirus 2
AYESLRPDTRYVL

SEQ ID NO: 86083 - protein, 13 aa, Severe acute respiratory syndrome coronavirus 2
YESLRPDTRYVLM

SEQ ID NO: 86084 - protein, 13 aa, Severe acute respiratory syndrome coronavirus 2
ESLRPDTRYVLMD

SEQ ID NO: 86085 - protein, 13 aa, Severe acute respiratory syndrome coronavirus 2
SLRPDTRYVLMDG

SEQ ID NO: 86086 - protein, 13 aa, Severe acute respiratory syndrome coronavirus 2
PDTRYVLMDGSII

SEQ ID NO: 86087 - protein, 13 aa, Severe acute respiratory syndrome coronavirus 2
DTRYVLMDGSIIQ

SEQ ID NO: 86088 - protein, 13 aa, Severe acute respiratory syndrome coronavirus 2
TRYVLMDGSIIQF

SEQ ID NO: 86089 - protein, 13 aa, Severe acute respiratory syndrome coronavirus 2
GRWVLNNDYYRSL

SEQ ID NO: 86090 - protein, 13 aa, Severe acute respiratory syndrome coronavirus 2
RWVLNNDYYRSLP

SEQ ID NO: 86091 - protein, 13 aa, Severe acute respiratory syndrome coronavirus 2
NNDYYRSLPGVFC

SEQ ID NO: 86092 - protein, 13 aa, Severe acute respiratory syndrome coronavirus 2
NDYYRSLPGVFCG

SEQ ID NO: 86093 - protein, 13 aa, Severe acute respiratory syndrome coronavirus 2
DYYRSLPGVFCGV

SEQ ID NO: 86094 - protein, 13 aa, Severe acute respiratory syndrome coronavirus 2
YYRSLPGVFCGVD

SEQ ID NO: 86095 - protein, 13 aa, Severe acute respiratory syndrome coronavirus 2
PLIQPIGALDISA

SEQ ID NO: 86096 - protein, 13 aa, Severe acute respiratory syndrome coronavirus 2
LIQPIGALDISAS

SEQ ID NO: 86097 - protein, 13 aa, Severe acute respiratory syndrome coronavirus 2
IQPIGALDISASI

SEQ ID NO: 86098 - protein, 13 aa, Severe acute respiratory syndrome coronavirus 2
QPIGALDISASIV

SEQ ID NO: 86099 - protein, 13 aa, Severe acute respiratory syndrome coronavirus 2
PIGALDISASIVA

SEQ ID NO: 86100 - protein, 13 aa, Severe acute respiratory syndrome coronavirus 2
IGALDISASIVAG

SEQ ID NO: 86101 - protein, 13 aa, Severe acute respiratory syndrome coronavirus 2
GALDISASIVAGG

SEQ ID NO: 86102 - protein, 13 aa, Severe acute respiratory syndrome coronavirus 2
ALDISASIVAGGI

SEQ ID NO: 86103 - protein, 13 aa, Severe acute respiratory syndrome coronavirus 2
VLCLTPVYSFLPG

SEQ ID NO: 86104 - protein, 13 aa, Severe acute respiratory syndrome coronavirus 2
LTPVYSFLPGVYS

SEQ ID NO: 86105 - protein, 13 aa, Severe acute respiratory syndrome coronavirus 2
TPVYSFLPGVYSV

SEQ ID NO: 86106 - protein, 13 aa, Severe acute respiratory syndrome coronavirus 2
FLPGVYSVIYLYL

SEQ ID NO: 86107 - protein, 13 aa, Severe acute respiratory syndrome coronavirus 2
LPGVYSVIYLYLT

SEQ ID NO: 86108 - protein, 13 aa, Severe acute respiratory syndrome coronavirus 2
PGVYSVIYLYLTF

SEQ ID NO: 86109 - protein, 13 aa, Severe acute respiratory syndrome coronavirus 2
GVYSVIYLYLTFY

SEQ ID NO: 86110 - protein, 13 aa, Severe acute respiratory syndrome coronavirus 2
YSVIYLYLTFYLT

SEQ ID NO: 86111 - protein, 13 aa, Severe acute respiratory syndrome coronavirus 2
SVIYLYLTFYLTN

SEQ ID NO: 86112 - protein, 13 aa, Severe acute respiratory syndrome coronavirus 2
VIYLYLTFYLTND

SEQ ID NO: 86113 - protein, 13 aa, Severe acute respiratory syndrome coronavirus 2
IYLYLTFYLTNDV

SEQ ID NO: 86114 - protein, 13 aa, Severe acute respiratory syndrome coronavirus 2
YLYLTFYLTNDVS

SEQ ID NO: 86115 - protein, 13 aa, Severe acute respiratory syndrome coronavirus 2
LYLTFYLTNDVSF

SEQ ID NO: 86116 - protein, 13 aa, Severe acute respiratory syndrome coronavirus 2
YLTFYLTNDVSFL

SEQ ID NO: 86117 - protein, 13 aa, Severe acute respiratory syndrome coronavirus 2
LTFYLTNDVSFLA

SEQ ID NO: 86118 - protein, 13 aa, Severe acute respiratory syndrome coronavirus 2
TFYLTNDVSFLAH

SEQ ID NO: 86119 - protein, 13 aa, Severe acute respiratory syndrome coronavirus 2
FYLTNDVSFLAHI

SEQ ID NO: 86120 - protein, 13 aa, Severe acute respiratory syndrome coronavirus 2
YLTNDVSFLAHIQ

SEQ ID NO: 86121 - protein, 13 aa, Severe acute respiratory syndrome coronavirus 2
NDVSFLAHIQWMV

SEQ ID NO: 86122 - protein, 13 aa, Severe acute respiratory syndrome coronavirus 2
DVSFLAHIQWMVM

SEQ ID NO: 86123 - protein, 13 aa, Severe acute respiratory syndrome coronavirus 2
HIQWMVMFTPLVP

SEQ ID NO: 86124 - protein, 13 aa, Severe acute respiratory syndrome coronavirus 2
IQWMVMFTPLVPF

SEQ ID NO: 86125 - protein, 13 aa, Severe acute respiratory syndrome coronavirus 2
QWMVMFTPLVPFW

SEQ ID NO: 86126 - protein, 13 aa, Severe acute respiratory syndrome coronavirus 2
WMVMFTPLVPFWI

SEQ ID NO: 86127 - protein, 13 aa, Severe acute respiratory syndrome coronavirus 2
MVMFTPLVPFWIT

SEQ ID NO: 86128 - protein, 13 aa, Severe acute respiratory syndrome coronavirus 2
VMFTPLVPFWITI

SEQ ID NO: 86129 - protein, 13 aa, Severe acute respiratory syndrome coronavirus 2
TPLVPFWITIAYI

SEQ ID NO: 86130 - protein, 13 aa, Severe acute respiratory syndrome coronavirus 2
PLVPFWITIAYII

SEQ ID NO: 86131 - protein, 13 aa, Severe acute respiratory syndrome coronavirus 2
LVPFWITIAYIIC

SEQ ID NO: 86132 - protein, 13 aa, Severe acute respiratory syndrome coronavirus 2
VPFWITIAYIICI

SEQ ID NO: 86133 - protein, 13 aa, Severe acute respiratory syndrome coronavirus 2
YIICISTKHFYWF

SEQ ID NO: 86134 - protein, 13 aa, Severe acute respiratory syndrome coronavirus 2
IICISTKHFYWFF

SEQ ID NO: 86135 - protein, 13 aa, Severe acute respiratory syndrome coronavirus 2
ISTKHFYWFFSNY

SEQ ID NO: 86136 - protein, 13 aa, Severe acute respiratory syndrome coronavirus 2
STKHFYWFFSNYL

SEQ ID NO: 86137 - protein, 13 aa, Severe acute respiratory syndrome coronavirus 2
TKHFYWFFSNYLK

SEQ ID NO: 86138 - protein, 13 aa, Severe acute respiratory syndrome coronavirus 2
KHFYWFFSNYLKR

SEQ ID NO: 86139 - protein, 13 aa, Severe acute respiratory syndrome coronavirus 2
HFYWFFSNYLKRR

SEQ ID NO: 86140 - protein, 13 aa, Severe acute respiratory syndrome coronavirus 2
FYWFFSNYLKRRV

SEQ ID NO: 86141 - protein, 13 aa, Severe acute respiratory syndrome coronavirus 2
YWFFSNYLKRRVV

SEQ ID NO: 86142 - protein, 13 aa, Severe acute respiratory syndrome coronavirus 2
WFFSNYLKRRVVF

SEQ ID NO: 86143 - protein, 13 aa, Severe acute respiratory syndrome coronavirus 2
FFSNYLKRRVVFN

SEQ ID NO: 86144 - protein, 13 aa, Severe acute respiratory syndrome coronavirus 2
FSNYLKRRVVFNG

SEQ ID NO: 86145 - protein, 13 aa, Severe acute respiratory syndrome coronavirus 2
YLKRRVVFNGVSF

SEQ ID NO: 86146 - protein, 13 aa, Severe acute respiratory syndrome coronavirus 2
LKRRVVFNGVSFS

SEQ ID NO: 86147 - protein, 13 aa, Severe acute respiratory syndrome coronavirus 2
KRRVVFNGVSFST

SEQ ID NO: 86148 - protein, 13 aa, Severe acute respiratory syndrome coronavirus 2
RRVVFNGVSFSTF

SEQ ID NO: 86149 - protein, 13 aa, Severe acute respiratory syndrome coronavirus 2
RVVFNGVSFSTFE

SEQ ID NO: 86150 - protein, 13 aa, Severe acute respiratory syndrome coronavirus 2
VVFNGVSFSTFEE

SEQ ID NO: 86151 - protein, 13 aa, Severe acute respiratory syndrome coronavirus 2
VFNGVSFSTFEEA

SEQ ID NO: 86152 - protein, 13 aa, Severe acute respiratory syndrome coronavirus 2
FNGVSFSTFEEAA

SEQ ID NO: 86153 - protein, 13 aa, Severe acute respiratory syndrome coronavirus 2
NGVSFSTFEEAAL

SEQ ID NO: 86154 - protein, 13 aa, Severe acute respiratory syndrome coronavirus 2
GVSFSTFEEAALC

SEQ ID NO: 86155 - protein, 13 aa, Severe acute respiratory syndrome coronavirus 2
TFEEAALCTFLLN

SEQ ID NO: 86156 - protein, 13 aa, Severe acute respiratory syndrome coronavirus 2
FEEAALCTFLLNK

SEQ ID NO: 86157 - protein, 13 aa, Severe acute respiratory syndrome coronavirus 2
EEAALCTFLLNKE

SEQ ID NO: 86158 - protein, 13 aa, Severe acute respiratory syndrome coronavirus 2
EAALCTFLLNKEM

SEQ ID NO: 86159 - protein, 13 aa, Severe acute respiratory syndrome coronavirus 2
AALCTFLLNKEMY

SEQ ID NO: 86160 - protein, 13 aa, Severe acute respiratory syndrome coronavirus 2
ALCTFLLNKEMYL

SEQ ID NO: 86161 - protein, 13 aa, Severe acute respiratory syndrome coronavirus 2
LCTFLLNKEMYLK

SEQ ID NO: 86162 - protein, 13 aa, Severe acute respiratory syndrome coronavirus 2
CTFLLNKEMYLKL

SEQ ID NO: 86163 - protein, 13 aa, Severe acute respiratory syndrome coronavirus 2
TFLLNKEMYLKLR

SEQ ID NO: 86164 - protein, 13 aa, Severe acute respiratory syndrome coronavirus 2
FLLNKEMYLKLRS

SEQ ID NO: 86165 - protein, 13 aa, Severe acute respiratory syndrome coronavirus 2
LLNKEMYLKLRSD

SEQ ID NO: 86166 - protein, 13 aa, Severe acute respiratory syndrome coronavirus 2
NKEMYLKLRSDVL

SEQ ID NO: 86167 - protein, 13 aa, Severe acute respiratory syndrome coronavirus 2
KEMYLKLRSDVLL

SEQ ID NO: 86168 - protein, 13 aa, Severe acute respiratory syndrome coronavirus 2
EMYLKLRSDVLLP

SEQ ID NO: 86169 - protein, 13 aa, Severe acute respiratory syndrome coronavirus 2
NDFSNSGSDVLYQ

SEQ ID NO: 86170 - protein, 13 aa, Severe acute respiratory syndrome coronavirus 2
DFSNSGSDVLYQP

SEQ ID NO: 86171 - protein, 13 aa, Severe acute respiratory syndrome coronavirus 2
FSNSGSDVLYQPP

SEQ ID NO: 86172 - protein, 13 aa, Severe acute respiratory syndrome coronavirus 2
SNSGSDVLYQPPQ

SEQ ID NO: 86173 - protein, 13 aa, Severe acute respiratory syndrome coronavirus 2
YQPPQTSITSAVL

SEQ ID NO: 86174 - protein, 13 aa, Severe acute respiratory syndrome coronavirus 2
QPPQTSITSAVLQ

SEQ ID NO: 86175 - protein, 13 aa, Severe acute respiratory syndrome coronavirus 2
TTTLNGLWLDDVV

SEQ ID NO: 86176 - protein, 13 aa, Severe acute respiratory syndrome coronavirus 2
TTLNGLWLDDVVY

SEQ ID NO: 86177 - protein, 13 aa, Severe acute respiratory syndrome coronavirus 2
TLNGLWLDDVVYC

SEQ ID NO: 86178 - protein, 13 aa, Severe acute respiratory syndrome coronavirus 2
LNGLWLDDVVYCP

SEQ ID NO: 86179 - protein, 13 aa, Severe acute respiratory syndrome coronavirus 2
SFCYMHHMELPTG

SEQ ID NO: 86180 - protein, 13 aa, Severe acute respiratory syndrome coronavirus 2
TDTTITVNVLAWL

SEQ ID NO: 86181 - protein, 13 aa, Severe acute respiratory syndrome coronavirus 2
DTTITVNVLAWLY

SEQ ID NO: 86182 - protein, 13 aa, Severe acute respiratory syndrome coronavirus 2
TTITVNVLAWLYA

SEQ ID NO: 86183 - protein, 13 aa, Severe acute respiratory syndrome coronavirus 2
TITVNVLAWLYAA

SEQ ID NO: 86184 - protein, 13 aa, Severe acute respiratory syndrome coronavirus 2
ITVNVLAWLYAAV

SEQ ID NO: 86185 - protein, 13 aa, Severe acute respiratory syndrome coronavirus 2
TVNVLAWLYAAVI

SEQ ID NO: 86186 - protein, 13 aa, Severe acute respiratory syndrome coronavirus 2
VNVLAWLYAAVIN

SEQ ID NO: 86187 - protein, 13 aa, Severe acute respiratory syndrome coronavirus 2
NVLAWLYAAVING

SEQ ID NO: 86188 - protein, 13 aa, Severe acute respiratory syndrome coronavirus 2
VLAWLYAAVINGD

SEQ ID NO: 86189 - protein, 13 aa, Severe acute respiratory syndrome coronavirus 2
LAWLYAAVINGDR

SEQ ID NO: 86190 - protein, 13 aa, Severe acute respiratory syndrome coronavirus 2
AWLYAAVINGDRW

SEQ ID NO: 86191 - protein, 13 aa, Severe acute respiratory syndrome coronavirus 2
WLYAAVINGDRWF

SEQ ID NO: 86192 - protein, 13 aa, Severe acute respiratory syndrome coronavirus 2
NRFTTTLNDFNLV

SEQ ID NO: 86193 - protein, 13 aa, Severe acute respiratory syndrome coronavirus 2
RFTTTLNDFNLVA

SEQ ID NO: 86194 - protein, 13 aa, Severe acute respiratory syndrome coronavirus 2
FTTTLNDFNLVAM

SEQ ID NO: 86195 - protein, 13 aa, Severe acute respiratory syndrome coronavirus 2
TTTLNDFNLVAMK

SEQ ID NO: 86196 - protein, 13 aa, Severe acute respiratory syndrome coronavirus 2
TLNDFNLVAMKYN

SEQ ID NO: 86197 - protein, 13 aa, Severe acute respiratory syndrome coronavirus 2
LNDFNLVAMKYNY

SEQ ID NO: 86198 - protein, 13 aa, Severe acute respiratory syndrome coronavirus 2
NDFNLVAMKYNYE

SEQ ID NO: 86199 - protein, 13 aa, Severe acute respiratory syndrome coronavirus 2
NLVAMKYNYEPLT

SEQ ID NO: 86200 - protein, 13 aa, Severe acute respiratory syndrome coronavirus 2
LGPLSAQTGIAVL

SEQ ID NO: 86201 - protein, 13 aa, Severe acute respiratory syndrome coronavirus 2
GPLSAQTGIAVLD

SEQ ID NO: 86202 - protein, 13 aa, Severe acute respiratory syndrome coronavirus 2
TILGSALLEDEFT

SEQ ID NO: 86203 - protein, 13 aa, Severe acute respiratory syndrome coronavirus 2
ILGSALLEDEFTP

SEQ ID NO: 86204 - protein, 13 aa, Severe acute respiratory syndrome coronavirus 2
ALLEDEFTPFDVV

SEQ ID NO: 86205 - protein, 13 aa, Severe acute respiratory syndrome coronavirus 2
LLEDEFTPFDVVR

SEQ ID NO: 86206 - protein, 13 aa, Severe acute respiratory syndrome coronavirus 2
VKRTIKGTHHWLL

SEQ ID NO: 86207 - protein, 13 aa, Severe acute respiratory syndrome coronavirus 2
KRTIKGTHHWLLL

SEQ ID NO: 86208 - protein, 13 aa, Severe acute respiratory syndrome coronavirus 2
RTIKGTHHWLLLT

SEQ ID NO: 86209 - protein, 13 aa, Severe acute respiratory syndrome coronavirus 2
TIKGTHHWLLLTI

SEQ ID NO: 86210 - protein, 13 aa, Severe acute respiratory syndrome coronavirus 2
IKGTHHWLLLTIL

SEQ ID NO: 86211 - protein, 13 aa, Severe acute respiratory syndrome coronavirus 2
KGTHHWLLLTILT

SEQ ID NO: 86212 - protein, 13 aa, Severe acute respiratory syndrome coronavirus 2
GTHHWLLLTILTS

SEQ ID NO: 86213 - protein, 13 aa, Severe acute respiratory syndrome coronavirus 2
THHWLLLTILTSL

SEQ ID NO: 86214 - protein, 13 aa, Severe acute respiratory syndrome coronavirus 2
HHWLLLTILTSLL

SEQ ID NO: 86215 - protein, 13 aa, Severe acute respiratory syndrome coronavirus 2
LLTILTSLLVLVQ

SEQ ID NO: 86216 - protein, 13 aa, Severe acute respiratory syndrome coronavirus 2
LTILTSLLVLVQS

SEQ ID NO: 86217 - protein, 13 aa, Severe acute respiratory syndrome coronavirus 2
TILTSLLVLVQST

SEQ ID NO: 86218 - protein, 13 aa, Severe acute respiratory syndrome coronavirus 2
SLLVLVQSTQWSL

SEQ ID NO: 86219 - protein, 13 aa, Severe acute respiratory syndrome coronavirus 2
LLVLVQSTQWSLF

SEQ ID NO: 86220 - protein, 13 aa, Severe acute respiratory syndrome coronavirus 2
MGIIAMSAFAMMF

SEQ ID NO: 86221 - protein, 13 aa, Severe acute respiratory syndrome coronavirus 2
GIIAMSAFAMMFV

SEQ ID NO: 86222 - protein, 13 aa, Severe acute respiratory syndrome coronavirus 2
IIAMSAFAMMFVK

SEQ ID NO: 86223 - protein, 13 aa, Severe acute respiratory syndrome coronavirus 2
IAMSAFAMMFVKH

SEQ ID NO: 86224 - protein, 13 aa, Severe acute respiratory syndrome coronavirus 2
AMSAFAMMFVKHK

SEQ ID NO: 86225 - protein, 13 aa, Severe acute respiratory syndrome coronavirus 2
MSAFAMMFVKHKH

SEQ ID NO: 86226 - protein, 13 aa, Severe acute respiratory syndrome coronavirus 2
SAFAMMFVKHKHA

SEQ ID NO: 86227 - protein, 13 aa, Severe acute respiratory syndrome coronavirus 2
AFAMMFVKHKHAF

SEQ ID NO: 86228 - protein, 13 aa, Severe acute respiratory syndrome coronavirus 2
FAMMFVKHKHAFL

SEQ ID NO: 86229 - protein, 13 aa, Severe acute respiratory syndrome coronavirus 2
AMMFVKHKHAFLC

SEQ ID NO: 86230 - protein, 13 aa, Severe acute respiratory syndrome coronavirus 2
MMFVKHKHAFLCL

SEQ ID NO: 86231 - protein, 13 aa, Severe acute respiratory syndrome coronavirus 2
MFVKHKHAFLCLF

SEQ ID NO: 86232 - protein, 13 aa, Severe acute respiratory syndrome coronavirus 2
FVKHKHAFLCLFL

SEQ ID NO: 86233 - protein, 13 aa, Severe acute respiratory syndrome coronavirus 2
VKHKHAFLCLFLL

SEQ ID NO: 86234 - protein, 13 aa, Severe acute respiratory syndrome coronavirus 2
KHKHAFLCLFLLP

SEQ ID NO: 86235 - protein, 13 aa, Severe acute respiratory syndrome coronavirus 2
HKHAFLCLFLLPS

SEQ ID NO: 86236 - protein, 13 aa, Severe acute respiratory syndrome coronavirus 2
ATVAYFNMVYMPA

SEQ ID NO: 86237 - protein, 13 aa, Severe acute respiratory syndrome coronavirus 2
TVAYFNMVYMPAS

SEQ ID NO: 86238 - protein, 13 aa, Severe acute respiratory syndrome coronavirus 2
VAYFNMVYMPASW

SEQ ID NO: 86239 - protein, 13 aa, Severe acute respiratory syndrome coronavirus 2
AYFNMVYMPASWV

SEQ ID NO: 86240 - protein, 13 aa, Severe acute respiratory syndrome coronavirus 2
YFNMVYMPASWVM

SEQ ID NO: 86241 - protein, 13 aa, Severe acute respiratory syndrome coronavirus 2
FNMVYMPASWVMR

SEQ ID NO: 86242 - protein, 13 aa, Severe acute respiratory syndrome coronavirus 2
NMVYMPASWVMRI

SEQ ID NO: 86243 - protein, 13 aa, Severe acute respiratory syndrome coronavirus 2
MVYMPASWVMRIM

SEQ ID NO: 86244 - protein, 13 aa, Severe acute respiratory syndrome coronavirus 2
VYMPASWVMRIMT

SEQ ID NO: 86245 - protein, 13 aa, Severe acute respiratory syndrome coronavirus 2
YMPASWVMRIMTW

SEQ ID NO: 86246 - protein, 13 aa, Severe acute respiratory syndrome coronavirus 2
MPASWVMRIMTWL

SEQ ID NO: 86247 - protein, 13 aa, Severe acute respiratory syndrome coronavirus 2
MRIMTWLDMVDTS

SEQ ID NO: 86248 - protein, 13 aa, Severe acute respiratory syndrome coronavirus 2
RIMTWLDMVDTSL

SEQ ID NO: 86249 - protein, 13 aa, Severe acute respiratory syndrome coronavirus 2
KLKDCVMYASAVV

SEQ ID NO: 86250 - protein, 13 aa, Severe acute respiratory syndrome coronavirus 2
LKDCVMYASAVVL

SEQ ID NO: 86251 - protein, 13 aa, Severe acute respiratory syndrome coronavirus 2
KDCVMYASAVVLL

SEQ ID NO: 86252 - protein, 13 aa, Severe acute respiratory syndrome coronavirus 2
DCVMYASAVVLLI

SEQ ID NO: 86253 - protein, 13 aa, Severe acute respiratory syndrome coronavirus 2
CVMYASAVVLLIL

SEQ ID NO: 86254 - protein, 13 aa, Severe acute respiratory syndrome coronavirus 2
IVFMCVEYCPIFF

SEQ ID NO: 86255 - protein, 13 aa, Severe acute respiratory syndrome coronavirus 2
VFMCVEYCPIFFI

SEQ ID NO: 86256 - protein, 13 aa, Severe acute respiratory syndrome coronavirus 2
FMCVEYCPIFFIT

SEQ ID NO: 86257 - protein, 13 aa, Severe acute respiratory syndrome coronavirus 2
IMLVYCFLGYFCT

SEQ ID NO: 86258 - protein, 13 aa, Severe acute respiratory syndrome coronavirus 2
CFLGYFCTCYFGL

SEQ ID NO: 86259 - protein, 13 aa, Severe acute respiratory syndrome coronavirus 2
FLGYFCTCYFGLF

SEQ ID NO: 86260 - protein, 13 aa, Severe acute respiratory syndrome coronavirus 2
LGYFCTCYFGLFC

SEQ ID NO: 86261 - protein, 13 aa, Severe acute respiratory syndrome coronavirus 2
GYFCTCYFGLFCL

SEQ ID NO: 86262 - protein, 13 aa, Severe acute respiratory syndrome coronavirus 2
CYFGLFCLLNRYF

SEQ ID NO: 86263 - protein, 13 aa, Severe acute respiratory syndrome coronavirus 2
YFGLFCLLNRYFR

SEQ ID NO: 86264 - protein, 13 aa, Severe acute respiratory syndrome coronavirus 2
FGLFCLLNRYFRL

SEQ ID NO: 86265 - protein, 13 aa, Severe acute respiratory syndrome coronavirus 2
GLFCLLNRYFRLT

SEQ ID NO: 86266 - protein, 13 aa, Severe acute respiratory syndrome coronavirus 2
LFCLLNRYFRLTL

SEQ ID NO: 86267 - protein, 13 aa, Severe acute respiratory syndrome coronavirus 2
FCLLNRYFRLTLG

SEQ ID NO: 86268 - protein, 13 aa, Severe acute respiratory syndrome coronavirus 2
CLLNRYFRLTLGV

SEQ ID NO: 86269 - protein, 13 aa, Severe acute respiratory syndrome coronavirus 2
LLNRYFRLTLGVY

SEQ ID NO: 86270 - protein, 13 aa, Severe acute respiratory syndrome coronavirus 2
LNRYFRLTLGVYD

SEQ ID NO: 86271 - protein, 13 aa, Severe acute respiratory syndrome coronavirus 2
NRYFRLTLGVYDY

SEQ ID NO: 86272 - protein, 13 aa, Severe acute respiratory syndrome coronavirus 2
RYFRLTLGVYDYL

SEQ ID NO: 86273 - protein, 13 aa, Severe acute respiratory syndrome coronavirus 2
YFRLTLGVYDYLV

SEQ ID NO: 86274 - protein, 13 aa, Severe acute respiratory syndrome coronavirus 2
FRLTLGVYDYLVS

SEQ ID NO: 86275 - protein, 13 aa, Severe acute respiratory syndrome coronavirus 2
RLTLGVYDYLVST

SEQ ID NO: 86276 - protein, 13 aa, Severe acute respiratory syndrome coronavirus 2
LTLGVYDYLVSTQ

SEQ ID NO: 86277 - protein, 13 aa, Severe acute respiratory syndrome coronavirus 2
TLGVYDYLVSTQE

SEQ ID NO: 86278 - protein, 13 aa, Severe acute respiratory syndrome coronavirus 2
GVYDYLVSTQEFR

SEQ ID NO: 86279 - protein, 13 aa, Severe acute respiratory syndrome coronavirus 2
VYDYLVSTQEFRY

SEQ ID NO: 86280 - protein, 13 aa, Severe acute respiratory syndrome coronavirus 2
YDYLVSTQEFRYM

SEQ ID NO: 86281 - protein, 13 aa, Severe acute respiratory syndrome coronavirus 2
DYLVSTQEFRYMN

SEQ ID NO: 86282 - protein, 13 aa, Severe acute respiratory syndrome coronavirus 2
YLVSTQEFRYMNS

SEQ ID NO: 86283 - protein, 13 aa, Severe acute respiratory syndrome coronavirus 2
STQEFRYMNSQGL

SEQ ID NO: 86284 - protein, 13 aa, Severe acute respiratory syndrome coronavirus 2
SDVKCTSVVLLSV

SEQ ID NO: 86285 - protein, 13 aa, Severe acute respiratory syndrome coronavirus 2
DVKCTSVVLLSVL

SEQ ID NO: 86286 - protein, 13 aa, Severe acute respiratory syndrome coronavirus 2
VKCTSVVLLSVLQ

SEQ ID NO: 86287 - protein, 13 aa, Severe acute respiratory syndrome coronavirus 2
KCTSVVLLSVLQQ

SEQ ID NO: 86288 - protein, 13 aa, Severe acute respiratory syndrome coronavirus 2
CTSVVLLSVLQQL

SEQ ID NO: 86289 - protein, 13 aa, Severe acute respiratory syndrome coronavirus 2
TSVVLLSVLQQLR

SEQ ID NO: 86290 - protein, 13 aa, Severe acute respiratory syndrome coronavirus 2
SVVLLSVLQQLRV

SEQ ID NO: 86291 - protein, 13 aa, Severe acute respiratory syndrome coronavirus 2
VVLLSVLQQLRVE

SEQ ID NO: 86292 - protein, 13 aa, Severe acute respiratory syndrome coronavirus 2
VLLSVLQQLRVES

SEQ ID NO: 86293 - protein, 13 aa, Severe acute respiratory syndrome coronavirus 2
CVQLHNDILLAKD

SEQ ID NO: 86294 - protein, 13 aa, Severe acute respiratory syndrome coronavirus 2
VQLHNDILLAKDT

SEQ ID NO: 86295 - protein, 13 aa, Severe acute respiratory syndrome coronavirus 2
DILLAKDTTEAFE

SEQ ID NO: 86296 - protein, 13 aa, Severe acute respiratory syndrome coronavirus 2
ILLAKDTTEAFEK

SEQ ID NO: 86297 - protein, 13 aa, Severe acute respiratory syndrome coronavirus 2
LLAKDTTEAFEKM

SEQ ID NO: 86298 - protein, 13 aa, Severe acute respiratory syndrome coronavirus 2
TTEAFEKMVSLLS

SEQ ID NO: 86299 - protein, 13 aa, Severe acute respiratory syndrome coronavirus 2
KMVSLLSVLLSMQ

SEQ ID NO: 86300 - protein, 13 aa, Severe acute respiratory syndrome coronavirus 2
MVSLLSVLLSMQG

SEQ ID NO: 86301 - protein, 13 aa, Severe acute respiratory syndrome coronavirus 2
VSLLSVLLSMQGA

SEQ ID NO: 86302 - protein, 13 aa, Severe acute respiratory syndrome coronavirus 2
SLLSVLLSMQGAV

SEQ ID NO: 86303 - protein, 13 aa, Severe acute respiratory syndrome coronavirus 2
LLSVLLSMQGAVD

SEQ ID NO: 86304 - protein, 13 aa, Severe acute respiratory syndrome coronavirus 2
LSVLLSMQGAVDI

SEQ ID NO: 86305 - protein, 13 aa, Severe acute respiratory syndrome coronavirus 2
SVLLSMQGAVDIN

SEQ ID NO: 86306 - protein, 13 aa, Severe acute respiratory syndrome coronavirus 2
VLLSMQGAVDINK

SEQ ID NO: 86307 - protein, 13 aa, Severe acute respiratory syndrome coronavirus 2
LLSMQGAVDINKL

SEQ ID NO: 86308 - protein, 13 aa, Severe acute respiratory syndrome coronavirus 2
IASEFSSLPSYAA

SEQ ID NO: 86309 - protein, 13 aa, Severe acute respiratory syndrome coronavirus 2
ASEFSSLPSYAAF

SEQ ID NO: 86310 - protein, 13 aa, Severe acute respiratory syndrome coronavirus 2
KRAKVTSAMQTML

SEQ ID NO: 86311 - protein, 13 aa, Severe acute respiratory syndrome coronavirus 2
VTSAMQTMLFTML

SEQ ID NO: 86312 - protein, 13 aa, Severe acute respiratory syndrome coronavirus 2
TSAMQTMLFTMLR

SEQ ID NO: 86313 - protein, 13 aa, Severe acute respiratory syndrome coronavirus 2
SAMQTMLFTMLRK

SEQ ID NO: 86314 - protein, 13 aa, Severe acute respiratory syndrome coronavirus 2
AMQTMLFTMLRKL

SEQ ID NO: 86315 - protein, 13 aa, Severe acute respiratory syndrome coronavirus 2
MQTMLFTMLRKLD

SEQ ID NO: 86316 - protein, 13 aa, Severe acute respiratory syndrome coronavirus 2
QTMLFTMLRKLDN

SEQ ID NO: 86317 - protein, 13 aa, Severe acute respiratory syndrome coronavirus 2
LWEIQQVVDADSK

SEQ ID NO: 86318 - protein, 13 aa, Severe acute respiratory syndrome coronavirus 2
WEIQQVVDADSKI

SEQ ID NO: 86319 - protein, 13 aa, Severe acute respiratory syndrome coronavirus 2
EIQQVVDADSKIV

SEQ ID NO: 86320 - protein, 13 aa, Severe acute respiratory syndrome coronavirus 2
QQVVDADSKIVQL

SEQ ID NO: 86321 - protein, 13 aa, Severe acute respiratory syndrome coronavirus 2
QVVDADSKIVQLS

SEQ ID NO: 86322 - protein, 13 aa, Severe acute respiratory syndrome coronavirus 2
VVDADSKIVQLSE

SEQ ID NO: 86323 - protein, 13 aa, Severe acute respiratory syndrome coronavirus 2
GGRFVLALLSDLQ

SEQ ID NO: 86324 - protein, 13 aa, Severe acute respiratory syndrome coronavirus 2
GRFVLALLSDLQD

SEQ ID NO: 86325 - protein, 13 aa, Severe acute respiratory syndrome coronavirus 2
RFVLALLSDLQDL

SEQ ID NO: 86326 - protein, 13 aa, Severe acute respiratory syndrome coronavirus 2
FVLALLSDLQDLK

SEQ ID NO: 86327 - protein, 13 aa, Severe acute respiratory syndrome coronavirus 2
VLALLSDLQDLKW

SEQ ID NO: 86328 - protein, 13 aa, Severe acute respiratory syndrome coronavirus 2
LALLSDLQDLKWA

SEQ ID NO: 86329 - protein, 13 aa, Severe acute respiratory syndrome coronavirus 2
LLSDLQDLKWARF

SEQ ID NO: 86330 - protein, 13 aa, Severe acute respiratory syndrome coronavirus 2
LSDLQDLKWARFP

SEQ ID NO: 86331 - protein, 13 aa, Severe acute respiratory syndrome coronavirus 2
SDLQDLKWARFPK

SEQ ID NO: 86332 - protein, 13 aa, Severe acute respiratory syndrome coronavirus 2
DLQDLKWARFPKS

SEQ ID NO: 86333 - protein, 13 aa, Severe acute respiratory syndrome coronavirus 2
LQDLKWARFPKSD

SEQ ID NO: 86334 - protein, 13 aa, Severe acute respiratory syndrome coronavirus 2
KGPKVKYLYFIKG

SEQ ID NO: 86335 - protein, 13 aa, Severe acute respiratory syndrome coronavirus 2
GPKVKYLYFIKGL

SEQ ID NO: 86336 - protein, 13 aa, Severe acute respiratory syndrome coronavirus 2
PKVKYLYFIKGLN

SEQ ID NO: 86337 - protein, 13 aa, Severe acute respiratory syndrome coronavirus 2
KVKYLYFIKGLNN

SEQ ID NO: 86338 - protein, 13 aa, Severe acute respiratory syndrome coronavirus 2
VKYLYFIKGLNNL

SEQ ID NO: 86339 - protein, 13 aa, Severe acute respiratory syndrome coronavirus 2
KYLYFIKGLNNLN

SEQ ID NO: 86340 - protein, 13 aa, Severe acute respiratory syndrome coronavirus 2
YLYFIKGLNNLNR

SEQ ID NO: 86341 - protein, 13 aa, Severe acute respiratory syndrome coronavirus 2
LYFIKGLNNLNRG

SEQ ID NO: 86342 - protein, 13 aa, Severe acute respiratory syndrome coronavirus 2
YFIKGLNNLNRGM

SEQ ID NO: 86343 - protein, 13 aa, Severe acute respiratory syndrome coronavirus 2
FIKGLNNLNRGMV

SEQ ID NO: 86344 - protein, 13 aa, Severe acute respiratory syndrome coronavirus 2
IKGLNNLNRGMVL

SEQ ID NO: 86345 - protein, 13 aa, Severe acute respiratory syndrome coronavirus 2
VLSFCAFAVDAAK

SEQ ID NO: 86346 - protein, 13 aa, Severe acute respiratory syndrome coronavirus 2
LSFCAFAVDAAKA

SEQ ID NO: 86347 - protein, 13 aa, Severe acute respiratory syndrome coronavirus 2
SFCAFAVDAAKAY

SEQ ID NO: 86348 - protein, 13 aa, Severe acute respiratory syndrome coronavirus 2
FCAFAVDAAKAYK

SEQ ID NO: 86349 - protein, 13 aa, Severe acute respiratory syndrome coronavirus 2
CAFAVDAAKAYKD

SEQ ID NO: 86350 - protein, 13 aa, Severe acute respiratory syndrome coronavirus 2
AFAVDAAKAYKDY

SEQ ID NO: 86351 - protein, 13 aa, Severe acute respiratory syndrome coronavirus 2
FAVDAAKAYKDYL

SEQ ID NO: 86352 - protein, 13 aa, Severe acute respiratory syndrome coronavirus 2
AVDAAKAYKDYLA

SEQ ID NO: 86353 - protein, 13 aa, Severe acute respiratory syndrome coronavirus 2
VDAAKAYKDYLAS

SEQ ID NO: 86354 - protein, 13 aa, Severe acute respiratory syndrome coronavirus 2
DAAKAYKDYLASG

SEQ ID NO: 86355 - protein, 13 aa, Severe acute respiratory syndrome coronavirus 2
AYKDYLASGGQPI

SEQ ID NO: 86356 - protein, 13 aa, Severe acute respiratory syndrome coronavirus 2
YKDYLASGGQPIT

SEQ ID NO: 86357 - protein, 13 aa, Severe acute respiratory syndrome coronavirus 2
KDYLASGGQPITN

SEQ ID NO: 86358 - protein, 13 aa, Severe acute respiratory syndrome coronavirus 2
DYLASGGQPITNC

SEQ ID NO: 86359 - protein, 13 aa, Severe acute respiratory syndrome coronavirus 2
YLASGGQPITNCV

SEQ ID NO: 86360 - protein, 13 aa, Severe acute respiratory syndrome coronavirus 2
LASGGQPITNCVK

SEQ ID NO: 86361 - protein, 13 aa, Severe acute respiratory syndrome coronavirus 2
PKGFCDLKGKYVQ

SEQ ID NO: 86362 - protein, 13 aa, Severe acute respiratory syndrome coronavirus 2
KGFCDLKGKYVQI

SEQ ID NO: 86363 - protein, 14 aa, Severe acute respiratory syndrome coronavirus 2
VLPQLEQPYVFIKR

SEQ ID NO: 86364 - protein, 14 aa, Severe acute respiratory syndrome coronavirus 2
AELEGIQYGRSGET

SEQ ID NO: 86365 - protein, 14 aa, Severe acute respiratory syndrome coronavirus 2
PDGYPLECIKDLLA

SEQ ID NO: 86366 - protein, 14 aa, Severe acute respiratory syndrome coronavirus 2
HEIAWYTERSEKSY

SEQ ID NO: 86367 - protein, 14 aa, Severe acute respiratory syndrome coronavirus 2
EIAWYTERSEKSYE

SEQ ID NO: 86368 - protein, 14 aa, Severe acute respiratory syndrome coronavirus 2
IAWYTERSEKSYEL

SEQ ID NO: 86369 - protein, 14 aa, Severe acute respiratory syndrome coronavirus 2
AWYTERSEKSYELQ

SEQ ID NO: 86370 - protein, 14 aa, Severe acute respiratory syndrome coronavirus 2
RSEKSYELQTPFEI

SEQ ID NO: 86371 - protein, 14 aa, Severe acute respiratory syndrome coronavirus 2
SEKSYELQTPFEIK

SEQ ID NO: 86372 - protein, 14 aa, Severe acute respiratory syndrome coronavirus 2
EKSYELQTPFEIKL

SEQ ID NO: 86373 - protein, 14 aa, Severe acute respiratory syndrome coronavirus 2
KSYELQTPFEIKLA

SEQ ID NO: 86374 - protein, 14 aa, Severe acute respiratory syndrome coronavirus 2
SYELQTPFEIKLAK

SEQ ID NO: 86375 - protein, 14 aa, Severe acute respiratory syndrome coronavirus 2
YELQTPFEIKLAKK

SEQ ID NO: 86376 - protein, 14 aa, Severe acute respiratory syndrome coronavirus 2
QKEKVNINIVGDFK

SEQ ID NO: 86377 - protein, 14 aa, Severe acute respiratory syndrome coronavirus 2
EKVNINIVGDFKLN

SEQ ID NO: 86378 - protein, 14 aa, Severe acute respiratory syndrome coronavirus 2
KVNINIVGDFKLNE

SEQ ID NO: 86379 - protein, 14 aa, Severe acute respiratory syndrome coronavirus 2
VNINIVGDFKLNEE

SEQ ID NO: 86380 - protein, 14 aa, Severe acute respiratory syndrome coronavirus 2
NINIVGDFKLNEEI

SEQ ID NO: 86381 - protein, 14 aa, Severe acute respiratory syndrome coronavirus 2
INIVGDFKLNEEIA

SEQ ID NO: 86382 - protein, 14 aa, Severe acute respiratory syndrome coronavirus 2
NIVGDFKLNEEIAI

SEQ ID NO: 86383 - protein, 14 aa, Severe acute respiratory syndrome coronavirus 2
IVGDFKLNEEIAII

SEQ ID NO: 86384 - protein, 14 aa, Severe acute respiratory syndrome coronavirus 2
VGDFKLNEEIAIIL

SEQ ID NO: 86385 - protein, 14 aa, Severe acute respiratory syndrome coronavirus 2
GDFKLNEEIAIILA

SEQ ID NO: 86386 - protein, 14 aa, Severe acute respiratory syndrome coronavirus 2
DFKLNEEIAIILAS

SEQ ID NO: 86387 - protein, 14 aa, Severe acute respiratory syndrome coronavirus 2
FKLNEEIAIILASF

SEQ ID NO: 86388 - protein, 14 aa, Severe acute respiratory syndrome coronavirus 2
ASTSAFVETVKGLD

SEQ ID NO: 86389 - protein, 14 aa, Severe acute respiratory syndrome coronavirus 2
STSAFVETVKGLDY

SEQ ID NO: 86390 - protein, 14 aa, Severe acute respiratory syndrome coronavirus 2
TSAFVETVKGLDYK

SEQ ID NO: 86391 - protein, 14 aa, Severe acute respiratory syndrome coronavirus 2
FKQIVESCGNFKVT

SEQ ID NO: 86392 - protein, 14 aa, Severe acute respiratory syndrome coronavirus 2
KQIVESCGNFKVTK

SEQ ID NO: 86393 - protein, 14 aa, Severe acute respiratory syndrome coronavirus 2
TAQNSVRVLQKAAI

SEQ ID NO: 86394 - protein, 14 aa, Severe acute respiratory syndrome coronavirus 2
FTSDLATNNLVVMA

SEQ ID NO: 86395 - protein, 14 aa, Severe acute respiratory syndrome coronavirus 2
TSDLATNNLVVMAY

SEQ ID NO: 86396 - protein, 14 aa, Severe acute respiratory syndrome coronavirus 2
SDLATNNLVVMAYI

SEQ ID NO: 86397 - protein, 14 aa, Severe acute respiratory syndrome coronavirus 2
DLATNNLVVMAYIT

SEQ ID NO: 86398 - protein, 14 aa, Severe acute respiratory syndrome coronavirus 2
LATNNLVVMAYITG

SEQ ID NO: 86399 - protein, 14 aa, Severe acute respiratory syndrome coronavirus 2
ATNNLVVMAYITGG

SEQ ID NO: 86400 - protein, 14 aa, Severe acute respiratory syndrome coronavirus 2
TNNLVVMAYITGGV

SEQ ID NO: 86401 - protein, 14 aa, Severe acute respiratory syndrome coronavirus 2
NNLVVMAYITGGVV

SEQ ID NO: 86402 - protein, 14 aa, Severe acute respiratory syndrome coronavirus 2
NLVVMAYITGGVVQ

SEQ ID NO: 86403 - protein, 14 aa, Severe acute respiratory syndrome coronavirus 2
LVVMAYITGGVVQL

SEQ ID NO: 86404 - protein, 14 aa, Severe acute respiratory syndrome coronavirus 2
LEEKFKEGVEFLRD

SEQ ID NO: 86405 - protein, 14 aa, Severe acute respiratory syndrome coronavirus 2
EEKFKEGVEFLRDG

SEQ ID NO: 86406 - protein, 14 aa, Severe acute respiratory syndrome coronavirus 2
EKFKEGVEFLRDGW

SEQ ID NO: 86407 - protein, 14 aa, Severe acute respiratory syndrome coronavirus 2
KFKEGVEFLRDGWE

SEQ ID NO: 86408 - protein, 14 aa, Severe acute respiratory syndrome coronavirus 2
FKEGVEFLRDGWEI

SEQ ID NO: 86409 - protein, 14 aa, Severe acute respiratory syndrome coronavirus 2
KEGVEFLRDGWEIV

SEQ ID NO: 86410 - protein, 14 aa, Severe acute respiratory syndrome coronavirus 2
EGVEFLRDGWEIVK

SEQ ID NO: 86411 - protein, 14 aa, Severe acute respiratory syndrome coronavirus 2
GVEFLRDGWEIVKF

SEQ ID NO: 86412 - protein, 14 aa, Severe acute respiratory syndrome coronavirus 2
IVGGQIVTCAKEIK

SEQ ID NO: 86413 - protein, 14 aa, Severe acute respiratory syndrome coronavirus 2
NKFLALCADSIIIG

SEQ ID NO: 86414 - protein, 14 aa, Severe acute respiratory syndrome coronavirus 2
KFLALCADSIIIGG

SEQ ID NO: 86415 - protein, 14 aa, Severe acute respiratory syndrome coronavirus 2
FLALCADSIIIGGA

SEQ ID NO: 86416 - protein, 14 aa, Severe acute respiratory syndrome coronavirus 2
LALCADSIIIGGAK

SEQ ID NO: 86417 - protein, 14 aa, Severe acute respiratory syndrome coronavirus 2
LCADSIIIGGAKLK

SEQ ID NO: 86418 - protein, 14 aa, Severe acute respiratory syndrome coronavirus 2
CADSIIIGGAKLKA

SEQ ID NO: 86419 - protein, 14 aa, Severe acute respiratory syndrome coronavirus 2
ADSIIIGGAKLKAL

SEQ ID NO: 86420 - protein, 14 aa, Severe acute respiratory syndrome coronavirus 2
DSIIIGGAKLKALN

SEQ ID NO: 86421 - protein, 14 aa, Severe acute respiratory syndrome coronavirus 2
SIIIGGAKLKALNL

SEQ ID NO: 86422 - protein, 14 aa, Severe acute respiratory syndrome coronavirus 2
IIIGGAKLKALNLG

SEQ ID NO: 86423 - protein, 14 aa, Severe acute respiratory syndrome coronavirus 2
IIGGAKLKALNLGE

SEQ ID NO: 86424 - protein, 14 aa, Severe acute respiratory syndrome coronavirus 2
FVTHSKGLYRKCVK

SEQ ID NO: 86425 - protein, 14 aa, Severe acute respiratory syndrome coronavirus 2
EAVEAPLVGTPVCI

SEQ ID NO: 86426 - protein, 14 aa, Severe acute respiratory syndrome coronavirus 2
AVEAPLVGTPVCIN

SEQ ID NO: 86427 - protein, 14 aa, Severe acute respiratory syndrome coronavirus 2
VEAPLVGTPVCING

SEQ ID NO: 86428 - protein, 14 aa, Severe acute respiratory syndrome coronavirus 2
EAPLVGTPVCINGL

SEQ ID NO: 86429 - protein, 14 aa, Severe acute respiratory syndrome coronavirus 2
APLVGTPVCINGLM

SEQ ID NO: 86430 - protein, 14 aa, Severe acute respiratory syndrome coronavirus 2
LVGTPVCINGLMLL

SEQ ID NO: 86431 - protein, 14 aa, Severe acute respiratory syndrome coronavirus 2
VGTPVCINGLMLLE

SEQ ID NO: 86432 - protein, 14 aa, Severe acute respiratory syndrome coronavirus 2
GTPVCINGLMLLEI

SEQ ID NO: 86433 - protein, 14 aa, Severe acute respiratory syndrome coronavirus 2
TPVCINGLMLLEIK

SEQ ID NO: 86434 - protein, 14 aa, Severe acute respiratory syndrome coronavirus 2
PVCINGLMLLEIKD

SEQ ID NO: 86435 - protein, 14 aa, Severe acute respiratory syndrome coronavirus 2
VCINGLMLLEIKDT

SEQ ID NO: 86436 - protein, 14 aa, Severe acute respiratory syndrome coronavirus 2
CINGLMLLEIKDTE

SEQ ID NO: 86437 - protein, 14 aa, Severe acute respiratory syndrome coronavirus 2
INGLMLLEIKDTEK

SEQ ID NO: 86438 - protein, 14 aa, Severe acute respiratory syndrome coronavirus 2
NGLMLLEIKDTEKY

SEQ ID NO: 86439 - protein, 14 aa, Severe acute respiratory syndrome coronavirus 2
CSAYTVELGTEVNE

SEQ ID NO: 86440 - protein, 14 aa, Severe acute respiratory syndrome coronavirus 2
SAYTVELGTEVNEF

SEQ ID NO: 86441 - protein, 14 aa, Severe acute respiratory syndrome coronavirus 2
AYTVELGTEVNEFA

SEQ ID NO: 86442 - protein, 14 aa, Severe acute respiratory syndrome coronavirus 2
VELGTEVNEFACVV

SEQ ID NO: 86443 - protein, 14 aa, Severe acute respiratory syndrome coronavirus 2
TPVVQTIEVNSFSG

SEQ ID NO: 86444 - protein, 14 aa, Severe acute respiratory syndrome coronavirus 2
PVVQTIEVNSFSGY

SEQ ID NO: 86445 - protein, 14 aa, Severe acute respiratory syndrome coronavirus 2
VVQTIEVNSFSGYL

SEQ ID NO: 86446 - protein, 14 aa, Severe acute respiratory syndrome coronavirus 2
VQTIEVNSFSGYLK

SEQ ID NO: 86447 - protein, 14 aa, Severe acute respiratory syndrome coronavirus 2
QTIEVNSFSGYLKL

SEQ ID NO: 86448 - protein, 14 aa, Severe acute respiratory syndrome coronavirus 2
TIEVNSFSGYLKLT

SEQ ID NO: 86449 - protein, 14 aa, Severe acute respiratory syndrome coronavirus 2
KPTVVVNAANVYLK

SEQ ID NO: 86450 - protein, 14 aa, Severe acute respiratory syndrome coronavirus 2
PTVVVNAANVYLKH

SEQ ID NO: 86451 - protein, 14 aa, Severe acute respiratory syndrome coronavirus 2
TVVVNAANVYLKHG

SEQ ID NO: 86452 - protein, 14 aa, Severe acute respiratory syndrome coronavirus 2
VVVNAANVYLKHGG

SEQ ID NO: 86453 - protein, 14 aa, Severe acute respiratory syndrome coronavirus 2
VVNAANVYLKHGGG

SEQ ID NO: 86454 - protein, 14 aa, Severe acute respiratory syndrome coronavirus 2
NVYLKHGGGVAGAL

SEQ ID NO: 86455 - protein, 14 aa, Severe acute respiratory syndrome coronavirus 2
VYLKHGGGVAGALN

SEQ ID NO: 86456 - protein, 14 aa, Severe acute respiratory syndrome coronavirus 2
YLKHGGGVAGALNK

SEQ ID NO: 86457 - protein, 14 aa, Severe acute respiratory syndrome coronavirus 2
LKHGGGVAGALNKA

SEQ ID NO: 86458 - protein, 14 aa, Severe acute respiratory syndrome coronavirus 2
KHGGGVAGALNKAT

SEQ ID NO: 86459 - protein, 14 aa, Severe acute respiratory syndrome coronavirus 2
HGGGVAGALNKATN

SEQ ID NO: 86460 - protein, 14 aa, Severe acute respiratory syndrome coronavirus 2
GGGVAGALNKATNN

SEQ ID NO: 86461 - protein, 14 aa, Severe acute respiratory syndrome coronavirus 2
GGVAGALNKATNNA

SEQ ID NO: 86462 - protein, 14 aa, Severe acute respiratory syndrome coronavirus 2
GVAGALNKATNNAM

SEQ ID NO: 86463 - protein, 14 aa, Severe acute respiratory syndrome coronavirus 2
VAGALNKATNNAMQ

SEQ ID NO: 86464 - protein, 14 aa, Severe acute respiratory syndrome coronavirus 2
GSCVLSGHNLAKHC

SEQ ID NO: 86465 - protein, 14 aa, Severe acute respiratory syndrome coronavirus 2
LSGHNLAKHCLHVV

SEQ ID NO: 86466 - protein, 14 aa, Severe acute respiratory syndrome coronavirus 2
SGHNLAKHCLHVVG

SEQ ID NO: 86467 - protein, 14 aa, Severe acute respiratory syndrome coronavirus 2
GHNLAKHCLHVVGP

SEQ ID NO: 86468 - protein, 14 aa, Severe acute respiratory syndrome coronavirus 2
LAKHCLHVVGPNVN

SEQ ID NO: 86469 - protein, 14 aa, Severe acute respiratory syndrome coronavirus 2
IQLLKSAYENFNQH

SEQ ID NO: 86470 - protein, 14 aa, Severe acute respiratory syndrome coronavirus 2
TNVYLAVFDKNLYD

SEQ ID NO: 86471 - protein, 14 aa, Severe acute respiratory syndrome coronavirus 2
NVYLAVFDKNLYDK

SEQ ID NO: 86472 - protein, 14 aa, Severe acute respiratory syndrome coronavirus 2
VFDKNLYDKLVSSF

SEQ ID NO: 86473 - protein, 14 aa, Severe acute respiratory syndrome coronavirus 2
FDKNLYDKLVSSFL

SEQ ID NO: 86474 - protein, 14 aa, Severe acute respiratory syndrome coronavirus 2
DKNLYDKLVSSFLE

SEQ ID NO: 86475 - protein, 14 aa, Severe acute respiratory syndrome coronavirus 2
KFLTENLLLYIDIN

SEQ ID NO: 86476 - protein, 14 aa, Severe acute respiratory syndrome coronavirus 2
FLTENLLLYIDING

SEQ ID NO: 86477 - protein, 14 aa, Severe acute respiratory syndrome coronavirus 2
DSATLVSDIDITFL

SEQ ID NO: 86478 - protein, 14 aa, Severe acute respiratory syndrome coronavirus 2
SATLVSDIDITFLK

SEQ ID NO: 86479 - protein, 14 aa, Severe acute respiratory syndrome coronavirus 2
ATLVSDIDITFLKK

SEQ ID NO: 86480 - protein, 14 aa, Severe acute respiratory syndrome coronavirus 2
TLVSDIDITFLKKD

SEQ ID NO: 86481 - protein, 14 aa, Severe acute respiratory syndrome coronavirus 2
PYIVGDVVQEGVLT

SEQ ID NO: 86482 - protein, 14 aa, Severe acute respiratory syndrome coronavirus 2
YITTYPGQGLNGYT

SEQ ID NO: 86483 - protein, 14 aa, Severe acute respiratory syndrome coronavirus 2
YPGQGLNGYTVEEA

SEQ ID NO: 86484 - protein, 14 aa, Severe acute respiratory syndrome coronavirus 2
PGQGLNGYTVEEAK

SEQ ID NO: 86485 - protein, 14 aa, Severe acute respiratory syndrome coronavirus 2
GQGLNGYTVEEAKT

SEQ ID NO: 86486 - protein, 14 aa, Severe acute respiratory syndrome coronavirus 2
QGLNGYTVEEAKTV

SEQ ID NO: 86487 - protein, 14 aa, Severe acute respiratory syndrome coronavirus 2
GLNGYTVEEAKTVL

SEQ ID NO: 86488 - protein, 14 aa, Severe acute respiratory syndrome coronavirus 2
LNGYTVEEAKTVLK

SEQ ID NO: 86489 - protein, 14 aa, Severe acute respiratory syndrome coronavirus 2
NGYTVEEAKTVLKK

SEQ ID NO: 86490 - protein, 14 aa, Severe acute respiratory syndrome coronavirus 2
GYTVEEAKTVLKKC

SEQ ID NO: 86491 - protein, 14 aa, Severe acute respiratory syndrome coronavirus 2
FYILPSIISNEKQE

SEQ ID NO: 86492 - protein, 14 aa, Severe acute respiratory syndrome coronavirus 2
YILPSIISNEKQEI

SEQ ID NO: 86493 - protein, 14 aa, Severe acute respiratory syndrome coronavirus 2
ILPSIISNEKQEIL

SEQ ID NO: 86494 - protein, 14 aa, Severe acute respiratory syndrome coronavirus 2
LPSIISNEKQEILG

SEQ ID NO: 86495 - protein, 14 aa, Severe acute respiratory syndrome coronavirus 2
PSIISNEKQEILGT

SEQ ID NO: 86496 - protein, 14 aa, Severe acute respiratory syndrome coronavirus 2
SIISNEKQEILGTV

SEQ ID NO: 86497 - protein, 14 aa, Severe acute respiratory syndrome coronavirus 2
HAEETRKLMPVCVE

SEQ ID NO: 86498 - protein, 14 aa, Severe acute respiratory syndrome coronavirus 2
AEETRKLMPVCVET

SEQ ID NO: 86499 - protein, 14 aa, Severe acute respiratory syndrome coronavirus 2
EETRKLMPVCVETK

SEQ ID NO: 86500 - protein, 14 aa, Severe acute respiratory syndrome coronavirus 2
ETRKLMPVCVETKA

SEQ ID NO: 86501 - protein, 14 aa, Severe acute respiratory syndrome coronavirus 2
CVETKAIVSTIQRK

SEQ ID NO: 86502 - protein, 14 aa, Severe acute respiratory syndrome coronavirus 2
VETKAIVSTIQRKY

SEQ ID NO: 86503 - protein, 14 aa, Severe acute respiratory syndrome coronavirus 2
ETKAIVSTIQRKYK

SEQ ID NO: 86504 - protein, 14 aa, Severe acute respiratory syndrome coronavirus 2
VSTIQRKYKGIKIQ

SEQ ID NO: 86505 - protein, 14 aa, Severe acute respiratory syndrome coronavirus 2
STIQRKYKGIKIQE

SEQ ID NO: 86506 - protein, 14 aa, Severe acute respiratory syndrome coronavirus 2
TIQRKYKGIKIQEG

SEQ ID NO: 86507 - protein, 14 aa, Severe acute respiratory syndrome coronavirus 2
IQRKYKGIKIQEGV

SEQ ID NO: 86508 - protein, 14 aa, Severe acute respiratory syndrome coronavirus 2
QRKYKGIKIQEGVV

SEQ ID NO: 86509 - protein, 14 aa, Severe acute respiratory syndrome coronavirus 2
RKYKGIKIQEGVVD

SEQ ID NO: 86510 - protein, 14 aa, Severe acute respiratory syndrome coronavirus 2
KYKGIKIQEGVVDY

SEQ ID NO: 86511 - protein, 14 aa, Severe acute respiratory syndrome coronavirus 2
YKGIKIQEGVVDYG

SEQ ID NO: 86512 - protein, 14 aa, Severe acute respiratory syndrome coronavirus 2
AVTAYNGYLTSSSK

SEQ ID NO: 86513 - protein, 14 aa, Severe acute respiratory syndrome coronavirus 2
VTAYNGYLTSSSKT

SEQ ID NO: 86514 - protein, 14 aa, Severe acute respiratory syndrome coronavirus 2
TAYNGYLTSSSKTP

SEQ ID NO: 86515 - protein, 14 aa, Severe acute respiratory syndrome coronavirus 2
TPEEHFIETISLAG

SEQ ID NO: 86516 - protein, 14 aa, Severe acute respiratory syndrome coronavirus 2
PEEHFIETISLAGS

SEQ ID NO: 86517 - protein, 14 aa, Severe acute respiratory syndrome coronavirus 2
EEHFIETISLAGSY

SEQ ID NO: 86518 - protein, 14 aa, Severe acute respiratory syndrome coronavirus 2
EHFIETISLAGSYK

SEQ ID NO: 86519 - protein, 14 aa, Severe acute respiratory syndrome coronavirus 2
HFIETISLAGSYKD

SEQ ID NO: 86520 - protein, 14 aa, Severe acute respiratory syndrome coronavirus 2
FIETISLAGSYKDW

SEQ ID NO: 86521 - protein, 14 aa, Severe acute respiratory syndrome coronavirus 2
VITFDNLKTLLSLR

SEQ ID NO: 86522 - protein, 14 aa, Severe acute respiratory syndrome coronavirus 2
VRTIKVFTTVDNIN

SEQ ID NO: 86523 - protein, 14 aa, Severe acute respiratory syndrome coronavirus 2
RTIKVFTTVDNINL

SEQ ID NO: 86524 - protein, 14 aa, Severe acute respiratory syndrome coronavirus 2
TIKVFTTVDNINLH

SEQ ID NO: 86525 - protein, 14 aa, Severe acute respiratory syndrome coronavirus 2
YPQVNGLTSIKWAD

SEQ ID NO: 86526 - protein, 14 aa, Severe acute respiratory syndrome coronavirus 2
PQVNGLTSIKWADN

SEQ ID NO: 86527 - protein, 14 aa, Severe acute respiratory syndrome coronavirus 2
QVNGLTSIKWADNN

SEQ ID NO: 86528 - protein, 14 aa, Severe acute respiratory syndrome coronavirus 2
VNGLTSIKWADNNC

SEQ ID NO: 86529 - protein, 14 aa, Severe acute respiratory syndrome coronavirus 2
NGLTSIKWADNNCY

SEQ ID NO: 86530 - protein, 14 aa, Severe acute respiratory syndrome coronavirus 2
GLTSIKWADNNCYL

SEQ ID NO: 86531 - protein, 14 aa, Severe acute respiratory syndrome coronavirus 2
LTSIKWADNNCYLA

SEQ ID NO: 86532 - protein, 14 aa, Severe acute respiratory syndrome coronavirus 2
TSIKWADNNCYLAT

SEQ ID NO: 86533 - protein, 14 aa, Severe acute respiratory syndrome coronavirus 2
LQQIELKFNPPALQ

SEQ ID NO: 86534 - protein, 14 aa, Severe acute respiratory syndrome coronavirus 2
QQIELKFNPPALQD

SEQ ID NO: 86535 - protein, 14 aa, Severe acute respiratory syndrome coronavirus 2
ELKFNPPALQDAYY

SEQ ID NO: 86536 - protein, 14 aa, Severe acute respiratory syndrome coronavirus 2
ALQDAYYRARAGEA

SEQ ID NO: 86537 - protein, 14 aa, Severe acute respiratory syndrome coronavirus 2
LQDAYYRARAGEAA

SEQ ID NO: 86538 - protein, 14 aa, Severe acute respiratory syndrome coronavirus 2
QDAYYRARAGEAAN

SEQ ID NO: 86539 - protein, 14 aa, Severe acute respiratory syndrome coronavirus 2
DAYYRARAGEAANF

SEQ ID NO: 86540 - protein, 14 aa, Severe acute respiratory syndrome coronavirus 2
AYYRARAGEAANFC

SEQ ID NO: 86541 - protein, 14 aa, Severe acute respiratory syndrome coronavirus 2
YYRARAGEAANFCA

SEQ ID NO: 86542 - protein, 14 aa, Severe acute respiratory syndrome coronavirus 2
YRARAGEAANFCAL

SEQ ID NO: 86543 - protein, 14 aa, Severe acute respiratory syndrome coronavirus 2
RARAGEAANFCALI

SEQ ID NO: 86544 - protein, 14 aa, Severe acute respiratory syndrome coronavirus 2
ARAGEAANFCALIL

SEQ ID NO: 86545 - protein, 14 aa, Severe acute respiratory syndrome coronavirus 2
RAGEAANFCALILA

SEQ ID NO: 86546 - protein, 14 aa, Severe acute respiratory syndrome coronavirus 2
AGEAANFCALILAY

SEQ ID NO: 86547 - protein, 14 aa, Severe acute respiratory syndrome coronavirus 2
GEAANFCALILAYC

SEQ ID NO: 86548 - protein, 14 aa, Severe acute respiratory syndrome coronavirus 2
ELGDVRETMSYLFQ

SEQ ID NO: 86549 - protein, 14 aa, Severe acute respiratory syndrome coronavirus 2
MSYLFQHANLDSCK

SEQ ID NO: 86550 - protein, 14 aa, Severe acute respiratory syndrome coronavirus 2
SYLFQHANLDSCKR

SEQ ID NO: 86551 - protein, 14 aa, Severe acute respiratory syndrome coronavirus 2
YLFQHANLDSCKRV

SEQ ID NO: 86552 - protein, 14 aa, Severe acute respiratory syndrome coronavirus 2
CKRVLNVVCKTCGQ

SEQ ID NO: 86553 - protein, 14 aa, Severe acute respiratory syndrome coronavirus 2
KRVLNVVCKTCGQQ

SEQ ID NO: 86554 - protein, 14 aa, Severe acute respiratory syndrome coronavirus 2
MGTLSYEQFKKGVQ

SEQ ID NO: 86555 - protein, 14 aa, Severe acute respiratory syndrome coronavirus 2
GTLSYEQFKKGVQI

SEQ ID NO: 86556 - protein, 14 aa, Severe acute respiratory syndrome coronavirus 2
TLSYEQFKKGVQIP

SEQ ID NO: 86557 - protein, 14 aa, Severe acute respiratory syndrome coronavirus 2
ITDVFYKENSYTTT

SEQ ID NO: 86558 - protein, 14 aa, Severe acute respiratory syndrome coronavirus 2
TDVFYKENSYTTTI

SEQ ID NO: 86559 - protein, 14 aa, Severe acute respiratory syndrome coronavirus 2
DVFYKENSYTTTIK

SEQ ID NO: 86560 - protein, 14 aa, Severe acute respiratory syndrome coronavirus 2
VFYKENSYTTTIKP

SEQ ID NO: 86561 - protein, 14 aa, Severe acute respiratory syndrome coronavirus 2
KENSYTTTIKPVTY

SEQ ID NO: 86562 - protein, 14 aa, Severe acute respiratory syndrome coronavirus 2
ENSYTTTIKPVTYK

SEQ ID NO: 86563 - protein, 14 aa, Severe acute respiratory syndrome coronavirus 2
NSYTTTIKPVTYKL

SEQ ID NO: 86564 - protein, 14 aa, Severe acute respiratory syndrome coronavirus 2
IKPVTYKLDGVVCT

SEQ ID NO: 86565 - protein, 14 aa, Severe acute respiratory syndrome coronavirus 2
KPVTYKLDGVVCTE

SEQ ID NO: 86566 - protein, 14 aa, Severe acute respiratory syndrome coronavirus 2
PVTYKLDGVVCTEI

SEQ ID NO: 86567 - protein, 14 aa, Severe acute respiratory syndrome coronavirus 2
VTYKLDGVVCTEID

SEQ ID NO: 86568 - protein, 14 aa, Severe acute respiratory syndrome coronavirus 2
TYKLDGVVCTEIDP

SEQ ID NO: 86569 - protein, 14 aa, Severe acute respiratory syndrome coronavirus 2
LDNYYKKDNSYFTE

SEQ ID NO: 86570 - protein, 14 aa, Severe acute respiratory syndrome coronavirus 2
DNYYKKDNSYFTEQ

SEQ ID NO: 86571 - protein, 14 aa, Severe acute respiratory syndrome coronavirus 2
NYYKKDNSYFTEQP

SEQ ID NO: 86572 - protein, 14 aa, Severe acute respiratory syndrome coronavirus 2
KKDNSYFTEQPIDL

SEQ ID NO: 86573 - protein, 14 aa, Severe acute respiratory syndrome coronavirus 2
KDNSYFTEQPIDLV

SEQ ID NO: 86574 - protein, 14 aa, Severe acute respiratory syndrome coronavirus 2
DNSYFTEQPIDLVP

SEQ ID NO: 86575 - protein, 14 aa, Severe acute respiratory syndrome coronavirus 2
NSYFTEQPIDLVPN

SEQ ID NO: 86576 - protein, 14 aa, Severe acute respiratory syndrome coronavirus 2
SYFTEQPIDLVPNQ

SEQ ID NO: 86577 - protein, 14 aa, Severe acute respiratory syndrome coronavirus 2
YFTEQPIDLVPNQP

SEQ ID NO: 86578 - protein, 14 aa, Severe acute respiratory syndrome coronavirus 2
FTEQPIDLVPNQPY

SEQ ID NO: 86579 - protein, 14 aa, Severe acute respiratory syndrome coronavirus 2
ASFDNFKFVCDNIK

SEQ ID NO: 86580 - protein, 14 aa, Severe acute respiratory syndrome coronavirus 2
SFDNFKFVCDNIKF

SEQ ID NO: 86581 - protein, 14 aa, Severe acute respiratory syndrome coronavirus 2
FDNFKFVCDNIKFA

SEQ ID NO: 86582 - protein, 14 aa, Severe acute respiratory syndrome coronavirus 2
DNFKFVCDNIKFAD

SEQ ID NO: 86583 - protein, 14 aa, Severe acute respiratory syndrome coronavirus 2
NFKFVCDNIKFADD

SEQ ID NO: 86584 - protein, 14 aa, Severe acute respiratory syndrome coronavirus 2
FKFVCDNIKFADDL

SEQ ID NO: 86585 - protein, 14 aa, Severe acute respiratory syndrome coronavirus 2
VCDNIKFADDLNQL

SEQ ID NO: 86586 - protein, 14 aa, Severe acute respiratory syndrome coronavirus 2
CDNIKFADDLNQLT

SEQ ID NO: 86587 - protein, 14 aa, Severe acute respiratory syndrome coronavirus 2
DNIKFADDLNQLTG

SEQ ID NO: 86588 - protein, 14 aa, Severe acute respiratory syndrome coronavirus 2
NIKFADDLNQLTGY

SEQ ID NO: 86589 - protein, 14 aa, Severe acute respiratory syndrome coronavirus 2
IKFADDLNQLTGYK

SEQ ID NO: 86590 - protein, 14 aa, Severe acute respiratory syndrome coronavirus 2
DLNQLTGYKKPASR

SEQ ID NO: 86591 - protein, 14 aa, Severe acute respiratory syndrome coronavirus 2
LNQLTGYKKPASRE

SEQ ID NO: 86592 - protein, 14 aa, Severe acute respiratory syndrome coronavirus 2
NQLTGYKKPASREL

SEQ ID NO: 86593 - protein, 14 aa, Severe acute respiratory syndrome coronavirus 2
QLTGYKKPASRELK

SEQ ID NO: 86594 - protein, 14 aa, Severe acute respiratory syndrome coronavirus 2
PASRELKVTFFPDL

SEQ ID NO: 86595 - protein, 14 aa, Severe acute respiratory syndrome coronavirus 2
ASRELKVTFFPDLN

SEQ ID NO: 86596 - protein, 14 aa, Severe acute respiratory syndrome coronavirus 2
SRELKVTFFPDLNG

SEQ ID NO: 86597 - protein, 14 aa, Severe acute respiratory syndrome coronavirus 2
RELKVTFFPDLNGD

SEQ ID NO: 86598 - protein, 14 aa, Severe acute respiratory syndrome coronavirus 2
ELKVTFFPDLNGDV

SEQ ID NO: 86599 - protein, 14 aa, Severe acute respiratory syndrome coronavirus 2
LKVTFFPDLNGDVV

SEQ ID NO: 86600 - protein, 14 aa, Severe acute respiratory syndrome coronavirus 2
KVTFFPDLNGDVVA

SEQ ID NO: 86601 - protein, 14 aa, Severe acute respiratory syndrome coronavirus 2
VTFFPDLNGDVVAI

SEQ ID NO: 86602 - protein, 14 aa, Severe acute respiratory syndrome coronavirus 2
FFPDLNGDVVAIDY

SEQ ID NO: 86603 - protein, 14 aa, Severe acute respiratory syndrome coronavirus 2
FPDLNGDVVAIDYK

SEQ ID NO: 86604 - protein, 14 aa, Severe acute respiratory syndrome coronavirus 2
PDLNGDVVAIDYKH

SEQ ID NO: 86605 - protein, 14 aa, Severe acute respiratory syndrome coronavirus 2
NGDVVAIDYKHYTP

SEQ ID NO: 86606 - protein, 14 aa, Severe acute respiratory syndrome coronavirus 2
GDVVAIDYKHYTPS

SEQ ID NO: 86607 - protein, 14 aa, Severe acute respiratory syndrome coronavirus 2
ATYKPNTWCIRCLW

SEQ ID NO: 86608 - protein, 14 aa, Severe acute respiratory syndrome coronavirus 2
HGLAAVNSVPWDTI

SEQ ID NO: 86609 - protein, 14 aa, Severe acute respiratory syndrome coronavirus 2
GLAAVNSVPWDTIA

SEQ ID NO: 86610 - protein, 14 aa, Severe acute respiratory syndrome coronavirus 2
LAAVNSVPWDTIAN

SEQ ID NO: 86611 - protein, 14 aa, Severe acute respiratory syndrome coronavirus 2
NKVVSTTTNIVTRC

SEQ ID NO: 86612 - protein, 14 aa, Severe acute respiratory syndrome coronavirus 2
KVVSTTTNIVTRCL

SEQ ID NO: 86613 - protein, 14 aa, Severe acute respiratory syndrome coronavirus 2
STTTNIVTRCLNRV

SEQ ID NO: 86614 - protein, 14 aa, Severe acute respiratory syndrome coronavirus 2
TTTNIVTRCLNRVC

SEQ ID NO: 86615 - protein, 14 aa, Severe acute respiratory syndrome coronavirus 2
NYMPYFFTLLLQLC

SEQ ID NO: 86616 - protein, 14 aa, Severe acute respiratory syndrome coronavirus 2
YMPYFFTLLLQLCT

SEQ ID NO: 86617 - protein, 14 aa, Severe acute respiratory syndrome coronavirus 2
MPYFFTLLLQLCTF

SEQ ID NO: 86618 - protein, 14 aa, Severe acute respiratory syndrome coronavirus 2
PYFFTLLLQLCTFT

SEQ ID NO: 86619 - protein, 14 aa, Severe acute respiratory syndrome coronavirus 2
YFFTLLLQLCTFTR

SEQ ID NO: 86620 - protein, 14 aa, Severe acute respiratory syndrome coronavirus 2
VKSVGKFCLEASFN

SEQ ID NO: 86621 - protein, 14 aa, Severe acute respiratory syndrome coronavirus 2
KSVGKFCLEASFNY

SEQ ID NO: 86622 - protein, 14 aa, Severe acute respiratory syndrome coronavirus 2
SVGKFCLEASFNYL

SEQ ID NO: 86623 - protein, 14 aa, Severe acute respiratory syndrome coronavirus 2
VGKFCLEASFNYLK

SEQ ID NO: 86624 - protein, 14 aa, Severe acute respiratory syndrome coronavirus 2
GKFCLEASFNYLKS

SEQ ID NO: 86625 - protein, 14 aa, Severe acute respiratory syndrome coronavirus 2
TYCTGSIPCSVCLS

SEQ ID NO: 86626 - protein, 14 aa, Severe acute respiratory syndrome coronavirus 2
YCTGSIPCSVCLSG

SEQ ID NO: 86627 - protein, 14 aa, Severe acute respiratory syndrome coronavirus 2
CSVCLSGLDSLDTY

SEQ ID NO: 86628 - protein, 14 aa, Severe acute respiratory syndrome coronavirus 2
SVCLSGLDSLDTYP

SEQ ID NO: 86629 - protein, 14 aa, Severe acute respiratory syndrome coronavirus 2
LETIQITISSFKWD

SEQ ID NO: 86630 - protein, 14 aa, Severe acute respiratory syndrome coronavirus 2
ETIQITISSFKWDL

SEQ ID NO: 86631 - protein, 14 aa, Severe acute respiratory syndrome coronavirus 2
TIQITISSFKWDLT

SEQ ID NO: 86632 - protein, 14 aa, Severe acute respiratory syndrome coronavirus 2
QITISSFKWDLTAF

SEQ ID NO: 86633 - protein, 14 aa, Severe acute respiratory syndrome coronavirus 2
ITISSFKWDLTAFG

SEQ ID NO: 86634 - protein, 14 aa, Severe acute respiratory syndrome coronavirus 2
TISSFKWDLTAFGL

SEQ ID NO: 86635 - protein, 14 aa, Severe acute respiratory syndrome coronavirus 2
ISSFKWDLTAFGLV

SEQ ID NO: 86636 - protein, 14 aa, Severe acute respiratory syndrome coronavirus 2
SSFKWDLTAFGLVA

SEQ ID NO: 86637 - protein, 14 aa, Severe acute respiratory syndrome coronavirus 2
SFKWDLTAFGLVAE

SEQ ID NO: 86638 - protein, 14 aa, Severe acute respiratory syndrome coronavirus 2
FKWDLTAFGLVAEW

SEQ ID NO: 86639 - protein, 14 aa, Severe acute respiratory syndrome coronavirus 2
KWDLTAFGLVAEWF

SEQ ID NO: 86640 - protein, 14 aa, Severe acute respiratory syndrome coronavirus 2
WDLTAFGLVAEWFL

SEQ ID NO: 86641 - protein, 14 aa, Severe acute respiratory syndrome coronavirus 2
DLTAFGLVAEWFLA

SEQ ID NO: 86642 - protein, 14 aa, Severe acute respiratory syndrome coronavirus 2
LTAFGLVAEWFLAY

SEQ ID NO: 86643 - protein, 14 aa, Severe acute respiratory syndrome coronavirus 2
TAFGLVAEWFLAYI

SEQ ID NO: 86644 - protein, 14 aa, Severe acute respiratory syndrome coronavirus 2
AFGLVAEWFLAYIL

SEQ ID NO: 86645 - protein, 14 aa, Severe acute respiratory syndrome coronavirus 2
FGLVAEWFLAYILF

SEQ ID NO: 86646 - protein, 14 aa, Severe acute respiratory syndrome coronavirus 2
GLVAEWFLAYILFT

SEQ ID NO: 86647 - protein, 14 aa, Severe acute respiratory syndrome coronavirus 2
LVAEWFLAYILFTR

SEQ ID NO: 86648 - protein, 14 aa, Severe acute respiratory syndrome coronavirus 2
VAEWFLAYILFTRF

SEQ ID NO: 86649 - protein, 14 aa, Severe acute respiratory syndrome coronavirus 2
AEWFLAYILFTRFF

SEQ ID NO: 86650 - protein, 14 aa, Severe acute respiratory syndrome coronavirus 2
EWFLAYILFTRFFY

SEQ ID NO: 86651 - protein, 14 aa, Severe acute respiratory syndrome coronavirus 2
WFLAYILFTRFFYV

SEQ ID NO: 86652 - protein, 14 aa, Severe acute respiratory syndrome coronavirus 2
FLAYILFTRFFYVL

SEQ ID NO: 86653 - protein, 14 aa, Severe acute respiratory syndrome coronavirus 2
LAYILFTRFFYVLG

SEQ ID NO: 86654 - protein, 14 aa, Severe acute respiratory syndrome coronavirus 2
AYILFTRFFYVLGL

SEQ ID NO: 86655 - protein, 14 aa, Severe acute respiratory syndrome coronavirus 2
YILFTRFFYVLGLA

SEQ ID NO: 86656 - protein, 14 aa, Severe acute respiratory syndrome coronavirus 2
ILFTRFFYVLGLAA

SEQ ID NO: 86657 - protein, 14 aa, Severe acute respiratory syndrome coronavirus 2
LFTRFFYVLGLAAI

SEQ ID NO: 86658 - protein, 14 aa, Severe acute respiratory syndrome coronavirus 2
FTRFFYVLGLAAIM

SEQ ID NO: 86659 - protein, 14 aa, Severe acute respiratory syndrome coronavirus 2
TRFFYVLGLAAIMQ

SEQ ID NO: 86660 - protein, 14 aa, Severe acute respiratory syndrome coronavirus 2
LGLAAIMQLFFSYF

SEQ ID NO: 86661 - protein, 14 aa, Severe acute respiratory syndrome coronavirus 2
GLAAIMQLFFSYFA

SEQ ID NO: 86662 - protein, 14 aa, Severe acute respiratory syndrome coronavirus 2
LAAIMQLFFSYFAV

SEQ ID NO: 86663 - protein, 14 aa, Severe acute respiratory syndrome coronavirus 2
IMQLFFSYFAVHFI

SEQ ID NO: 86664 - protein, 14 aa, Severe acute respiratory syndrome coronavirus 2
MQLFFSYFAVHFIS

SEQ ID NO: 86665 - protein, 14 aa, Severe acute respiratory syndrome coronavirus 2
QLFFSYFAVHFISN

SEQ ID NO: 86666 - protein, 14 aa, Severe acute respiratory syndrome coronavirus 2
LFFSYFAVHFISNS

SEQ ID NO: 86667 - protein, 14 aa, Severe acute respiratory syndrome coronavirus 2
FFSYFAVHFISNSW

SEQ ID NO: 86668 - protein, 14 aa, Severe acute respiratory syndrome coronavirus 2
FSYFAVHFISNSWL

SEQ ID NO: 86669 - protein, 14 aa, Severe acute respiratory syndrome coronavirus 2
SYFAVHFISNSWLM

SEQ ID NO: 86670 - protein, 14 aa, Severe acute respiratory syndrome coronavirus 2
YFAVHFISNSWLMW

SEQ ID NO: 86671 - protein, 14 aa, Severe acute respiratory syndrome coronavirus 2
FAVHFISNSWLMWL

SEQ ID NO: 86672 - protein, 14 aa, Severe acute respiratory syndrome coronavirus 2
AVHFISNSWLMWLI

SEQ ID NO: 86673 - protein, 14 aa, Severe acute respiratory syndrome coronavirus 2
VHFISNSWLMWLII

SEQ ID NO: 86674 - protein, 14 aa, Severe acute respiratory syndrome coronavirus 2
HFISNSWLMWLIIN

SEQ ID NO: 86675 - protein, 14 aa, Severe acute respiratory syndrome coronavirus 2
FISNSWLMWLIINL

SEQ ID NO: 86676 - protein, 14 aa, Severe acute respiratory syndrome coronavirus 2
ISNSWLMWLIINLV

SEQ ID NO: 86677 - protein, 14 aa, Severe acute respiratory syndrome coronavirus 2
SNSWLMWLIINLVQ

SEQ ID NO: 86678 - protein, 14 aa, Severe acute respiratory syndrome coronavirus 2
NSWLMWLIINLVQM

SEQ ID NO: 86679 - protein, 14 aa, Severe acute respiratory syndrome coronavirus 2
SWLMWLIINLVQMA

SEQ ID NO: 86680 - protein, 14 aa, Severe acute respiratory syndrome coronavirus 2
ISAMVRMYIFFASF

SEQ ID NO: 86681 - protein, 14 aa, Severe acute respiratory syndrome coronavirus 2
SAMVRMYIFFASFY

SEQ ID NO: 86682 - protein, 14 aa, Severe acute respiratory syndrome coronavirus 2
AMVRMYIFFASFYY

SEQ ID NO: 86683 - protein, 14 aa, Severe acute respiratory syndrome coronavirus 2
MVRMYIFFASFYYV

SEQ ID NO: 86684 - protein, 14 aa, Severe acute respiratory syndrome coronavirus 2
VRMYIFFASFYYVW

SEQ ID NO: 86685 - protein, 14 aa, Severe acute respiratory syndrome coronavirus 2
RMYIFFASFYYVWK

SEQ ID NO: 86686 - protein, 14 aa, Severe acute respiratory syndrome coronavirus 2
MYIFFASFYYVWKS

SEQ ID NO: 86687 - protein, 14 aa, Severe acute respiratory syndrome coronavirus 2
YIFFASFYYVWKSY

SEQ ID NO: 86688 - protein, 14 aa, Severe acute respiratory syndrome coronavirus 2
IFFASFYYVWKSYV

SEQ ID NO: 86689 - protein, 14 aa, Severe acute respiratory syndrome coronavirus 2
FFASFYYVWKSYVH

SEQ ID NO: 86690 - protein, 14 aa, Severe acute respiratory syndrome coronavirus 2
FASFYYVWKSYVHV

SEQ ID NO: 86691 - protein, 14 aa, Severe acute respiratory syndrome coronavirus 2
ASFYYVWKSYVHVV

SEQ ID NO: 86692 - protein, 14 aa, Severe acute respiratory syndrome coronavirus 2
SFYYVWKSYVHVVD

SEQ ID NO: 86693 - protein, 14 aa, Severe acute respiratory syndrome coronavirus 2
SSTCMMCYKRNRAT

SEQ ID NO: 86694 - protein, 14 aa, Severe acute respiratory syndrome coronavirus 2
STCMMCYKRNRATR

SEQ ID NO: 86695 - protein, 14 aa, Severe acute respiratory syndrome coronavirus 2
TCMMCYKRNRATRV

SEQ ID NO: 86696 - protein, 14 aa, Severe acute respiratory syndrome coronavirus 2
CMMCYKRNRATRVE

SEQ ID NO: 86697 - protein, 14 aa, Severe acute respiratory syndrome coronavirus 2
MMCYKRNRATRVEC

SEQ ID NO: 86698 - protein, 14 aa, Severe acute respiratory syndrome coronavirus 2
MCYKRNRATRVECT

SEQ ID NO: 86699 - protein, 14 aa, Severe acute respiratory syndrome coronavirus 2
CYKRNRATRVECTT

SEQ ID NO: 86700 - protein, 14 aa, Severe acute respiratory syndrome coronavirus 2
YKRNRATRVECTTI

SEQ ID NO: 86701 - protein, 14 aa, Severe acute respiratory syndrome coronavirus 2
KRNRATRVECTTIV

SEQ ID NO: 86702 - protein, 14 aa, Severe acute respiratory syndrome coronavirus 2
RNRATRVECTTIVN

SEQ ID NO: 86703 - protein, 14 aa, Severe acute respiratory syndrome coronavirus 2
SFYVYANGGKGFCK

SEQ ID NO: 86704 - protein, 14 aa, Severe acute respiratory syndrome coronavirus 2
FYVYANGGKGFCKL

SEQ ID NO: 86705 - protein, 14 aa, Severe acute respiratory syndrome coronavirus 2
GGKGFCKLHNWNCV

SEQ ID NO: 86706 - protein, 14 aa, Severe acute respiratory syndrome coronavirus 2
GKGFCKLHNWNCVN

SEQ ID NO: 86707 - protein, 14 aa, Severe acute respiratory syndrome coronavirus 2
KGFCKLHNWNCVNC

SEQ ID NO: 86708 - protein, 14 aa, Severe acute respiratory syndrome coronavirus 2
VNCDTFCAGSTFIS

SEQ ID NO: 86709 - protein, 14 aa, Severe acute respiratory syndrome coronavirus 2
NCDTFCAGSTFISD

SEQ ID NO: 86710 - protein, 14 aa, Severe acute respiratory syndrome coronavirus 2
CDTFCAGSTFISDE

SEQ ID NO: 86711 - protein, 14 aa, Severe acute respiratory syndrome coronavirus 2
DTFCAGSTFISDEV

SEQ ID NO: 86712 - protein, 14 aa, Severe acute respiratory syndrome coronavirus 2
TFCAGSTFISDEVA

SEQ ID NO: 86713 - protein, 14 aa, Severe acute respiratory syndrome coronavirus 2
FCAGSTFISDEVAR

SEQ ID NO: 86714 - protein, 14 aa, Severe acute respiratory syndrome coronavirus 2
CAGSTFISDEVARD

SEQ ID NO: 86715 - protein, 14 aa, Severe acute respiratory syndrome coronavirus 2
AGSTFISDEVARDL

SEQ ID NO: 86716 - protein, 14 aa, Severe acute respiratory syndrome coronavirus 2
GSTFISDEVARDLS

SEQ ID NO: 86717 - protein, 14 aa, Severe acute respiratory syndrome coronavirus 2
STFISDEVARDLSL

SEQ ID NO: 86718 - protein, 14 aa, Severe acute respiratory syndrome coronavirus 2
TFISDEVARDLSLQ

SEQ ID NO: 86719 - protein, 14 aa, Severe acute respiratory syndrome coronavirus 2
FISDEVARDLSLQF

SEQ ID NO: 86720 - protein, 14 aa, Severe acute respiratory syndrome coronavirus 2
ISDEVARDLSLQFK

SEQ ID NO: 86721 - protein, 14 aa, Severe acute respiratory syndrome coronavirus 2
SDEVARDLSLQFKR

SEQ ID NO: 86722 - protein, 14 aa, Severe acute respiratory syndrome coronavirus 2
DEVARDLSLQFKRP

SEQ ID NO: 86723 - protein, 14 aa, Severe acute respiratory syndrome coronavirus 2
EVARDLSLQFKRPI

SEQ ID NO: 86724 - protein, 14 aa, Severe acute respiratory syndrome coronavirus 2
PTDQSSYIVDSVTV

SEQ ID NO: 86725 - protein, 14 aa, Severe acute respiratory syndrome coronavirus 2
TDQSSYIVDSVTVK

SEQ ID NO: 86726 - protein, 14 aa, Severe acute respiratory syndrome coronavirus 2
LPINVIVFDGKSKC

SEQ ID NO: 86727 - protein, 14 aa, Severe acute respiratory syndrome coronavirus 2
PINVIVFDGKSKCE

SEQ ID NO: 86728 - protein, 14 aa, Severe acute respiratory syndrome coronavirus 2
INVIVFDGKSKCEE

SEQ ID NO: 86729 - protein, 14 aa, Severe acute respiratory syndrome coronavirus 2
NVIVFDGKSKCEES

SEQ ID NO: 86730 - protein, 14 aa, Severe acute respiratory syndrome coronavirus 2
VIVFDGKSKCEESS

SEQ ID NO: 86731 - protein, 14 aa, Severe acute respiratory syndrome coronavirus 2
KSASVYYSQLMCQP

SEQ ID NO: 86732 - protein, 14 aa, Severe acute respiratory syndrome coronavirus 2
SASVYYSQLMCQPI

SEQ ID NO: 86733 - protein, 14 aa, Severe acute respiratory syndrome coronavirus 2
ASVYYSQLMCQPIL

SEQ ID NO: 86734 - protein, 14 aa, Severe acute respiratory syndrome coronavirus 2
SVYYSQLMCQPILL

SEQ ID NO: 86735 - protein, 14 aa, Severe acute respiratory syndrome coronavirus 2
VYYSQLMCQPILLL

SEQ ID NO: 86736 - protein, 14 aa, Severe acute respiratory syndrome coronavirus 2
YYSQLMCQPILLLD

SEQ ID NO: 86737 - protein, 14 aa, Severe acute respiratory syndrome coronavirus 2
YSQLMCQPILLLDQ

SEQ ID NO: 86738 - protein, 14 aa, Severe acute respiratory syndrome coronavirus 2
SQLMCQPILLLDQA

SEQ ID NO: 86739 - protein, 14 aa, Severe acute respiratory syndrome coronavirus 2
QLMCQPILLLDQAL

SEQ ID NO: 86740 - protein, 14 aa, Severe acute respiratory syndrome coronavirus 2
LMCQPILLLDQALV

SEQ ID NO: 86741 - protein, 14 aa, Severe acute respiratory syndrome coronavirus 2
MCQPILLLDQALVS

SEQ ID NO: 86742 - protein, 14 aa, Severe acute respiratory syndrome coronavirus 2
CQPILLLDQALVSD

SEQ ID NO: 86743 - protein, 14 aa, Severe acute respiratory syndrome coronavirus 2
LDNVLSTFISAARQ

SEQ ID NO: 86744 - protein, 14 aa, Severe acute respiratory syndrome coronavirus 2
DNVLSTFISAARQG

SEQ ID NO: 86745 - protein, 14 aa, Severe acute respiratory syndrome coronavirus 2
NVLSTFISAARQGF

SEQ ID NO: 86746 - protein, 14 aa, Severe acute respiratory syndrome coronavirus 2
VLSTFISAARQGFV

SEQ ID NO: 86747 - protein, 14 aa, Severe acute respiratory syndrome coronavirus 2
LSTFISAARQGFVD

SEQ ID NO: 86748 - protein, 14 aa, Severe acute respiratory syndrome coronavirus 2
STFISAARQGFVDS

SEQ ID NO: 86749 - protein, 14 aa, Severe acute respiratory syndrome coronavirus 2
TFISAARQGFVDSD

SEQ ID NO: 86750 - protein, 14 aa, Severe acute respiratory syndrome coronavirus 2
FISAARQGFVDSDV

SEQ ID NO: 86751 - protein, 14 aa, Severe acute respiratory syndrome coronavirus 2
TKDVVECLKLSHQS

SEQ ID NO: 86752 - protein, 14 aa, Severe acute respiratory syndrome coronavirus 2
VECLKLSHQSDIEV

SEQ ID NO: 86753 - protein, 14 aa, Severe acute respiratory syndrome coronavirus 2
ECLKLSHQSDIEVT

SEQ ID NO: 86754 - protein, 14 aa, Severe acute respiratory syndrome coronavirus 2
SLSEQLRKQIRSAA

SEQ ID NO: 86755 - protein, 14 aa, Severe acute respiratory syndrome coronavirus 2
LSEQLRKQIRSAAK

SEQ ID NO: 86756 - protein, 14 aa, Severe acute respiratory syndrome coronavirus 2
SEQLRKQIRSAAKK

SEQ ID NO: 86757 - protein, 14 aa, Severe acute respiratory syndrome coronavirus 2
EQLRKQIRSAAKKN

SEQ ID NO: 86758 - protein, 14 aa, Severe acute respiratory syndrome coronavirus 2
QLRKQIRSAAKKNN

SEQ ID NO: 86759 - protein, 14 aa, Severe acute respiratory syndrome coronavirus 2
LRKQIRSAAKKNNL

SEQ ID NO: 86760 - protein, 14 aa, Severe acute respiratory syndrome coronavirus 2
RKQIRSAAKKNNLP

SEQ ID NO: 86761 - protein, 14 aa, Severe acute respiratory syndrome coronavirus 2
KQIRSAAKKNNLPF

SEQ ID NO: 86762 - protein, 14 aa, Severe acute respiratory syndrome coronavirus 2
KNNLPFKLTCATTR

SEQ ID NO: 86763 - protein, 14 aa, Severe acute respiratory syndrome coronavirus 2
NNLPFKLTCATTRQ

SEQ ID NO: 86764 - protein, 14 aa, Severe acute respiratory syndrome coronavirus 2
NLPFKLTCATTRQV

SEQ ID NO: 86765 - protein, 14 aa, Severe acute respiratory syndrome coronavirus 2
LPFKLTCATTRQVV

SEQ ID NO: 86766 - protein, 14 aa, Severe acute respiratory syndrome coronavirus 2
PFKLTCATTRQVVN

SEQ ID NO: 86767 - protein, 14 aa, Severe acute respiratory syndrome coronavirus 2
FKLTCATTRQVVNV

SEQ ID NO: 86768 - protein, 14 aa, Severe acute respiratory syndrome coronavirus 2
KLTCATTRQVVNVV

SEQ ID NO: 86769 - protein, 14 aa, Severe acute respiratory syndrome coronavirus 2
ATTRQVVNVVTTKI

SEQ ID NO: 86770 - protein, 14 aa, Severe acute respiratory syndrome coronavirus 2
TTRQVVNVVTTKIA

SEQ ID NO: 86771 - protein, 14 aa, Severe acute respiratory syndrome coronavirus 2
TRQVVNVVTTKIAL

SEQ ID NO: 86772 - protein, 14 aa, Severe acute respiratory syndrome coronavirus 2
RQVVNVVTTKIALK

SEQ ID NO: 86773 - protein, 14 aa, Severe acute respiratory syndrome coronavirus 2
QVVNVVTTKIALKG

SEQ ID NO: 86774 - protein, 14 aa, Severe acute respiratory syndrome coronavirus 2
VVNVVTTKIALKGG

SEQ ID NO: 86775 - protein, 14 aa, Severe acute respiratory syndrome coronavirus 2
KIVNNWLKQLIKVT

SEQ ID NO: 86776 - protein, 14 aa, Severe acute respiratory syndrome coronavirus 2
IVNNWLKQLIKVTL

SEQ ID NO: 86777 - protein, 14 aa, Severe acute respiratory syndrome coronavirus 2
VNNWLKQLIKVTLV

SEQ ID NO: 86778 - protein, 14 aa, Severe acute respiratory syndrome coronavirus 2
NNWLKQLIKVTLVF

SEQ ID NO: 86779 - protein, 14 aa, Severe acute respiratory syndrome coronavirus 2
NWLKQLIKVTLVFL

SEQ ID NO: 86780 - protein, 14 aa, Severe acute respiratory syndrome coronavirus 2
WLKQLIKVTLVFLF

SEQ ID NO: 86781 - protein, 14 aa, Severe acute respiratory syndrome coronavirus 2
LKQLIKVTLVFLFV

SEQ ID NO: 86782 - protein, 14 aa, Severe acute respiratory syndrome coronavirus 2
FLFVAAIFYLITPV

SEQ ID NO: 86783 - protein, 14 aa, Severe acute respiratory syndrome coronavirus 2
LFVAAIFYLITPVH

SEQ ID NO: 86784 - protein, 14 aa, Severe acute respiratory syndrome coronavirus 2
FVAAIFYLITPVHV

SEQ ID NO: 86785 - protein, 14 aa, Severe acute respiratory syndrome coronavirus 2
IGYKAIDGGVTRDI

SEQ ID NO: 86786 - protein, 14 aa, Severe acute respiratory syndrome coronavirus 2
GYKAIDGGVTRDIA

SEQ ID NO: 86787 - protein, 14 aa, Severe acute respiratory syndrome coronavirus 2
GSYTNDKACPLIAA

SEQ ID NO: 86788 - protein, 14 aa, Severe acute respiratory syndrome coronavirus 2
SYTNDKACPLIAAV

SEQ ID NO: 86789 - protein, 14 aa, Severe acute respiratory syndrome coronavirus 2
YTNDKACPLIAAVI

SEQ ID NO: 86790 - protein, 14 aa, Severe acute respiratory syndrome coronavirus 2
TNDKACPLIAAVIT

SEQ ID NO: 86791 - protein, 14 aa, Severe acute respiratory syndrome coronavirus 2
NDKACPLIAAVITR

SEQ ID NO: 86792 - protein, 14 aa, Severe acute respiratory syndrome coronavirus 2
DKACPLIAAVITRE

SEQ ID NO: 86793 - protein, 14 aa, Severe acute respiratory syndrome coronavirus 2
KACPLIAAVITREV

SEQ ID NO: 86794 - protein, 14 aa, Severe acute respiratory syndrome coronavirus 2
ILRTTNGDFLHFLP

SEQ ID NO: 86795 - protein, 14 aa, Severe acute respiratory syndrome coronavirus 2
TTNGDFLHFLPRVF

SEQ ID NO: 86796 - protein, 14 aa, Severe acute respiratory syndrome coronavirus 2
TNGDFLHFLPRVFS

SEQ ID NO: 86797 - protein, 14 aa, Severe acute respiratory syndrome coronavirus 2
NGDFLHFLPRVFSA

SEQ ID NO: 86798 - protein, 14 aa, Severe acute respiratory syndrome coronavirus 2
GDFLHFLPRVFSAV

SEQ ID NO: 86799 - protein, 14 aa, Severe acute respiratory syndrome coronavirus 2
DFLHFLPRVFSAVG

SEQ ID NO: 86800 - protein, 14 aa, Severe acute respiratory syndrome coronavirus 2
FLHFLPRVFSAVGN

SEQ ID NO: 86801 - protein, 14 aa, Severe acute respiratory syndrome coronavirus 2
LHFLPRVFSAVGNI

SEQ ID NO: 86802 - protein, 14 aa, Severe acute respiratory syndrome coronavirus 2
HFLPRVFSAVGNIC

SEQ ID NO: 86803 - protein, 14 aa, Severe acute respiratory syndrome coronavirus 2
FLPRVFSAVGNICY

SEQ ID NO: 86804 - protein, 14 aa, Severe acute respiratory syndrome coronavirus 2
LPRVFSAVGNICYT

SEQ ID NO: 86805 - protein, 14 aa, Severe acute respiratory syndrome coronavirus 2
PRVFSAVGNICYTP

SEQ ID NO: 86806 - protein, 14 aa, Severe acute respiratory syndrome coronavirus 2
ATSACVLAAECTIF

SEQ ID NO: 86807 - protein, 14 aa, Severe acute respiratory syndrome coronavirus 2
ECTIFKDASGKPVP

SEQ ID NO: 86808 - protein, 14 aa, Severe acute respiratory syndrome coronavirus 2
CTIFKDASGKPVPY

SEQ ID NO: 86809 - protein, 14 aa, Severe acute respiratory syndrome coronavirus 2
TIFKDASGKPVPYC

SEQ ID NO: 86810 - protein, 14 aa, Severe acute respiratory syndrome coronavirus 2
IFKDASGKPVPYCY

SEQ ID NO: 86811 - protein, 14 aa, Severe acute respiratory syndrome coronavirus 2
FKDASGKPVPYCYD

SEQ ID NO: 86812 - protein, 14 aa, Severe acute respiratory syndrome coronavirus 2
KPVPYCYDTNVLEG

SEQ ID NO: 86813 - protein, 14 aa, Severe acute respiratory syndrome coronavirus 2
PVPYCYDTNVLEGS

SEQ ID NO: 86814 - protein, 14 aa, Severe acute respiratory syndrome coronavirus 2
VPYCYDTNVLEGSV

SEQ ID NO: 86815 - protein, 14 aa, Severe acute respiratory syndrome coronavirus 2
YDTNVLEGSVAYES

SEQ ID NO: 86816 - protein, 14 aa, Severe acute respiratory syndrome coronavirus 2
DTNVLEGSVAYESL

SEQ ID NO: 86817 - protein, 14 aa, Severe acute respiratory syndrome coronavirus 2
TNVLEGSVAYESLR

SEQ ID NO: 86818 - protein, 14 aa, Severe acute respiratory syndrome coronavirus 2
NVLEGSVAYESLRP

SEQ ID NO: 86819 - protein, 14 aa, Severe acute respiratory syndrome coronavirus 2
VLEGSVAYESLRPD

SEQ ID NO: 86820 - protein, 14 aa, Severe acute respiratory syndrome coronavirus 2
LEGSVAYESLRPDT

SEQ ID NO: 86821 - protein, 14 aa, Severe acute respiratory syndrome coronavirus 2
VAYESLRPDTRYVL

SEQ ID NO: 86822 - protein, 14 aa, Severe acute respiratory syndrome coronavirus 2
AYESLRPDTRYVLM

SEQ ID NO: 86823 - protein, 14 aa, Severe acute respiratory syndrome coronavirus 2
YESLRPDTRYVLMD

SEQ ID NO: 86824 - protein, 14 aa, Severe acute respiratory syndrome coronavirus 2
ESLRPDTRYVLMDG

SEQ ID NO: 86825 - protein, 14 aa, Severe acute respiratory syndrome coronavirus 2
SLRPDTRYVLMDGS

SEQ ID NO: 86826 - protein, 14 aa, Severe acute respiratory syndrome coronavirus 2
RPDTRYVLMDGSII

SEQ ID NO: 86827 - protein, 14 aa, Severe acute respiratory syndrome coronavirus 2
PDTRYVLMDGSIIQ

SEQ ID NO: 86828 - protein, 14 aa, Severe acute respiratory syndrome coronavirus 2
DTRYVLMDGSIIQF

SEQ ID NO: 86829 - protein, 14 aa, Severe acute respiratory syndrome coronavirus 2
GVCVSTSGRWVLNN

SEQ ID NO: 86830 - protein, 14 aa, Severe acute respiratory syndrome coronavirus 2
TSGRWVLNNDYYRS

SEQ ID NO: 86831 - protein, 14 aa, Severe acute respiratory syndrome coronavirus 2
SGRWVLNNDYYRSL

SEQ ID NO: 86832 - protein, 14 aa, Severe acute respiratory syndrome coronavirus 2
GRWVLNNDYYRSLP

SEQ ID NO: 86833 - protein, 14 aa, Severe acute respiratory syndrome coronavirus 2
RWVLNNDYYRSLPG

SEQ ID NO: 86834 - protein, 14 aa, Severe acute respiratory syndrome coronavirus 2
WVLNNDYYRSLPGV

SEQ ID NO: 86835 - protein, 14 aa, Severe acute respiratory syndrome coronavirus 2
VLNNDYYRSLPGVF

SEQ ID NO: 86836 - protein, 14 aa, Severe acute respiratory syndrome coronavirus 2
LNNDYYRSLPGVFC

SEQ ID NO: 86837 - protein, 14 aa, Severe acute respiratory syndrome coronavirus 2
NNDYYRSLPGVFCG

SEQ ID NO: 86838 - protein, 14 aa, Severe acute respiratory syndrome coronavirus 2
NDYYRSLPGVFCGV

SEQ ID NO: 86839 - protein, 14 aa, Severe acute respiratory syndrome coronavirus 2
DYYRSLPGVFCGVD

SEQ ID NO: 86840 - protein, 14 aa, Severe acute respiratory syndrome coronavirus 2
PLIQPIGALDISAS

SEQ ID NO: 86841 - protein, 14 aa, Severe acute respiratory syndrome coronavirus 2
LIQPIGALDISASI

SEQ ID NO: 86842 - protein, 14 aa, Severe acute respiratory syndrome coronavirus 2
IQPIGALDISASIV

SEQ ID NO: 86843 - protein, 14 aa, Severe acute respiratory syndrome coronavirus 2
QPIGALDISASIVA

SEQ ID NO: 86844 - protein, 14 aa, Severe acute respiratory syndrome coronavirus 2
PIGALDISASIVAG

SEQ ID NO: 86845 - protein, 14 aa, Severe acute respiratory syndrome coronavirus 2
IGALDISASIVAGG

SEQ ID NO: 86846 - protein, 14 aa, Severe acute respiratory syndrome coronavirus 2
GALDISASIVAGGI

SEQ ID NO: 86847 - protein, 14 aa, Severe acute respiratory syndrome coronavirus 2
VLCLTPVYSFLPGV

SEQ ID NO: 86848 - protein, 14 aa, Severe acute respiratory syndrome coronavirus 2
LCLTPVYSFLPGVY

SEQ ID NO: 86849 - protein, 14 aa, Severe acute respiratory syndrome coronavirus 2
CLTPVYSFLPGVYS

SEQ ID NO: 86850 - protein, 14 aa, Severe acute respiratory syndrome coronavirus 2
LTPVYSFLPGVYSV

SEQ ID NO: 86851 - protein, 14 aa, Severe acute respiratory syndrome coronavirus 2
FLPGVYSVIYLYLT

SEQ ID NO: 86852 - protein, 14 aa, Severe acute respiratory syndrome coronavirus 2
LPGVYSVIYLYLTF

SEQ ID NO: 86853 - protein, 14 aa, Severe acute respiratory syndrome coronavirus 2
PGVYSVIYLYLTFY

SEQ ID NO: 86854 - protein, 14 aa, Severe acute respiratory syndrome coronavirus 2
GVYSVIYLYLTFYL

SEQ ID NO: 86855 - protein, 14 aa, Severe acute respiratory syndrome coronavirus 2
VYSVIYLYLTFYLT

SEQ ID NO: 86856 - protein, 14 aa, Severe acute respiratory syndrome coronavirus 2
YSVIYLYLTFYLTN

SEQ ID NO: 86857 - protein, 14 aa, Severe acute respiratory syndrome coronavirus 2
SVIYLYLTFYLTND

SEQ ID NO: 86858 - protein, 14 aa, Severe acute respiratory syndrome coronavirus 2
VIYLYLTFYLTNDV

SEQ ID NO: 86859 - protein, 14 aa, Severe acute respiratory syndrome coronavirus 2
IYLYLTFYLTNDVS

SEQ ID NO: 86860 - protein, 14 aa, Severe acute respiratory syndrome coronavirus 2
YLYLTFYLTNDVSF

SEQ ID NO: 86861 - protein, 14 aa, Severe acute respiratory syndrome coronavirus 2
LYLTFYLTNDVSFL

SEQ ID NO: 86862 - protein, 14 aa, Severe acute respiratory syndrome coronavirus 2
YLTFYLTNDVSFLA

SEQ ID NO: 86863 - protein, 14 aa, Severe acute respiratory syndrome coronavirus 2
LTFYLTNDVSFLAH

SEQ ID NO: 86864 - protein, 14 aa, Severe acute respiratory syndrome coronavirus 2
TFYLTNDVSFLAHI

SEQ ID NO: 86865 - protein, 14 aa, Severe acute respiratory syndrome coronavirus 2
FYLTNDVSFLAHIQ

SEQ ID NO: 86866 - protein, 14 aa, Severe acute respiratory syndrome coronavirus 2
YLTNDVSFLAHIQW

SEQ ID NO: 86867 - protein, 14 aa, Severe acute respiratory syndrome coronavirus 2
LTNDVSFLAHIQWM

SEQ ID NO: 86868 - protein, 14 aa, Severe acute respiratory syndrome coronavirus 2
TNDVSFLAHIQWMV

SEQ ID NO: 86869 - protein, 14 aa, Severe acute respiratory syndrome coronavirus 2
NDVSFLAHIQWMVM

SEQ ID NO: 86870 - protein, 14 aa, Severe acute respiratory syndrome coronavirus 2
HIQWMVMFTPLVPF

SEQ ID NO: 86871 - protein, 14 aa, Severe acute respiratory syndrome coronavirus 2
IQWMVMFTPLVPFW

SEQ ID NO: 86872 - protein, 14 aa, Severe acute respiratory syndrome coronavirus 2
QWMVMFTPLVPFWI

SEQ ID NO: 86873 - protein, 14 aa, Severe acute respiratory syndrome coronavirus 2
WMVMFTPLVPFWIT

SEQ ID NO: 86874 - protein, 14 aa, Severe acute respiratory syndrome coronavirus 2
MVMFTPLVPFWITI

SEQ ID NO: 86875 - protein, 14 aa, Severe acute respiratory syndrome coronavirus 2
TPLVPFWITIAYII

SEQ ID NO: 86876 - protein, 14 aa, Severe acute respiratory syndrome coronavirus 2
PLVPFWITIAYIIC

SEQ ID NO: 86877 - protein, 14 aa, Severe acute respiratory syndrome coronavirus 2
LVPFWITIAYIICI

SEQ ID NO: 86878 - protein, 14 aa, Severe acute respiratory syndrome coronavirus 2
YIICISTKHFYWFF

SEQ ID NO: 86879 - protein, 14 aa, Severe acute respiratory syndrome coronavirus 2
IICISTKHFYWFFS

SEQ ID NO: 86880 - protein, 14 aa, Severe acute respiratory syndrome coronavirus 2
ICISTKHFYWFFSN

SEQ ID NO: 86881 - protein, 14 aa, Severe acute respiratory syndrome coronavirus 2
CISTKHFYWFFSNY

SEQ ID NO: 86882 - protein, 14 aa, Severe acute respiratory syndrome coronavirus 2
ISTKHFYWFFSNYL

SEQ ID NO: 86883 - protein, 14 aa, Severe acute respiratory syndrome coronavirus 2
STKHFYWFFSNYLK

SEQ ID NO: 86884 - protein, 14 aa, Severe acute respiratory syndrome coronavirus 2
TKHFYWFFSNYLKR

SEQ ID NO: 86885 - protein, 14 aa, Severe acute respiratory syndrome coronavirus 2
KHFYWFFSNYLKRR

SEQ ID NO: 86886 - protein, 14 aa, Severe acute respiratory syndrome coronavirus 2
HFYWFFSNYLKRRV

SEQ ID NO: 86887 - protein, 14 aa, Severe acute respiratory syndrome coronavirus 2
FYWFFSNYLKRRVV

SEQ ID NO: 86888 - protein, 14 aa, Severe acute respiratory syndrome coronavirus 2
YWFFSNYLKRRVVF

SEQ ID NO: 86889 - protein, 14 aa, Severe acute respiratory syndrome coronavirus 2
WFFSNYLKRRVVFN

SEQ ID NO: 86890 - protein, 14 aa, Severe acute respiratory syndrome coronavirus 2
FFSNYLKRRVVFNG

SEQ ID NO: 86891 - protein, 14 aa, Severe acute respiratory syndrome coronavirus 2
FSNYLKRRVVFNGV

SEQ ID NO: 86892 - protein, 14 aa, Severe acute respiratory syndrome coronavirus 2
SNYLKRRVVFNGVS

SEQ ID NO: 86893 - protein, 14 aa, Severe acute respiratory syndrome coronavirus 2
NYLKRRVVFNGVSF

SEQ ID NO: 86894 - protein, 14 aa, Severe acute respiratory syndrome coronavirus 2
YLKRRVVFNGVSFS

SEQ ID NO: 86895 - protein, 14 aa, Severe acute respiratory syndrome coronavirus 2
LKRRVVFNGVSFST

SEQ ID NO: 86896 - protein, 14 aa, Severe acute respiratory syndrome coronavirus 2
KRRVVFNGVSFSTF

SEQ ID NO: 86897 - protein, 14 aa, Severe acute respiratory syndrome coronavirus 2
RRVVFNGVSFSTFE

SEQ ID NO: 86898 - protein, 14 aa, Severe acute respiratory syndrome coronavirus 2
RVVFNGVSFSTFEE

SEQ ID NO: 86899 - protein, 14 aa, Severe acute respiratory syndrome coronavirus 2
VVFNGVSFSTFEEA

SEQ ID NO: 86900 - protein, 14 aa, Severe acute respiratory syndrome coronavirus 2
VFNGVSFSTFEEAA

SEQ ID NO: 86901 - protein, 14 aa, Severe acute respiratory syndrome coronavirus 2
FNGVSFSTFEEAAL

SEQ ID NO: 86902 - protein, 14 aa, Severe acute respiratory syndrome coronavirus 2
NGVSFSTFEEAALC

SEQ ID NO: 86903 - protein, 14 aa, Severe acute respiratory syndrome coronavirus 2
GVSFSTFEEAALCT

SEQ ID NO: 86904 - protein, 14 aa, Severe acute respiratory syndrome coronavirus 2
VSFSTFEEAALCTF

SEQ ID NO: 86905 - protein, 14 aa, Severe acute respiratory syndrome coronavirus 2
SFSTFEEAALCTFL

SEQ ID NO: 86906 - protein, 14 aa, Severe acute respiratory syndrome coronavirus 2
FSTFEEAALCTFLL

SEQ ID NO: 86907 - protein, 14 aa, Severe acute respiratory syndrome coronavirus 2
STFEEAALCTFLLN

SEQ ID NO: 86908 - protein, 14 aa, Severe acute respiratory syndrome coronavirus 2
TFEEAALCTFLLNK

SEQ ID NO: 86909 - protein, 14 aa, Severe acute respiratory syndrome coronavirus 2
FEEAALCTFLLNKE

SEQ ID NO: 86910 - protein, 14 aa, Severe acute respiratory syndrome coronavirus 2
EEAALCTFLLNKEM

SEQ ID NO: 86911 - protein, 14 aa, Severe acute respiratory syndrome coronavirus 2
EAALCTFLLNKEMY

SEQ ID NO: 86912 - protein, 14 aa, Severe acute respiratory syndrome coronavirus 2
AALCTFLLNKEMYL

SEQ ID NO: 86913 - protein, 14 aa, Severe acute respiratory syndrome coronavirus 2
ALCTFLLNKEMYLK

SEQ ID NO: 86914 - protein, 14 aa, Severe acute respiratory syndrome coronavirus 2
LCTFLLNKEMYLKL

SEQ ID NO: 86915 - protein, 14 aa, Severe acute respiratory syndrome coronavirus 2
CTFLLNKEMYLKLR

SEQ ID NO: 86916 - protein, 14 aa, Severe acute respiratory syndrome coronavirus 2
TFLLNKEMYLKLRS

SEQ ID NO: 86917 - protein, 14 aa, Severe acute respiratory syndrome coronavirus 2
FLLNKEMYLKLRSD

SEQ ID NO: 86918 - protein, 14 aa, Severe acute respiratory syndrome coronavirus 2
LLNKEMYLKLRSDV

SEQ ID NO: 86919 - protein, 14 aa, Severe acute respiratory syndrome coronavirus 2
LNKEMYLKLRSDVL

SEQ ID NO: 86920 - protein, 14 aa, Severe acute respiratory syndrome coronavirus 2
NKEMYLKLRSDVLL

SEQ ID NO: 86921 - protein, 14 aa, Severe acute respiratory syndrome coronavirus 2
KEMYLKLRSDVLLP

SEQ ID NO: 86922 - protein, 14 aa, Severe acute respiratory syndrome coronavirus 2
LNDFSNSGSDVLYQ

SEQ ID NO: 86923 - protein, 14 aa, Severe acute respiratory syndrome coronavirus 2
NDFSNSGSDVLYQP

SEQ ID NO: 86924 - protein, 14 aa, Severe acute respiratory syndrome coronavirus 2
DFSNSGSDVLYQPP

SEQ ID NO: 86925 - protein, 14 aa, Severe acute respiratory syndrome coronavirus 2
FSNSGSDVLYQPPQ

SEQ ID NO: 86926 - protein, 14 aa, Severe acute respiratory syndrome coronavirus 2
GSDVLYQPPQTSIT

SEQ ID NO: 86927 - protein, 14 aa, Severe acute respiratory syndrome coronavirus 2
SDVLYQPPQTSITS

SEQ ID NO: 86928 - protein, 14 aa, Severe acute respiratory syndrome coronavirus 2
VLYQPPQTSITSAV

SEQ ID NO: 86929 - protein, 14 aa, Severe acute respiratory syndrome coronavirus 2
LYQPPQTSITSAVL

SEQ ID NO: 86930 - protein, 14 aa, Severe acute respiratory syndrome coronavirus 2
YQPPQTSITSAVLQ

SEQ ID NO: 86931 - protein, 14 aa, Severe acute respiratory syndrome coronavirus 2
CMVQVTCGTTTLNG

SEQ ID NO: 86932 - protein, 14 aa, Severe acute respiratory syndrome coronavirus 2
MVQVTCGTTTLNGL

SEQ ID NO: 86933 - protein, 14 aa, Severe acute respiratory syndrome coronavirus 2
VQVTCGTTTLNGLW

SEQ ID NO: 86934 - protein, 14 aa, Severe acute respiratory syndrome coronavirus 2
QVTCGTTTLNGLWL

SEQ ID NO: 86935 - protein, 14 aa, Severe acute respiratory syndrome coronavirus 2
CGTTTLNGLWLDDV

SEQ ID NO: 86936 - protein, 14 aa, Severe acute respiratory syndrome coronavirus 2
GTTTLNGLWLDDVV

SEQ ID NO: 86937 - protein, 14 aa, Severe acute respiratory syndrome coronavirus 2
TTTLNGLWLDDVVY

SEQ ID NO: 86938 - protein, 14 aa, Severe acute respiratory syndrome coronavirus 2
TTLNGLWLDDVVYC

SEQ ID NO: 86939 - protein, 14 aa, Severe acute respiratory syndrome coronavirus 2
TLNGLWLDDVVYCP

SEQ ID NO: 86940 - protein, 14 aa, Severe acute respiratory syndrome coronavirus 2
LNGLWLDDVVYCPR

SEQ ID NO: 86941 - protein, 14 aa, Severe acute respiratory syndrome coronavirus 2
NGLWLDDVVYCPRH

SEQ ID NO: 86942 - protein, 14 aa, Severe acute respiratory syndrome coronavirus 2
SFCYMHHMELPTGV

SEQ ID NO: 86943 - protein, 14 aa, Severe acute respiratory syndrome coronavirus 2
FCYMHHMELPTGVH

SEQ ID NO: 86944 - protein, 14 aa, Severe acute respiratory syndrome coronavirus 2
GTDTTITVNVLAWL

SEQ ID NO: 86945 - protein, 14 aa, Severe acute respiratory syndrome coronavirus 2
TDTTITVNVLAWLY

SEQ ID NO: 86946 - protein, 14 aa, Severe acute respiratory syndrome coronavirus 2
DTTITVNVLAWLYA

SEQ ID NO: 86947 - protein, 14 aa, Severe acute respiratory syndrome coronavirus 2
TTITVNVLAWLYAA

SEQ ID NO: 86948 - protein, 14 aa, Severe acute respiratory syndrome coronavirus 2
TITVNVLAWLYAAV

SEQ ID NO: 86949 - protein, 14 aa, Severe acute respiratory syndrome coronavirus 2
ITVNVLAWLYAAVI

SEQ ID NO: 86950 - protein, 14 aa, Severe acute respiratory syndrome coronavirus 2
TVNVLAWLYAAVIN

SEQ ID NO: 86951 - protein, 14 aa, Severe acute respiratory syndrome coronavirus 2
VNVLAWLYAAVING

SEQ ID NO: 86952 - protein, 14 aa, Severe acute respiratory syndrome coronavirus 2
NVLAWLYAAVINGD

SEQ ID NO: 86953 - protein, 14 aa, Severe acute respiratory syndrome coronavirus 2
VLAWLYAAVINGDR

SEQ ID NO: 86954 - protein, 14 aa, Severe acute respiratory syndrome coronavirus 2
LAWLYAAVINGDRW

SEQ ID NO: 86955 - protein, 14 aa, Severe acute respiratory syndrome coronavirus 2
AWLYAAVINGDRWF

SEQ ID NO: 86956 - protein, 14 aa, Severe acute respiratory syndrome coronavirus 2
NRFTTTLNDFNLVA

SEQ ID NO: 86957 - protein, 14 aa, Severe acute respiratory syndrome coronavirus 2
RFTTTLNDFNLVAM

SEQ ID NO: 86958 - protein, 14 aa, Severe acute respiratory syndrome coronavirus 2
FTTTLNDFNLVAMK

SEQ ID NO: 86959 - protein, 14 aa, Severe acute respiratory syndrome coronavirus 2
TLNDFNLVAMKYNY

SEQ ID NO: 86960 - protein, 14 aa, Severe acute respiratory syndrome coronavirus 2
LNDFNLVAMKYNYE

SEQ ID NO: 86961 - protein, 14 aa, Severe acute respiratory syndrome coronavirus 2
NLVAMKYNYEPLTQ

SEQ ID NO: 86962 - protein, 14 aa, Severe acute respiratory syndrome coronavirus 2
LVAMKYNYEPLTQD

SEQ ID NO: 86963 - protein, 14 aa, Severe acute respiratory syndrome coronavirus 2
VAMKYNYEPLTQDH

SEQ ID NO: 86964 - protein, 14 aa, Severe acute respiratory syndrome coronavirus 2
AMKYNYEPLTQDHV

SEQ ID NO: 86965 - protein, 14 aa, Severe acute respiratory syndrome coronavirus 2
LGPLSAQTGIAVLD

SEQ ID NO: 86966 - protein, 14 aa, Severe acute respiratory syndrome coronavirus 2
TILGSALLEDEFTP

SEQ ID NO: 86967 - protein, 14 aa, Severe acute respiratory syndrome coronavirus 2
ILGSALLEDEFTPF

SEQ ID NO: 86968 - protein, 14 aa, Severe acute respiratory syndrome coronavirus 2
LGSALLEDEFTPFD

SEQ ID NO: 86969 - protein, 14 aa, Severe acute respiratory syndrome coronavirus 2
GSALLEDEFTPFDV

SEQ ID NO: 86970 - protein, 14 aa, Severe acute respiratory syndrome coronavirus 2
SALLEDEFTPFDVV

SEQ ID NO: 86971 - protein, 14 aa, Severe acute respiratory syndrome coronavirus 2
ALLEDEFTPFDVVR

SEQ ID NO: 86972 - protein, 14 aa, Severe acute respiratory syndrome coronavirus 2
LLEDEFTPFDVVRQ

SEQ ID NO: 86973 - protein, 14 aa, Severe acute respiratory syndrome coronavirus 2
LEDEFTPFDVVRQC

SEQ ID NO: 86974 - protein, 14 aa, Severe acute respiratory syndrome coronavirus 2
EDEFTPFDVVRQCS

SEQ ID NO: 86975 - protein, 14 aa, Severe acute respiratory syndrome coronavirus 2
DEFTPFDVVRQCSG

SEQ ID NO: 86976 - protein, 14 aa, Severe acute respiratory syndrome coronavirus 2
EFTPFDVVRQCSGV

SEQ ID NO: 86977 - protein, 14 aa, Severe acute respiratory syndrome coronavirus 2
SAVKRTIKGTHHWL

SEQ ID NO: 86978 - protein, 14 aa, Severe acute respiratory syndrome coronavirus 2
AVKRTIKGTHHWLL

SEQ ID NO: 86979 - protein, 14 aa, Severe acute respiratory syndrome coronavirus 2
VKRTIKGTHHWLLL

SEQ ID NO: 86980 - protein, 14 aa, Severe acute respiratory syndrome coronavirus 2
KRTIKGTHHWLLLT

SEQ ID NO: 86981 - protein, 14 aa, Severe acute respiratory syndrome coronavirus 2
RTIKGTHHWLLLTI

SEQ ID NO: 86982 - protein, 14 aa, Severe acute respiratory syndrome coronavirus 2
TIKGTHHWLLLTIL

SEQ ID NO: 86983 - protein, 14 aa, Severe acute respiratory syndrome coronavirus 2
IKGTHHWLLLTILT

SEQ ID NO: 86984 - protein, 14 aa, Severe acute respiratory syndrome coronavirus 2
KGTHHWLLLTILTS

SEQ ID NO: 86985 - protein, 14 aa, Severe acute respiratory syndrome coronavirus 2
GTHHWLLLTILTSL

SEQ ID NO: 86986 - protein, 14 aa, Severe acute respiratory syndrome coronavirus 2
THHWLLLTILTSLL

SEQ ID NO: 86987 - protein, 14 aa, Severe acute respiratory syndrome coronavirus 2
HHWLLLTILTSLLV

SEQ ID NO: 86988 - protein, 14 aa, Severe acute respiratory syndrome coronavirus 2
HWLLLTILTSLLVL

SEQ ID NO: 86989 - protein, 14 aa, Severe acute respiratory syndrome coronavirus 2
WLLLTILTSLLVLV

SEQ ID NO: 86990 - protein, 14 aa, Severe acute respiratory syndrome coronavirus 2
LLLTILTSLLVLVQ

SEQ ID NO: 86991 - protein, 14 aa, Severe acute respiratory syndrome coronavirus 2
LLTILTSLLVLVQS

SEQ ID NO: 86992 - protein, 14 aa, Severe acute respiratory syndrome coronavirus 2
LTILTSLLVLVQST

SEQ ID NO: 86993 - protein, 14 aa, Severe acute respiratory syndrome coronavirus 2
TILTSLLVLVQSTQ

SEQ ID NO: 86994 - protein, 14 aa, Severe acute respiratory syndrome coronavirus 2
ILTSLLVLVQSTQW

SEQ ID NO: 86995 - protein, 14 aa, Severe acute respiratory syndrome coronavirus 2
LTSLLVLVQSTQWS

SEQ ID NO: 86996 - protein, 14 aa, Severe acute respiratory syndrome coronavirus 2
TSLLVLVQSTQWSL

SEQ ID NO: 86997 - protein, 14 aa, Severe acute respiratory syndrome coronavirus 2
SLLVLVQSTQWSLF

SEQ ID NO: 86998 - protein, 14 aa, Severe acute respiratory syndrome coronavirus 2
MGIIAMSAFAMMFV

SEQ ID NO: 86999 - protein, 14 aa, Severe acute respiratory syndrome coronavirus 2
GIIAMSAFAMMFVK

SEQ ID NO: 87000 - protein, 14 aa, Severe acute respiratory syndrome coronavirus 2
IIAMSAFAMMFVKH

SEQ ID NO: 87001 - protein, 14 aa, Severe acute respiratory syndrome coronavirus 2
IAMSAFAMMFVKHK

SEQ ID NO: 87002 - protein, 14 aa, Severe acute respiratory syndrome coronavirus 2
AMSAFAMMFVKHKH

SEQ ID NO: 87003 - protein, 14 aa, Severe acute respiratory syndrome coronavirus 2
MSAFAMMFVKHKHA

SEQ ID NO: 87004 - protein, 14 aa, Severe acute respiratory syndrome coronavirus 2
SAFAMMFVKHKHAF

SEQ ID NO: 87005 - protein, 14 aa, Severe acute respiratory syndrome coronavirus 2
AFAMMFVKHKHAFL

SEQ ID NO: 87006 - protein, 14 aa, Severe acute respiratory syndrome coronavirus 2
FAMMFVKHKHAFLC

SEQ ID NO: 87007 - protein, 14 aa, Severe acute respiratory syndrome coronavirus 2
AMMFVKHKHAFLCL

SEQ ID NO: 87008 - protein, 14 aa, Severe acute respiratory syndrome coronavirus 2
MMFVKHKHAFLCLF

SEQ ID NO: 87009 - protein, 14 aa, Severe acute respiratory syndrome coronavirus 2
MFVKHKHAFLCLFL

SEQ ID NO: 87010 - protein, 14 aa, Severe acute respiratory syndrome coronavirus 2
FVKHKHAFLCLFLL

SEQ ID NO: 87011 - protein, 14 aa, Severe acute respiratory syndrome coronavirus 2
VKHKHAFLCLFLLP

SEQ ID NO: 87012 - protein, 14 aa, Severe acute respiratory syndrome coronavirus 2
KHKHAFLCLFLLPS

SEQ ID NO: 87013 - protein, 14 aa, Severe acute respiratory syndrome coronavirus 2
ATVAYFNMVYMPAS

SEQ ID NO: 87014 - protein, 14 aa, Severe acute respiratory syndrome coronavirus 2
TVAYFNMVYMPASW

SEQ ID NO: 87015 - protein, 14 aa, Severe acute respiratory syndrome coronavirus 2
VAYFNMVYMPASWV

SEQ ID NO: 87016 - protein, 14 aa, Severe acute respiratory syndrome coronavirus 2
AYFNMVYMPASWVM

SEQ ID NO: 87017 - protein, 14 aa, Severe acute respiratory syndrome coronavirus 2
YFNMVYMPASWVMR

SEQ ID NO: 87018 - protein, 14 aa, Severe acute respiratory syndrome coronavirus 2
FNMVYMPASWVMRI

SEQ ID NO: 87019 - protein, 14 aa, Severe acute respiratory syndrome coronavirus 2
NMVYMPASWVMRIM

SEQ ID NO: 87020 - protein, 14 aa, Severe acute respiratory syndrome coronavirus 2
MVYMPASWVMRIMT

SEQ ID NO: 87021 - protein, 14 aa, Severe acute respiratory syndrome coronavirus 2
VYMPASWVMRIMTW

SEQ ID NO: 87022 - protein, 14 aa, Severe acute respiratory syndrome coronavirus 2
YMPASWVMRIMTWL

SEQ ID NO: 87023 - protein, 14 aa, Severe acute respiratory syndrome coronavirus 2
MRIMTWLDMVDTSL

SEQ ID NO: 87024 - protein, 14 aa, Severe acute respiratory syndrome coronavirus 2
MVDTSLSGFKLKDC

SEQ ID NO: 87025 - protein, 14 aa, Severe acute respiratory syndrome coronavirus 2
LSGFKLKDCVMYAS

SEQ ID NO: 87026 - protein, 14 aa, Severe acute respiratory syndrome coronavirus 2
SGFKLKDCVMYASA

SEQ ID NO: 87027 - protein, 14 aa, Severe acute respiratory syndrome coronavirus 2
GFKLKDCVMYASAV

SEQ ID NO: 87028 - protein, 14 aa, Severe acute respiratory syndrome coronavirus 2
FKLKDCVMYASAVV

SEQ ID NO: 87029 - protein, 14 aa, Severe acute respiratory syndrome coronavirus 2
KLKDCVMYASAVVL

SEQ ID NO: 87030 - protein, 14 aa, Severe acute respiratory syndrome coronavirus 2
LKDCVMYASAVVLL

SEQ ID NO: 87031 - protein, 14 aa, Severe acute respiratory syndrome coronavirus 2
KDCVMYASAVVLLI

SEQ ID NO: 87032 - protein, 14 aa, Severe acute respiratory syndrome coronavirus 2
DCVMYASAVVLLIL

SEQ ID NO: 87033 - protein, 14 aa, Severe acute respiratory syndrome coronavirus 2
CVMYASAVVLLILM

SEQ ID NO: 87034 - protein, 14 aa, Severe acute respiratory syndrome coronavirus 2
VMYASAVVLLILMT

SEQ ID NO: 87035 - protein, 14 aa, Severe acute respiratory syndrome coronavirus 2
IVFMCVEYCPIFFI

SEQ ID NO: 87036 - protein, 14 aa, Severe acute respiratory syndrome coronavirus 2
VFMCVEYCPIFFIT

SEQ ID NO: 87037 - protein, 14 aa, Severe acute respiratory syndrome coronavirus 2
FMCVEYCPIFFITG

SEQ ID NO: 87038 - protein, 14 aa, Severe acute respiratory syndrome coronavirus 2
MCVEYCPIFFITGN

SEQ ID NO: 87039 - protein, 14 aa, Severe acute respiratory syndrome coronavirus 2
CVEYCPIFFITGNT

SEQ ID NO: 87040 - protein, 14 aa, Severe acute respiratory syndrome coronavirus 2
VEYCPIFFITGNTL

SEQ ID NO: 87041 - protein, 14 aa, Severe acute respiratory syndrome coronavirus 2
MLVYCFLGYFCTCY

SEQ ID NO: 87042 - protein, 14 aa, Severe acute respiratory syndrome coronavirus 2
LVYCFLGYFCTCYF

SEQ ID NO: 87043 - protein, 14 aa, Severe acute respiratory syndrome coronavirus 2
VYCFLGYFCTCYFG

SEQ ID NO: 87044 - protein, 14 aa, Severe acute respiratory syndrome coronavirus 2
YCFLGYFCTCYFGL

SEQ ID NO: 87045 - protein, 14 aa, Severe acute respiratory syndrome coronavirus 2
CFLGYFCTCYFGLF

SEQ ID NO: 87046 - protein, 14 aa, Severe acute respiratory syndrome coronavirus 2
FLGYFCTCYFGLFC

SEQ ID NO: 87047 - protein, 14 aa, Severe acute respiratory syndrome coronavirus 2
LGYFCTCYFGLFCL

SEQ ID NO: 87048 - protein, 14 aa, Severe acute respiratory syndrome coronavirus 2
CYFGLFCLLNRYFR

SEQ ID NO: 87049 - protein, 14 aa, Severe acute respiratory syndrome coronavirus 2
YFGLFCLLNRYFRL

SEQ ID NO: 87050 - protein, 14 aa, Severe acute respiratory syndrome coronavirus 2
FGLFCLLNRYFRLT

SEQ ID NO: 87051 - protein, 14 aa, Severe acute respiratory syndrome coronavirus 2
GLFCLLNRYFRLTL

SEQ ID NO: 87052 - protein, 14 aa, Severe acute respiratory syndrome coronavirus 2
LFCLLNRYFRLTLG

SEQ ID NO: 87053 - protein, 14 aa, Severe acute respiratory syndrome coronavirus 2
FCLLNRYFRLTLGV

SEQ ID NO: 87054 - protein, 14 aa, Severe acute respiratory syndrome coronavirus 2
CLLNRYFRLTLGVY

SEQ ID NO: 87055 - protein, 14 aa, Severe acute respiratory syndrome coronavirus 2
LLNRYFRLTLGVYD

SEQ ID NO: 87056 - protein, 14 aa, Severe acute respiratory syndrome coronavirus 2
LNRYFRLTLGVYDY

SEQ ID NO: 87057 - protein, 14 aa, Severe acute respiratory syndrome coronavirus 2
NRYFRLTLGVYDYL

SEQ ID NO: 87058 - protein, 14 aa, Severe acute respiratory syndrome coronavirus 2
RYFRLTLGVYDYLV

SEQ ID NO: 87059 - protein, 14 aa, Severe acute respiratory syndrome coronavirus 2
YFRLTLGVYDYLVS

SEQ ID NO: 87060 - protein, 14 aa, Severe acute respiratory syndrome coronavirus 2
FRLTLGVYDYLVST

SEQ ID NO: 87061 - protein, 14 aa, Severe acute respiratory syndrome coronavirus 2
RLTLGVYDYLVSTQ

SEQ ID NO: 87062 - protein, 14 aa, Severe acute respiratory syndrome coronavirus 2
LTLGVYDYLVSTQE

SEQ ID NO: 87063 - protein, 14 aa, Severe acute respiratory syndrome coronavirus 2
TLGVYDYLVSTQEF

SEQ ID NO: 87064 - protein, 14 aa, Severe acute respiratory syndrome coronavirus 2
LGVYDYLVSTQEFR

SEQ ID NO: 87065 - protein, 14 aa, Severe acute respiratory syndrome coronavirus 2
GVYDYLVSTQEFRY

SEQ ID NO: 87066 - protein, 14 aa, Severe acute respiratory syndrome coronavirus 2
VYDYLVSTQEFRYM

SEQ ID NO: 87067 - protein, 14 aa, Severe acute respiratory syndrome coronavirus 2
YDYLVSTQEFRYMN

SEQ ID NO: 87068 - protein, 14 aa, Severe acute respiratory syndrome coronavirus 2
DYLVSTQEFRYMNS

SEQ ID NO: 87069 - protein, 14 aa, Severe acute respiratory syndrome coronavirus 2
YLVSTQEFRYMNSQ

SEQ ID NO: 87070 - protein, 14 aa, Severe acute respiratory syndrome coronavirus 2
LVSTQEFRYMNSQG

SEQ ID NO: 87071 - protein, 14 aa, Severe acute respiratory syndrome coronavirus 2
VSTQEFRYMNSQGL

SEQ ID NO: 87072 - protein, 14 aa, Severe acute respiratory syndrome coronavirus 2
PPKNSIDAFKLNIK

SEQ ID NO: 87073 - protein, 14 aa, Severe acute respiratory syndrome coronavirus 2
MSDVKCTSVVLLSV

SEQ ID NO: 87074 - protein, 14 aa, Severe acute respiratory syndrome coronavirus 2
SDVKCTSVVLLSVL

SEQ ID NO: 87075 - protein, 14 aa, Severe acute respiratory syndrome coronavirus 2
DVKCTSVVLLSVLQ

SEQ ID NO: 87076 - protein, 14 aa, Severe acute respiratory syndrome coronavirus 2
VKCTSVVLLSVLQQ

SEQ ID NO: 87077 - protein, 14 aa, Severe acute respiratory syndrome coronavirus 2
KCTSVVLLSVLQQL

SEQ ID NO: 87078 - protein, 14 aa, Severe acute respiratory syndrome coronavirus 2
CTSVVLLSVLQQLR

SEQ ID NO: 87079 - protein, 14 aa, Severe acute respiratory syndrome coronavirus 2
TSVVLLSVLQQLRV

SEQ ID NO: 87080 - protein, 14 aa, Severe acute respiratory syndrome coronavirus 2
SVVLLSVLQQLRVE

SEQ ID NO: 87081 - protein, 14 aa, Severe acute respiratory syndrome coronavirus 2
VVLLSVLQQLRVES

SEQ ID NO: 87082 - protein, 14 aa, Severe acute respiratory syndrome coronavirus 2
CVQLHNDILLAKDT

SEQ ID NO: 87083 - protein, 14 aa, Severe acute respiratory syndrome coronavirus 2
VQLHNDILLAKDTT

SEQ ID NO: 87084 - protein, 14 aa, Severe acute respiratory syndrome coronavirus 2
QLHNDILLAKDTTE

SEQ ID NO: 87085 - protein, 14 aa, Severe acute respiratory syndrome coronavirus 2
HNDILLAKDTTEAF

SEQ ID NO: 87086 - protein, 14 aa, Severe acute respiratory syndrome coronavirus 2
NDILLAKDTTEAFE

SEQ ID NO: 87087 - protein, 14 aa, Severe acute respiratory syndrome coronavirus 2
DILLAKDTTEAFEK

SEQ ID NO: 87088 - protein, 14 aa, Severe acute respiratory syndrome coronavirus 2
ILLAKDTTEAFEKM

SEQ ID NO: 87089 - protein, 14 aa, Severe acute respiratory syndrome coronavirus 2
LLAKDTTEAFEKMV

SEQ ID NO: 87090 - protein, 14 aa, Severe acute respiratory syndrome coronavirus 2
LAKDTTEAFEKMVS

SEQ ID NO: 87091 - protein, 14 aa, Severe acute respiratory syndrome coronavirus 2
AKDTTEAFEKMVSL

SEQ ID NO: 87092 - protein, 14 aa, Severe acute respiratory syndrome coronavirus 2
KDTTEAFEKMVSLL

SEQ ID NO: 87093 - protein, 14 aa, Severe acute respiratory syndrome coronavirus 2
DTTEAFEKMVSLLS

SEQ ID NO: 87094 - protein, 14 aa, Severe acute respiratory syndrome coronavirus 2
KMVSLLSVLLSMQG

SEQ ID NO: 87095 - protein, 14 aa, Severe acute respiratory syndrome coronavirus 2
MVSLLSVLLSMQGA

SEQ ID NO: 87096 - protein, 14 aa, Severe acute respiratory syndrome coronavirus 2
VSLLSVLLSMQGAV

SEQ ID NO: 87097 - protein, 14 aa, Severe acute respiratory syndrome coronavirus 2
SLLSVLLSMQGAVD

SEQ ID NO: 87098 - protein, 14 aa, Severe acute respiratory syndrome coronavirus 2
LLSVLLSMQGAVDI

SEQ ID NO: 87099 - protein, 14 aa, Severe acute respiratory syndrome coronavirus 2
LSVLLSMQGAVDIN

SEQ ID NO: 87100 - protein, 14 aa, Severe acute respiratory syndrome coronavirus 2
SVLLSMQGAVDINK

SEQ ID NO: 87101 - protein, 14 aa, Severe acute respiratory syndrome coronavirus 2
LLSMQGAVDINKLC

SEQ ID NO: 87102 - protein, 14 aa, Severe acute respiratory syndrome coronavirus 2
LSMQGAVDINKLCE

SEQ ID NO: 87103 - protein, 14 aa, Severe acute respiratory syndrome coronavirus 2
AIASEFSSLPSYAA

SEQ ID NO: 87104 - protein, 14 aa, Severe acute respiratory syndrome coronavirus 2
IASEFSSLPSYAAF

SEQ ID NO: 87105 - protein, 14 aa, Severe acute respiratory syndrome coronavirus 2
YEQAVANGDSEVVL

SEQ ID NO: 87106 - protein, 14 aa, Severe acute respiratory syndrome coronavirus 2
EQAVANGDSEVVLK

SEQ ID NO: 87107 - protein, 14 aa, Severe acute respiratory syndrome coronavirus 2
QAVANGDSEVVLKK

SEQ ID NO: 87108 - protein, 14 aa, Severe acute respiratory syndrome coronavirus 2
AVANGDSEVVLKKL

SEQ ID NO: 87109 - protein, 14 aa, Severe acute respiratory syndrome coronavirus 2
AMQRKLEKMADQAM

SEQ ID NO: 87110 - protein, 14 aa, Severe acute respiratory syndrome coronavirus 2
MQRKLEKMADQAMT

SEQ ID NO: 87111 - protein, 14 aa, Severe acute respiratory syndrome coronavirus 2
QRKLEKMADQAMTQ

SEQ ID NO: 87112 - protein, 14 aa, Severe acute respiratory syndrome coronavirus 2
RKLEKMADQAMTQM

SEQ ID NO: 87113 - protein, 14 aa, Severe acute respiratory syndrome coronavirus 2
KLEKMADQAMTQMY

SEQ ID NO: 87114 - protein, 14 aa, Severe acute respiratory syndrome coronavirus 2
LEKMADQAMTQMYK

SEQ ID NO: 87115 - protein, 14 aa, Severe acute respiratory syndrome coronavirus 2
SEDKRAKVTSAMQT

SEQ ID NO: 87116 - protein, 14 aa, Severe acute respiratory syndrome coronavirus 2
EDKRAKVTSAMQTM

SEQ ID NO: 87117 - protein, 14 aa, Severe acute respiratory syndrome coronavirus 2
DKRAKVTSAMQTML

SEQ ID NO: 87118 - protein, 14 aa, Severe acute respiratory syndrome coronavirus 2
KRAKVTSAMQTMLF

SEQ ID NO: 87119 - protein, 14 aa, Severe acute respiratory syndrome coronavirus 2
RAKVTSAMQTMLFT

SEQ ID NO: 87120 - protein, 14 aa, Severe acute respiratory syndrome coronavirus 2
AKVTSAMQTMLFTM

SEQ ID NO: 87121 - protein, 14 aa, Severe acute respiratory syndrome coronavirus 2
KVTSAMQTMLFTML

SEQ ID NO: 87122 - protein, 14 aa, Severe acute respiratory syndrome coronavirus 2
VTSAMQTMLFTMLR

SEQ ID NO: 87123 - protein, 14 aa, Severe acute respiratory syndrome coronavirus 2
TSAMQTMLFTMLRK

SEQ ID NO: 87124 - protein, 14 aa, Severe acute respiratory syndrome coronavirus 2
SAMQTMLFTMLRKL

SEQ ID NO: 87125 - protein, 14 aa, Severe acute respiratory syndrome coronavirus 2
AMQTMLFTMLRKLD

SEQ ID NO: 87126 - protein, 14 aa, Severe acute respiratory syndrome coronavirus 2
MQTMLFTMLRKLDN

SEQ ID NO: 87127 - protein, 14 aa, Severe acute respiratory syndrome coronavirus 2
NARDGCVPLNIIPL

SEQ ID NO: 87128 - protein, 14 aa, Severe acute respiratory syndrome coronavirus 2
ARDGCVPLNIIPLT

SEQ ID NO: 87129 - protein, 14 aa, Severe acute respiratory syndrome coronavirus 2
LWEIQQVVDADSKI

SEQ ID NO: 87130 - protein, 14 aa, Severe acute respiratory syndrome coronavirus 2
WEIQQVVDADSKIV

SEQ ID NO: 87131 - protein, 14 aa, Severe acute respiratory syndrome coronavirus 2
EIQQVVDADSKIVQ

SEQ ID NO: 87132 - protein, 14 aa, Severe acute respiratory syndrome coronavirus 2
IQQVVDADSKIVQL

SEQ ID NO: 87133 - protein, 14 aa, Severe acute respiratory syndrome coronavirus 2
QQVVDADSKIVQLS

SEQ ID NO: 87134 - protein, 14 aa, Severe acute respiratory syndrome coronavirus 2
QVVDADSKIVQLSE

SEQ ID NO: 87135 - protein, 14 aa, Severe acute respiratory syndrome coronavirus 2
VVDADSKIVQLSEI

SEQ ID NO: 87136 - protein, 14 aa, Severe acute respiratory syndrome coronavirus 2
ADSKIVQLSEISMD

SEQ ID NO: 87137 - protein, 14 aa, Severe acute respiratory syndrome coronavirus 2
DSKIVQLSEISMDN

SEQ ID NO: 87138 - protein, 14 aa, Severe acute respiratory syndrome coronavirus 2
SKIVQLSEISMDNS

SEQ ID NO: 87139 - protein, 14 aa, Severe acute respiratory syndrome coronavirus 2
KIVQLSEISMDNSP

SEQ ID NO: 87140 - protein, 14 aa, Severe acute respiratory syndrome coronavirus 2
IVQLSEISMDNSPN

SEQ ID NO: 87141 - protein, 14 aa, Severe acute respiratory syndrome coronavirus 2
VQLSEISMDNSPNL

SEQ ID NO: 87142 - protein, 14 aa, Severe acute respiratory syndrome coronavirus 2
QLSEISMDNSPNLA

SEQ ID NO: 87143 - protein, 14 aa, Severe acute respiratory syndrome coronavirus 2
LSEISMDNSPNLAW

SEQ ID NO: 87144 - protein, 14 aa, Severe acute respiratory syndrome coronavirus 2
SEISMDNSPNLAWP

SEQ ID NO: 87145 - protein, 14 aa, Severe acute respiratory syndrome coronavirus 2
SMDNSPNLAWPLIV

SEQ ID NO: 87146 - protein, 14 aa, Severe acute respiratory syndrome coronavirus 2
GGRFVLALLSDLQD

SEQ ID NO: 87147 - protein, 14 aa, Severe acute respiratory syndrome coronavirus 2
GRFVLALLSDLQDL

SEQ ID NO: 87148 - protein, 14 aa, Severe acute respiratory syndrome coronavirus 2
RFVLALLSDLQDLK

SEQ ID NO: 87149 - protein, 14 aa, Severe acute respiratory syndrome coronavirus 2
FVLALLSDLQDLKW

SEQ ID NO: 87150 - protein, 14 aa, Severe acute respiratory syndrome coronavirus 2
VLALLSDLQDLKWA

SEQ ID NO: 87151 - protein, 14 aa, Severe acute respiratory syndrome coronavirus 2
ALLSDLQDLKWARF

SEQ ID NO: 87152 - protein, 14 aa, Severe acute respiratory syndrome coronavirus 2
LLSDLQDLKWARFP

SEQ ID NO: 87153 - protein, 14 aa, Severe acute respiratory syndrome coronavirus 2
LSDLQDLKWARFPK

SEQ ID NO: 87154 - protein, 14 aa, Severe acute respiratory syndrome coronavirus 2
SDLQDLKWARFPKS

SEQ ID NO: 87155 - protein, 14 aa, Severe acute respiratory syndrome coronavirus 2
DLQDLKWARFPKSD

SEQ ID NO: 87156 - protein, 14 aa, Severe acute respiratory syndrome coronavirus 2
PKGPKVKYLYFIKG

SEQ ID NO: 87157 - protein, 14 aa, Severe acute respiratory syndrome coronavirus 2
KGPKVKYLYFIKGL

SEQ ID NO: 87158 - protein, 14 aa, Severe acute respiratory syndrome coronavirus 2
GPKVKYLYFIKGLN

SEQ ID NO: 87159 - protein, 14 aa, Severe acute respiratory syndrome coronavirus 2
PKVKYLYFIKGLNN

SEQ ID NO: 87160 - protein, 14 aa, Severe acute respiratory syndrome coronavirus 2
KVKYLYFIKGLNNL

SEQ ID NO: 87161 - protein, 14 aa, Severe acute respiratory syndrome coronavirus 2
VKYLYFIKGLNNLN

SEQ ID NO: 87162 - protein, 14 aa, Severe acute respiratory syndrome coronavirus 2
KYLYFIKGLNNLNR

SEQ ID NO: 87163 - protein, 14 aa, Severe acute respiratory syndrome coronavirus 2
YLYFIKGLNNLNRG

SEQ ID NO: 87164 - protein, 14 aa, Severe acute respiratory syndrome coronavirus 2
LYFIKGLNNLNRGM

SEQ ID NO: 87165 - protein, 14 aa, Severe acute respiratory syndrome coronavirus 2
YFIKGLNNLNRGMV

SEQ ID NO: 87166 - protein, 14 aa, Severe acute respiratory syndrome coronavirus 2
FIKGLNNLNRGMVL

SEQ ID NO: 87167 - protein, 14 aa, Severe acute respiratory syndrome coronavirus 2
VLSFCAFAVDAAKA

SEQ ID NO: 87168 - protein, 14 aa, Severe acute respiratory syndrome coronavirus 2
LSFCAFAVDAAKAY

SEQ ID NO: 87169 - protein, 14 aa, Severe acute respiratory syndrome coronavirus 2
SFCAFAVDAAKAYK

SEQ ID NO: 87170 - protein, 14 aa, Severe acute respiratory syndrome coronavirus 2
FCAFAVDAAKAYKD

SEQ ID NO: 87171 - protein, 14 aa, Severe acute respiratory syndrome coronavirus 2
CAFAVDAAKAYKDY

SEQ ID NO: 87172 - protein, 14 aa, Severe acute respiratory syndrome coronavirus 2
AFAVDAAKAYKDYL

SEQ ID NO: 87173 - protein, 14 aa, Severe acute respiratory syndrome coronavirus 2
FAVDAAKAYKDYLA

SEQ ID NO: 87174 - protein, 14 aa, Severe acute respiratory syndrome coronavirus 2
AVDAAKAYKDYLAS

SEQ ID NO: 87175 - protein, 14 aa, Severe acute respiratory syndrome coronavirus 2
VDAAKAYKDYLASG

SEQ ID NO: 87176 - protein, 14 aa, Severe acute respiratory syndrome coronavirus 2
DAAKAYKDYLASGG

SEQ ID NO: 87177 - protein, 14 aa, Severe acute respiratory syndrome coronavirus 2
AAKAYKDYLASGGQ

SEQ ID NO: 87178 - protein, 14 aa, Severe acute respiratory syndrome coronavirus 2
KAYKDYLASGGQPI

SEQ ID NO: 87179 - protein, 14 aa, Severe acute respiratory syndrome coronavirus 2
AYKDYLASGGQPIT

SEQ ID NO: 87180 - protein, 14 aa, Severe acute respiratory syndrome coronavirus 2
YKDYLASGGQPITN

SEQ ID NO: 87181 - protein, 14 aa, Severe acute respiratory syndrome coronavirus 2
KDYLASGGQPITNC

SEQ ID NO: 87182 - protein, 14 aa, Severe acute respiratory syndrome coronavirus 2
DYLASGGQPITNCV

SEQ ID NO: 87183 - protein, 14 aa, Severe acute respiratory syndrome coronavirus 2
YLASGGQPITNCVK

SEQ ID NO: 87184 - protein, 14 aa, Severe acute respiratory syndrome coronavirus 2
LASGGQPITNCVKM

SEQ ID NO: 87185 - protein, 14 aa, Severe acute respiratory syndrome coronavirus 2
ASGGQPITNCVKML

SEQ ID NO: 87186 - protein, 14 aa, Severe acute respiratory syndrome coronavirus 2
QESFGGASCCLYCR

SEQ ID NO: 87187 - protein, 14 aa, Severe acute respiratory syndrome coronavirus 2
ESFGGASCCLYCRC

SEQ ID NO: 87188 - protein, 14 aa, Severe acute respiratory syndrome coronavirus 2
PNPKGFCDLKGKYV

SEQ ID NO: 87189 - protein, 14 aa, Severe acute respiratory syndrome coronavirus 2
NPKGFCDLKGKYVQ

SEQ ID NO: 87190 - protein, 14 aa, Severe acute respiratory syndrome coronavirus 2
PKGFCDLKGKYVQI

SEQ ID NO: 87191 - protein, 14 aa, Severe acute respiratory syndrome coronavirus 2
KGFCDLKGKYVQIP

SEQ ID NO: 87192 - protein, 14 aa, Severe acute respiratory syndrome coronavirus 2
GFCDLKGKYVQIPT

SEQ ID NO: 87193 - protein, 15 aa, Severe acute respiratory syndrome coronavirus 2
TCGLVEVEKGVLPQL

SEQ ID NO: 87194 - protein, 15 aa, Severe acute respiratory syndrome coronavirus 2
VEKGVLPQLEQPYVF

SEQ ID NO: 87195 - protein, 15 aa, Severe acute respiratory syndrome coronavirus 2
EKGVLPQLEQPYVFI

SEQ ID NO: 87196 - protein, 15 aa, Severe acute respiratory syndrome coronavirus 2
KGVLPQLEQPYVFIK

SEQ ID NO: 87197 - protein, 15 aa, Severe acute respiratory syndrome coronavirus 2
GVLPQLEQPYVFIKR

SEQ ID NO: 87198 - protein, 15 aa, Severe acute respiratory syndrome coronavirus 2
LVAELEGIQYGRSGE

SEQ ID NO: 87199 - protein, 15 aa, Severe acute respiratory syndrome coronavirus 2
VAELEGIQYGRSGET

SEQ ID NO: 87200 - protein, 15 aa, Severe acute respiratory syndrome coronavirus 2
EHEHEIAWYTERSEK

SEQ ID NO: 87201 - protein, 15 aa, Severe acute respiratory syndrome coronavirus 2
HEHEIAWYTERSEKS

SEQ ID NO: 87202 - protein, 15 aa, Severe acute respiratory syndrome coronavirus 2
EHEIAWYTERSEKSY

SEQ ID NO: 87203 - protein, 15 aa, Severe acute respiratory syndrome coronavirus 2
HEIAWYTERSEKSYE

SEQ ID NO: 87204 - protein, 15 aa, Severe acute respiratory syndrome coronavirus 2
EIAWYTERSEKSYEL

SEQ ID NO: 87205 - protein, 15 aa, Severe acute respiratory syndrome coronavirus 2
IAWYTERSEKSYELQ

SEQ ID NO: 87206 - protein, 15 aa, Severe acute respiratory syndrome coronavirus 2
AWYTERSEKSYELQT

SEQ ID NO: 87207 - protein, 15 aa, Severe acute respiratory syndrome coronavirus 2
ERSEKSYELQTPFEI

SEQ ID NO: 87208 - protein, 15 aa, Severe acute respiratory syndrome coronavirus 2
RSEKSYELQTPFEIK

SEQ ID NO: 87209 - protein, 15 aa, Severe acute respiratory syndrome coronavirus 2
SEKSYELQTPFEIKL

SEQ ID NO: 87210 - protein, 15 aa, Severe acute respiratory syndrome coronavirus 2
EKSYELQTPFEIKLA

SEQ ID NO: 87211 - protein, 15 aa, Severe acute respiratory syndrome coronavirus 2
KSYELQTPFEIKLAK

SEQ ID NO: 87212 - protein, 15 aa, Severe acute respiratory syndrome coronavirus 2
SYELQTPFEIKLAKK

SEQ ID NO: 87213 - protein, 15 aa, Severe acute respiratory syndrome coronavirus 2
YELQTPFEIKLAKKF

SEQ ID NO: 87214 - protein, 15 aa, Severe acute respiratory syndrome coronavirus 2
ELQTPFEIKLAKKFD

SEQ ID NO: 87215 - protein, 15 aa, Severe acute respiratory syndrome coronavirus 2
EKVNINIVGDFKLNE

SEQ ID NO: 87216 - protein, 15 aa, Severe acute respiratory syndrome coronavirus 2
KVNINIVGDFKLNEE

SEQ ID NO: 87217 - protein, 15 aa, Severe acute respiratory syndrome coronavirus 2
VNINIVGDFKLNEEI

SEQ ID NO: 87218 - protein, 15 aa, Severe acute respiratory syndrome coronavirus 2
NINIVGDFKLNEEIA

SEQ ID NO: 87219 - protein, 15 aa, Severe acute respiratory syndrome coronavirus 2
INIVGDFKLNEEIAI

SEQ ID NO: 87220 - protein, 15 aa, Severe acute respiratory syndrome coronavirus 2
NIVGDFKLNEEIAII

SEQ ID NO: 87221 - protein, 15 aa, Severe acute respiratory syndrome coronavirus 2
IVGDFKLNEEIAIIL

SEQ ID NO: 87222 - protein, 15 aa, Severe acute respiratory syndrome coronavirus 2
VGDFKLNEEIAIILA

SEQ ID NO: 87223 - protein, 15 aa, Severe acute respiratory syndrome coronavirus 2
GDFKLNEEIAIILAS

SEQ ID NO: 87224 - protein, 15 aa, Severe acute respiratory syndrome coronavirus 2
DFKLNEEIAIILASF

SEQ ID NO: 87225 - protein, 15 aa, Severe acute respiratory syndrome coronavirus 2
ASTSAFVETVKGLDY

SEQ ID NO: 87226 - protein, 15 aa, Severe acute respiratory syndrome coronavirus 2
STSAFVETVKGLDYK

SEQ ID NO: 87227 - protein, 15 aa, Severe acute respiratory syndrome coronavirus 2
FKQIVESCGNFKVTK

SEQ ID NO: 87228 - protein, 15 aa, Severe acute respiratory syndrome coronavirus 2
KQIVESCGNFKVTKG

SEQ ID NO: 87229 - protein, 15 aa, Severe acute respiratory syndrome coronavirus 2
QIVESCGNFKVTKGK

SEQ ID NO: 87230 - protein, 15 aa, Severe acute respiratory syndrome coronavirus 2
ETAQNSVRVLQKAAI

SEQ ID NO: 87231 - protein, 15 aa, Severe acute respiratory syndrome coronavirus 2
FTSDLATNNLVVMAY

SEQ ID NO: 87232 - protein, 15 aa, Severe acute respiratory syndrome coronavirus 2
TSDLATNNLVVMAYI

SEQ ID NO: 87233 - protein, 15 aa, Severe acute respiratory syndrome coronavirus 2
SDLATNNLVVMAYIT

SEQ ID NO: 87234 - protein, 15 aa, Severe acute respiratory syndrome coronavirus 2
DLATNNLVVMAYITG

SEQ ID NO: 87235 - protein, 15 aa, Severe acute respiratory syndrome coronavirus 2
LATNNLVVMAYITGG

SEQ ID NO: 87236 - protein, 15 aa, Severe acute respiratory syndrome coronavirus 2
ATNNLVVMAYITGGV

SEQ ID NO: 87237 - protein, 15 aa, Severe acute respiratory syndrome coronavirus 2
NNLVVMAYITGGVVQ

SEQ ID NO: 87238 - protein, 15 aa, Severe acute respiratory syndrome coronavirus 2
NLVVMAYITGGVVQL

SEQ ID NO: 87239 - protein, 15 aa, Severe acute respiratory syndrome coronavirus 2
VLDWLEEKFKEGVEF

SEQ ID NO: 87240 - protein, 15 aa, Severe acute respiratory syndrome coronavirus 2
LDWLEEKFKEGVEFL

SEQ ID NO: 87241 - protein, 15 aa, Severe acute respiratory syndrome coronavirus 2
DWLEEKFKEGVEFLR

SEQ ID NO: 87242 - protein, 15 aa, Severe acute respiratory syndrome coronavirus 2
WLEEKFKEGVEFLRD

SEQ ID NO: 87243 - protein, 15 aa, Severe acute respiratory syndrome coronavirus 2
LEEKFKEGVEFLRDG

SEQ ID NO: 87244 - protein, 15 aa, Severe acute respiratory syndrome coronavirus 2
EEKFKEGVEFLRDGW

SEQ ID NO: 87245 - protein, 15 aa, Severe acute respiratory syndrome coronavirus 2
EKFKEGVEFLRDGWE

SEQ ID NO: 87246 - protein, 15 aa, Severe acute respiratory syndrome coronavirus 2
KFKEGVEFLRDGWEI

SEQ ID NO: 87247 - protein, 15 aa, Severe acute respiratory syndrome coronavirus 2
FKEGVEFLRDGWEIV

SEQ ID NO: 87248 - protein, 15 aa, Severe acute respiratory syndrome coronavirus 2
KEGVEFLRDGWEIVK

SEQ ID NO: 87249 - protein, 15 aa, Severe acute respiratory syndrome coronavirus 2
EGVEFLRDGWEIVKF

SEQ ID NO: 87250 - protein, 15 aa, Severe acute respiratory syndrome coronavirus 2
IVGGQIVTCAKEIKE

SEQ ID NO: 87251 - protein, 15 aa, Severe acute respiratory syndrome coronavirus 2
GGQIVTCAKEIKESV

SEQ ID NO: 87252 - protein, 15 aa, Severe acute respiratory syndrome coronavirus 2
NKFLALCADSIIIGG

SEQ ID NO: 87253 - protein, 15 aa, Severe acute respiratory syndrome coronavirus 2
KFLALCADSIIIGGA

SEQ ID NO: 87254 - protein, 15 aa, Severe acute respiratory syndrome coronavirus 2
FLALCADSIIIGGAK

SEQ ID NO: 87255 - protein, 15 aa, Severe acute respiratory syndrome coronavirus 2
LALCADSIIIGGAKL

SEQ ID NO: 87256 - protein, 15 aa, Severe acute respiratory syndrome coronavirus 2
ALCADSIIIGGAKLK

SEQ ID NO: 87257 - protein, 15 aa, Severe acute respiratory syndrome coronavirus 2
LCADSIIIGGAKLKA

SEQ ID NO: 87258 - protein, 15 aa, Severe acute respiratory syndrome coronavirus 2
CADSIIIGGAKLKAL

SEQ ID NO: 87259 - protein, 15 aa, Severe acute respiratory syndrome coronavirus 2
ADSIIIGGAKLKALN

SEQ ID NO: 87260 - protein, 15 aa, Severe acute respiratory syndrome coronavirus 2
DSIIIGGAKLKALNL

SEQ ID NO: 87261 - protein, 15 aa, Severe acute respiratory syndrome coronavirus 2
SIIIGGAKLKALNLG

SEQ ID NO: 87262 - protein, 15 aa, Severe acute respiratory syndrome coronavirus 2
IIIGGAKLKALNLGE

SEQ ID NO: 87263 - protein, 15 aa, Severe acute respiratory syndrome coronavirus 2
FVTHSKGLYRKCVKS

SEQ ID NO: 87264 - protein, 15 aa, Severe acute respiratory syndrome coronavirus 2
SEAVEAPLVGTPVCI

SEQ ID NO: 87265 - protein, 15 aa, Severe acute respiratory syndrome coronavirus 2
EAVEAPLVGTPVCIN

SEQ ID NO: 87266 - protein, 15 aa, Severe acute respiratory syndrome coronavirus 2
AVEAPLVGTPVCING

SEQ ID NO: 87267 - protein, 15 aa, Severe acute respiratory syndrome coronavirus 2
VEAPLVGTPVCINGL

SEQ ID NO: 87268 - protein, 15 aa, Severe acute respiratory syndrome coronavirus 2
EAPLVGTPVCINGLM

SEQ ID NO: 87269 - protein, 15 aa, Severe acute respiratory syndrome coronavirus 2
APLVGTPVCINGLML

SEQ ID NO: 87270 - protein, 15 aa, Severe acute respiratory syndrome coronavirus 2
PLVGTPVCINGLMLL

SEQ ID NO: 87271 - protein, 15 aa, Severe acute respiratory syndrome coronavirus 2
LVGTPVCINGLMLLE

SEQ ID NO: 87272 - protein, 15 aa, Severe acute respiratory syndrome coronavirus 2
VGTPVCINGLMLLEI

SEQ ID NO: 87273 - protein, 15 aa, Severe acute respiratory syndrome coronavirus 2
GTPVCINGLMLLEIK

SEQ ID NO: 87274 - protein, 15 aa, Severe acute respiratory syndrome coronavirus 2
TPVCINGLMLLEIKD

SEQ ID NO: 87275 - protein, 15 aa, Severe acute respiratory syndrome coronavirus 2
PVCINGLMLLEIKDT

SEQ ID NO: 87276 - protein, 15 aa, Severe acute respiratory syndrome coronavirus 2
VCINGLMLLEIKDTE

SEQ ID NO: 87277 - protein, 15 aa, Severe acute respiratory syndrome coronavirus 2
CINGLMLLEIKDTEK

SEQ ID NO: 87278 - protein, 15 aa, Severe acute respiratory syndrome coronavirus 2
INGLMLLEIKDTEKY

SEQ ID NO: 87279 - protein, 15 aa, Severe acute respiratory syndrome coronavirus 2
NGLMLLEIKDTEKYC

SEQ ID NO: 87280 - protein, 15 aa, Severe acute respiratory syndrome coronavirus 2
GLMLLEIKDTEKYCA

SEQ ID NO: 87281 - protein, 15 aa, Severe acute respiratory syndrome coronavirus 2
LMLLEIKDTEKYCAL

SEQ ID NO: 87282 - protein, 15 aa, Severe acute respiratory syndrome coronavirus 2
MLLEIKDTEKYCALA

SEQ ID NO: 87283 - protein, 15 aa, Severe acute respiratory syndrome coronavirus 2
CSAYTVELGTEVNEF

SEQ ID NO: 87284 - protein, 15 aa, Severe acute respiratory syndrome coronavirus 2
SAYTVELGTEVNEFA

SEQ ID NO: 87285 - protein, 15 aa, Severe acute respiratory syndrome coronavirus 2
AYTVELGTEVNEFAC

SEQ ID NO: 87286 - protein, 15 aa, Severe acute respiratory syndrome coronavirus 2
YTVELGTEVNEFACV

SEQ ID NO: 87287 - protein, 15 aa, Severe acute respiratory syndrome coronavirus 2
TVELGTEVNEFACVV

SEQ ID NO: 87288 - protein, 15 aa, Severe acute respiratory syndrome coronavirus 2
TPVVQTIEVNSFSGY

SEQ ID NO: 87289 - protein, 15 aa, Severe acute respiratory syndrome coronavirus 2
PVVQTIEVNSFSGYL

SEQ ID NO: 87290 - protein, 15 aa, Severe acute respiratory syndrome coronavirus 2
VVQTIEVNSFSGYLK

SEQ ID NO: 87291 - protein, 15 aa, Severe acute respiratory syndrome coronavirus 2
VQTIEVNSFSGYLKL

SEQ ID NO: 87292 - protein, 15 aa, Severe acute respiratory syndrome coronavirus 2
QTIEVNSFSGYLKLT

SEQ ID NO: 87293 - protein, 15 aa, Severe acute respiratory syndrome coronavirus 2
KPTVVVNAANVYLKH

SEQ ID NO: 87294 - protein, 15 aa, Severe acute respiratory syndrome coronavirus 2
PTVVVNAANVYLKHG

SEQ ID NO: 87295 - protein, 15 aa, Severe acute respiratory syndrome coronavirus 2
TVVVNAANVYLKHGG

SEQ ID NO: 87296 - protein, 15 aa, Severe acute respiratory syndrome coronavirus 2
VVVNAANVYLKHGGG

SEQ ID NO: 87297 - protein, 15 aa, Severe acute respiratory syndrome coronavirus 2
NVYLKHGGGVAGALN

SEQ ID NO: 87298 - protein, 15 aa, Severe acute respiratory syndrome coronavirus 2
VYLKHGGGVAGALNK

SEQ ID NO: 87299 - protein, 15 aa, Severe acute respiratory syndrome coronavirus 2
YLKHGGGVAGALNKA

SEQ ID NO: 87300 - protein, 15 aa, Severe acute respiratory syndrome coronavirus 2
LKHGGGVAGALNKAT

SEQ ID NO: 87301 - protein, 15 aa, Severe acute respiratory syndrome coronavirus 2
KHGGGVAGALNKATN

SEQ ID NO: 87302 - protein, 15 aa, Severe acute respiratory syndrome coronavirus 2
HGGGVAGALNKATNN

SEQ ID NO: 87303 - protein, 15 aa, Severe acute respiratory syndrome coronavirus 2
GGGVAGALNKATNNA

SEQ ID NO: 87304 - protein, 15 aa, Severe acute respiratory syndrome coronavirus 2
GGVAGALNKATNNAM

SEQ ID NO: 87305 - protein, 15 aa, Severe acute respiratory syndrome coronavirus 2
GVAGALNKATNNAMQ

SEQ ID NO: 87306 - protein, 15 aa, Severe acute respiratory syndrome coronavirus 2
GSCVLSGHNLAKHCL

SEQ ID NO: 87307 - protein, 15 aa, Severe acute respiratory syndrome coronavirus 2
SCVLSGHNLAKHCLH

SEQ ID NO: 87308 - protein, 15 aa, Severe acute respiratory syndrome coronavirus 2
CVLSGHNLAKHCLHV

SEQ ID NO: 87309 - protein, 15 aa, Severe acute respiratory syndrome coronavirus 2
VLSGHNLAKHCLHVV

SEQ ID NO: 87310 - protein, 15 aa, Severe acute respiratory syndrome coronavirus 2
LSGHNLAKHCLHVVG

SEQ ID NO: 87311 - protein, 15 aa, Severe acute respiratory syndrome coronavirus 2
SGHNLAKHCLHVVGP

SEQ ID NO: 87312 - protein, 15 aa, Severe acute respiratory syndrome coronavirus 2
GHNLAKHCLHVVGPN

SEQ ID NO: 87313 - protein, 15 aa, Severe acute respiratory syndrome coronavirus 2
HNLAKHCLHVVGPNV

SEQ ID NO: 87314 - protein, 15 aa, Severe acute respiratory syndrome coronavirus 2
NLAKHCLHVVGPNVN

SEQ ID NO: 87315 - protein, 15 aa, Severe acute respiratory syndrome coronavirus 2
TNVYLAVFDKNLYDK

SEQ ID NO: 87316 - protein, 15 aa, Severe acute respiratory syndrome coronavirus 2
VFDKNLYDKLVSSFL

SEQ ID NO: 87317 - protein, 15 aa, Severe acute respiratory syndrome coronavirus 2
FDKNLYDKLVSSFLE

SEQ ID NO: 87318 - protein, 15 aa, Severe acute respiratory syndrome coronavirus 2
KFLTENLLLYIDING

SEQ ID NO: 87319 - protein, 15 aa, Severe acute respiratory syndrome coronavirus 2
DSATLVSDIDITFLK

SEQ ID NO: 87320 - protein, 15 aa, Severe acute respiratory syndrome coronavirus 2
SATLVSDIDITFLKK

SEQ ID NO: 87321 - protein, 15 aa, Severe acute respiratory syndrome coronavirus 2
YITTYPGQGLNGYTV

SEQ ID NO: 87322 - protein, 15 aa, Severe acute respiratory syndrome coronavirus 2
ITTYPGQGLNGYTVE

SEQ ID NO: 87323 - protein, 15 aa, Severe acute respiratory syndrome coronavirus 2
TYPGQGLNGYTVEEA

SEQ ID NO: 87324 - protein, 15 aa, Severe acute respiratory syndrome coronavirus 2
YPGQGLNGYTVEEAK

SEQ ID NO: 87325 - protein, 15 aa, Severe acute respiratory syndrome coronavirus 2
PGQGLNGYTVEEAKT

SEQ ID NO: 87326 - protein, 15 aa, Severe acute respiratory syndrome coronavirus 2
GQGLNGYTVEEAKTV

SEQ ID NO: 87327 - protein, 15 aa, Severe acute respiratory syndrome coronavirus 2
QGLNGYTVEEAKTVL

SEQ ID NO: 87328 - protein, 15 aa, Severe acute respiratory syndrome coronavirus 2
GLNGYTVEEAKTVLK

SEQ ID NO: 87329 - protein, 15 aa, Severe acute respiratory syndrome coronavirus 2
LNGYTVEEAKTVLKK

SEQ ID NO: 87330 - protein, 15 aa, Severe acute respiratory syndrome coronavirus 2
NGYTVEEAKTVLKKC

SEQ ID NO: 87331 - protein, 15 aa, Severe acute respiratory syndrome coronavirus 2
GYTVEEAKTVLKKCK

SEQ ID NO: 87332 - protein, 15 aa, Severe acute respiratory syndrome coronavirus 2
YTVEEAKTVLKKCKS

SEQ ID NO: 87333 - protein, 15 aa, Severe acute respiratory syndrome coronavirus 2
FYILPSIISNEKQEI

SEQ ID NO: 87334 - protein, 15 aa, Severe acute respiratory syndrome coronavirus 2
YILPSIISNEKQEIL

SEQ ID NO: 87335 - protein, 15 aa, Severe acute respiratory syndrome coronavirus 2
ILPSIISNEKQEILG

SEQ ID NO: 87336 - protein, 15 aa, Severe acute respiratory syndrome coronavirus 2
LPSIISNEKQEILGT

SEQ ID NO: 87337 - protein, 15 aa, Severe acute respiratory syndrome coronavirus 2
PSIISNEKQEILGTV

SEQ ID NO: 87338 - protein, 15 aa, Severe acute respiratory syndrome coronavirus 2
SIISNEKQEILGTVS

SEQ ID NO: 87339 - protein, 15 aa, Severe acute respiratory syndrome coronavirus 2
REMLAHAEETRKLMP

SEQ ID NO: 87340 - protein, 15 aa, Severe acute respiratory syndrome coronavirus 2
LAHAEETRKLMPVCV

SEQ ID NO: 87341 - protein, 15 aa, Severe acute respiratory syndrome coronavirus 2
AHAEETRKLMPVCVE

SEQ ID NO: 87342 - protein, 15 aa, Severe acute respiratory syndrome coronavirus 2
HAEETRKLMPVCVET

SEQ ID NO: 87343 - protein, 15 aa, Severe acute respiratory syndrome coronavirus 2
AEETRKLMPVCVETK

SEQ ID NO: 87344 - protein, 15 aa, Severe acute respiratory syndrome coronavirus 2
EETRKLMPVCVETKA

SEQ ID NO: 87345 - protein, 15 aa, Severe acute respiratory syndrome coronavirus 2
CVETKAIVSTIQRKY

SEQ ID NO: 87346 - protein, 15 aa, Severe acute respiratory syndrome coronavirus 2
VETKAIVSTIQRKYK

SEQ ID NO: 87347 - protein, 15 aa, Severe acute respiratory syndrome coronavirus 2
VSTIQRKYKGIKIQE

SEQ ID NO: 87348 - protein, 15 aa, Severe acute respiratory syndrome coronavirus 2
STIQRKYKGIKIQEG

SEQ ID NO: 87349 - protein, 15 aa, Severe acute respiratory syndrome coronavirus 2
TIQRKYKGIKIQEGV

SEQ ID NO: 87350 - protein, 15 aa, Severe acute respiratory syndrome coronavirus 2
IQRKYKGIKIQEGVV

SEQ ID NO: 87351 - protein, 15 aa, Severe acute respiratory syndrome coronavirus 2
QRKYKGIKIQEGVVD

SEQ ID NO: 87352 - protein, 15 aa, Severe acute respiratory syndrome coronavirus 2
RKYKGIKIQEGVVDY

SEQ ID NO: 87353 - protein, 15 aa, Severe acute respiratory syndrome coronavirus 2
KYKGIKIQEGVVDYG

SEQ ID NO: 87354 - protein, 15 aa, Severe acute respiratory syndrome coronavirus 2
AVTAYNGYLTSSSKT

SEQ ID NO: 87355 - protein, 15 aa, Severe acute respiratory syndrome coronavirus 2
TAYNGYLTSSSKTPE

SEQ ID NO: 87356 - protein, 15 aa, Severe acute respiratory syndrome coronavirus 2
AYNGYLTSSSKTPEE

SEQ ID NO: 87357 - protein, 15 aa, Severe acute respiratory syndrome coronavirus 2
YNGYLTSSSKTPEEH

SEQ ID NO: 87358 - protein, 15 aa, Severe acute respiratory syndrome coronavirus 2
SKTPEEHFIETISLA

SEQ ID NO: 87359 - protein, 15 aa, Severe acute respiratory syndrome coronavirus 2
KTPEEHFIETISLAG

SEQ ID NO: 87360 - protein, 15 aa, Severe acute respiratory syndrome coronavirus 2
TPEEHFIETISLAGS

SEQ ID NO: 87361 - protein, 15 aa, Severe acute respiratory syndrome coronavirus 2
PEEHFIETISLAGSY

SEQ ID NO: 87362 - protein, 15 aa, Severe acute respiratory syndrome coronavirus 2
EEHFIETISLAGSYK

SEQ ID NO: 87363 - protein, 15 aa, Severe acute respiratory syndrome coronavirus 2
EHFIETISLAGSYKD

SEQ ID NO: 87364 - protein, 15 aa, Severe acute respiratory syndrome coronavirus 2
HFIETISLAGSYKDW

SEQ ID NO: 87365 - protein, 15 aa, Severe acute respiratory syndrome coronavirus 2
VRTIKVFTTVDNINL

SEQ ID NO: 87366 - protein, 15 aa, Severe acute respiratory syndrome coronavirus 2
RTIKVFTTVDNINLH

SEQ ID NO: 87367 - protein, 15 aa, Severe acute respiratory syndrome coronavirus 2
IKPHNSHEGKTFYVL

SEQ ID NO: 87368 - protein, 15 aa, Severe acute respiratory syndrome coronavirus 2
KPHNSHEGKTFYVLP

SEQ ID NO: 87369 - protein, 15 aa, Severe acute respiratory syndrome coronavirus 2
PHNSHEGKTFYVLPN

SEQ ID NO: 87370 - protein, 15 aa, Severe acute respiratory syndrome coronavirus 2
HNSHEGKTFYVLPND

SEQ ID NO: 87371 - protein, 15 aa, Severe acute respiratory syndrome coronavirus 2
KKWKYPQVNGLTSIK

SEQ ID NO: 87372 - protein, 15 aa, Severe acute respiratory syndrome coronavirus 2
KWKYPQVNGLTSIKW

SEQ ID NO: 87373 - protein, 15 aa, Severe acute respiratory syndrome coronavirus 2
WKYPQVNGLTSIKWA

SEQ ID NO: 87374 - protein, 15 aa, Severe acute respiratory syndrome coronavirus 2
KYPQVNGLTSIKWAD

SEQ ID NO: 87375 - protein, 15 aa, Severe acute respiratory syndrome coronavirus 2
YPQVNGLTSIKWADN

SEQ ID NO: 87376 - protein, 15 aa, Severe acute respiratory syndrome coronavirus 2
PQVNGLTSIKWADNN

SEQ ID NO: 87377 - protein, 15 aa, Severe acute respiratory syndrome coronavirus 2
QVNGLTSIKWADNNC

SEQ ID NO: 87378 - protein, 15 aa, Severe acute respiratory syndrome coronavirus 2
VNGLTSIKWADNNCY

SEQ ID NO: 87379 - protein, 15 aa, Severe acute respiratory syndrome coronavirus 2
NGLTSIKWADNNCYL

SEQ ID NO: 87380 - protein, 15 aa, Severe acute respiratory syndrome coronavirus 2
GLTSIKWADNNCYLA

SEQ ID NO: 87381 - protein, 15 aa, Severe acute respiratory syndrome coronavirus 2
LTSIKWADNNCYLAT

SEQ ID NO: 87382 - protein, 15 aa, Severe acute respiratory syndrome coronavirus 2
LQQIELKFNPPALQD

SEQ ID NO: 87383 - protein, 15 aa, Severe acute respiratory syndrome coronavirus 2
ELKFNPPALQDAYYR

SEQ ID NO: 87384 - protein, 15 aa, Severe acute respiratory syndrome coronavirus 2
LKFNPPALQDAYYRA

SEQ ID NO: 87385 - protein, 15 aa, Severe acute respiratory syndrome coronavirus 2
NPPALQDAYYRARAG

SEQ ID NO: 87386 - protein, 15 aa, Severe acute respiratory syndrome coronavirus 2
PPALQDAYYRARAGE

SEQ ID NO: 87387 - protein, 15 aa, Severe acute respiratory syndrome coronavirus 2
PALQDAYYRARAGEA

SEQ ID NO: 87388 - protein, 15 aa, Severe acute respiratory syndrome coronavirus 2
ALQDAYYRARAGEAA

SEQ ID NO: 87389 - protein, 15 aa, Severe acute respiratory syndrome coronavirus 2
LQDAYYRARAGEAAN

SEQ ID NO: 87390 - protein, 15 aa, Severe acute respiratory syndrome coronavirus 2
QDAYYRARAGEAANF

SEQ ID NO: 87391 - protein, 15 aa, Severe acute respiratory syndrome coronavirus 2
DAYYRARAGEAANFC

SEQ ID NO: 87392 - protein, 15 aa, Severe acute respiratory syndrome coronavirus 2
AYYRARAGEAANFCA

SEQ ID NO: 87393 - protein, 15 aa, Severe acute respiratory syndrome coronavirus 2
YYRARAGEAANFCAL

SEQ ID NO: 87394 - protein, 15 aa, Severe acute respiratory syndrome coronavirus 2
YRARAGEAANFCALI

SEQ ID NO: 87395 - protein, 15 aa, Severe acute respiratory syndrome coronavirus 2
RARAGEAANFCALIL

SEQ ID NO: 87396 - protein, 15 aa, Severe acute respiratory syndrome coronavirus 2
ARAGEAANFCALILA

SEQ ID NO: 87397 - protein, 15 aa, Severe acute respiratory syndrome coronavirus 2
RAGEAANFCALILAY

SEQ ID NO: 87398 - protein, 15 aa, Severe acute respiratory syndrome coronavirus 2
AGEAANFCALILAYC

SEQ ID NO: 87399 - protein, 15 aa, Severe acute respiratory syndrome coronavirus 2
MSYLFQHANLDSCKR

SEQ ID NO: 87400 - protein, 15 aa, Severe acute respiratory syndrome coronavirus 2
SYLFQHANLDSCKRV

SEQ ID NO: 87401 - protein, 15 aa, Severe acute respiratory syndrome coronavirus 2
LFQHANLDSCKRVLN

SEQ ID NO: 87402 - protein, 15 aa, Severe acute respiratory syndrome coronavirus 2
FQHANLDSCKRVLNV

SEQ ID NO: 87403 - protein, 15 aa, Severe acute respiratory syndrome coronavirus 2
QHANLDSCKRVLNVV

SEQ ID NO: 87404 - protein, 15 aa, Severe acute respiratory syndrome coronavirus 2
HANLDSCKRVLNVVC

SEQ ID NO: 87405 - protein, 15 aa, Severe acute respiratory syndrome coronavirus 2
ANLDSCKRVLNVVCK

SEQ ID NO: 87406 - protein, 15 aa, Severe acute respiratory syndrome coronavirus 2
NLDSCKRVLNVVCKT

SEQ ID NO: 87407 - protein, 15 aa, Severe acute respiratory syndrome coronavirus 2
LDSCKRVLNVVCKTC

SEQ ID NO: 87408 - protein, 15 aa, Severe acute respiratory syndrome coronavirus 2
DSCKRVLNVVCKTCG

SEQ ID NO: 87409 - protein, 15 aa, Severe acute respiratory syndrome coronavirus 2
SCKRVLNVVCKTCGQ

SEQ ID NO: 87410 - protein, 15 aa, Severe acute respiratory syndrome coronavirus 2
CKRVLNVVCKTCGQQ

SEQ ID NO: 87411 - protein, 15 aa, Severe acute respiratory syndrome coronavirus 2
KRVLNVVCKTCGQQQ

SEQ ID NO: 87412 - protein, 15 aa, Severe acute respiratory syndrome coronavirus 2
RVLNVVCKTCGQQQT

SEQ ID NO: 87413 - protein, 15 aa, Severe acute respiratory syndrome coronavirus 2
TCGQQQTTLKGVEAV

SEQ ID NO: 87414 - protein, 15 aa, Severe acute respiratory syndrome coronavirus 2
MGTLSYEQFKKGVQI

SEQ ID NO: 87415 - protein, 15 aa, Severe acute respiratory syndrome coronavirus 2
GTLSYEQFKKGVQIP

SEQ ID NO: 87416 - protein, 15 aa, Severe acute respiratory syndrome coronavirus 2
TLSYEQFKKGVQIPC

SEQ ID NO: 87417 - protein, 15 aa, Severe acute respiratory syndrome coronavirus 2
ITDVFYKENSYTTTI

SEQ ID NO: 87418 - protein, 15 aa, Severe acute respiratory syndrome coronavirus 2
TDVFYKENSYTTTIK

SEQ ID NO: 87419 - protein, 15 aa, Severe acute respiratory syndrome coronavirus 2
DVFYKENSYTTTIKP

SEQ ID NO: 87420 - protein, 15 aa, Severe acute respiratory syndrome coronavirus 2
VFYKENSYTTTIKPV

SEQ ID NO: 87421 - protein, 15 aa, Severe acute respiratory syndrome coronavirus 2
FYKENSYTTTIKPVT

SEQ ID NO: 87422 - protein, 15 aa, Severe acute respiratory syndrome coronavirus 2
YKENSYTTTIKPVTY

SEQ ID NO: 87423 - protein, 15 aa, Severe acute respiratory syndrome coronavirus 2
KENSYTTTIKPVTYK

SEQ ID NO: 87424 - protein, 15 aa, Severe acute respiratory syndrome coronavirus 2
ENSYTTTIKPVTYKL

SEQ ID NO: 87425 - protein, 15 aa, Severe acute respiratory syndrome coronavirus 2
NSYTTTIKPVTYKLD

SEQ ID NO: 87426 - protein, 15 aa, Severe acute respiratory syndrome coronavirus 2
SYTTTIKPVTYKLDG

SEQ ID NO: 87427 - protein, 15 aa, Severe acute respiratory syndrome coronavirus 2
YTTTIKPVTYKLDGV

SEQ ID NO: 87428 - protein, 15 aa, Severe acute respiratory syndrome coronavirus 2
TTTIKPVTYKLDGVV

SEQ ID NO: 87429 - protein, 15 aa, Severe acute respiratory syndrome coronavirus 2
TTIKPVTYKLDGVVC

SEQ ID NO: 87430 - protein, 15 aa, Severe acute respiratory syndrome coronavirus 2
TIKPVTYKLDGVVCT

SEQ ID NO: 87431 - protein, 15 aa, Severe acute respiratory syndrome coronavirus 2
IKPVTYKLDGVVCTE

SEQ ID NO: 87432 - protein, 15 aa, Severe acute respiratory syndrome coronavirus 2
KPVTYKLDGVVCTEI

SEQ ID NO: 87433 - protein, 15 aa, Severe acute respiratory syndrome coronavirus 2
PVTYKLDGVVCTEID

SEQ ID NO: 87434 - protein, 15 aa, Severe acute respiratory syndrome coronavirus 2
VTYKLDGVVCTEIDP

SEQ ID NO: 87435 - protein, 15 aa, Severe acute respiratory syndrome coronavirus 2
TYKLDGVVCTEIDPK

SEQ ID NO: 87436 - protein, 15 aa, Severe acute respiratory syndrome coronavirus 2
PKLDNYYKKDNSYFT

SEQ ID NO: 87437 - protein, 15 aa, Severe acute respiratory syndrome coronavirus 2
KLDNYYKKDNSYFTE

SEQ ID NO: 87438 - protein, 15 aa, Severe acute respiratory syndrome coronavirus 2
LDNYYKKDNSYFTEQ

SEQ ID NO: 87439 - protein, 15 aa, Severe acute respiratory syndrome coronavirus 2
DNYYKKDNSYFTEQP

SEQ ID NO: 87440 - protein, 15 aa, Severe acute respiratory syndrome coronavirus 2
NYYKKDNSYFTEQPI

SEQ ID NO: 87441 - protein, 15 aa, Severe acute respiratory syndrome coronavirus 2
YYKKDNSYFTEQPID

SEQ ID NO: 87442 - protein, 15 aa, Severe acute respiratory syndrome coronavirus 2
YKKDNSYFTEQPIDL

SEQ ID NO: 87443 - protein, 15 aa, Severe acute respiratory syndrome coronavirus 2
KKDNSYFTEQPIDLV

SEQ ID NO: 87444 - protein, 15 aa, Severe acute respiratory syndrome coronavirus 2
KDNSYFTEQPIDLVP

SEQ ID NO: 87445 - protein, 15 aa, Severe acute respiratory syndrome coronavirus 2
DNSYFTEQPIDLVPN

SEQ ID NO: 87446 - protein, 15 aa, Severe acute respiratory syndrome coronavirus 2
NSYFTEQPIDLVPNQ

SEQ ID NO: 87447 - protein, 15 aa, Severe acute respiratory syndrome coronavirus 2
SYFTEQPIDLVPNQP

SEQ ID NO: 87448 - protein, 15 aa, Severe acute respiratory syndrome coronavirus 2
YFTEQPIDLVPNQPY

SEQ ID NO: 87449 - protein, 15 aa, Severe acute respiratory syndrome coronavirus 2
ASFDNFKFVCDNIKF

SEQ ID NO: 87450 - protein, 15 aa, Severe acute respiratory syndrome coronavirus 2
SFDNFKFVCDNIKFA

SEQ ID NO: 87451 - protein, 15 aa, Severe acute respiratory syndrome coronavirus 2
FDNFKFVCDNIKFAD

SEQ ID NO: 87452 - protein, 15 aa, Severe acute respiratory syndrome coronavirus 2
DNFKFVCDNIKFADD

SEQ ID NO: 87453 - protein, 15 aa, Severe acute respiratory syndrome coronavirus 2
NFKFVCDNIKFADDL

SEQ ID NO: 87454 - protein, 15 aa, Severe acute respiratory syndrome coronavirus 2
FKFVCDNIKFADDLN

SEQ ID NO: 87455 - protein, 15 aa, Severe acute respiratory syndrome coronavirus 2
KFVCDNIKFADDLNQ

SEQ ID NO: 87456 - protein, 15 aa, Severe acute respiratory syndrome coronavirus 2
FVCDNIKFADDLNQL

SEQ ID NO: 87457 - protein, 15 aa, Severe acute respiratory syndrome coronavirus 2
VCDNIKFADDLNQLT

SEQ ID NO: 87458 - protein, 15 aa, Severe acute respiratory syndrome coronavirus 2
CDNIKFADDLNQLTG

SEQ ID NO: 87459 - protein, 15 aa, Severe acute respiratory syndrome coronavirus 2
DNIKFADDLNQLTGY

SEQ ID NO: 87460 - protein, 15 aa, Severe acute respiratory syndrome coronavirus 2
NIKFADDLNQLTGYK

SEQ ID NO: 87461 - protein, 15 aa, Severe acute respiratory syndrome coronavirus 2
IKFADDLNQLTGYKK

SEQ ID NO: 87462 - protein, 15 aa, Severe acute respiratory syndrome coronavirus 2
KFADDLNQLTGYKKP

SEQ ID NO: 87463 - protein, 15 aa, Severe acute respiratory syndrome coronavirus 2
FADDLNQLTGYKKPA

SEQ ID NO: 87464 - protein, 15 aa, Severe acute respiratory syndrome coronavirus 2
DLNQLTGYKKPASRE

SEQ ID NO: 87465 - protein, 15 aa, Severe acute respiratory syndrome coronavirus 2
LNQLTGYKKPASREL

SEQ ID NO: 87466 - protein, 15 aa, Severe acute respiratory syndrome coronavirus 2
NQLTGYKKPASRELK

SEQ ID NO: 87467 - protein, 15 aa, Severe acute respiratory syndrome coronavirus 2
QLTGYKKPASRELKV

SEQ ID NO: 87468 - protein, 15 aa, Severe acute respiratory syndrome coronavirus 2
LTGYKKPASRELKVT

SEQ ID NO: 87469 - protein, 15 aa, Severe acute respiratory syndrome coronavirus 2
TGYKKPASRELKVTF

SEQ ID NO: 87470 - protein, 15 aa, Severe acute respiratory syndrome coronavirus 2
GYKKPASRELKVTFF

SEQ ID NO: 87471 - protein, 15 aa, Severe acute respiratory syndrome coronavirus 2
KPASRELKVTFFPDL

SEQ ID NO: 87472 - protein, 15 aa, Severe acute respiratory syndrome coronavirus 2
PASRELKVTFFPDLN

SEQ ID NO: 87473 - protein, 15 aa, Severe acute respiratory syndrome coronavirus 2
ASRELKVTFFPDLNG

SEQ ID NO: 87474 - protein, 15 aa, Severe acute respiratory syndrome coronavirus 2
SRELKVTFFPDLNGD

SEQ ID NO: 87475 - protein, 15 aa, Severe acute respiratory syndrome coronavirus 2
RELKVTFFPDLNGDV

SEQ ID NO: 87476 - protein, 15 aa, Severe acute respiratory syndrome coronavirus 2
ELKVTFFPDLNGDVV

SEQ ID NO: 87477 - protein, 15 aa, Severe acute respiratory syndrome coronavirus 2
LKVTFFPDLNGDVVA

SEQ ID NO: 87478 - protein, 15 aa, Severe acute respiratory syndrome coronavirus 2
KVTFFPDLNGDVVAI

SEQ ID NO: 87479 - protein, 15 aa, Severe acute respiratory syndrome coronavirus 2
VTFFPDLNGDVVAID

SEQ ID NO: 87480 - protein, 15 aa, Severe acute respiratory syndrome coronavirus 2
TFFPDLNGDVVAIDY

SEQ ID NO: 87481 - protein, 15 aa, Severe acute respiratory syndrome coronavirus 2
FFPDLNGDVVAIDYK

SEQ ID NO: 87482 - protein, 15 aa, Severe acute respiratory syndrome coronavirus 2
FPDLNGDVVAIDYKH

SEQ ID NO: 87483 - protein, 15 aa, Severe acute respiratory syndrome coronavirus 2
PDLNGDVVAIDYKHY

SEQ ID NO: 87484 - protein, 15 aa, Severe acute respiratory syndrome coronavirus 2
DLNGDVVAIDYKHYT

SEQ ID NO: 87485 - protein, 15 aa, Severe acute respiratory syndrome coronavirus 2
LNGDVVAIDYKHYTP

SEQ ID NO: 87486 - protein, 15 aa, Severe acute respiratory syndrome coronavirus 2
NGDVVAIDYKHYTPS

SEQ ID NO: 87487 - protein, 15 aa, Severe acute respiratory syndrome coronavirus 2
NKATYKPNTWCIRCL

SEQ ID NO: 87488 - protein, 15 aa, Severe acute respiratory syndrome coronavirus 2
KATYKPNTWCIRCLW

SEQ ID NO: 87489 - protein, 15 aa, Severe acute respiratory syndrome coronavirus 2
HGLAAVNSVPWDTIA

SEQ ID NO: 87490 - protein, 15 aa, Severe acute respiratory syndrome coronavirus 2
GLAAVNSVPWDTIAN

SEQ ID NO: 87491 - protein, 15 aa, Severe acute respiratory syndrome coronavirus 2
LAAVNSVPWDTIANY

SEQ ID NO: 87492 - protein, 15 aa, Severe acute respiratory syndrome coronavirus 2
NKVVSTTTNIVTRCL

SEQ ID NO: 87493 - protein, 15 aa, Severe acute respiratory syndrome coronavirus 2
KVVSTTTNIVTRCLN

SEQ ID NO: 87494 - protein, 15 aa, Severe acute respiratory syndrome coronavirus 2
VVSTTTNIVTRCLNR

SEQ ID NO: 87495 - protein, 15 aa, Severe acute respiratory syndrome coronavirus 2
VSTTTNIVTRCLNRV

SEQ ID NO: 87496 - protein, 15 aa, Severe acute respiratory syndrome coronavirus 2
STTTNIVTRCLNRVC

SEQ ID NO: 87497 - protein, 15 aa, Severe acute respiratory syndrome coronavirus 2
NYMPYFFTLLLQLCT

SEQ ID NO: 87498 - protein, 15 aa, Severe acute respiratory syndrome coronavirus 2
YMPYFFTLLLQLCTF

SEQ ID NO: 87499 - protein, 15 aa, Severe acute respiratory syndrome coronavirus 2
MPYFFTLLLQLCTFT

SEQ ID NO: 87500 - protein, 15 aa, Severe acute respiratory syndrome coronavirus 2
PYFFTLLLQLCTFTR

SEQ ID NO: 87501 - protein, 15 aa, Severe acute respiratory syndrome coronavirus 2
VKSVGKFCLEASFNY

SEQ ID NO: 87502 - protein, 15 aa, Severe acute respiratory syndrome coronavirus 2
KSVGKFCLEASFNYL

SEQ ID NO: 87503 - protein, 15 aa, Severe acute respiratory syndrome coronavirus 2
SVGKFCLEASFNYLK

SEQ ID NO: 87504 - protein, 15 aa, Severe acute respiratory syndrome coronavirus 2
VGKFCLEASFNYLKS

SEQ ID NO: 87505 - protein, 15 aa, Severe acute respiratory syndrome coronavirus 2
TYCTGSIPCSVCLSG

SEQ ID NO: 87506 - protein, 15 aa, Severe acute respiratory syndrome coronavirus 2
YCTGSIPCSVCLSGL

SEQ ID NO: 87507 - protein, 15 aa, Severe acute respiratory syndrome coronavirus 2
CTGSIPCSVCLSGLD

SEQ ID NO: 87508 - protein, 15 aa, Severe acute respiratory syndrome coronavirus 2
IPCSVCLSGLDSLDT

SEQ ID NO: 87509 - protein, 15 aa, Severe acute respiratory syndrome coronavirus 2
PCSVCLSGLDSLDTY

SEQ ID NO: 87510 - protein, 15 aa, Severe acute respiratory syndrome coronavirus 2
CSVCLSGLDSLDTYP

SEQ ID NO: 87511 - protein, 15 aa, Severe acute respiratory syndrome coronavirus 2
LETIQITISSFKWDL

SEQ ID NO: 87512 - protein, 15 aa, Severe acute respiratory syndrome coronavirus 2
ETIQITISSFKWDLT

SEQ ID NO: 87513 - protein, 15 aa, Severe acute respiratory syndrome coronavirus 2
QITISSFKWDLTAFG

SEQ ID NO: 87514 - protein, 15 aa, Severe acute respiratory syndrome coronavirus 2
ITISSFKWDLTAFGL

SEQ ID NO: 87515 - protein, 15 aa, Severe acute respiratory syndrome coronavirus 2
TISSFKWDLTAFGLV

SEQ ID NO: 87516 - protein, 15 aa, Severe acute respiratory syndrome coronavirus 2
ISSFKWDLTAFGLVA

SEQ ID NO: 87517 - protein, 15 aa, Severe acute respiratory syndrome coronavirus 2
SSFKWDLTAFGLVAE

SEQ ID NO: 87518 - protein, 15 aa, Severe acute respiratory syndrome coronavirus 2
SFKWDLTAFGLVAEW

SEQ ID NO: 87519 - protein, 15 aa, Severe acute respiratory syndrome coronavirus 2
FKWDLTAFGLVAEWF

SEQ ID NO: 87520 - protein, 15 aa, Severe acute respiratory syndrome coronavirus 2
KWDLTAFGLVAEWFL

SEQ ID NO: 87521 - protein, 15 aa, Severe acute respiratory syndrome coronavirus 2
WDLTAFGLVAEWFLA

SEQ ID NO: 87522 - protein, 15 aa, Severe acute respiratory syndrome coronavirus 2
DLTAFGLVAEWFLAY

SEQ ID NO: 87523 - protein, 15 aa, Severe acute respiratory syndrome coronavirus 2
LTAFGLVAEWFLAYI

SEQ ID NO: 87524 - protein, 15 aa, Severe acute respiratory syndrome coronavirus 2
TAFGLVAEWFLAYIL

SEQ ID NO: 87525 - protein, 15 aa, Severe acute respiratory syndrome coronavirus 2
AFGLVAEWFLAYILF

SEQ ID NO: 87526 - protein, 15 aa, Severe acute respiratory syndrome coronavirus 2
FGLVAEWFLAYILFT

SEQ ID NO: 87527 - protein, 15 aa, Severe acute respiratory syndrome coronavirus 2
GLVAEWFLAYILFTR

SEQ ID NO: 87528 - protein, 15 aa, Severe acute respiratory syndrome coronavirus 2
LVAEWFLAYILFTRF

SEQ ID NO: 87529 - protein, 15 aa, Severe acute respiratory syndrome coronavirus 2
VAEWFLAYILFTRFF

SEQ ID NO: 87530 - protein, 15 aa, Severe acute respiratory syndrome coronavirus 2
AEWFLAYILFTRFFY

SEQ ID NO: 87531 - protein, 15 aa, Severe acute respiratory syndrome coronavirus 2
EWFLAYILFTRFFYV

SEQ ID NO: 87532 - protein, 15 aa, Severe acute respiratory syndrome coronavirus 2
WFLAYILFTRFFYVL

SEQ ID NO: 87533 - protein, 15 aa, Severe acute respiratory syndrome coronavirus 2
FLAYILFTRFFYVLG

SEQ ID NO: 87534 - protein, 15 aa, Severe acute respiratory syndrome coronavirus 2
LAYILFTRFFYVLGL

SEQ ID NO: 87535 - protein, 15 aa, Severe acute respiratory syndrome coronavirus 2
AYILFTRFFYVLGLA

SEQ ID NO: 87536 - protein, 15 aa, Severe acute respiratory syndrome coronavirus 2
YILFTRFFYVLGLAA

SEQ ID NO: 87537 - protein, 15 aa, Severe acute respiratory syndrome coronavirus 2
ILFTRFFYVLGLAAI

SEQ ID NO: 87538 - protein, 15 aa, Severe acute respiratory syndrome coronavirus 2
LFTRFFYVLGLAAIM

SEQ ID NO: 87539 - protein, 15 aa, Severe acute respiratory syndrome coronavirus 2
FTRFFYVLGLAAIMQ

SEQ ID NO: 87540 - protein, 15 aa, Severe acute respiratory syndrome coronavirus 2
LGLAAIMQLFFSYFA

SEQ ID NO: 87541 - protein, 15 aa, Severe acute respiratory syndrome coronavirus 2
GLAAIMQLFFSYFAV

SEQ ID NO: 87542 - protein, 15 aa, Severe acute respiratory syndrome coronavirus 2
IMQLFFSYFAVHFIS

SEQ ID NO: 87543 - protein, 15 aa, Severe acute respiratory syndrome coronavirus 2
MQLFFSYFAVHFISN

SEQ ID NO: 87544 - protein, 15 aa, Severe acute respiratory syndrome coronavirus 2
QLFFSYFAVHFISNS

SEQ ID NO: 87545 - protein, 15 aa, Severe acute respiratory syndrome coronavirus 2
LFFSYFAVHFISNSW

SEQ ID NO: 87546 - protein, 15 aa, Severe acute respiratory syndrome coronavirus 2
FFSYFAVHFISNSWL

SEQ ID NO: 87547 - protein, 15 aa, Severe acute respiratory syndrome coronavirus 2
FSYFAVHFISNSWLM

SEQ ID NO: 87548 - protein, 15 aa, Severe acute respiratory syndrome coronavirus 2
SYFAVHFISNSWLMW

SEQ ID NO: 87549 - protein, 15 aa, Severe acute respiratory syndrome coronavirus 2
YFAVHFISNSWLMWL

SEQ ID NO: 87550 - protein, 15 aa, Severe acute respiratory syndrome coronavirus 2
FAVHFISNSWLMWLI

SEQ ID NO: 87551 - protein, 15 aa, Severe acute respiratory syndrome coronavirus 2
AVHFISNSWLMWLII

SEQ ID NO: 87552 - protein, 15 aa, Severe acute respiratory syndrome coronavirus 2
VHFISNSWLMWLIIN

SEQ ID NO: 87553 - protein, 15 aa, Severe acute respiratory syndrome coronavirus 2
HFISNSWLMWLIINL

SEQ ID NO: 87554 - protein, 15 aa, Severe acute respiratory syndrome coronavirus 2
FISNSWLMWLIINLV

SEQ ID NO: 87555 - protein, 15 aa, Severe acute respiratory syndrome coronavirus 2
ISNSWLMWLIINLVQ

SEQ ID NO: 87556 - protein, 15 aa, Severe acute respiratory syndrome coronavirus 2
SNSWLMWLIINLVQM

SEQ ID NO: 87557 - protein, 15 aa, Severe acute respiratory syndrome coronavirus 2
NSWLMWLIINLVQMA

SEQ ID NO: 87558 - protein, 15 aa, Severe acute respiratory syndrome coronavirus 2
ISAMVRMYIFFASFY

SEQ ID NO: 87559 - protein, 15 aa, Severe acute respiratory syndrome coronavirus 2
SAMVRMYIFFASFYY

SEQ ID NO: 87560 - protein, 15 aa, Severe acute respiratory syndrome coronavirus 2
AMVRMYIFFASFYYV

SEQ ID NO: 87561 - protein, 15 aa, Severe acute respiratory syndrome coronavirus 2
MVRMYIFFASFYYVW

SEQ ID NO: 87562 - protein, 15 aa, Severe acute respiratory syndrome coronavirus 2
VRMYIFFASFYYVWK

SEQ ID NO: 87563 - protein, 15 aa, Severe acute respiratory syndrome coronavirus 2
RMYIFFASFYYVWKS

SEQ ID NO: 87564 - protein, 15 aa, Severe acute respiratory syndrome coronavirus 2
MYIFFASFYYVWKSY

SEQ ID NO: 87565 - protein, 15 aa, Severe acute respiratory syndrome coronavirus 2
YIFFASFYYVWKSYV

SEQ ID NO: 87566 - protein, 15 aa, Severe acute respiratory syndrome coronavirus 2
IFFASFYYVWKSYVH

SEQ ID NO: 87567 - protein, 15 aa, Severe acute respiratory syndrome coronavirus 2
FFASFYYVWKSYVHV

SEQ ID NO: 87568 - protein, 15 aa, Severe acute respiratory syndrome coronavirus 2
FASFYYVWKSYVHVV

SEQ ID NO: 87569 - protein, 15 aa, Severe acute respiratory syndrome coronavirus 2
ASFYYVWKSYVHVVD

SEQ ID NO: 87570 - protein, 15 aa, Severe acute respiratory syndrome coronavirus 2
SSTCMMCYKRNRATR

SEQ ID NO: 87571 - protein, 15 aa, Severe acute respiratory syndrome coronavirus 2
STCMMCYKRNRATRV

SEQ ID NO: 87572 - protein, 15 aa, Severe acute respiratory syndrome coronavirus 2
TCMMCYKRNRATRVE

SEQ ID NO: 87573 - protein, 15 aa, Severe acute respiratory syndrome coronavirus 2
CMMCYKRNRATRVEC

SEQ ID NO: 87574 - protein, 15 aa, Severe acute respiratory syndrome coronavirus 2
MMCYKRNRATRVECT

SEQ ID NO: 87575 - protein, 15 aa, Severe acute respiratory syndrome coronavirus 2
MCYKRNRATRVECTT

SEQ ID NO: 87576 - protein, 15 aa, Severe acute respiratory syndrome coronavirus 2
CYKRNRATRVECTTI

SEQ ID NO: 87577 - protein, 15 aa, Severe acute respiratory syndrome coronavirus 2
YKRNRATRVECTTIV

SEQ ID NO: 87578 - protein, 15 aa, Severe acute respiratory syndrome coronavirus 2
KRNRATRVECTTIVN

SEQ ID NO: 87579 - protein, 15 aa, Severe acute respiratory syndrome coronavirus 2
RNRATRVECTTIVNG

SEQ ID NO: 87580 - protein, 15 aa, Severe acute respiratory syndrome coronavirus 2
NRATRVECTTIVNGV

SEQ ID NO: 87581 - protein, 15 aa, Severe acute respiratory syndrome coronavirus 2
SFYVYANGGKGFCKL

SEQ ID NO: 87582 - protein, 15 aa, Severe acute respiratory syndrome coronavirus 2
FYVYANGGKGFCKLH

SEQ ID NO: 87583 - protein, 15 aa, Severe acute respiratory syndrome coronavirus 2
YVYANGGKGFCKLHN

SEQ ID NO: 87584 - protein, 15 aa, Severe acute respiratory syndrome coronavirus 2
ANGGKGFCKLHNWNC

SEQ ID NO: 87585 - protein, 15 aa, Severe acute respiratory syndrome coronavirus 2
NGGKGFCKLHNWNCV

SEQ ID NO: 87586 - protein, 15 aa, Severe acute respiratory syndrome coronavirus 2
GGKGFCKLHNWNCVN

SEQ ID NO: 87587 - protein, 15 aa, Severe acute respiratory syndrome coronavirus 2
GKGFCKLHNWNCVNC

SEQ ID NO: 87588 - protein, 15 aa, Severe acute respiratory syndrome coronavirus 2
KGFCKLHNWNCVNCD

SEQ ID NO: 87589 - protein, 15 aa, Severe acute respiratory syndrome coronavirus 2
GFCKLHNWNCVNCDT

SEQ ID NO: 87590 - protein, 15 aa, Severe acute respiratory syndrome coronavirus 2
CVNCDTFCAGSTFIS

SEQ ID NO: 87591 - protein, 15 aa, Severe acute respiratory syndrome coronavirus 2
VNCDTFCAGSTFISD

SEQ ID NO: 87592 - protein, 15 aa, Severe acute respiratory syndrome coronavirus 2
NCDTFCAGSTFISDE

SEQ ID NO: 87593 - protein, 15 aa, Severe acute respiratory syndrome coronavirus 2
CDTFCAGSTFISDEV

SEQ ID NO: 87594 - protein, 15 aa, Severe acute respiratory syndrome coronavirus 2
DTFCAGSTFISDEVA

SEQ ID NO: 87595 - protein, 15 aa, Severe acute respiratory syndrome coronavirus 2
TFCAGSTFISDEVAR

SEQ ID NO: 87596 - protein, 15 aa, Severe acute respiratory syndrome coronavirus 2
FCAGSTFISDEVARD

SEQ ID NO: 87597 - protein, 15 aa, Severe acute respiratory syndrome coronavirus 2
CAGSTFISDEVARDL

SEQ ID NO: 87598 - protein, 15 aa, Severe acute respiratory syndrome coronavirus 2
AGSTFISDEVARDLS

SEQ ID NO: 87599 - protein, 15 aa, Severe acute respiratory syndrome coronavirus 2
GSTFISDEVARDLSL

SEQ ID NO: 87600 - protein, 15 aa, Severe acute respiratory syndrome coronavirus 2
STFISDEVARDLSLQ

SEQ ID NO: 87601 - protein, 15 aa, Severe acute respiratory syndrome coronavirus 2
TFISDEVARDLSLQF

SEQ ID NO: 87602 - protein, 15 aa, Severe acute respiratory syndrome coronavirus 2
FISDEVARDLSLQFK

SEQ ID NO: 87603 - protein, 15 aa, Severe acute respiratory syndrome coronavirus 2
ISDEVARDLSLQFKR

SEQ ID NO: 87604 - protein, 15 aa, Severe acute respiratory syndrome coronavirus 2
SDEVARDLSLQFKRP

SEQ ID NO: 87605 - protein, 15 aa, Severe acute respiratory syndrome coronavirus 2
DEVARDLSLQFKRPI

SEQ ID NO: 87606 - protein, 15 aa, Severe acute respiratory syndrome coronavirus 2
PTDQSSYIVDSVTVK

SEQ ID NO: 87607 - protein, 15 aa, Severe acute respiratory syndrome coronavirus 2
LPINVIVFDGKSKCE

SEQ ID NO: 87608 - protein, 15 aa, Severe acute respiratory syndrome coronavirus 2
PINVIVFDGKSKCEE

SEQ ID NO: 87609 - protein, 15 aa, Severe acute respiratory syndrome coronavirus 2
INVIVFDGKSKCEES

SEQ ID NO: 87610 - protein, 15 aa, Severe acute respiratory syndrome coronavirus 2
NVIVFDGKSKCEESS

SEQ ID NO: 87611 - protein, 15 aa, Severe acute respiratory syndrome coronavirus 2
VIVFDGKSKCEESSA

SEQ ID NO: 87612 - protein, 15 aa, Severe acute respiratory syndrome coronavirus 2
SASVYYSQLMCQPIL

SEQ ID NO: 87613 - protein, 15 aa, Severe acute respiratory syndrome coronavirus 2
ASVYYSQLMCQPILL

SEQ ID NO: 87614 - protein, 15 aa, Severe acute respiratory syndrome coronavirus 2
SVYYSQLMCQPILLL

SEQ ID NO: 87615 - protein, 15 aa, Severe acute respiratory syndrome coronavirus 2
VYYSQLMCQPILLLD

SEQ ID NO: 87616 - protein, 15 aa, Severe acute respiratory syndrome coronavirus 2
YYSQLMCQPILLLDQ

SEQ ID NO: 87617 - protein, 15 aa, Severe acute respiratory syndrome coronavirus 2
YSQLMCQPILLLDQA

SEQ ID NO: 87618 - protein, 15 aa, Severe acute respiratory syndrome coronavirus 2
SQLMCQPILLLDQAL

SEQ ID NO: 87619 - protein, 15 aa, Severe acute respiratory syndrome coronavirus 2
QLMCQPILLLDQALV

SEQ ID NO: 87620 - protein, 15 aa, Severe acute respiratory syndrome coronavirus 2
LMCQPILLLDQALVS

SEQ ID NO: 87621 - protein, 15 aa, Severe acute respiratory syndrome coronavirus 2
MCQPILLLDQALVSD

SEQ ID NO: 87622 - protein, 15 aa, Severe acute respiratory syndrome coronavirus 2
LDNVLSTFISAARQG

SEQ ID NO: 87623 - protein, 15 aa, Severe acute respiratory syndrome coronavirus 2
DNVLSTFISAARQGF

SEQ ID NO: 87624 - protein, 15 aa, Severe acute respiratory syndrome coronavirus 2
NVLSTFISAARQGFV

SEQ ID NO: 87625 - protein, 15 aa, Severe acute respiratory syndrome coronavirus 2
VLSTFISAARQGFVD

SEQ ID NO: 87626 - protein, 15 aa, Severe acute respiratory syndrome coronavirus 2
LSTFISAARQGFVDS

SEQ ID NO: 87627 - protein, 15 aa, Severe acute respiratory syndrome coronavirus 2
STFISAARQGFVDSD

SEQ ID NO: 87628 - protein, 15 aa, Severe acute respiratory syndrome coronavirus 2
TFISAARQGFVDSDV

SEQ ID NO: 87629 - protein, 15 aa, Severe acute respiratory syndrome coronavirus 2
FISAARQGFVDSDVE

SEQ ID NO: 87630 - protein, 15 aa, Severe acute respiratory syndrome coronavirus 2
VETKDVVECLKLSHQ

SEQ ID NO: 87631 - protein, 15 aa, Severe acute respiratory syndrome coronavirus 2
ETKDVVECLKLSHQS

SEQ ID NO: 87632 - protein, 15 aa, Severe acute respiratory syndrome coronavirus 2
TKDVVECLKLSHQSD

SEQ ID NO: 87633 - protein, 15 aa, Severe acute respiratory syndrome coronavirus 2
KDVVECLKLSHQSDI

SEQ ID NO: 87634 - protein, 15 aa, Severe acute respiratory syndrome coronavirus 2
DVVECLKLSHQSDIE

SEQ ID NO: 87635 - protein, 15 aa, Severe acute respiratory syndrome coronavirus 2
VVECLKLSHQSDIEV

SEQ ID NO: 87636 - protein, 15 aa, Severe acute respiratory syndrome coronavirus 2
VECLKLSHQSDIEVT

SEQ ID NO: 87637 - protein, 15 aa, Severe acute respiratory syndrome coronavirus 2
ECLKLSHQSDIEVTG

SEQ ID NO: 87638 - protein, 15 aa, Severe acute respiratory syndrome coronavirus 2
TGDSCNNYMLTYNKV

SEQ ID NO: 87639 - protein, 15 aa, Severe acute respiratory syndrome coronavirus 2
GDSCNNYMLTYNKVE

SEQ ID NO: 87640 - protein, 15 aa, Severe acute respiratory syndrome coronavirus 2
PRDLGACIDCSARHI

SEQ ID NO: 87641 - protein, 15 aa, Severe acute respiratory syndrome coronavirus 2
DLGACIDCSARHINA

SEQ ID NO: 87642 - protein, 15 aa, Severe acute respiratory syndrome coronavirus 2
SLSEQLRKQIRSAAK

SEQ ID NO: 87643 - protein, 15 aa, Severe acute respiratory syndrome coronavirus 2
LSEQLRKQIRSAAKK

SEQ ID NO: 87644 - protein, 15 aa, Severe acute respiratory syndrome coronavirus 2
SEQLRKQIRSAAKKN

SEQ ID NO: 87645 - protein, 15 aa, Severe acute respiratory syndrome coronavirus 2
EQLRKQIRSAAKKNN

SEQ ID NO: 87646 - protein, 15 aa, Severe acute respiratory syndrome coronavirus 2
QLRKQIRSAAKKNNL

SEQ ID NO: 87647 - protein, 15 aa, Severe acute respiratory syndrome coronavirus 2
LRKQIRSAAKKNNLP

SEQ ID NO: 87648 - protein, 15 aa, Severe acute respiratory syndrome coronavirus 2
RKQIRSAAKKNNLPF

SEQ ID NO: 87649 - protein, 15 aa, Severe acute respiratory syndrome coronavirus 2
KQIRSAAKKNNLPFK

SEQ ID NO: 87650 - protein, 15 aa, Severe acute respiratory syndrome coronavirus 2
QIRSAAKKNNLPFKL

SEQ ID NO: 87651 - protein, 15 aa, Severe acute respiratory syndrome coronavirus 2
IRSAAKKNNLPFKLT

SEQ ID NO: 87652 - protein, 15 aa, Severe acute respiratory syndrome coronavirus 2
RSAAKKNNLPFKLTC

SEQ ID NO: 87653 - protein, 15 aa, Severe acute respiratory syndrome coronavirus 2
SAAKKNNLPFKLTCA

SEQ ID NO: 87654 - protein, 15 aa, Severe acute respiratory syndrome coronavirus 2
AAKKNNLPFKLTCAT

SEQ ID NO: 87655 - protein, 15 aa, Severe acute respiratory syndrome coronavirus 2
AKKNNLPFKLTCATT

SEQ ID NO: 87656 - protein, 15 aa, Severe acute respiratory syndrome coronavirus 2
KKNNLPFKLTCATTR

SEQ ID NO: 87657 - protein, 15 aa, Severe acute respiratory syndrome coronavirus 2
KNNLPFKLTCATTRQ

SEQ ID NO: 87658 - protein, 15 aa, Severe acute respiratory syndrome coronavirus 2
NNLPFKLTCATTRQV

SEQ ID NO: 87659 - protein, 15 aa, Severe acute respiratory syndrome coronavirus 2
NLPFKLTCATTRQVV

SEQ ID NO: 87660 - protein, 15 aa, Severe acute respiratory syndrome coronavirus 2
LPFKLTCATTRQVVN

SEQ ID NO: 87661 - protein, 15 aa, Severe acute respiratory syndrome coronavirus 2
PFKLTCATTRQVVNV

SEQ ID NO: 87662 - protein, 15 aa, Severe acute respiratory syndrome coronavirus 2
FKLTCATTRQVVNVV

SEQ ID NO: 87663 - protein, 15 aa, Severe acute respiratory syndrome coronavirus 2
KLTCATTRQVVNVVT

SEQ ID NO: 87664 - protein, 15 aa, Severe acute respiratory syndrome coronavirus 2
LTCATTRQVVNVVTT

SEQ ID NO: 87665 - protein, 15 aa, Severe acute respiratory syndrome coronavirus 2
TCATTRQVVNVVTTK

SEQ ID NO: 87666 - protein, 15 aa, Severe acute respiratory syndrome coronavirus 2
CATTRQVVNVVTTKI

SEQ ID NO: 87667 - protein, 15 aa, Severe acute respiratory syndrome coronavirus 2
ATTRQVVNVVTTKIA

SEQ ID NO: 87668 - protein, 15 aa, Severe acute respiratory syndrome coronavirus 2
TTRQVVNVVTTKIAL

SEQ ID NO: 87669 - protein, 15 aa, Severe acute respiratory syndrome coronavirus 2
TRQVVNVVTTKIALK

SEQ ID NO: 87670 - protein, 15 aa, Severe acute respiratory syndrome coronavirus 2
RQVVNVVTTKIALKG

SEQ ID NO: 87671 - protein, 15 aa, Severe acute respiratory syndrome coronavirus 2
QVVNVVTTKIALKGG

SEQ ID NO: 87672 - protein, 15 aa, Severe acute respiratory syndrome coronavirus 2
KIVNNWLKQLIKVTL

SEQ ID NO: 87673 - protein, 15 aa, Severe acute respiratory syndrome coronavirus 2
IVNNWLKQLIKVTLV

SEQ ID NO: 87674 - protein, 15 aa, Severe acute respiratory syndrome coronavirus 2
VNNWLKQLIKVTLVF

SEQ ID NO: 87675 - protein, 15 aa, Severe acute respiratory syndrome coronavirus 2
NNWLKQLIKVTLVFL

SEQ ID NO: 87676 - protein, 15 aa, Severe acute respiratory syndrome coronavirus 2
NWLKQLIKVTLVFLF

SEQ ID NO: 87677 - protein, 15 aa, Severe acute respiratory syndrome coronavirus 2
WLKQLIKVTLVFLFV

SEQ ID NO: 87678 - protein, 15 aa, Severe acute respiratory syndrome coronavirus 2
FLFVAAIFYLITPVH

SEQ ID NO: 87679 - protein, 15 aa, Severe acute respiratory syndrome coronavirus 2
LFVAAIFYLITPVHV

SEQ ID NO: 87680 - protein, 15 aa, Severe acute respiratory syndrome coronavirus 2
IGYKAIDGGVTRDIA

SEQ ID NO: 87681 - protein, 15 aa, Severe acute respiratory syndrome coronavirus 2
FDTWFSQRGGSYTND

SEQ ID NO: 87682 - protein, 15 aa, Severe acute respiratory syndrome coronavirus 2
DTWFSQRGGSYTNDK

SEQ ID NO: 87683 - protein, 15 aa, Severe acute respiratory syndrome coronavirus 2
TWFSQRGGSYTNDKA

SEQ ID NO: 87684 - protein, 15 aa, Severe acute respiratory syndrome coronavirus 2
QRGGSYTNDKACPLI

SEQ ID NO: 87685 - protein, 15 aa, Severe acute respiratory syndrome coronavirus 2
RGGSYTNDKACPLIA

SEQ ID NO: 87686 - protein, 15 aa, Severe acute respiratory syndrome coronavirus 2
GGSYTNDKACPLIAA

SEQ ID NO: 87687 - protein, 15 aa, Severe acute respiratory syndrome coronavirus 2
GSYTNDKACPLIAAV

SEQ ID NO: 87688 - protein, 15 aa, Severe acute respiratory syndrome coronavirus 2
SYTNDKACPLIAAVI

SEQ ID NO: 87689 - protein, 15 aa, Severe acute respiratory syndrome coronavirus 2
YTNDKACPLIAAVIT

SEQ ID NO: 87690 - protein, 15 aa, Severe acute respiratory syndrome coronavirus 2
TNDKACPLIAAVITR

SEQ ID NO: 87691 - protein, 15 aa, Severe acute respiratory syndrome coronavirus 2
NDKACPLIAAVITRE

SEQ ID NO: 87692 - protein, 15 aa, Severe acute respiratory syndrome coronavirus 2
DKACPLIAAVITREV

SEQ ID NO: 87693 - protein, 15 aa, Severe acute respiratory syndrome coronavirus 2
TTNGDFLHFLPRVFS

SEQ ID NO: 87694 - protein, 15 aa, Severe acute respiratory syndrome coronavirus 2
TNGDFLHFLPRVFSA

SEQ ID NO: 87695 - protein, 15 aa, Severe acute respiratory syndrome coronavirus 2
NGDFLHFLPRVFSAV

SEQ ID NO: 87696 - protein, 15 aa, Severe acute respiratory syndrome coronavirus 2
GDFLHFLPRVFSAVG

SEQ ID NO: 87697 - protein, 15 aa, Severe acute respiratory syndrome coronavirus 2
DFLHFLPRVFSAVGN

SEQ ID NO: 87698 - protein, 15 aa, Severe acute respiratory syndrome coronavirus 2
FLHFLPRVFSAVGNI

SEQ ID NO: 87699 - protein, 15 aa, Severe acute respiratory syndrome coronavirus 2
LHFLPRVFSAVGNIC

SEQ ID NO: 87700 - protein, 15 aa, Severe acute respiratory syndrome coronavirus 2
HFLPRVFSAVGNICY

SEQ ID NO: 87701 - protein, 15 aa, Severe acute respiratory syndrome coronavirus 2
FLPRVFSAVGNICYT

SEQ ID NO: 87702 - protein, 15 aa, Severe acute respiratory syndrome coronavirus 2
LPRVFSAVGNICYTP

SEQ ID NO: 87703 - protein, 15 aa, Severe acute respiratory syndrome coronavirus 2
ATSACVLAAECTIFK

SEQ ID NO: 87704 - protein, 15 aa, Severe acute respiratory syndrome coronavirus 2
TSACVLAAECTIFKD

SEQ ID NO: 87705 - protein, 15 aa, Severe acute respiratory syndrome coronavirus 2
SACVLAAECTIFKDA

SEQ ID NO: 87706 - protein, 15 aa, Severe acute respiratory syndrome coronavirus 2
ACVLAAECTIFKDAS

SEQ ID NO: 87707 - protein, 15 aa, Severe acute respiratory syndrome coronavirus 2
CVLAAECTIFKDASG

SEQ ID NO: 87708 - protein, 15 aa, Severe acute respiratory syndrome coronavirus 2
VLAAECTIFKDASGK

SEQ ID NO: 87709 - protein, 15 aa, Severe acute respiratory syndrome coronavirus 2
AAECTIFKDASGKPV

SEQ ID NO: 87710 - protein, 15 aa, Severe acute respiratory syndrome coronavirus 2
AECTIFKDASGKPVP

SEQ ID NO: 87711 - protein, 15 aa, Severe acute respiratory syndrome coronavirus 2
ECTIFKDASGKPVPY

SEQ ID NO: 87712 - protein, 15 aa, Severe acute respiratory syndrome coronavirus 2
CTIFKDASGKPVPYC

SEQ ID NO: 87713 - protein, 15 aa, Severe acute respiratory syndrome coronavirus 2
TIFKDASGKPVPYCY

SEQ ID NO: 87714 - protein, 15 aa, Severe acute respiratory syndrome coronavirus 2
IFKDASGKPVPYCYD

SEQ ID NO: 87715 - protein, 15 aa, Severe acute respiratory syndrome coronavirus 2
FKDASGKPVPYCYDT

SEQ ID NO: 87716 - protein, 15 aa, Severe acute respiratory syndrome coronavirus 2
SGKPVPYCYDTNVLE

SEQ ID NO: 87717 - protein, 15 aa, Severe acute respiratory syndrome coronavirus 2
GKPVPYCYDTNVLEG

SEQ ID NO: 87718 - protein, 15 aa, Severe acute respiratory syndrome coronavirus 2
KPVPYCYDTNVLEGS

SEQ ID NO: 87719 - protein, 15 aa, Severe acute respiratory syndrome coronavirus 2
PVPYCYDTNVLEGSV

SEQ ID NO: 87720 - protein, 15 aa, Severe acute respiratory syndrome coronavirus 2
VPYCYDTNVLEGSVA

SEQ ID NO: 87721 - protein, 15 aa, Severe acute respiratory syndrome coronavirus 2
PYCYDTNVLEGSVAY

SEQ ID NO: 87722 - protein, 15 aa, Severe acute respiratory syndrome coronavirus 2
YCYDTNVLEGSVAYE

SEQ ID NO: 87723 - protein, 15 aa, Severe acute respiratory syndrome coronavirus 2
CYDTNVLEGSVAYES

SEQ ID NO: 87724 - protein, 15 aa, Severe acute respiratory syndrome coronavirus 2
YDTNVLEGSVAYESL

SEQ ID NO: 87725 - protein, 15 aa, Severe acute respiratory syndrome coronavirus 2
DTNVLEGSVAYESLR

SEQ ID NO: 87726 - protein, 15 aa, Severe acute respiratory syndrome coronavirus 2
TNVLEGSVAYESLRP

SEQ ID NO: 87727 - protein, 15 aa, Severe acute respiratory syndrome coronavirus 2
NVLEGSVAYESLRPD

SEQ ID NO: 87728 - protein, 15 aa, Severe acute respiratory syndrome coronavirus 2
VLEGSVAYESLRPDT

SEQ ID NO: 87729 - protein, 15 aa, Severe acute respiratory syndrome coronavirus 2
LEGSVAYESLRPDTR

SEQ ID NO: 87730 - protein, 15 aa, Severe acute respiratory syndrome coronavirus 2
EGSVAYESLRPDTRY

SEQ ID NO: 87731 - protein, 15 aa, Severe acute respiratory syndrome coronavirus 2
GSVAYESLRPDTRYV

SEQ ID NO: 87732 - protein, 15 aa, Severe acute respiratory syndrome coronavirus 2
SVAYESLRPDTRYVL

SEQ ID NO: 87733 - protein, 15 aa, Severe acute respiratory syndrome coronavirus 2
VAYESLRPDTRYVLM

SEQ ID NO: 87734 - protein, 15 aa, Severe acute respiratory syndrome coronavirus 2
AYESLRPDTRYVLMD

SEQ ID NO: 87735 - protein, 15 aa, Severe acute respiratory syndrome coronavirus 2
YESLRPDTRYVLMDG

SEQ ID NO: 87736 - protein, 15 aa, Severe acute respiratory syndrome coronavirus 2
ESLRPDTRYVLMDGS

SEQ ID NO: 87737 - protein, 15 aa, Severe acute respiratory syndrome coronavirus 2
SLRPDTRYVLMDGSI

SEQ ID NO: 87738 - protein, 15 aa, Severe acute respiratory syndrome coronavirus 2
LRPDTRYVLMDGSII

SEQ ID NO: 87739 - protein, 15 aa, Severe acute respiratory syndrome coronavirus 2
RPDTRYVLMDGSIIQ

SEQ ID NO: 87740 - protein, 15 aa, Severe acute respiratory syndrome coronavirus 2
PDTRYVLMDGSIIQF

SEQ ID NO: 87741 - protein, 15 aa, Severe acute respiratory syndrome coronavirus 2
FDSEYCRHGTCERSE

SEQ ID NO: 87742 - protein, 15 aa, Severe acute respiratory syndrome coronavirus 2
GVCVSTSGRWVLNND

SEQ ID NO: 87743 - protein, 15 aa, Severe acute respiratory syndrome coronavirus 2
VCVSTSGRWVLNNDY

SEQ ID NO: 87744 - protein, 15 aa, Severe acute respiratory syndrome coronavirus 2
VSTSGRWVLNNDYYR

SEQ ID NO: 87745 - protein, 15 aa, Severe acute respiratory syndrome coronavirus 2
STSGRWVLNNDYYRS

SEQ ID NO: 87746 - protein, 15 aa, Severe acute respiratory syndrome coronavirus 2
TSGRWVLNNDYYRSL

SEQ ID NO: 87747 - protein, 15 aa, Severe acute respiratory syndrome coronavirus 2
SGRWVLNNDYYRSLP

SEQ ID NO: 87748 - protein, 15 aa, Severe acute respiratory syndrome coronavirus 2
GRWVLNNDYYRSLPG

SEQ ID NO: 87749 - protein, 15 aa, Severe acute respiratory syndrome coronavirus 2
RWVLNNDYYRSLPGV

SEQ ID NO: 87750 - protein, 15 aa, Severe acute respiratory syndrome coronavirus 2
WVLNNDYYRSLPGVF

SEQ ID NO: 87751 - protein, 15 aa, Severe acute respiratory syndrome coronavirus 2
VLNNDYYRSLPGVFC

SEQ ID NO: 87752 - protein, 15 aa, Severe acute respiratory syndrome coronavirus 2
LNNDYYRSLPGVFCG

SEQ ID NO: 87753 - protein, 15 aa, Severe acute respiratory syndrome coronavirus 2
NNDYYRSLPGVFCGV

SEQ ID NO: 87754 - protein, 15 aa, Severe acute respiratory syndrome coronavirus 2
NDYYRSLPGVFCGVD

SEQ ID NO: 87755 - protein, 15 aa, Severe acute respiratory syndrome coronavirus 2
PLIQPIGALDISASI

SEQ ID NO: 87756 - protein, 15 aa, Severe acute respiratory syndrome coronavirus 2
LIQPIGALDISASIV

SEQ ID NO: 87757 - protein, 15 aa, Severe acute respiratory syndrome coronavirus 2
IQPIGALDISASIVA

SEQ ID NO: 87758 - protein, 15 aa, Severe acute respiratory syndrome coronavirus 2
QPIGALDISASIVAG

SEQ ID NO: 87759 - protein, 15 aa, Severe acute respiratory syndrome coronavirus 2
PIGALDISASIVAGG

SEQ ID NO: 87760 - protein, 15 aa, Severe acute respiratory syndrome coronavirus 2
IGALDISASIVAGGI

SEQ ID NO: 87761 - protein, 15 aa, Severe acute respiratory syndrome coronavirus 2
VLCLTPVYSFLPGVY

SEQ ID NO: 87762 - protein, 15 aa, Severe acute respiratory syndrome coronavirus 2
LCLTPVYSFLPGVYS

SEQ ID NO: 87763 - protein, 15 aa, Severe acute respiratory syndrome coronavirus 2
CLTPVYSFLPGVYSV

SEQ ID NO: 87764 - protein, 15 aa, Severe acute respiratory syndrome coronavirus 2
FLPGVYSVIYLYLTF

SEQ ID NO: 87765 - protein, 15 aa, Severe acute respiratory syndrome coronavirus 2
LPGVYSVIYLYLTFY

SEQ ID NO: 87766 - protein, 15 aa, Severe acute respiratory syndrome coronavirus 2
PGVYSVIYLYLTFYL

SEQ ID NO: 87767 - protein, 15 aa, Severe acute respiratory syndrome coronavirus 2
GVYSVIYLYLTFYLT

SEQ ID NO: 87768 - protein, 15 aa, Severe acute respiratory syndrome coronavirus 2
VYSVIYLYLTFYLTN

SEQ ID NO: 87769 - protein, 15 aa, Severe acute respiratory syndrome coronavirus 2
YSVIYLYLTFYLTND

SEQ ID NO: 87770 - protein, 15 aa, Severe acute respiratory syndrome coronavirus 2
SVIYLYLTFYLTNDV

SEQ ID NO: 87771 - protein, 15 aa, Severe acute respiratory syndrome coronavirus 2
VIYLYLTFYLTNDVS

SEQ ID NO: 87772 - protein, 15 aa, Severe acute respiratory syndrome coronavirus 2
IYLYLTFYLTNDVSF

SEQ ID NO: 87773 - protein, 15 aa, Severe acute respiratory syndrome coronavirus 2
YLYLTFYLTNDVSFL

SEQ ID NO: 87774 - protein, 15 aa, Severe acute respiratory syndrome coronavirus 2
LYLTFYLTNDVSFLA

SEQ ID NO: 87775 - protein, 15 aa, Severe acute respiratory syndrome coronavirus 2
YLTFYLTNDVSFLAH

SEQ ID NO: 87776 - protein, 15 aa, Severe acute respiratory syndrome coronavirus 2
LTFYLTNDVSFLAHI

SEQ ID NO: 87777 - protein, 15 aa, Severe acute respiratory syndrome coronavirus 2
TFYLTNDVSFLAHIQ

SEQ ID NO: 87778 - protein, 15 aa, Severe acute respiratory syndrome coronavirus 2
FYLTNDVSFLAHIQW

SEQ ID NO: 87779 - protein, 15 aa, Severe acute respiratory syndrome coronavirus 2
YLTNDVSFLAHIQWM

SEQ ID NO: 87780 - protein, 15 aa, Severe acute respiratory syndrome coronavirus 2
LTNDVSFLAHIQWMV

SEQ ID NO: 87781 - protein, 15 aa, Severe acute respiratory syndrome coronavirus 2
TNDVSFLAHIQWMVM

SEQ ID NO: 87782 - protein, 15 aa, Severe acute respiratory syndrome coronavirus 2
HIQWMVMFTPLVPFW

SEQ ID NO: 87783 - protein, 15 aa, Severe acute respiratory syndrome coronavirus 2
IQWMVMFTPLVPFWI

SEQ ID NO: 87784 - protein, 15 aa, Severe acute respiratory syndrome coronavirus 2
QWMVMFTPLVPFWIT

SEQ ID NO: 87785 - protein, 15 aa, Severe acute respiratory syndrome coronavirus 2
WMVMFTPLVPFWITI

SEQ ID NO: 87786 - protein, 15 aa, Severe acute respiratory syndrome coronavirus 2
TPLVPFWITIAYIIC

SEQ ID NO: 87787 - protein, 15 aa, Severe acute respiratory syndrome coronavirus 2
PLVPFWITIAYIICI

SEQ ID NO: 87788 - protein, 15 aa, Severe acute respiratory syndrome coronavirus 2
YIICISTKHFYWFFS

SEQ ID NO: 87789 - protein, 15 aa, Severe acute respiratory syndrome coronavirus 2
IICISTKHFYWFFSN

SEQ ID NO: 87790 - protein, 15 aa, Severe acute respiratory syndrome coronavirus 2
ICISTKHFYWFFSNY

SEQ ID NO: 87791 - protein, 15 aa, Severe acute respiratory syndrome coronavirus 2
CISTKHFYWFFSNYL

SEQ ID NO: 87792 - protein, 15 aa, Severe acute respiratory syndrome coronavirus 2
ISTKHFYWFFSNYLK

SEQ ID NO: 87793 - protein, 15 aa, Severe acute respiratory syndrome coronavirus 2
STKHFYWFFSNYLKR

SEQ ID NO: 87794 - protein, 15 aa, Severe acute respiratory syndrome coronavirus 2
TKHFYWFFSNYLKRR

SEQ ID NO: 87795 - protein, 15 aa, Severe acute respiratory syndrome coronavirus 2
KHFYWFFSNYLKRRV

SEQ ID NO: 87796 - protein, 15 aa, Severe acute respiratory syndrome coronavirus 2
HFYWFFSNYLKRRVV

SEQ ID NO: 87797 - protein, 15 aa, Severe acute respiratory syndrome coronavirus 2
FYWFFSNYLKRRVVF

SEQ ID NO: 87798 - protein, 15 aa, Severe acute respiratory syndrome coronavirus 2
YWFFSNYLKRRVVFN

SEQ ID NO: 87799 - protein, 15 aa, Severe acute respiratory syndrome coronavirus 2
WFFSNYLKRRVVFNG

SEQ ID NO: 87800 - protein, 15 aa, Severe acute respiratory syndrome coronavirus 2
FFSNYLKRRVVFNGV

SEQ ID NO: 87801 - protein, 15 aa, Severe acute respiratory syndrome coronavirus 2
FSNYLKRRVVFNGVS

SEQ ID NO: 87802 - protein, 15 aa, Severe acute respiratory syndrome coronavirus 2
SNYLKRRVVFNGVSF

SEQ ID NO: 87803 - protein, 15 aa, Severe acute respiratory syndrome coronavirus 2
NYLKRRVVFNGVSFS

SEQ ID NO: 87804 - protein, 15 aa, Severe acute respiratory syndrome coronavirus 2
YLKRRVVFNGVSFST

SEQ ID NO: 87805 - protein, 15 aa, Severe acute respiratory syndrome coronavirus 2
LKRRVVFNGVSFSTF

SEQ ID NO: 87806 - protein, 15 aa, Severe acute respiratory syndrome coronavirus 2
KRRVVFNGVSFSTFE

SEQ ID NO: 87807 - protein, 15 aa, Severe acute respiratory syndrome coronavirus 2
RRVVFNGVSFSTFEE

SEQ ID NO: 87808 - protein, 15 aa, Severe acute respiratory syndrome coronavirus 2
RVVFNGVSFSTFEEA

SEQ ID NO: 87809 - protein, 15 aa, Severe acute respiratory syndrome coronavirus 2
VVFNGVSFSTFEEAA

SEQ ID NO: 87810 - protein, 15 aa, Severe acute respiratory syndrome coronavirus 2
VFNGVSFSTFEEAAL

SEQ ID NO: 87811 - protein, 15 aa, Severe acute respiratory syndrome coronavirus 2
FNGVSFSTFEEAALC

SEQ ID NO: 87812 - protein, 15 aa, Severe acute respiratory syndrome coronavirus 2
NGVSFSTFEEAALCT

SEQ ID NO: 87813 - protein, 15 aa, Severe acute respiratory syndrome coronavirus 2
GVSFSTFEEAALCTF

SEQ ID NO: 87814 - protein, 15 aa, Severe acute respiratory syndrome coronavirus 2
VSFSTFEEAALCTFL

SEQ ID NO: 87815 - protein, 15 aa, Severe acute respiratory syndrome coronavirus 2
SFSTFEEAALCTFLL

SEQ ID NO: 87816 - protein, 15 aa, Severe acute respiratory syndrome coronavirus 2
FSTFEEAALCTFLLN

SEQ ID NO: 87817 - protein, 15 aa, Severe acute respiratory syndrome coronavirus 2
STFEEAALCTFLLNK

SEQ ID NO: 87818 - protein, 15 aa, Severe acute respiratory syndrome coronavirus 2
TFEEAALCTFLLNKE

SEQ ID NO: 87819 - protein, 15 aa, Severe acute respiratory syndrome coronavirus 2
FEEAALCTFLLNKEM

SEQ ID NO: 87820 - protein, 15 aa, Severe acute respiratory syndrome coronavirus 2
EEAALCTFLLNKEMY

SEQ ID NO: 87821 - protein, 15 aa, Severe acute respiratory syndrome coronavirus 2
EAALCTFLLNKEMYL

SEQ ID NO: 87822 - protein, 15 aa, Severe acute respiratory syndrome coronavirus 2
AALCTFLLNKEMYLK

SEQ ID NO: 87823 - protein, 15 aa, Severe acute respiratory syndrome coronavirus 2
ALCTFLLNKEMYLKL

SEQ ID NO: 87824 - protein, 15 aa, Severe acute respiratory syndrome coronavirus 2
LCTFLLNKEMYLKLR

SEQ ID NO: 87825 - protein, 15 aa, Severe acute respiratory syndrome coronavirus 2
CTFLLNKEMYLKLRS

SEQ ID NO: 87826 - protein, 15 aa, Severe acute respiratory syndrome coronavirus 2
TFLLNKEMYLKLRSD

SEQ ID NO: 87827 - protein, 15 aa, Severe acute respiratory syndrome coronavirus 2
FLLNKEMYLKLRSDV

SEQ ID NO: 87828 - protein, 15 aa, Severe acute respiratory syndrome coronavirus 2
LLNKEMYLKLRSDVL

SEQ ID NO: 87829 - protein, 15 aa, Severe acute respiratory syndrome coronavirus 2
LNKEMYLKLRSDVLL

SEQ ID NO: 87830 - protein, 15 aa, Severe acute respiratory syndrome coronavirus 2
NKEMYLKLRSDVLLP

SEQ ID NO: 87831 - protein, 15 aa, Severe acute respiratory syndrome coronavirus 2
LAKALNDFSNSGSDV

SEQ ID NO: 87832 - protein, 15 aa, Severe acute respiratory syndrome coronavirus 2
AKALNDFSNSGSDVL

SEQ ID NO: 87833 - protein, 15 aa, Severe acute respiratory syndrome coronavirus 2
KALNDFSNSGSDVLY

SEQ ID NO: 87834 - protein, 15 aa, Severe acute respiratory syndrome coronavirus 2
ALNDFSNSGSDVLYQ

SEQ ID NO: 87835 - protein, 15 aa, Severe acute respiratory syndrome coronavirus 2
LNDFSNSGSDVLYQP

SEQ ID NO: 87836 - protein, 15 aa, Severe acute respiratory syndrome coronavirus 2
NDFSNSGSDVLYQPP

SEQ ID NO: 87837 - protein, 15 aa, Severe acute respiratory syndrome coronavirus 2
DFSNSGSDVLYQPPQ

SEQ ID NO: 87838 - protein, 15 aa, Severe acute respiratory syndrome coronavirus 2
GSDVLYQPPQTSITS

SEQ ID NO: 87839 - protein, 15 aa, Severe acute respiratory syndrome coronavirus 2
SDVLYQPPQTSITSA

SEQ ID NO: 87840 - protein, 15 aa, Severe acute respiratory syndrome coronavirus 2
DVLYQPPQTSITSAV

SEQ ID NO: 87841 - protein, 15 aa, Severe acute respiratory syndrome coronavirus 2
VLYQPPQTSITSAVL

SEQ ID NO: 87842 - protein, 15 aa, Severe acute respiratory syndrome coronavirus 2
LYQPPQTSITSAVLQ

SEQ ID NO: 87843 - protein, 15 aa, Severe acute respiratory syndrome coronavirus 2
CMVQVTCGTTTLNGL

SEQ ID NO: 87844 - protein, 15 aa, Severe acute respiratory syndrome coronavirus 2
MVQVTCGTTTLNGLW

SEQ ID NO: 87845 - protein, 15 aa, Severe acute respiratory syndrome coronavirus 2
VQVTCGTTTLNGLWL

SEQ ID NO: 87846 - protein, 15 aa, Severe acute respiratory syndrome coronavirus 2
QVTCGTTTLNGLWLD

SEQ ID NO: 87847 - protein, 15 aa, Severe acute respiratory syndrome coronavirus 2
TCGTTTLNGLWLDDV

SEQ ID NO: 87848 - protein, 15 aa, Severe acute respiratory syndrome coronavirus 2
CGTTTLNGLWLDDVV

SEQ ID NO: 87849 - protein, 15 aa, Severe acute respiratory syndrome coronavirus 2
GTTTLNGLWLDDVVY

SEQ ID NO: 87850 - protein, 15 aa, Severe acute respiratory syndrome coronavirus 2
TTTLNGLWLDDVVYC

SEQ ID NO: 87851 - protein, 15 aa, Severe acute respiratory syndrome coronavirus 2
TTLNGLWLDDVVYCP

SEQ ID NO: 87852 - protein, 15 aa, Severe acute respiratory syndrome coronavirus 2
TLNGLWLDDVVYCPR

SEQ ID NO: 87853 - protein, 15 aa, Severe acute respiratory syndrome coronavirus 2
LNGLWLDDVVYCPRH

SEQ ID NO: 87854 - protein, 15 aa, Severe acute respiratory syndrome coronavirus 2
NGLWLDDVVYCPRHV

SEQ ID NO: 87855 - protein, 15 aa, Severe acute respiratory syndrome coronavirus 2
GLWLDDVVYCPRHVI

SEQ ID NO: 87856 - protein, 15 aa, Severe acute respiratory syndrome coronavirus 2
LWLDDVVYCPRHVIC

SEQ ID NO: 87857 - protein, 15 aa, Severe acute respiratory syndrome coronavirus 2
SFCYMHHMELPTGVH

SEQ ID NO: 87858 - protein, 15 aa, Severe acute respiratory syndrome coronavirus 2
FCYMHHMELPTGVHA

SEQ ID NO: 87859 - protein, 15 aa, Severe acute respiratory syndrome coronavirus 2
CYMHHMELPTGVHAG

SEQ ID NO: 87860 - protein, 15 aa, Severe acute respiratory syndrome coronavirus 2
YMHHMELPTGVHAGT

SEQ ID NO: 87861 - protein, 15 aa, Severe acute respiratory syndrome coronavirus 2
MHHMELPTGVHAGTD

SEQ ID NO: 87862 - protein, 15 aa, Severe acute respiratory syndrome coronavirus 2
HHMELPTGVHAGTDL

SEQ ID NO: 87863 - protein, 15 aa, Severe acute respiratory syndrome coronavirus 2
MELPTGVHAGTDLEG

SEQ ID NO: 87864 - protein, 15 aa, Severe acute respiratory syndrome coronavirus 2
ELPTGVHAGTDLEGN

SEQ ID NO: 87865 - protein, 15 aa, Severe acute respiratory syndrome coronavirus 2
LPTGVHAGTDLEGNF

SEQ ID NO: 87866 - protein, 15 aa, Severe acute respiratory syndrome coronavirus 2
PTGVHAGTDLEGNFY

SEQ ID NO: 87867 - protein, 15 aa, Severe acute respiratory syndrome coronavirus 2
TGVHAGTDLEGNFYG

SEQ ID NO: 87868 - protein, 15 aa, Severe acute respiratory syndrome coronavirus 2
AGTDTTITVNVLAWL

SEQ ID NO: 87869 - protein, 15 aa, Severe acute respiratory syndrome coronavirus 2
GTDTTITVNVLAWLY

SEQ ID NO: 87870 - protein, 15 aa, Severe acute respiratory syndrome coronavirus 2
TDTTITVNVLAWLYA

SEQ ID NO: 87871 - protein, 15 aa, Severe acute respiratory syndrome coronavirus 2
DTTITVNVLAWLYAA

SEQ ID NO: 87872 - protein, 15 aa, Severe acute respiratory syndrome coronavirus 2
TTITVNVLAWLYAAV

SEQ ID NO: 87873 - protein, 15 aa, Severe acute respiratory syndrome coronavirus 2
TITVNVLAWLYAAVI

SEQ ID NO: 87874 - protein, 15 aa, Severe acute respiratory syndrome coronavirus 2
ITVNVLAWLYAAVIN

SEQ ID NO: 87875 - protein, 15 aa, Severe acute respiratory syndrome coronavirus 2
TVNVLAWLYAAVING

SEQ ID NO: 87876 - protein, 15 aa, Severe acute respiratory syndrome coronavirus 2
VNVLAWLYAAVINGD

SEQ ID NO: 87877 - protein, 15 aa, Severe acute respiratory syndrome coronavirus 2
NVLAWLYAAVINGDR

SEQ ID NO: 87878 - protein, 15 aa, Severe acute respiratory syndrome coronavirus 2
VLAWLYAAVINGDRW

SEQ ID NO: 87879 - protein, 15 aa, Severe acute respiratory syndrome coronavirus 2
LAWLYAAVINGDRWF

SEQ ID NO: 87880 - protein, 15 aa, Severe acute respiratory syndrome coronavirus 2
NRFTTTLNDFNLVAM

SEQ ID NO: 87881 - protein, 15 aa, Severe acute respiratory syndrome coronavirus 2
RFTTTLNDFNLVAMK

SEQ ID NO: 87882 - protein, 15 aa, Severe acute respiratory syndrome coronavirus 2
TLNDFNLVAMKYNYE

SEQ ID NO: 87883 - protein, 15 aa, Severe acute respiratory syndrome coronavirus 2
NLVAMKYNYEPLTQD

SEQ ID NO: 87884 - protein, 15 aa, Severe acute respiratory syndrome coronavirus 2
LVAMKYNYEPLTQDH

SEQ ID NO: 87885 - protein, 15 aa, Severe acute respiratory syndrome coronavirus 2
VAMKYNYEPLTQDHV

SEQ ID NO: 87886 - protein, 15 aa, Severe acute respiratory syndrome coronavirus 2
TILGSALLEDEFTPF

SEQ ID NO: 87887 - protein, 15 aa, Severe acute respiratory syndrome coronavirus 2
ILGSALLEDEFTPFD

SEQ ID NO: 87888 - protein, 15 aa, Severe acute respiratory syndrome coronavirus 2
LGSALLEDEFTPFDV

SEQ ID NO: 87889 - protein, 15 aa, Severe acute respiratory syndrome coronavirus 2
GSALLEDEFTPFDVV

SEQ ID NO: 87890 - protein, 15 aa, Severe acute respiratory syndrome coronavirus 2
SALLEDEFTPFDVVR

SEQ ID NO: 87891 - protein, 15 aa, Severe acute respiratory syndrome coronavirus 2
ALLEDEFTPFDVVRQ

SEQ ID NO: 87892 - protein, 15 aa, Severe acute respiratory syndrome coronavirus 2
LLEDEFTPFDVVRQC

SEQ ID NO: 87893 - protein, 15 aa, Severe acute respiratory syndrome coronavirus 2
LEDEFTPFDVVRQCS

SEQ ID NO: 87894 - protein, 15 aa, Severe acute respiratory syndrome coronavirus 2
EDEFTPFDVVRQCSG

SEQ ID NO: 87895 - protein, 15 aa, Severe acute respiratory syndrome coronavirus 2
DEFTPFDVVRQCSGV

SEQ ID NO: 87896 - protein, 15 aa, Severe acute respiratory syndrome coronavirus 2
EFTPFDVVRQCSGVT

SEQ ID NO: 87897 - protein, 15 aa, Severe acute respiratory syndrome coronavirus 2
FTPFDVVRQCSGVTF

SEQ ID NO: 87898 - protein, 15 aa, Severe acute respiratory syndrome coronavirus 2
TPFDVVRQCSGVTFQ

SEQ ID NO: 87899 - protein, 15 aa, Severe acute respiratory syndrome coronavirus 2
SAVKRTIKGTHHWLL

SEQ ID NO: 87900 - protein, 15 aa, Severe acute respiratory syndrome coronavirus 2
AVKRTIKGTHHWLLL

SEQ ID NO: 87901 - protein, 15 aa, Severe acute respiratory syndrome coronavirus 2
VKRTIKGTHHWLLLT

SEQ ID NO: 87902 - protein, 15 aa, Severe acute respiratory syndrome coronavirus 2
KRTIKGTHHWLLLTI

SEQ ID NO: 87903 - protein, 15 aa, Severe acute respiratory syndrome coronavirus 2
RTIKGTHHWLLLTIL

SEQ ID NO: 87904 - protein, 15 aa, Severe acute respiratory syndrome coronavirus 2
TIKGTHHWLLLTILT

SEQ ID NO: 87905 - protein, 15 aa, Severe acute respiratory syndrome coronavirus 2
IKGTHHWLLLTILTS

SEQ ID NO: 87906 - protein, 15 aa, Severe acute respiratory syndrome coronavirus 2
KGTHHWLLLTILTSL

SEQ ID NO: 87907 - protein, 15 aa, Severe acute respiratory syndrome coronavirus 2
GTHHWLLLTILTSLL

SEQ ID NO: 87908 - protein, 15 aa, Severe acute respiratory syndrome coronavirus 2
THHWLLLTILTSLLV

SEQ ID NO: 87909 - protein, 15 aa, Severe acute respiratory syndrome coronavirus 2
HHWLLLTILTSLLVL

SEQ ID NO: 87910 - protein, 15 aa, Severe acute respiratory syndrome coronavirus 2
HWLLLTILTSLLVLV

SEQ ID NO: 87911 - protein, 15 aa, Severe acute respiratory syndrome coronavirus 2
WLLLTILTSLLVLVQ

SEQ ID NO: 87912 - protein, 15 aa, Severe acute respiratory syndrome coronavirus 2
LLLTILTSLLVLVQS

SEQ ID NO: 87913 - protein, 15 aa, Severe acute respiratory syndrome coronavirus 2
LLTILTSLLVLVQST

SEQ ID NO: 87914 - protein, 15 aa, Severe acute respiratory syndrome coronavirus 2
LTILTSLLVLVQSTQ

SEQ ID NO: 87915 - protein, 15 aa, Severe acute respiratory syndrome coronavirus 2
TILTSLLVLVQSTQW

SEQ ID NO: 87916 - protein, 15 aa, Severe acute respiratory syndrome coronavirus 2
ILTSLLVLVQSTQWS

SEQ ID NO: 87917 - protein, 15 aa, Severe acute respiratory syndrome coronavirus 2
LTSLLVLVQSTQWSL

SEQ ID NO: 87918 - protein, 15 aa, Severe acute respiratory syndrome coronavirus 2
TSLLVLVQSTQWSLF

SEQ ID NO: 87919 - protein, 15 aa, Severe acute respiratory syndrome coronavirus 2
MGIIAMSAFAMMFVK

SEQ ID NO: 87920 - protein, 15 aa, Severe acute respiratory syndrome coronavirus 2
GIIAMSAFAMMFVKH

SEQ ID NO: 87921 - protein, 15 aa, Severe acute respiratory syndrome coronavirus 2
IIAMSAFAMMFVKHK

SEQ ID NO: 87922 - protein, 15 aa, Severe acute respiratory syndrome coronavirus 2
IAMSAFAMMFVKHKH

SEQ ID NO: 87923 - protein, 15 aa, Severe acute respiratory syndrome coronavirus 2
AMSAFAMMFVKHKHA

SEQ ID NO: 87924 - protein, 15 aa, Severe acute respiratory syndrome coronavirus 2
MSAFAMMFVKHKHAF

SEQ ID NO: 87925 - protein, 15 aa, Severe acute respiratory syndrome coronavirus 2
SAFAMMFVKHKHAFL

SEQ ID NO: 87926 - protein, 15 aa, Severe acute respiratory syndrome coronavirus 2
AFAMMFVKHKHAFLC

SEQ ID NO: 87927 - protein, 15 aa, Severe acute respiratory syndrome coronavirus 2
FAMMFVKHKHAFLCL

SEQ ID NO: 87928 - protein, 15 aa, Severe acute respiratory syndrome coronavirus 2
AMMFVKHKHAFLCLF

SEQ ID NO: 87929 - protein, 15 aa, Severe acute respiratory syndrome coronavirus 2
MMFVKHKHAFLCLFL

SEQ ID NO: 87930 - protein, 15 aa, Severe acute respiratory syndrome coronavirus 2
MFVKHKHAFLCLFLL

SEQ ID NO: 87931 - protein, 15 aa, Severe acute respiratory syndrome coronavirus 2
FVKHKHAFLCLFLLP

SEQ ID NO: 87932 - protein, 15 aa, Severe acute respiratory syndrome coronavirus 2
VKHKHAFLCLFLLPS

SEQ ID NO: 87933 - protein, 15 aa, Severe acute respiratory syndrome coronavirus 2
ATVAYFNMVYMPASW

SEQ ID NO: 87934 - protein, 15 aa, Severe acute respiratory syndrome coronavirus 2
TVAYFNMVYMPASWV

SEQ ID NO: 87935 - protein, 15 aa, Severe acute respiratory syndrome coronavirus 2
VAYFNMVYMPASWVM

SEQ ID NO: 87936 - protein, 15 aa, Severe acute respiratory syndrome coronavirus 2
AYFNMVYMPASWVMR

SEQ ID NO: 87937 - protein, 15 aa, Severe acute respiratory syndrome coronavirus 2
YFNMVYMPASWVMRI

SEQ ID NO: 87938 - protein, 15 aa, Severe acute respiratory syndrome coronavirus 2
FNMVYMPASWVMRIM

SEQ ID NO: 87939 - protein, 15 aa, Severe acute respiratory syndrome coronavirus 2
NMVYMPASWVMRIMT

SEQ ID NO: 87940 - protein, 15 aa, Severe acute respiratory syndrome coronavirus 2
MVYMPASWVMRIMTW

SEQ ID NO: 87941 - protein, 15 aa, Severe acute respiratory syndrome coronavirus 2
VYMPASWVMRIMTWL

SEQ ID NO: 87942 - protein, 15 aa, Severe acute respiratory syndrome coronavirus 2
MVDTSLSGFKLKDCV

SEQ ID NO: 87943 - protein, 15 aa, Severe acute respiratory syndrome coronavirus 2
VDTSLSGFKLKDCVM

SEQ ID NO: 87944 - protein, 15 aa, Severe acute respiratory syndrome coronavirus 2
DTSLSGFKLKDCVMY

SEQ ID NO: 87945 - protein, 15 aa, Severe acute respiratory syndrome coronavirus 2
TSLSGFKLKDCVMYA

SEQ ID NO: 87946 - protein, 15 aa, Severe acute respiratory syndrome coronavirus 2
SLSGFKLKDCVMYAS

SEQ ID NO: 87947 - protein, 15 aa, Severe acute respiratory syndrome coronavirus 2
LSGFKLKDCVMYASA

SEQ ID NO: 87948 - protein, 15 aa, Severe acute respiratory syndrome coronavirus 2
SGFKLKDCVMYASAV

SEQ ID NO: 87949 - protein, 15 aa, Severe acute respiratory syndrome coronavirus 2
GFKLKDCVMYASAVV

SEQ ID NO: 87950 - protein, 15 aa, Severe acute respiratory syndrome coronavirus 2
FKLKDCVMYASAVVL

SEQ ID NO: 87951 - protein, 15 aa, Severe acute respiratory syndrome coronavirus 2
KLKDCVMYASAVVLL

SEQ ID NO: 87952 - protein, 15 aa, Severe acute respiratory syndrome coronavirus 2
LKDCVMYASAVVLLI

SEQ ID NO: 87953 - protein, 15 aa, Severe acute respiratory syndrome coronavirus 2
KDCVMYASAVVLLIL

SEQ ID NO: 87954 - protein, 15 aa, Severe acute respiratory syndrome coronavirus 2
DCVMYASAVVLLILM

SEQ ID NO: 87955 - protein, 15 aa, Severe acute respiratory syndrome coronavirus 2
CVMYASAVVLLILMT

SEQ ID NO: 87956 - protein, 15 aa, Severe acute respiratory syndrome coronavirus 2
IVFMCVEYCPIFFIT

SEQ ID NO: 87957 - protein, 15 aa, Severe acute respiratory syndrome coronavirus 2
VFMCVEYCPIFFITG

SEQ ID NO: 87958 - protein, 15 aa, Severe acute respiratory syndrome coronavirus 2
FMCVEYCPIFFITGN

SEQ ID NO: 87959 - protein, 15 aa, Severe acute respiratory syndrome coronavirus 2
MCVEYCPIFFITGNT

SEQ ID NO: 87960 - protein, 15 aa, Severe acute respiratory syndrome coronavirus 2
CVEYCPIFFITGNTL

SEQ ID NO: 87961 - protein, 15 aa, Severe acute respiratory syndrome coronavirus 2
CIMLVYCFLGYFCTC

SEQ ID NO: 87962 - protein, 15 aa, Severe acute respiratory syndrome coronavirus 2
IMLVYCFLGYFCTCY

SEQ ID NO: 87963 - protein, 15 aa, Severe acute respiratory syndrome coronavirus 2
MLVYCFLGYFCTCYF

SEQ ID NO: 87964 - protein, 15 aa, Severe acute respiratory syndrome coronavirus 2
LVYCFLGYFCTCYFG

SEQ ID NO: 87965 - protein, 15 aa, Severe acute respiratory syndrome coronavirus 2
VYCFLGYFCTCYFGL

SEQ ID NO: 87966 - protein, 15 aa, Severe acute respiratory syndrome coronavirus 2
YCFLGYFCTCYFGLF

SEQ ID NO: 87967 - protein, 15 aa, Severe acute respiratory syndrome coronavirus 2
CFLGYFCTCYFGLFC

SEQ ID NO: 87968 - protein, 15 aa, Severe acute respiratory syndrome coronavirus 2
FLGYFCTCYFGLFCL

SEQ ID NO: 87969 - protein, 15 aa, Severe acute respiratory syndrome coronavirus 2
CYFGLFCLLNRYFRL

SEQ ID NO: 87970 - protein, 15 aa, Severe acute respiratory syndrome coronavirus 2
YFGLFCLLNRYFRLT

SEQ ID NO: 87971 - protein, 15 aa, Severe acute respiratory syndrome coronavirus 2
FGLFCLLNRYFRLTL

SEQ ID NO: 87972 - protein, 15 aa, Severe acute respiratory syndrome coronavirus 2
GLFCLLNRYFRLTLG

SEQ ID NO: 87973 - protein, 15 aa, Severe acute respiratory syndrome coronavirus 2
LFCLLNRYFRLTLGV

SEQ ID NO: 87974 - protein, 15 aa, Severe acute respiratory syndrome coronavirus 2
FCLLNRYFRLTLGVY

SEQ ID NO: 87975 - protein, 15 aa, Severe acute respiratory syndrome coronavirus 2
CLLNRYFRLTLGVYD

SEQ ID NO: 87976 - protein, 15 aa, Severe acute respiratory syndrome coronavirus 2
LLNRYFRLTLGVYDY

SEQ ID NO: 87977 - protein, 15 aa, Severe acute respiratory syndrome coronavirus 2
LNRYFRLTLGVYDYL

SEQ ID NO: 87978 - protein, 15 aa, Severe acute respiratory syndrome coronavirus 2
NRYFRLTLGVYDYLV

SEQ ID NO: 87979 - protein, 15 aa, Severe acute respiratory syndrome coronavirus 2
RYFRLTLGVYDYLVS

SEQ ID NO: 87980 - protein, 15 aa, Severe acute respiratory syndrome coronavirus 2
YFRLTLGVYDYLVST

SEQ ID NO: 87981 - protein, 15 aa, Severe acute respiratory syndrome coronavirus 2
FRLTLGVYDYLVSTQ

SEQ ID NO: 87982 - protein, 15 aa, Severe acute respiratory syndrome coronavirus 2
RLTLGVYDYLVSTQE

SEQ ID NO: 87983 - protein, 15 aa, Severe acute respiratory syndrome coronavirus 2
LTLGVYDYLVSTQEF

SEQ ID NO: 87984 - protein, 15 aa, Severe acute respiratory syndrome coronavirus 2
TLGVYDYLVSTQEFR

SEQ ID NO: 87985 - protein, 15 aa, Severe acute respiratory syndrome coronavirus 2
LGVYDYLVSTQEFRY

SEQ ID NO: 87986 - protein, 15 aa, Severe acute respiratory syndrome coronavirus 2
GVYDYLVSTQEFRYM

SEQ ID NO: 87987 - protein, 15 aa, Severe acute respiratory syndrome coronavirus 2
VYDYLVSTQEFRYMN

SEQ ID NO: 87988 - protein, 15 aa, Severe acute respiratory syndrome coronavirus 2
YDYLVSTQEFRYMNS

SEQ ID NO: 87989 - protein, 15 aa, Severe acute respiratory syndrome coronavirus 2
DYLVSTQEFRYMNSQ

SEQ ID NO: 87990 - protein, 15 aa, Severe acute respiratory syndrome coronavirus 2
YLVSTQEFRYMNSQG

SEQ ID NO: 87991 - protein, 15 aa, Severe acute respiratory syndrome coronavirus 2
LVSTQEFRYMNSQGL

SEQ ID NO: 87992 - protein, 15 aa, Severe acute respiratory syndrome coronavirus 2
SKMSDVKCTSVVLLS

SEQ ID NO: 87993 - protein, 15 aa, Severe acute respiratory syndrome coronavirus 2
KMSDVKCTSVVLLSV

SEQ ID NO: 87994 - protein, 15 aa, Severe acute respiratory syndrome coronavirus 2
MSDVKCTSVVLLSVL

SEQ ID NO: 87995 - protein, 15 aa, Severe acute respiratory syndrome coronavirus 2
SDVKCTSVVLLSVLQ

SEQ ID NO: 87996 - protein, 15 aa, Severe acute respiratory syndrome coronavirus 2
DVKCTSVVLLSVLQQ

SEQ ID NO: 87997 - protein, 15 aa, Severe acute respiratory syndrome coronavirus 2
VKCTSVVLLSVLQQL

SEQ ID NO: 87998 - protein, 15 aa, Severe acute respiratory syndrome coronavirus 2
KCTSVVLLSVLQQLR

SEQ ID NO: 87999 - protein, 15 aa, Severe acute respiratory syndrome coronavirus 2
CTSVVLLSVLQQLRV

SEQ ID NO: 88000 - protein, 15 aa, Severe acute respiratory syndrome coronavirus 2
TSVVLLSVLQQLRVE

SEQ ID NO: 88001 - protein, 15 aa, Severe acute respiratory syndrome coronavirus 2
SVVLLSVLQQLRVES

SEQ ID NO: 88002 - protein, 15 aa, Severe acute respiratory syndrome coronavirus 2
CVQLHNDILLAKDTT

SEQ ID NO: 88003 - protein, 15 aa, Severe acute respiratory syndrome coronavirus 2
VQLHNDILLAKDTTE

SEQ ID NO: 88004 - protein, 15 aa, Severe acute respiratory syndrome coronavirus 2
QLHNDILLAKDTTEA

SEQ ID NO: 88005 - protein, 15 aa, Severe acute respiratory syndrome coronavirus 2
LHNDILLAKDTTEAF

SEQ ID NO: 88006 - protein, 15 aa, Severe acute respiratory syndrome coronavirus 2
HNDILLAKDTTEAFE

SEQ ID NO: 88007 - protein, 15 aa, Severe acute respiratory syndrome coronavirus 2
NDILLAKDTTEAFEK

SEQ ID NO: 88008 - protein, 15 aa, Severe acute respiratory syndrome coronavirus 2
DILLAKDTTEAFEKM

SEQ ID NO: 88009 - protein, 15 aa, Severe acute respiratory syndrome coronavirus 2
ILLAKDTTEAFEKMV

SEQ ID NO: 88010 - protein, 15 aa, Severe acute respiratory syndrome coronavirus 2
LLAKDTTEAFEKMVS

SEQ ID NO: 88011 - protein, 15 aa, Severe acute respiratory syndrome coronavirus 2
LAKDTTEAFEKMVSL

SEQ ID NO: 88012 - protein, 15 aa, Severe acute respiratory syndrome coronavirus 2
AKDTTEAFEKMVSLL

SEQ ID NO: 88013 - protein, 15 aa, Severe acute respiratory syndrome coronavirus 2
KDTTEAFEKMVSLLS

SEQ ID NO: 88014 - protein, 15 aa, Severe acute respiratory syndrome coronavirus 2
KMVSLLSVLLSMQGA

SEQ ID NO: 88015 - protein, 15 aa, Severe acute respiratory syndrome coronavirus 2
MVSLLSVLLSMQGAV

SEQ ID NO: 88016 - protein, 15 aa, Severe acute respiratory syndrome coronavirus 2
VSLLSVLLSMQGAVD

SEQ ID NO: 88017 - protein, 15 aa, Severe acute respiratory syndrome coronavirus 2
SLLSVLLSMQGAVDI

SEQ ID NO: 88018 - protein, 15 aa, Severe acute respiratory syndrome coronavirus 2
LLSVLLSMQGAVDIN

SEQ ID NO: 88019 - protein, 15 aa, Severe acute respiratory syndrome coronavirus 2
LSVLLSMQGAVDINK

SEQ ID NO: 88020 - protein, 15 aa, Severe acute respiratory syndrome coronavirus 2
LLSMQGAVDINKLCE

SEQ ID NO: 88021 - protein, 15 aa, Severe acute respiratory syndrome coronavirus 2
LSMQGAVDINKLCEE

SEQ ID NO: 88022 - protein, 15 aa, Severe acute respiratory syndrome coronavirus 2
AVDINKLCEEMLDNR

SEQ ID NO: 88023 - protein, 15 aa, Severe acute respiratory syndrome coronavirus 2
VDINKLCEEMLDNRA

SEQ ID NO: 88024 - protein, 15 aa, Severe acute respiratory syndrome coronavirus 2
INKLCEEMLDNRATL

SEQ ID NO: 88025 - protein, 15 aa, Severe acute respiratory syndrome coronavirus 2
AIASEFSSLPSYAAF

SEQ ID NO: 88026 - protein, 15 aa, Severe acute respiratory syndrome coronavirus 2
YEQAVANGDSEVVLK

SEQ ID NO: 88027 - protein, 15 aa, Severe acute respiratory syndrome coronavirus 2
EQAVANGDSEVVLKK

SEQ ID NO: 88028 - protein, 15 aa, Severe acute respiratory syndrome coronavirus 2
QAVANGDSEVVLKKL

SEQ ID NO: 88029 - protein, 15 aa, Severe acute respiratory syndrome coronavirus 2
AVANGDSEVVLKKLK

SEQ ID NO: 88030 - protein, 15 aa, Severe acute respiratory syndrome coronavirus 2
VANGDSEVVLKKLKK

SEQ ID NO: 88031 - protein, 15 aa, Severe acute respiratory syndrome coronavirus 2
AMQRKLEKMADQAMT

SEQ ID NO: 88032 - protein, 15 aa, Severe acute respiratory syndrome coronavirus 2
MQRKLEKMADQAMTQ

SEQ ID NO: 88033 - protein, 15 aa, Severe acute respiratory syndrome coronavirus 2
QRKLEKMADQAMTQM

SEQ ID NO: 88034 - protein, 15 aa, Severe acute respiratory syndrome coronavirus 2
RKLEKMADQAMTQMY

SEQ ID NO: 88035 - protein, 15 aa, Severe acute respiratory syndrome coronavirus 2
KLEKMADQAMTQMYK

SEQ ID NO: 88036 - protein, 15 aa, Severe acute respiratory syndrome coronavirus 2
LEKMADQAMTQMYKQ

SEQ ID NO: 88037 - protein, 15 aa, Severe acute respiratory syndrome coronavirus 2
EKMADQAMTQMYKQA

SEQ ID NO: 88038 - protein, 15 aa, Severe acute respiratory syndrome coronavirus 2
KMADQAMTQMYKQAR

SEQ ID NO: 88039 - protein, 15 aa, Severe acute respiratory syndrome coronavirus 2
MADQAMTQMYKQARS

SEQ ID NO: 88040 - protein, 15 aa, Severe acute respiratory syndrome coronavirus 2
ADQAMTQMYKQARSE

SEQ ID NO: 88041 - protein, 15 aa, Severe acute respiratory syndrome coronavirus 2
DQAMTQMYKQARSED

SEQ ID NO: 88042 - protein, 15 aa, Severe acute respiratory syndrome coronavirus 2
QAMTQMYKQARSEDK

SEQ ID NO: 88043 - protein, 15 aa, Severe acute respiratory syndrome coronavirus 2
AMTQMYKQARSEDKR

SEQ ID NO: 88044 - protein, 15 aa, Severe acute respiratory syndrome coronavirus 2
MTQMYKQARSEDKRA

SEQ ID NO: 88045 - protein, 15 aa, Severe acute respiratory syndrome coronavirus 2
TQMYKQARSEDKRAK

SEQ ID NO: 88046 - protein, 15 aa, Severe acute respiratory syndrome coronavirus 2
QMYKQARSEDKRAKV

SEQ ID NO: 88047 - protein, 15 aa, Severe acute respiratory syndrome coronavirus 2
QARSEDKRAKVTSAM

SEQ ID NO: 88048 - protein, 15 aa, Severe acute respiratory syndrome coronavirus 2
ARSEDKRAKVTSAMQ

SEQ ID NO: 88049 - protein, 15 aa, Severe acute respiratory syndrome coronavirus 2
RSEDKRAKVTSAMQT

SEQ ID NO: 88050 - protein, 15 aa, Severe acute respiratory syndrome coronavirus 2
SEDKRAKVTSAMQTM

SEQ ID NO: 88051 - protein, 15 aa, Severe acute respiratory syndrome coronavirus 2
EDKRAKVTSAMQTML

SEQ ID NO: 88052 - protein, 15 aa, Severe acute respiratory syndrome coronavirus 2
DKRAKVTSAMQTMLF

SEQ ID NO: 88053 - protein, 15 aa, Severe acute respiratory syndrome coronavirus 2
KRAKVTSAMQTMLFT

SEQ ID NO: 88054 - protein, 15 aa, Severe acute respiratory syndrome coronavirus 2
RAKVTSAMQTMLFTM

SEQ ID NO: 88055 - protein, 15 aa, Severe acute respiratory syndrome coronavirus 2
AKVTSAMQTMLFTML

SEQ ID NO: 88056 - protein, 15 aa, Severe acute respiratory syndrome coronavirus 2
KVTSAMQTMLFTMLR

SEQ ID NO: 88057 - protein, 15 aa, Severe acute respiratory syndrome coronavirus 2
VTSAMQTMLFTMLRK

SEQ ID NO: 88058 - protein, 15 aa, Severe acute respiratory syndrome coronavirus 2
TSAMQTMLFTMLRKL

SEQ ID NO: 88059 - protein, 15 aa, Severe acute respiratory syndrome coronavirus 2
SAMQTMLFTMLRKLD

SEQ ID NO: 88060 - protein, 15 aa, Severe acute respiratory syndrome coronavirus 2
AMQTMLFTMLRKLDN

SEQ ID NO: 88061 - protein, 15 aa, Severe acute respiratory syndrome coronavirus 2
KLDNDALNNIINNAR

SEQ ID NO: 88062 - protein, 15 aa, Severe acute respiratory syndrome coronavirus 2
LDNDALNNIINNARD

SEQ ID NO: 88063 - protein, 15 aa, Severe acute respiratory syndrome coronavirus 2
DNDALNNIINNARDG

SEQ ID NO: 88064 - protein, 15 aa, Severe acute respiratory syndrome coronavirus 2
DALNNIINNARDGCV

SEQ ID NO: 88065 - protein, 15 aa, Severe acute respiratory syndrome coronavirus 2
ALNNIINNARDGCVP

SEQ ID NO: 88066 - protein, 15 aa, Severe acute respiratory syndrome coronavirus 2
LNNIINNARDGCVPL

SEQ ID NO: 88067 - protein, 15 aa, Severe acute respiratory syndrome coronavirus 2
NIINNARDGCVPLNI

SEQ ID NO: 88068 - protein, 15 aa, Severe acute respiratory syndrome coronavirus 2
IINNARDGCVPLNII

SEQ ID NO: 88069 - protein, 15 aa, Severe acute respiratory syndrome coronavirus 2
INNARDGCVPLNIIP

SEQ ID NO: 88070 - protein, 15 aa, Severe acute respiratory syndrome coronavirus 2
NNARDGCVPLNIIPL

SEQ ID NO: 88071 - protein, 15 aa, Severe acute respiratory syndrome coronavirus 2
NARDGCVPLNIIPLT

SEQ ID NO: 88072 - protein, 15 aa, Severe acute respiratory syndrome coronavirus 2
LWEIQQVVDADSKIV

SEQ ID NO: 88073 - protein, 15 aa, Severe acute respiratory syndrome coronavirus 2
WEIQQVVDADSKIVQ

SEQ ID NO: 88074 - protein, 15 aa, Severe acute respiratory syndrome coronavirus 2
EIQQVVDADSKIVQL

SEQ ID NO: 88075 - protein, 15 aa, Severe acute respiratory syndrome coronavirus 2
IQQVVDADSKIVQLS

SEQ ID NO: 88076 - protein, 15 aa, Severe acute respiratory syndrome coronavirus 2
QQVVDADSKIVQLSE

SEQ ID NO: 88077 - protein, 15 aa, Severe acute respiratory syndrome coronavirus 2
QVVDADSKIVQLSEI

SEQ ID NO: 88078 - protein, 15 aa, Severe acute respiratory syndrome coronavirus 2
VVDADSKIVQLSEIS

SEQ ID NO: 88079 - protein, 15 aa, Severe acute respiratory syndrome coronavirus 2
VDADSKIVQLSEISM

SEQ ID NO: 88080 - protein, 15 aa, Severe acute respiratory syndrome coronavirus 2
DADSKIVQLSEISMD

SEQ ID NO: 88081 - protein, 15 aa, Severe acute respiratory syndrome coronavirus 2
ADSKIVQLSEISMDN

SEQ ID NO: 88082 - protein, 15 aa, Severe acute respiratory syndrome coronavirus 2
DSKIVQLSEISMDNS

SEQ ID NO: 88083 - protein, 15 aa, Severe acute respiratory syndrome coronavirus 2
SKIVQLSEISMDNSP

SEQ ID NO: 88084 - protein, 15 aa, Severe acute respiratory syndrome coronavirus 2
KIVQLSEISMDNSPN

SEQ ID NO: 88085 - protein, 15 aa, Severe acute respiratory syndrome coronavirus 2
IVQLSEISMDNSPNL

SEQ ID NO: 88086 - protein, 15 aa, Severe acute respiratory syndrome coronavirus 2
VQLSEISMDNSPNLA

SEQ ID NO: 88087 - protein, 15 aa, Severe acute respiratory syndrome coronavirus 2
QLSEISMDNSPNLAW

SEQ ID NO: 88088 - protein, 15 aa, Severe acute respiratory syndrome coronavirus 2
LSEISMDNSPNLAWP

SEQ ID NO: 88089 - protein, 15 aa, Severe acute respiratory syndrome coronavirus 2
SEISMDNSPNLAWPL

SEQ ID NO: 88090 - protein, 15 aa, Severe acute respiratory syndrome coronavirus 2
EISMDNSPNLAWPLI

SEQ ID NO: 88091 - protein, 15 aa, Severe acute respiratory syndrome coronavirus 2
ISMDNSPNLAWPLIV

SEQ ID NO: 88092 - protein, 15 aa, Severe acute respiratory syndrome coronavirus 2
GGRFVLALLSDLQDL

SEQ ID NO: 88093 - protein, 15 aa, Severe acute respiratory syndrome coronavirus 2
GRFVLALLSDLQDLK

SEQ ID NO: 88094 - protein, 15 aa, Severe acute respiratory syndrome coronavirus 2
RFVLALLSDLQDLKW

SEQ ID NO: 88095 - protein, 15 aa, Severe acute respiratory syndrome coronavirus 2
FVLALLSDLQDLKWA

SEQ ID NO: 88096 - protein, 15 aa, Severe acute respiratory syndrome coronavirus 2
ALLSDLQDLKWARFP

SEQ ID NO: 88097 - protein, 15 aa, Severe acute respiratory syndrome coronavirus 2
LLSDLQDLKWARFPK

SEQ ID NO: 88098 - protein, 15 aa, Severe acute respiratory syndrome coronavirus 2
LSDLQDLKWARFPKS

SEQ ID NO: 88099 - protein, 15 aa, Severe acute respiratory syndrome coronavirus 2
SDLQDLKWARFPKSD

SEQ ID NO: 88100 - protein, 15 aa, Severe acute respiratory syndrome coronavirus 2
FPKSDGTGTIYTELE

SEQ ID NO: 88101 - protein, 15 aa, Severe acute respiratory syndrome coronavirus 2
PCRFVTDTPKGPKVK

SEQ ID NO: 88102 - protein, 15 aa, Severe acute respiratory syndrome coronavirus 2
TPKGPKVKYLYFIKG

SEQ ID NO: 88103 - protein, 15 aa, Severe acute respiratory syndrome coronavirus 2
PKGPKVKYLYFIKGL

SEQ ID NO: 88104 - protein, 15 aa, Severe acute respiratory syndrome coronavirus 2
KGPKVKYLYFIKGLN

SEQ ID NO: 88105 - protein, 15 aa, Severe acute respiratory syndrome coronavirus 2
GPKVKYLYFIKGLNN

SEQ ID NO: 88106 - protein, 15 aa, Severe acute respiratory syndrome coronavirus 2
PKVKYLYFIKGLNNL

SEQ ID NO: 88107 - protein, 15 aa, Severe acute respiratory syndrome coronavirus 2
KVKYLYFIKGLNNLN

SEQ ID NO: 88108 - protein, 15 aa, Severe acute respiratory syndrome coronavirus 2
VKYLYFIKGLNNLNR

SEQ ID NO: 88109 - protein, 15 aa, Severe acute respiratory syndrome coronavirus 2
KYLYFIKGLNNLNRG

SEQ ID NO: 88110 - protein, 15 aa, Severe acute respiratory syndrome coronavirus 2
YLYFIKGLNNLNRGM

SEQ ID NO: 88111 - protein, 15 aa, Severe acute respiratory syndrome coronavirus 2
LYFIKGLNNLNRGMV

SEQ ID NO: 88112 - protein, 15 aa, Severe acute respiratory syndrome coronavirus 2
YFIKGLNNLNRGMVL

SEQ ID NO: 88113 - protein, 15 aa, Severe acute respiratory syndrome coronavirus 2
VLSFCAFAVDAAKAY

SEQ ID NO: 88114 - protein, 15 aa, Severe acute respiratory syndrome coronavirus 2
LSFCAFAVDAAKAYK

SEQ ID NO: 88115 - protein, 15 aa, Severe acute respiratory syndrome coronavirus 2
SFCAFAVDAAKAYKD

SEQ ID NO: 88116 - protein, 15 aa, Severe acute respiratory syndrome coronavirus 2
FCAFAVDAAKAYKDY

SEQ ID NO: 88117 - protein, 15 aa, Severe acute respiratory syndrome coronavirus 2
CAFAVDAAKAYKDYL

SEQ ID NO: 88118 - protein, 15 aa, Severe acute respiratory syndrome coronavirus 2
AFAVDAAKAYKDYLA

SEQ ID NO: 88119 - protein, 15 aa, Severe acute respiratory syndrome coronavirus 2
FAVDAAKAYKDYLAS

SEQ ID NO: 88120 - protein, 15 aa, Severe acute respiratory syndrome coronavirus 2
AVDAAKAYKDYLASG

SEQ ID NO: 88121 - protein, 15 aa, Severe acute respiratory syndrome coronavirus 2
VDAAKAYKDYLASGG

SEQ ID NO: 88122 - protein, 15 aa, Severe acute respiratory syndrome coronavirus 2
DAAKAYKDYLASGGQ

SEQ ID NO: 88123 - protein, 15 aa, Severe acute respiratory syndrome coronavirus 2
AAKAYKDYLASGGQP

SEQ ID NO: 88124 - protein, 15 aa, Severe acute respiratory syndrome coronavirus 2
AKAYKDYLASGGQPI

SEQ ID NO: 88125 - protein, 15 aa, Severe acute respiratory syndrome coronavirus 2
KAYKDYLASGGQPIT

SEQ ID NO: 88126 - protein, 15 aa, Severe acute respiratory syndrome coronavirus 2
AYKDYLASGGQPITN

SEQ ID NO: 88127 - protein, 15 aa, Severe acute respiratory syndrome coronavirus 2
YKDYLASGGQPITNC

SEQ ID NO: 88128 - protein, 15 aa, Severe acute respiratory syndrome coronavirus 2
KDYLASGGQPITNCV

SEQ ID NO: 88129 - protein, 15 aa, Severe acute respiratory syndrome coronavirus 2
DYLASGGQPITNCVK

SEQ ID NO: 88130 - protein, 15 aa, Severe acute respiratory syndrome coronavirus 2
YLASGGQPITNCVKM

SEQ ID NO: 88131 - protein, 15 aa, Severe acute respiratory syndrome coronavirus 2
LASGGQPITNCVKML

SEQ ID NO: 88132 - protein, 15 aa, Severe acute respiratory syndrome coronavirus 2
ASGGQPITNCVKMLC

SEQ ID NO: 88133 - protein, 15 aa, Severe acute respiratory syndrome coronavirus 2
SGGQPITNCVKMLCT

SEQ ID NO: 88134 - protein, 15 aa, Severe acute respiratory syndrome coronavirus 2
GGQPITNCVKMLCTH

SEQ ID NO: 88135 - protein, 15 aa, Severe acute respiratory syndrome coronavirus 2
GQPITNCVKMLCTHT

SEQ ID NO: 88136 - protein, 15 aa, Severe acute respiratory syndrome coronavirus 2
QPITNCVKMLCTHTG

SEQ ID NO: 88137 - protein, 15 aa, Severe acute respiratory syndrome coronavirus 2
QESFGGASCCLYCRC

SEQ ID NO: 88138 - protein, 15 aa, Severe acute respiratory syndrome coronavirus 2
ESFGGASCCLYCRCH

SEQ ID NO: 88139 - protein, 15 aa, Severe acute respiratory syndrome coronavirus 2
HPNPKGFCDLKGKYV

SEQ ID NO: 88140 - protein, 15 aa, Severe acute respiratory syndrome coronavirus 2
PNPKGFCDLKGKYVQ

SEQ ID NO: 88141 - protein, 15 aa, Severe acute respiratory syndrome coronavirus 2
NPKGFCDLKGKYVQI

SEQ ID NO: 88142 - protein, 15 aa, Severe acute respiratory syndrome coronavirus 2
PKGFCDLKGKYVQIP

SEQ ID NO: 88143 - protein, 15 aa, Severe acute respiratory syndrome coronavirus 2
KGFCDLKGKYVQIPT

SEQ ID NO: 88144 - protein, 16 aa, Severe acute respiratory syndrome coronavirus 2
LVEVEKGVLPQLEQPY

SEQ ID NO: 88145 - protein, 16 aa, Severe acute respiratory syndrome coronavirus 2
VEVEKGVLPQLEQPYV

SEQ ID NO: 88146 - protein, 16 aa, Severe acute respiratory syndrome coronavirus 2
EVEKGVLPQLEQPYVF

SEQ ID NO: 88147 - protein, 16 aa, Severe acute respiratory syndrome coronavirus 2
VEKGVLPQLEQPYVFI

SEQ ID NO: 88148 - protein, 16 aa, Severe acute respiratory syndrome coronavirus 2
EKGVLPQLEQPYVFIK

SEQ ID NO: 88149 - protein, 16 aa, Severe acute respiratory syndrome coronavirus 2
KGVLPQLEQPYVFIKR

SEQ ID NO: 88150 - protein, 16 aa, Severe acute respiratory syndrome coronavirus 2
LVAELEGIQYGRSGET

SEQ ID NO: 88151 - protein, 16 aa, Severe acute respiratory syndrome coronavirus 2
REHEHEIAWYTERSEK

SEQ ID NO: 88152 - protein, 16 aa, Severe acute respiratory syndrome coronavirus 2
EHEHEIAWYTERSEKS

SEQ ID NO: 88153 - protein, 16 aa, Severe acute respiratory syndrome coronavirus 2
HEHEIAWYTERSEKSY

SEQ ID NO: 88154 - protein, 16 aa, Severe acute respiratory syndrome coronavirus 2
EHEIAWYTERSEKSYE

SEQ ID NO: 88155 - protein, 16 aa, Severe acute respiratory syndrome coronavirus 2
HEIAWYTERSEKSYEL

SEQ ID NO: 88156 - protein, 16 aa, Severe acute respiratory syndrome coronavirus 2
EIAWYTERSEKSYELQ

SEQ ID NO: 88157 - protein, 16 aa, Severe acute respiratory syndrome coronavirus 2
IAWYTERSEKSYELQT

SEQ ID NO: 88158 - protein, 16 aa, Severe acute respiratory syndrome coronavirus 2
AWYTERSEKSYELQTP

SEQ ID NO: 88159 - protein, 16 aa, Severe acute respiratory syndrome coronavirus 2
TERSEKSYELQTPFEI

SEQ ID NO: 88160 - protein, 16 aa, Severe acute respiratory syndrome coronavirus 2
ERSEKSYELQTPFEIK

SEQ ID NO: 88161 - protein, 16 aa, Severe acute respiratory syndrome coronavirus 2
RSEKSYELQTPFEIKL

SEQ ID NO: 88162 - protein, 16 aa, Severe acute respiratory syndrome coronavirus 2
SEKSYELQTPFEIKLA

SEQ ID NO: 88163 - protein, 16 aa, Severe acute respiratory syndrome coronavirus 2
EKSYELQTPFEIKLAK

SEQ ID NO: 88164 - protein, 16 aa, Severe acute respiratory syndrome coronavirus 2
KSYELQTPFEIKLAKK

SEQ ID NO: 88165 - protein, 16 aa, Severe acute respiratory syndrome coronavirus 2
SYELQTPFEIKLAKKF

SEQ ID NO: 88166 - protein, 16 aa, Severe acute respiratory syndrome coronavirus 2
YELQTPFEIKLAKKFD

SEQ ID NO: 88167 - protein, 16 aa, Severe acute respiratory syndrome coronavirus 2
EKVNINIVGDFKLNEE

SEQ ID NO: 88168 - protein, 16 aa, Severe acute respiratory syndrome coronavirus 2
KVNINIVGDFKLNEEI

SEQ ID NO: 88169 - protein, 16 aa, Severe acute respiratory syndrome coronavirus 2
VNINIVGDFKLNEEIA

SEQ ID NO: 88170 - protein, 16 aa, Severe acute respiratory syndrome coronavirus 2
NINIVGDFKLNEEIAI

SEQ ID NO: 88171 - protein, 16 aa, Severe acute respiratory syndrome coronavirus 2
NIVGDFKLNEEIAIIL

SEQ ID NO: 88172 - protein, 16 aa, Severe acute respiratory syndrome coronavirus 2
IVGDFKLNEEIAIILA

SEQ ID NO: 88173 - protein, 16 aa, Severe acute respiratory syndrome coronavirus 2
VGDFKLNEEIAIILAS

SEQ ID NO: 88174 - protein, 16 aa, Severe acute respiratory syndrome coronavirus 2
GDFKLNEEIAIILASF

SEQ ID NO: 88175 - protein, 16 aa, Severe acute respiratory syndrome coronavirus 2
ASTSAFVETVKGLDYK

SEQ ID NO: 88176 - protein, 16 aa, Severe acute respiratory syndrome coronavirus 2
FKQIVESCGNFKVTKG

SEQ ID NO: 88177 - protein, 16 aa, Severe acute respiratory syndrome coronavirus 2
KQIVESCGNFKVTKGK

SEQ ID NO: 88178 - protein, 16 aa, Severe acute respiratory syndrome coronavirus 2
FTSDLATNNLVVMAYI

SEQ ID NO: 88179 - protein, 16 aa, Severe acute respiratory syndrome coronavirus 2
TSDLATNNLVVMAYIT

SEQ ID NO: 88180 - protein, 16 aa, Severe acute respiratory syndrome coronavirus 2
SDLATNNLVVMAYITG

SEQ ID NO: 88181 - protein, 16 aa, Severe acute respiratory syndrome coronavirus 2
DLATNNLVVMAYITGG

SEQ ID NO: 88182 - protein, 16 aa, Severe acute respiratory syndrome coronavirus 2
LATNNLVVMAYITGGV

SEQ ID NO: 88183 - protein, 16 aa, Severe acute respiratory syndrome coronavirus 2
NNLVVMAYITGGVVQL

SEQ ID NO: 88184 - protein, 16 aa, Severe acute respiratory syndrome coronavirus 2
VLDWLEEKFKEGVEFL

SEQ ID NO: 88185 - protein, 16 aa, Severe acute respiratory syndrome coronavirus 2
LDWLEEKFKEGVEFLR

SEQ ID NO: 88186 - protein, 16 aa, Severe acute respiratory syndrome coronavirus 2
DWLEEKFKEGVEFLRD

SEQ ID NO: 88187 - protein, 16 aa, Severe acute respiratory syndrome coronavirus 2
WLEEKFKEGVEFLRDG

SEQ ID NO: 88188 - protein, 16 aa, Severe acute respiratory syndrome coronavirus 2
LEEKFKEGVEFLRDGW

SEQ ID NO: 88189 - protein, 16 aa, Severe acute respiratory syndrome coronavirus 2
EEKFKEGVEFLRDGWE

SEQ ID NO: 88190 - protein, 16 aa, Severe acute respiratory syndrome coronavirus 2
EKFKEGVEFLRDGWEI

SEQ ID NO: 88191 - protein, 16 aa, Severe acute respiratory syndrome coronavirus 2
KFKEGVEFLRDGWEIV

SEQ ID NO: 88192 - protein, 16 aa, Severe acute respiratory syndrome coronavirus 2
FKEGVEFLRDGWEIVK

SEQ ID NO: 88193 - protein, 16 aa, Severe acute respiratory syndrome coronavirus 2
KEGVEFLRDGWEIVKF

SEQ ID NO: 88194 - protein, 16 aa, Severe acute respiratory syndrome coronavirus 2
NKFLALCADSIIIGGA

SEQ ID NO: 88195 - protein, 16 aa, Severe acute respiratory syndrome coronavirus 2
KFLALCADSIIIGGAK

SEQ ID NO: 88196 - protein, 16 aa, Severe acute respiratory syndrome coronavirus 2
FLALCADSIIIGGAKL

SEQ ID NO: 88197 - protein, 16 aa, Severe acute respiratory syndrome coronavirus 2
LALCADSIIIGGAKLK

SEQ ID NO: 88198 - protein, 16 aa, Severe acute respiratory syndrome coronavirus 2
ALCADSIIIGGAKLKA

SEQ ID NO: 88199 - protein, 16 aa, Severe acute respiratory syndrome coronavirus 2
LCADSIIIGGAKLKAL

SEQ ID NO: 88200 - protein, 16 aa, Severe acute respiratory syndrome coronavirus 2
CADSIIIGGAKLKALN

SEQ ID NO: 88201 - protein, 16 aa, Severe acute respiratory syndrome coronavirus 2
ADSIIIGGAKLKALNL

SEQ ID NO: 88202 - protein, 16 aa, Severe acute respiratory syndrome coronavirus 2
DSIIIGGAKLKALNLG

SEQ ID NO: 88203 - protein, 16 aa, Severe acute respiratory syndrome coronavirus 2
SIIIGGAKLKALNLGE

SEQ ID NO: 88204 - protein, 16 aa, Severe acute respiratory syndrome coronavirus 2
SEAVEAPLVGTPVCIN

SEQ ID NO: 88205 - protein, 16 aa, Severe acute respiratory syndrome coronavirus 2
EAVEAPLVGTPVCING

SEQ ID NO: 88206 - protein, 16 aa, Severe acute respiratory syndrome coronavirus 2
AVEAPLVGTPVCINGL

SEQ ID NO: 88207 - protein, 16 aa, Severe acute respiratory syndrome coronavirus 2
VEAPLVGTPVCINGLM

SEQ ID NO: 88208 - protein, 16 aa, Severe acute respiratory syndrome coronavirus 2
APLVGTPVCINGLMLL

SEQ ID NO: 88209 - protein, 16 aa, Severe acute respiratory syndrome coronavirus 2
PLVGTPVCINGLMLLE

SEQ ID NO: 88210 - protein, 16 aa, Severe acute respiratory syndrome coronavirus 2
LVGTPVCINGLMLLEI

SEQ ID NO: 88211 - protein, 16 aa, Severe acute respiratory syndrome coronavirus 2
VGTPVCINGLMLLEIK

SEQ ID NO: 88212 - protein, 16 aa, Severe acute respiratory syndrome coronavirus 2
GTPVCINGLMLLEIKD

SEQ ID NO: 88213 - protein, 16 aa, Severe acute respiratory syndrome coronavirus 2
PVCINGLMLLEIKDTE

SEQ ID NO: 88214 - protein, 16 aa, Severe acute respiratory syndrome coronavirus 2
VCINGLMLLEIKDTEK

SEQ ID NO: 88215 - protein, 16 aa, Severe acute respiratory syndrome coronavirus 2
CINGLMLLEIKDTEKY

SEQ ID NO: 88216 - protein, 16 aa, Severe acute respiratory syndrome coronavirus 2
INGLMLLEIKDTEKYC

SEQ ID NO: 88217 - protein, 16 aa, Severe acute respiratory syndrome coronavirus 2
NGLMLLEIKDTEKYCA

SEQ ID NO: 88218 - protein, 16 aa, Severe acute respiratory syndrome coronavirus 2
GLMLLEIKDTEKYCAL

SEQ ID NO: 88219 - protein, 16 aa, Severe acute respiratory syndrome coronavirus 2
TKVTFGDDTVIEVQGY

SEQ ID NO: 88220 - protein, 16 aa, Severe acute respiratory syndrome coronavirus 2
CSAYTVELGTEVNEFA

SEQ ID NO: 88221 - protein, 16 aa, Severe acute respiratory syndrome coronavirus 2
SAYTVELGTEVNEFAC

SEQ ID NO: 88222 - protein, 16 aa, Severe acute respiratory syndrome coronavirus 2
AYTVELGTEVNEFACV

SEQ ID NO: 88223 - protein, 16 aa, Severe acute respiratory syndrome coronavirus 2
YTVELGTEVNEFACVV

SEQ ID NO: 88224 - protein, 16 aa, Severe acute respiratory syndrome coronavirus 2
TPVVQTIEVNSFSGYL

SEQ ID NO: 88225 - protein, 16 aa, Severe acute respiratory syndrome coronavirus 2
PVVQTIEVNSFSGYLK

SEQ ID NO: 88226 - protein, 16 aa, Severe acute respiratory syndrome coronavirus 2
VVQTIEVNSFSGYLKL

SEQ ID NO: 88227 - protein, 16 aa, Severe acute respiratory syndrome coronavirus 2
VQTIEVNSFSGYLKLT

SEQ ID NO: 88228 - protein, 16 aa, Severe acute respiratory syndrome coronavirus 2
KPTVVVNAANVYLKHG

SEQ ID NO: 88229 - protein, 16 aa, Severe acute respiratory syndrome coronavirus 2
PTVVVNAANVYLKHGG

SEQ ID NO: 88230 - protein, 16 aa, Severe acute respiratory syndrome coronavirus 2
TVVVNAANVYLKHGGG

SEQ ID NO: 88231 - protein, 16 aa, Severe acute respiratory syndrome coronavirus 2
NVYLKHGGGVAGALNK

SEQ ID NO: 88232 - protein, 16 aa, Severe acute respiratory syndrome coronavirus 2
VYLKHGGGVAGALNKA

SEQ ID NO: 88233 - protein, 16 aa, Severe acute respiratory syndrome coronavirus 2
YLKHGGGVAGALNKAT

SEQ ID NO: 88234 - protein, 16 aa, Severe acute respiratory syndrome coronavirus 2
LKHGGGVAGALNKATN

SEQ ID NO: 88235 - protein, 16 aa, Severe acute respiratory syndrome coronavirus 2
KHGGGVAGALNKATNN

SEQ ID NO: 88236 - protein, 16 aa, Severe acute respiratory syndrome coronavirus 2
HGGGVAGALNKATNNA

SEQ ID NO: 88237 - protein, 16 aa, Severe acute respiratory syndrome coronavirus 2
GGGVAGALNKATNNAM

SEQ ID NO: 88238 - protein, 16 aa, Severe acute respiratory syndrome coronavirus 2
GGVAGALNKATNNAMQ

SEQ ID NO: 88239 - protein, 16 aa, Severe acute respiratory syndrome coronavirus 2
GSCVLSGHNLAKHCLH

SEQ ID NO: 88240 - protein, 16 aa, Severe acute respiratory syndrome coronavirus 2
CVLSGHNLAKHCLHVV

SEQ ID NO: 88241 - protein, 16 aa, Severe acute respiratory syndrome coronavirus 2
VLSGHNLAKHCLHVVG

SEQ ID NO: 88242 - protein, 16 aa, Severe acute respiratory syndrome coronavirus 2
LSGHNLAKHCLHVVGP

SEQ ID NO: 88243 - protein, 16 aa, Severe acute respiratory syndrome coronavirus 2
SGHNLAKHCLHVVGPN

SEQ ID NO: 88244 - protein, 16 aa, Severe acute respiratory syndrome coronavirus 2
GHNLAKHCLHVVGPNV

SEQ ID NO: 88245 - protein, 16 aa, Severe acute respiratory syndrome coronavirus 2
HNLAKHCLHVVGPNVN

SEQ ID NO: 88246 - protein, 16 aa, Severe acute respiratory syndrome coronavirus 2
VFDKNLYDKLVSSFLE

SEQ ID NO: 88247 - protein, 16 aa, Severe acute respiratory syndrome coronavirus 2
DSATLVSDIDITFLKK

SEQ ID NO: 88248 - protein, 16 aa, Severe acute respiratory syndrome coronavirus 2
YITTYPGQGLNGYTVE

SEQ ID NO: 88249 - protein, 16 aa, Severe acute respiratory syndrome coronavirus 2
TTYPGQGLNGYTVEEA

SEQ ID NO: 88250 - protein, 16 aa, Severe acute respiratory syndrome coronavirus 2
TYPGQGLNGYTVEEAK

SEQ ID NO: 88251 - protein, 16 aa, Severe acute respiratory syndrome coronavirus 2
YPGQGLNGYTVEEAKT

SEQ ID NO: 88252 - protein, 16 aa, Severe acute respiratory syndrome coronavirus 2
PGQGLNGYTVEEAKTV

SEQ ID NO: 88253 - protein, 16 aa, Severe acute respiratory syndrome coronavirus 2
GQGLNGYTVEEAKTVL

SEQ ID NO: 88254 - protein, 16 aa, Severe acute respiratory syndrome coronavirus 2
QGLNGYTVEEAKTVLK

SEQ ID NO: 88255 - protein, 16 aa, Severe acute respiratory syndrome coronavirus 2
GLNGYTVEEAKTVLKK

SEQ ID NO: 88256 - protein, 16 aa, Severe acute respiratory syndrome coronavirus 2
LNGYTVEEAKTVLKKC

SEQ ID NO: 88257 - protein, 16 aa, Severe acute respiratory syndrome coronavirus 2
NGYTVEEAKTVLKKCK

SEQ ID NO: 88258 - protein, 16 aa, Severe acute respiratory syndrome coronavirus 2
GYTVEEAKTVLKKCKS

SEQ ID NO: 88259 - protein, 16 aa, Severe acute respiratory syndrome coronavirus 2
FYILPSIISNEKQEIL

SEQ ID NO: 88260 - protein, 16 aa, Severe acute respiratory syndrome coronavirus 2
YILPSIISNEKQEILG

SEQ ID NO: 88261 - protein, 16 aa, Severe acute respiratory syndrome coronavirus 2
ILPSIISNEKQEILGT

SEQ ID NO: 88262 - protein, 16 aa, Severe acute respiratory syndrome coronavirus 2
LPSIISNEKQEILGTV

SEQ ID NO: 88263 - protein, 16 aa, Severe acute respiratory syndrome coronavirus 2
PSIISNEKQEILGTVS

SEQ ID NO: 88264 - protein, 16 aa, Severe acute respiratory syndrome coronavirus 2
SIISNEKQEILGTVSW

SEQ ID NO: 88265 - protein, 16 aa, Severe acute respiratory syndrome coronavirus 2
MLAHAEETRKLMPVCV

SEQ ID NO: 88266 - protein, 16 aa, Severe acute respiratory syndrome coronavirus 2
LAHAEETRKLMPVCVE

SEQ ID NO: 88267 - protein, 16 aa, Severe acute respiratory syndrome coronavirus 2
AHAEETRKLMPVCVET

SEQ ID NO: 88268 - protein, 16 aa, Severe acute respiratory syndrome coronavirus 2
HAEETRKLMPVCVETK

SEQ ID NO: 88269 - protein, 16 aa, Severe acute respiratory syndrome coronavirus 2
AEETRKLMPVCVETKA

SEQ ID NO: 88270 - protein, 16 aa, Severe acute respiratory syndrome coronavirus 2
CVETKAIVSTIQRKYK

SEQ ID NO: 88271 - protein, 16 aa, Severe acute respiratory syndrome coronavirus 2
VSTIQRKYKGIKIQEG

SEQ ID NO: 88272 - protein, 16 aa, Severe acute respiratory syndrome coronavirus 2
STIQRKYKGIKIQEGV

SEQ ID NO: 88273 - protein, 16 aa, Severe acute respiratory syndrome coronavirus 2
TIQRKYKGIKIQEGVV

SEQ ID NO: 88274 - protein, 16 aa, Severe acute respiratory syndrome coronavirus 2
IQRKYKGIKIQEGVVD

SEQ ID NO: 88275 - protein, 16 aa, Severe acute respiratory syndrome coronavirus 2
QRKYKGIKIQEGVVDY

SEQ ID NO: 88276 - protein, 16 aa, Severe acute respiratory syndrome coronavirus 2
RKYKGIKIQEGVVDYG

SEQ ID NO: 88277 - protein, 16 aa, Severe acute respiratory syndrome coronavirus 2
TAYNGYLTSSSKTPEE

SEQ ID NO: 88278 - protein, 16 aa, Severe acute respiratory syndrome coronavirus 2
AYNGYLTSSSKTPEEH

SEQ ID NO: 88279 - protein, 16 aa, Severe acute respiratory syndrome coronavirus 2
SSKTPEEHFIETISLA

SEQ ID NO: 88280 - protein, 16 aa, Severe acute respiratory syndrome coronavirus 2
SKTPEEHFIETISLAG

SEQ ID NO: 88281 - protein, 16 aa, Severe acute respiratory syndrome coronavirus 2
KTPEEHFIETISLAGS

SEQ ID NO: 88282 - protein, 16 aa, Severe acute respiratory syndrome coronavirus 2
TPEEHFIETISLAGSY

SEQ ID NO: 88283 - protein, 16 aa, Severe acute respiratory syndrome coronavirus 2
PEEHFIETISLAGSYK

SEQ ID NO: 88284 - protein, 16 aa, Severe acute respiratory syndrome coronavirus 2
EEHFIETISLAGSYKD

SEQ ID NO: 88285 - protein, 16 aa, Severe acute respiratory syndrome coronavirus 2
EHFIETISLAGSYKDW

SEQ ID NO: 88286 - protein, 16 aa, Severe acute respiratory syndrome coronavirus 2
VRTIKVFTTVDNINLH

SEQ ID NO: 88287 - protein, 16 aa, Severe acute respiratory syndrome coronavirus 2
KPHNSHEGKTFYVLPN

SEQ ID NO: 88288 - protein, 16 aa, Severe acute respiratory syndrome coronavirus 2
PHNSHEGKTFYVLPND

SEQ ID NO: 88289 - protein, 16 aa, Severe acute respiratory syndrome coronavirus 2
HNSHEGKTFYVLPNDD

SEQ ID NO: 88290 - protein, 16 aa, Severe acute respiratory syndrome coronavirus 2
KKWKYPQVNGLTSIKW

SEQ ID NO: 88291 - protein, 16 aa, Severe acute respiratory syndrome coronavirus 2
KWKYPQVNGLTSIKWA

SEQ ID NO: 88292 - protein, 16 aa, Severe acute respiratory syndrome coronavirus 2
WKYPQVNGLTSIKWAD

SEQ ID NO: 88293 - protein, 16 aa, Severe acute respiratory syndrome coronavirus 2
KYPQVNGLTSIKWADN

SEQ ID NO: 88294 - protein, 16 aa, Severe acute respiratory syndrome coronavirus 2
YPQVNGLTSIKWADNN

SEQ ID NO: 88295 - protein, 16 aa, Severe acute respiratory syndrome coronavirus 2
PQVNGLTSIKWADNNC

SEQ ID NO: 88296 - protein, 16 aa, Severe acute respiratory syndrome coronavirus 2
QVNGLTSIKWADNNCY

SEQ ID NO: 88297 - protein, 16 aa, Severe acute respiratory syndrome coronavirus 2
VNGLTSIKWADNNCYL

SEQ ID NO: 88298 - protein, 16 aa, Severe acute respiratory syndrome coronavirus 2
NGLTSIKWADNNCYLA

SEQ ID NO: 88299 - protein, 16 aa, Severe acute respiratory syndrome coronavirus 2
GLTSIKWADNNCYLAT

SEQ ID NO: 88300 - protein, 16 aa, Severe acute respiratory syndrome coronavirus 2
ELKFNPPALQDAYYRA

SEQ ID NO: 88301 - protein, 16 aa, Severe acute respiratory syndrome coronavirus 2
LKFNPPALQDAYYRAR

SEQ ID NO: 88302 - protein, 16 aa, Severe acute respiratory syndrome coronavirus 2
PPALQDAYYRARAGEA

SEQ ID NO: 88303 - protein, 16 aa, Severe acute respiratory syndrome coronavirus 2
PALQDAYYRARAGEAA

SEQ ID NO: 88304 - protein, 16 aa, Severe acute respiratory syndrome coronavirus 2
ALQDAYYRARAGEAAN

SEQ ID NO: 88305 - protein, 16 aa, Severe acute respiratory syndrome coronavirus 2
LQDAYYRARAGEAANF

SEQ ID NO: 88306 - protein, 16 aa, Severe acute respiratory syndrome coronavirus 2
QDAYYRARAGEAANFC

SEQ ID NO: 88307 - protein, 16 aa, Severe acute respiratory syndrome coronavirus 2
DAYYRARAGEAANFCA

SEQ ID NO: 88308 - protein, 16 aa, Severe acute respiratory syndrome coronavirus 2
AYYRARAGEAANFCAL

SEQ ID NO: 88309 - protein, 16 aa, Severe acute respiratory syndrome coronavirus 2
YYRARAGEAANFCALI

SEQ ID NO: 88310 - protein, 16 aa, Severe acute respiratory syndrome coronavirus 2
YRARAGEAANFCALIL

SEQ ID NO: 88311 - protein, 16 aa, Severe acute respiratory syndrome coronavirus 2
RARAGEAANFCALILA

SEQ ID NO: 88312 - protein, 16 aa, Severe acute respiratory syndrome coronavirus 2
ARAGEAANFCALILAY

SEQ ID NO: 88313 - protein, 16 aa, Severe acute respiratory syndrome coronavirus 2
RAGEAANFCALILAYC

SEQ ID NO: 88314 - protein, 16 aa, Severe acute respiratory syndrome coronavirus 2
MSYLFQHANLDSCKRV

SEQ ID NO: 88315 - protein, 16 aa, Severe acute respiratory syndrome coronavirus 2
DSCKRVLNVVCKTCGQ

SEQ ID NO: 88316 - protein, 16 aa, Severe acute respiratory syndrome coronavirus 2
SCKRVLNVVCKTCGQQ

SEQ ID NO: 88317 - protein, 16 aa, Severe acute respiratory syndrome coronavirus 2
CKRVLNVVCKTCGQQQ

SEQ ID NO: 88318 - protein, 16 aa, Severe acute respiratory syndrome coronavirus 2
KRVLNVVCKTCGQQQT

SEQ ID NO: 88319 - protein, 16 aa, Severe acute respiratory syndrome coronavirus 2
MGTLSYEQFKKGVQIP

SEQ ID NO: 88320 - protein, 16 aa, Severe acute respiratory syndrome coronavirus 2
GTLSYEQFKKGVQIPC

SEQ ID NO: 88321 - protein, 16 aa, Severe acute respiratory syndrome coronavirus 2
ITDVFYKENSYTTTIK

SEQ ID NO: 88322 - protein, 16 aa, Severe acute respiratory syndrome coronavirus 2
TDVFYKENSYTTTIKP

SEQ ID NO: 88323 - protein, 16 aa, Severe acute respiratory syndrome coronavirus 2
DVFYKENSYTTTIKPV

SEQ ID NO: 88324 - protein, 16 aa, Severe acute respiratory syndrome coronavirus 2
VFYKENSYTTTIKPVT

SEQ ID NO: 88325 - protein, 16 aa, Severe acute respiratory syndrome coronavirus 2
FYKENSYTTTIKPVTY

SEQ ID NO: 88326 - protein, 16 aa, Severe acute respiratory syndrome coronavirus 2
YKENSYTTTIKPVTYK

SEQ ID NO: 88327 - protein, 16 aa, Severe acute respiratory syndrome coronavirus 2
KENSYTTTIKPVTYKL

SEQ ID NO: 88328 - protein, 16 aa, Severe acute respiratory syndrome coronavirus 2
ENSYTTTIKPVTYKLD

SEQ ID NO: 88329 - protein, 16 aa, Severe acute respiratory syndrome coronavirus 2
NSYTTTIKPVTYKLDG

SEQ ID NO: 88330 - protein, 16 aa, Severe acute respiratory syndrome coronavirus 2
SYTTTIKPVTYKLDGV

SEQ ID NO: 88331 - protein, 16 aa, Severe acute respiratory syndrome coronavirus 2
YTTTIKPVTYKLDGVV

SEQ ID NO: 88332 - protein, 16 aa, Severe acute respiratory syndrome coronavirus 2
TTTIKPVTYKLDGVVC

SEQ ID NO: 88333 - protein, 16 aa, Severe acute respiratory syndrome coronavirus 2
TTIKPVTYKLDGVVCT

SEQ ID NO: 88334 - protein, 16 aa, Severe acute respiratory syndrome coronavirus 2
TIKPVTYKLDGVVCTE

SEQ ID NO: 88335 - protein, 16 aa, Severe acute respiratory syndrome coronavirus 2
IKPVTYKLDGVVCTEI

SEQ ID NO: 88336 - protein, 16 aa, Severe acute respiratory syndrome coronavirus 2
KPVTYKLDGVVCTEID

SEQ ID NO: 88337 - protein, 16 aa, Severe acute respiratory syndrome coronavirus 2
PVTYKLDGVVCTEIDP

SEQ ID NO: 88338 - protein, 16 aa, Severe acute respiratory syndrome coronavirus 2
VTYKLDGVVCTEIDPK

SEQ ID NO: 88339 - protein, 16 aa, Severe acute respiratory syndrome coronavirus 2
PKLDNYYKKDNSYFTE

SEQ ID NO: 88340 - protein, 16 aa, Severe acute respiratory syndrome coronavirus 2
KLDNYYKKDNSYFTEQ

SEQ ID NO: 88341 - protein, 16 aa, Severe acute respiratory syndrome coronavirus 2
LDNYYKKDNSYFTEQP

SEQ ID NO: 88342 - protein, 16 aa, Severe acute respiratory syndrome coronavirus 2
DNYYKKDNSYFTEQPI

SEQ ID NO: 88343 - protein, 16 aa, Severe acute respiratory syndrome coronavirus 2
NYYKKDNSYFTEQPID

SEQ ID NO: 88344 - protein, 16 aa, Severe acute respiratory syndrome coronavirus 2
YYKKDNSYFTEQPIDL

SEQ ID NO: 88345 - protein, 16 aa, Severe acute respiratory syndrome coronavirus 2
YKKDNSYFTEQPIDLV

SEQ ID NO: 88346 - protein, 16 aa, Severe acute respiratory syndrome coronavirus 2
KKDNSYFTEQPIDLVP

SEQ ID NO: 88347 - protein, 16 aa, Severe acute respiratory syndrome coronavirus 2
KDNSYFTEQPIDLVPN

SEQ ID NO: 88348 - protein, 16 aa, Severe acute respiratory syndrome coronavirus 2
DNSYFTEQPIDLVPNQ

SEQ ID NO: 88349 - protein, 16 aa, Severe acute respiratory syndrome coronavirus 2
NSYFTEQPIDLVPNQP

SEQ ID NO: 88350 - protein, 16 aa, Severe acute respiratory syndrome coronavirus 2
SYFTEQPIDLVPNQPY

SEQ ID NO: 88351 - protein, 16 aa, Severe acute respiratory syndrome coronavirus 2
ASFDNFKFVCDNIKFA

SEQ ID NO: 88352 - protein, 16 aa, Severe acute respiratory syndrome coronavirus 2
SFDNFKFVCDNIKFAD

SEQ ID NO: 88353 - protein, 16 aa, Severe acute respiratory syndrome coronavirus 2
FDNFKFVCDNIKFADD

SEQ ID NO: 88354 - protein, 16 aa, Severe acute respiratory syndrome coronavirus 2
DNFKFVCDNIKFADDL

SEQ ID NO: 88355 - protein, 16 aa, Severe acute respiratory syndrome coronavirus 2
NFKFVCDNIKFADDLN

SEQ ID NO: 88356 - protein, 16 aa, Severe acute respiratory syndrome coronavirus 2
FKFVCDNIKFADDLNQ

SEQ ID NO: 88357 - protein, 16 aa, Severe acute respiratory syndrome coronavirus 2
KFVCDNIKFADDLNQL

SEQ ID NO: 88358 - protein, 16 aa, Severe acute respiratory syndrome coronavirus 2
FVCDNIKFADDLNQLT

SEQ ID NO: 88359 - protein, 16 aa, Severe acute respiratory syndrome coronavirus 2
VCDNIKFADDLNQLTG

SEQ ID NO: 88360 - protein, 16 aa, Severe acute respiratory syndrome coronavirus 2
CDNIKFADDLNQLTGY

SEQ ID NO: 88361 - protein, 16 aa, Severe acute respiratory syndrome coronavirus 2
DNIKFADDLNQLTGYK

SEQ ID NO: 88362 - protein, 16 aa, Severe acute respiratory syndrome coronavirus 2
NIKFADDLNQLTGYKK

SEQ ID NO: 88363 - protein, 16 aa, Severe acute respiratory syndrome coronavirus 2
IKFADDLNQLTGYKKP

SEQ ID NO: 88364 - protein, 16 aa, Severe acute respiratory syndrome coronavirus 2
DLNQLTGYKKPASREL

SEQ ID NO: 88365 - protein, 16 aa, Severe acute respiratory syndrome coronavirus 2
LNQLTGYKKPASRELK

SEQ ID NO: 88366 - protein, 16 aa, Severe acute respiratory syndrome coronavirus 2
NQLTGYKKPASRELKV

SEQ ID NO: 88367 - protein, 16 aa, Severe acute respiratory syndrome coronavirus 2
QLTGYKKPASRELKVT

SEQ ID NO: 88368 - protein, 16 aa, Severe acute respiratory syndrome coronavirus 2
KKPASRELKVTFFPDL

SEQ ID NO: 88369 - protein, 16 aa, Severe acute respiratory syndrome coronavirus 2
KPASRELKVTFFPDLN

SEQ ID NO: 88370 - protein, 16 aa, Severe acute respiratory syndrome coronavirus 2
PASRELKVTFFPDLNG

SEQ ID NO: 88371 - protein, 16 aa, Severe acute respiratory syndrome coronavirus 2
ASRELKVTFFPDLNGD

SEQ ID NO: 88372 - protein, 16 aa, Severe acute respiratory syndrome coronavirus 2
SRELKVTFFPDLNGDV

SEQ ID NO: 88373 - protein, 16 aa, Severe acute respiratory syndrome coronavirus 2
RELKVTFFPDLNGDVV

SEQ ID NO: 88374 - protein, 16 aa, Severe acute respiratory syndrome coronavirus 2
ELKVTFFPDLNGDVVA

SEQ ID NO: 88375 - protein, 16 aa, Severe acute respiratory syndrome coronavirus 2
LKVTFFPDLNGDVVAI

SEQ ID NO: 88376 - protein, 16 aa, Severe acute respiratory syndrome coronavirus 2
KVTFFPDLNGDVVAID

SEQ ID NO: 88377 - protein, 16 aa, Severe acute respiratory syndrome coronavirus 2
VTFFPDLNGDVVAIDY

SEQ ID NO: 88378 - protein, 16 aa, Severe acute respiratory syndrome coronavirus 2
TFFPDLNGDVVAIDYK

SEQ ID NO: 88379 - protein, 16 aa, Severe acute respiratory syndrome coronavirus 2
FFPDLNGDVVAIDYKH

SEQ ID NO: 88380 - protein, 16 aa, Severe acute respiratory syndrome coronavirus 2
FPDLNGDVVAIDYKHY

SEQ ID NO: 88381 - protein, 16 aa, Severe acute respiratory syndrome coronavirus 2
PDLNGDVVAIDYKHYT

SEQ ID NO: 88382 - protein, 16 aa, Severe acute respiratory syndrome coronavirus 2
DLNGDVVAIDYKHYTP

SEQ ID NO: 88383 - protein, 16 aa, Severe acute respiratory syndrome coronavirus 2
LNGDVVAIDYKHYTPS

SEQ ID NO: 88384 - protein, 16 aa, Severe acute respiratory syndrome coronavirus 2
TNKATYKPNTWCIRCL

SEQ ID NO: 88385 - protein, 16 aa, Severe acute respiratory syndrome coronavirus 2
NKATYKPNTWCIRCLW

SEQ ID NO: 88386 - protein, 16 aa, Severe acute respiratory syndrome coronavirus 2
ECNVKTTEVVGDIILK

SEQ ID NO: 88387 - protein, 16 aa, Severe acute respiratory syndrome coronavirus 2
HGLAAVNSVPWDTIAN

SEQ ID NO: 88388 - protein, 16 aa, Severe acute respiratory syndrome coronavirus 2
GLAAVNSVPWDTIANY

SEQ ID NO: 88389 - protein, 16 aa, Severe acute respiratory syndrome coronavirus 2
NKVVSTTTNIVTRCLN

SEQ ID NO: 88390 - protein, 16 aa, Severe acute respiratory syndrome coronavirus 2
KVVSTTTNIVTRCLNR

SEQ ID NO: 88391 - protein, 16 aa, Severe acute respiratory syndrome coronavirus 2
VVSTTTNIVTRCLNRV

SEQ ID NO: 88392 - protein, 16 aa, Severe acute respiratory syndrome coronavirus 2
VSTTTNIVTRCLNRVC

SEQ ID NO: 88393 - protein, 16 aa, Severe acute respiratory syndrome coronavirus 2
NYMPYFFTLLLQLCTF

SEQ ID NO: 88394 - protein, 16 aa, Severe acute respiratory syndrome coronavirus 2
YMPYFFTLLLQLCTFT

SEQ ID NO: 88395 - protein, 16 aa, Severe acute respiratory syndrome coronavirus 2
MPYFFTLLLQLCTFTR

SEQ ID NO: 88396 - protein, 16 aa, Severe acute respiratory syndrome coronavirus 2
VKSVGKFCLEASFNYL

SEQ ID NO: 88397 - protein, 16 aa, Severe acute respiratory syndrome coronavirus 2
KSVGKFCLEASFNYLK

SEQ ID NO: 88398 - protein, 16 aa, Severe acute respiratory syndrome coronavirus 2
SVGKFCLEASFNYLKS

SEQ ID NO: 88399 - protein, 16 aa, Severe acute respiratory syndrome coronavirus 2
TYCTGSIPCSVCLSGL

SEQ ID NO: 88400 - protein, 16 aa, Severe acute respiratory syndrome coronavirus 2
YCTGSIPCSVCLSGLD

SEQ ID NO: 88401 - protein, 16 aa, Severe acute respiratory syndrome coronavirus 2
CTGSIPCSVCLSGLDS

SEQ ID NO: 88402 - protein, 16 aa, Severe acute respiratory syndrome coronavirus 2
SIPCSVCLSGLDSLDT

SEQ ID NO: 88403 - protein, 16 aa, Severe acute respiratory syndrome coronavirus 2
IPCSVCLSGLDSLDTY

SEQ ID NO: 88404 - protein, 16 aa, Severe acute respiratory syndrome coronavirus 2
PCSVCLSGLDSLDTYP

SEQ ID NO: 88405 - protein, 16 aa, Severe acute respiratory syndrome coronavirus 2
LETIQITISSFKWDLT

SEQ ID NO: 88406 - protein, 16 aa, Severe acute respiratory syndrome coronavirus 2
QITISSFKWDLTAFGL

SEQ ID NO: 88407 - protein, 16 aa, Severe acute respiratory syndrome coronavirus 2
ITISSFKWDLTAFGLV

SEQ ID NO: 88408 - protein, 16 aa, Severe acute respiratory syndrome coronavirus 2
TISSFKWDLTAFGLVA

SEQ ID NO: 88409 - protein, 16 aa, Severe acute respiratory syndrome coronavirus 2
ISSFKWDLTAFGLVAE

SEQ ID NO: 88410 - protein, 16 aa, Severe acute respiratory syndrome coronavirus 2
SSFKWDLTAFGLVAEW

SEQ ID NO: 88411 - protein, 16 aa, Severe acute respiratory syndrome coronavirus 2
SFKWDLTAFGLVAEWF

SEQ ID NO: 88412 - protein, 16 aa, Severe acute respiratory syndrome coronavirus 2
FKWDLTAFGLVAEWFL

SEQ ID NO: 88413 - protein, 16 aa, Severe acute respiratory syndrome coronavirus 2
KWDLTAFGLVAEWFLA

SEQ ID NO: 88414 - protein, 16 aa, Severe acute respiratory syndrome coronavirus 2
WDLTAFGLVAEWFLAY

SEQ ID NO: 88415 - protein, 16 aa, Severe acute respiratory syndrome coronavirus 2
DLTAFGLVAEWFLAYI

SEQ ID NO: 88416 - protein, 16 aa, Severe acute respiratory syndrome coronavirus 2
LTAFGLVAEWFLAYIL

SEQ ID NO: 88417 - protein, 16 aa, Severe acute respiratory syndrome coronavirus 2
TAFGLVAEWFLAYILF

SEQ ID NO: 88418 - protein, 16 aa, Severe acute respiratory syndrome coronavirus 2
AFGLVAEWFLAYILFT

SEQ ID NO: 88419 - protein, 16 aa, Severe acute respiratory syndrome coronavirus 2
FGLVAEWFLAYILFTR

SEQ ID NO: 88420 - protein, 16 aa, Severe acute respiratory syndrome coronavirus 2
GLVAEWFLAYILFTRF

SEQ ID NO: 88421 - protein, 16 aa, Severe acute respiratory syndrome coronavirus 2
LVAEWFLAYILFTRFF

SEQ ID NO: 88422 - protein, 16 aa, Severe acute respiratory syndrome coronavirus 2
VAEWFLAYILFTRFFY

SEQ ID NO: 88423 - protein, 16 aa, Severe acute respiratory syndrome coronavirus 2
AEWFLAYILFTRFFYV

SEQ ID NO: 88424 - protein, 16 aa, Severe acute respiratory syndrome coronavirus 2
EWFLAYILFTRFFYVL

SEQ ID NO: 88425 - protein, 16 aa, Severe acute respiratory syndrome coronavirus 2
WFLAYILFTRFFYVLG

SEQ ID NO: 88426 - protein, 16 aa, Severe acute respiratory syndrome coronavirus 2
FLAYILFTRFFYVLGL

SEQ ID NO: 88427 - protein, 16 aa, Severe acute respiratory syndrome coronavirus 2
LAYILFTRFFYVLGLA

SEQ ID NO: 88428 - protein, 16 aa, Severe acute respiratory syndrome coronavirus 2
AYILFTRFFYVLGLAA

SEQ ID NO: 88429 - protein, 16 aa, Severe acute respiratory syndrome coronavirus 2
YILFTRFFYVLGLAAI

SEQ ID NO: 88430 - protein, 16 aa, Severe acute respiratory syndrome coronavirus 2
ILFTRFFYVLGLAAIM

SEQ ID NO: 88431 - protein, 16 aa, Severe acute respiratory syndrome coronavirus 2
LFTRFFYVLGLAAIMQ

SEQ ID NO: 88432 - protein, 16 aa, Severe acute respiratory syndrome coronavirus 2
LGLAAIMQLFFSYFAV

SEQ ID NO: 88433 - protein, 16 aa, Severe acute respiratory syndrome coronavirus 2
IMQLFFSYFAVHFISN

SEQ ID NO: 88434 - protein, 16 aa, Severe acute respiratory syndrome coronavirus 2
MQLFFSYFAVHFISNS

SEQ ID NO: 88435 - protein, 16 aa, Severe acute respiratory syndrome coronavirus 2
QLFFSYFAVHFISNSW

SEQ ID NO: 88436 - protein, 16 aa, Severe acute respiratory syndrome coronavirus 2
LFFSYFAVHFISNSWL

SEQ ID NO: 88437 - protein, 16 aa, Severe acute respiratory syndrome coronavirus 2
FFSYFAVHFISNSWLM

SEQ ID NO: 88438 - protein, 16 aa, Severe acute respiratory syndrome coronavirus 2
FSYFAVHFISNSWLMW

SEQ ID NO: 88439 - protein, 16 aa, Severe acute respiratory syndrome coronavirus 2
SYFAVHFISNSWLMWL

SEQ ID NO: 88440 - protein, 16 aa, Severe acute respiratory syndrome coronavirus 2
YFAVHFISNSWLMWLI

SEQ ID NO: 88441 - protein, 16 aa, Severe acute respiratory syndrome coronavirus 2
FAVHFISNSWLMWLII

SEQ ID NO: 88442 - protein, 16 aa, Severe acute respiratory syndrome coronavirus 2
AVHFISNSWLMWLIIN

SEQ ID NO: 88443 - protein, 16 aa, Severe acute respiratory syndrome coronavirus 2
VHFISNSWLMWLIINL

SEQ ID NO: 88444 - protein, 16 aa, Severe acute respiratory syndrome coronavirus 2
HFISNSWLMWLIINLV

SEQ ID NO: 88445 - protein, 16 aa, Severe acute respiratory syndrome coronavirus 2
FISNSWLMWLIINLVQ

SEQ ID NO: 88446 - protein, 16 aa, Severe acute respiratory syndrome coronavirus 2
ISNSWLMWLIINLVQM

SEQ ID NO: 88447 - protein, 16 aa, Severe acute respiratory syndrome coronavirus 2
SNSWLMWLIINLVQMA

SEQ ID NO: 88448 - protein, 16 aa, Severe acute respiratory syndrome coronavirus 2
ISAMVRMYIFFASFYY

SEQ ID NO: 88449 - protein, 16 aa, Severe acute respiratory syndrome coronavirus 2
SAMVRMYIFFASFYYV

SEQ ID NO: 88450 - protein, 16 aa, Severe acute respiratory syndrome coronavirus 2
AMVRMYIFFASFYYVW

SEQ ID NO: 88451 - protein, 16 aa, Severe acute respiratory syndrome coronavirus 2
MVRMYIFFASFYYVWK

SEQ ID NO: 88452 - protein, 16 aa, Severe acute respiratory syndrome coronavirus 2
VRMYIFFASFYYVWKS

SEQ ID NO: 88453 - protein, 16 aa, Severe acute respiratory syndrome coronavirus 2
RMYIFFASFYYVWKSY

SEQ ID NO: 88454 - protein, 16 aa, Severe acute respiratory syndrome coronavirus 2
MYIFFASFYYVWKSYV

SEQ ID NO: 88455 - protein, 16 aa, Severe acute respiratory syndrome coronavirus 2
YIFFASFYYVWKSYVH

SEQ ID NO: 88456 - protein, 16 aa, Severe acute respiratory syndrome coronavirus 2
IFFASFYYVWKSYVHV

SEQ ID NO: 88457 - protein, 16 aa, Severe acute respiratory syndrome coronavirus 2
FFASFYYVWKSYVHVV

SEQ ID NO: 88458 - protein, 16 aa, Severe acute respiratory syndrome coronavirus 2
FASFYYVWKSYVHVVD

SEQ ID NO: 88459 - protein, 16 aa, Severe acute respiratory syndrome coronavirus 2
SSTCMMCYKRNRATRV

SEQ ID NO: 88460 - protein, 16 aa, Severe acute respiratory syndrome coronavirus 2
STCMMCYKRNRATRVE

SEQ ID NO: 88461 - protein, 16 aa, Severe acute respiratory syndrome coronavirus 2
TCMMCYKRNRATRVEC

SEQ ID NO: 88462 - protein, 16 aa, Severe acute respiratory syndrome coronavirus 2
CMMCYKRNRATRVECT

SEQ ID NO: 88463 - protein, 16 aa, Severe acute respiratory syndrome coronavirus 2
MMCYKRNRATRVECTT

SEQ ID NO: 88464 - protein, 16 aa, Severe acute respiratory syndrome coronavirus 2
MCYKRNRATRVECTTI

SEQ ID NO: 88465 - protein, 16 aa, Severe acute respiratory syndrome coronavirus 2
CYKRNRATRVECTTIV

SEQ ID NO: 88466 - protein, 16 aa, Severe acute respiratory syndrome coronavirus 2
YKRNRATRVECTTIVN

SEQ ID NO: 88467 - protein, 16 aa, Severe acute respiratory syndrome coronavirus 2
KRNRATRVECTTIVNG

SEQ ID NO: 88468 - protein, 16 aa, Severe acute respiratory syndrome coronavirus 2
RNRATRVECTTIVNGV

SEQ ID NO: 88469 - protein, 16 aa, Severe acute respiratory syndrome coronavirus 2
NRATRVECTTIVNGVR

SEQ ID NO: 88470 - protein, 16 aa, Severe acute respiratory syndrome coronavirus 2
SFYVYANGGKGFCKLH

SEQ ID NO: 88471 - protein, 16 aa, Severe acute respiratory syndrome coronavirus 2
FYVYANGGKGFCKLHN

SEQ ID NO: 88472 - protein, 16 aa, Severe acute respiratory syndrome coronavirus 2
ANGGKGFCKLHNWNCV

SEQ ID NO: 88473 - protein, 16 aa, Severe acute respiratory syndrome coronavirus 2
NGGKGFCKLHNWNCVN

SEQ ID NO: 88474 - protein, 16 aa, Severe acute respiratory syndrome coronavirus 2
GGKGFCKLHNWNCVNC

SEQ ID NO: 88475 - protein, 16 aa, Severe acute respiratory syndrome coronavirus 2
GKGFCKLHNWNCVNCD

SEQ ID NO: 88476 - protein, 16 aa, Severe acute respiratory syndrome coronavirus 2
KGFCKLHNWNCVNCDT

SEQ ID NO: 88477 - protein, 16 aa, Severe acute respiratory syndrome coronavirus 2
NCVNCDTFCAGSTFIS

SEQ ID NO: 88478 - protein, 16 aa, Severe acute respiratory syndrome coronavirus 2
CVNCDTFCAGSTFISD

SEQ ID NO: 88479 - protein, 16 aa, Severe acute respiratory syndrome coronavirus 2
VNCDTFCAGSTFISDE

SEQ ID NO: 88480 - protein, 16 aa, Severe acute respiratory syndrome coronavirus 2
NCDTFCAGSTFISDEV

SEQ ID NO: 88481 - protein, 16 aa, Severe acute respiratory syndrome coronavirus 2
CDTFCAGSTFISDEVA

SEQ ID NO: 88482 - protein, 16 aa, Severe acute respiratory syndrome coronavirus 2
DTFCAGSTFISDEVAR

SEQ ID NO: 88483 - protein, 16 aa, Severe acute respiratory syndrome coronavirus 2
TFCAGSTFISDEVARD

SEQ ID NO: 88484 - protein, 16 aa, Severe acute respiratory syndrome coronavirus 2
FCAGSTFISDEVARDL

SEQ ID NO: 88485 - protein, 16 aa, Severe acute respiratory syndrome coronavirus 2
CAGSTFISDEVARDLS

SEQ ID NO: 88486 - protein, 16 aa, Severe acute respiratory syndrome coronavirus 2
AGSTFISDEVARDLSL

SEQ ID NO: 88487 - protein, 16 aa, Severe acute respiratory syndrome coronavirus 2
GSTFISDEVARDLSLQ

SEQ ID NO: 88488 - protein, 16 aa, Severe acute respiratory syndrome coronavirus 2
STFISDEVARDLSLQF

SEQ ID NO: 88489 - protein, 16 aa, Severe acute respiratory syndrome coronavirus 2
TFISDEVARDLSLQFK

SEQ ID NO: 88490 - protein, 16 aa, Severe acute respiratory syndrome coronavirus 2
FISDEVARDLSLQFKR

SEQ ID NO: 88491 - protein, 16 aa, Severe acute respiratory syndrome coronavirus 2
ISDEVARDLSLQFKRP

SEQ ID NO: 88492 - protein, 16 aa, Severe acute respiratory syndrome coronavirus 2
SDEVARDLSLQFKRPI

SEQ ID NO: 88493 - protein, 16 aa, Severe acute respiratory syndrome coronavirus 2
LPINVIVFDGKSKCEE

SEQ ID NO: 88494 - protein, 16 aa, Severe acute respiratory syndrome coronavirus 2
PINVIVFDGKSKCEES

SEQ ID NO: 88495 - protein, 16 aa, Severe acute respiratory syndrome coronavirus 2
INVIVFDGKSKCEESS

SEQ ID NO: 88496 - protein, 16 aa, Severe acute respiratory syndrome coronavirus 2
NVIVFDGKSKCEESSA

SEQ ID NO: 88497 - protein, 16 aa, Severe acute respiratory syndrome coronavirus 2
SASVYYSQLMCQPILL

SEQ ID NO: 88498 - protein, 16 aa, Severe acute respiratory syndrome coronavirus 2
ASVYYSQLMCQPILLL

SEQ ID NO: 88499 - protein, 16 aa, Severe acute respiratory syndrome coronavirus 2
SVYYSQLMCQPILLLD

SEQ ID NO: 88500 - protein, 16 aa, Severe acute respiratory syndrome coronavirus 2
VYYSQLMCQPILLLDQ

SEQ ID NO: 88501 - protein, 16 aa, Severe acute respiratory syndrome coronavirus 2
YYSQLMCQPILLLDQA

SEQ ID NO: 88502 - protein, 16 aa, Severe acute respiratory syndrome coronavirus 2
YSQLMCQPILLLDQAL

SEQ ID NO: 88503 - protein, 16 aa, Severe acute respiratory syndrome coronavirus 2
SQLMCQPILLLDQALV

SEQ ID NO: 88504 - protein, 16 aa, Severe acute respiratory syndrome coronavirus 2
QLMCQPILLLDQALVS

SEQ ID NO: 88505 - protein, 16 aa, Severe acute respiratory syndrome coronavirus 2
LMCQPILLLDQALVSD

SEQ ID NO: 88506 - protein, 16 aa, Severe acute respiratory syndrome coronavirus 2
LDNVLSTFISAARQGF

SEQ ID NO: 88507 - protein, 16 aa, Severe acute respiratory syndrome coronavirus 2
DNVLSTFISAARQGFV

SEQ ID NO: 88508 - protein, 16 aa, Severe acute respiratory syndrome coronavirus 2
NVLSTFISAARQGFVD

SEQ ID NO: 88509 - protein, 16 aa, Severe acute respiratory syndrome coronavirus 2
VLSTFISAARQGFVDS

SEQ ID NO: 88510 - protein, 16 aa, Severe acute respiratory syndrome coronavirus 2
LSTFISAARQGFVDSD

SEQ ID NO: 88511 - protein, 16 aa, Severe acute respiratory syndrome coronavirus 2
STFISAARQGFVDSDV

SEQ ID NO: 88512 - protein, 16 aa, Severe acute respiratory syndrome coronavirus 2
TFISAARQGFVDSDVE

SEQ ID NO: 88513 - protein, 16 aa, Severe acute respiratory syndrome coronavirus 2
FISAARQGFVDSDVET

SEQ ID NO: 88514 - protein, 16 aa, Severe acute respiratory syndrome coronavirus 2
ISAARQGFVDSDVETK

SEQ ID NO: 88515 - protein, 16 aa, Severe acute respiratory syndrome coronavirus 2
VETKDVVECLKLSHQS

SEQ ID NO: 88516 - protein, 16 aa, Severe acute respiratory syndrome coronavirus 2
ETKDVVECLKLSHQSD

SEQ ID NO: 88517 - protein, 16 aa, Severe acute respiratory syndrome coronavirus 2
TKDVVECLKLSHQSDI

SEQ ID NO: 88518 - protein, 16 aa, Severe acute respiratory syndrome coronavirus 2
DVVECLKLSHQSDIEV

SEQ ID NO: 88519 - protein, 16 aa, Severe acute respiratory syndrome coronavirus 2
VVECLKLSHQSDIEVT

SEQ ID NO: 88520 - protein, 16 aa, Severe acute respiratory syndrome coronavirus 2
VECLKLSHQSDIEVTG

SEQ ID NO: 88521 - protein, 16 aa, Severe acute respiratory syndrome coronavirus 2
ECLKLSHQSDIEVTGD

SEQ ID NO: 88522 - protein, 16 aa, Severe acute respiratory syndrome coronavirus 2
CLKLSHQSDIEVTGDS

SEQ ID NO: 88523 - protein, 16 aa, Severe acute respiratory syndrome coronavirus 2
TGDSCNNYMLTYNKVE

SEQ ID NO: 88524 - protein, 16 aa, Severe acute respiratory syndrome coronavirus 2
SLSEQLRKQIRSAAKK

SEQ ID NO: 88525 - protein, 16 aa, Severe acute respiratory syndrome coronavirus 2
LSEQLRKQIRSAAKKN

SEQ ID NO: 88526 - protein, 16 aa, Severe acute respiratory syndrome coronavirus 2
SEQLRKQIRSAAKKNN

SEQ ID NO: 88527 - protein, 16 aa, Severe acute respiratory syndrome coronavirus 2
EQLRKQIRSAAKKNNL

SEQ ID NO: 88528 - protein, 16 aa, Severe acute respiratory syndrome coronavirus 2
QLRKQIRSAAKKNNLP

SEQ ID NO: 88529 - protein, 16 aa, Severe acute respiratory syndrome coronavirus 2
LRKQIRSAAKKNNLPF

SEQ ID NO: 88530 - protein, 16 aa, Severe acute respiratory syndrome coronavirus 2
RKQIRSAAKKNNLPFK

SEQ ID NO: 88531 - protein, 16 aa, Severe acute respiratory syndrome coronavirus 2
KQIRSAAKKNNLPFKL

SEQ ID NO: 88532 - protein, 16 aa, Severe acute respiratory syndrome coronavirus 2
QIRSAAKKNNLPFKLT

SEQ ID NO: 88533 - protein, 16 aa, Severe acute respiratory syndrome coronavirus 2
AKKNNLPFKLTCATTR

SEQ ID NO: 88534 - protein, 16 aa, Severe acute respiratory syndrome coronavirus 2
KKNNLPFKLTCATTRQ

SEQ ID NO: 88535 - protein, 16 aa, Severe acute respiratory syndrome coronavirus 2
KNNLPFKLTCATTRQV

SEQ ID NO: 88536 - protein, 16 aa, Severe acute respiratory syndrome coronavirus 2
NNLPFKLTCATTRQVV

SEQ ID NO: 88537 - protein, 16 aa, Severe acute respiratory syndrome coronavirus 2
NLPFKLTCATTRQVVN

SEQ ID NO: 88538 - protein, 16 aa, Severe acute respiratory syndrome coronavirus 2
LPFKLTCATTRQVVNV

SEQ ID NO: 88539 - protein, 16 aa, Severe acute respiratory syndrome coronavirus 2
PFKLTCATTRQVVNVV

SEQ ID NO: 88540 - protein, 16 aa, Severe acute respiratory syndrome coronavirus 2
FKLTCATTRQVVNVVT

SEQ ID NO: 88541 - protein, 16 aa, Severe acute respiratory syndrome coronavirus 2
KLTCATTRQVVNVVTT

SEQ ID NO: 88542 - protein, 16 aa, Severe acute respiratory syndrome coronavirus 2
LTCATTRQVVNVVTTK

SEQ ID NO: 88543 - protein, 16 aa, Severe acute respiratory syndrome coronavirus 2
TCATTRQVVNVVTTKI

SEQ ID NO: 88544 - protein, 16 aa, Severe acute respiratory syndrome coronavirus 2
CATTRQVVNVVTTKIA

SEQ ID NO: 88545 - protein, 16 aa, Severe acute respiratory syndrome coronavirus 2
ATTRQVVNVVTTKIAL

SEQ ID NO: 88546 - protein, 16 aa, Severe acute respiratory syndrome coronavirus 2
TTRQVVNVVTTKIALK

SEQ ID NO: 88547 - protein, 16 aa, Severe acute respiratory syndrome coronavirus 2
TRQVVNVVTTKIALKG

SEQ ID NO: 88548 - protein, 16 aa, Severe acute respiratory syndrome coronavirus 2
RQVVNVVTTKIALKGG

SEQ ID NO: 88549 - protein, 16 aa, Severe acute respiratory syndrome coronavirus 2
KIVNNWLKQLIKVTLV

SEQ ID NO: 88550 - protein, 16 aa, Severe acute respiratory syndrome coronavirus 2
IVNNWLKQLIKVTLVF

SEQ ID NO: 88551 - protein, 16 aa, Severe acute respiratory syndrome coronavirus 2
VNNWLKQLIKVTLVFL

SEQ ID NO: 88552 - protein, 16 aa, Severe acute respiratory syndrome coronavirus 2
NNWLKQLIKVTLVFLF

SEQ ID NO: 88553 - protein, 16 aa, Severe acute respiratory syndrome coronavirus 2
NWLKQLIKVTLVFLFV

SEQ ID NO: 88554 - protein, 16 aa, Severe acute respiratory syndrome coronavirus 2
FLFVAAIFYLITPVHV

SEQ ID NO: 88555 - protein, 16 aa, Severe acute respiratory syndrome coronavirus 2
DTWFSQRGGSYTNDKA

SEQ ID NO: 88556 - protein, 16 aa, Severe acute respiratory syndrome coronavirus 2
RGGSYTNDKACPLIAA

SEQ ID NO: 88557 - protein, 16 aa, Severe acute respiratory syndrome coronavirus 2
GGSYTNDKACPLIAAV

SEQ ID NO: 88558 - protein, 16 aa, Severe acute respiratory syndrome coronavirus 2
GSYTNDKACPLIAAVI

SEQ ID NO: 88559 - protein, 16 aa, Severe acute respiratory syndrome coronavirus 2
SYTNDKACPLIAAVIT

SEQ ID NO: 88560 - protein, 16 aa, Severe acute respiratory syndrome coronavirus 2
YTNDKACPLIAAVITR

SEQ ID NO: 88561 - protein, 16 aa, Severe acute respiratory syndrome coronavirus 2
TNDKACPLIAAVITRE

SEQ ID NO: 88562 - protein, 16 aa, Severe acute respiratory syndrome coronavirus 2
NDKACPLIAAVITREV

SEQ ID NO: 88563 - protein, 16 aa, Severe acute respiratory syndrome coronavirus 2
TTNGDFLHFLPRVFSA

SEQ ID NO: 88564 - protein, 16 aa, Severe acute respiratory syndrome coronavirus 2
TNGDFLHFLPRVFSAV

SEQ ID NO: 88565 - protein, 16 aa, Severe acute respiratory syndrome coronavirus 2
NGDFLHFLPRVFSAVG

SEQ ID NO: 88566 - protein, 16 aa, Severe acute respiratory syndrome coronavirus 2
GDFLHFLPRVFSAVGN

SEQ ID NO: 88567 - protein, 16 aa, Severe acute respiratory syndrome coronavirus 2
DFLHFLPRVFSAVGNI

SEQ ID NO: 88568 - protein, 16 aa, Severe acute respiratory syndrome coronavirus 2
FLHFLPRVFSAVGNIC

SEQ ID NO: 88569 - protein, 16 aa, Severe acute respiratory syndrome coronavirus 2
LHFLPRVFSAVGNICY

SEQ ID NO: 88570 - protein, 16 aa, Severe acute respiratory syndrome coronavirus 2
HFLPRVFSAVGNICYT

SEQ ID NO: 88571 - protein, 16 aa, Severe acute respiratory syndrome coronavirus 2
FLPRVFSAVGNICYTP

SEQ ID NO: 88572 - protein, 16 aa, Severe acute respiratory syndrome coronavirus 2
ATSACVLAAECTIFKD

SEQ ID NO: 88573 - protein, 16 aa, Severe acute respiratory syndrome coronavirus 2
TSACVLAAECTIFKDA

SEQ ID NO: 88574 - protein, 16 aa, Severe acute respiratory syndrome coronavirus 2
SACVLAAECTIFKDAS

SEQ ID NO: 88575 - protein, 16 aa, Severe acute respiratory syndrome coronavirus 2
ACVLAAECTIFKDASG

SEQ ID NO: 88576 - protein, 16 aa, Severe acute respiratory syndrome coronavirus 2
CVLAAECTIFKDASGK

SEQ ID NO: 88577 - protein, 16 aa, Severe acute respiratory syndrome coronavirus 2
VLAAECTIFKDASGKP

SEQ ID NO: 88578 - protein, 16 aa, Severe acute respiratory syndrome coronavirus 2
LAAECTIFKDASGKPV

SEQ ID NO: 88579 - protein, 16 aa, Severe acute respiratory syndrome coronavirus 2
AAECTIFKDASGKPVP

SEQ ID NO: 88580 - protein, 16 aa, Severe acute respiratory syndrome coronavirus 2
AECTIFKDASGKPVPY

SEQ ID NO: 88581 - protein, 16 aa, Severe acute respiratory syndrome coronavirus 2
ECTIFKDASGKPVPYC

SEQ ID NO: 88582 - protein, 16 aa, Severe acute respiratory syndrome coronavirus 2
CTIFKDASGKPVPYCY

SEQ ID NO: 88583 - protein, 16 aa, Severe acute respiratory syndrome coronavirus 2
TIFKDASGKPVPYCYD

SEQ ID NO: 88584 - protein, 16 aa, Severe acute respiratory syndrome coronavirus 2
IFKDASGKPVPYCYDT

SEQ ID NO: 88585 - protein, 16 aa, Severe acute respiratory syndrome coronavirus 2
FKDASGKPVPYCYDTN

SEQ ID NO: 88586 - protein, 16 aa, Severe acute respiratory syndrome coronavirus 2
SGKPVPYCYDTNVLEG

SEQ ID NO: 88587 - protein, 16 aa, Severe acute respiratory syndrome coronavirus 2
GKPVPYCYDTNVLEGS

SEQ ID NO: 88588 - protein, 16 aa, Severe acute respiratory syndrome coronavirus 2
KPVPYCYDTNVLEGSV

SEQ ID NO: 88589 - protein, 16 aa, Severe acute respiratory syndrome coronavirus 2
PVPYCYDTNVLEGSVA

SEQ ID NO: 88590 - protein, 16 aa, Severe acute respiratory syndrome coronavirus 2
VPYCYDTNVLEGSVAY

SEQ ID NO: 88591 - protein, 16 aa, Severe acute respiratory syndrome coronavirus 2
YCYDTNVLEGSVAYES

SEQ ID NO: 88592 - protein, 16 aa, Severe acute respiratory syndrome coronavirus 2
CYDTNVLEGSVAYESL

SEQ ID NO: 88593 - protein, 16 aa, Severe acute respiratory syndrome coronavirus 2
YDTNVLEGSVAYESLR

SEQ ID NO: 88594 - protein, 16 aa, Severe acute respiratory syndrome coronavirus 2
DTNVLEGSVAYESLRP

SEQ ID NO: 88595 - protein, 16 aa, Severe acute respiratory syndrome coronavirus 2
TNVLEGSVAYESLRPD

SEQ ID NO: 88596 - protein, 16 aa, Severe acute respiratory syndrome coronavirus 2
NVLEGSVAYESLRPDT

SEQ ID NO: 88597 - protein, 16 aa, Severe acute respiratory syndrome coronavirus 2
VLEGSVAYESLRPDTR

SEQ ID NO: 88598 - protein, 16 aa, Severe acute respiratory syndrome coronavirus 2
LEGSVAYESLRPDTRY

SEQ ID NO: 88599 - protein, 16 aa, Severe acute respiratory syndrome coronavirus 2
EGSVAYESLRPDTRYV

SEQ ID NO: 88600 - protein, 16 aa, Severe acute respiratory syndrome coronavirus 2
GSVAYESLRPDTRYVL

SEQ ID NO: 88601 - protein, 16 aa, Severe acute respiratory syndrome coronavirus 2
SVAYESLRPDTRYVLM

SEQ ID NO: 88602 - protein, 16 aa, Severe acute respiratory syndrome coronavirus 2
VAYESLRPDTRYVLMD

SEQ ID NO: 88603 - protein, 16 aa, Severe acute respiratory syndrome coronavirus 2
YESLRPDTRYVLMDGS

SEQ ID NO: 88604 - protein, 16 aa, Severe acute respiratory syndrome coronavirus 2
ESLRPDTRYVLMDGSI

SEQ ID NO: 88605 - protein, 16 aa, Severe acute respiratory syndrome coronavirus 2
SLRPDTRYVLMDGSII

SEQ ID NO: 88606 - protein, 16 aa, Severe acute respiratory syndrome coronavirus 2
LRPDTRYVLMDGSIIQ

SEQ ID NO: 88607 - protein, 16 aa, Severe acute respiratory syndrome coronavirus 2
RPDTRYVLMDGSIIQF

SEQ ID NO: 88608 - protein, 16 aa, Severe acute respiratory syndrome coronavirus 2
GVCVSTSGRWVLNNDY

SEQ ID NO: 88609 - protein, 16 aa, Severe acute respiratory syndrome coronavirus 2
VCVSTSGRWVLNNDYY

SEQ ID NO: 88610 - protein, 16 aa, Severe acute respiratory syndrome coronavirus 2
CVSTSGRWVLNNDYYR

SEQ ID NO: 88611 - protein, 16 aa, Severe acute respiratory syndrome coronavirus 2
VSTSGRWVLNNDYYRS

SEQ ID NO: 88612 - protein, 16 aa, Severe acute respiratory syndrome coronavirus 2
STSGRWVLNNDYYRSL

SEQ ID NO: 88613 - protein, 16 aa, Severe acute respiratory syndrome coronavirus 2
TSGRWVLNNDYYRSLP

SEQ ID NO: 88614 - protein, 16 aa, Severe acute respiratory syndrome coronavirus 2
SGRWVLNNDYYRSLPG

SEQ ID NO: 88615 - protein, 16 aa, Severe acute respiratory syndrome coronavirus 2
GRWVLNNDYYRSLPGV

SEQ ID NO: 88616 - protein, 16 aa, Severe acute respiratory syndrome coronavirus 2
RWVLNNDYYRSLPGVF

SEQ ID NO: 88617 - protein, 16 aa, Severe acute respiratory syndrome coronavirus 2
WVLNNDYYRSLPGVFC

SEQ ID NO: 88618 - protein, 16 aa, Severe acute respiratory syndrome coronavirus 2
VLNNDYYRSLPGVFCG

SEQ ID NO: 88619 - protein, 16 aa, Severe acute respiratory syndrome coronavirus 2
LNNDYYRSLPGVFCGV

SEQ ID NO: 88620 - protein, 16 aa, Severe acute respiratory syndrome coronavirus 2
NNDYYRSLPGVFCGVD

SEQ ID NO: 88621 - protein, 16 aa, Severe acute respiratory syndrome coronavirus 2
PLIQPIGALDISASIV

SEQ ID NO: 88622 - protein, 16 aa, Severe acute respiratory syndrome coronavirus 2
LIQPIGALDISASIVA

SEQ ID NO: 88623 - protein, 16 aa, Severe acute respiratory syndrome coronavirus 2
IQPIGALDISASIVAG

SEQ ID NO: 88624 - protein, 16 aa, Severe acute respiratory syndrome coronavirus 2
QPIGALDISASIVAGG

SEQ ID NO: 88625 - protein, 16 aa, Severe acute respiratory syndrome coronavirus 2
PIGALDISASIVAGGI

SEQ ID NO: 88626 - protein, 16 aa, Severe acute respiratory syndrome coronavirus 2
VLCLTPVYSFLPGVYS

SEQ ID NO: 88627 - protein, 16 aa, Severe acute respiratory syndrome coronavirus 2
LCLTPVYSFLPGVYSV

SEQ ID NO: 88628 - protein, 16 aa, Severe acute respiratory syndrome coronavirus 2
FLPGVYSVIYLYLTFY

SEQ ID NO: 88629 - protein, 16 aa, Severe acute respiratory syndrome coronavirus 2
LPGVYSVIYLYLTFYL

SEQ ID NO: 88630 - protein, 16 aa, Severe acute respiratory syndrome coronavirus 2
PGVYSVIYLYLTFYLT

SEQ ID NO: 88631 - protein, 16 aa, Severe acute respiratory syndrome coronavirus 2
GVYSVIYLYLTFYLTN

SEQ ID NO: 88632 - protein, 16 aa, Severe acute respiratory syndrome coronavirus 2
VYSVIYLYLTFYLTND

SEQ ID NO: 88633 - protein, 16 aa, Severe acute respiratory syndrome coronavirus 2
YSVIYLYLTFYLTNDV

SEQ ID NO: 88634 - protein, 16 aa, Severe acute respiratory syndrome coronavirus 2
SVIYLYLTFYLTNDVS

SEQ ID NO: 88635 - protein, 16 aa, Severe acute respiratory syndrome coronavirus 2
VIYLYLTFYLTNDVSF

SEQ ID NO: 88636 - protein, 16 aa, Severe acute respiratory syndrome coronavirus 2
IYLYLTFYLTNDVSFL

SEQ ID NO: 88637 - protein, 16 aa, Severe acute respiratory syndrome coronavirus 2
YLYLTFYLTNDVSFLA

SEQ ID NO: 88638 - protein, 16 aa, Severe acute respiratory syndrome coronavirus 2
LYLTFYLTNDVSFLAH

SEQ ID NO: 88639 - protein, 16 aa, Severe acute respiratory syndrome coronavirus 2
YLTFYLTNDVSFLAHI

SEQ ID NO: 88640 - protein, 16 aa, Severe acute respiratory syndrome coronavirus 2
LTFYLTNDVSFLAHIQ

SEQ ID NO: 88641 - protein, 16 aa, Severe acute respiratory syndrome coronavirus 2
TFYLTNDVSFLAHIQW

SEQ ID NO: 88642 - protein, 16 aa, Severe acute respiratory syndrome coronavirus 2
FYLTNDVSFLAHIQWM

SEQ ID NO: 88643 - protein, 16 aa, Severe acute respiratory syndrome coronavirus 2
YLTNDVSFLAHIQWMV

SEQ ID NO: 88644 - protein, 16 aa, Severe acute respiratory syndrome coronavirus 2
LTNDVSFLAHIQWMVM

SEQ ID NO: 88645 - protein, 16 aa, Severe acute respiratory syndrome coronavirus 2
HIQWMVMFTPLVPFWI

SEQ ID NO: 88646 - protein, 16 aa, Severe acute respiratory syndrome coronavirus 2
IQWMVMFTPLVPFWIT

SEQ ID NO: 88647 - protein, 16 aa, Severe acute respiratory syndrome coronavirus 2
QWMVMFTPLVPFWITI

SEQ ID NO: 88648 - protein, 16 aa, Severe acute respiratory syndrome coronavirus 2
TPLVPFWITIAYIICI

SEQ ID NO: 88649 - protein, 16 aa, Severe acute respiratory syndrome coronavirus 2
YIICISTKHFYWFFSN

SEQ ID NO: 88650 - protein, 16 aa, Severe acute respiratory syndrome coronavirus 2
IICISTKHFYWFFSNY

SEQ ID NO: 88651 - protein, 16 aa, Severe acute respiratory syndrome coronavirus 2
ICISTKHFYWFFSNYL

SEQ ID NO: 88652 - protein, 16 aa, Severe acute respiratory syndrome coronavirus 2
CISTKHFYWFFSNYLK

SEQ ID NO: 88653 - protein, 16 aa, Severe acute respiratory syndrome coronavirus 2
ISTKHFYWFFSNYLKR

SEQ ID NO: 88654 - protein, 16 aa, Severe acute respiratory syndrome coronavirus 2
STKHFYWFFSNYLKRR

SEQ ID NO: 88655 - protein, 16 aa, Severe acute respiratory syndrome coronavirus 2
TKHFYWFFSNYLKRRV

SEQ ID NO: 88656 - protein, 16 aa, Severe acute respiratory syndrome coronavirus 2
KHFYWFFSNYLKRRVV

SEQ ID NO: 88657 - protein, 16 aa, Severe acute respiratory syndrome coronavirus 2
HFYWFFSNYLKRRVVF

SEQ ID NO: 88658 - protein, 16 aa, Severe acute respiratory syndrome coronavirus 2
FYWFFSNYLKRRVVFN

SEQ ID NO: 88659 - protein, 16 aa, Severe acute respiratory syndrome coronavirus 2
YWFFSNYLKRRVVFNG

SEQ ID NO: 88660 - protein, 16 aa, Severe acute respiratory syndrome coronavirus 2
WFFSNYLKRRVVFNGV

SEQ ID NO: 88661 - protein, 16 aa, Severe acute respiratory syndrome coronavirus 2
FFSNYLKRRVVFNGVS

SEQ ID NO: 88662 - protein, 16 aa, Severe acute respiratory syndrome coronavirus 2
FSNYLKRRVVFNGVSF

SEQ ID NO: 88663 - protein, 16 aa, Severe acute respiratory syndrome coronavirus 2
SNYLKRRVVFNGVSFS

SEQ ID NO: 88664 - protein, 16 aa, Severe acute respiratory syndrome coronavirus 2
NYLKRRVVFNGVSFST

SEQ ID NO: 88665 - protein, 16 aa, Severe acute respiratory syndrome coronavirus 2
YLKRRVVFNGVSFSTF

SEQ ID NO: 88666 - protein, 16 aa, Severe acute respiratory syndrome coronavirus 2
LKRRVVFNGVSFSTFE

SEQ ID NO: 88667 - protein, 16 aa, Severe acute respiratory syndrome coronavirus 2
KRRVVFNGVSFSTFEE

SEQ ID NO: 88668 - protein, 16 aa, Severe acute respiratory syndrome coronavirus 2
RRVVFNGVSFSTFEEA

SEQ ID NO: 88669 - protein, 16 aa, Severe acute respiratory syndrome coronavirus 2
RVVFNGVSFSTFEEAA

SEQ ID NO: 88670 - protein, 16 aa, Severe acute respiratory syndrome coronavirus 2
VVFNGVSFSTFEEAAL

SEQ ID NO: 88671 - protein, 16 aa, Severe acute respiratory syndrome coronavirus 2
VFNGVSFSTFEEAALC

SEQ ID NO: 88672 - protein, 16 aa, Severe acute respiratory syndrome coronavirus 2
FNGVSFSTFEEAALCT

SEQ ID NO: 88673 - protein, 16 aa, Severe acute respiratory syndrome coronavirus 2
NGVSFSTFEEAALCTF

SEQ ID NO: 88674 - protein, 16 aa, Severe acute respiratory syndrome coronavirus 2
GVSFSTFEEAALCTFL

SEQ ID NO: 88675 - protein, 16 aa, Severe acute respiratory syndrome coronavirus 2
VSFSTFEEAALCTFLL

SEQ ID NO: 88676 - protein, 16 aa, Severe acute respiratory syndrome coronavirus 2
SFSTFEEAALCTFLLN

SEQ ID NO: 88677 - protein, 16 aa, Severe acute respiratory syndrome coronavirus 2
FSTFEEAALCTFLLNK

SEQ ID NO: 88678 - protein, 16 aa, Severe acute respiratory syndrome coronavirus 2
STFEEAALCTFLLNKE

SEQ ID NO: 88679 - protein, 16 aa, Severe acute respiratory syndrome coronavirus 2
TFEEAALCTFLLNKEM

SEQ ID NO: 88680 - protein, 16 aa, Severe acute respiratory syndrome coronavirus 2
FEEAALCTFLLNKEMY

SEQ ID NO: 88681 - protein, 16 aa, Severe acute respiratory syndrome coronavirus 2
EEAALCTFLLNKEMYL

SEQ ID NO: 88682 - protein, 16 aa, Severe acute respiratory syndrome coronavirus 2
EAALCTFLLNKEMYLK

SEQ ID NO: 88683 - protein, 16 aa, Severe acute respiratory syndrome coronavirus 2
AALCTFLLNKEMYLKL

SEQ ID NO: 88684 - protein, 16 aa, Severe acute respiratory syndrome coronavirus 2
ALCTFLLNKEMYLKLR

SEQ ID NO: 88685 - protein, 16 aa, Severe acute respiratory syndrome coronavirus 2
LCTFLLNKEMYLKLRS

SEQ ID NO: 88686 - protein, 16 aa, Severe acute respiratory syndrome coronavirus 2
CTFLLNKEMYLKLRSD

SEQ ID NO: 88687 - protein, 16 aa, Severe acute respiratory syndrome coronavirus 2
TFLLNKEMYLKLRSDV

SEQ ID NO: 88688 - protein, 16 aa, Severe acute respiratory syndrome coronavirus 2
FLLNKEMYLKLRSDVL

SEQ ID NO: 88689 - protein, 16 aa, Severe acute respiratory syndrome coronavirus 2
LLNKEMYLKLRSDVLL

SEQ ID NO: 88690 - protein, 16 aa, Severe acute respiratory syndrome coronavirus 2
LNKEMYLKLRSDVLLP

SEQ ID NO: 88691 - protein, 16 aa, Severe acute respiratory syndrome coronavirus 2
LAKALNDFSNSGSDVL

SEQ ID NO: 88692 - protein, 16 aa, Severe acute respiratory syndrome coronavirus 2
AKALNDFSNSGSDVLY

SEQ ID NO: 88693 - protein, 16 aa, Severe acute respiratory syndrome coronavirus 2
KALNDFSNSGSDVLYQ

SEQ ID NO: 88694 - protein, 16 aa, Severe acute respiratory syndrome coronavirus 2
ALNDFSNSGSDVLYQP

SEQ ID NO: 88695 - protein, 16 aa, Severe acute respiratory syndrome coronavirus 2
LNDFSNSGSDVLYQPP

SEQ ID NO: 88696 - protein, 16 aa, Severe acute respiratory syndrome coronavirus 2
NDFSNSGSDVLYQPPQ

SEQ ID NO: 88697 - protein, 16 aa, Severe acute respiratory syndrome coronavirus 2
GSDVLYQPPQTSITSA

SEQ ID NO: 88698 - protein, 16 aa, Severe acute respiratory syndrome coronavirus 2
SDVLYQPPQTSITSAV

SEQ ID NO: 88699 - protein, 16 aa, Severe acute respiratory syndrome coronavirus 2
DVLYQPPQTSITSAVL

SEQ ID NO: 88700 - protein, 16 aa, Severe acute respiratory syndrome coronavirus 2
VLYQPPQTSITSAVLQ

SEQ ID NO: 88701 - protein, 16 aa, Severe acute respiratory syndrome coronavirus 2
CMVQVTCGTTTLNGLW

SEQ ID NO: 88702 - protein, 16 aa, Severe acute respiratory syndrome coronavirus 2
MVQVTCGTTTLNGLWL

SEQ ID NO: 88703 - protein, 16 aa, Severe acute respiratory syndrome coronavirus 2
VQVTCGTTTLNGLWLD

SEQ ID NO: 88704 - protein, 16 aa, Severe acute respiratory syndrome coronavirus 2
QVTCGTTTLNGLWLDD

SEQ ID NO: 88705 - protein, 16 aa, Severe acute respiratory syndrome coronavirus 2
VTCGTTTLNGLWLDDV

SEQ ID NO: 88706 - protein, 16 aa, Severe acute respiratory syndrome coronavirus 2
TCGTTTLNGLWLDDVV

SEQ ID NO: 88707 - protein, 16 aa, Severe acute respiratory syndrome coronavirus 2
CGTTTLNGLWLDDVVY

SEQ ID NO: 88708 - protein, 16 aa, Severe acute respiratory syndrome coronavirus 2
GTTTLNGLWLDDVVYC

SEQ ID NO: 88709 - protein, 16 aa, Severe acute respiratory syndrome coronavirus 2
TTTLNGLWLDDVVYCP

SEQ ID NO: 88710 - protein, 16 aa, Severe acute respiratory syndrome coronavirus 2
TTLNGLWLDDVVYCPR

SEQ ID NO: 88711 - protein, 16 aa, Severe acute respiratory syndrome coronavirus 2
TLNGLWLDDVVYCPRH

SEQ ID NO: 88712 - protein, 16 aa, Severe acute respiratory syndrome coronavirus 2
LNGLWLDDVVYCPRHV

SEQ ID NO: 88713 - protein, 16 aa, Severe acute respiratory syndrome coronavirus 2
NGLWLDDVVYCPRHVI

SEQ ID NO: 88714 - protein, 16 aa, Severe acute respiratory syndrome coronavirus 2
GLWLDDVVYCPRHVIC

SEQ ID NO: 88715 - protein, 16 aa, Severe acute respiratory syndrome coronavirus 2
SFCYMHHMELPTGVHA

SEQ ID NO: 88716 - protein, 16 aa, Severe acute respiratory syndrome coronavirus 2
FCYMHHMELPTGVHAG

SEQ ID NO: 88717 - protein, 16 aa, Severe acute respiratory syndrome coronavirus 2
CYMHHMELPTGVHAGT

SEQ ID NO: 88718 - protein, 16 aa, Severe acute respiratory syndrome coronavirus 2
ELPTGVHAGTDLEGNF

SEQ ID NO: 88719 - protein, 16 aa, Severe acute respiratory syndrome coronavirus 2
LPTGVHAGTDLEGNFY

SEQ ID NO: 88720 - protein, 16 aa, Severe acute respiratory syndrome coronavirus 2
PTGVHAGTDLEGNFYG

SEQ ID NO: 88721 - protein, 16 aa, Severe acute respiratory syndrome coronavirus 2
AGTDTTITVNVLAWLY

SEQ ID NO: 88722 - protein, 16 aa, Severe acute respiratory syndrome coronavirus 2
GTDTTITVNVLAWLYA

SEQ ID NO: 88723 - protein, 16 aa, Severe acute respiratory syndrome coronavirus 2
TDTTITVNVLAWLYAA

SEQ ID NO: 88724 - protein, 16 aa, Severe acute respiratory syndrome coronavirus 2
DTTITVNVLAWLYAAV

SEQ ID NO: 88725 - protein, 16 aa, Severe acute respiratory syndrome coronavirus 2
TITVNVLAWLYAAVIN

SEQ ID NO: 88726 - protein, 16 aa, Severe acute respiratory syndrome coronavirus 2
ITVNVLAWLYAAVING

SEQ ID NO: 88727 - protein, 16 aa, Severe acute respiratory syndrome coronavirus 2
TVNVLAWLYAAVINGD

SEQ ID NO: 88728 - protein, 16 aa, Severe acute respiratory syndrome coronavirus 2
VNVLAWLYAAVINGDR

SEQ ID NO: 88729 - protein, 16 aa, Severe acute respiratory syndrome coronavirus 2
NVLAWLYAAVINGDRW

SEQ ID NO: 88730 - protein, 16 aa, Severe acute respiratory syndrome coronavirus 2
VLAWLYAAVINGDRWF

SEQ ID NO: 88731 - protein, 16 aa, Severe acute respiratory syndrome coronavirus 2
NRFTTTLNDFNLVAMK

SEQ ID NO: 88732 - protein, 16 aa, Severe acute respiratory syndrome coronavirus 2
NLVAMKYNYEPLTQDH

SEQ ID NO: 88733 - protein, 16 aa, Severe acute respiratory syndrome coronavirus 2
LVAMKYNYEPLTQDHV

SEQ ID NO: 88734 - protein, 16 aa, Severe acute respiratory syndrome coronavirus 2
TILGSALLEDEFTPFD

SEQ ID NO: 88735 - protein, 16 aa, Severe acute respiratory syndrome coronavirus 2
ILGSALLEDEFTPFDV

SEQ ID NO: 88736 - protein, 16 aa, Severe acute respiratory syndrome coronavirus 2
LGSALLEDEFTPFDVV

SEQ ID NO: 88737 - protein, 16 aa, Severe acute respiratory syndrome coronavirus 2
GSALLEDEFTPFDVVR

SEQ ID NO: 88738 - protein, 16 aa, Severe acute respiratory syndrome coronavirus 2
SALLEDEFTPFDVVRQ

SEQ ID NO: 88739 - protein, 16 aa, Severe acute respiratory syndrome coronavirus 2
ALLEDEFTPFDVVRQC

SEQ ID NO: 88740 - protein, 16 aa, Severe acute respiratory syndrome coronavirus 2
LLEDEFTPFDVVRQCS

SEQ ID NO: 88741 - protein, 16 aa, Severe acute respiratory syndrome coronavirus 2
LEDEFTPFDVVRQCSG

SEQ ID NO: 88742 - protein, 16 aa, Severe acute respiratory syndrome coronavirus 2
EDEFTPFDVVRQCSGV

SEQ ID NO: 88743 - protein, 16 aa, Severe acute respiratory syndrome coronavirus 2
DEFTPFDVVRQCSGVT

SEQ ID NO: 88744 - protein, 16 aa, Severe acute respiratory syndrome coronavirus 2
EFTPFDVVRQCSGVTF

SEQ ID NO: 88745 - protein, 16 aa, Severe acute respiratory syndrome coronavirus 2
FTPFDVVRQCSGVTFQ

SEQ ID NO: 88746 - protein, 16 aa, Severe acute respiratory syndrome coronavirus 2
SAVKRTIKGTHHWLLL

SEQ ID NO: 88747 - protein, 16 aa, Severe acute respiratory syndrome coronavirus 2
AVKRTIKGTHHWLLLT

SEQ ID NO: 88748 - protein, 16 aa, Severe acute respiratory syndrome coronavirus 2
VKRTIKGTHHWLLLTI

SEQ ID NO: 88749 - protein, 16 aa, Severe acute respiratory syndrome coronavirus 2
KRTIKGTHHWLLLTIL

SEQ ID NO: 88750 - protein, 16 aa, Severe acute respiratory syndrome coronavirus 2
RTIKGTHHWLLLTILT

SEQ ID NO: 88751 - protein, 16 aa, Severe acute respiratory syndrome coronavirus 2
TIKGTHHWLLLTILTS

SEQ ID NO: 88752 - protein, 16 aa, Severe acute respiratory syndrome coronavirus 2
IKGTHHWLLLTILTSL

SEQ ID NO: 88753 - protein, 16 aa, Severe acute respiratory syndrome coronavirus 2
KGTHHWLLLTILTSLL

SEQ ID NO: 88754 - protein, 16 aa, Severe acute respiratory syndrome coronavirus 2
GTHHWLLLTILTSLLV

SEQ ID NO: 88755 - protein, 16 aa, Severe acute respiratory syndrome coronavirus 2
THHWLLLTILTSLLVL

SEQ ID NO: 88756 - protein, 16 aa, Severe acute respiratory syndrome coronavirus 2
HHWLLLTILTSLLVLV

SEQ ID NO: 88757 - protein, 16 aa, Severe acute respiratory syndrome coronavirus 2
HWLLLTILTSLLVLVQ

SEQ ID NO: 88758 - protein, 16 aa, Severe acute respiratory syndrome coronavirus 2
WLLLTILTSLLVLVQS

SEQ ID NO: 88759 - protein, 16 aa, Severe acute respiratory syndrome coronavirus 2
LLLTILTSLLVLVQST

SEQ ID NO: 88760 - protein, 16 aa, Severe acute respiratory syndrome coronavirus 2
LLTILTSLLVLVQSTQ

SEQ ID NO: 88761 - protein, 16 aa, Severe acute respiratory syndrome coronavirus 2
LTILTSLLVLVQSTQW

SEQ ID NO: 88762 - protein, 16 aa, Severe acute respiratory syndrome coronavirus 2
TILTSLLVLVQSTQWS

SEQ ID NO: 88763 - protein, 16 aa, Severe acute respiratory syndrome coronavirus 2
ILTSLLVLVQSTQWSL

SEQ ID NO: 88764 - protein, 16 aa, Severe acute respiratory syndrome coronavirus 2
LTSLLVLVQSTQWSLF

SEQ ID NO: 88765 - protein, 16 aa, Severe acute respiratory syndrome coronavirus 2
MGIIAMSAFAMMFVKH

SEQ ID NO: 88766 - protein, 16 aa, Severe acute respiratory syndrome coronavirus 2
GIIAMSAFAMMFVKHK

SEQ ID NO: 88767 - protein, 16 aa, Severe acute respiratory syndrome coronavirus 2
IIAMSAFAMMFVKHKH

SEQ ID NO: 88768 - protein, 16 aa, Severe acute respiratory syndrome coronavirus 2
IAMSAFAMMFVKHKHA

SEQ ID NO: 88769 - protein, 16 aa, Severe acute respiratory syndrome coronavirus 2
AMSAFAMMFVKHKHAF

SEQ ID NO: 88770 - protein, 16 aa, Severe acute respiratory syndrome coronavirus 2
MSAFAMMFVKHKHAFL

SEQ ID NO: 88771 - protein, 16 aa, Severe acute respiratory syndrome coronavirus 2
SAFAMMFVKHKHAFLC

SEQ ID NO: 88772 - protein, 16 aa, Severe acute respiratory syndrome coronavirus 2
AFAMMFVKHKHAFLCL

SEQ ID NO: 88773 - protein, 16 aa, Severe acute respiratory syndrome coronavirus 2
FAMMFVKHKHAFLCLF

SEQ ID NO: 88774 - protein, 16 aa, Severe acute respiratory syndrome coronavirus 2
AMMFVKHKHAFLCLFL

SEQ ID NO: 88775 - protein, 16 aa, Severe acute respiratory syndrome coronavirus 2
MMFVKHKHAFLCLFLL

SEQ ID NO: 88776 - protein, 16 aa, Severe acute respiratory syndrome coronavirus 2
MFVKHKHAFLCLFLLP

SEQ ID NO: 88777 - protein, 16 aa, Severe acute respiratory syndrome coronavirus 2
FVKHKHAFLCLFLLPS

SEQ ID NO: 88778 - protein, 16 aa, Severe acute respiratory syndrome coronavirus 2
TVAYFNMVYMPASWVM

SEQ ID NO: 88779 - protein, 16 aa, Severe acute respiratory syndrome coronavirus 2
VAYFNMVYMPASWVMR

SEQ ID NO: 88780 - protein, 16 aa, Severe acute respiratory syndrome coronavirus 2
AYFNMVYMPASWVMRI

SEQ ID NO: 88781 - protein, 16 aa, Severe acute respiratory syndrome coronavirus 2
YFNMVYMPASWVMRIM

SEQ ID NO: 88782 - protein, 16 aa, Severe acute respiratory syndrome coronavirus 2
FNMVYMPASWVMRIMT

SEQ ID NO: 88783 - protein, 16 aa, Severe acute respiratory syndrome coronavirus 2
NMVYMPASWVMRIMTW

SEQ ID NO: 88784 - protein, 16 aa, Severe acute respiratory syndrome coronavirus 2
MVYMPASWVMRIMTWL

SEQ ID NO: 88785 - protein, 16 aa, Severe acute respiratory syndrome coronavirus 2
MVDTSLSGFKLKDCVM

SEQ ID NO: 88786 - protein, 16 aa, Severe acute respiratory syndrome coronavirus 2
VDTSLSGFKLKDCVMY

SEQ ID NO: 88787 - protein, 16 aa, Severe acute respiratory syndrome coronavirus 2
DTSLSGFKLKDCVMYA

SEQ ID NO: 88788 - protein, 16 aa, Severe acute respiratory syndrome coronavirus 2
TSLSGFKLKDCVMYAS

SEQ ID NO: 88789 - protein, 16 aa, Severe acute respiratory syndrome coronavirus 2
SLSGFKLKDCVMYASA

SEQ ID NO: 88790 - protein, 16 aa, Severe acute respiratory syndrome coronavirus 2
LSGFKLKDCVMYASAV

SEQ ID NO: 88791 - protein, 16 aa, Severe acute respiratory syndrome coronavirus 2
SGFKLKDCVMYASAVV

SEQ ID NO: 88792 - protein, 16 aa, Severe acute respiratory syndrome coronavirus 2
GFKLKDCVMYASAVVL

SEQ ID NO: 88793 - protein, 16 aa, Severe acute respiratory syndrome coronavirus 2
FKLKDCVMYASAVVLL

SEQ ID NO: 88794 - protein, 16 aa, Severe acute respiratory syndrome coronavirus 2
KLKDCVMYASAVVLLI

SEQ ID NO: 88795 - protein, 16 aa, Severe acute respiratory syndrome coronavirus 2
LKDCVMYASAVVLLIL

SEQ ID NO: 88796 - protein, 16 aa, Severe acute respiratory syndrome coronavirus 2
KDCVMYASAVVLLILM

SEQ ID NO: 88797 - protein, 16 aa, Severe acute respiratory syndrome coronavirus 2
DCVMYASAVVLLILMT

SEQ ID NO: 88798 - protein, 16 aa, Severe acute respiratory syndrome coronavirus 2
IVFMCVEYCPIFFITG

SEQ ID NO: 88799 - protein, 16 aa, Severe acute respiratory syndrome coronavirus 2
VFMCVEYCPIFFITGN

SEQ ID NO: 88800 - protein, 16 aa, Severe acute respiratory syndrome coronavirus 2
FMCVEYCPIFFITGNT

SEQ ID NO: 88801 - protein, 16 aa, Severe acute respiratory syndrome coronavirus 2
MCVEYCPIFFITGNTL

SEQ ID NO: 88802 - protein, 16 aa, Severe acute respiratory syndrome coronavirus 2
CIMLVYCFLGYFCTCY

SEQ ID NO: 88803 - protein, 16 aa, Severe acute respiratory syndrome coronavirus 2
IMLVYCFLGYFCTCYF

SEQ ID NO: 88804 - protein, 16 aa, Severe acute respiratory syndrome coronavirus 2
MLVYCFLGYFCTCYFG

SEQ ID NO: 88805 - protein, 16 aa, Severe acute respiratory syndrome coronavirus 2
LVYCFLGYFCTCYFGL

SEQ ID NO: 88806 - protein, 16 aa, Severe acute respiratory syndrome coronavirus 2
VYCFLGYFCTCYFGLF

SEQ ID NO: 88807 - protein, 16 aa, Severe acute respiratory syndrome coronavirus 2
YCFLGYFCTCYFGLFC

SEQ ID NO: 88808 - protein, 16 aa, Severe acute respiratory syndrome coronavirus 2
CFLGYFCTCYFGLFCL

SEQ ID NO: 88809 - protein, 16 aa, Severe acute respiratory syndrome coronavirus 2
CYFGLFCLLNRYFRLT

SEQ ID NO: 88810 - protein, 16 aa, Severe acute respiratory syndrome coronavirus 2
YFGLFCLLNRYFRLTL

SEQ ID NO: 88811 - protein, 16 aa, Severe acute respiratory syndrome coronavirus 2
FGLFCLLNRYFRLTLG

SEQ ID NO: 88812 - protein, 16 aa, Severe acute respiratory syndrome coronavirus 2
GLFCLLNRYFRLTLGV

SEQ ID NO: 88813 - protein, 16 aa, Severe acute respiratory syndrome coronavirus 2
LFCLLNRYFRLTLGVY

SEQ ID NO: 88814 - protein, 16 aa, Severe acute respiratory syndrome coronavirus 2
FCLLNRYFRLTLGVYD

SEQ ID NO: 88815 - protein, 16 aa, Severe acute respiratory syndrome coronavirus 2
CLLNRYFRLTLGVYDY

SEQ ID NO: 88816 - protein, 16 aa, Severe acute respiratory syndrome coronavirus 2
LLNRYFRLTLGVYDYL

SEQ ID NO: 88817 - protein, 16 aa, Severe acute respiratory syndrome coronavirus 2
NRYFRLTLGVYDYLVS

SEQ ID NO: 88818 - protein, 16 aa, Severe acute respiratory syndrome coronavirus 2
RYFRLTLGVYDYLVST

SEQ ID NO: 88819 - protein, 16 aa, Severe acute respiratory syndrome coronavirus 2
YFRLTLGVYDYLVSTQ

SEQ ID NO: 88820 - protein, 16 aa, Severe acute respiratory syndrome coronavirus 2
FRLTLGVYDYLVSTQE

SEQ ID NO: 88821 - protein, 16 aa, Severe acute respiratory syndrome coronavirus 2
RLTLGVYDYLVSTQEF

SEQ ID NO: 88822 - protein, 16 aa, Severe acute respiratory syndrome coronavirus 2
LTLGVYDYLVSTQEFR

SEQ ID NO: 88823 - protein, 16 aa, Severe acute respiratory syndrome coronavirus 2
TLGVYDYLVSTQEFRY

SEQ ID NO: 88824 - protein, 16 aa, Severe acute respiratory syndrome coronavirus 2
LGVYDYLVSTQEFRYM

SEQ ID NO: 88825 - protein, 16 aa, Severe acute respiratory syndrome coronavirus 2
GVYDYLVSTQEFRYMN

SEQ ID NO: 88826 - protein, 16 aa, Severe acute respiratory syndrome coronavirus 2
VYDYLVSTQEFRYMNS

SEQ ID NO: 88827 - protein, 16 aa, Severe acute respiratory syndrome coronavirus 2
YDYLVSTQEFRYMNSQ

SEQ ID NO: 88828 - protein, 16 aa, Severe acute respiratory syndrome coronavirus 2
DYLVSTQEFRYMNSQG

SEQ ID NO: 88829 - protein, 16 aa, Severe acute respiratory syndrome coronavirus 2
YLVSTQEFRYMNSQGL

SEQ ID NO: 88830 - protein, 16 aa, Severe acute respiratory syndrome coronavirus 2
SKMSDVKCTSVVLLSV

SEQ ID NO: 88831 - protein, 16 aa, Severe acute respiratory syndrome coronavirus 2
KMSDVKCTSVVLLSVL

SEQ ID NO: 88832 - protein, 16 aa, Severe acute respiratory syndrome coronavirus 2
MSDVKCTSVVLLSVLQ

SEQ ID NO: 88833 - protein, 16 aa, Severe acute respiratory syndrome coronavirus 2
SDVKCTSVVLLSVLQQ

SEQ ID NO: 88834 - protein, 16 aa, Severe acute respiratory syndrome coronavirus 2
DVKCTSVVLLSVLQQL

SEQ ID NO: 88835 - protein, 16 aa, Severe acute respiratory syndrome coronavirus 2
VKCTSVVLLSVLQQLR

SEQ ID NO: 88836 - protein, 16 aa, Severe acute respiratory syndrome coronavirus 2
KCTSVVLLSVLQQLRV

SEQ ID NO: 88837 - protein, 16 aa, Severe acute respiratory syndrome coronavirus 2
CTSVVLLSVLQQLRVE

SEQ ID NO: 88838 - protein, 16 aa, Severe acute respiratory syndrome coronavirus 2
TSVVLLSVLQQLRVES

SEQ ID NO: 88839 - protein, 16 aa, Severe acute respiratory syndrome coronavirus 2
CVQLHNDILLAKDTTE

SEQ ID NO: 88840 - protein, 16 aa, Severe acute respiratory syndrome coronavirus 2
VQLHNDILLAKDTTEA

SEQ ID NO: 88841 - protein, 16 aa, Severe acute respiratory syndrome coronavirus 2
QLHNDILLAKDTTEAF

SEQ ID NO: 88842 - protein, 16 aa, Severe acute respiratory syndrome coronavirus 2
LHNDILLAKDTTEAFE

SEQ ID NO: 88843 - protein, 16 aa, Severe acute respiratory syndrome coronavirus 2
HNDILLAKDTTEAFEK

SEQ ID NO: 88844 - protein, 16 aa, Severe acute respiratory syndrome coronavirus 2
NDILLAKDTTEAFEKM

SEQ ID NO: 88845 - protein, 16 aa, Severe acute respiratory syndrome coronavirus 2
DILLAKDTTEAFEKMV

SEQ ID NO: 88846 - protein, 16 aa, Severe acute respiratory syndrome coronavirus 2
ILLAKDTTEAFEKMVS

SEQ ID NO: 88847 - protein, 16 aa, Severe acute respiratory syndrome coronavirus 2
LLAKDTTEAFEKMVSL

SEQ ID NO: 88848 - protein, 16 aa, Severe acute respiratory syndrome coronavirus 2
LAKDTTEAFEKMVSLL

SEQ ID NO: 88849 - protein, 16 aa, Severe acute respiratory syndrome coronavirus 2
AKDTTEAFEKMVSLLS

SEQ ID NO: 88850 - protein, 16 aa, Severe acute respiratory syndrome coronavirus 2
KMVSLLSVLLSMQGAV

SEQ ID NO: 88851 - protein, 16 aa, Severe acute respiratory syndrome coronavirus 2
MVSLLSVLLSMQGAVD

SEQ ID NO: 88852 - protein, 16 aa, Severe acute respiratory syndrome coronavirus 2
VSLLSVLLSMQGAVDI

SEQ ID NO: 88853 - protein, 16 aa, Severe acute respiratory syndrome coronavirus 2
SLLSVLLSMQGAVDIN

SEQ ID NO: 88854 - protein, 16 aa, Severe acute respiratory syndrome coronavirus 2
LLSVLLSMQGAVDINK

SEQ ID NO: 88855 - protein, 16 aa, Severe acute respiratory syndrome coronavirus 2
LLSMQGAVDINKLCEE

SEQ ID NO: 88856 - protein, 16 aa, Severe acute respiratory syndrome coronavirus 2
LSMQGAVDINKLCEEM

SEQ ID NO: 88857 - protein, 16 aa, Severe acute respiratory syndrome coronavirus 2
GAVDINKLCEEMLDNR

SEQ ID NO: 88858 - protein, 16 aa, Severe acute respiratory syndrome coronavirus 2
AVDINKLCEEMLDNRA

SEQ ID NO: 88859 - protein, 16 aa, Severe acute respiratory syndrome coronavirus 2
VDINKLCEEMLDNRAT

SEQ ID NO: 88860 - protein, 16 aa, Severe acute respiratory syndrome coronavirus 2
DINKLCEEMLDNRATL

SEQ ID NO: 88861 - protein, 16 aa, Severe acute respiratory syndrome coronavirus 2
INKLCEEMLDNRATLQ

SEQ ID NO: 88862 - protein, 16 aa, Severe acute respiratory syndrome coronavirus 2
YEQAVANGDSEVVLKK

SEQ ID NO: 88863 - protein, 16 aa, Severe acute respiratory syndrome coronavirus 2
EQAVANGDSEVVLKKL

SEQ ID NO: 88864 - protein, 16 aa, Severe acute respiratory syndrome coronavirus 2
QAVANGDSEVVLKKLK

SEQ ID NO: 88865 - protein, 16 aa, Severe acute respiratory syndrome coronavirus 2
AVANGDSEVVLKKLKK

SEQ ID NO: 88866 - protein, 16 aa, Severe acute respiratory syndrome coronavirus 2
AMQRKLEKMADQAMTQ

SEQ ID NO: 88867 - protein, 16 aa, Severe acute respiratory syndrome coronavirus 2
MQRKLEKMADQAMTQM

SEQ ID NO: 88868 - protein, 16 aa, Severe acute respiratory syndrome coronavirus 2
QRKLEKMADQAMTQMY

SEQ ID NO: 88869 - protein, 16 aa, Severe acute respiratory syndrome coronavirus 2
RKLEKMADQAMTQMYK

SEQ ID NO: 88870 - protein, 16 aa, Severe acute respiratory syndrome coronavirus 2
KLEKMADQAMTQMYKQ

SEQ ID NO: 88871 - protein, 16 aa, Severe acute respiratory syndrome coronavirus 2
LEKMADQAMTQMYKQA

SEQ ID NO: 88872 - protein, 16 aa, Severe acute respiratory syndrome coronavirus 2
EKMADQAMTQMYKQAR

SEQ ID NO: 88873 - protein, 16 aa, Severe acute respiratory syndrome coronavirus 2
KMADQAMTQMYKQARS

SEQ ID NO: 88874 - protein, 16 aa, Severe acute respiratory syndrome coronavirus 2
MADQAMTQMYKQARSE

SEQ ID NO: 88875 - protein, 16 aa, Severe acute respiratory syndrome coronavirus 2
DQAMTQMYKQARSEDK

SEQ ID NO: 88876 - protein, 16 aa, Severe acute respiratory syndrome coronavirus 2
QAMTQMYKQARSEDKR

SEQ ID NO: 88877 - protein, 16 aa, Severe acute respiratory syndrome coronavirus 2
QARSEDKRAKVTSAMQ

SEQ ID NO: 88878 - protein, 16 aa, Severe acute respiratory syndrome coronavirus 2
ARSEDKRAKVTSAMQT

SEQ ID NO: 88879 - protein, 16 aa, Severe acute respiratory syndrome coronavirus 2
RSEDKRAKVTSAMQTM

SEQ ID NO: 88880 - protein, 16 aa, Severe acute respiratory syndrome coronavirus 2
SEDKRAKVTSAMQTML

SEQ ID NO: 88881 - protein, 16 aa, Severe acute respiratory syndrome coronavirus 2
EDKRAKVTSAMQTMLF

SEQ ID NO: 88882 - protein, 16 aa, Severe acute respiratory syndrome coronavirus 2
DKRAKVTSAMQTMLFT

SEQ ID NO: 88883 - protein, 16 aa, Severe acute respiratory syndrome coronavirus 2
KRAKVTSAMQTMLFTM

SEQ ID NO: 88884 - protein, 16 aa, Severe acute respiratory syndrome coronavirus 2
RAKVTSAMQTMLFTML

SEQ ID NO: 88885 - protein, 16 aa, Severe acute respiratory syndrome coronavirus 2
AKVTSAMQTMLFTMLR

SEQ ID NO: 88886 - protein, 16 aa, Severe acute respiratory syndrome coronavirus 2
KVTSAMQTMLFTMLRK

SEQ ID NO: 88887 - protein, 16 aa, Severe acute respiratory syndrome coronavirus 2
VTSAMQTMLFTMLRKL

SEQ ID NO: 88888 - protein, 16 aa, Severe acute respiratory syndrome coronavirus 2
TSAMQTMLFTMLRKLD

SEQ ID NO: 88889 - protein, 16 aa, Severe acute respiratory syndrome coronavirus 2
SAMQTMLFTMLRKLDN

SEQ ID NO: 88890 - protein, 16 aa, Severe acute respiratory syndrome coronavirus 2
RKLDNDALNNIINNAR

SEQ ID NO: 88891 - protein, 16 aa, Severe acute respiratory syndrome coronavirus 2
KLDNDALNNIINNARD

SEQ ID NO: 88892 - protein, 16 aa, Severe acute respiratory syndrome coronavirus 2
NDALNNIINNARDGCV

SEQ ID NO: 88893 - protein, 16 aa, Severe acute respiratory syndrome coronavirus 2
DALNNIINNARDGCVP

SEQ ID NO: 88894 - protein, 16 aa, Severe acute respiratory syndrome coronavirus 2
ALNNIINNARDGCVPL

SEQ ID NO: 88895 - protein, 16 aa, Severe acute respiratory syndrome coronavirus 2
LNNIINNARDGCVPLN

SEQ ID NO: 88896 - protein, 16 aa, Severe acute respiratory syndrome coronavirus 2
NIINNARDGCVPLNII

SEQ ID NO: 88897 - protein, 16 aa, Severe acute respiratory syndrome coronavirus 2
IINNARDGCVPLNIIP

SEQ ID NO: 88898 - protein, 16 aa, Severe acute respiratory syndrome coronavirus 2
INNARDGCVPLNIIPL

SEQ ID NO: 88899 - protein, 16 aa, Severe acute respiratory syndrome coronavirus 2
NNARDGCVPLNIIPLT

SEQ ID NO: 88900 - protein, 16 aa, Severe acute respiratory syndrome coronavirus 2
LWEIQQVVDADSKIVQ

SEQ ID NO: 88901 - protein, 16 aa, Severe acute respiratory syndrome coronavirus 2
WEIQQVVDADSKIVQL

SEQ ID NO: 88902 - protein, 16 aa, Severe acute respiratory syndrome coronavirus 2
EIQQVVDADSKIVQLS

SEQ ID NO: 88903 - protein, 16 aa, Severe acute respiratory syndrome coronavirus 2
IQQVVDADSKIVQLSE

SEQ ID NO: 88904 - protein, 16 aa, Severe acute respiratory syndrome coronavirus 2
QQVVDADSKIVQLSEI

SEQ ID NO: 88905 - protein, 16 aa, Severe acute respiratory syndrome coronavirus 2
QVVDADSKIVQLSEIS

SEQ ID NO: 88906 - protein, 16 aa, Severe acute respiratory syndrome coronavirus 2
VVDADSKIVQLSEISM

SEQ ID NO: 88907 - protein, 16 aa, Severe acute respiratory syndrome coronavirus 2
VDADSKIVQLSEISMD

SEQ ID NO: 88908 - protein, 16 aa, Severe acute respiratory syndrome coronavirus 2
DADSKIVQLSEISMDN

SEQ ID NO: 88909 - protein, 16 aa, Severe acute respiratory syndrome coronavirus 2
ADSKIVQLSEISMDNS

SEQ ID NO: 88910 - protein, 16 aa, Severe acute respiratory syndrome coronavirus 2
DSKIVQLSEISMDNSP

SEQ ID NO: 88911 - protein, 16 aa, Severe acute respiratory syndrome coronavirus 2
SKIVQLSEISMDNSPN

SEQ ID NO: 88912 - protein, 16 aa, Severe acute respiratory syndrome coronavirus 2
KIVQLSEISMDNSPNL

SEQ ID NO: 88913 - protein, 16 aa, Severe acute respiratory syndrome coronavirus 2
IVQLSEISMDNSPNLA

SEQ ID NO: 88914 - protein, 16 aa, Severe acute respiratory syndrome coronavirus 2
VQLSEISMDNSPNLAW

SEQ ID NO: 88915 - protein, 16 aa, Severe acute respiratory syndrome coronavirus 2
QLSEISMDNSPNLAWP

SEQ ID NO: 88916 - protein, 16 aa, Severe acute respiratory syndrome coronavirus 2
LSEISMDNSPNLAWPL

SEQ ID NO: 88917 - protein, 16 aa, Severe acute respiratory syndrome coronavirus 2
SEISMDNSPNLAWPLI

SEQ ID NO: 88918 - protein, 16 aa, Severe acute respiratory syndrome coronavirus 2
EISMDNSPNLAWPLIV

SEQ ID NO: 88919 - protein, 16 aa, Severe acute respiratory syndrome coronavirus 2
GRFVLALLSDLQDLKW

SEQ ID NO: 88920 - protein, 16 aa, Severe acute respiratory syndrome coronavirus 2
RFVLALLSDLQDLKWA

SEQ ID NO: 88921 - protein, 16 aa, Severe acute respiratory syndrome coronavirus 2
ALLSDLQDLKWARFPK

SEQ ID NO: 88922 - protein, 16 aa, Severe acute respiratory syndrome coronavirus 2
LLSDLQDLKWARFPKS

SEQ ID NO: 88923 - protein, 16 aa, Severe acute respiratory syndrome coronavirus 2
LSDLQDLKWARFPKSD

SEQ ID NO: 88924 - protein, 16 aa, Severe acute respiratory syndrome coronavirus 2
DTPKGPKVKYLYFIKG

SEQ ID NO: 88925 - protein, 16 aa, Severe acute respiratory syndrome coronavirus 2
TPKGPKVKYLYFIKGL

SEQ ID NO: 88926 - protein, 16 aa, Severe acute respiratory syndrome coronavirus 2
PKGPKVKYLYFIKGLN

SEQ ID NO: 88927 - protein, 16 aa, Severe acute respiratory syndrome coronavirus 2
KGPKVKYLYFIKGLNN

SEQ ID NO: 88928 - protein, 16 aa, Severe acute respiratory syndrome coronavirus 2
GPKVKYLYFIKGLNNL

SEQ ID NO: 88929 - protein, 16 aa, Severe acute respiratory syndrome coronavirus 2
PKVKYLYFIKGLNNLN

SEQ ID NO: 88930 - protein, 16 aa, Severe acute respiratory syndrome coronavirus 2
KVKYLYFIKGLNNLNR

SEQ ID NO: 88931 - protein, 16 aa, Severe acute respiratory syndrome coronavirus 2
VKYLYFIKGLNNLNRG

SEQ ID NO: 88932 - protein, 16 aa, Severe acute respiratory syndrome coronavirus 2
KYLYFIKGLNNLNRGM

SEQ ID NO: 88933 - protein, 16 aa, Severe acute respiratory syndrome coronavirus 2
YLYFIKGLNNLNRGMV

SEQ ID NO: 88934 - protein, 16 aa, Severe acute respiratory syndrome coronavirus 2
LYFIKGLNNLNRGMVL

SEQ ID NO: 88935 - protein, 16 aa, Severe acute respiratory syndrome coronavirus 2
VLSFCAFAVDAAKAYK

SEQ ID NO: 88936 - protein, 16 aa, Severe acute respiratory syndrome coronavirus 2
LSFCAFAVDAAKAYKD

SEQ ID NO: 88937 - protein, 16 aa, Severe acute respiratory syndrome coronavirus 2
SFCAFAVDAAKAYKDY

SEQ ID NO: 88938 - protein, 16 aa, Severe acute respiratory syndrome coronavirus 2
FCAFAVDAAKAYKDYL

SEQ ID NO: 88939 - protein, 16 aa, Severe acute respiratory syndrome coronavirus 2
CAFAVDAAKAYKDYLA

SEQ ID NO: 88940 - protein, 16 aa, Severe acute respiratory syndrome coronavirus 2
AFAVDAAKAYKDYLAS

SEQ ID NO: 88941 - protein, 16 aa, Severe acute respiratory syndrome coronavirus 2
FAVDAAKAYKDYLASG

SEQ ID NO: 88942 - protein, 16 aa, Severe acute respiratory syndrome coronavirus 2
AVDAAKAYKDYLASGG

SEQ ID NO: 88943 - protein, 16 aa, Severe acute respiratory syndrome coronavirus 2
VDAAKAYKDYLASGGQ

SEQ ID NO: 88944 - protein, 16 aa, Severe acute respiratory syndrome coronavirus 2
DAAKAYKDYLASGGQP

SEQ ID NO: 88945 - protein, 16 aa, Severe acute respiratory syndrome coronavirus 2
AAKAYKDYLASGGQPI

SEQ ID NO: 88946 - protein, 16 aa, Severe acute respiratory syndrome coronavirus 2
AKAYKDYLASGGQPIT

SEQ ID NO: 88947 - protein, 16 aa, Severe acute respiratory syndrome coronavirus 2
KAYKDYLASGGQPITN

SEQ ID NO: 88948 - protein, 16 aa, Severe acute respiratory syndrome coronavirus 2
AYKDYLASGGQPITNC

SEQ ID NO: 88949 - protein, 16 aa, Severe acute respiratory syndrome coronavirus 2
YKDYLASGGQPITNCV

SEQ ID NO: 88950 - protein, 16 aa, Severe acute respiratory syndrome coronavirus 2
KDYLASGGQPITNCVK

SEQ ID NO: 88951 - protein, 16 aa, Severe acute respiratory syndrome coronavirus 2
DYLASGGQPITNCVKM

SEQ ID NO: 88952 - protein, 16 aa, Severe acute respiratory syndrome coronavirus 2
YLASGGQPITNCVKML

SEQ ID NO: 88953 - protein, 16 aa, Severe acute respiratory syndrome coronavirus 2
LASGGQPITNCVKMLC

SEQ ID NO: 88954 - protein, 16 aa, Severe acute respiratory syndrome coronavirus 2
QESFGGASCCLYCRCH

SEQ ID NO: 88955 - protein, 16 aa, Severe acute respiratory syndrome coronavirus 2
ESFGGASCCLYCRCHI

SEQ ID NO: 88956 - protein, 16 aa, Severe acute respiratory syndrome coronavirus 2
DHPNPKGFCDLKGKYV

SEQ ID NO: 88957 - protein, 16 aa, Severe acute respiratory syndrome coronavirus 2
HPNPKGFCDLKGKYVQ

SEQ ID NO: 88958 - protein, 16 aa, Severe acute respiratory syndrome coronavirus 2
NPKGFCDLKGKYVQIP

SEQ ID NO: 88959 - protein, 16 aa, Severe acute respiratory syndrome coronavirus 2
PKGFCDLKGKYVQIPT

SEQ ID NO: 88960 - protein, 17 aa, Severe acute respiratory syndrome coronavirus 2
LVEVEKGVLPQLEQPYV

SEQ ID NO: 88961 - protein, 17 aa, Severe acute respiratory syndrome coronavirus 2
VEVEKGVLPQLEQPYVF

SEQ ID NO: 88962 - protein, 17 aa, Severe acute respiratory syndrome coronavirus 2
EVEKGVLPQLEQPYVFI

SEQ ID NO: 88963 - protein, 17 aa, Severe acute respiratory syndrome coronavirus 2
VEKGVLPQLEQPYVFIK

SEQ ID NO: 88964 - protein, 17 aa, Severe acute respiratory syndrome coronavirus 2
EKGVLPQLEQPYVFIKR

SEQ ID NO: 88965 - protein, 17 aa, Severe acute respiratory syndrome coronavirus 2
REHEHEIAWYTERSEKS

SEQ ID NO: 88966 - protein, 17 aa, Severe acute respiratory syndrome coronavirus 2
EHEHEIAWYTERSEKSY

SEQ ID NO: 88967 - protein, 17 aa, Severe acute respiratory syndrome coronavirus 2
HEHEIAWYTERSEKSYE

SEQ ID NO: 88968 - protein, 17 aa, Severe acute respiratory syndrome coronavirus 2
EHEIAWYTERSEKSYEL

SEQ ID NO: 88969 - protein, 17 aa, Severe acute respiratory syndrome coronavirus 2
HEIAWYTERSEKSYELQ

SEQ ID NO: 88970 - protein, 17 aa, Severe acute respiratory syndrome coronavirus 2
EIAWYTERSEKSYELQT

SEQ ID NO: 88971 - protein, 17 aa, Severe acute respiratory syndrome coronavirus 2
IAWYTERSEKSYELQTP

SEQ ID NO: 88972 - protein, 17 aa, Severe acute respiratory syndrome coronavirus 2
YTERSEKSYELQTPFEI

SEQ ID NO: 88973 - protein, 17 aa, Severe acute respiratory syndrome coronavirus 2
TERSEKSYELQTPFEIK

SEQ ID NO: 88974 - protein, 17 aa, Severe acute respiratory syndrome coronavirus 2
ERSEKSYELQTPFEIKL

SEQ ID NO: 88975 - protein, 17 aa, Severe acute respiratory syndrome coronavirus 2
RSEKSYELQTPFEIKLA

SEQ ID NO: 88976 - protein, 17 aa, Severe acute respiratory syndrome coronavirus 2
SEKSYELQTPFEIKLAK

SEQ ID NO: 88977 - protein, 17 aa, Severe acute respiratory syndrome coronavirus 2
EKSYELQTPFEIKLAKK

SEQ ID NO: 88978 - protein, 17 aa, Severe acute respiratory syndrome coronavirus 2
KSYELQTPFEIKLAKKF

SEQ ID NO: 88979 - protein, 17 aa, Severe acute respiratory syndrome coronavirus 2
SYELQTPFEIKLAKKFD

SEQ ID NO: 88980 - protein, 17 aa, Severe acute respiratory syndrome coronavirus 2
EKVNINIVGDFKLNEEI

SEQ ID NO: 88981 - protein, 17 aa, Severe acute respiratory syndrome coronavirus 2
KVNINIVGDFKLNEEIA

SEQ ID NO: 88982 - protein, 17 aa, Severe acute respiratory syndrome coronavirus 2
VNINIVGDFKLNEEIAI

SEQ ID NO: 88983 - protein, 17 aa, Severe acute respiratory syndrome coronavirus 2
NIVGDFKLNEEIAIILA

SEQ ID NO: 88984 - protein, 17 aa, Severe acute respiratory syndrome coronavirus 2
IVGDFKLNEEIAIILAS

SEQ ID NO: 88985 - protein, 17 aa, Severe acute respiratory syndrome coronavirus 2
VGDFKLNEEIAIILASF

SEQ ID NO: 88986 - protein, 17 aa, Severe acute respiratory syndrome coronavirus 2
FKQIVESCGNFKVTKGK

SEQ ID NO: 88987 - protein, 17 aa, Severe acute respiratory syndrome coronavirus 2
FTSDLATNNLVVMAYIT

SEQ ID NO: 88988 - protein, 17 aa, Severe acute respiratory syndrome coronavirus 2
TSDLATNNLVVMAYITG

SEQ ID NO: 88989 - protein, 17 aa, Severe acute respiratory syndrome coronavirus 2
SDLATNNLVVMAYITGG

SEQ ID NO: 88990 - protein, 17 aa, Severe acute respiratory syndrome coronavirus 2
DLATNNLVVMAYITGGV

SEQ ID NO: 88991 - protein, 17 aa, Severe acute respiratory syndrome coronavirus 2
VLDWLEEKFKEGVEFLR

SEQ ID NO: 88992 - protein, 17 aa, Severe acute respiratory syndrome coronavirus 2
LDWLEEKFKEGVEFLRD

SEQ ID NO: 88993 - protein, 17 aa, Severe acute respiratory syndrome coronavirus 2
DWLEEKFKEGVEFLRDG

SEQ ID NO: 88994 - protein, 17 aa, Severe acute respiratory syndrome coronavirus 2
WLEEKFKEGVEFLRDGW

SEQ ID NO: 88995 - protein, 17 aa, Severe acute respiratory syndrome coronavirus 2
LEEKFKEGVEFLRDGWE

SEQ ID NO: 88996 - protein, 17 aa, Severe acute respiratory syndrome coronavirus 2
EEKFKEGVEFLRDGWEI

SEQ ID NO: 88997 - protein, 17 aa, Severe acute respiratory syndrome coronavirus 2
EKFKEGVEFLRDGWEIV

SEQ ID NO: 88998 - protein, 17 aa, Severe acute respiratory syndrome coronavirus 2
KFKEGVEFLRDGWEIVK

SEQ ID NO: 88999 - protein, 17 aa, Severe acute respiratory syndrome coronavirus 2
FKEGVEFLRDGWEIVKF

SEQ ID NO: 89000 - protein, 17 aa, Severe acute respiratory syndrome coronavirus 2
NKFLALCADSIIIGGAK

SEQ ID NO: 89001 - protein, 17 aa, Severe acute respiratory syndrome coronavirus 2
KFLALCADSIIIGGAKL

SEQ ID NO: 89002 - protein, 17 aa, Severe acute respiratory syndrome coronavirus 2
FLALCADSIIIGGAKLK

SEQ ID NO: 89003 - protein, 17 aa, Severe acute respiratory syndrome coronavirus 2
LALCADSIIIGGAKLKA

SEQ ID NO: 89004 - protein, 17 aa, Severe acute respiratory syndrome coronavirus 2
ALCADSIIIGGAKLKAL

SEQ ID NO: 89005 - protein, 17 aa, Severe acute respiratory syndrome coronavirus 2
LCADSIIIGGAKLKALN

SEQ ID NO: 89006 - protein, 17 aa, Severe acute respiratory syndrome coronavirus 2
CADSIIIGGAKLKALNL

SEQ ID NO: 89007 - protein, 17 aa, Severe acute respiratory syndrome coronavirus 2
ADSIIIGGAKLKALNLG

SEQ ID NO: 89008 - protein, 17 aa, Severe acute respiratory syndrome coronavirus 2
DSIIIGGAKLKALNLGE

SEQ ID NO: 89009 - protein, 17 aa, Severe acute respiratory syndrome coronavirus 2
SEAVEAPLVGTPVCING

SEQ ID NO: 89010 - protein, 17 aa, Severe acute respiratory syndrome coronavirus 2
EAVEAPLVGTPVCINGL

SEQ ID NO: 89011 - protein, 17 aa, Severe acute respiratory syndrome coronavirus 2
AVEAPLVGTPVCINGLM

SEQ ID NO: 89012 - protein, 17 aa, Severe acute respiratory syndrome coronavirus 2
APLVGTPVCINGLMLLE

SEQ ID NO: 89013 - protein, 17 aa, Severe acute respiratory syndrome coronavirus 2
PLVGTPVCINGLMLLEI

SEQ ID NO: 89014 - protein, 17 aa, Severe acute respiratory syndrome coronavirus 2
LVGTPVCINGLMLLEIK

SEQ ID NO: 89015 - protein, 17 aa, Severe acute respiratory syndrome coronavirus 2
VGTPVCINGLMLLEIKD

SEQ ID NO: 89016 - protein, 17 aa, Severe acute respiratory syndrome coronavirus 2
PVCINGLMLLEIKDTEK

SEQ ID NO: 89017 - protein, 17 aa, Severe acute respiratory syndrome coronavirus 2
VCINGLMLLEIKDTEKY

SEQ ID NO: 89018 - protein, 17 aa, Severe acute respiratory syndrome coronavirus 2
CINGLMLLEIKDTEKYC

SEQ ID NO: 89019 - protein, 17 aa, Severe acute respiratory syndrome coronavirus 2
INGLMLLEIKDTEKYCA

SEQ ID NO: 89020 - protein, 17 aa, Severe acute respiratory syndrome coronavirus 2
NGLMLLEIKDTEKYCAL

SEQ ID NO: 89021 - protein, 17 aa, Severe acute respiratory syndrome coronavirus 2
GLMLLEIKDTEKYCALA

SEQ ID NO: 89022 - protein, 17 aa, Severe acute respiratory syndrome coronavirus 2
CSAYTVELGTEVNEFAC

SEQ ID NO: 89023 - protein, 17 aa, Severe acute respiratory syndrome coronavirus 2
SAYTVELGTEVNEFACV

SEQ ID NO: 89024 - protein, 17 aa, Severe acute respiratory syndrome coronavirus 2
AYTVELGTEVNEFACVV

SEQ ID NO: 89025 - protein, 17 aa, Severe acute respiratory syndrome coronavirus 2
TPVVQTIEVNSFSGYLK

SEQ ID NO: 89026 - protein, 17 aa, Severe acute respiratory syndrome coronavirus 2
PVVQTIEVNSFSGYLKL

SEQ ID NO: 89027 - protein, 17 aa, Severe acute respiratory syndrome coronavirus 2
VVQTIEVNSFSGYLKLT

SEQ ID NO: 89028 - protein, 17 aa, Severe acute respiratory syndrome coronavirus 2
KPTVVVNAANVYLKHGG

SEQ ID NO: 89029 - protein, 17 aa, Severe acute respiratory syndrome coronavirus 2
PTVVVNAANVYLKHGGG

SEQ ID NO: 89030 - protein, 17 aa, Severe acute respiratory syndrome coronavirus 2
NVYLKHGGGVAGALNKA

SEQ ID NO: 89031 - protein, 17 aa, Severe acute respiratory syndrome coronavirus 2
VYLKHGGGVAGALNKAT

SEQ ID NO: 89032 - protein, 17 aa, Severe acute respiratory syndrome coronavirus 2
YLKHGGGVAGALNKATN

SEQ ID NO: 89033 - protein, 17 aa, Severe acute respiratory syndrome coronavirus 2
LKHGGGVAGALNKATNN

SEQ ID NO: 89034 - protein, 17 aa, Severe acute respiratory syndrome coronavirus 2
KHGGGVAGALNKATNNA

SEQ ID NO: 89035 - protein, 17 aa, Severe acute respiratory syndrome coronavirus 2
HGGGVAGALNKATNNAM

SEQ ID NO: 89036 - protein, 17 aa, Severe acute respiratory syndrome coronavirus 2
GGGVAGALNKATNNAMQ

SEQ ID NO: 89037 - protein, 17 aa, Severe acute respiratory syndrome coronavirus 2
GSCVLSGHNLAKHCLHV

SEQ ID NO: 89038 - protein, 17 aa, Severe acute respiratory syndrome coronavirus 2
SCVLSGHNLAKHCLHVV

SEQ ID NO: 89039 - protein, 17 aa, Severe acute respiratory syndrome coronavirus 2
CVLSGHNLAKHCLHVVG

SEQ ID NO: 89040 - protein, 17 aa, Severe acute respiratory syndrome coronavirus 2
VLSGHNLAKHCLHVVGP

SEQ ID NO: 89041 - protein, 17 aa, Severe acute respiratory syndrome coronavirus 2
LSGHNLAKHCLHVVGPN

SEQ ID NO: 89042 - protein, 17 aa, Severe acute respiratory syndrome coronavirus 2
SGHNLAKHCLHVVGPNV

SEQ ID NO: 89043 - protein, 17 aa, Severe acute respiratory syndrome coronavirus 2
GHNLAKHCLHVVGPNVN

SEQ ID NO: 89044 - protein, 17 aa, Severe acute respiratory syndrome coronavirus 2
YITTYPGQGLNGYTVEE

SEQ ID NO: 89045 - protein, 17 aa, Severe acute respiratory syndrome coronavirus 2
ITTYPGQGLNGYTVEEA

SEQ ID NO: 89046 - protein, 17 aa, Severe acute respiratory syndrome coronavirus 2
TTYPGQGLNGYTVEEAK

SEQ ID NO: 89047 - protein, 17 aa, Severe acute respiratory syndrome coronavirus 2
TYPGQGLNGYTVEEAKT

SEQ ID NO: 89048 - protein, 17 aa, Severe acute respiratory syndrome coronavirus 2
YPGQGLNGYTVEEAKTV

SEQ ID NO: 89049 - protein, 17 aa, Severe acute respiratory syndrome coronavirus 2
PGQGLNGYTVEEAKTVL

SEQ ID NO: 89050 - protein, 17 aa, Severe acute respiratory syndrome coronavirus 2
GQGLNGYTVEEAKTVLK

SEQ ID NO: 89051 - protein, 17 aa, Severe acute respiratory syndrome coronavirus 2
QGLNGYTVEEAKTVLKK

SEQ ID NO: 89052 - protein, 17 aa, Severe acute respiratory syndrome coronavirus 2
GLNGYTVEEAKTVLKKC

SEQ ID NO: 89053 - protein, 17 aa, Severe acute respiratory syndrome coronavirus 2
LNGYTVEEAKTVLKKCK

SEQ ID NO: 89054 - protein, 17 aa, Severe acute respiratory syndrome coronavirus 2
NGYTVEEAKTVLKKCKS

SEQ ID NO: 89055 - protein, 17 aa, Severe acute respiratory syndrome coronavirus 2
FYILPSIISNEKQEILG

SEQ ID NO: 89056 - protein, 17 aa, Severe acute respiratory syndrome coronavirus 2
YILPSIISNEKQEILGT

SEQ ID NO: 89057 - protein, 17 aa, Severe acute respiratory syndrome coronavirus 2
ILPSIISNEKQEILGTV

SEQ ID NO: 89058 - protein, 17 aa, Severe acute respiratory syndrome coronavirus 2
LPSIISNEKQEILGTVS

SEQ ID NO: 89059 - protein, 17 aa, Severe acute respiratory syndrome coronavirus 2
PSIISNEKQEILGTVSW

SEQ ID NO: 89060 - protein, 17 aa, Severe acute respiratory syndrome coronavirus 2
EMLAHAEETRKLMPVCV

SEQ ID NO: 89061 - protein, 17 aa, Severe acute respiratory syndrome coronavirus 2
MLAHAEETRKLMPVCVE

SEQ ID NO: 89062 - protein, 17 aa, Severe acute respiratory syndrome coronavirus 2
LAHAEETRKLMPVCVET

SEQ ID NO: 89063 - protein, 17 aa, Severe acute respiratory syndrome coronavirus 2
AHAEETRKLMPVCVETK

SEQ ID NO: 89064 - protein, 17 aa, Severe acute respiratory syndrome coronavirus 2
HAEETRKLMPVCVETKA

SEQ ID NO: 89065 - protein, 17 aa, Severe acute respiratory syndrome coronavirus 2
VSTIQRKYKGIKIQEGV

SEQ ID NO: 89066 - protein, 17 aa, Severe acute respiratory syndrome coronavirus 2
STIQRKYKGIKIQEGVV

SEQ ID NO: 89067 - protein, 17 aa, Severe acute respiratory syndrome coronavirus 2
TIQRKYKGIKIQEGVVD

SEQ ID NO: 89068 - protein, 17 aa, Severe acute respiratory syndrome coronavirus 2
IQRKYKGIKIQEGVVDY

SEQ ID NO: 89069 - protein, 17 aa, Severe acute respiratory syndrome coronavirus 2
QRKYKGIKIQEGVVDYG

SEQ ID NO: 89070 - protein, 17 aa, Severe acute respiratory syndrome coronavirus 2
TAYNGYLTSSSKTPEEH

SEQ ID NO: 89071 - protein, 17 aa, Severe acute respiratory syndrome coronavirus 2
AYNGYLTSSSKTPEEHF

SEQ ID NO: 89072 - protein, 17 aa, Severe acute respiratory syndrome coronavirus 2
SSSKTPEEHFIETISLA

SEQ ID NO: 89073 - protein, 17 aa, Severe acute respiratory syndrome coronavirus 2
SSKTPEEHFIETISLAG

SEQ ID NO: 89074 - protein, 17 aa, Severe acute respiratory syndrome coronavirus 2
SKTPEEHFIETISLAGS

SEQ ID NO: 89075 - protein, 17 aa, Severe acute respiratory syndrome coronavirus 2
KTPEEHFIETISLAGSY

SEQ ID NO: 89076 - protein, 17 aa, Severe acute respiratory syndrome coronavirus 2
TPEEHFIETISLAGSYK

SEQ ID NO: 89077 - protein, 17 aa, Severe acute respiratory syndrome coronavirus 2
PEEHFIETISLAGSYKD

SEQ ID NO: 89078 - protein, 17 aa, Severe acute respiratory syndrome coronavirus 2
EEHFIETISLAGSYKDW

SEQ ID NO: 89079 - protein, 17 aa, Severe acute respiratory syndrome coronavirus 2
KKWKYPQVNGLTSIKWA

SEQ ID NO: 89080 - protein, 17 aa, Severe acute respiratory syndrome coronavirus 2
KWKYPQVNGLTSIKWAD

SEQ ID NO: 89081 - protein, 17 aa, Severe acute respiratory syndrome coronavirus 2
WKYPQVNGLTSIKWADN

SEQ ID NO: 89082 - protein, 17 aa, Severe acute respiratory syndrome coronavirus 2
KYPQVNGLTSIKWADNN

SEQ ID NO: 89083 - protein, 17 aa, Severe acute respiratory syndrome coronavirus 2
YPQVNGLTSIKWADNNC

SEQ ID NO: 89084 - protein, 17 aa, Severe acute respiratory syndrome coronavirus 2
PQVNGLTSIKWADNNCY

SEQ ID NO: 89085 - protein, 17 aa, Severe acute respiratory syndrome coronavirus 2
QVNGLTSIKWADNNCYL

SEQ ID NO: 89086 - protein, 17 aa, Severe acute respiratory syndrome coronavirus 2
VNGLTSIKWADNNCYLA

SEQ ID NO: 89087 - protein, 17 aa, Severe acute respiratory syndrome coronavirus 2
NGLTSIKWADNNCYLAT

SEQ ID NO: 89088 - protein, 17 aa, Severe acute respiratory syndrome coronavirus 2
ELKFNPPALQDAYYRAR

SEQ ID NO: 89089 - protein, 17 aa, Severe acute respiratory syndrome coronavirus 2
LKFNPPALQDAYYRARA

SEQ ID NO: 89090 - protein, 17 aa, Severe acute respiratory syndrome coronavirus 2
NPPALQDAYYRARAGEA

SEQ ID NO: 89091 - protein, 17 aa, Severe acute respiratory syndrome coronavirus 2
PPALQDAYYRARAGEAA

SEQ ID NO: 89092 - protein, 17 aa, Severe acute respiratory syndrome coronavirus 2
PALQDAYYRARAGEAAN

SEQ ID NO: 89093 - protein, 17 aa, Severe acute respiratory syndrome coronavirus 2
ALQDAYYRARAGEAANF

SEQ ID NO: 89094 - protein, 17 aa, Severe acute respiratory syndrome coronavirus 2
LQDAYYRARAGEAANFC

SEQ ID NO: 89095 - protein, 17 aa, Severe acute respiratory syndrome coronavirus 2
QDAYYRARAGEAANFCA

SEQ ID NO: 89096 - protein, 17 aa, Severe acute respiratory syndrome coronavirus 2
DAYYRARAGEAANFCAL

SEQ ID NO: 89097 - protein, 17 aa, Severe acute respiratory syndrome coronavirus 2
YYRARAGEAANFCALIL

SEQ ID NO: 89098 - protein, 17 aa, Severe acute respiratory syndrome coronavirus 2
YRARAGEAANFCALILA

SEQ ID NO: 89099 - protein, 17 aa, Severe acute respiratory syndrome coronavirus 2
RARAGEAANFCALILAY

SEQ ID NO: 89100 - protein, 17 aa, Severe acute respiratory syndrome coronavirus 2
ARAGEAANFCALILAYC

SEQ ID NO: 89101 - protein, 17 aa, Severe acute respiratory syndrome coronavirus 2
LFQHANLDSCKRVLNVV

SEQ ID NO: 89102 - protein, 17 aa, Severe acute respiratory syndrome coronavirus 2
HANLDSCKRVLNVVCKT

SEQ ID NO: 89103 - protein, 17 aa, Severe acute respiratory syndrome coronavirus 2
LDSCKRVLNVVCKTCGQ

SEQ ID NO: 89104 - protein, 17 aa, Severe acute respiratory syndrome coronavirus 2
DSCKRVLNVVCKTCGQQ

SEQ ID NO: 89105 - protein, 17 aa, Severe acute respiratory syndrome coronavirus 2
SCKRVLNVVCKTCGQQQ

SEQ ID NO: 89106 - protein, 17 aa, Severe acute respiratory syndrome coronavirus 2
CKRVLNVVCKTCGQQQT

SEQ ID NO: 89107 - protein, 17 aa, Severe acute respiratory syndrome coronavirus 2
MGTLSYEQFKKGVQIPC

SEQ ID NO: 89108 - protein, 17 aa, Severe acute respiratory syndrome coronavirus 2
ITDVFYKENSYTTTIKP

SEQ ID NO: 89109 - protein, 17 aa, Severe acute respiratory syndrome coronavirus 2
TDVFYKENSYTTTIKPV

SEQ ID NO: 89110 - protein, 17 aa, Severe acute respiratory syndrome coronavirus 2
DVFYKENSYTTTIKPVT

SEQ ID NO: 89111 - protein, 17 aa, Severe acute respiratory syndrome coronavirus 2
VFYKENSYTTTIKPVTY

SEQ ID NO: 89112 - protein, 17 aa, Severe acute respiratory syndrome coronavirus 2
FYKENSYTTTIKPVTYK

SEQ ID NO: 89113 - protein, 17 aa, Severe acute respiratory syndrome coronavirus 2
YKENSYTTTIKPVTYKL

SEQ ID NO: 89114 - protein, 17 aa, Severe acute respiratory syndrome coronavirus 2
KENSYTTTIKPVTYKLD

SEQ ID NO: 89115 - protein, 17 aa, Severe acute respiratory syndrome coronavirus 2
ENSYTTTIKPVTYKLDG

SEQ ID NO: 89116 - protein, 17 aa, Severe acute respiratory syndrome coronavirus 2
NSYTTTIKPVTYKLDGV

SEQ ID NO: 89117 - protein, 17 aa, Severe acute respiratory syndrome coronavirus 2
SYTTTIKPVTYKLDGVV

SEQ ID NO: 89118 - protein, 17 aa, Severe acute respiratory syndrome coronavirus 2
YTTTIKPVTYKLDGVVC

SEQ ID NO: 89119 - protein, 17 aa, Severe acute respiratory syndrome coronavirus 2
TTTIKPVTYKLDGVVCT

SEQ ID NO: 89120 - protein, 17 aa, Severe acute respiratory syndrome coronavirus 2
TTIKPVTYKLDGVVCTE

SEQ ID NO: 89121 - protein, 17 aa, Severe acute respiratory syndrome coronavirus 2
TIKPVTYKLDGVVCTEI

SEQ ID NO: 89122 - protein, 17 aa, Severe acute respiratory syndrome coronavirus 2
IKPVTYKLDGVVCTEID

SEQ ID NO: 89123 - protein, 17 aa, Severe acute respiratory syndrome coronavirus 2
KPVTYKLDGVVCTEIDP

SEQ ID NO: 89124 - protein, 17 aa, Severe acute respiratory syndrome coronavirus 2
PVTYKLDGVVCTEIDPK

SEQ ID NO: 89125 - protein, 17 aa, Severe acute respiratory syndrome coronavirus 2
VTYKLDGVVCTEIDPKL

SEQ ID NO: 89126 - protein, 17 aa, Severe acute respiratory syndrome coronavirus 2
PKLDNYYKKDNSYFTEQ

SEQ ID NO: 89127 - protein, 17 aa, Severe acute respiratory syndrome coronavirus 2
KLDNYYKKDNSYFTEQP

SEQ ID NO: 89128 - protein, 17 aa, Severe acute respiratory syndrome coronavirus 2
LDNYYKKDNSYFTEQPI

SEQ ID NO: 89129 - protein, 17 aa, Severe acute respiratory syndrome coronavirus 2
DNYYKKDNSYFTEQPID

SEQ ID NO: 89130 - protein, 17 aa, Severe acute respiratory syndrome coronavirus 2
NYYKKDNSYFTEQPIDL

SEQ ID NO: 89131 - protein, 17 aa, Severe acute respiratory syndrome coronavirus 2
YYKKDNSYFTEQPIDLV

SEQ ID NO: 89132 - protein, 17 aa, Severe acute respiratory syndrome coronavirus 2
YKKDNSYFTEQPIDLVP

SEQ ID NO: 89133 - protein, 17 aa, Severe acute respiratory syndrome coronavirus 2
KKDNSYFTEQPIDLVPN

SEQ ID NO: 89134 - protein, 17 aa, Severe acute respiratory syndrome coronavirus 2
KDNSYFTEQPIDLVPNQ

SEQ ID NO: 89135 - protein, 17 aa, Severe acute respiratory syndrome coronavirus 2
DNSYFTEQPIDLVPNQP

SEQ ID NO: 89136 - protein, 17 aa, Severe acute respiratory syndrome coronavirus 2
NSYFTEQPIDLVPNQPY

SEQ ID NO: 89137 - protein, 17 aa, Severe acute respiratory syndrome coronavirus 2
ASFDNFKFVCDNIKFAD

SEQ ID NO: 89138 - protein, 17 aa, Severe acute respiratory syndrome coronavirus 2
SFDNFKFVCDNIKFADD

SEQ ID NO: 89139 - protein, 17 aa, Severe acute respiratory syndrome coronavirus 2
FDNFKFVCDNIKFADDL

SEQ ID NO: 89140 - protein, 17 aa, Severe acute respiratory syndrome coronavirus 2
DNFKFVCDNIKFADDLN

SEQ ID NO: 89141 - protein, 17 aa, Severe acute respiratory syndrome coronavirus 2
NFKFVCDNIKFADDLNQ

SEQ ID NO: 89142 - protein, 17 aa, Severe acute respiratory syndrome coronavirus 2
FKFVCDNIKFADDLNQL

SEQ ID NO: 89143 - protein, 17 aa, Severe acute respiratory syndrome coronavirus 2
KFVCDNIKFADDLNQLT

SEQ ID NO: 89144 - protein, 17 aa, Severe acute respiratory syndrome coronavirus 2
FVCDNIKFADDLNQLTG

SEQ ID NO: 89145 - protein, 17 aa, Severe acute respiratory syndrome coronavirus 2
VCDNIKFADDLNQLTGY

SEQ ID NO: 89146 - protein, 17 aa, Severe acute respiratory syndrome coronavirus 2
CDNIKFADDLNQLTGYK

SEQ ID NO: 89147 - protein, 17 aa, Severe acute respiratory syndrome coronavirus 2
DNIKFADDLNQLTGYKK

SEQ ID NO: 89148 - protein, 17 aa, Severe acute respiratory syndrome coronavirus 2
NIKFADDLNQLTGYKKP

SEQ ID NO: 89149 - protein, 17 aa, Severe acute respiratory syndrome coronavirus 2
IKFADDLNQLTGYKKPA

SEQ ID NO: 89150 - protein, 17 aa, Severe acute respiratory syndrome coronavirus 2
DLNQLTGYKKPASRELK

SEQ ID NO: 89151 - protein, 17 aa, Severe acute respiratory syndrome coronavirus 2
LNQLTGYKKPASRELKV

SEQ ID NO: 89152 - protein, 17 aa, Severe acute respiratory syndrome coronavirus 2
NQLTGYKKPASRELKVT

SEQ ID NO: 89153 - protein, 17 aa, Severe acute respiratory syndrome coronavirus 2
QLTGYKKPASRELKVTF

SEQ ID NO: 89154 - protein, 17 aa, Severe acute respiratory syndrome coronavirus 2
YKKPASRELKVTFFPDL

SEQ ID NO: 89155 - protein, 17 aa, Severe acute respiratory syndrome coronavirus 2
KKPASRELKVTFFPDLN

SEQ ID NO: 89156 - protein, 17 aa, Severe acute respiratory syndrome coronavirus 2
KPASRELKVTFFPDLNG

SEQ ID NO: 89157 - protein, 17 aa, Severe acute respiratory syndrome coronavirus 2
PASRELKVTFFPDLNGD

SEQ ID NO: 89158 - protein, 17 aa, Severe acute respiratory syndrome coronavirus 2
ASRELKVTFFPDLNGDV

SEQ ID NO: 89159 - protein, 17 aa, Severe acute respiratory syndrome coronavirus 2
SRELKVTFFPDLNGDVV

SEQ ID NO: 89160 - protein, 17 aa, Severe acute respiratory syndrome coronavirus 2
RELKVTFFPDLNGDVVA

SEQ ID NO: 89161 - protein, 17 aa, Severe acute respiratory syndrome coronavirus 2
ELKVTFFPDLNGDVVAI

SEQ ID NO: 89162 - protein, 17 aa, Severe acute respiratory syndrome coronavirus 2
LKVTFFPDLNGDVVAID

SEQ ID NO: 89163 - protein, 17 aa, Severe acute respiratory syndrome coronavirus 2
KVTFFPDLNGDVVAIDY

SEQ ID NO: 89164 - protein, 17 aa, Severe acute respiratory syndrome coronavirus 2
VTFFPDLNGDVVAIDYK

SEQ ID NO: 89165 - protein, 17 aa, Severe acute respiratory syndrome coronavirus 2
TFFPDLNGDVVAIDYKH

SEQ ID NO: 89166 - protein, 17 aa, Severe acute respiratory syndrome coronavirus 2
FFPDLNGDVVAIDYKHY

SEQ ID NO: 89167 - protein, 17 aa, Severe acute respiratory syndrome coronavirus 2
FPDLNGDVVAIDYKHYT

SEQ ID NO: 89168 - protein, 17 aa, Severe acute respiratory syndrome coronavirus 2
PDLNGDVVAIDYKHYTP

SEQ ID NO: 89169 - protein, 17 aa, Severe acute respiratory syndrome coronavirus 2
DLNGDVVAIDYKHYTPS

SEQ ID NO: 89170 - protein, 17 aa, Severe acute respiratory syndrome coronavirus 2
TNKATYKPNTWCIRCLW

SEQ ID NO: 89171 - protein, 17 aa, Severe acute respiratory syndrome coronavirus 2
HGLAAVNSVPWDTIANY

SEQ ID NO: 89172 - protein, 17 aa, Severe acute respiratory syndrome coronavirus 2
NKVVSTTTNIVTRCLNR

SEQ ID NO: 89173 - protein, 17 aa, Severe acute respiratory syndrome coronavirus 2
KVVSTTTNIVTRCLNRV

SEQ ID NO: 89174 - protein, 17 aa, Severe acute respiratory syndrome coronavirus 2
VVSTTTNIVTRCLNRVC

SEQ ID NO: 89175 - protein, 17 aa, Severe acute respiratory syndrome coronavirus 2
NYMPYFFTLLLQLCTFT

SEQ ID NO: 89176 - protein, 17 aa, Severe acute respiratory syndrome coronavirus 2
YMPYFFTLLLQLCTFTR

SEQ ID NO: 89177 - protein, 17 aa, Severe acute respiratory syndrome coronavirus 2
VKSVGKFCLEASFNYLK

SEQ ID NO: 89178 - protein, 17 aa, Severe acute respiratory syndrome coronavirus 2
KSVGKFCLEASFNYLKS

SEQ ID NO: 89179 - protein, 17 aa, Severe acute respiratory syndrome coronavirus 2
TYCTGSIPCSVCLSGLD

SEQ ID NO: 89180 - protein, 17 aa, Severe acute respiratory syndrome coronavirus 2
YCTGSIPCSVCLSGLDS

SEQ ID NO: 89181 - protein, 17 aa, Severe acute respiratory syndrome coronavirus 2
SIPCSVCLSGLDSLDTY

SEQ ID NO: 89182 - protein, 17 aa, Severe acute respiratory syndrome coronavirus 2
IPCSVCLSGLDSLDTYP

SEQ ID NO: 89183 - protein, 17 aa, Severe acute respiratory syndrome coronavirus 2
QITISSFKWDLTAFGLV

SEQ ID NO: 89184 - protein, 17 aa, Severe acute respiratory syndrome coronavirus 2
ITISSFKWDLTAFGLVA

SEQ ID NO: 89185 - protein, 17 aa, Severe acute respiratory syndrome coronavirus 2
TISSFKWDLTAFGLVAE

SEQ ID NO: 89186 - protein, 17 aa, Severe acute respiratory syndrome coronavirus 2
ISSFKWDLTAFGLVAEW

SEQ ID NO: 89187 - protein, 17 aa, Severe acute respiratory syndrome coronavirus 2
SSFKWDLTAFGLVAEWF

SEQ ID NO: 89188 - protein, 17 aa, Severe acute respiratory syndrome coronavirus 2
SFKWDLTAFGLVAEWFL

SEQ ID NO: 89189 - protein, 17 aa, Severe acute respiratory syndrome coronavirus 2
FKWDLTAFGLVAEWFLA

SEQ ID NO: 89190 - protein, 17 aa, Severe acute respiratory syndrome coronavirus 2
KWDLTAFGLVAEWFLAY

SEQ ID NO: 89191 - protein, 17 aa, Severe acute respiratory syndrome coronavirus 2
WDLTAFGLVAEWFLAYI

SEQ ID NO: 89192 - protein, 17 aa, Severe acute respiratory syndrome coronavirus 2
DLTAFGLVAEWFLAYIL

SEQ ID NO: 89193 - protein, 17 aa, Severe acute respiratory syndrome coronavirus 2
LTAFGLVAEWFLAYILF

SEQ ID NO: 89194 - protein, 17 aa, Severe acute respiratory syndrome coronavirus 2
TAFGLVAEWFLAYILFT

SEQ ID NO: 89195 - protein, 17 aa, Severe acute respiratory syndrome coronavirus 2
AFGLVAEWFLAYILFTR

SEQ ID NO: 89196 - protein, 17 aa, Severe acute respiratory syndrome coronavirus 2
FGLVAEWFLAYILFTRF

SEQ ID NO: 89197 - protein, 17 aa, Severe acute respiratory syndrome coronavirus 2
GLVAEWFLAYILFTRFF

SEQ ID NO: 89198 - protein, 17 aa, Severe acute respiratory syndrome coronavirus 2
LVAEWFLAYILFTRFFY

SEQ ID NO: 89199 - protein, 17 aa, Severe acute respiratory syndrome coronavirus 2
VAEWFLAYILFTRFFYV

SEQ ID NO: 89200 - protein, 17 aa, Severe acute respiratory syndrome coronavirus 2
AEWFLAYILFTRFFYVL

SEQ ID NO: 89201 - protein, 17 aa, Severe acute respiratory syndrome coronavirus 2
EWFLAYILFTRFFYVLG

SEQ ID NO: 89202 - protein, 17 aa, Severe acute respiratory syndrome coronavirus 2
WFLAYILFTRFFYVLGL

SEQ ID NO: 89203 - protein, 17 aa, Severe acute respiratory syndrome coronavirus 2
FLAYILFTRFFYVLGLA

SEQ ID NO: 89204 - protein, 17 aa, Severe acute respiratory syndrome coronavirus 2
LAYILFTRFFYVLGLAA

SEQ ID NO: 89205 - protein, 17 aa, Severe acute respiratory syndrome coronavirus 2
AYILFTRFFYVLGLAAI

SEQ ID NO: 89206 - protein, 17 aa, Severe acute respiratory syndrome coronavirus 2
YILFTRFFYVLGLAAIM

SEQ ID NO: 89207 - protein, 17 aa, Severe acute respiratory syndrome coronavirus 2
ILFTRFFYVLGLAAIMQ

SEQ ID NO: 89208 - protein, 17 aa, Severe acute respiratory syndrome coronavirus 2
IMQLFFSYFAVHFISNS

SEQ ID NO: 89209 - protein, 17 aa, Severe acute respiratory syndrome coronavirus 2
MQLFFSYFAVHFISNSW

SEQ ID NO: 89210 - protein, 17 aa, Severe acute respiratory syndrome coronavirus 2
QLFFSYFAVHFISNSWL

SEQ ID NO: 89211 - protein, 17 aa, Severe acute respiratory syndrome coronavirus 2
FFSYFAVHFISNSWLMW

SEQ ID NO: 89212 - protein, 17 aa, Severe acute respiratory syndrome coronavirus 2
FSYFAVHFISNSWLMWL

SEQ ID NO: 89213 - protein, 17 aa, Severe acute respiratory syndrome coronavirus 2
SYFAVHFISNSWLMWLI

SEQ ID NO: 89214 - protein, 17 aa, Severe acute respiratory syndrome coronavirus 2
YFAVHFISNSWLMWLII

SEQ ID NO: 89215 - protein, 17 aa, Severe acute respiratory syndrome coronavirus 2
FAVHFISNSWLMWLIIN

SEQ ID NO: 89216 - protein, 17 aa, Severe acute respiratory syndrome coronavirus 2
AVHFISNSWLMWLIINL

SEQ ID NO: 89217 - protein, 17 aa, Severe acute respiratory syndrome coronavirus 2
VHFISNSWLMWLIINLV

SEQ ID NO: 89218 - protein, 17 aa, Severe acute respiratory syndrome coronavirus 2
HFISNSWLMWLIINLVQ

SEQ ID NO: 89219 - protein, 17 aa, Severe acute respiratory syndrome coronavirus 2
FISNSWLMWLIINLVQM

SEQ ID NO: 89220 - protein, 17 aa, Severe acute respiratory syndrome coronavirus 2
ISNSWLMWLIINLVQMA

SEQ ID NO: 89221 - protein, 17 aa, Severe acute respiratory syndrome coronavirus 2
ISAMVRMYIFFASFYYV

SEQ ID NO: 89222 - protein, 17 aa, Severe acute respiratory syndrome coronavirus 2
SAMVRMYIFFASFYYVW

SEQ ID NO: 89223 - protein, 17 aa, Severe acute respiratory syndrome coronavirus 2
AMVRMYIFFASFYYVWK

SEQ ID NO: 89224 - protein, 17 aa, Severe acute respiratory syndrome coronavirus 2
MVRMYIFFASFYYVWKS

SEQ ID NO: 89225 - protein, 17 aa, Severe acute respiratory syndrome coronavirus 2
VRMYIFFASFYYVWKSY

SEQ ID NO: 89226 - protein, 17 aa, Severe acute respiratory syndrome coronavirus 2
RMYIFFASFYYVWKSYV

SEQ ID NO: 89227 - protein, 17 aa, Severe acute respiratory syndrome coronavirus 2
MYIFFASFYYVWKSYVH

SEQ ID NO: 89228 - protein, 17 aa, Severe acute respiratory syndrome coronavirus 2
YIFFASFYYVWKSYVHV

SEQ ID NO: 89229 - protein, 17 aa, Severe acute respiratory syndrome coronavirus 2
IFFASFYYVWKSYVHVV

SEQ ID NO: 89230 - protein, 17 aa, Severe acute respiratory syndrome coronavirus 2
FFASFYYVWKSYVHVVD

SEQ ID NO: 89231 - protein, 17 aa, Severe acute respiratory syndrome coronavirus 2
SSTCMMCYKRNRATRVE

SEQ ID NO: 89232 - protein, 17 aa, Severe acute respiratory syndrome coronavirus 2
STCMMCYKRNRATRVEC

SEQ ID NO: 89233 - protein, 17 aa, Severe acute respiratory syndrome coronavirus 2
TCMMCYKRNRATRVECT

SEQ ID NO: 89234 - protein, 17 aa, Severe acute respiratory syndrome coronavirus 2
CMMCYKRNRATRVECTT

SEQ ID NO: 89235 - protein, 17 aa, Severe acute respiratory syndrome coronavirus 2
MMCYKRNRATRVECTTI

SEQ ID NO: 89236 - protein, 17 aa, Severe acute respiratory syndrome coronavirus 2
MCYKRNRATRVECTTIV

SEQ ID NO: 89237 - protein, 17 aa, Severe acute respiratory syndrome coronavirus 2
CYKRNRATRVECTTIVN

SEQ ID NO: 89238 - protein, 17 aa, Severe acute respiratory syndrome coronavirus 2
YKRNRATRVECTTIVNG

SEQ ID NO: 89239 - protein, 17 aa, Severe acute respiratory syndrome coronavirus 2
KRNRATRVECTTIVNGV

SEQ ID NO: 89240 - protein, 17 aa, Severe acute respiratory syndrome coronavirus 2
RNRATRVECTTIVNGVR

SEQ ID NO: 89241 - protein, 17 aa, Severe acute respiratory syndrome coronavirus 2
SFYVYANGGKGFCKLHN

SEQ ID NO: 89242 - protein, 17 aa, Severe acute respiratory syndrome coronavirus 2
FYVYANGGKGFCKLHNW

SEQ ID NO: 89243 - protein, 17 aa, Severe acute respiratory syndrome coronavirus 2
YANGGKGFCKLHNWNCV

SEQ ID NO: 89244 - protein, 17 aa, Severe acute respiratory syndrome coronavirus 2
ANGGKGFCKLHNWNCVN

SEQ ID NO: 89245 - protein, 17 aa, Severe acute respiratory syndrome coronavirus 2
NGGKGFCKLHNWNCVNC

SEQ ID NO: 89246 - protein, 17 aa, Severe acute respiratory syndrome coronavirus 2
GGKGFCKLHNWNCVNCD

SEQ ID NO: 89247 - protein, 17 aa, Severe acute respiratory syndrome coronavirus 2
GKGFCKLHNWNCVNCDT

SEQ ID NO: 89248 - protein, 17 aa, Severe acute respiratory syndrome coronavirus 2
KGFCKLHNWNCVNCDTF

SEQ ID NO: 89249 - protein, 17 aa, Severe acute respiratory syndrome coronavirus 2
WNCVNCDTFCAGSTFIS

SEQ ID NO: 89250 - protein, 17 aa, Severe acute respiratory syndrome coronavirus 2
NCVNCDTFCAGSTFISD

SEQ ID NO: 89251 - protein, 17 aa, Severe acute respiratory syndrome coronavirus 2
CVNCDTFCAGSTFISDE

SEQ ID NO: 89252 - protein, 17 aa, Severe acute respiratory syndrome coronavirus 2
VNCDTFCAGSTFISDEV

SEQ ID NO: 89253 - protein, 17 aa, Severe acute respiratory syndrome coronavirus 2
NCDTFCAGSTFISDEVA

SEQ ID NO: 89254 - protein, 17 aa, Severe acute respiratory syndrome coronavirus 2
CDTFCAGSTFISDEVAR

SEQ ID NO: 89255 - protein, 17 aa, Severe acute respiratory syndrome coronavirus 2
DTFCAGSTFISDEVARD

SEQ ID NO: 89256 - protein, 17 aa, Severe acute respiratory syndrome coronavirus 2
TFCAGSTFISDEVARDL

SEQ ID NO: 89257 - protein, 17 aa, Severe acute respiratory syndrome coronavirus 2
FCAGSTFISDEVARDLS

SEQ ID NO: 89258 - protein, 17 aa, Severe acute respiratory syndrome coronavirus 2
CAGSTFISDEVARDLSL

SEQ ID NO: 89259 - protein, 17 aa, Severe acute respiratory syndrome coronavirus 2
AGSTFISDEVARDLSLQ

SEQ ID NO: 89260 - protein, 17 aa, Severe acute respiratory syndrome coronavirus 2
GSTFISDEVARDLSLQF

SEQ ID NO: 89261 - protein, 17 aa, Severe acute respiratory syndrome coronavirus 2
STFISDEVARDLSLQFK

SEQ ID NO: 89262 - protein, 17 aa, Severe acute respiratory syndrome coronavirus 2
TFISDEVARDLSLQFKR

SEQ ID NO: 89263 - protein, 17 aa, Severe acute respiratory syndrome coronavirus 2
FISDEVARDLSLQFKRP

SEQ ID NO: 89264 - protein, 17 aa, Severe acute respiratory syndrome coronavirus 2
ISDEVARDLSLQFKRPI

SEQ ID NO: 89265 - protein, 17 aa, Severe acute respiratory syndrome coronavirus 2
LPINVIVFDGKSKCEES

SEQ ID NO: 89266 - protein, 17 aa, Severe acute respiratory syndrome coronavirus 2
PINVIVFDGKSKCEESS

SEQ ID NO: 89267 - protein, 17 aa, Severe acute respiratory syndrome coronavirus 2
SASVYYSQLMCQPILLL

SEQ ID NO: 89268 - protein, 17 aa, Severe acute respiratory syndrome coronavirus 2
ASVYYSQLMCQPILLLD

SEQ ID NO: 89269 - protein, 17 aa, Severe acute respiratory syndrome coronavirus 2
SVYYSQLMCQPILLLDQ

SEQ ID NO: 89270 - protein, 17 aa, Severe acute respiratory syndrome coronavirus 2
VYYSQLMCQPILLLDQA

SEQ ID NO: 89271 - protein, 17 aa, Severe acute respiratory syndrome coronavirus 2
YYSQLMCQPILLLDQAL

SEQ ID NO: 89272 - protein, 17 aa, Severe acute respiratory syndrome coronavirus 2
YSQLMCQPILLLDQALV

SEQ ID NO: 89273 - protein, 17 aa, Severe acute respiratory syndrome coronavirus 2
SQLMCQPILLLDQALVS

SEQ ID NO: 89274 - protein, 17 aa, Severe acute respiratory syndrome coronavirus 2
QLMCQPILLLDQALVSD

SEQ ID NO: 89275 - protein, 17 aa, Severe acute respiratory syndrome coronavirus 2
LDNVLSTFISAARQGFV

SEQ ID NO: 89276 - protein, 17 aa, Severe acute respiratory syndrome coronavirus 2
DNVLSTFISAARQGFVD

SEQ ID NO: 89277 - protein, 17 aa, Severe acute respiratory syndrome coronavirus 2
NVLSTFISAARQGFVDS

SEQ ID NO: 89278 - protein, 17 aa, Severe acute respiratory syndrome coronavirus 2
VLSTFISAARQGFVDSD

SEQ ID NO: 89279 - protein, 17 aa, Severe acute respiratory syndrome coronavirus 2
LSTFISAARQGFVDSDV

SEQ ID NO: 89280 - protein, 17 aa, Severe acute respiratory syndrome coronavirus 2
STFISAARQGFVDSDVE

SEQ ID NO: 89281 - protein, 17 aa, Severe acute respiratory syndrome coronavirus 2
TFISAARQGFVDSDVET

SEQ ID NO: 89282 - protein, 17 aa, Severe acute respiratory syndrome coronavirus 2
FISAARQGFVDSDVETK

SEQ ID NO: 89283 - protein, 17 aa, Severe acute respiratory syndrome coronavirus 2
DVETKDVVECLKLSHQS

SEQ ID NO: 89284 - protein, 17 aa, Severe acute respiratory syndrome coronavirus 2
VETKDVVECLKLSHQSD

SEQ ID NO: 89285 - protein, 17 aa, Severe acute respiratory syndrome coronavirus 2
ETKDVVECLKLSHQSDI

SEQ ID NO: 89286 - protein, 17 aa, Severe acute respiratory syndrome coronavirus 2
TKDVVECLKLSHQSDIE

SEQ ID NO: 89287 - protein, 17 aa, Severe acute respiratory syndrome coronavirus 2
KDVVECLKLSHQSDIEV

SEQ ID NO: 89288 - protein, 17 aa, Severe acute respiratory syndrome coronavirus 2
DVVECLKLSHQSDIEVT

SEQ ID NO: 89289 - protein, 17 aa, Severe acute respiratory syndrome coronavirus 2
VVECLKLSHQSDIEVTG

SEQ ID NO: 89290 - protein, 17 aa, Severe acute respiratory syndrome coronavirus 2
VECLKLSHQSDIEVTGD

SEQ ID NO: 89291 - protein, 17 aa, Severe acute respiratory syndrome coronavirus 2
SLSEQLRKQIRSAAKKN

SEQ ID NO: 89292 - protein, 17 aa, Severe acute respiratory syndrome coronavirus 2
LSEQLRKQIRSAAKKNN

SEQ ID NO: 89293 - protein, 17 aa, Severe acute respiratory syndrome coronavirus 2
SEQLRKQIRSAAKKNNL

SEQ ID NO: 89294 - protein, 17 aa, Severe acute respiratory syndrome coronavirus 2
EQLRKQIRSAAKKNNLP

SEQ ID NO: 89295 - protein, 17 aa, Severe acute respiratory syndrome coronavirus 2
QLRKQIRSAAKKNNLPF

SEQ ID NO: 89296 - protein, 17 aa, Severe acute respiratory syndrome coronavirus 2
LRKQIRSAAKKNNLPFK

SEQ ID NO: 89297 - protein, 17 aa, Severe acute respiratory syndrome coronavirus 2
RKQIRSAAKKNNLPFKL

SEQ ID NO: 89298 - protein, 17 aa, Severe acute respiratory syndrome coronavirus 2
KQIRSAAKKNNLPFKLT

SEQ ID NO: 89299 - protein, 17 aa, Severe acute respiratory syndrome coronavirus 2
QIRSAAKKNNLPFKLTC

SEQ ID NO: 89300 - protein, 17 aa, Severe acute respiratory syndrome coronavirus 2
AAKKNNLPFKLTCATTR

SEQ ID NO: 89301 - protein, 17 aa, Severe acute respiratory syndrome coronavirus 2
AKKNNLPFKLTCATTRQ

SEQ ID NO: 89302 - protein, 17 aa, Severe acute respiratory syndrome coronavirus 2
KKNNLPFKLTCATTRQV

SEQ ID NO: 89303 - protein, 17 aa, Severe acute respiratory syndrome coronavirus 2
KNNLPFKLTCATTRQVV

SEQ ID NO: 89304 - protein, 17 aa, Severe acute respiratory syndrome coronavirus 2
NNLPFKLTCATTRQVVN

SEQ ID NO: 89305 - protein, 17 aa, Severe acute respiratory syndrome coronavirus 2
NLPFKLTCATTRQVVNV

SEQ ID NO: 89306 - protein, 17 aa, Severe acute respiratory syndrome coronavirus 2
LPFKLTCATTRQVVNVV

SEQ ID NO: 89307 - protein, 17 aa, Severe acute respiratory syndrome coronavirus 2
PFKLTCATTRQVVNVVT

SEQ ID NO: 89308 - protein, 17 aa, Severe acute respiratory syndrome coronavirus 2
FKLTCATTRQVVNVVTT

SEQ ID NO: 89309 - protein, 17 aa, Severe acute respiratory syndrome coronavirus 2
KLTCATTRQVVNVVTTK

SEQ ID NO: 89310 - protein, 17 aa, Severe acute respiratory syndrome coronavirus 2
LTCATTRQVVNVVTTKI

SEQ ID NO: 89311 - protein, 17 aa, Severe acute respiratory syndrome coronavirus 2
TCATTRQVVNVVTTKIA

SEQ ID NO: 89312 - protein, 17 aa, Severe acute respiratory syndrome coronavirus 2
CATTRQVVNVVTTKIAL

SEQ ID NO: 89313 - protein, 17 aa, Severe acute respiratory syndrome coronavirus 2
ATTRQVVNVVTTKIALK

SEQ ID NO: 89314 - protein, 17 aa, Severe acute respiratory syndrome coronavirus 2
TTRQVVNVVTTKIALKG

SEQ ID NO: 89315 - protein, 17 aa, Severe acute respiratory syndrome coronavirus 2
TRQVVNVVTTKIALKGG

SEQ ID NO: 89316 - protein, 17 aa, Severe acute respiratory syndrome coronavirus 2
KIVNNWLKQLIKVTLVF

SEQ ID NO: 89317 - protein, 17 aa, Severe acute respiratory syndrome coronavirus 2
IVNNWLKQLIKVTLVFL

SEQ ID NO: 89318 - protein, 17 aa, Severe acute respiratory syndrome coronavirus 2
VNNWLKQLIKVTLVFLF

SEQ ID NO: 89319 - protein, 17 aa, Severe acute respiratory syndrome coronavirus 2
NNWLKQLIKVTLVFLFV

SEQ ID NO: 89320 - protein, 17 aa, Severe acute respiratory syndrome coronavirus 2
QRGGSYTNDKACPLIAA

SEQ ID NO: 89321 - protein, 17 aa, Severe acute respiratory syndrome coronavirus 2
RGGSYTNDKACPLIAAV

SEQ ID NO: 89322 - protein, 17 aa, Severe acute respiratory syndrome coronavirus 2
GGSYTNDKACPLIAAVI

SEQ ID NO: 89323 - protein, 17 aa, Severe acute respiratory syndrome coronavirus 2
GSYTNDKACPLIAAVIT

SEQ ID NO: 89324 - protein, 17 aa, Severe acute respiratory syndrome coronavirus 2
SYTNDKACPLIAAVITR

SEQ ID NO: 89325 - protein, 17 aa, Severe acute respiratory syndrome coronavirus 2
YTNDKACPLIAAVITRE

SEQ ID NO: 89326 - protein, 17 aa, Severe acute respiratory syndrome coronavirus 2
TNDKACPLIAAVITREV

SEQ ID NO: 89327 - protein, 17 aa, Severe acute respiratory syndrome coronavirus 2
TTNGDFLHFLPRVFSAV

SEQ ID NO: 89328 - protein, 17 aa, Severe acute respiratory syndrome coronavirus 2
TNGDFLHFLPRVFSAVG

SEQ ID NO: 89329 - protein, 17 aa, Severe acute respiratory syndrome coronavirus 2
NGDFLHFLPRVFSAVGN

SEQ ID NO: 89330 - protein, 17 aa, Severe acute respiratory syndrome coronavirus 2
GDFLHFLPRVFSAVGNI

SEQ ID NO: 89331 - protein, 17 aa, Severe acute respiratory syndrome coronavirus 2
DFLHFLPRVFSAVGNIC

SEQ ID NO: 89332 - protein, 17 aa, Severe acute respiratory syndrome coronavirus 2
FLHFLPRVFSAVGNICY

SEQ ID NO: 89333 - protein, 17 aa, Severe acute respiratory syndrome coronavirus 2
LHFLPRVFSAVGNICYT

SEQ ID NO: 89334 - protein, 17 aa, Severe acute respiratory syndrome coronavirus 2
HFLPRVFSAVGNICYTP

SEQ ID NO: 89335 - protein, 17 aa, Severe acute respiratory syndrome coronavirus 2
ATSACVLAAECTIFKDA

SEQ ID NO: 89336 - protein, 17 aa, Severe acute respiratory syndrome coronavirus 2
TSACVLAAECTIFKDAS

SEQ ID NO: 89337 - protein, 17 aa, Severe acute respiratory syndrome coronavirus 2
SACVLAAECTIFKDASG

SEQ ID NO: 89338 - protein, 17 aa, Severe acute respiratory syndrome coronavirus 2
ACVLAAECTIFKDASGK

SEQ ID NO: 89339 - protein, 17 aa, Severe acute respiratory syndrome coronavirus 2
CVLAAECTIFKDASGKP

SEQ ID NO: 89340 - protein, 17 aa, Severe acute respiratory syndrome coronavirus 2
VLAAECTIFKDASGKPV

SEQ ID NO: 89341 - protein, 17 aa, Severe acute respiratory syndrome coronavirus 2
LAAECTIFKDASGKPVP

SEQ ID NO: 89342 - protein, 17 aa, Severe acute respiratory syndrome coronavirus 2
AAECTIFKDASGKPVPY

SEQ ID NO: 89343 - protein, 17 aa, Severe acute respiratory syndrome coronavirus 2
AECTIFKDASGKPVPYC

SEQ ID NO: 89344 - protein, 17 aa, Severe acute respiratory syndrome coronavirus 2
ECTIFKDASGKPVPYCY

SEQ ID NO: 89345 - protein, 17 aa, Severe acute respiratory syndrome coronavirus 2
CTIFKDASGKPVPYCYD

SEQ ID NO: 89346 - protein, 17 aa, Severe acute respiratory syndrome coronavirus 2
TIFKDASGKPVPYCYDT

SEQ ID NO: 89347 - protein, 17 aa, Severe acute respiratory syndrome coronavirus 2
IFKDASGKPVPYCYDTN

SEQ ID NO: 89348 - protein, 17 aa, Severe acute respiratory syndrome coronavirus 2
SGKPVPYCYDTNVLEGS

SEQ ID NO: 89349 - protein, 17 aa, Severe acute respiratory syndrome coronavirus 2
GKPVPYCYDTNVLEGSV

SEQ ID NO: 89350 - protein, 17 aa, Severe acute respiratory syndrome coronavirus 2
KPVPYCYDTNVLEGSVA

SEQ ID NO: 89351 - protein, 17 aa, Severe acute respiratory syndrome coronavirus 2
PVPYCYDTNVLEGSVAY

SEQ ID NO: 89352 - protein, 17 aa, Severe acute respiratory syndrome coronavirus 2
VPYCYDTNVLEGSVAYE

SEQ ID NO: 89353 - protein, 17 aa, Severe acute respiratory syndrome coronavirus 2
PYCYDTNVLEGSVAYES

SEQ ID NO: 89354 - protein, 17 aa, Severe acute respiratory syndrome coronavirus 2
YCYDTNVLEGSVAYESL

SEQ ID NO: 89355 - protein, 17 aa, Severe acute respiratory syndrome coronavirus 2
CYDTNVLEGSVAYESLR

SEQ ID NO: 89356 - protein, 17 aa, Severe acute respiratory syndrome coronavirus 2
YDTNVLEGSVAYESLRP

SEQ ID NO: 89357 - protein, 17 aa, Severe acute respiratory syndrome coronavirus 2
DTNVLEGSVAYESLRPD

SEQ ID NO: 89358 - protein, 17 aa, Severe acute respiratory syndrome coronavirus 2
TNVLEGSVAYESLRPDT

SEQ ID NO: 89359 - protein, 17 aa, Severe acute respiratory syndrome coronavirus 2
NVLEGSVAYESLRPDTR

SEQ ID NO: 89360 - protein, 17 aa, Severe acute respiratory syndrome coronavirus 2
VLEGSVAYESLRPDTRY

SEQ ID NO: 89361 - protein, 17 aa, Severe acute respiratory syndrome coronavirus 2
LEGSVAYESLRPDTRYV

SEQ ID NO: 89362 - protein, 17 aa, Severe acute respiratory syndrome coronavirus 2
EGSVAYESLRPDTRYVL

SEQ ID NO: 89363 - protein, 17 aa, Severe acute respiratory syndrome coronavirus 2
GSVAYESLRPDTRYVLM

SEQ ID NO: 89364 - protein, 17 aa, Severe acute respiratory syndrome coronavirus 2
SVAYESLRPDTRYVLMD

SEQ ID NO: 89365 - protein, 17 aa, Severe acute respiratory syndrome coronavirus 2
YESLRPDTRYVLMDGSI

SEQ ID NO: 89366 - protein, 17 aa, Severe acute respiratory syndrome coronavirus 2
ESLRPDTRYVLMDGSII

SEQ ID NO: 89367 - protein, 17 aa, Severe acute respiratory syndrome coronavirus 2
SLRPDTRYVLMDGSIIQ

SEQ ID NO: 89368 - protein, 17 aa, Severe acute respiratory syndrome coronavirus 2
LRPDTRYVLMDGSIIQF

SEQ ID NO: 89369 - protein, 17 aa, Severe acute respiratory syndrome coronavirus 2
GVCVSTSGRWVLNNDYY

SEQ ID NO: 89370 - protein, 17 aa, Severe acute respiratory syndrome coronavirus 2
VCVSTSGRWVLNNDYYR

SEQ ID NO: 89371 - protein, 17 aa, Severe acute respiratory syndrome coronavirus 2
CVSTSGRWVLNNDYYRS

SEQ ID NO: 89372 - protein, 17 aa, Severe acute respiratory syndrome coronavirus 2
VSTSGRWVLNNDYYRSL

SEQ ID NO: 89373 - protein, 17 aa, Severe acute respiratory syndrome coronavirus 2
STSGRWVLNNDYYRSLP

SEQ ID NO: 89374 - protein, 17 aa, Severe acute respiratory syndrome coronavirus 2
TSGRWVLNNDYYRSLPG

SEQ ID NO: 89375 - protein, 17 aa, Severe acute respiratory syndrome coronavirus 2
SGRWVLNNDYYRSLPGV

SEQ ID NO: 89376 - protein, 17 aa, Severe acute respiratory syndrome coronavirus 2
GRWVLNNDYYRSLPGVF

SEQ ID NO: 89377 - protein, 17 aa, Severe acute respiratory syndrome coronavirus 2
RWVLNNDYYRSLPGVFC

SEQ ID NO: 89378 - protein, 17 aa, Severe acute respiratory syndrome coronavirus 2
WVLNNDYYRSLPGVFCG

SEQ ID NO: 89379 - protein, 17 aa, Severe acute respiratory syndrome coronavirus 2
VLNNDYYRSLPGVFCGV

SEQ ID NO: 89380 - protein, 17 aa, Severe acute respiratory syndrome coronavirus 2
LNNDYYRSLPGVFCGVD

SEQ ID NO: 89381 - protein, 17 aa, Severe acute respiratory syndrome coronavirus 2
PLIQPIGALDISASIVA

SEQ ID NO: 89382 - protein, 17 aa, Severe acute respiratory syndrome coronavirus 2
LIQPIGALDISASIVAG

SEQ ID NO: 89383 - protein, 17 aa, Severe acute respiratory syndrome coronavirus 2
IQPIGALDISASIVAGG

SEQ ID NO: 89384 - protein, 17 aa, Severe acute respiratory syndrome coronavirus 2
QPIGALDISASIVAGGI

SEQ ID NO: 89385 - protein, 17 aa, Severe acute respiratory syndrome coronavirus 2
VLCLTPVYSFLPGVYSV

SEQ ID NO: 89386 - protein, 17 aa, Severe acute respiratory syndrome coronavirus 2
FLPGVYSVIYLYLTFYL

SEQ ID NO: 89387 - protein, 17 aa, Severe acute respiratory syndrome coronavirus 2
LPGVYSVIYLYLTFYLT

SEQ ID NO: 89388 - protein, 17 aa, Severe acute respiratory syndrome coronavirus 2
PGVYSVIYLYLTFYLTN

SEQ ID NO: 89389 - protein, 17 aa, Severe acute respiratory syndrome coronavirus 2
GVYSVIYLYLTFYLTND

SEQ ID NO: 89390 - protein, 17 aa, Severe acute respiratory syndrome coronavirus 2
VYSVIYLYLTFYLTNDV

SEQ ID NO: 89391 - protein, 17 aa, Severe acute respiratory syndrome coronavirus 2
YSVIYLYLTFYLTNDVS

SEQ ID NO: 89392 - protein, 17 aa, Severe acute respiratory syndrome coronavirus 2
SVIYLYLTFYLTNDVSF

SEQ ID NO: 89393 - protein, 17 aa, Severe acute respiratory syndrome coronavirus 2
VIYLYLTFYLTNDVSFL

SEQ ID NO: 89394 - protein, 17 aa, Severe acute respiratory syndrome coronavirus 2
YLYLTFYLTNDVSFLAH

SEQ ID NO: 89395 - protein, 17 aa, Severe acute respiratory syndrome coronavirus 2
LYLTFYLTNDVSFLAHI

SEQ ID NO: 89396 - protein, 17 aa, Severe acute respiratory syndrome coronavirus 2
YLTFYLTNDVSFLAHIQ

SEQ ID NO: 89397 - protein, 17 aa, Severe acute respiratory syndrome coronavirus 2
LTFYLTNDVSFLAHIQW

SEQ ID NO: 89398 - protein, 17 aa, Severe acute respiratory syndrome coronavirus 2
TFYLTNDVSFLAHIQWM

SEQ ID NO: 89399 - protein, 17 aa, Severe acute respiratory syndrome coronavirus 2
FYLTNDVSFLAHIQWMV

SEQ ID NO: 89400 - protein, 17 aa, Severe acute respiratory syndrome coronavirus 2
YLTNDVSFLAHIQWMVM

SEQ ID NO: 89401 - protein, 17 aa, Severe acute respiratory syndrome coronavirus 2
HIQWMVMFTPLVPFWIT

SEQ ID NO: 89402 - protein, 17 aa, Severe acute respiratory syndrome coronavirus 2
IQWMVMFTPLVPFWITI

SEQ ID NO: 89403 - protein, 17 aa, Severe acute respiratory syndrome coronavirus 2
YIICISTKHFYWFFSNY

SEQ ID NO: 89404 - protein, 17 aa, Severe acute respiratory syndrome coronavirus 2
IICISTKHFYWFFSNYL

SEQ ID NO: 89405 - protein, 17 aa, Severe acute respiratory syndrome coronavirus 2
ICISTKHFYWFFSNYLK

SEQ ID NO: 89406 - protein, 17 aa, Severe acute respiratory syndrome coronavirus 2
CISTKHFYWFFSNYLKR

SEQ ID NO: 89407 - protein, 17 aa, Severe acute respiratory syndrome coronavirus 2
ISTKHFYWFFSNYLKRR

SEQ ID NO: 89408 - protein, 17 aa, Severe acute respiratory syndrome coronavirus 2
STKHFYWFFSNYLKRRV

SEQ ID NO: 89409 - protein, 17 aa, Severe acute respiratory syndrome coronavirus 2
TKHFYWFFSNYLKRRVV

SEQ ID NO: 89410 - protein, 17 aa, Severe acute respiratory syndrome coronavirus 2
KHFYWFFSNYLKRRVVF

SEQ ID NO: 89411 - protein, 17 aa, Severe acute respiratory syndrome coronavirus 2
HFYWFFSNYLKRRVVFN

SEQ ID NO: 89412 - protein, 17 aa, Severe acute respiratory syndrome coronavirus 2
FYWFFSNYLKRRVVFNG

SEQ ID NO: 89413 - protein, 17 aa, Severe acute respiratory syndrome coronavirus 2
YWFFSNYLKRRVVFNGV

SEQ ID NO: 89414 - protein, 17 aa, Severe acute respiratory syndrome coronavirus 2
WFFSNYLKRRVVFNGVS

SEQ ID NO: 89415 - protein, 17 aa, Severe acute respiratory syndrome coronavirus 2
FFSNYLKRRVVFNGVSF

SEQ ID NO: 89416 - protein, 17 aa, Severe acute respiratory syndrome coronavirus 2
FSNYLKRRVVFNGVSFS

SEQ ID NO: 89417 - protein, 17 aa, Severe acute respiratory syndrome coronavirus 2
SNYLKRRVVFNGVSFST

SEQ ID NO: 89418 - protein, 17 aa, Severe acute respiratory syndrome coronavirus 2
NYLKRRVVFNGVSFSTF

SEQ ID NO: 89419 - protein, 17 aa, Severe acute respiratory syndrome coronavirus 2
YLKRRVVFNGVSFSTFE

SEQ ID NO: 89420 - protein, 17 aa, Severe acute respiratory syndrome coronavirus 2
LKRRVVFNGVSFSTFEE

SEQ ID NO: 89421 - protein, 17 aa, Severe acute respiratory syndrome coronavirus 2
KRRVVFNGVSFSTFEEA

SEQ ID NO: 89422 - protein, 17 aa, Severe acute respiratory syndrome coronavirus 2
RRVVFNGVSFSTFEEAA

SEQ ID NO: 89423 - protein, 17 aa, Severe acute respiratory syndrome coronavirus 2
RVVFNGVSFSTFEEAAL

SEQ ID NO: 89424 - protein, 17 aa, Severe acute respiratory syndrome coronavirus 2
VVFNGVSFSTFEEAALC

SEQ ID NO: 89425 - protein, 17 aa, Severe acute respiratory syndrome coronavirus 2
VFNGVSFSTFEEAALCT

SEQ ID NO: 89426 - protein, 17 aa, Severe acute respiratory syndrome coronavirus 2
FNGVSFSTFEEAALCTF

SEQ ID NO: 89427 - protein, 17 aa, Severe acute respiratory syndrome coronavirus 2
NGVSFSTFEEAALCTFL

SEQ ID NO: 89428 - protein, 17 aa, Severe acute respiratory syndrome coronavirus 2
GVSFSTFEEAALCTFLL

SEQ ID NO: 89429 - protein, 17 aa, Severe acute respiratory syndrome coronavirus 2
VSFSTFEEAALCTFLLN

SEQ ID NO: 89430 - protein, 17 aa, Severe acute respiratory syndrome coronavirus 2
SFSTFEEAALCTFLLNK

SEQ ID NO: 89431 - protein, 17 aa, Severe acute respiratory syndrome coronavirus 2
FSTFEEAALCTFLLNKE

SEQ ID NO: 89432 - protein, 17 aa, Severe acute respiratory syndrome coronavirus 2
STFEEAALCTFLLNKEM

SEQ ID NO: 89433 - protein, 17 aa, Severe acute respiratory syndrome coronavirus 2
TFEEAALCTFLLNKEMY

SEQ ID NO: 89434 - protein, 17 aa, Severe acute respiratory syndrome coronavirus 2
FEEAALCTFLLNKEMYL

SEQ ID NO: 89435 - protein, 17 aa, Severe acute respiratory syndrome coronavirus 2
EEAALCTFLLNKEMYLK

SEQ ID NO: 89436 - protein, 17 aa, Severe acute respiratory syndrome coronavirus 2
EAALCTFLLNKEMYLKL

SEQ ID NO: 89437 - protein, 17 aa, Severe acute respiratory syndrome coronavirus 2
AALCTFLLNKEMYLKLR

SEQ ID NO: 89438 - protein, 17 aa, Severe acute respiratory syndrome coronavirus 2
ALCTFLLNKEMYLKLRS

SEQ ID NO: 89439 - protein, 17 aa, Severe acute respiratory syndrome coronavirus 2
LCTFLLNKEMYLKLRSD

SEQ ID NO: 89440 - protein, 17 aa, Severe acute respiratory syndrome coronavirus 2
CTFLLNKEMYLKLRSDV

SEQ ID NO: 89441 - protein, 17 aa, Severe acute respiratory syndrome coronavirus 2
TFLLNKEMYLKLRSDVL

SEQ ID NO: 89442 - protein, 17 aa, Severe acute respiratory syndrome coronavirus 2
FLLNKEMYLKLRSDVLL

SEQ ID NO: 89443 - protein, 17 aa, Severe acute respiratory syndrome coronavirus 2
LLNKEMYLKLRSDVLLP

SEQ ID NO: 89444 - protein, 17 aa, Severe acute respiratory syndrome coronavirus 2
LAKALNDFSNSGSDVLY

SEQ ID NO: 89445 - protein, 17 aa, Severe acute respiratory syndrome coronavirus 2
AKALNDFSNSGSDVLYQ

SEQ ID NO: 89446 - protein, 17 aa, Severe acute respiratory syndrome coronavirus 2
KALNDFSNSGSDVLYQP

SEQ ID NO: 89447 - protein, 17 aa, Severe acute respiratory syndrome coronavirus 2
ALNDFSNSGSDVLYQPP

SEQ ID NO: 89448 - protein, 17 aa, Severe acute respiratory syndrome coronavirus 2
LNDFSNSGSDVLYQPPQ

SEQ ID NO: 89449 - protein, 17 aa, Severe acute respiratory syndrome coronavirus 2
GSDVLYQPPQTSITSAV

SEQ ID NO: 89450 - protein, 17 aa, Severe acute respiratory syndrome coronavirus 2
SDVLYQPPQTSITSAVL

SEQ ID NO: 89451 - protein, 17 aa, Severe acute respiratory syndrome coronavirus 2
DVLYQPPQTSITSAVLQ

SEQ ID NO: 89452 - protein, 17 aa, Severe acute respiratory syndrome coronavirus 2
CMVQVTCGTTTLNGLWL

SEQ ID NO: 89453 - protein, 17 aa, Severe acute respiratory syndrome coronavirus 2
MVQVTCGTTTLNGLWLD

SEQ ID NO: 89454 - protein, 17 aa, Severe acute respiratory syndrome coronavirus 2
VQVTCGTTTLNGLWLDD

SEQ ID NO: 89455 - protein, 17 aa, Severe acute respiratory syndrome coronavirus 2
QVTCGTTTLNGLWLDDV

SEQ ID NO: 89456 - protein, 17 aa, Severe acute respiratory syndrome coronavirus 2
VTCGTTTLNGLWLDDVV

SEQ ID NO: 89457 - protein, 17 aa, Severe acute respiratory syndrome coronavirus 2
TCGTTTLNGLWLDDVVY

SEQ ID NO: 89458 - protein, 17 aa, Severe acute respiratory syndrome coronavirus 2
CGTTTLNGLWLDDVVYC

SEQ ID NO: 89459 - protein, 17 aa, Severe acute respiratory syndrome coronavirus 2
GTTTLNGLWLDDVVYCP

SEQ ID NO: 89460 - protein, 17 aa, Severe acute respiratory syndrome coronavirus 2
TTTLNGLWLDDVVYCPR

SEQ ID NO: 89461 - protein, 17 aa, Severe acute respiratory syndrome coronavirus 2
TTLNGLWLDDVVYCPRH

SEQ ID NO: 89462 - protein, 17 aa, Severe acute respiratory syndrome coronavirus 2
TLNGLWLDDVVYCPRHV

SEQ ID NO: 89463 - protein, 17 aa, Severe acute respiratory syndrome coronavirus 2
LNGLWLDDVVYCPRHVI

SEQ ID NO: 89464 - protein, 17 aa, Severe acute respiratory syndrome coronavirus 2
NGLWLDDVVYCPRHVIC

SEQ ID NO: 89465 - protein, 17 aa, Severe acute respiratory syndrome coronavirus 2
SFCYMHHMELPTGVHAG

SEQ ID NO: 89466 - protein, 17 aa, Severe acute respiratory syndrome coronavirus 2
FCYMHHMELPTGVHAGT

SEQ ID NO: 89467 - protein, 17 aa, Severe acute respiratory syndrome coronavirus 2
CYMHHMELPTGVHAGTD

SEQ ID NO: 89468 - protein, 17 aa, Severe acute respiratory syndrome coronavirus 2
AGTDTTITVNVLAWLYA

SEQ ID NO: 89469 - protein, 17 aa, Severe acute respiratory syndrome coronavirus 2
GTDTTITVNVLAWLYAA

SEQ ID NO: 89470 - protein, 17 aa, Severe acute respiratory syndrome coronavirus 2
TDTTITVNVLAWLYAAV

SEQ ID NO: 89471 - protein, 17 aa, Severe acute respiratory syndrome coronavirus 2
TITVNVLAWLYAAVING

SEQ ID NO: 89472 - protein, 17 aa, Severe acute respiratory syndrome coronavirus 2
ITVNVLAWLYAAVINGD

SEQ ID NO: 89473 - protein, 17 aa, Severe acute respiratory syndrome coronavirus 2
TVNVLAWLYAAVINGDR

SEQ ID NO: 89474 - protein, 17 aa, Severe acute respiratory syndrome coronavirus 2
VNVLAWLYAAVINGDRW

SEQ ID NO: 89475 - protein, 17 aa, Severe acute respiratory syndrome coronavirus 2
NVLAWLYAAVINGDRWF

SEQ ID NO: 89476 - protein, 17 aa, Severe acute respiratory syndrome coronavirus 2
NLVAMKYNYEPLTQDHV

SEQ ID NO: 89477 - protein, 17 aa, Severe acute respiratory syndrome coronavirus 2
TILGSALLEDEFTPFDV

SEQ ID NO: 89478 - protein, 17 aa, Severe acute respiratory syndrome coronavirus 2
ILGSALLEDEFTPFDVV

SEQ ID NO: 89479 - protein, 17 aa, Severe acute respiratory syndrome coronavirus 2
LGSALLEDEFTPFDVVR

SEQ ID NO: 89480 - protein, 17 aa, Severe acute respiratory syndrome coronavirus 2
GSALLEDEFTPFDVVRQ

SEQ ID NO: 89481 - protein, 17 aa, Severe acute respiratory syndrome coronavirus 2
SALLEDEFTPFDVVRQC

SEQ ID NO: 89482 - protein, 17 aa, Severe acute respiratory syndrome coronavirus 2
ALLEDEFTPFDVVRQCS

SEQ ID NO: 89483 - protein, 17 aa, Severe acute respiratory syndrome coronavirus 2
LLEDEFTPFDVVRQCSG

SEQ ID NO: 89484 - protein, 17 aa, Severe acute respiratory syndrome coronavirus 2
LEDEFTPFDVVRQCSGV

SEQ ID NO: 89485 - protein, 17 aa, Severe acute respiratory syndrome coronavirus 2
EDEFTPFDVVRQCSGVT

SEQ ID NO: 89486 - protein, 17 aa, Severe acute respiratory syndrome coronavirus 2
DEFTPFDVVRQCSGVTF

SEQ ID NO: 89487 - protein, 17 aa, Severe acute respiratory syndrome coronavirus 2
EFTPFDVVRQCSGVTFQ

SEQ ID NO: 89488 - protein, 17 aa, Severe acute respiratory syndrome coronavirus 2
SAVKRTIKGTHHWLLLT

SEQ ID NO: 89489 - protein, 17 aa, Severe acute respiratory syndrome coronavirus 2
AVKRTIKGTHHWLLLTI

SEQ ID NO: 89490 - protein, 17 aa, Severe acute respiratory syndrome coronavirus 2
VKRTIKGTHHWLLLTIL

SEQ ID NO: 89491 - protein, 17 aa, Severe acute respiratory syndrome coronavirus 2
KRTIKGTHHWLLLTILT

SEQ ID NO: 89492 - protein, 17 aa, Severe acute respiratory syndrome coronavirus 2
RTIKGTHHWLLLTILTS

SEQ ID NO: 89493 - protein, 17 aa, Severe acute respiratory syndrome coronavirus 2
TIKGTHHWLLLTILTSL

SEQ ID NO: 89494 - protein, 17 aa, Severe acute respiratory syndrome coronavirus 2
IKGTHHWLLLTILTSLL

SEQ ID NO: 89495 - protein, 17 aa, Severe acute respiratory syndrome coronavirus 2
KGTHHWLLLTILTSLLV

SEQ ID NO: 89496 - protein, 17 aa, Severe acute respiratory syndrome coronavirus 2
GTHHWLLLTILTSLLVL

SEQ ID NO: 89497 - protein, 17 aa, Severe acute respiratory syndrome coronavirus 2
THHWLLLTILTSLLVLV

SEQ ID NO: 89498 - protein, 17 aa, Severe acute respiratory syndrome coronavirus 2
HHWLLLTILTSLLVLVQ

SEQ ID NO: 89499 - protein, 17 aa, Severe acute respiratory syndrome coronavirus 2
HWLLLTILTSLLVLVQS

SEQ ID NO: 89500 - protein, 17 aa, Severe acute respiratory syndrome coronavirus 2
WLLLTILTSLLVLVQST

SEQ ID NO: 89501 - protein, 17 aa, Severe acute respiratory syndrome coronavirus 2
LLLTILTSLLVLVQSTQ

SEQ ID NO: 89502 - protein, 17 aa, Severe acute respiratory syndrome coronavirus 2
LLTILTSLLVLVQSTQW

SEQ ID NO: 89503 - protein, 17 aa, Severe acute respiratory syndrome coronavirus 2
LTILTSLLVLVQSTQWS

SEQ ID NO: 89504 - protein, 17 aa, Severe acute respiratory syndrome coronavirus 2
TILTSLLVLVQSTQWSL

SEQ ID NO: 89505 - protein, 17 aa, Severe acute respiratory syndrome coronavirus 2
ILTSLLVLVQSTQWSLF

SEQ ID NO: 89506 - protein, 17 aa, Severe acute respiratory syndrome coronavirus 2
MGIIAMSAFAMMFVKHK

SEQ ID NO: 89507 - protein, 17 aa, Severe acute respiratory syndrome coronavirus 2
GIIAMSAFAMMFVKHKH

SEQ ID NO: 89508 - protein, 17 aa, Severe acute respiratory syndrome coronavirus 2
IIAMSAFAMMFVKHKHA

SEQ ID NO: 89509 - protein, 17 aa, Severe acute respiratory syndrome coronavirus 2
IAMSAFAMMFVKHKHAF

SEQ ID NO: 89510 - protein, 17 aa, Severe acute respiratory syndrome coronavirus 2
AMSAFAMMFVKHKHAFL

SEQ ID NO: 89511 - protein, 17 aa, Severe acute respiratory syndrome coronavirus 2
MSAFAMMFVKHKHAFLC

SEQ ID NO: 89512 - protein, 17 aa, Severe acute respiratory syndrome coronavirus 2
SAFAMMFVKHKHAFLCL

SEQ ID NO: 89513 - protein, 17 aa, Severe acute respiratory syndrome coronavirus 2
AFAMMFVKHKHAFLCLF

SEQ ID NO: 89514 - protein, 17 aa, Severe acute respiratory syndrome coronavirus 2
FAMMFVKHKHAFLCLFL

SEQ ID NO: 89515 - protein, 17 aa, Severe acute respiratory syndrome coronavirus 2
AMMFVKHKHAFLCLFLL

SEQ ID NO: 89516 - protein, 17 aa, Severe acute respiratory syndrome coronavirus 2
MMFVKHKHAFLCLFLLP

SEQ ID NO: 89517 - protein, 17 aa, Severe acute respiratory syndrome coronavirus 2
MFVKHKHAFLCLFLLPS

SEQ ID NO: 89518 - protein, 17 aa, Severe acute respiratory syndrome coronavirus 2
TVAYFNMVYMPASWVMR

SEQ ID NO: 89519 - protein, 17 aa, Severe acute respiratory syndrome coronavirus 2
VAYFNMVYMPASWVMRI

SEQ ID NO: 89520 - protein, 17 aa, Severe acute respiratory syndrome coronavirus 2
AYFNMVYMPASWVMRIM

SEQ ID NO: 89521 - protein, 17 aa, Severe acute respiratory syndrome coronavirus 2
YFNMVYMPASWVMRIMT

SEQ ID NO: 89522 - protein, 17 aa, Severe acute respiratory syndrome coronavirus 2
FNMVYMPASWVMRIMTW

SEQ ID NO: 89523 - protein, 17 aa, Severe acute respiratory syndrome coronavirus 2
NMVYMPASWVMRIMTWL

SEQ ID NO: 89524 - protein, 17 aa, Severe acute respiratory syndrome coronavirus 2
MVDTSLSGFKLKDCVMY

SEQ ID NO: 89525 - protein, 17 aa, Severe acute respiratory syndrome coronavirus 2
VDTSLSGFKLKDCVMYA

SEQ ID NO: 89526 - protein, 17 aa, Severe acute respiratory syndrome coronavirus 2
DTSLSGFKLKDCVMYAS

SEQ ID NO: 89527 - protein, 17 aa, Severe acute respiratory syndrome coronavirus 2
TSLSGFKLKDCVMYASA

SEQ ID NO: 89528 - protein, 17 aa, Severe acute respiratory syndrome coronavirus 2
SLSGFKLKDCVMYASAV

SEQ ID NO: 89529 - protein, 17 aa, Severe acute respiratory syndrome coronavirus 2
LSGFKLKDCVMYASAVV

SEQ ID NO: 89530 - protein, 17 aa, Severe acute respiratory syndrome coronavirus 2
SGFKLKDCVMYASAVVL

SEQ ID NO: 89531 - protein, 17 aa, Severe acute respiratory syndrome coronavirus 2
GFKLKDCVMYASAVVLL

SEQ ID NO: 89532 - protein, 17 aa, Severe acute respiratory syndrome coronavirus 2
FKLKDCVMYASAVVLLI

SEQ ID NO: 89533 - protein, 17 aa, Severe acute respiratory syndrome coronavirus 2
KLKDCVMYASAVVLLIL

SEQ ID NO: 89534 - protein, 17 aa, Severe acute respiratory syndrome coronavirus 2
LKDCVMYASAVVLLILM

SEQ ID NO: 89535 - protein, 17 aa, Severe acute respiratory syndrome coronavirus 2
KDCVMYASAVVLLILMT

SEQ ID NO: 89536 - protein, 17 aa, Severe acute respiratory syndrome coronavirus 2
IVFMCVEYCPIFFITGN

SEQ ID NO: 89537 - protein, 17 aa, Severe acute respiratory syndrome coronavirus 2
VFMCVEYCPIFFITGNT

SEQ ID NO: 89538 - protein, 17 aa, Severe acute respiratory syndrome coronavirus 2
FMCVEYCPIFFITGNTL

SEQ ID NO: 89539 - protein, 17 aa, Severe acute respiratory syndrome coronavirus 2
CIMLVYCFLGYFCTCYF

SEQ ID NO: 89540 - protein, 17 aa, Severe acute respiratory syndrome coronavirus 2
IMLVYCFLGYFCTCYFG

SEQ ID NO: 89541 - protein, 17 aa, Severe acute respiratory syndrome coronavirus 2
MLVYCFLGYFCTCYFGL

SEQ ID NO: 89542 - protein, 17 aa, Severe acute respiratory syndrome coronavirus 2
LVYCFLGYFCTCYFGLF

SEQ ID NO: 89543 - protein, 17 aa, Severe acute respiratory syndrome coronavirus 2
VYCFLGYFCTCYFGLFC

SEQ ID NO: 89544 - protein, 17 aa, Severe acute respiratory syndrome coronavirus 2
YCFLGYFCTCYFGLFCL

SEQ ID NO: 89545 - protein, 17 aa, Severe acute respiratory syndrome coronavirus 2
CYFGLFCLLNRYFRLTL

SEQ ID NO: 89546 - protein, 17 aa, Severe acute respiratory syndrome coronavirus 2
YFGLFCLLNRYFRLTLG

SEQ ID NO: 89547 - protein, 17 aa, Severe acute respiratory syndrome coronavirus 2
FGLFCLLNRYFRLTLGV

SEQ ID NO: 89548 - protein, 17 aa, Severe acute respiratory syndrome coronavirus 2
GLFCLLNRYFRLTLGVY

SEQ ID NO: 89549 - protein, 17 aa, Severe acute respiratory syndrome coronavirus 2
LFCLLNRYFRLTLGVYD

SEQ ID NO: 89550 - protein, 17 aa, Severe acute respiratory syndrome coronavirus 2
FCLLNRYFRLTLGVYDY

SEQ ID NO: 89551 - protein, 17 aa, Severe acute respiratory syndrome coronavirus 2
CLLNRYFRLTLGVYDYL

SEQ ID NO: 89552 - protein, 17 aa, Severe acute respiratory syndrome coronavirus 2
NRYFRLTLGVYDYLVST

SEQ ID NO: 89553 - protein, 17 aa, Severe acute respiratory syndrome coronavirus 2
RYFRLTLGVYDYLVSTQ

SEQ ID NO: 89554 - protein, 17 aa, Severe acute respiratory syndrome coronavirus 2
YFRLTLGVYDYLVSTQE

SEQ ID NO: 89555 - protein, 17 aa, Severe acute respiratory syndrome coronavirus 2
FRLTLGVYDYLVSTQEF

SEQ ID NO: 89556 - protein, 17 aa, Severe acute respiratory syndrome coronavirus 2
RLTLGVYDYLVSTQEFR

SEQ ID NO: 89557 - protein, 17 aa, Severe acute respiratory syndrome coronavirus 2
LTLGVYDYLVSTQEFRY

SEQ ID NO: 89558 - protein, 17 aa, Severe acute respiratory syndrome coronavirus 2
TLGVYDYLVSTQEFRYM

SEQ ID NO: 89559 - protein, 17 aa, Severe acute respiratory syndrome coronavirus 2
LGVYDYLVSTQEFRYMN

SEQ ID NO: 89560 - protein, 17 aa, Severe acute respiratory syndrome coronavirus 2
GVYDYLVSTQEFRYMNS

SEQ ID NO: 89561 - protein, 17 aa, Severe acute respiratory syndrome coronavirus 2
VYDYLVSTQEFRYMNSQ

SEQ ID NO: 89562 - protein, 17 aa, Severe acute respiratory syndrome coronavirus 2
YDYLVSTQEFRYMNSQG

SEQ ID NO: 89563 - protein, 17 aa, Severe acute respiratory syndrome coronavirus 2
DYLVSTQEFRYMNSQGL

SEQ ID NO: 89564 - protein, 17 aa, Severe acute respiratory syndrome coronavirus 2
SKMSDVKCTSVVLLSVL

SEQ ID NO: 89565 - protein, 17 aa, Severe acute respiratory syndrome coronavirus 2
KMSDVKCTSVVLLSVLQ

SEQ ID NO: 89566 - protein, 17 aa, Severe acute respiratory syndrome coronavirus 2
MSDVKCTSVVLLSVLQQ

SEQ ID NO: 89567 - protein, 17 aa, Severe acute respiratory syndrome coronavirus 2
SDVKCTSVVLLSVLQQL

SEQ ID NO: 89568 - protein, 17 aa, Severe acute respiratory syndrome coronavirus 2
DVKCTSVVLLSVLQQLR

SEQ ID NO: 89569 - protein, 17 aa, Severe acute respiratory syndrome coronavirus 2
VKCTSVVLLSVLQQLRV

SEQ ID NO: 89570 - protein, 17 aa, Severe acute respiratory syndrome coronavirus 2
KCTSVVLLSVLQQLRVE

SEQ ID NO: 89571 - protein, 17 aa, Severe acute respiratory syndrome coronavirus 2
CTSVVLLSVLQQLRVES

SEQ ID NO: 89572 - protein, 17 aa, Severe acute respiratory syndrome coronavirus 2
CVQLHNDILLAKDTTEA

SEQ ID NO: 89573 - protein, 17 aa, Severe acute respiratory syndrome coronavirus 2
VQLHNDILLAKDTTEAF

SEQ ID NO: 89574 - protein, 17 aa, Severe acute respiratory syndrome coronavirus 2
QLHNDILLAKDTTEAFE

SEQ ID NO: 89575 - protein, 17 aa, Severe acute respiratory syndrome coronavirus 2
LHNDILLAKDTTEAFEK

SEQ ID NO: 89576 - protein, 17 aa, Severe acute respiratory syndrome coronavirus 2
HNDILLAKDTTEAFEKM

SEQ ID NO: 89577 - protein, 17 aa, Severe acute respiratory syndrome coronavirus 2
NDILLAKDTTEAFEKMV

SEQ ID NO: 89578 - protein, 17 aa, Severe acute respiratory syndrome coronavirus 2
DILLAKDTTEAFEKMVS

SEQ ID NO: 89579 - protein, 17 aa, Severe acute respiratory syndrome coronavirus 2
ILLAKDTTEAFEKMVSL

SEQ ID NO: 89580 - protein, 17 aa, Severe acute respiratory syndrome coronavirus 2
LLAKDTTEAFEKMVSLL

SEQ ID NO: 89581 - protein, 17 aa, Severe acute respiratory syndrome coronavirus 2
LAKDTTEAFEKMVSLLS

SEQ ID NO: 89582 - protein, 17 aa, Severe acute respiratory syndrome coronavirus 2
KMVSLLSVLLSMQGAVD

SEQ ID NO: 89583 - protein, 17 aa, Severe acute respiratory syndrome coronavirus 2
MVSLLSVLLSMQGAVDI

SEQ ID NO: 89584 - protein, 17 aa, Severe acute respiratory syndrome coronavirus 2
VSLLSVLLSMQGAVDIN

SEQ ID NO: 89585 - protein, 17 aa, Severe acute respiratory syndrome coronavirus 2
SLLSVLLSMQGAVDINK

SEQ ID NO: 89586 - protein, 17 aa, Severe acute respiratory syndrome coronavirus 2
LLSMQGAVDINKLCEEM

SEQ ID NO: 89587 - protein, 17 aa, Severe acute respiratory syndrome coronavirus 2
LSMQGAVDINKLCEEML

SEQ ID NO: 89588 - protein, 17 aa, Severe acute respiratory syndrome coronavirus 2
GAVDINKLCEEMLDNRA

SEQ ID NO: 89589 - protein, 17 aa, Severe acute respiratory syndrome coronavirus 2
AVDINKLCEEMLDNRAT

SEQ ID NO: 89590 - protein, 17 aa, Severe acute respiratory syndrome coronavirus 2
VDINKLCEEMLDNRATL

SEQ ID NO: 89591 - protein, 17 aa, Severe acute respiratory syndrome coronavirus 2
DINKLCEEMLDNRATLQ

SEQ ID NO: 89592 - protein, 17 aa, Severe acute respiratory syndrome coronavirus 2
YEQAVANGDSEVVLKKL

SEQ ID NO: 89593 - protein, 17 aa, Severe acute respiratory syndrome coronavirus 2
EQAVANGDSEVVLKKLK

SEQ ID NO: 89594 - protein, 17 aa, Severe acute respiratory syndrome coronavirus 2
QAVANGDSEVVLKKLKK

SEQ ID NO: 89595 - protein, 17 aa, Severe acute respiratory syndrome coronavirus 2
AMQRKLEKMADQAMTQM

SEQ ID NO: 89596 - protein, 17 aa, Severe acute respiratory syndrome coronavirus 2
MQRKLEKMADQAMTQMY

SEQ ID NO: 89597 - protein, 17 aa, Severe acute respiratory syndrome coronavirus 2
QRKLEKMADQAMTQMYK

SEQ ID NO: 89598 - protein, 17 aa, Severe acute respiratory syndrome coronavirus 2
RKLEKMADQAMTQMYKQ

SEQ ID NO: 89599 - protein, 17 aa, Severe acute respiratory syndrome coronavirus 2
KLEKMADQAMTQMYKQA

SEQ ID NO: 89600 - protein, 17 aa, Severe acute respiratory syndrome coronavirus 2
LEKMADQAMTQMYKQAR

SEQ ID NO: 89601 - protein, 17 aa, Severe acute respiratory syndrome coronavirus 2
EKMADQAMTQMYKQARS

SEQ ID NO: 89602 - protein, 17 aa, Severe acute respiratory syndrome coronavirus 2
KMADQAMTQMYKQARSE

SEQ ID NO: 89603 - protein, 17 aa, Severe acute respiratory syndrome coronavirus 2
MADQAMTQMYKQARSED

SEQ ID NO: 89604 - protein, 17 aa, Severe acute respiratory syndrome coronavirus 2
ADQAMTQMYKQARSEDK

SEQ ID NO: 89605 - protein, 17 aa, Severe acute respiratory syndrome coronavirus 2
DQAMTQMYKQARSEDKR

SEQ ID NO: 89606 - protein, 17 aa, Severe acute respiratory syndrome coronavirus 2
QAMTQMYKQARSEDKRA

SEQ ID NO: 89607 - protein, 17 aa, Severe acute respiratory syndrome coronavirus 2
AMTQMYKQARSEDKRAK

SEQ ID NO: 89608 - protein, 17 aa, Severe acute respiratory syndrome coronavirus 2
QARSEDKRAKVTSAMQT

SEQ ID NO: 89609 - protein, 17 aa, Severe acute respiratory syndrome coronavirus 2
ARSEDKRAKVTSAMQTM

SEQ ID NO: 89610 - protein, 17 aa, Severe acute respiratory syndrome coronavirus 2
RSEDKRAKVTSAMQTML

SEQ ID NO: 89611 - protein, 17 aa, Severe acute respiratory syndrome coronavirus 2
SEDKRAKVTSAMQTMLF

SEQ ID NO: 89612 - protein, 17 aa, Severe acute respiratory syndrome coronavirus 2
EDKRAKVTSAMQTMLFT

SEQ ID NO: 89613 - protein, 17 aa, Severe acute respiratory syndrome coronavirus 2
DKRAKVTSAMQTMLFTM

SEQ ID NO: 89614 - protein, 17 aa, Severe acute respiratory syndrome coronavirus 2
KRAKVTSAMQTMLFTML

SEQ ID NO: 89615 - protein, 17 aa, Severe acute respiratory syndrome coronavirus 2
RAKVTSAMQTMLFTMLR

SEQ ID NO: 89616 - protein, 17 aa, Severe acute respiratory syndrome coronavirus 2
AKVTSAMQTMLFTMLRK

SEQ ID NO: 89617 - protein, 17 aa, Severe acute respiratory syndrome coronavirus 2
KVTSAMQTMLFTMLRKL

SEQ ID NO: 89618 - protein, 17 aa, Severe acute respiratory syndrome coronavirus 2
VTSAMQTMLFTMLRKLD

SEQ ID NO: 89619 - protein, 17 aa, Severe acute respiratory syndrome coronavirus 2
TSAMQTMLFTMLRKLDN

SEQ ID NO: 89620 - protein, 17 aa, Severe acute respiratory syndrome coronavirus 2
RKLDNDALNNIINNARD

SEQ ID NO: 89621 - protein, 17 aa, Severe acute respiratory syndrome coronavirus 2
DNDALNNIINNARDGCV

SEQ ID NO: 89622 - protein, 17 aa, Severe acute respiratory syndrome coronavirus 2
NDALNNIINNARDGCVP

SEQ ID NO: 89623 - protein, 17 aa, Severe acute respiratory syndrome coronavirus 2
DALNNIINNARDGCVPL

SEQ ID NO: 89624 - protein, 17 aa, Severe acute respiratory syndrome coronavirus 2
ALNNIINNARDGCVPLN

SEQ ID NO: 89625 - protein, 17 aa, Severe acute respiratory syndrome coronavirus 2
LNNIINNARDGCVPLNI

SEQ ID NO: 89626 - protein, 17 aa, Severe acute respiratory syndrome coronavirus 2
IINNARDGCVPLNIIPL

SEQ ID NO: 89627 - protein, 17 aa, Severe acute respiratory syndrome coronavirus 2
INNARDGCVPLNIIPLT

SEQ ID NO: 89628 - protein, 17 aa, Severe acute respiratory syndrome coronavirus 2
LWEIQQVVDADSKIVQL

SEQ ID NO: 89629 - protein, 17 aa, Severe acute respiratory syndrome coronavirus 2
WEIQQVVDADSKIVQLS

SEQ ID NO: 89630 - protein, 17 aa, Severe acute respiratory syndrome coronavirus 2
EIQQVVDADSKIVQLSE

SEQ ID NO: 89631 - protein, 17 aa, Severe acute respiratory syndrome coronavirus 2
IQQVVDADSKIVQLSEI

SEQ ID NO: 89632 - protein, 17 aa, Severe acute respiratory syndrome coronavirus 2
QQVVDADSKIVQLSEIS

SEQ ID NO: 89633 - protein, 17 aa, Severe acute respiratory syndrome coronavirus 2
QVVDADSKIVQLSEISM

SEQ ID NO: 89634 - protein, 17 aa, Severe acute respiratory syndrome coronavirus 2
VVDADSKIVQLSEISMD

SEQ ID NO: 89635 - protein, 17 aa, Severe acute respiratory syndrome coronavirus 2
VDADSKIVQLSEISMDN

SEQ ID NO: 89636 - protein, 17 aa, Severe acute respiratory syndrome coronavirus 2
DADSKIVQLSEISMDNS

SEQ ID NO: 89637 - protein, 17 aa, Severe acute respiratory syndrome coronavirus 2
ADSKIVQLSEISMDNSP

SEQ ID NO: 89638 - protein, 17 aa, Severe acute respiratory syndrome coronavirus 2
DSKIVQLSEISMDNSPN

SEQ ID NO: 89639 - protein, 17 aa, Severe acute respiratory syndrome coronavirus 2
SKIVQLSEISMDNSPNL

SEQ ID NO: 89640 - protein, 17 aa, Severe acute respiratory syndrome coronavirus 2
KIVQLSEISMDNSPNLA

SEQ ID NO: 89641 - protein, 17 aa, Severe acute respiratory syndrome coronavirus 2
IVQLSEISMDNSPNLAW

SEQ ID NO: 89642 - protein, 17 aa, Severe acute respiratory syndrome coronavirus 2
VQLSEISMDNSPNLAWP

SEQ ID NO: 89643 - protein, 17 aa, Severe acute respiratory syndrome coronavirus 2
QLSEISMDNSPNLAWPL

SEQ ID NO: 89644 - protein, 17 aa, Severe acute respiratory syndrome coronavirus 2
LSEISMDNSPNLAWPLI

SEQ ID NO: 89645 - protein, 17 aa, Severe acute respiratory syndrome coronavirus 2
SEISMDNSPNLAWPLIV

SEQ ID NO: 89646 - protein, 17 aa, Severe acute respiratory syndrome coronavirus 2
GRFVLALLSDLQDLKWA

SEQ ID NO: 89647 - protein, 17 aa, Severe acute respiratory syndrome coronavirus 2
ALLSDLQDLKWARFPKS

SEQ ID NO: 89648 - protein, 17 aa, Severe acute respiratory syndrome coronavirus 2
LLSDLQDLKWARFPKSD

SEQ ID NO: 89649 - protein, 17 aa, Severe acute respiratory syndrome coronavirus 2
TDTPKGPKVKYLYFIKG

SEQ ID NO: 89650 - protein, 17 aa, Severe acute respiratory syndrome coronavirus 2
DTPKGPKVKYLYFIKGL

SEQ ID NO: 89651 - protein, 17 aa, Severe acute respiratory syndrome coronavirus 2
TPKGPKVKYLYFIKGLN

SEQ ID NO: 89652 - protein, 17 aa, Severe acute respiratory syndrome coronavirus 2
PKGPKVKYLYFIKGLNN

SEQ ID NO: 89653 - protein, 17 aa, Severe acute respiratory syndrome coronavirus 2
KGPKVKYLYFIKGLNNL

SEQ ID NO: 89654 - protein, 17 aa, Severe acute respiratory syndrome coronavirus 2
GPKVKYLYFIKGLNNLN

SEQ ID NO: 89655 - protein, 17 aa, Severe acute respiratory syndrome coronavirus 2
PKVKYLYFIKGLNNLNR

SEQ ID NO: 89656 - protein, 17 aa, Severe acute respiratory syndrome coronavirus 2
KVKYLYFIKGLNNLNRG

SEQ ID NO: 89657 - protein, 17 aa, Severe acute respiratory syndrome coronavirus 2
VKYLYFIKGLNNLNRGM

SEQ ID NO: 89658 - protein, 17 aa, Severe acute respiratory syndrome coronavirus 2
KYLYFIKGLNNLNRGMV

SEQ ID NO: 89659 - protein, 17 aa, Severe acute respiratory syndrome coronavirus 2
YLYFIKGLNNLNRGMVL

SEQ ID NO: 89660 - protein, 17 aa, Severe acute respiratory syndrome coronavirus 2
VLSFCAFAVDAAKAYKD

SEQ ID NO: 89661 - protein, 17 aa, Severe acute respiratory syndrome coronavirus 2
LSFCAFAVDAAKAYKDY

SEQ ID NO: 89662 - protein, 17 aa, Severe acute respiratory syndrome coronavirus 2
SFCAFAVDAAKAYKDYL

SEQ ID NO: 89663 - protein, 17 aa, Severe acute respiratory syndrome coronavirus 2
FCAFAVDAAKAYKDYLA

SEQ ID NO: 89664 - protein, 17 aa, Severe acute respiratory syndrome coronavirus 2
CAFAVDAAKAYKDYLAS

SEQ ID NO: 89665 - protein, 17 aa, Severe acute respiratory syndrome coronavirus 2
AFAVDAAKAYKDYLASG

SEQ ID NO: 89666 - protein, 17 aa, Severe acute respiratory syndrome coronavirus 2
FAVDAAKAYKDYLASGG

SEQ ID NO: 89667 - protein, 17 aa, Severe acute respiratory syndrome coronavirus 2
AVDAAKAYKDYLASGGQ

SEQ ID NO: 89668 - protein, 17 aa, Severe acute respiratory syndrome coronavirus 2
VDAAKAYKDYLASGGQP

SEQ ID NO: 89669 - protein, 17 aa, Severe acute respiratory syndrome coronavirus 2
DAAKAYKDYLASGGQPI

SEQ ID NO: 89670 - protein, 17 aa, Severe acute respiratory syndrome coronavirus 2
AAKAYKDYLASGGQPIT

SEQ ID NO: 89671 - protein, 17 aa, Severe acute respiratory syndrome coronavirus 2
AKAYKDYLASGGQPITN

SEQ ID NO: 89672 - protein, 17 aa, Severe acute respiratory syndrome coronavirus 2
KAYKDYLASGGQPITNC

SEQ ID NO: 89673 - protein, 17 aa, Severe acute respiratory syndrome coronavirus 2
AYKDYLASGGQPITNCV

SEQ ID NO: 89674 - protein, 17 aa, Severe acute respiratory syndrome coronavirus 2
YKDYLASGGQPITNCVK

SEQ ID NO: 89675 - protein, 17 aa, Severe acute respiratory syndrome coronavirus 2
KDYLASGGQPITNCVKM

SEQ ID NO: 89676 - protein, 17 aa, Severe acute respiratory syndrome coronavirus 2
DYLASGGQPITNCVKML

SEQ ID NO: 89677 - protein, 17 aa, Severe acute respiratory syndrome coronavirus 2
YLASGGQPITNCVKMLC

SEQ ID NO: 89678 - protein, 17 aa, Severe acute respiratory syndrome coronavirus 2
LASGGQPITNCVKMLCT

SEQ ID NO: 89679 - protein, 17 aa, Severe acute respiratory syndrome coronavirus 2
GGQPITNCVKMLCTHTG

SEQ ID NO: 89680 - protein, 17 aa, Severe acute respiratory syndrome coronavirus 2
QESFGGASCCLYCRCHI

SEQ ID NO: 89681 - protein, 17 aa, Severe acute respiratory syndrome coronavirus 2
DHPNPKGFCDLKGKYVQ

SEQ ID NO: 89682 - protein, 17 aa, Severe acute respiratory syndrome coronavirus 2
NPKGFCDLKGKYVQIPT

SEQ ID NO: 89683 - protein, 18 aa, Severe acute respiratory syndrome coronavirus 2
YTERSEKSYELQTPFEIK

SEQ ID NO: 89684 - protein, 18 aa, Severe acute respiratory syndrome coronavirus 2
TERSEKSYELQTPFEIKL

SEQ ID NO: 89685 - protein, 18 aa, Severe acute respiratory syndrome coronavirus 2
ERSEKSYELQTPFEIKLA

SEQ ID NO: 89686 - protein, 18 aa, Severe acute respiratory syndrome coronavirus 2
RSEKSYELQTPFEIKLAK

SEQ ID NO: 89687 - protein, 18 aa, Severe acute respiratory syndrome coronavirus 2
SEKSYELQTPFEIKLAKK

SEQ ID NO: 89688 - protein, 18 aa, Severe acute respiratory syndrome coronavirus 2
EKSYELQTPFEIKLAKKF

SEQ ID NO: 89689 - protein, 18 aa, Severe acute respiratory syndrome coronavirus 2
KSYELQTPFEIKLAKKFD

SEQ ID NO: 89690 - protein, 18 aa, Severe acute respiratory syndrome coronavirus 2
EKVNINIVGDFKLNEEIA

SEQ ID NO: 89691 - protein, 18 aa, Severe acute respiratory syndrome coronavirus 2
KVNINIVGDFKLNEEIAI

SEQ ID NO: 89692 - protein, 18 aa, Severe acute respiratory syndrome coronavirus 2
NIVGDFKLNEEIAIILAS

SEQ ID NO: 89693 - protein, 18 aa, Severe acute respiratory syndrome coronavirus 2
IVGDFKLNEEIAIILASF

SEQ ID NO: 89694 - protein, 18 aa, Severe acute respiratory syndrome coronavirus 2
FTSDLATNNLVVMAYITG

SEQ ID NO: 89695 - protein, 18 aa, Severe acute respiratory syndrome coronavirus 2
TSDLATNNLVVMAYITGG

SEQ ID NO: 89696 - protein, 18 aa, Severe acute respiratory syndrome coronavirus 2
SDLATNNLVVMAYITGGV

SEQ ID NO: 89697 - protein, 18 aa, Severe acute respiratory syndrome coronavirus 2
VLDWLEEKFKEGVEFLRD

SEQ ID NO: 89698 - protein, 18 aa, Severe acute respiratory syndrome coronavirus 2
LDWLEEKFKEGVEFLRDG

SEQ ID NO: 89699 - protein, 18 aa, Severe acute respiratory syndrome coronavirus 2
DWLEEKFKEGVEFLRDGW

SEQ ID NO: 89700 - protein, 18 aa, Severe acute respiratory syndrome coronavirus 2
WLEEKFKEGVEFLRDGWE

SEQ ID NO: 89701 - protein, 18 aa, Severe acute respiratory syndrome coronavirus 2
LEEKFKEGVEFLRDGWEI

SEQ ID NO: 89702 - protein, 18 aa, Severe acute respiratory syndrome coronavirus 2
EEKFKEGVEFLRDGWEIV

SEQ ID NO: 89703 - protein, 18 aa, Severe acute respiratory syndrome coronavirus 2
EKFKEGVEFLRDGWEIVK

SEQ ID NO: 89704 - protein, 18 aa, Severe acute respiratory syndrome coronavirus 2
KFKEGVEFLRDGWEIVKF

SEQ ID NO: 89705 - protein, 18 aa, Severe acute respiratory syndrome coronavirus 2
NKFLALCADSIIIGGAKL

SEQ ID NO: 89706 - protein, 18 aa, Severe acute respiratory syndrome coronavirus 2
KFLALCADSIIIGGAKLK

SEQ ID NO: 89707 - protein, 18 aa, Severe acute respiratory syndrome coronavirus 2
FLALCADSIIIGGAKLKA

SEQ ID NO: 89708 - protein, 18 aa, Severe acute respiratory syndrome coronavirus 2
LALCADSIIIGGAKLKAL

SEQ ID NO: 89709 - protein, 18 aa, Severe acute respiratory syndrome coronavirus 2
ALCADSIIIGGAKLKALN

SEQ ID NO: 89710 - protein, 18 aa, Severe acute respiratory syndrome coronavirus 2
LCADSIIIGGAKLKALNL

SEQ ID NO: 89711 - protein, 18 aa, Severe acute respiratory syndrome coronavirus 2
CADSIIIGGAKLKALNLG

SEQ ID NO: 89712 - protein, 18 aa, Severe acute respiratory syndrome coronavirus 2
ADSIIIGGAKLKALNLGE

SEQ ID NO: 89713 - protein, 18 aa, Severe acute respiratory syndrome coronavirus 2
SEAVEAPLVGTPVCINGL

SEQ ID NO: 89714 - protein, 18 aa, Severe acute respiratory syndrome coronavirus 2
EAVEAPLVGTPVCINGLM

SEQ ID NO: 89715 - protein, 18 aa, Severe acute respiratory syndrome coronavirus 2
APLVGTPVCINGLMLLEI

SEQ ID NO: 89716 - protein, 18 aa, Severe acute respiratory syndrome coronavirus 2
PLVGTPVCINGLMLLEIK

SEQ ID NO: 89717 - protein, 18 aa, Severe acute respiratory syndrome coronavirus 2
LVGTPVCINGLMLLEIKD

SEQ ID NO: 89718 - protein, 18 aa, Severe acute respiratory syndrome coronavirus 2
PVCINGLMLLEIKDTEKY

SEQ ID NO: 89719 - protein, 18 aa, Severe acute respiratory syndrome coronavirus 2
VCINGLMLLEIKDTEKYC

SEQ ID NO: 89720 - protein, 18 aa, Severe acute respiratory syndrome coronavirus 2
CINGLMLLEIKDTEKYCA

SEQ ID NO: 89721 - protein, 18 aa, Severe acute respiratory syndrome coronavirus 2
INGLMLLEIKDTEKYCAL

SEQ ID NO: 89722 - protein, 18 aa, Severe acute respiratory syndrome coronavirus 2
TPVVQTIEVNSFSGYLKL

SEQ ID NO: 89723 - protein, 18 aa, Severe acute respiratory syndrome coronavirus 2
PVVQTIEVNSFSGYLKLT

SEQ ID NO: 89724 - protein, 18 aa, Severe acute respiratory syndrome coronavirus 2
KPTVVVNAANVYLKHGGG

SEQ ID NO: 89725 - protein, 18 aa, Severe acute respiratory syndrome coronavirus 2
NVYLKHGGGVAGALNKAT

SEQ ID NO: 89726 - protein, 18 aa, Severe acute respiratory syndrome coronavirus 2
VYLKHGGGVAGALNKATN

SEQ ID NO: 89727 - protein, 18 aa, Severe acute respiratory syndrome coronavirus 2
YLKHGGGVAGALNKATNN

SEQ ID NO: 89728 - protein, 18 aa, Severe acute respiratory syndrome coronavirus 2
LKHGGGVAGALNKATNNA

SEQ ID NO: 89729 - protein, 18 aa, Severe acute respiratory syndrome coronavirus 2
KHGGGVAGALNKATNNAM

SEQ ID NO: 89730 - protein, 18 aa, Severe acute respiratory syndrome coronavirus 2
HGGGVAGALNKATNNAMQ

SEQ ID NO: 89731 - protein, 18 aa, Severe acute respiratory syndrome coronavirus 2
YITTYPGQGLNGYTVEEA

SEQ ID NO: 89732 - protein, 18 aa, Severe acute respiratory syndrome coronavirus 2
ITTYPGQGLNGYTVEEAK

SEQ ID NO: 89733 - protein, 18 aa, Severe acute respiratory syndrome coronavirus 2
TTYPGQGLNGYTVEEAKT

SEQ ID NO: 89734 - protein, 18 aa, Severe acute respiratory syndrome coronavirus 2
TYPGQGLNGYTVEEAKTV

SEQ ID NO: 89735 - protein, 18 aa, Severe acute respiratory syndrome coronavirus 2
YPGQGLNGYTVEEAKTVL

SEQ ID NO: 89736 - protein, 18 aa, Severe acute respiratory syndrome coronavirus 2
PGQGLNGYTVEEAKTVLK

SEQ ID NO: 89737 - protein, 18 aa, Severe acute respiratory syndrome coronavirus 2
GQGLNGYTVEEAKTVLKK

SEQ ID NO: 89738 - protein, 18 aa, Severe acute respiratory syndrome coronavirus 2
QGLNGYTVEEAKTVLKKC

SEQ ID NO: 89739 - protein, 18 aa, Severe acute respiratory syndrome coronavirus 2
GLNGYTVEEAKTVLKKCK

SEQ ID NO: 89740 - protein, 18 aa, Severe acute respiratory syndrome coronavirus 2
LNGYTVEEAKTVLKKCKS

SEQ ID NO: 89741 - protein, 18 aa, Severe acute respiratory syndrome coronavirus 2
FYILPSIISNEKQEILGT

SEQ ID NO: 89742 - protein, 18 aa, Severe acute respiratory syndrome coronavirus 2
AHAEETRKLMPVCVETKA

SEQ ID NO: 89743 - protein, 18 aa, Severe acute respiratory syndrome coronavirus 2
VSTIQRKYKGIKIQEGVV

SEQ ID NO: 89744 - protein, 18 aa, Severe acute respiratory syndrome coronavirus 2
STIQRKYKGIKIQEGVVD

SEQ ID NO: 89745 - protein, 18 aa, Severe acute respiratory syndrome coronavirus 2
TIQRKYKGIKIQEGVVDY

SEQ ID NO: 89746 - protein, 18 aa, Severe acute respiratory syndrome coronavirus 2
IQRKYKGIKIQEGVVDYG

SEQ ID NO: 89747 - protein, 18 aa, Severe acute respiratory syndrome coronavirus 2
SSKTPEEHFIETISLAGS

SEQ ID NO: 89748 - protein, 18 aa, Severe acute respiratory syndrome coronavirus 2
SKTPEEHFIETISLAGSY

SEQ ID NO: 89749 - protein, 18 aa, Severe acute respiratory syndrome coronavirus 2
KTPEEHFIETISLAGSYK

SEQ ID NO: 89750 - protein, 18 aa, Severe acute respiratory syndrome coronavirus 2
TPEEHFIETISLAGSYKD

SEQ ID NO: 89751 - protein, 18 aa, Severe acute respiratory syndrome coronavirus 2
PEEHFIETISLAGSYKDW

SEQ ID NO: 89752 - protein, 18 aa, Severe acute respiratory syndrome coronavirus 2
WKYPQVNGLTSIKWADNN

SEQ ID NO: 89753 - protein, 18 aa, Severe acute respiratory syndrome coronavirus 2
KYPQVNGLTSIKWADNNC

SEQ ID NO: 89754 - protein, 18 aa, Severe acute respiratory syndrome coronavirus 2
YPQVNGLTSIKWADNNCY

SEQ ID NO: 89755 - protein, 18 aa, Severe acute respiratory syndrome coronavirus 2
PQVNGLTSIKWADNNCYL

SEQ ID NO: 89756 - protein, 18 aa, Severe acute respiratory syndrome coronavirus 2
QVNGLTSIKWADNNCYLA

SEQ ID NO: 89757 - protein, 18 aa, Severe acute respiratory syndrome coronavirus 2
VNGLTSIKWADNNCYLAT

SEQ ID NO: 89758 - protein, 18 aa, Severe acute respiratory syndrome coronavirus 2
NPPALQDAYYRARAGEAA

SEQ ID NO: 89759 - protein, 18 aa, Severe acute respiratory syndrome coronavirus 2
PPALQDAYYRARAGEAAN

SEQ ID NO: 89760 - protein, 18 aa, Severe acute respiratory syndrome coronavirus 2
PALQDAYYRARAGEAANF

SEQ ID NO: 89761 - protein, 18 aa, Severe acute respiratory syndrome coronavirus 2
ALQDAYYRARAGEAANFC

SEQ ID NO: 89762 - protein, 18 aa, Severe acute respiratory syndrome coronavirus 2
LQDAYYRARAGEAANFCA

SEQ ID NO: 89763 - protein, 18 aa, Severe acute respiratory syndrome coronavirus 2
QDAYYRARAGEAANFCAL

SEQ ID NO: 89764 - protein, 18 aa, Severe acute respiratory syndrome coronavirus 2
YYRARAGEAANFCALILA

SEQ ID NO: 89765 - protein, 18 aa, Severe acute respiratory syndrome coronavirus 2
YRARAGEAANFCALILAY

SEQ ID NO: 89766 - protein, 18 aa, Severe acute respiratory syndrome coronavirus 2
RARAGEAANFCALILAYC

SEQ ID NO: 89767 - protein, 18 aa, Severe acute respiratory syndrome coronavirus 2
TTIKPVTYKLDGVVCTEI

SEQ ID NO: 89768 - protein, 18 aa, Severe acute respiratory syndrome coronavirus 2
TIKPVTYKLDGVVCTEID

SEQ ID NO: 89769 - protein, 18 aa, Severe acute respiratory syndrome coronavirus 2
IKPVTYKLDGVVCTEIDP

SEQ ID NO: 89770 - protein, 18 aa, Severe acute respiratory syndrome coronavirus 2
NYYKKDNSYFTEQPIDLV

SEQ ID NO: 89771 - protein, 18 aa, Severe acute respiratory syndrome coronavirus 2
YYKKDNSYFTEQPIDLVP

SEQ ID NO: 89772 - protein, 18 aa, Severe acute respiratory syndrome coronavirus 2
YKKDNSYFTEQPIDLVPN

SEQ ID NO: 89773 - protein, 18 aa, Severe acute respiratory syndrome coronavirus 2
KKDNSYFTEQPIDLVPNQ

SEQ ID NO: 89774 - protein, 18 aa, Severe acute respiratory syndrome coronavirus 2
KDNSYFTEQPIDLVPNQP

SEQ ID NO: 89775 - protein, 18 aa, Severe acute respiratory syndrome coronavirus 2
DNSYFTEQPIDLVPNQPY

SEQ ID NO: 89776 - protein, 18 aa, Severe acute respiratory syndrome coronavirus 2
ASFDNFKFVCDNIKFADD

SEQ ID NO: 89777 - protein, 18 aa, Severe acute respiratory syndrome coronavirus 2
SFDNFKFVCDNIKFADDL

SEQ ID NO: 89778 - protein, 18 aa, Severe acute respiratory syndrome coronavirus 2
FDNFKFVCDNIKFADDLN

SEQ ID NO: 89779 - protein, 18 aa, Severe acute respiratory syndrome coronavirus 2
DNFKFVCDNIKFADDLNQ

SEQ ID NO: 89780 - protein, 18 aa, Severe acute respiratory syndrome coronavirus 2
NFKFVCDNIKFADDLNQL

SEQ ID NO: 89781 - protein, 18 aa, Severe acute respiratory syndrome coronavirus 2
FKFVCDNIKFADDLNQLT

SEQ ID NO: 89782 - protein, 18 aa, Severe acute respiratory syndrome coronavirus 2
KFVCDNIKFADDLNQLTG

SEQ ID NO: 89783 - protein, 18 aa, Severe acute respiratory syndrome coronavirus 2
FVCDNIKFADDLNQLTGY

SEQ ID NO: 89784 - protein, 18 aa, Severe acute respiratory syndrome coronavirus 2
VCDNIKFADDLNQLTGYK

SEQ ID NO: 89785 - protein, 18 aa, Severe acute respiratory syndrome coronavirus 2
DLNQLTGYKKPASRELKV

SEQ ID NO: 89786 - protein, 18 aa, Severe acute respiratory syndrome coronavirus 2
GYKKPASRELKVTFFPDL

SEQ ID NO: 89787 - protein, 18 aa, Severe acute respiratory syndrome coronavirus 2
YKKPASRELKVTFFPDLN

SEQ ID NO: 89788 - protein, 18 aa, Severe acute respiratory syndrome coronavirus 2
KKPASRELKVTFFPDLNG

SEQ ID NO: 89789 - protein, 18 aa, Severe acute respiratory syndrome coronavirus 2
KPASRELKVTFFPDLNGD

SEQ ID NO: 89790 - protein, 18 aa, Severe acute respiratory syndrome coronavirus 2
PASRELKVTFFPDLNGDV

SEQ ID NO: 89791 - protein, 18 aa, Severe acute respiratory syndrome coronavirus 2
ASRELKVTFFPDLNGDVV

SEQ ID NO: 89792 - protein, 18 aa, Severe acute respiratory syndrome coronavirus 2
SRELKVTFFPDLNGDVVA

SEQ ID NO: 89793 - protein, 18 aa, Severe acute respiratory syndrome coronavirus 2
RELKVTFFPDLNGDVVAI

SEQ ID NO: 89794 - protein, 18 aa, Severe acute respiratory syndrome coronavirus 2
ELKVTFFPDLNGDVVAID

SEQ ID NO: 89795 - protein, 18 aa, Severe acute respiratory syndrome coronavirus 2
LKVTFFPDLNGDVVAIDY

SEQ ID NO: 89796 - protein, 18 aa, Severe acute respiratory syndrome coronavirus 2
KVTFFPDLNGDVVAIDYK

SEQ ID NO: 89797 - protein, 18 aa, Severe acute respiratory syndrome coronavirus 2
VTFFPDLNGDVVAIDYKH

SEQ ID NO: 89798 - protein, 18 aa, Severe acute respiratory syndrome coronavirus 2
TFFPDLNGDVVAIDYKHY

SEQ ID NO: 89799 - protein, 18 aa, Severe acute respiratory syndrome coronavirus 2
FFPDLNGDVVAIDYKHYT

SEQ ID NO: 89800 - protein, 18 aa, Severe acute respiratory syndrome coronavirus 2
NYMPYFFTLLLQLCTFTR

SEQ ID NO: 89801 - protein, 18 aa, Severe acute respiratory syndrome coronavirus 2
VKSVGKFCLEASFNYLKS

SEQ ID NO: 89802 - protein, 18 aa, Severe acute respiratory syndrome coronavirus 2
TYCTGSIPCSVCLSGLDS

SEQ ID NO: 89803 - protein, 18 aa, Severe acute respiratory syndrome coronavirus 2
QITISSFKWDLTAFGLVA

SEQ ID NO: 89804 - protein, 18 aa, Severe acute respiratory syndrome coronavirus 2
ITISSFKWDLTAFGLVAE

SEQ ID NO: 89805 - protein, 18 aa, Severe acute respiratory syndrome coronavirus 2
TISSFKWDLTAFGLVAEW

SEQ ID NO: 89806 - protein, 18 aa, Severe acute respiratory syndrome coronavirus 2
ISSFKWDLTAFGLVAEWF

SEQ ID NO: 89807 - protein, 18 aa, Severe acute respiratory syndrome coronavirus 2
SSFKWDLTAFGLVAEWFL

SEQ ID NO: 89808 - protein, 18 aa, Severe acute respiratory syndrome coronavirus 2
SFKWDLTAFGLVAEWFLA

SEQ ID NO: 89809 - protein, 18 aa, Severe acute respiratory syndrome coronavirus 2
FKWDLTAFGLVAEWFLAY

SEQ ID NO: 89810 - protein, 18 aa, Severe acute respiratory syndrome coronavirus 2
KWDLTAFGLVAEWFLAYI

SEQ ID NO: 89811 - protein, 18 aa, Severe acute respiratory syndrome coronavirus 2
WDLTAFGLVAEWFLAYIL

SEQ ID NO: 89812 - protein, 18 aa, Severe acute respiratory syndrome coronavirus 2
DLTAFGLVAEWFLAYILF

SEQ ID NO: 89813 - protein, 18 aa, Severe acute respiratory syndrome coronavirus 2
LTAFGLVAEWFLAYILFT

SEQ ID NO: 89814 - protein, 18 aa, Severe acute respiratory syndrome coronavirus 2
TAFGLVAEWFLAYILFTR

SEQ ID NO: 89815 - protein, 18 aa, Severe acute respiratory syndrome coronavirus 2
AFGLVAEWFLAYILFTRF

SEQ ID NO: 89816 - protein, 18 aa, Severe acute respiratory syndrome coronavirus 2
FGLVAEWFLAYILFTRFF

SEQ ID NO: 89817 - protein, 18 aa, Severe acute respiratory syndrome coronavirus 2
GLVAEWFLAYILFTRFFY

SEQ ID NO: 89818 - protein, 18 aa, Severe acute respiratory syndrome coronavirus 2
LVAEWFLAYILFTRFFYV

SEQ ID NO: 89819 - protein, 18 aa, Severe acute respiratory syndrome coronavirus 2
VAEWFLAYILFTRFFYVL

SEQ ID NO: 89820 - protein, 18 aa, Severe acute respiratory syndrome coronavirus 2
AEWFLAYILFTRFFYVLG

SEQ ID NO: 89821 - protein, 18 aa, Severe acute respiratory syndrome coronavirus 2
EWFLAYILFTRFFYVLGL

SEQ ID NO: 89822 - protein, 18 aa, Severe acute respiratory syndrome coronavirus 2
WFLAYILFTRFFYVLGLA

SEQ ID NO: 89823 - protein, 18 aa, Severe acute respiratory syndrome coronavirus 2
FLAYILFTRFFYVLGLAA

SEQ ID NO: 89824 - protein, 18 aa, Severe acute respiratory syndrome coronavirus 2
LAYILFTRFFYVLGLAAI

SEQ ID NO: 89825 - protein, 18 aa, Severe acute respiratory syndrome coronavirus 2
AYILFTRFFYVLGLAAIM

SEQ ID NO: 89826 - protein, 18 aa, Severe acute respiratory syndrome coronavirus 2
YILFTRFFYVLGLAAIMQ

SEQ ID NO: 89827 - protein, 18 aa, Severe acute respiratory syndrome coronavirus 2
IMQLFFSYFAVHFISNSW

SEQ ID NO: 89828 - protein, 18 aa, Severe acute respiratory syndrome coronavirus 2
MQLFFSYFAVHFISNSWL

SEQ ID NO: 89829 - protein, 18 aa, Severe acute respiratory syndrome coronavirus 2
FFSYFAVHFISNSWLMWL

SEQ ID NO: 89830 - protein, 18 aa, Severe acute respiratory syndrome coronavirus 2
FSYFAVHFISNSWLMWLI

SEQ ID NO: 89831 - protein, 18 aa, Severe acute respiratory syndrome coronavirus 2
SYFAVHFISNSWLMWLII

SEQ ID NO: 89832 - protein, 18 aa, Severe acute respiratory syndrome coronavirus 2
YFAVHFISNSWLMWLIIN

SEQ ID NO: 89833 - protein, 18 aa, Severe acute respiratory syndrome coronavirus 2
FAVHFISNSWLMWLIINL

SEQ ID NO: 89834 - protein, 18 aa, Severe acute respiratory syndrome coronavirus 2
AVHFISNSWLMWLIINLV

SEQ ID NO: 89835 - protein, 18 aa, Severe acute respiratory syndrome coronavirus 2
VHFISNSWLMWLIINLVQ

SEQ ID NO: 89836 - protein, 18 aa, Severe acute respiratory syndrome coronavirus 2
HFISNSWLMWLIINLVQM

SEQ ID NO: 89837 - protein, 18 aa, Severe acute respiratory syndrome coronavirus 2
FISNSWLMWLIINLVQMA

SEQ ID NO: 89838 - protein, 18 aa, Severe acute respiratory syndrome coronavirus 2
ISAMVRMYIFFASFYYVW

SEQ ID NO: 89839 - protein, 18 aa, Severe acute respiratory syndrome coronavirus 2
SAMVRMYIFFASFYYVWK

SEQ ID NO: 89840 - protein, 18 aa, Severe acute respiratory syndrome coronavirus 2
AMVRMYIFFASFYYVWKS

SEQ ID NO: 89841 - protein, 18 aa, Severe acute respiratory syndrome coronavirus 2
MVRMYIFFASFYYVWKSY

SEQ ID NO: 89842 - protein, 18 aa, Severe acute respiratory syndrome coronavirus 2
VRMYIFFASFYYVWKSYV

SEQ ID NO: 89843 - protein, 18 aa, Severe acute respiratory syndrome coronavirus 2
RMYIFFASFYYVWKSYVH

SEQ ID NO: 89844 - protein, 18 aa, Severe acute respiratory syndrome coronavirus 2
MYIFFASFYYVWKSYVHV

SEQ ID NO: 89845 - protein, 18 aa, Severe acute respiratory syndrome coronavirus 2
YIFFASFYYVWKSYVHVV

SEQ ID NO: 89846 - protein, 18 aa, Severe acute respiratory syndrome coronavirus 2
IFFASFYYVWKSYVHVVD

SEQ ID NO: 89847 - protein, 18 aa, Severe acute respiratory syndrome coronavirus 2
SSTCMMCYKRNRATRVEC

SEQ ID NO: 89848 - protein, 18 aa, Severe acute respiratory syndrome coronavirus 2
STCMMCYKRNRATRVECT

SEQ ID NO: 89849 - protein, 18 aa, Severe acute respiratory syndrome coronavirus 2
TCMMCYKRNRATRVECTT

SEQ ID NO: 89850 - protein, 18 aa, Severe acute respiratory syndrome coronavirus 2
CMMCYKRNRATRVECTTI

SEQ ID NO: 89851 - protein, 18 aa, Severe acute respiratory syndrome coronavirus 2
MMCYKRNRATRVECTTIV

SEQ ID NO: 89852 - protein, 18 aa, Severe acute respiratory syndrome coronavirus 2
MCYKRNRATRVECTTIVN

SEQ ID NO: 89853 - protein, 18 aa, Severe acute respiratory syndrome coronavirus 2
CYKRNRATRVECTTIVNG

SEQ ID NO: 89854 - protein, 18 aa, Severe acute respiratory syndrome coronavirus 2
YKRNRATRVECTTIVNGV

SEQ ID NO: 89855 - protein, 18 aa, Severe acute respiratory syndrome coronavirus 2
KRNRATRVECTTIVNGVR

SEQ ID NO: 89856 - protein, 18 aa, Severe acute respiratory syndrome coronavirus 2
WNCVNCDTFCAGSTFISD

SEQ ID NO: 89857 - protein, 18 aa, Severe acute respiratory syndrome coronavirus 2
NCVNCDTFCAGSTFISDE

SEQ ID NO: 89858 - protein, 18 aa, Severe acute respiratory syndrome coronavirus 2
CVNCDTFCAGSTFISDEV

SEQ ID NO: 89859 - protein, 18 aa, Severe acute respiratory syndrome coronavirus 2
VNCDTFCAGSTFISDEVA

SEQ ID NO: 89860 - protein, 18 aa, Severe acute respiratory syndrome coronavirus 2
NCDTFCAGSTFISDEVAR

SEQ ID NO: 89861 - protein, 18 aa, Severe acute respiratory syndrome coronavirus 2
CDTFCAGSTFISDEVARD

SEQ ID NO: 89862 - protein, 18 aa, Severe acute respiratory syndrome coronavirus 2
DTFCAGSTFISDEVARDL

SEQ ID NO: 89863 - protein, 18 aa, Severe acute respiratory syndrome coronavirus 2
TFCAGSTFISDEVARDLS

SEQ ID NO: 89864 - protein, 18 aa, Severe acute respiratory syndrome coronavirus 2
FCAGSTFISDEVARDLSL

SEQ ID NO: 89865 - protein, 18 aa, Severe acute respiratory syndrome coronavirus 2
CAGSTFISDEVARDLSLQ

SEQ ID NO: 89866 - protein, 18 aa, Severe acute respiratory syndrome coronavirus 2
AGSTFISDEVARDLSLQF

SEQ ID NO: 89867 - protein, 18 aa, Severe acute respiratory syndrome coronavirus 2
GSTFISDEVARDLSLQFK

SEQ ID NO: 89868 - protein, 18 aa, Severe acute respiratory syndrome coronavirus 2
STFISDEVARDLSLQFKR

SEQ ID NO: 89869 - protein, 18 aa, Severe acute respiratory syndrome coronavirus 2
TFISDEVARDLSLQFKRP

SEQ ID NO: 89870 - protein, 18 aa, Severe acute respiratory syndrome coronavirus 2
FISDEVARDLSLQFKRPI

SEQ ID NO: 89871 - protein, 18 aa, Severe acute respiratory syndrome coronavirus 2
SASVYYSQLMCQPILLLD

SEQ ID NO: 89872 - protein, 18 aa, Severe acute respiratory syndrome coronavirus 2
ASVYYSQLMCQPILLLDQ

SEQ ID NO: 89873 - protein, 18 aa, Severe acute respiratory syndrome coronavirus 2
SVYYSQLMCQPILLLDQA

SEQ ID NO: 89874 - protein, 18 aa, Severe acute respiratory syndrome coronavirus 2
VYYSQLMCQPILLLDQAL

SEQ ID NO: 89875 - protein, 18 aa, Severe acute respiratory syndrome coronavirus 2
YYSQLMCQPILLLDQALV

SEQ ID NO: 89876 - protein, 18 aa, Severe acute respiratory syndrome coronavirus 2
YSQLMCQPILLLDQALVS

SEQ ID NO: 89877 - protein, 18 aa, Severe acute respiratory syndrome coronavirus 2
SQLMCQPILLLDQALVSD

SEQ ID NO: 89878 - protein, 18 aa, Severe acute respiratory syndrome coronavirus 2
LDNVLSTFISAARQGFVD

SEQ ID NO: 89879 - protein, 18 aa, Severe acute respiratory syndrome coronavirus 2
DNVLSTFISAARQGFVDS

SEQ ID NO: 89880 - protein, 18 aa, Severe acute respiratory syndrome coronavirus 2
NVLSTFISAARQGFVDSD

SEQ ID NO: 89881 - protein, 18 aa, Severe acute respiratory syndrome coronavirus 2
VLSTFISAARQGFVDSDV

SEQ ID NO: 89882 - protein, 18 aa, Severe acute respiratory syndrome coronavirus 2
LSTFISAARQGFVDSDVE

SEQ ID NO: 89883 - protein, 18 aa, Severe acute respiratory syndrome coronavirus 2
STFISAARQGFVDSDVET

SEQ ID NO: 89884 - protein, 18 aa, Severe acute respiratory syndrome coronavirus 2
SLSEQLRKQIRSAAKKNN

SEQ ID NO: 89885 - protein, 18 aa, Severe acute respiratory syndrome coronavirus 2
LSEQLRKQIRSAAKKNNL

SEQ ID NO: 89886 - protein, 18 aa, Severe acute respiratory syndrome coronavirus 2
SEQLRKQIRSAAKKNNLP

SEQ ID NO: 89887 - protein, 18 aa, Severe acute respiratory syndrome coronavirus 2
EQLRKQIRSAAKKNNLPF

SEQ ID NO: 89888 - protein, 18 aa, Severe acute respiratory syndrome coronavirus 2
QLRKQIRSAAKKNNLPFK

SEQ ID NO: 89889 - protein, 18 aa, Severe acute respiratory syndrome coronavirus 2
LRKQIRSAAKKNNLPFKL

SEQ ID NO: 89890 - protein, 18 aa, Severe acute respiratory syndrome coronavirus 2
RKQIRSAAKKNNLPFKLT

SEQ ID NO: 89891 - protein, 18 aa, Severe acute respiratory syndrome coronavirus 2
AKKNNLPFKLTCATTRQV

SEQ ID NO: 89892 - protein, 18 aa, Severe acute respiratory syndrome coronavirus 2
KKNNLPFKLTCATTRQVV

SEQ ID NO: 89893 - protein, 18 aa, Severe acute respiratory syndrome coronavirus 2
KNNLPFKLTCATTRQVVN

SEQ ID NO: 89894 - protein, 18 aa, Severe acute respiratory syndrome coronavirus 2
NNLPFKLTCATTRQVVNV

SEQ ID NO: 89895 - protein, 18 aa, Severe acute respiratory syndrome coronavirus 2
NLPFKLTCATTRQVVNVV

SEQ ID NO: 89896 - protein, 18 aa, Severe acute respiratory syndrome coronavirus 2
LPFKLTCATTRQVVNVVT

SEQ ID NO: 89897 - protein, 18 aa, Severe acute respiratory syndrome coronavirus 2
PFKLTCATTRQVVNVVTT

SEQ ID NO: 89898 - protein, 18 aa, Severe acute respiratory syndrome coronavirus 2
FKLTCATTRQVVNVVTTK

SEQ ID NO: 89899 - protein, 18 aa, Severe acute respiratory syndrome coronavirus 2
LTCATTRQVVNVVTTKIA

SEQ ID NO: 89900 - protein, 18 aa, Severe acute respiratory syndrome coronavirus 2
TCATTRQVVNVVTTKIAL

SEQ ID NO: 89901 - protein, 18 aa, Severe acute respiratory syndrome coronavirus 2
CATTRQVVNVVTTKIALK

SEQ ID NO: 89902 - protein, 18 aa, Severe acute respiratory syndrome coronavirus 2
ATTRQVVNVVTTKIALKG

SEQ ID NO: 89903 - protein, 18 aa, Severe acute respiratory syndrome coronavirus 2
TTRQVVNVVTTKIALKGG

SEQ ID NO: 89904 - protein, 18 aa, Severe acute respiratory syndrome coronavirus 2
KIVNNWLKQLIKVTLVFL

SEQ ID NO: 89905 - protein, 18 aa, Severe acute respiratory syndrome coronavirus 2
IVNNWLKQLIKVTLVFLF

SEQ ID NO: 89906 - protein, 18 aa, Severe acute respiratory syndrome coronavirus 2
VNNWLKQLIKVTLVFLFV

SEQ ID NO: 89907 - protein, 18 aa, Severe acute respiratory syndrome coronavirus 2
RGGSYTNDKACPLIAAVI

SEQ ID NO: 89908 - protein, 18 aa, Severe acute respiratory syndrome coronavirus 2
GGSYTNDKACPLIAAVIT

SEQ ID NO: 89909 - protein, 18 aa, Severe acute respiratory syndrome coronavirus 2
GSYTNDKACPLIAAVITR

SEQ ID NO: 89910 - protein, 18 aa, Severe acute respiratory syndrome coronavirus 2
SYTNDKACPLIAAVITRE

SEQ ID NO: 89911 - protein, 18 aa, Severe acute respiratory syndrome coronavirus 2
YTNDKACPLIAAVITREV

SEQ ID NO: 89912 - protein, 18 aa, Severe acute respiratory syndrome coronavirus 2
TTNGDFLHFLPRVFSAVG

SEQ ID NO: 89913 - protein, 18 aa, Severe acute respiratory syndrome coronavirus 2
TNGDFLHFLPRVFSAVGN

SEQ ID NO: 89914 - protein, 18 aa, Severe acute respiratory syndrome coronavirus 2
NGDFLHFLPRVFSAVGNI

SEQ ID NO: 89915 - protein, 18 aa, Severe acute respiratory syndrome coronavirus 2
GDFLHFLPRVFSAVGNIC

SEQ ID NO: 89916 - protein, 18 aa, Severe acute respiratory syndrome coronavirus 2
DFLHFLPRVFSAVGNICY

SEQ ID NO: 89917 - protein, 18 aa, Severe acute respiratory syndrome coronavirus 2
FLHFLPRVFSAVGNICYT

SEQ ID NO: 89918 - protein, 18 aa, Severe acute respiratory syndrome coronavirus 2
LHFLPRVFSAVGNICYTP

SEQ ID NO: 89919 - protein, 18 aa, Severe acute respiratory syndrome coronavirus 2
VPYCYDTNVLEGSVAYES

SEQ ID NO: 89920 - protein, 18 aa, Severe acute respiratory syndrome coronavirus 2
PYCYDTNVLEGSVAYESL

SEQ ID NO: 89921 - protein, 18 aa, Severe acute respiratory syndrome coronavirus 2
YCYDTNVLEGSVAYESLR

SEQ ID NO: 89922 - protein, 18 aa, Severe acute respiratory syndrome coronavirus 2
CYDTNVLEGSVAYESLRP

SEQ ID NO: 89923 - protein, 18 aa, Severe acute respiratory syndrome coronavirus 2
YDTNVLEGSVAYESLRPD

SEQ ID NO: 89924 - protein, 18 aa, Severe acute respiratory syndrome coronavirus 2
DTNVLEGSVAYESLRPDT

SEQ ID NO: 89925 - protein, 18 aa, Severe acute respiratory syndrome coronavirus 2
TNVLEGSVAYESLRPDTR

SEQ ID NO: 89926 - protein, 18 aa, Severe acute respiratory syndrome coronavirus 2
NVLEGSVAYESLRPDTRY

SEQ ID NO: 89927 - protein, 18 aa, Severe acute respiratory syndrome coronavirus 2
VLEGSVAYESLRPDTRYV

SEQ ID NO: 89928 - protein, 18 aa, Severe acute respiratory syndrome coronavirus 2
LEGSVAYESLRPDTRYVL

SEQ ID NO: 89929 - protein, 18 aa, Severe acute respiratory syndrome coronavirus 2
EGSVAYESLRPDTRYVLM

SEQ ID NO: 89930 - protein, 18 aa, Severe acute respiratory syndrome coronavirus 2
GSVAYESLRPDTRYVLMD

SEQ ID NO: 89931 - protein, 18 aa, Severe acute respiratory syndrome coronavirus 2
YESLRPDTRYVLMDGSII

SEQ ID NO: 89932 - protein, 18 aa, Severe acute respiratory syndrome coronavirus 2
ESLRPDTRYVLMDGSIIQ

SEQ ID NO: 89933 - protein, 18 aa, Severe acute respiratory syndrome coronavirus 2
SLRPDTRYVLMDGSIIQF

SEQ ID NO: 89934 - protein, 18 aa, Severe acute respiratory syndrome coronavirus 2
CVSTSGRWVLNNDYYRSL

SEQ ID NO: 89935 - protein, 18 aa, Severe acute respiratory syndrome coronavirus 2
VSTSGRWVLNNDYYRSLP

SEQ ID NO: 89936 - protein, 18 aa, Severe acute respiratory syndrome coronavirus 2
STSGRWVLNNDYYRSLPG

SEQ ID NO: 89937 - protein, 18 aa, Severe acute respiratory syndrome coronavirus 2
TSGRWVLNNDYYRSLPGV

SEQ ID NO: 89938 - protein, 18 aa, Severe acute respiratory syndrome coronavirus 2
SGRWVLNNDYYRSLPGVF

SEQ ID NO: 89939 - protein, 18 aa, Severe acute respiratory syndrome coronavirus 2
GRWVLNNDYYRSLPGVFC

SEQ ID NO: 89940 - protein, 18 aa, Severe acute respiratory syndrome coronavirus 2
RWVLNNDYYRSLPGVFCG

SEQ ID NO: 89941 - protein, 18 aa, Severe acute respiratory syndrome coronavirus 2
WVLNNDYYRSLPGVFCGV

SEQ ID NO: 89942 - protein, 18 aa, Severe acute respiratory syndrome coronavirus 2
VLNNDYYRSLPGVFCGVD

SEQ ID NO: 89943 - protein, 18 aa, Severe acute respiratory syndrome coronavirus 2
PLIQPIGALDISASIVAG

SEQ ID NO: 89944 - protein, 18 aa, Severe acute respiratory syndrome coronavirus 2
LIQPIGALDISASIVAGG

SEQ ID NO: 89945 - protein, 18 aa, Severe acute respiratory syndrome coronavirus 2
IQPIGALDISASIVAGGI

SEQ ID NO: 89946 - protein, 18 aa, Severe acute respiratory syndrome coronavirus 2
FLPGVYSVIYLYLTFYLT

SEQ ID NO: 89947 - protein, 18 aa, Severe acute respiratory syndrome coronavirus 2
LPGVYSVIYLYLTFYLTN

SEQ ID NO: 89948 - protein, 18 aa, Severe acute respiratory syndrome coronavirus 2
PGVYSVIYLYLTFYLTND

SEQ ID NO: 89949 - protein, 18 aa, Severe acute respiratory syndrome coronavirus 2
GVYSVIYLYLTFYLTNDV

SEQ ID NO: 89950 - protein, 18 aa, Severe acute respiratory syndrome coronavirus 2
VYSVIYLYLTFYLTNDVS

SEQ ID NO: 89951 - protein, 18 aa, Severe acute respiratory syndrome coronavirus 2
YSVIYLYLTFYLTNDVSF

SEQ ID NO: 89952 - protein, 18 aa, Severe acute respiratory syndrome coronavirus 2
SVIYLYLTFYLTNDVSFL

SEQ ID NO: 89953 - protein, 18 aa, Severe acute respiratory syndrome coronavirus 2
YLYLTFYLTNDVSFLAHI

SEQ ID NO: 89954 - protein, 18 aa, Severe acute respiratory syndrome coronavirus 2
LYLTFYLTNDVSFLAHIQ

SEQ ID NO: 89955 - protein, 18 aa, Severe acute respiratory syndrome coronavirus 2
YLTFYLTNDVSFLAHIQW

SEQ ID NO: 89956 - protein, 18 aa, Severe acute respiratory syndrome coronavirus 2
LTFYLTNDVSFLAHIQWM

SEQ ID NO: 89957 - protein, 18 aa, Severe acute respiratory syndrome coronavirus 2
TFYLTNDVSFLAHIQWMV

SEQ ID NO: 89958 - protein, 18 aa, Severe acute respiratory syndrome coronavirus 2
FYLTNDVSFLAHIQWMVM

SEQ ID NO: 89959 - protein, 18 aa, Severe acute respiratory syndrome coronavirus 2
HIQWMVMFTPLVPFWITI

SEQ ID NO: 89960 - protein, 18 aa, Severe acute respiratory syndrome coronavirus 2
YIICISTKHFYWFFSNYL

SEQ ID NO: 89961 - protein, 18 aa, Severe acute respiratory syndrome coronavirus 2
IICISTKHFYWFFSNYLK

SEQ ID NO: 89962 - protein, 18 aa, Severe acute respiratory syndrome coronavirus 2
ICISTKHFYWFFSNYLKR

SEQ ID NO: 89963 - protein, 18 aa, Severe acute respiratory syndrome coronavirus 2
CISTKHFYWFFSNYLKRR

SEQ ID NO: 89964 - protein, 18 aa, Severe acute respiratory syndrome coronavirus 2
ISTKHFYWFFSNYLKRRV

SEQ ID NO: 89965 - protein, 18 aa, Severe acute respiratory syndrome coronavirus 2
STKHFYWFFSNYLKRRVV

SEQ ID NO: 89966 - protein, 18 aa, Severe acute respiratory syndrome coronavirus 2
TKHFYWFFSNYLKRRVVF

SEQ ID NO: 89967 - protein, 18 aa, Severe acute respiratory syndrome coronavirus 2
KHFYWFFSNYLKRRVVFN

SEQ ID NO: 89968 - protein, 18 aa, Severe acute respiratory syndrome coronavirus 2
HFYWFFSNYLKRRVVFNG

SEQ ID NO: 89969 - protein, 18 aa, Severe acute respiratory syndrome coronavirus 2
FYWFFSNYLKRRVVFNGV

SEQ ID NO: 89970 - protein, 18 aa, Severe acute respiratory syndrome coronavirus 2
YWFFSNYLKRRVVFNGVS

SEQ ID NO: 89971 - protein, 18 aa, Severe acute respiratory syndrome coronavirus 2
WFFSNYLKRRVVFNGVSF

SEQ ID NO: 89972 - protein, 18 aa, Severe acute respiratory syndrome coronavirus 2
FFSNYLKRRVVFNGVSFS

SEQ ID NO: 89973 - protein, 18 aa, Severe acute respiratory syndrome coronavirus 2
FSNYLKRRVVFNGVSFST

SEQ ID NO: 89974 - protein, 18 aa, Severe acute respiratory syndrome coronavirus 2
SNYLKRRVVFNGVSFSTF

SEQ ID NO: 89975 - protein, 18 aa, Severe acute respiratory syndrome coronavirus 2
NYLKRRVVFNGVSFSTFE

SEQ ID NO: 89976 - protein, 18 aa, Severe acute respiratory syndrome coronavirus 2
YLKRRVVFNGVSFSTFEE

SEQ ID NO: 89977 - protein, 18 aa, Severe acute respiratory syndrome coronavirus 2
LKRRVVFNGVSFSTFEEA

SEQ ID NO: 89978 - protein, 18 aa, Severe acute respiratory syndrome coronavirus 2
KRRVVFNGVSFSTFEEAA

SEQ ID NO: 89979 - protein, 18 aa, Severe acute respiratory syndrome coronavirus 2
RRVVFNGVSFSTFEEAAL

SEQ ID NO: 89980 - protein, 18 aa, Severe acute respiratory syndrome coronavirus 2
RVVFNGVSFSTFEEAALC

SEQ ID NO: 89981 - protein, 18 aa, Severe acute respiratory syndrome coronavirus 2
VVFNGVSFSTFEEAALCT

SEQ ID NO: 89982 - protein, 18 aa, Severe acute respiratory syndrome coronavirus 2
VFNGVSFSTFEEAALCTF

SEQ ID NO: 89983 - protein, 18 aa, Severe acute respiratory syndrome coronavirus 2
FNGVSFSTFEEAALCTFL

SEQ ID NO: 89984 - protein, 18 aa, Severe acute respiratory syndrome coronavirus 2
NGVSFSTFEEAALCTFLL

SEQ ID NO: 89985 - protein, 18 aa, Severe acute respiratory syndrome coronavirus 2
GVSFSTFEEAALCTFLLN

SEQ ID NO: 89986 - protein, 18 aa, Severe acute respiratory syndrome coronavirus 2
VSFSTFEEAALCTFLLNK

SEQ ID NO: 89987 - protein, 18 aa, Severe acute respiratory syndrome coronavirus 2
SFSTFEEAALCTFLLNKE

SEQ ID NO: 89988 - protein, 18 aa, Severe acute respiratory syndrome coronavirus 2
FSTFEEAALCTFLLNKEM

SEQ ID NO: 89989 - protein, 18 aa, Severe acute respiratory syndrome coronavirus 2
STFEEAALCTFLLNKEMY

SEQ ID NO: 89990 - protein, 18 aa, Severe acute respiratory syndrome coronavirus 2
TFEEAALCTFLLNKEMYL

SEQ ID NO: 89991 - protein, 18 aa, Severe acute respiratory syndrome coronavirus 2
FEEAALCTFLLNKEMYLK

SEQ ID NO: 89992 - protein, 18 aa, Severe acute respiratory syndrome coronavirus 2
EEAALCTFLLNKEMYLKL

SEQ ID NO: 89993 - protein, 18 aa, Severe acute respiratory syndrome coronavirus 2
EAALCTFLLNKEMYLKLR

SEQ ID NO: 89994 - protein, 18 aa, Severe acute respiratory syndrome coronavirus 2
AALCTFLLNKEMYLKLRS

SEQ ID NO: 89995 - protein, 18 aa, Severe acute respiratory syndrome coronavirus 2
ALCTFLLNKEMYLKLRSD

SEQ ID NO: 89996 - protein, 18 aa, Severe acute respiratory syndrome coronavirus 2
LCTFLLNKEMYLKLRSDV

SEQ ID NO: 89997 - protein, 18 aa, Severe acute respiratory syndrome coronavirus 2
CTFLLNKEMYLKLRSDVL

SEQ ID NO: 89998 - protein, 18 aa, Severe acute respiratory syndrome coronavirus 2
TFLLNKEMYLKLRSDVLL

SEQ ID NO: 89999 - protein, 18 aa, Severe acute respiratory syndrome coronavirus 2
FLLNKEMYLKLRSDVLLP

SEQ ID NO: 90000 - protein, 18 aa, Severe acute respiratory syndrome coronavirus 2
LAKALNDFSNSGSDVLYQ

SEQ ID NO: 90001 - protein, 18 aa, Severe acute respiratory syndrome coronavirus 2
AKALNDFSNSGSDVLYQP

SEQ ID NO: 90002 - protein, 18 aa, Severe acute respiratory syndrome coronavirus 2
KALNDFSNSGSDVLYQPP

SEQ ID NO: 90003 - protein, 18 aa, Severe acute respiratory syndrome coronavirus 2
ALNDFSNSGSDVLYQPPQ

SEQ ID NO: 90004 - protein, 18 aa, Severe acute respiratory syndrome coronavirus 2
GSDVLYQPPQTSITSAVL

SEQ ID NO: 90005 - protein, 18 aa, Severe acute respiratory syndrome coronavirus 2
SDVLYQPPQTSITSAVLQ

SEQ ID NO: 90006 - protein, 18 aa, Severe acute respiratory syndrome coronavirus 2
QVTCGTTTLNGLWLDDVV

SEQ ID NO: 90007 - protein, 18 aa, Severe acute respiratory syndrome coronavirus 2
VTCGTTTLNGLWLDDVVY

SEQ ID NO: 90008 - protein, 18 aa, Severe acute respiratory syndrome coronavirus 2
TCGTTTLNGLWLDDVVYC

SEQ ID NO: 90009 - protein, 18 aa, Severe acute respiratory syndrome coronavirus 2
CGTTTLNGLWLDDVVYCP

SEQ ID NO: 90010 - protein, 18 aa, Severe acute respiratory syndrome coronavirus 2
GTTTLNGLWLDDVVYCPR

SEQ ID NO: 90011 - protein, 18 aa, Severe acute respiratory syndrome coronavirus 2
TTTLNGLWLDDVVYCPRH

SEQ ID NO: 90012 - protein, 18 aa, Severe acute respiratory syndrome coronavirus 2
TTLNGLWLDDVVYCPRHV

SEQ ID NO: 90013 - protein, 18 aa, Severe acute respiratory syndrome coronavirus 2
TLNGLWLDDVVYCPRHVI

SEQ ID NO: 90014 - protein, 18 aa, Severe acute respiratory syndrome coronavirus 2
LNGLWLDDVVYCPRHVIC

SEQ ID NO: 90015 - protein, 18 aa, Severe acute respiratory syndrome coronavirus 2
SFCYMHHMELPTGVHAGT

SEQ ID NO: 90016 - protein, 18 aa, Severe acute respiratory syndrome coronavirus 2
AGTDTTITVNVLAWLYAA

SEQ ID NO: 90017 - protein, 18 aa, Severe acute respiratory syndrome coronavirus 2
GTDTTITVNVLAWLYAAV

SEQ ID NO: 90018 - protein, 18 aa, Severe acute respiratory syndrome coronavirus 2
TITVNVLAWLYAAVINGD

SEQ ID NO: 90019 - protein, 18 aa, Severe acute respiratory syndrome coronavirus 2
ITVNVLAWLYAAVINGDR

SEQ ID NO: 90020 - protein, 18 aa, Severe acute respiratory syndrome coronavirus 2
TVNVLAWLYAAVINGDRW

SEQ ID NO: 90021 - protein, 18 aa, Severe acute respiratory syndrome coronavirus 2
VNVLAWLYAAVINGDRWF

SEQ ID NO: 90022 - protein, 18 aa, Severe acute respiratory syndrome coronavirus 2
TILGSALLEDEFTPFDVV

SEQ ID NO: 90023 - protein, 18 aa, Severe acute respiratory syndrome coronavirus 2
ILGSALLEDEFTPFDVVR

SEQ ID NO: 90024 - protein, 18 aa, Severe acute respiratory syndrome coronavirus 2
LGSALLEDEFTPFDVVRQ

SEQ ID NO: 90025 - protein, 18 aa, Severe acute respiratory syndrome coronavirus 2
GSALLEDEFTPFDVVRQC

SEQ ID NO: 90026 - protein, 18 aa, Severe acute respiratory syndrome coronavirus 2
SALLEDEFTPFDVVRQCS

SEQ ID NO: 90027 - protein, 18 aa, Severe acute respiratory syndrome coronavirus 2
ALLEDEFTPFDVVRQCSG

SEQ ID NO: 90028 - protein, 18 aa, Severe acute respiratory syndrome coronavirus 2
LLEDEFTPFDVVRQCSGV

SEQ ID NO: 90029 - protein, 18 aa, Severe acute respiratory syndrome coronavirus 2
SAVKRTIKGTHHWLLLTI

SEQ ID NO: 90030 - protein, 18 aa, Severe acute respiratory syndrome coronavirus 2
AVKRTIKGTHHWLLLTIL

SEQ ID NO: 90031 - protein, 18 aa, Severe acute respiratory syndrome coronavirus 2
VKRTIKGTHHWLLLTILT

SEQ ID NO: 90032 - protein, 18 aa, Severe acute respiratory syndrome coronavirus 2
KRTIKGTHHWLLLTILTS

SEQ ID NO: 90033 - protein, 18 aa, Severe acute respiratory syndrome coronavirus 2
RTIKGTHHWLLLTILTSL

SEQ ID NO: 90034 - protein, 18 aa, Severe acute respiratory syndrome coronavirus 2
TIKGTHHWLLLTILTSLL

SEQ ID NO: 90035 - protein, 18 aa, Severe acute respiratory syndrome coronavirus 2
IKGTHHWLLLTILTSLLV

SEQ ID NO: 90036 - protein, 18 aa, Severe acute respiratory syndrome coronavirus 2
KGTHHWLLLTILTSLLVL

SEQ ID NO: 90037 - protein, 18 aa, Severe acute respiratory syndrome coronavirus 2
GTHHWLLLTILTSLLVLV

SEQ ID NO: 90038 - protein, 18 aa, Severe acute respiratory syndrome coronavirus 2
THHWLLLTILTSLLVLVQ

SEQ ID NO: 90039 - protein, 18 aa, Severe acute respiratory syndrome coronavirus 2
HHWLLLTILTSLLVLVQS

SEQ ID NO: 90040 - protein, 18 aa, Severe acute respiratory syndrome coronavirus 2
HWLLLTILTSLLVLVQST

SEQ ID NO: 90041 - protein, 18 aa, Severe acute respiratory syndrome coronavirus 2
WLLLTILTSLLVLVQSTQ

SEQ ID NO: 90042 - protein, 18 aa, Severe acute respiratory syndrome coronavirus 2
LLLTILTSLLVLVQSTQW

SEQ ID NO: 90043 - protein, 18 aa, Severe acute respiratory syndrome coronavirus 2
LLTILTSLLVLVQSTQWS

SEQ ID NO: 90044 - protein, 18 aa, Severe acute respiratory syndrome coronavirus 2
LTILTSLLVLVQSTQWSL

SEQ ID NO: 90045 - protein, 18 aa, Severe acute respiratory syndrome coronavirus 2
TILTSLLVLVQSTQWSLF

SEQ ID NO: 90046 - protein, 18 aa, Severe acute respiratory syndrome coronavirus 2
MGIIAMSAFAMMFVKHKH

SEQ ID NO: 90047 - protein, 18 aa, Severe acute respiratory syndrome coronavirus 2
GIIAMSAFAMMFVKHKHA

SEQ ID NO: 90048 - protein, 18 aa, Severe acute respiratory syndrome coronavirus 2
IIAMSAFAMMFVKHKHAF

SEQ ID NO: 90049 - protein, 18 aa, Severe acute respiratory syndrome coronavirus 2
IAMSAFAMMFVKHKHAFL

SEQ ID NO: 90050 - protein, 18 aa, Severe acute respiratory syndrome coronavirus 2
AMSAFAMMFVKHKHAFLC

SEQ ID NO: 90051 - protein, 18 aa, Severe acute respiratory syndrome coronavirus 2
MSAFAMMFVKHKHAFLCL

SEQ ID NO: 90052 - protein, 18 aa, Severe acute respiratory syndrome coronavirus 2
SAFAMMFVKHKHAFLCLF

SEQ ID NO: 90053 - protein, 18 aa, Severe acute respiratory syndrome coronavirus 2
AFAMMFVKHKHAFLCLFL

SEQ ID NO: 90054 - protein, 18 aa, Severe acute respiratory syndrome coronavirus 2
FAMMFVKHKHAFLCLFLL

SEQ ID NO: 90055 - protein, 18 aa, Severe acute respiratory syndrome coronavirus 2
AMMFVKHKHAFLCLFLLP

SEQ ID NO: 90056 - protein, 18 aa, Severe acute respiratory syndrome coronavirus 2
MMFVKHKHAFLCLFLLPS

SEQ ID NO: 90057 - protein, 18 aa, Severe acute respiratory syndrome coronavirus 2
TVAYFNMVYMPASWVMRI

SEQ ID NO: 90058 - protein, 18 aa, Severe acute respiratory syndrome coronavirus 2
VAYFNMVYMPASWVMRIM

SEQ ID NO: 90059 - protein, 18 aa, Severe acute respiratory syndrome coronavirus 2
AYFNMVYMPASWVMRIMT

SEQ ID NO: 90060 - protein, 18 aa, Severe acute respiratory syndrome coronavirus 2
YFNMVYMPASWVMRIMTW

SEQ ID NO: 90061 - protein, 18 aa, Severe acute respiratory syndrome coronavirus 2
FNMVYMPASWVMRIMTWL

SEQ ID NO: 90062 - protein, 18 aa, Severe acute respiratory syndrome coronavirus 2
VDTSLSGFKLKDCVMYAS

SEQ ID NO: 90063 - protein, 18 aa, Severe acute respiratory syndrome coronavirus 2
DTSLSGFKLKDCVMYASA

SEQ ID NO: 90064 - protein, 18 aa, Severe acute respiratory syndrome coronavirus 2
TSLSGFKLKDCVMYASAV

SEQ ID NO: 90065 - protein, 18 aa, Severe acute respiratory syndrome coronavirus 2
SLSGFKLKDCVMYASAVV

SEQ ID NO: 90066 - protein, 18 aa, Severe acute respiratory syndrome coronavirus 2
LSGFKLKDCVMYASAVVL

SEQ ID NO: 90067 - protein, 18 aa, Severe acute respiratory syndrome coronavirus 2
SGFKLKDCVMYASAVVLL

SEQ ID NO: 90068 - protein, 18 aa, Severe acute respiratory syndrome coronavirus 2
GFKLKDCVMYASAVVLLI

SEQ ID NO: 90069 - protein, 18 aa, Severe acute respiratory syndrome coronavirus 2
FKLKDCVMYASAVVLLIL

SEQ ID NO: 90070 - protein, 18 aa, Severe acute respiratory syndrome coronavirus 2
KLKDCVMYASAVVLLILM

SEQ ID NO: 90071 - protein, 18 aa, Severe acute respiratory syndrome coronavirus 2
LKDCVMYASAVVLLILMT

SEQ ID NO: 90072 - protein, 18 aa, Severe acute respiratory syndrome coronavirus 2
IVFMCVEYCPIFFITGNT

SEQ ID NO: 90073 - protein, 18 aa, Severe acute respiratory syndrome coronavirus 2
VFMCVEYCPIFFITGNTL

SEQ ID NO: 90074 - protein, 18 aa, Severe acute respiratory syndrome coronavirus 2
IMLVYCFLGYFCTCYFGL

SEQ ID NO: 90075 - protein, 18 aa, Severe acute respiratory syndrome coronavirus 2
MLVYCFLGYFCTCYFGLF

SEQ ID NO: 90076 - protein, 18 aa, Severe acute respiratory syndrome coronavirus 2
LVYCFLGYFCTCYFGLFC

SEQ ID NO: 90077 - protein, 18 aa, Severe acute respiratory syndrome coronavirus 2
VYCFLGYFCTCYFGLFCL

SEQ ID NO: 90078 - protein, 18 aa, Severe acute respiratory syndrome coronavirus 2
CYFGLFCLLNRYFRLTLG

SEQ ID NO: 90079 - protein, 18 aa, Severe acute respiratory syndrome coronavirus 2
YFGLFCLLNRYFRLTLGV

SEQ ID NO: 90080 - protein, 18 aa, Severe acute respiratory syndrome coronavirus 2
FGLFCLLNRYFRLTLGVY

SEQ ID NO: 90081 - protein, 18 aa, Severe acute respiratory syndrome coronavirus 2
GLFCLLNRYFRLTLGVYD

SEQ ID NO: 90082 - protein, 18 aa, Severe acute respiratory syndrome coronavirus 2
LFCLLNRYFRLTLGVYDY

SEQ ID NO: 90083 - protein, 18 aa, Severe acute respiratory syndrome coronavirus 2
FCLLNRYFRLTLGVYDYL

SEQ ID NO: 90084 - protein, 18 aa, Severe acute respiratory syndrome coronavirus 2
NRYFRLTLGVYDYLVSTQ

SEQ ID NO: 90085 - protein, 18 aa, Severe acute respiratory syndrome coronavirus 2
RYFRLTLGVYDYLVSTQE

SEQ ID NO: 90086 - protein, 18 aa, Severe acute respiratory syndrome coronavirus 2
YFRLTLGVYDYLVSTQEF

SEQ ID NO: 90087 - protein, 18 aa, Severe acute respiratory syndrome coronavirus 2
FRLTLGVYDYLVSTQEFR

SEQ ID NO: 90088 - protein, 18 aa, Severe acute respiratory syndrome coronavirus 2
RLTLGVYDYLVSTQEFRY

SEQ ID NO: 90089 - protein, 18 aa, Severe acute respiratory syndrome coronavirus 2
LTLGVYDYLVSTQEFRYM

SEQ ID NO: 90090 - protein, 18 aa, Severe acute respiratory syndrome coronavirus 2
TLGVYDYLVSTQEFRYMN

SEQ ID NO: 90091 - protein, 18 aa, Severe acute respiratory syndrome coronavirus 2
LGVYDYLVSTQEFRYMNS

SEQ ID NO: 90092 - protein, 18 aa, Severe acute respiratory syndrome coronavirus 2
GVYDYLVSTQEFRYMNSQ

SEQ ID NO: 90093 - protein, 18 aa, Severe acute respiratory syndrome coronavirus 2
VYDYLVSTQEFRYMNSQG

SEQ ID NO: 90094 - protein, 18 aa, Severe acute respiratory syndrome coronavirus 2
YDYLVSTQEFRYMNSQGL

SEQ ID NO: 90095 - protein, 18 aa, Severe acute respiratory syndrome coronavirus 2
SKMSDVKCTSVVLLSVLQ

SEQ ID NO: 90096 - protein, 18 aa, Severe acute respiratory syndrome coronavirus 2
KMSDVKCTSVVLLSVLQQ

SEQ ID NO: 90097 - protein, 18 aa, Severe acute respiratory syndrome coronavirus 2
MSDVKCTSVVLLSVLQQL

SEQ ID NO: 90098 - protein, 18 aa, Severe acute respiratory syndrome coronavirus 2
SDVKCTSVVLLSVLQQLR

SEQ ID NO: 90099 - protein, 18 aa, Severe acute respiratory syndrome coronavirus 2
DVKCTSVVLLSVLQQLRV

SEQ ID NO: 90100 - protein, 18 aa, Severe acute respiratory syndrome coronavirus 2
VKCTSVVLLSVLQQLRVE

SEQ ID NO: 90101 - protein, 18 aa, Severe acute respiratory syndrome coronavirus 2
KCTSVVLLSVLQQLRVES

SEQ ID NO: 90102 - protein, 18 aa, Severe acute respiratory syndrome coronavirus 2
CVQLHNDILLAKDTTEAF

SEQ ID NO: 90103 - protein, 18 aa, Severe acute respiratory syndrome coronavirus 2
VQLHNDILLAKDTTEAFE

SEQ ID NO: 90104 - protein, 18 aa, Severe acute respiratory syndrome coronavirus 2
QLHNDILLAKDTTEAFEK

SEQ ID NO: 90105 - protein, 18 aa, Severe acute respiratory syndrome coronavirus 2
LHNDILLAKDTTEAFEKM

SEQ ID NO: 90106 - protein, 18 aa, Severe acute respiratory syndrome coronavirus 2
HNDILLAKDTTEAFEKMV

SEQ ID NO: 90107 - protein, 18 aa, Severe acute respiratory syndrome coronavirus 2
NDILLAKDTTEAFEKMVS

SEQ ID NO: 90108 - protein, 18 aa, Severe acute respiratory syndrome coronavirus 2
DILLAKDTTEAFEKMVSL

SEQ ID NO: 90109 - protein, 18 aa, Severe acute respiratory syndrome coronavirus 2
ILLAKDTTEAFEKMVSLL

SEQ ID NO: 90110 - protein, 18 aa, Severe acute respiratory syndrome coronavirus 2
LLAKDTTEAFEKMVSLLS

SEQ ID NO: 90111 - protein, 18 aa, Severe acute respiratory syndrome coronavirus 2
KMVSLLSVLLSMQGAVDI

SEQ ID NO: 90112 - protein, 18 aa, Severe acute respiratory syndrome coronavirus 2
MVSLLSVLLSMQGAVDIN

SEQ ID NO: 90113 - protein, 18 aa, Severe acute respiratory syndrome coronavirus 2
VSLLSVLLSMQGAVDINK

SEQ ID NO: 90114 - protein, 18 aa, Severe acute respiratory syndrome coronavirus 2
LLSMQGAVDINKLCEEML

SEQ ID NO: 90115 - protein, 18 aa, Severe acute respiratory syndrome coronavirus 2
LSMQGAVDINKLCEEMLD

SEQ ID NO: 90116 - protein, 18 aa, Severe acute respiratory syndrome coronavirus 2
AMQRKLEKMADQAMTQMY

SEQ ID NO: 90117 - protein, 18 aa, Severe acute respiratory syndrome coronavirus 2
MQRKLEKMADQAMTQMYK

SEQ ID NO: 90118 - protein, 18 aa, Severe acute respiratory syndrome coronavirus 2
QRKLEKMADQAMTQMYKQ

SEQ ID NO: 90119 - protein, 18 aa, Severe acute respiratory syndrome coronavirus 2
RKLEKMADQAMTQMYKQA

SEQ ID NO: 90120 - protein, 18 aa, Severe acute respiratory syndrome coronavirus 2
KLEKMADQAMTQMYKQAR

SEQ ID NO: 90121 - protein, 18 aa, Severe acute respiratory syndrome coronavirus 2
ARSEDKRAKVTSAMQTML

SEQ ID NO: 90122 - protein, 18 aa, Severe acute respiratory syndrome coronavirus 2
RSEDKRAKVTSAMQTMLF

SEQ ID NO: 90123 - protein, 18 aa, Severe acute respiratory syndrome coronavirus 2
SEDKRAKVTSAMQTMLFT

SEQ ID NO: 90124 - protein, 18 aa, Severe acute respiratory syndrome coronavirus 2
EDKRAKVTSAMQTMLFTM

SEQ ID NO: 90125 - protein, 18 aa, Severe acute respiratory syndrome coronavirus 2
DKRAKVTSAMQTMLFTML

SEQ ID NO: 90126 - protein, 18 aa, Severe acute respiratory syndrome coronavirus 2
KRAKVTSAMQTMLFTMLR

SEQ ID NO: 90127 - protein, 18 aa, Severe acute respiratory syndrome coronavirus 2
RAKVTSAMQTMLFTMLRK

SEQ ID NO: 90128 - protein, 18 aa, Severe acute respiratory syndrome coronavirus 2
AKVTSAMQTMLFTMLRKL

SEQ ID NO: 90129 - protein, 18 aa, Severe acute respiratory syndrome coronavirus 2
KVTSAMQTMLFTMLRKLD

SEQ ID NO: 90130 - protein, 18 aa, Severe acute respiratory syndrome coronavirus 2
VTSAMQTMLFTMLRKLDN

SEQ ID NO: 90131 - protein, 18 aa, Severe acute respiratory syndrome coronavirus 2
IINNARDGCVPLNIIPLT

SEQ ID NO: 90132 - protein, 18 aa, Severe acute respiratory syndrome coronavirus 2
LWEIQQVVDADSKIVQLS

SEQ ID NO: 90133 - protein, 18 aa, Severe acute respiratory syndrome coronavirus 2
WEIQQVVDADSKIVQLSE

SEQ ID NO: 90134 - protein, 18 aa, Severe acute respiratory syndrome coronavirus 2
IQQVVDADSKIVQLSEIS

SEQ ID NO: 90135 - protein, 18 aa, Severe acute respiratory syndrome coronavirus 2
QQVVDADSKIVQLSEISM

SEQ ID NO: 90136 - protein, 18 aa, Severe acute respiratory syndrome coronavirus 2
QVVDADSKIVQLSEISMD

SEQ ID NO: 90137 - protein, 18 aa, Severe acute respiratory syndrome coronavirus 2
VDADSKIVQLSEISMDNS

SEQ ID NO: 90138 - protein, 18 aa, Severe acute respiratory syndrome coronavirus 2
DADSKIVQLSEISMDNSP

SEQ ID NO: 90139 - protein, 18 aa, Severe acute respiratory syndrome coronavirus 2
ADSKIVQLSEISMDNSPN

SEQ ID NO: 90140 - protein, 18 aa, Severe acute respiratory syndrome coronavirus 2
DSKIVQLSEISMDNSPNL

SEQ ID NO: 90141 - protein, 18 aa, Severe acute respiratory syndrome coronavirus 2
SKIVQLSEISMDNSPNLA

SEQ ID NO: 90142 - protein, 18 aa, Severe acute respiratory syndrome coronavirus 2
KIVQLSEISMDNSPNLAW

SEQ ID NO: 90143 - protein, 18 aa, Severe acute respiratory syndrome coronavirus 2
IVQLSEISMDNSPNLAWP

SEQ ID NO: 90144 - protein, 18 aa, Severe acute respiratory syndrome coronavirus 2
LSEISMDNSPNLAWPLIV

SEQ ID NO: 90145 - protein, 18 aa, Severe acute respiratory syndrome coronavirus 2
ALLSDLQDLKWARFPKSD

SEQ ID NO: 90146 - protein, 18 aa, Severe acute respiratory syndrome coronavirus 2
VTDTPKGPKVKYLYFIKG

SEQ ID NO: 90147 - protein, 18 aa, Severe acute respiratory syndrome coronavirus 2
TDTPKGPKVKYLYFIKGL

SEQ ID NO: 90148 - protein, 18 aa, Severe acute respiratory syndrome coronavirus 2
DTPKGPKVKYLYFIKGLN

SEQ ID NO: 90149 - protein, 18 aa, Severe acute respiratory syndrome coronavirus 2
TPKGPKVKYLYFIKGLNN

SEQ ID NO: 90150 - protein, 18 aa, Severe acute respiratory syndrome coronavirus 2
PKGPKVKYLYFIKGLNNL

SEQ ID NO: 90151 - protein, 18 aa, Severe acute respiratory syndrome coronavirus 2
KGPKVKYLYFIKGLNNLN

SEQ ID NO: 90152 - protein, 18 aa, Severe acute respiratory syndrome coronavirus 2
GPKVKYLYFIKGLNNLNR

SEQ ID NO: 90153 - protein, 18 aa, Severe acute respiratory syndrome coronavirus 2
PKVKYLYFIKGLNNLNRG

SEQ ID NO: 90154 - protein, 18 aa, Severe acute respiratory syndrome coronavirus 2
KVKYLYFIKGLNNLNRGM

SEQ ID NO: 90155 - protein, 18 aa, Severe acute respiratory syndrome coronavirus 2
VKYLYFIKGLNNLNRGMV

SEQ ID NO: 90156 - protein, 18 aa, Severe acute respiratory syndrome coronavirus 2
KYLYFIKGLNNLNRGMVL

SEQ ID NO: 90157 - protein, 18 aa, Severe acute respiratory syndrome coronavirus 2
VLSFCAFAVDAAKAYKDY

SEQ ID NO: 90158 - protein, 18 aa, Severe acute respiratory syndrome coronavirus 2
LSFCAFAVDAAKAYKDYL

SEQ ID NO: 90159 - protein, 18 aa, Severe acute respiratory syndrome coronavirus 2
SFCAFAVDAAKAYKDYLA

SEQ ID NO: 90160 - protein, 18 aa, Severe acute respiratory syndrome coronavirus 2
FCAFAVDAAKAYKDYLAS

SEQ ID NO: 90161 - protein, 18 aa, Severe acute respiratory syndrome coronavirus 2
CAFAVDAAKAYKDYLASG

SEQ ID NO: 90162 - protein, 18 aa, Severe acute respiratory syndrome coronavirus 2
AFAVDAAKAYKDYLASGG

SEQ ID NO: 90163 - protein, 18 aa, Severe acute respiratory syndrome coronavirus 2
FAVDAAKAYKDYLASGGQ

SEQ ID NO: 90164 - protein, 18 aa, Severe acute respiratory syndrome coronavirus 2
VDAAKAYKDYLASGGQPI

SEQ ID NO: 90165 - protein, 18 aa, Severe acute respiratory syndrome coronavirus 2
DAAKAYKDYLASGGQPIT

SEQ ID NO: 90166 - protein, 18 aa, Severe acute respiratory syndrome coronavirus 2
AAKAYKDYLASGGQPITN

SEQ ID NO: 90167 - protein, 18 aa, Severe acute respiratory syndrome coronavirus 2
AKAYKDYLASGGQPITNC

SEQ ID NO: 90168 - protein, 18 aa, Severe acute respiratory syndrome coronavirus 2
KAYKDYLASGGQPITNCV

SEQ ID NO: 90169 - protein, 18 aa, Severe acute respiratory syndrome coronavirus 2
AYKDYLASGGQPITNCVK

SEQ ID NO: 90170 - protein, 18 aa, Severe acute respiratory syndrome coronavirus 2
YKDYLASGGQPITNCVKM

SEQ ID NO: 90171 - protein, 18 aa, Severe acute respiratory syndrome coronavirus 2
KDYLASGGQPITNCVKML

SEQ ID NO: 90172 - protein, 18 aa, Severe acute respiratory syndrome coronavirus 2
DYLASGGQPITNCVKMLC

SEQ ID NO: 90173 - protein, 18 aa, Severe acute respiratory syndrome coronavirus 2
YLASGGQPITNCVKMLCT

SEQ ID NO: 90174 - protein, 19 aa, Severe acute respiratory syndrome coronavirus 2
TCGLVEVEKGVLPQLEQPY

SEQ ID NO: 90175 - protein, 19 aa, Severe acute respiratory syndrome coronavirus 2
CGLVEVEKGVLPQLEQPYV

SEQ ID NO: 90176 - protein, 19 aa, Severe acute respiratory syndrome coronavirus 2
GLVEVEKGVLPQLEQPYVF

SEQ ID NO: 90177 - protein, 19 aa, Severe acute respiratory syndrome coronavirus 2
LVEVEKGVLPQLEQPYVFI

SEQ ID NO: 90178 - protein, 19 aa, Severe acute respiratory syndrome coronavirus 2
VEVEKGVLPQLEQPYVFIK

SEQ ID NO: 90179 - protein, 19 aa, Severe acute respiratory syndrome coronavirus 2
EVEKGVLPQLEQPYVFIKR

SEQ ID NO: 90180 - protein, 19 aa, Severe acute respiratory syndrome coronavirus 2
YCCREHEHEIAWYTERSEK

SEQ ID NO: 90181 - protein, 19 aa, Severe acute respiratory syndrome coronavirus 2
CCREHEHEIAWYTERSEKS

SEQ ID NO: 90182 - protein, 19 aa, Severe acute respiratory syndrome coronavirus 2
CREHEHEIAWYTERSEKSY

SEQ ID NO: 90183 - protein, 19 aa, Severe acute respiratory syndrome coronavirus 2
REHEHEIAWYTERSEKSYE

SEQ ID NO: 90184 - protein, 19 aa, Severe acute respiratory syndrome coronavirus 2
EHEHEIAWYTERSEKSYEL

SEQ ID NO: 90185 - protein, 19 aa, Severe acute respiratory syndrome coronavirus 2
HEHEIAWYTERSEKSYELQ

SEQ ID NO: 90186 - protein, 19 aa, Severe acute respiratory syndrome coronavirus 2
EHEIAWYTERSEKSYELQT

SEQ ID NO: 90187 - protein, 19 aa, Severe acute respiratory syndrome coronavirus 2
HEIAWYTERSEKSYELQTP

SEQ ID NO: 90188 - protein, 19 aa, Severe acute respiratory syndrome coronavirus 2
EIAWYTERSEKSYELQTPF

SEQ ID NO: 90189 - protein, 19 aa, Severe acute respiratory syndrome coronavirus 2
IAWYTERSEKSYELQTPFE

SEQ ID NO: 90190 - protein, 19 aa, Severe acute respiratory syndrome coronavirus 2
AWYTERSEKSYELQTPFEI

SEQ ID NO: 90191 - protein, 19 aa, Severe acute respiratory syndrome coronavirus 2
WYTERSEKSYELQTPFEIK

SEQ ID NO: 90192 - protein, 19 aa, Severe acute respiratory syndrome coronavirus 2
YTERSEKSYELQTPFEIKL

SEQ ID NO: 90193 - protein, 19 aa, Severe acute respiratory syndrome coronavirus 2
TERSEKSYELQTPFEIKLA

SEQ ID NO: 90194 - protein, 19 aa, Severe acute respiratory syndrome coronavirus 2
ERSEKSYELQTPFEIKLAK

SEQ ID NO: 90195 - protein, 19 aa, Severe acute respiratory syndrome coronavirus 2
RSEKSYELQTPFEIKLAKK

SEQ ID NO: 90196 - protein, 19 aa, Severe acute respiratory syndrome coronavirus 2
SEKSYELQTPFEIKLAKKF

SEQ ID NO: 90197 - protein, 19 aa, Severe acute respiratory syndrome coronavirus 2
EKSYELQTPFEIKLAKKFD

SEQ ID NO: 90198 - protein, 19 aa, Severe acute respiratory syndrome coronavirus 2
EKVNINIVGDFKLNEEIAI

SEQ ID NO: 90199 - protein, 19 aa, Severe acute respiratory syndrome coronavirus 2
NIVGDFKLNEEIAIILASF

SEQ ID NO: 90200 - protein, 19 aa, Severe acute respiratory syndrome coronavirus 2
FTSDLATNNLVVMAYITGG

SEQ ID NO: 90201 - protein, 19 aa, Severe acute respiratory syndrome coronavirus 2
TSDLATNNLVVMAYITGGV

SEQ ID NO: 90202 - protein, 19 aa, Severe acute respiratory syndrome coronavirus 2
VLDWLEEKFKEGVEFLRDG

SEQ ID NO: 90203 - protein, 19 aa, Severe acute respiratory syndrome coronavirus 2
LDWLEEKFKEGVEFLRDGW

SEQ ID NO: 90204 - protein, 19 aa, Severe acute respiratory syndrome coronavirus 2
DWLEEKFKEGVEFLRDGWE

SEQ ID NO: 90205 - protein, 19 aa, Severe acute respiratory syndrome coronavirus 2
LEEKFKEGVEFLRDGWEIV

SEQ ID NO: 90206 - protein, 19 aa, Severe acute respiratory syndrome coronavirus 2
EEKFKEGVEFLRDGWEIVK

SEQ ID NO: 90207 - protein, 19 aa, Severe acute respiratory syndrome coronavirus 2
EKFKEGVEFLRDGWEIVKF

SEQ ID NO: 90208 - protein, 19 aa, Severe acute respiratory syndrome coronavirus 2
NKFLALCADSIIIGGAKLK

SEQ ID NO: 90209 - protein, 19 aa, Severe acute respiratory syndrome coronavirus 2
KFLALCADSIIIGGAKLKA

SEQ ID NO: 90210 - protein, 19 aa, Severe acute respiratory syndrome coronavirus 2
FLALCADSIIIGGAKLKAL

SEQ ID NO: 90211 - protein, 19 aa, Severe acute respiratory syndrome coronavirus 2
LALCADSIIIGGAKLKALN

SEQ ID NO: 90212 - protein, 19 aa, Severe acute respiratory syndrome coronavirus 2
ALCADSIIIGGAKLKALNL

SEQ ID NO: 90213 - protein, 19 aa, Severe acute respiratory syndrome coronavirus 2
LCADSIIIGGAKLKALNLG

SEQ ID NO: 90214 - protein, 19 aa, Severe acute respiratory syndrome coronavirus 2
CADSIIIGGAKLKALNLGE

SEQ ID NO: 90215 - protein, 19 aa, Severe acute respiratory syndrome coronavirus 2
SEAVEAPLVGTPVCINGLM

SEQ ID NO: 90216 - protein, 19 aa, Severe acute respiratory syndrome coronavirus 2
APLVGTPVCINGLMLLEIK

SEQ ID NO: 90217 - protein, 19 aa, Severe acute respiratory syndrome coronavirus 2
PLVGTPVCINGLMLLEIKD

SEQ ID NO: 90218 - protein, 19 aa, Severe acute respiratory syndrome coronavirus 2
PVCINGLMLLEIKDTEKYC

SEQ ID NO: 90219 - protein, 19 aa, Severe acute respiratory syndrome coronavirus 2
VCINGLMLLEIKDTEKYCA

SEQ ID NO: 90220 - protein, 19 aa, Severe acute respiratory syndrome coronavirus 2
CINGLMLLEIKDTEKYCAL

SEQ ID NO: 90221 - protein, 19 aa, Severe acute respiratory syndrome coronavirus 2
INGLMLLEIKDTEKYCALA

SEQ ID NO: 90222 - protein, 19 aa, Severe acute respiratory syndrome coronavirus 2
CSAYTVELGTEVNEFACVV

SEQ ID NO: 90223 - protein, 19 aa, Severe acute respiratory syndrome coronavirus 2
TPVVQTIEVNSFSGYLKLT

SEQ ID NO: 90224 - protein, 19 aa, Severe acute respiratory syndrome coronavirus 2
NVYLKHGGGVAGALNKATN

SEQ ID NO: 90225 - protein, 19 aa, Severe acute respiratory syndrome coronavirus 2
VYLKHGGGVAGALNKATNN

SEQ ID NO: 90226 - protein, 19 aa, Severe acute respiratory syndrome coronavirus 2
YLKHGGGVAGALNKATNNA

SEQ ID NO: 90227 - protein, 19 aa, Severe acute respiratory syndrome coronavirus 2
LKHGGGVAGALNKATNNAM

SEQ ID NO: 90228 - protein, 19 aa, Severe acute respiratory syndrome coronavirus 2
KHGGGVAGALNKATNNAMQ

SEQ ID NO: 90229 - protein, 19 aa, Severe acute respiratory syndrome coronavirus 2
GSCVLSGHNLAKHCLHVVG

SEQ ID NO: 90230 - protein, 19 aa, Severe acute respiratory syndrome coronavirus 2
SCVLSGHNLAKHCLHVVGP

SEQ ID NO: 90231 - protein, 19 aa, Severe acute respiratory syndrome coronavirus 2
CVLSGHNLAKHCLHVVGPN

SEQ ID NO: 90232 - protein, 19 aa, Severe acute respiratory syndrome coronavirus 2
VLSGHNLAKHCLHVVGPNV

SEQ ID NO: 90233 - protein, 19 aa, Severe acute respiratory syndrome coronavirus 2
LSGHNLAKHCLHVVGPNVN

SEQ ID NO: 90234 - protein, 19 aa, Severe acute respiratory syndrome coronavirus 2
YITTYPGQGLNGYTVEEAK

SEQ ID NO: 90235 - protein, 19 aa, Severe acute respiratory syndrome coronavirus 2
ITTYPGQGLNGYTVEEAKT

SEQ ID NO: 90236 - protein, 19 aa, Severe acute respiratory syndrome coronavirus 2
TTYPGQGLNGYTVEEAKTV

SEQ ID NO: 90237 - protein, 19 aa, Severe acute respiratory syndrome coronavirus 2
TYPGQGLNGYTVEEAKTVL

SEQ ID NO: 90238 - protein, 19 aa, Severe acute respiratory syndrome coronavirus 2
YPGQGLNGYTVEEAKTVLK

SEQ ID NO: 90239 - protein, 19 aa, Severe acute respiratory syndrome coronavirus 2
PGQGLNGYTVEEAKTVLKK

SEQ ID NO: 90240 - protein, 19 aa, Severe acute respiratory syndrome coronavirus 2
GQGLNGYTVEEAKTVLKKC

SEQ ID NO: 90241 - protein, 19 aa, Severe acute respiratory syndrome coronavirus 2
QGLNGYTVEEAKTVLKKCK

SEQ ID NO: 90242 - protein, 19 aa, Severe acute respiratory syndrome coronavirus 2
GLNGYTVEEAKTVLKKCKS

SEQ ID NO: 90243 - protein, 19 aa, Severe acute respiratory syndrome coronavirus 2
FYILPSIISNEKQEILGTV

SEQ ID NO: 90244 - protein, 19 aa, Severe acute respiratory syndrome coronavirus 2
YILPSIISNEKQEILGTVS

SEQ ID NO: 90245 - protein, 19 aa, Severe acute respiratory syndrome coronavirus 2
ILPSIISNEKQEILGTVSW

SEQ ID NO: 90246 - protein, 19 aa, Severe acute respiratory syndrome coronavirus 2
LPSIISNEKQEILGTVSWN

SEQ ID NO: 90247 - protein, 19 aa, Severe acute respiratory syndrome coronavirus 2
REMLAHAEETRKLMPVCVE

SEQ ID NO: 90248 - protein, 19 aa, Severe acute respiratory syndrome coronavirus 2
EMLAHAEETRKLMPVCVET

SEQ ID NO: 90249 - protein, 19 aa, Severe acute respiratory syndrome coronavirus 2
MLAHAEETRKLMPVCVETK

SEQ ID NO: 90250 - protein, 19 aa, Severe acute respiratory syndrome coronavirus 2
LAHAEETRKLMPVCVETKA

SEQ ID NO: 90251 - protein, 19 aa, Severe acute respiratory syndrome coronavirus 2
VSTIQRKYKGIKIQEGVVD

SEQ ID NO: 90252 - protein, 19 aa, Severe acute respiratory syndrome coronavirus 2
STIQRKYKGIKIQEGVVDY

SEQ ID NO: 90253 - protein, 19 aa, Severe acute respiratory syndrome coronavirus 2
TIQRKYKGIKIQEGVVDYG

SEQ ID NO: 90254 - protein, 19 aa, Severe acute respiratory syndrome coronavirus 2
LTSSSKTPEEHFIETISLA

SEQ ID NO: 90255 - protein, 19 aa, Severe acute respiratory syndrome coronavirus 2
TSSSKTPEEHFIETISLAG

SEQ ID NO: 90256 - protein, 19 aa, Severe acute respiratory syndrome coronavirus 2
SSSKTPEEHFIETISLAGS

SEQ ID NO: 90257 - protein, 19 aa, Severe acute respiratory syndrome coronavirus 2
SSKTPEEHFIETISLAGSY

SEQ ID NO: 90258 - protein, 19 aa, Severe acute respiratory syndrome coronavirus 2
SKTPEEHFIETISLAGSYK

SEQ ID NO: 90259 - protein, 19 aa, Severe acute respiratory syndrome coronavirus 2
KTPEEHFIETISLAGSYKD

SEQ ID NO: 90260 - protein, 19 aa, Severe acute respiratory syndrome coronavirus 2
TPEEHFIETISLAGSYKDW

SEQ ID NO: 90261 - protein, 19 aa, Severe acute respiratory syndrome coronavirus 2
KKWKYPQVNGLTSIKWADN

SEQ ID NO: 90262 - protein, 19 aa, Severe acute respiratory syndrome coronavirus 2
KWKYPQVNGLTSIKWADNN

SEQ ID NO: 90263 - protein, 19 aa, Severe acute respiratory syndrome coronavirus 2
WKYPQVNGLTSIKWADNNC

SEQ ID NO: 90264 - protein, 19 aa, Severe acute respiratory syndrome coronavirus 2
KYPQVNGLTSIKWADNNCY

SEQ ID NO: 90265 - protein, 19 aa, Severe acute respiratory syndrome coronavirus 2
YPQVNGLTSIKWADNNCYL

SEQ ID NO: 90266 - protein, 19 aa, Severe acute respiratory syndrome coronavirus 2
PQVNGLTSIKWADNNCYLA

SEQ ID NO: 90267 - protein, 19 aa, Severe acute respiratory syndrome coronavirus 2
QVNGLTSIKWADNNCYLAT

SEQ ID NO: 90268 - protein, 19 aa, Severe acute respiratory syndrome coronavirus 2
ELKFNPPALQDAYYRARAG

SEQ ID NO: 90269 - protein, 19 aa, Severe acute respiratory syndrome coronavirus 2
KFNPPALQDAYYRARAGEA

SEQ ID NO: 90270 - protein, 19 aa, Severe acute respiratory syndrome coronavirus 2
FNPPALQDAYYRARAGEAA

SEQ ID NO: 90271 - protein, 19 aa, Severe acute respiratory syndrome coronavirus 2
NPPALQDAYYRARAGEAAN

SEQ ID NO: 90272 - protein, 19 aa, Severe acute respiratory syndrome coronavirus 2
PPALQDAYYRARAGEAANF

SEQ ID NO: 90273 - protein, 19 aa, Severe acute respiratory syndrome coronavirus 2
PALQDAYYRARAGEAANFC

SEQ ID NO: 90274 - protein, 19 aa, Severe acute respiratory syndrome coronavirus 2
ALQDAYYRARAGEAANFCA

SEQ ID NO: 90275 - protein, 19 aa, Severe acute respiratory syndrome coronavirus 2
LQDAYYRARAGEAANFCAL

SEQ ID NO: 90276 - protein, 19 aa, Severe acute respiratory syndrome coronavirus 2
YYRARAGEAANFCALILAY

SEQ ID NO: 90277 - protein, 19 aa, Severe acute respiratory syndrome coronavirus 2
YRARAGEAANFCALILAYC

SEQ ID NO: 90278 - protein, 19 aa, Severe acute respiratory syndrome coronavirus 2
NLDSCKRVLNVVCKTCGQQ

SEQ ID NO: 90279 - protein, 19 aa, Severe acute respiratory syndrome coronavirus 2
LDSCKRVLNVVCKTCGQQQ

SEQ ID NO: 90280 - protein, 19 aa, Severe acute respiratory syndrome coronavirus 2
DSCKRVLNVVCKTCGQQQT

SEQ ID NO: 90281 - protein, 19 aa, Severe acute respiratory syndrome coronavirus 2
DVFYKENSYTTTIKPVTYK

SEQ ID NO: 90282 - protein, 19 aa, Severe acute respiratory syndrome coronavirus 2
VFYKENSYTTTIKPVTYKL

SEQ ID NO: 90283 - protein, 19 aa, Severe acute respiratory syndrome coronavirus 2
FYKENSYTTTIKPVTYKLD

SEQ ID NO: 90284 - protein, 19 aa, Severe acute respiratory syndrome coronavirus 2
YKENSYTTTIKPVTYKLDG

SEQ ID NO: 90285 - protein, 19 aa, Severe acute respiratory syndrome coronavirus 2
KENSYTTTIKPVTYKLDGV

SEQ ID NO: 90286 - protein, 19 aa, Severe acute respiratory syndrome coronavirus 2
ENSYTTTIKPVTYKLDGVV

SEQ ID NO: 90287 - protein, 19 aa, Severe acute respiratory syndrome coronavirus 2
NSYTTTIKPVTYKLDGVVC

SEQ ID NO: 90288 - protein, 19 aa, Severe acute respiratory syndrome coronavirus 2
SYTTTIKPVTYKLDGVVCT

SEQ ID NO: 90289 - protein, 19 aa, Severe acute respiratory syndrome coronavirus 2
YTTTIKPVTYKLDGVVCTE

SEQ ID NO: 90290 - protein, 19 aa, Severe acute respiratory syndrome coronavirus 2
TTTIKPVTYKLDGVVCTEI

SEQ ID NO: 90291 - protein, 19 aa, Severe acute respiratory syndrome coronavirus 2
TTIKPVTYKLDGVVCTEID

SEQ ID NO: 90292 - protein, 19 aa, Severe acute respiratory syndrome coronavirus 2
TIKPVTYKLDGVVCTEIDP

SEQ ID NO: 90293 - protein, 19 aa, Severe acute respiratory syndrome coronavirus 2
IKPVTYKLDGVVCTEIDPK

SEQ ID NO: 90294 - protein, 19 aa, Severe acute respiratory syndrome coronavirus 2
KPVTYKLDGVVCTEIDPKL

SEQ ID NO: 90295 - protein, 19 aa, Severe acute respiratory syndrome coronavirus 2
PVTYKLDGVVCTEIDPKLD

SEQ ID NO: 90296 - protein, 19 aa, Severe acute respiratory syndrome coronavirus 2
VTYKLDGVVCTEIDPKLDN

SEQ ID NO: 90297 - protein, 19 aa, Severe acute respiratory syndrome coronavirus 2
IDPKLDNYYKKDNSYFTEQ

SEQ ID NO: 90298 - protein, 19 aa, Severe acute respiratory syndrome coronavirus 2
DPKLDNYYKKDNSYFTEQP

SEQ ID NO: 90299 - protein, 19 aa, Severe acute respiratory syndrome coronavirus 2
PKLDNYYKKDNSYFTEQPI

SEQ ID NO: 90300 - protein, 19 aa, Severe acute respiratory syndrome coronavirus 2
KLDNYYKKDNSYFTEQPID

SEQ ID NO: 90301 - protein, 19 aa, Severe acute respiratory syndrome coronavirus 2
LDNYYKKDNSYFTEQPIDL

SEQ ID NO: 90302 - protein, 19 aa, Severe acute respiratory syndrome coronavirus 2
DNYYKKDNSYFTEQPIDLV

SEQ ID NO: 90303 - protein, 19 aa, Severe acute respiratory syndrome coronavirus 2
NYYKKDNSYFTEQPIDLVP

SEQ ID NO: 90304 - protein, 19 aa, Severe acute respiratory syndrome coronavirus 2
YYKKDNSYFTEQPIDLVPN

SEQ ID NO: 90305 - protein, 19 aa, Severe acute respiratory syndrome coronavirus 2
YKKDNSYFTEQPIDLVPNQ

SEQ ID NO: 90306 - protein, 19 aa, Severe acute respiratory syndrome coronavirus 2
KKDNSYFTEQPIDLVPNQP

SEQ ID NO: 90307 - protein, 19 aa, Severe acute respiratory syndrome coronavirus 2
KDNSYFTEQPIDLVPNQPY

SEQ ID NO: 90308 - protein, 19 aa, Severe acute respiratory syndrome coronavirus 2
ASFDNFKFVCDNIKFADDL

SEQ ID NO: 90309 - protein, 19 aa, Severe acute respiratory syndrome coronavirus 2
SFDNFKFVCDNIKFADDLN

SEQ ID NO: 90310 - protein, 19 aa, Severe acute respiratory syndrome coronavirus 2
FDNFKFVCDNIKFADDLNQ

SEQ ID NO: 90311 - protein, 19 aa, Severe acute respiratory syndrome coronavirus 2
DNFKFVCDNIKFADDLNQL

SEQ ID NO: 90312 - protein, 19 aa, Severe acute respiratory syndrome coronavirus 2
NFKFVCDNIKFADDLNQLT

SEQ ID NO: 90313 - protein, 19 aa, Severe acute respiratory syndrome coronavirus 2
FKFVCDNIKFADDLNQLTG

SEQ ID NO: 90314 - protein, 19 aa, Severe acute respiratory syndrome coronavirus 2
KFVCDNIKFADDLNQLTGY

SEQ ID NO: 90315 - protein, 19 aa, Severe acute respiratory syndrome coronavirus 2
FVCDNIKFADDLNQLTGYK

SEQ ID NO: 90316 - protein, 19 aa, Severe acute respiratory syndrome coronavirus 2
VCDNIKFADDLNQLTGYKK

SEQ ID NO: 90317 - protein, 19 aa, Severe acute respiratory syndrome coronavirus 2
CDNIKFADDLNQLTGYKKP

SEQ ID NO: 90318 - protein, 19 aa, Severe acute respiratory syndrome coronavirus 2
DNIKFADDLNQLTGYKKPA

SEQ ID NO: 90319 - protein, 19 aa, Severe acute respiratory syndrome coronavirus 2
DLNQLTGYKKPASRELKVT

SEQ ID NO: 90320 - protein, 19 aa, Severe acute respiratory syndrome coronavirus 2
LNQLTGYKKPASRELKVTF

SEQ ID NO: 90321 - protein, 19 aa, Severe acute respiratory syndrome coronavirus 2
NQLTGYKKPASRELKVTFF

SEQ ID NO: 90322 - protein, 19 aa, Severe acute respiratory syndrome coronavirus 2
TGYKKPASRELKVTFFPDL

SEQ ID NO: 90323 - protein, 19 aa, Severe acute respiratory syndrome coronavirus 2
GYKKPASRELKVTFFPDLN

SEQ ID NO: 90324 - protein, 19 aa, Severe acute respiratory syndrome coronavirus 2
YKKPASRELKVTFFPDLNG

SEQ ID NO: 90325 - protein, 19 aa, Severe acute respiratory syndrome coronavirus 2
KKPASRELKVTFFPDLNGD

SEQ ID NO: 90326 - protein, 19 aa, Severe acute respiratory syndrome coronavirus 2
KPASRELKVTFFPDLNGDV

SEQ ID NO: 90327 - protein, 19 aa, Severe acute respiratory syndrome coronavirus 2
PASRELKVTFFPDLNGDVV

SEQ ID NO: 90328 - protein, 19 aa, Severe acute respiratory syndrome coronavirus 2
ASRELKVTFFPDLNGDVVA

SEQ ID NO: 90329 - protein, 19 aa, Severe acute respiratory syndrome coronavirus 2
SRELKVTFFPDLNGDVVAI

SEQ ID NO: 90330 - protein, 19 aa, Severe acute respiratory syndrome coronavirus 2
RELKVTFFPDLNGDVVAID

SEQ ID NO: 90331 - protein, 19 aa, Severe acute respiratory syndrome coronavirus 2
ELKVTFFPDLNGDVVAIDY

SEQ ID NO: 90332 - protein, 19 aa, Severe acute respiratory syndrome coronavirus 2
LKVTFFPDLNGDVVAIDYK

SEQ ID NO: 90333 - protein, 19 aa, Severe acute respiratory syndrome coronavirus 2
KVTFFPDLNGDVVAIDYKH

SEQ ID NO: 90334 - protein, 19 aa, Severe acute respiratory syndrome coronavirus 2
VTFFPDLNGDVVAIDYKHY

SEQ ID NO: 90335 - protein, 19 aa, Severe acute respiratory syndrome coronavirus 2
TFFPDLNGDVVAIDYKHYT

SEQ ID NO: 90336 - protein, 19 aa, Severe acute respiratory syndrome coronavirus 2
FFPDLNGDVVAIDYKHYTP

SEQ ID NO: 90337 - protein, 19 aa, Severe acute respiratory syndrome coronavirus 2
FPDLNGDVVAIDYKHYTPS

SEQ ID NO: 90338 - protein, 19 aa, Severe acute respiratory syndrome coronavirus 2
NKVVSTTTNIVTRCLNRVC

SEQ ID NO: 90339 - protein, 19 aa, Severe acute respiratory syndrome coronavirus 2
TYCTGSIPCSVCLSGLDSL

SEQ ID NO: 90340 - protein, 19 aa, Severe acute respiratory syndrome coronavirus 2
YCTGSIPCSVCLSGLDSLD

SEQ ID NO: 90341 - protein, 19 aa, Severe acute respiratory syndrome coronavirus 2
GSIPCSVCLSGLDSLDTYP

SEQ ID NO: 90342 - protein, 19 aa, Severe acute respiratory syndrome coronavirus 2
QITISSFKWDLTAFGLVAE

SEQ ID NO: 90343 - protein, 19 aa, Severe acute respiratory syndrome coronavirus 2
ITISSFKWDLTAFGLVAEW

SEQ ID NO: 90344 - protein, 19 aa, Severe acute respiratory syndrome coronavirus 2
TISSFKWDLTAFGLVAEWF

SEQ ID NO: 90345 - protein, 19 aa, Severe acute respiratory syndrome coronavirus 2
ISSFKWDLTAFGLVAEWFL

SEQ ID NO: 90346 - protein, 19 aa, Severe acute respiratory syndrome coronavirus 2
SSFKWDLTAFGLVAEWFLA

SEQ ID NO: 90347 - protein, 19 aa, Severe acute respiratory syndrome coronavirus 2
SFKWDLTAFGLVAEWFLAY

SEQ ID NO: 90348 - protein, 19 aa, Severe acute respiratory syndrome coronavirus 2
FKWDLTAFGLVAEWFLAYI

SEQ ID NO: 90349 - protein, 19 aa, Severe acute respiratory syndrome coronavirus 2
KWDLTAFGLVAEWFLAYIL

SEQ ID NO: 90350 - protein, 19 aa, Severe acute respiratory syndrome coronavirus 2
WDLTAFGLVAEWFLAYILF

SEQ ID NO: 90351 - protein, 19 aa, Severe acute respiratory syndrome coronavirus 2
DLTAFGLVAEWFLAYILFT

SEQ ID NO: 90352 - protein, 19 aa, Severe acute respiratory syndrome coronavirus 2
LTAFGLVAEWFLAYILFTR

SEQ ID NO: 90353 - protein, 19 aa, Severe acute respiratory syndrome coronavirus 2
TAFGLVAEWFLAYILFTRF

SEQ ID NO: 90354 - protein, 19 aa, Severe acute respiratory syndrome coronavirus 2
AFGLVAEWFLAYILFTRFF

SEQ ID NO: 90355 - protein, 19 aa, Severe acute respiratory syndrome coronavirus 2
FGLVAEWFLAYILFTRFFY

SEQ ID NO: 90356 - protein, 19 aa, Severe acute respiratory syndrome coronavirus 2
GLVAEWFLAYILFTRFFYV

SEQ ID NO: 90357 - protein, 19 aa, Severe acute respiratory syndrome coronavirus 2
LVAEWFLAYILFTRFFYVL

SEQ ID NO: 90358 - protein, 19 aa, Severe acute respiratory syndrome coronavirus 2
VAEWFLAYILFTRFFYVLG

SEQ ID NO: 90359 - protein, 19 aa, Severe acute respiratory syndrome coronavirus 2
AEWFLAYILFTRFFYVLGL

SEQ ID NO: 90360 - protein, 19 aa, Severe acute respiratory syndrome coronavirus 2
EWFLAYILFTRFFYVLGLA

SEQ ID NO: 90361 - protein, 19 aa, Severe acute respiratory syndrome coronavirus 2
WFLAYILFTRFFYVLGLAA

SEQ ID NO: 90362 - protein, 19 aa, Severe acute respiratory syndrome coronavirus 2
FLAYILFTRFFYVLGLAAI

SEQ ID NO: 90363 - protein, 19 aa, Severe acute respiratory syndrome coronavirus 2
LAYILFTRFFYVLGLAAIM

SEQ ID NO: 90364 - protein, 19 aa, Severe acute respiratory syndrome coronavirus 2
AYILFTRFFYVLGLAAIMQ

SEQ ID NO: 90365 - protein, 19 aa, Severe acute respiratory syndrome coronavirus 2
IMQLFFSYFAVHFISNSWL

SEQ ID NO: 90366 - protein, 19 aa, Severe acute respiratory syndrome coronavirus 2
FFSYFAVHFISNSWLMWLI

SEQ ID NO: 90367 - protein, 19 aa, Severe acute respiratory syndrome coronavirus 2
FSYFAVHFISNSWLMWLII

SEQ ID NO: 90368 - protein, 19 aa, Severe acute respiratory syndrome coronavirus 2
SYFAVHFISNSWLMWLIIN

SEQ ID NO: 90369 - protein, 19 aa, Severe acute respiratory syndrome coronavirus 2
YFAVHFISNSWLMWLIINL

SEQ ID NO: 90370 - protein, 19 aa, Severe acute respiratory syndrome coronavirus 2
FAVHFISNSWLMWLIINLV

SEQ ID NO: 90371 - protein, 19 aa, Severe acute respiratory syndrome coronavirus 2
AVHFISNSWLMWLIINLVQ

SEQ ID NO: 90372 - protein, 19 aa, Severe acute respiratory syndrome coronavirus 2
VHFISNSWLMWLIINLVQM

SEQ ID NO: 90373 - protein, 19 aa, Severe acute respiratory syndrome coronavirus 2
HFISNSWLMWLIINLVQMA

SEQ ID NO: 90374 - protein, 19 aa, Severe acute respiratory syndrome coronavirus 2
ISAMVRMYIFFASFYYVWK

SEQ ID NO: 90375 - protein, 19 aa, Severe acute respiratory syndrome coronavirus 2
AMVRMYIFFASFYYVWKSY

SEQ ID NO: 90376 - protein, 19 aa, Severe acute respiratory syndrome coronavirus 2
MVRMYIFFASFYYVWKSYV

SEQ ID NO: 90377 - protein, 19 aa, Severe acute respiratory syndrome coronavirus 2
VRMYIFFASFYYVWKSYVH

SEQ ID NO: 90378 - protein, 19 aa, Severe acute respiratory syndrome coronavirus 2
RMYIFFASFYYVWKSYVHV

SEQ ID NO: 90379 - protein, 19 aa, Severe acute respiratory syndrome coronavirus 2
MYIFFASFYYVWKSYVHVV

SEQ ID NO: 90380 - protein, 19 aa, Severe acute respiratory syndrome coronavirus 2
YIFFASFYYVWKSYVHVVD

SEQ ID NO: 90381 - protein, 19 aa, Severe acute respiratory syndrome coronavirus 2
SSTCMMCYKRNRATRVECT

SEQ ID NO: 90382 - protein, 19 aa, Severe acute respiratory syndrome coronavirus 2
STCMMCYKRNRATRVECTT

SEQ ID NO: 90383 - protein, 19 aa, Severe acute respiratory syndrome coronavirus 2
TCMMCYKRNRATRVECTTI

SEQ ID NO: 90384 - protein, 19 aa, Severe acute respiratory syndrome coronavirus 2
CMMCYKRNRATRVECTTIV

SEQ ID NO: 90385 - protein, 19 aa, Severe acute respiratory syndrome coronavirus 2
MMCYKRNRATRVECTTIVN

SEQ ID NO: 90386 - protein, 19 aa, Severe acute respiratory syndrome coronavirus 2
MCYKRNRATRVECTTIVNG

SEQ ID NO: 90387 - protein, 19 aa, Severe acute respiratory syndrome coronavirus 2
CYKRNRATRVECTTIVNGV

SEQ ID NO: 90388 - protein, 19 aa, Severe acute respiratory syndrome coronavirus 2
YKRNRATRVECTTIVNGVR

SEQ ID NO: 90389 - protein, 19 aa, Severe acute respiratory syndrome coronavirus 2
SFYVYANGGKGFCKLHNWN

SEQ ID NO: 90390 - protein, 19 aa, Severe acute respiratory syndrome coronavirus 2
FYVYANGGKGFCKLHNWNC

SEQ ID NO: 90391 - protein, 19 aa, Severe acute respiratory syndrome coronavirus 2
YVYANGGKGFCKLHNWNCV

SEQ ID NO: 90392 - protein, 19 aa, Severe acute respiratory syndrome coronavirus 2
VYANGGKGFCKLHNWNCVN

SEQ ID NO: 90393 - protein, 19 aa, Severe acute respiratory syndrome coronavirus 2
YANGGKGFCKLHNWNCVNC

SEQ ID NO: 90394 - protein, 19 aa, Severe acute respiratory syndrome coronavirus 2
ANGGKGFCKLHNWNCVNCD

SEQ ID NO: 90395 - protein, 19 aa, Severe acute respiratory syndrome coronavirus 2
NGGKGFCKLHNWNCVNCDT

SEQ ID NO: 90396 - protein, 19 aa, Severe acute respiratory syndrome coronavirus 2
GGKGFCKLHNWNCVNCDTF

SEQ ID NO: 90397 - protein, 19 aa, Severe acute respiratory syndrome coronavirus 2
GKGFCKLHNWNCVNCDTFC

SEQ ID NO: 90398 - protein, 19 aa, Severe acute respiratory syndrome coronavirus 2
HNWNCVNCDTFCAGSTFIS

SEQ ID NO: 90399 - protein, 19 aa, Severe acute respiratory syndrome coronavirus 2
NWNCVNCDTFCAGSTFISD

SEQ ID NO: 90400 - protein, 19 aa, Severe acute respiratory syndrome coronavirus 2
WNCVNCDTFCAGSTFISDE

SEQ ID NO: 90401 - protein, 19 aa, Severe acute respiratory syndrome coronavirus 2
NCVNCDTFCAGSTFISDEV

SEQ ID NO: 90402 - protein, 19 aa, Severe acute respiratory syndrome coronavirus 2
CVNCDTFCAGSTFISDEVA

SEQ ID NO: 90403 - protein, 19 aa, Severe acute respiratory syndrome coronavirus 2
VNCDTFCAGSTFISDEVAR

SEQ ID NO: 90404 - protein, 19 aa, Severe acute respiratory syndrome coronavirus 2
NCDTFCAGSTFISDEVARD

SEQ ID NO: 90405 - protein, 19 aa, Severe acute respiratory syndrome coronavirus 2
CDTFCAGSTFISDEVARDL

SEQ ID NO: 90406 - protein, 19 aa, Severe acute respiratory syndrome coronavirus 2
DTFCAGSTFISDEVARDLS

SEQ ID NO: 90407 - protein, 19 aa, Severe acute respiratory syndrome coronavirus 2
TFCAGSTFISDEVARDLSL

SEQ ID NO: 90408 - protein, 19 aa, Severe acute respiratory syndrome coronavirus 2
FCAGSTFISDEVARDLSLQ

SEQ ID NO: 90409 - protein, 19 aa, Severe acute respiratory syndrome coronavirus 2
CAGSTFISDEVARDLSLQF

SEQ ID NO: 90410 - protein, 19 aa, Severe acute respiratory syndrome coronavirus 2
AGSTFISDEVARDLSLQFK

SEQ ID NO: 90411 - protein, 19 aa, Severe acute respiratory syndrome coronavirus 2
GSTFISDEVARDLSLQFKR

SEQ ID NO: 90412 - protein, 19 aa, Severe acute respiratory syndrome coronavirus 2
STFISDEVARDLSLQFKRP

SEQ ID NO: 90413 - protein, 19 aa, Severe acute respiratory syndrome coronavirus 2
TFISDEVARDLSLQFKRPI

SEQ ID NO: 90414 - protein, 19 aa, Severe acute respiratory syndrome coronavirus 2
SASVYYSQLMCQPILLLDQ

SEQ ID NO: 90415 - protein, 19 aa, Severe acute respiratory syndrome coronavirus 2
ASVYYSQLMCQPILLLDQA

SEQ ID NO: 90416 - protein, 19 aa, Severe acute respiratory syndrome coronavirus 2
SVYYSQLMCQPILLLDQAL

SEQ ID NO: 90417 - protein, 19 aa, Severe acute respiratory syndrome coronavirus 2
VYYSQLMCQPILLLDQALV

SEQ ID NO: 90418 - protein, 19 aa, Severe acute respiratory syndrome coronavirus 2
YYSQLMCQPILLLDQALVS

SEQ ID NO: 90419 - protein, 19 aa, Severe acute respiratory syndrome coronavirus 2
YSQLMCQPILLLDQALVSD

SEQ ID NO: 90420 - protein, 19 aa, Severe acute respiratory syndrome coronavirus 2
LDNVLSTFISAARQGFVDS

SEQ ID NO: 90421 - protein, 19 aa, Severe acute respiratory syndrome coronavirus 2
DNVLSTFISAARQGFVDSD

SEQ ID NO: 90422 - protein, 19 aa, Severe acute respiratory syndrome coronavirus 2
NVLSTFISAARQGFVDSDV

SEQ ID NO: 90423 - protein, 19 aa, Severe acute respiratory syndrome coronavirus 2
VLSTFISAARQGFVDSDVE

SEQ ID NO: 90424 - protein, 19 aa, Severe acute respiratory syndrome coronavirus 2
LSTFISAARQGFVDSDVET

SEQ ID NO: 90425 - protein, 19 aa, Severe acute respiratory syndrome coronavirus 2
STFISAARQGFVDSDVETK

SEQ ID NO: 90426 - protein, 19 aa, Severe acute respiratory syndrome coronavirus 2
TFISAARQGFVDSDVETKD

SEQ ID NO: 90427 - protein, 19 aa, Severe acute respiratory syndrome coronavirus 2
FISAARQGFVDSDVETKDV

SEQ ID NO: 90428 - protein, 19 aa, Severe acute respiratory syndrome coronavirus 2
ISAARQGFVDSDVETKDVV

SEQ ID NO: 90429 - protein, 19 aa, Severe acute respiratory syndrome coronavirus 2
DVETKDVVECLKLSHQSDI

SEQ ID NO: 90430 - protein, 19 aa, Severe acute respiratory syndrome coronavirus 2
VETKDVVECLKLSHQSDIE

SEQ ID NO: 90431 - protein, 19 aa, Severe acute respiratory syndrome coronavirus 2
ETKDVVECLKLSHQSDIEV

SEQ ID NO: 90432 - protein, 19 aa, Severe acute respiratory syndrome coronavirus 2
TKDVVECLKLSHQSDIEVT

SEQ ID NO: 90433 - protein, 19 aa, Severe acute respiratory syndrome coronavirus 2
KDVVECLKLSHQSDIEVTG

SEQ ID NO: 90434 - protein, 19 aa, Severe acute respiratory syndrome coronavirus 2
DVVECLKLSHQSDIEVTGD

SEQ ID NO: 90435 - protein, 19 aa, Severe acute respiratory syndrome coronavirus 2
VVECLKLSHQSDIEVTGDS

SEQ ID NO: 90436 - protein, 19 aa, Severe acute respiratory syndrome coronavirus 2
IEVTGDSCNNYMLTYNKVE

SEQ ID NO: 90437 - protein, 19 aa, Severe acute respiratory syndrome coronavirus 2
SLSEQLRKQIRSAAKKNNL

SEQ ID NO: 90438 - protein, 19 aa, Severe acute respiratory syndrome coronavirus 2
LSEQLRKQIRSAAKKNNLP

SEQ ID NO: 90439 - protein, 19 aa, Severe acute respiratory syndrome coronavirus 2
SEQLRKQIRSAAKKNNLPF

SEQ ID NO: 90440 - protein, 19 aa, Severe acute respiratory syndrome coronavirus 2
EQLRKQIRSAAKKNNLPFK

SEQ ID NO: 90441 - protein, 19 aa, Severe acute respiratory syndrome coronavirus 2
QLRKQIRSAAKKNNLPFKL

SEQ ID NO: 90442 - protein, 19 aa, Severe acute respiratory syndrome coronavirus 2
LRKQIRSAAKKNNLPFKLT

SEQ ID NO: 90443 - protein, 19 aa, Severe acute respiratory syndrome coronavirus 2
RKQIRSAAKKNNLPFKLTC

SEQ ID NO: 90444 - protein, 19 aa, Severe acute respiratory syndrome coronavirus 2
RSAAKKNNLPFKLTCATTR

SEQ ID NO: 90445 - protein, 19 aa, Severe acute respiratory syndrome coronavirus 2
SAAKKNNLPFKLTCATTRQ

SEQ ID NO: 90446 - protein, 19 aa, Severe acute respiratory syndrome coronavirus 2
AAKKNNLPFKLTCATTRQV

SEQ ID NO: 90447 - protein, 19 aa, Severe acute respiratory syndrome coronavirus 2
AKKNNLPFKLTCATTRQVV

SEQ ID NO: 90448 - protein, 19 aa, Severe acute respiratory syndrome coronavirus 2
KKNNLPFKLTCATTRQVVN

SEQ ID NO: 90449 - protein, 19 aa, Severe acute respiratory syndrome coronavirus 2
KNNLPFKLTCATTRQVVNV

SEQ ID NO: 90450 - protein, 19 aa, Severe acute respiratory syndrome coronavirus 2
NNLPFKLTCATTRQVVNVV

SEQ ID NO: 90451 - protein, 19 aa, Severe acute respiratory syndrome coronavirus 2
NLPFKLTCATTRQVVNVVT

SEQ ID NO: 90452 - protein, 19 aa, Severe acute respiratory syndrome coronavirus 2
LPFKLTCATTRQVVNVVTT

SEQ ID NO: 90453 - protein, 19 aa, Severe acute respiratory syndrome coronavirus 2
PFKLTCATTRQVVNVVTTK

SEQ ID NO: 90454 - protein, 19 aa, Severe acute respiratory syndrome coronavirus 2
FKLTCATTRQVVNVVTTKI

SEQ ID NO: 90455 - protein, 19 aa, Severe acute respiratory syndrome coronavirus 2
KLTCATTRQVVNVVTTKIA

SEQ ID NO: 90456 - protein, 19 aa, Severe acute respiratory syndrome coronavirus 2
LTCATTRQVVNVVTTKIAL

SEQ ID NO: 90457 - protein, 19 aa, Severe acute respiratory syndrome coronavirus 2
TCATTRQVVNVVTTKIALK

SEQ ID NO: 90458 - protein, 19 aa, Severe acute respiratory syndrome coronavirus 2
CATTRQVVNVVTTKIALKG

SEQ ID NO: 90459 - protein, 19 aa, Severe acute respiratory syndrome coronavirus 2
ATTRQVVNVVTTKIALKGG

SEQ ID NO: 90460 - protein, 19 aa, Severe acute respiratory syndrome coronavirus 2
KIVNNWLKQLIKVTLVFLF

SEQ ID NO: 90461 - protein, 19 aa, Severe acute respiratory syndrome coronavirus 2
IVNNWLKQLIKVTLVFLFV

SEQ ID NO: 90462 - protein, 19 aa, Severe acute respiratory syndrome coronavirus 2
FSQRGGSYTNDKACPLIAA

SEQ ID NO: 90463 - protein, 19 aa, Severe acute respiratory syndrome coronavirus 2
SQRGGSYTNDKACPLIAAV

SEQ ID NO: 90464 - protein, 19 aa, Severe acute respiratory syndrome coronavirus 2
QRGGSYTNDKACPLIAAVI

SEQ ID NO: 90465 - protein, 19 aa, Severe acute respiratory syndrome coronavirus 2
RGGSYTNDKACPLIAAVIT

SEQ ID NO: 90466 - protein, 19 aa, Severe acute respiratory syndrome coronavirus 2
GGSYTNDKACPLIAAVITR

SEQ ID NO: 90467 - protein, 19 aa, Severe acute respiratory syndrome coronavirus 2
GSYTNDKACPLIAAVITRE

SEQ ID NO: 90468 - protein, 19 aa, Severe acute respiratory syndrome coronavirus 2
SYTNDKACPLIAAVITREV

SEQ ID NO: 90469 - protein, 19 aa, Severe acute respiratory syndrome coronavirus 2
TTNGDFLHFLPRVFSAVGN

SEQ ID NO: 90470 - protein, 19 aa, Severe acute respiratory syndrome coronavirus 2
TNGDFLHFLPRVFSAVGNI

SEQ ID NO: 90471 - protein, 19 aa, Severe acute respiratory syndrome coronavirus 2
NGDFLHFLPRVFSAVGNIC

SEQ ID NO: 90472 - protein, 19 aa, Severe acute respiratory syndrome coronavirus 2
GDFLHFLPRVFSAVGNICY

SEQ ID NO: 90473 - protein, 19 aa, Severe acute respiratory syndrome coronavirus 2
DFLHFLPRVFSAVGNICYT

SEQ ID NO: 90474 - protein, 19 aa, Severe acute respiratory syndrome coronavirus 2
FLHFLPRVFSAVGNICYTP

SEQ ID NO: 90475 - protein, 19 aa, Severe acute respiratory syndrome coronavirus 2
ATSACVLAAECTIFKDASG

SEQ ID NO: 90476 - protein, 19 aa, Severe acute respiratory syndrome coronavirus 2
TSACVLAAECTIFKDASGK

SEQ ID NO: 90477 - protein, 19 aa, Severe acute respiratory syndrome coronavirus 2
SACVLAAECTIFKDASGKP

SEQ ID NO: 90478 - protein, 19 aa, Severe acute respiratory syndrome coronavirus 2
ACVLAAECTIFKDASGKPV

SEQ ID NO: 90479 - protein, 19 aa, Severe acute respiratory syndrome coronavirus 2
CVLAAECTIFKDASGKPVP

SEQ ID NO: 90480 - protein, 19 aa, Severe acute respiratory syndrome coronavirus 2
VLAAECTIFKDASGKPVPY

SEQ ID NO: 90481 - protein, 19 aa, Severe acute respiratory syndrome coronavirus 2
LAAECTIFKDASGKPVPYC

SEQ ID NO: 90482 - protein, 19 aa, Severe acute respiratory syndrome coronavirus 2
AAECTIFKDASGKPVPYCY

SEQ ID NO: 90483 - protein, 19 aa, Severe acute respiratory syndrome coronavirus 2
AECTIFKDASGKPVPYCYD

SEQ ID NO: 90484 - protein, 19 aa, Severe acute respiratory syndrome coronavirus 2
ECTIFKDASGKPVPYCYDT

SEQ ID NO: 90485 - protein, 19 aa, Severe acute respiratory syndrome coronavirus 2
CTIFKDASGKPVPYCYDTN

SEQ ID NO: 90486 - protein, 19 aa, Severe acute respiratory syndrome coronavirus 2
TIFKDASGKPVPYCYDTNV

SEQ ID NO: 90487 - protein, 19 aa, Severe acute respiratory syndrome coronavirus 2
ASGKPVPYCYDTNVLEGSV

SEQ ID NO: 90488 - protein, 19 aa, Severe acute respiratory syndrome coronavirus 2
SGKPVPYCYDTNVLEGSVA

SEQ ID NO: 90489 - protein, 19 aa, Severe acute respiratory syndrome coronavirus 2
GKPVPYCYDTNVLEGSVAY

SEQ ID NO: 90490 - protein, 19 aa, Severe acute respiratory syndrome coronavirus 2
KPVPYCYDTNVLEGSVAYE

SEQ ID NO: 90491 - protein, 19 aa, Severe acute respiratory syndrome coronavirus 2
PVPYCYDTNVLEGSVAYES

SEQ ID NO: 90492 - protein, 19 aa, Severe acute respiratory syndrome coronavirus 2
VPYCYDTNVLEGSVAYESL

SEQ ID NO: 90493 - protein, 19 aa, Severe acute respiratory syndrome coronavirus 2
PYCYDTNVLEGSVAYESLR

SEQ ID NO: 90494 - protein, 19 aa, Severe acute respiratory syndrome coronavirus 2
YCYDTNVLEGSVAYESLRP

SEQ ID NO: 90495 - protein, 19 aa, Severe acute respiratory syndrome coronavirus 2
CYDTNVLEGSVAYESLRPD

SEQ ID NO: 90496 - protein, 19 aa, Severe acute respiratory syndrome coronavirus 2
YDTNVLEGSVAYESLRPDT

SEQ ID NO: 90497 - protein, 19 aa, Severe acute respiratory syndrome coronavirus 2
DTNVLEGSVAYESLRPDTR

SEQ ID NO: 90498 - protein, 19 aa, Severe acute respiratory syndrome coronavirus 2
TNVLEGSVAYESLRPDTRY

SEQ ID NO: 90499 - protein, 19 aa, Severe acute respiratory syndrome coronavirus 2
NVLEGSVAYESLRPDTRYV

SEQ ID NO: 90500 - protein, 19 aa, Severe acute respiratory syndrome coronavirus 2
VLEGSVAYESLRPDTRYVL

SEQ ID NO: 90501 - protein, 19 aa, Severe acute respiratory syndrome coronavirus 2
LEGSVAYESLRPDTRYVLM

SEQ ID NO: 90502 - protein, 19 aa, Severe acute respiratory syndrome coronavirus 2
EGSVAYESLRPDTRYVLMD

SEQ ID NO: 90503 - protein, 19 aa, Severe acute respiratory syndrome coronavirus 2
YESLRPDTRYVLMDGSIIQ

SEQ ID NO: 90504 - protein, 19 aa, Severe acute respiratory syndrome coronavirus 2
ESLRPDTRYVLMDGSIIQF

SEQ ID NO: 90505 - protein, 19 aa, Severe acute respiratory syndrome coronavirus 2
GVCVSTSGRWVLNNDYYRS

SEQ ID NO: 90506 - protein, 19 aa, Severe acute respiratory syndrome coronavirus 2
VCVSTSGRWVLNNDYYRSL

SEQ ID NO: 90507 - protein, 19 aa, Severe acute respiratory syndrome coronavirus 2
CVSTSGRWVLNNDYYRSLP

SEQ ID NO: 90508 - protein, 19 aa, Severe acute respiratory syndrome coronavirus 2
VSTSGRWVLNNDYYRSLPG

SEQ ID NO: 90509 - protein, 19 aa, Severe acute respiratory syndrome coronavirus 2
STSGRWVLNNDYYRSLPGV

SEQ ID NO: 90510 - protein, 19 aa, Severe acute respiratory syndrome coronavirus 2
TSGRWVLNNDYYRSLPGVF

SEQ ID NO: 90511 - protein, 19 aa, Severe acute respiratory syndrome coronavirus 2
SGRWVLNNDYYRSLPGVFC

SEQ ID NO: 90512 - protein, 19 aa, Severe acute respiratory syndrome coronavirus 2
GRWVLNNDYYRSLPGVFCG

SEQ ID NO: 90513 - protein, 19 aa, Severe acute respiratory syndrome coronavirus 2
RWVLNNDYYRSLPGVFCGV

SEQ ID NO: 90514 - protein, 19 aa, Severe acute respiratory syndrome coronavirus 2
WVLNNDYYRSLPGVFCGVD

SEQ ID NO: 90515 - protein, 19 aa, Severe acute respiratory syndrome coronavirus 2
PLIQPIGALDISASIVAGG

SEQ ID NO: 90516 - protein, 19 aa, Severe acute respiratory syndrome coronavirus 2
LIQPIGALDISASIVAGGI

SEQ ID NO: 90517 - protein, 19 aa, Severe acute respiratory syndrome coronavirus 2
FLPGVYSVIYLYLTFYLTN

SEQ ID NO: 90518 - protein, 19 aa, Severe acute respiratory syndrome coronavirus 2
LPGVYSVIYLYLTFYLTND

SEQ ID NO: 90519 - protein, 19 aa, Severe acute respiratory syndrome coronavirus 2
PGVYSVIYLYLTFYLTNDV

SEQ ID NO: 90520 - protein, 19 aa, Severe acute respiratory syndrome coronavirus 2
GVYSVIYLYLTFYLTNDVS

SEQ ID NO: 90521 - protein, 19 aa, Severe acute respiratory syndrome coronavirus 2
VYSVIYLYLTFYLTNDVSF

SEQ ID NO: 90522 - protein, 19 aa, Severe acute respiratory syndrome coronavirus 2
YSVIYLYLTFYLTNDVSFL

SEQ ID NO: 90523 - protein, 19 aa, Severe acute respiratory syndrome coronavirus 2
YLYLTFYLTNDVSFLAHIQ

SEQ ID NO: 90524 - protein, 19 aa, Severe acute respiratory syndrome coronavirus 2
LYLTFYLTNDVSFLAHIQW

SEQ ID NO: 90525 - protein, 19 aa, Severe acute respiratory syndrome coronavirus 2
YLTFYLTNDVSFLAHIQWM

SEQ ID NO: 90526 - protein, 19 aa, Severe acute respiratory syndrome coronavirus 2
LTFYLTNDVSFLAHIQWMV

SEQ ID NO: 90527 - protein, 19 aa, Severe acute respiratory syndrome coronavirus 2
TFYLTNDVSFLAHIQWMVM

SEQ ID NO: 90528 - protein, 19 aa, Severe acute respiratory syndrome coronavirus 2
YIICISTKHFYWFFSNYLK

SEQ ID NO: 90529 - protein, 19 aa, Severe acute respiratory syndrome coronavirus 2
IICISTKHFYWFFSNYLKR

SEQ ID NO: 90530 - protein, 19 aa, Severe acute respiratory syndrome coronavirus 2
ICISTKHFYWFFSNYLKRR

SEQ ID NO: 90531 - protein, 19 aa, Severe acute respiratory syndrome coronavirus 2
CISTKHFYWFFSNYLKRRV

SEQ ID NO: 90532 - protein, 19 aa, Severe acute respiratory syndrome coronavirus 2
ISTKHFYWFFSNYLKRRVV

SEQ ID NO: 90533 - protein, 19 aa, Severe acute respiratory syndrome coronavirus 2
STKHFYWFFSNYLKRRVVF

SEQ ID NO: 90534 - protein, 19 aa, Severe acute respiratory syndrome coronavirus 2
TKHFYWFFSNYLKRRVVFN

SEQ ID NO: 90535 - protein, 19 aa, Severe acute respiratory syndrome coronavirus 2
KHFYWFFSNYLKRRVVFNG

SEQ ID NO: 90536 - protein, 19 aa, Severe acute respiratory syndrome coronavirus 2
HFYWFFSNYLKRRVVFNGV

SEQ ID NO: 90537 - protein, 19 aa, Severe acute respiratory syndrome coronavirus 2
FYWFFSNYLKRRVVFNGVS

SEQ ID NO: 90538 - protein, 19 aa, Severe acute respiratory syndrome coronavirus 2
YWFFSNYLKRRVVFNGVSF

SEQ ID NO: 90539 - protein, 19 aa, Severe acute respiratory syndrome coronavirus 2
WFFSNYLKRRVVFNGVSFS

SEQ ID NO: 90540 - protein, 19 aa, Severe acute respiratory syndrome coronavirus 2
FFSNYLKRRVVFNGVSFST

SEQ ID NO: 90541 - protein, 19 aa, Severe acute respiratory syndrome coronavirus 2
FSNYLKRRVVFNGVSFSTF

SEQ ID NO: 90542 - protein, 19 aa, Severe acute respiratory syndrome coronavirus 2
SNYLKRRVVFNGVSFSTFE

SEQ ID NO: 90543 - protein, 19 aa, Severe acute respiratory syndrome coronavirus 2
NYLKRRVVFNGVSFSTFEE

SEQ ID NO: 90544 - protein, 19 aa, Severe acute respiratory syndrome coronavirus 2
YLKRRVVFNGVSFSTFEEA

SEQ ID NO: 90545 - protein, 19 aa, Severe acute respiratory syndrome coronavirus 2
LKRRVVFNGVSFSTFEEAA

SEQ ID NO: 90546 - protein, 19 aa, Severe acute respiratory syndrome coronavirus 2
KRRVVFNGVSFSTFEEAAL

SEQ ID NO: 90547 - protein, 19 aa, Severe acute respiratory syndrome coronavirus 2
RRVVFNGVSFSTFEEAALC

SEQ ID NO: 90548 - protein, 19 aa, Severe acute respiratory syndrome coronavirus 2
RVVFNGVSFSTFEEAALCT

SEQ ID NO: 90549 - protein, 19 aa, Severe acute respiratory syndrome coronavirus 2
VVFNGVSFSTFEEAALCTF

SEQ ID NO: 90550 - protein, 19 aa, Severe acute respiratory syndrome coronavirus 2
VFNGVSFSTFEEAALCTFL

SEQ ID NO: 90551 - protein, 19 aa, Severe acute respiratory syndrome coronavirus 2
FNGVSFSTFEEAALCTFLL

SEQ ID NO: 90552 - protein, 19 aa, Severe acute respiratory syndrome coronavirus 2
NGVSFSTFEEAALCTFLLN

SEQ ID NO: 90553 - protein, 19 aa, Severe acute respiratory syndrome coronavirus 2
GVSFSTFEEAALCTFLLNK

SEQ ID NO: 90554 - protein, 19 aa, Severe acute respiratory syndrome coronavirus 2
VSFSTFEEAALCTFLLNKE

SEQ ID NO: 90555 - protein, 19 aa, Severe acute respiratory syndrome coronavirus 2
SFSTFEEAALCTFLLNKEM

SEQ ID NO: 90556 - protein, 19 aa, Severe acute respiratory syndrome coronavirus 2
FSTFEEAALCTFLLNKEMY

SEQ ID NO: 90557 - protein, 19 aa, Severe acute respiratory syndrome coronavirus 2
STFEEAALCTFLLNKEMYL

SEQ ID NO: 90558 - protein, 19 aa, Severe acute respiratory syndrome coronavirus 2
TFEEAALCTFLLNKEMYLK

SEQ ID NO: 90559 - protein, 19 aa, Severe acute respiratory syndrome coronavirus 2
FEEAALCTFLLNKEMYLKL

SEQ ID NO: 90560 - protein, 19 aa, Severe acute respiratory syndrome coronavirus 2
EEAALCTFLLNKEMYLKLR

SEQ ID NO: 90561 - protein, 19 aa, Severe acute respiratory syndrome coronavirus 2
EAALCTFLLNKEMYLKLRS

SEQ ID NO: 90562 - protein, 19 aa, Severe acute respiratory syndrome coronavirus 2
AALCTFLLNKEMYLKLRSD

SEQ ID NO: 90563 - protein, 19 aa, Severe acute respiratory syndrome coronavirus 2
ALCTFLLNKEMYLKLRSDV

SEQ ID NO: 90564 - protein, 19 aa, Severe acute respiratory syndrome coronavirus 2
LCTFLLNKEMYLKLRSDVL

SEQ ID NO: 90565 - protein, 19 aa, Severe acute respiratory syndrome coronavirus 2
CTFLLNKEMYLKLRSDVLL

SEQ ID NO: 90566 - protein, 19 aa, Severe acute respiratory syndrome coronavirus 2
TFLLNKEMYLKLRSDVLLP

SEQ ID NO: 90567 - protein, 19 aa, Severe acute respiratory syndrome coronavirus 2
LAKALNDFSNSGSDVLYQP

SEQ ID NO: 90568 - protein, 19 aa, Severe acute respiratory syndrome coronavirus 2
AKALNDFSNSGSDVLYQPP

SEQ ID NO: 90569 - protein, 19 aa, Severe acute respiratory syndrome coronavirus 2
KALNDFSNSGSDVLYQPPQ

SEQ ID NO: 90570 - protein, 19 aa, Severe acute respiratory syndrome coronavirus 2
GSDVLYQPPQTSITSAVLQ

SEQ ID NO: 90571 - protein, 19 aa, Severe acute respiratory syndrome coronavirus 2
CMVQVTCGTTTLNGLWLDD

SEQ ID NO: 90572 - protein, 19 aa, Severe acute respiratory syndrome coronavirus 2
MVQVTCGTTTLNGLWLDDV

SEQ ID NO: 90573 - protein, 19 aa, Severe acute respiratory syndrome coronavirus 2
VQVTCGTTTLNGLWLDDVV

SEQ ID NO: 90574 - protein, 19 aa, Severe acute respiratory syndrome coronavirus 2
QVTCGTTTLNGLWLDDVVY

SEQ ID NO: 90575 - protein, 19 aa, Severe acute respiratory syndrome coronavirus 2
VTCGTTTLNGLWLDDVVYC

SEQ ID NO: 90576 - protein, 19 aa, Severe acute respiratory syndrome coronavirus 2
TCGTTTLNGLWLDDVVYCP

SEQ ID NO: 90577 - protein, 19 aa, Severe acute respiratory syndrome coronavirus 2
CGTTTLNGLWLDDVVYCPR

SEQ ID NO: 90578 - protein, 19 aa, Severe acute respiratory syndrome coronavirus 2
GTTTLNGLWLDDVVYCPRH

SEQ ID NO: 90579 - protein, 19 aa, Severe acute respiratory syndrome coronavirus 2
TTTLNGLWLDDVVYCPRHV

SEQ ID NO: 90580 - protein, 19 aa, Severe acute respiratory syndrome coronavirus 2
TTLNGLWLDDVVYCPRHVI

SEQ ID NO: 90581 - protein, 19 aa, Severe acute respiratory syndrome coronavirus 2
TLNGLWLDDVVYCPRHVIC

SEQ ID NO: 90582 - protein, 19 aa, Severe acute respiratory syndrome coronavirus 2
SFCYMHHMELPTGVHAGTD

SEQ ID NO: 90583 - protein, 19 aa, Severe acute respiratory syndrome coronavirus 2
FCYMHHMELPTGVHAGTDL

SEQ ID NO: 90584 - protein, 19 aa, Severe acute respiratory syndrome coronavirus 2
AGTDTTITVNVLAWLYAAV

SEQ ID NO: 90585 - protein, 19 aa, Severe acute respiratory syndrome coronavirus 2
TITVNVLAWLYAAVINGDR

SEQ ID NO: 90586 - protein, 19 aa, Severe acute respiratory syndrome coronavirus 2
ITVNVLAWLYAAVINGDRW

SEQ ID NO: 90587 - protein, 19 aa, Severe acute respiratory syndrome coronavirus 2
TVNVLAWLYAAVINGDRWF

SEQ ID NO: 90588 - protein, 19 aa, Severe acute respiratory syndrome coronavirus 2
TILGSALLEDEFTPFDVVR

SEQ ID NO: 90589 - protein, 19 aa, Severe acute respiratory syndrome coronavirus 2
ILGSALLEDEFTPFDVVRQ

SEQ ID NO: 90590 - protein, 19 aa, Severe acute respiratory syndrome coronavirus 2
LGSALLEDEFTPFDVVRQC

SEQ ID NO: 90591 - protein, 19 aa, Severe acute respiratory syndrome coronavirus 2
GSALLEDEFTPFDVVRQCS

SEQ ID NO: 90592 - protein, 19 aa, Severe acute respiratory syndrome coronavirus 2
SALLEDEFTPFDVVRQCSG

SEQ ID NO: 90593 - protein, 19 aa, Severe acute respiratory syndrome coronavirus 2
ALLEDEFTPFDVVRQCSGV

SEQ ID NO: 90594 - protein, 19 aa, Severe acute respiratory syndrome coronavirus 2
LLEDEFTPFDVVRQCSGVT

SEQ ID NO: 90595 - protein, 19 aa, Severe acute respiratory syndrome coronavirus 2
LEDEFTPFDVVRQCSGVTF

SEQ ID NO: 90596 - protein, 19 aa, Severe acute respiratory syndrome coronavirus 2
EDEFTPFDVVRQCSGVTFQ

SEQ ID NO: 90597 - protein, 19 aa, Severe acute respiratory syndrome coronavirus 2
SAVKRTIKGTHHWLLLTIL

SEQ ID NO: 90598 - protein, 19 aa, Severe acute respiratory syndrome coronavirus 2
AVKRTIKGTHHWLLLTILT

SEQ ID NO: 90599 - protein, 19 aa, Severe acute respiratory syndrome coronavirus 2
VKRTIKGTHHWLLLTILTS

SEQ ID NO: 90600 - protein, 19 aa, Severe acute respiratory syndrome coronavirus 2
KRTIKGTHHWLLLTILTSL

SEQ ID NO: 90601 - protein, 19 aa, Severe acute respiratory syndrome coronavirus 2
RTIKGTHHWLLLTILTSLL

SEQ ID NO: 90602 - protein, 19 aa, Severe acute respiratory syndrome coronavirus 2
TIKGTHHWLLLTILTSLLV

SEQ ID NO: 90603 - protein, 19 aa, Severe acute respiratory syndrome coronavirus 2
IKGTHHWLLLTILTSLLVL

SEQ ID NO: 90604 - protein, 19 aa, Severe acute respiratory syndrome coronavirus 2
KGTHHWLLLTILTSLLVLV

SEQ ID NO: 90605 - protein, 19 aa, Severe acute respiratory syndrome coronavirus 2
GTHHWLLLTILTSLLVLVQ

SEQ ID NO: 90606 - protein, 19 aa, Severe acute respiratory syndrome coronavirus 2
THHWLLLTILTSLLVLVQS

SEQ ID NO: 90607 - protein, 19 aa, Severe acute respiratory syndrome coronavirus 2
HHWLLLTILTSLLVLVQST

SEQ ID NO: 90608 - protein, 19 aa, Severe acute respiratory syndrome coronavirus 2
HWLLLTILTSLLVLVQSTQ

SEQ ID NO: 90609 - protein, 19 aa, Severe acute respiratory syndrome coronavirus 2
WLLLTILTSLLVLVQSTQW

SEQ ID NO: 90610 - protein, 19 aa, Severe acute respiratory syndrome coronavirus 2
LLLTILTSLLVLVQSTQWS

SEQ ID NO: 90611 - protein, 19 aa, Severe acute respiratory syndrome coronavirus 2
LLTILTSLLVLVQSTQWSL

SEQ ID NO: 90612 - protein, 19 aa, Severe acute respiratory syndrome coronavirus 2
LTILTSLLVLVQSTQWSLF

SEQ ID NO: 90613 - protein, 19 aa, Severe acute respiratory syndrome coronavirus 2
MGIIAMSAFAMMFVKHKHA

SEQ ID NO: 90614 - protein, 19 aa, Severe acute respiratory syndrome coronavirus 2
GIIAMSAFAMMFVKHKHAF

SEQ ID NO: 90615 - protein, 19 aa, Severe acute respiratory syndrome coronavirus 2
IIAMSAFAMMFVKHKHAFL

SEQ ID NO: 90616 - protein, 19 aa, Severe acute respiratory syndrome coronavirus 2
IAMSAFAMMFVKHKHAFLC

SEQ ID NO: 90617 - protein, 19 aa, Severe acute respiratory syndrome coronavirus 2
AMSAFAMMFVKHKHAFLCL

SEQ ID NO: 90618 - protein, 19 aa, Severe acute respiratory syndrome coronavirus 2
MSAFAMMFVKHKHAFLCLF

SEQ ID NO: 90619 - protein, 19 aa, Severe acute respiratory syndrome coronavirus 2
SAFAMMFVKHKHAFLCLFL

SEQ ID NO: 90620 - protein, 19 aa, Severe acute respiratory syndrome coronavirus 2
AFAMMFVKHKHAFLCLFLL

SEQ ID NO: 90621 - protein, 19 aa, Severe acute respiratory syndrome coronavirus 2
FAMMFVKHKHAFLCLFLLP

SEQ ID NO: 90622 - protein, 19 aa, Severe acute respiratory syndrome coronavirus 2
AMMFVKHKHAFLCLFLLPS

SEQ ID NO: 90623 - protein, 19 aa, Severe acute respiratory syndrome coronavirus 2
TVAYFNMVYMPASWVMRIM

SEQ ID NO: 90624 - protein, 19 aa, Severe acute respiratory syndrome coronavirus 2
VAYFNMVYMPASWVMRIMT

SEQ ID NO: 90625 - protein, 19 aa, Severe acute respiratory syndrome coronavirus 2
AYFNMVYMPASWVMRIMTW

SEQ ID NO: 90626 - protein, 19 aa, Severe acute respiratory syndrome coronavirus 2
YFNMVYMPASWVMRIMTWL

SEQ ID NO: 90627 - protein, 19 aa, Severe acute respiratory syndrome coronavirus 2
MVDTSLSGFKLKDCVMYAS

SEQ ID NO: 90628 - protein, 19 aa, Severe acute respiratory syndrome coronavirus 2
VDTSLSGFKLKDCVMYASA

SEQ ID NO: 90629 - protein, 19 aa, Severe acute respiratory syndrome coronavirus 2
DTSLSGFKLKDCVMYASAV

SEQ ID NO: 90630 - protein, 19 aa, Severe acute respiratory syndrome coronavirus 2
TSLSGFKLKDCVMYASAVV

SEQ ID NO: 90631 - protein, 19 aa, Severe acute respiratory syndrome coronavirus 2
SLSGFKLKDCVMYASAVVL

SEQ ID NO: 90632 - protein, 19 aa, Severe acute respiratory syndrome coronavirus 2
LSGFKLKDCVMYASAVVLL

SEQ ID NO: 90633 - protein, 19 aa, Severe acute respiratory syndrome coronavirus 2
SGFKLKDCVMYASAVVLLI

SEQ ID NO: 90634 - protein, 19 aa, Severe acute respiratory syndrome coronavirus 2
GFKLKDCVMYASAVVLLIL

SEQ ID NO: 90635 - protein, 19 aa, Severe acute respiratory syndrome coronavirus 2
FKLKDCVMYASAVVLLILM

SEQ ID NO: 90636 - protein, 19 aa, Severe acute respiratory syndrome coronavirus 2
KLKDCVMYASAVVLLILMT

SEQ ID NO: 90637 - protein, 19 aa, Severe acute respiratory syndrome coronavirus 2
IVFMCVEYCPIFFITGNTL

SEQ ID NO: 90638 - protein, 19 aa, Severe acute respiratory syndrome coronavirus 2
CIMLVYCFLGYFCTCYFGL

SEQ ID NO: 90639 - protein, 19 aa, Severe acute respiratory syndrome coronavirus 2
IMLVYCFLGYFCTCYFGLF

SEQ ID NO: 90640 - protein, 19 aa, Severe acute respiratory syndrome coronavirus 2
MLVYCFLGYFCTCYFGLFC

SEQ ID NO: 90641 - protein, 19 aa, Severe acute respiratory syndrome coronavirus 2
LVYCFLGYFCTCYFGLFCL

SEQ ID NO: 90642 - protein, 19 aa, Severe acute respiratory syndrome coronavirus 2
CYFGLFCLLNRYFRLTLGV

SEQ ID NO: 90643 - protein, 19 aa, Severe acute respiratory syndrome coronavirus 2
YFGLFCLLNRYFRLTLGVY

SEQ ID NO: 90644 - protein, 19 aa, Severe acute respiratory syndrome coronavirus 2
FGLFCLLNRYFRLTLGVYD

SEQ ID NO: 90645 - protein, 19 aa, Severe acute respiratory syndrome coronavirus 2
GLFCLLNRYFRLTLGVYDY

SEQ ID NO: 90646 - protein, 19 aa, Severe acute respiratory syndrome coronavirus 2
LFCLLNRYFRLTLGVYDYL

SEQ ID NO: 90647 - protein, 19 aa, Severe acute respiratory syndrome coronavirus 2
NRYFRLTLGVYDYLVSTQE

SEQ ID NO: 90648 - protein, 19 aa, Severe acute respiratory syndrome coronavirus 2
RYFRLTLGVYDYLVSTQEF

SEQ ID NO: 90649 - protein, 19 aa, Severe acute respiratory syndrome coronavirus 2
YFRLTLGVYDYLVSTQEFR

SEQ ID NO: 90650 - protein, 19 aa, Severe acute respiratory syndrome coronavirus 2
FRLTLGVYDYLVSTQEFRY

SEQ ID NO: 90651 - protein, 19 aa, Severe acute respiratory syndrome coronavirus 2
RLTLGVYDYLVSTQEFRYM

SEQ ID NO: 90652 - protein, 19 aa, Severe acute respiratory syndrome coronavirus 2
LTLGVYDYLVSTQEFRYMN

SEQ ID NO: 90653 - protein, 19 aa, Severe acute respiratory syndrome coronavirus 2
TLGVYDYLVSTQEFRYMNS

SEQ ID NO: 90654 - protein, 19 aa, Severe acute respiratory syndrome coronavirus 2
LGVYDYLVSTQEFRYMNSQ

SEQ ID NO: 90655 - protein, 19 aa, Severe acute respiratory syndrome coronavirus 2
GVYDYLVSTQEFRYMNSQG

SEQ ID NO: 90656 - protein, 19 aa, Severe acute respiratory syndrome coronavirus 2
VYDYLVSTQEFRYMNSQGL

SEQ ID NO: 90657 - protein, 19 aa, Severe acute respiratory syndrome coronavirus 2
SKMSDVKCTSVVLLSVLQQ

SEQ ID NO: 90658 - protein, 19 aa, Severe acute respiratory syndrome coronavirus 2
KMSDVKCTSVVLLSVLQQL

SEQ ID NO: 90659 - protein, 19 aa, Severe acute respiratory syndrome coronavirus 2
MSDVKCTSVVLLSVLQQLR

SEQ ID NO: 90660 - protein, 19 aa, Severe acute respiratory syndrome coronavirus 2
SDVKCTSVVLLSVLQQLRV

SEQ ID NO: 90661 - protein, 19 aa, Severe acute respiratory syndrome coronavirus 2
DVKCTSVVLLSVLQQLRVE

SEQ ID NO: 90662 - protein, 19 aa, Severe acute respiratory syndrome coronavirus 2
VKCTSVVLLSVLQQLRVES

SEQ ID NO: 90663 - protein, 19 aa, Severe acute respiratory syndrome coronavirus 2
VQLHNDILLAKDTTEAFEK

SEQ ID NO: 90664 - protein, 19 aa, Severe acute respiratory syndrome coronavirus 2
QLHNDILLAKDTTEAFEKM

SEQ ID NO: 90665 - protein, 19 aa, Severe acute respiratory syndrome coronavirus 2
LHNDILLAKDTTEAFEKMV

SEQ ID NO: 90666 - protein, 19 aa, Severe acute respiratory syndrome coronavirus 2
HNDILLAKDTTEAFEKMVS

SEQ ID NO: 90667 - protein, 19 aa, Severe acute respiratory syndrome coronavirus 2
NDILLAKDTTEAFEKMVSL

SEQ ID NO: 90668 - protein, 19 aa, Severe acute respiratory syndrome coronavirus 2
DILLAKDTTEAFEKMVSLL

SEQ ID NO: 90669 - protein, 19 aa, Severe acute respiratory syndrome coronavirus 2
ILLAKDTTEAFEKMVSLLS

SEQ ID NO: 90670 - protein, 19 aa, Severe acute respiratory syndrome coronavirus 2
KMVSLLSVLLSMQGAVDIN

SEQ ID NO: 90671 - protein, 19 aa, Severe acute respiratory syndrome coronavirus 2
MVSLLSVLLSMQGAVDINK

SEQ ID NO: 90672 - protein, 19 aa, Severe acute respiratory syndrome coronavirus 2
LLSMQGAVDINKLCEEMLD

SEQ ID NO: 90673 - protein, 19 aa, Severe acute respiratory syndrome coronavirus 2
LSMQGAVDINKLCEEMLDN

SEQ ID NO: 90674 - protein, 19 aa, Severe acute respiratory syndrome coronavirus 2
SMQGAVDINKLCEEMLDNR

SEQ ID NO: 90675 - protein, 19 aa, Severe acute respiratory syndrome coronavirus 2
MQGAVDINKLCEEMLDNRA

SEQ ID NO: 90676 - protein, 19 aa, Severe acute respiratory syndrome coronavirus 2
QGAVDINKLCEEMLDNRAT

SEQ ID NO: 90677 - protein, 19 aa, Severe acute respiratory syndrome coronavirus 2
GAVDINKLCEEMLDNRATL

SEQ ID NO: 90678 - protein, 19 aa, Severe acute respiratory syndrome coronavirus 2
AVDINKLCEEMLDNRATLQ

SEQ ID NO: 90679 - protein, 19 aa, Severe acute respiratory syndrome coronavirus 2
YEQAVANGDSEVVLKKLKK

SEQ ID NO: 90680 - protein, 19 aa, Severe acute respiratory syndrome coronavirus 2
AMQRKLEKMADQAMTQMYK

SEQ ID NO: 90681 - protein, 19 aa, Severe acute respiratory syndrome coronavirus 2
MQRKLEKMADQAMTQMYKQ

SEQ ID NO: 90682 - protein, 19 aa, Severe acute respiratory syndrome coronavirus 2
QRKLEKMADQAMTQMYKQA

SEQ ID NO: 90683 - protein, 19 aa, Severe acute respiratory syndrome coronavirus 2
RKLEKMADQAMTQMYKQAR

SEQ ID NO: 90684 - protein, 19 aa, Severe acute respiratory syndrome coronavirus 2
KLEKMADQAMTQMYKQARS

SEQ ID NO: 90685 - protein, 19 aa, Severe acute respiratory syndrome coronavirus 2
LEKMADQAMTQMYKQARSE

SEQ ID NO: 90686 - protein, 19 aa, Severe acute respiratory syndrome coronavirus 2
EKMADQAMTQMYKQARSED

SEQ ID NO: 90687 - protein, 19 aa, Severe acute respiratory syndrome coronavirus 2
KQARSEDKRAKVTSAMQTM

SEQ ID NO: 90688 - protein, 19 aa, Severe acute respiratory syndrome coronavirus 2
QARSEDKRAKVTSAMQTML

SEQ ID NO: 90689 - protein, 19 aa, Severe acute respiratory syndrome coronavirus 2
ARSEDKRAKVTSAMQTMLF

SEQ ID NO: 90690 - protein, 19 aa, Severe acute respiratory syndrome coronavirus 2
RSEDKRAKVTSAMQTMLFT

SEQ ID NO: 90691 - protein, 19 aa, Severe acute respiratory syndrome coronavirus 2
SEDKRAKVTSAMQTMLFTM

SEQ ID NO: 90692 - protein, 19 aa, Severe acute respiratory syndrome coronavirus 2
EDKRAKVTSAMQTMLFTML

SEQ ID NO: 90693 - protein, 19 aa, Severe acute respiratory syndrome coronavirus 2
DKRAKVTSAMQTMLFTMLR

SEQ ID NO: 90694 - protein, 19 aa, Severe acute respiratory syndrome coronavirus 2
KRAKVTSAMQTMLFTMLRK

SEQ ID NO: 90695 - protein, 19 aa, Severe acute respiratory syndrome coronavirus 2
RAKVTSAMQTMLFTMLRKL

SEQ ID NO: 90696 - protein, 19 aa, Severe acute respiratory syndrome coronavirus 2
AKVTSAMQTMLFTMLRKLD

SEQ ID NO: 90697 - protein, 19 aa, Severe acute respiratory syndrome coronavirus 2
KVTSAMQTMLFTMLRKLDN

SEQ ID NO: 90698 - protein, 19 aa, Severe acute respiratory syndrome coronavirus 2
RKLDNDALNNIINNARDGC

SEQ ID NO: 90699 - protein, 19 aa, Severe acute respiratory syndrome coronavirus 2
KLDNDALNNIINNARDGCV

SEQ ID NO: 90700 - protein, 19 aa, Severe acute respiratory syndrome coronavirus 2
LDNDALNNIINNARDGCVP

SEQ ID NO: 90701 - protein, 19 aa, Severe acute respiratory syndrome coronavirus 2
DNDALNNIINNARDGCVPL

SEQ ID NO: 90702 - protein, 19 aa, Severe acute respiratory syndrome coronavirus 2
NDALNNIINNARDGCVPLN

SEQ ID NO: 90703 - protein, 19 aa, Severe acute respiratory syndrome coronavirus 2
DALNNIINNARDGCVPLNI

SEQ ID NO: 90704 - protein, 19 aa, Severe acute respiratory syndrome coronavirus 2
ALNNIINNARDGCVPLNII

SEQ ID NO: 90705 - protein, 19 aa, Severe acute respiratory syndrome coronavirus 2
LNNIINNARDGCVPLNIIP

SEQ ID NO: 90706 - protein, 19 aa, Severe acute respiratory syndrome coronavirus 2
NNIINNARDGCVPLNIIPL

SEQ ID NO: 90707 - protein, 19 aa, Severe acute respiratory syndrome coronavirus 2
NIINNARDGCVPLNIIPLT

SEQ ID NO: 90708 - protein, 19 aa, Severe acute respiratory syndrome coronavirus 2
LWEIQQVVDADSKIVQLSE

SEQ ID NO: 90709 - protein, 19 aa, Severe acute respiratory syndrome coronavirus 2
IQQVVDADSKIVQLSEISM

SEQ ID NO: 90710 - protein, 19 aa, Severe acute respiratory syndrome coronavirus 2
QQVVDADSKIVQLSEISMD

SEQ ID NO: 90711 - protein, 19 aa, Severe acute respiratory syndrome coronavirus 2
VDADSKIVQLSEISMDNSP

SEQ ID NO: 90712 - protein, 19 aa, Severe acute respiratory syndrome coronavirus 2
DADSKIVQLSEISMDNSPN

SEQ ID NO: 90713 - protein, 19 aa, Severe acute respiratory syndrome coronavirus 2
ADSKIVQLSEISMDNSPNL

SEQ ID NO: 90714 - protein, 19 aa, Severe acute respiratory syndrome coronavirus 2
DSKIVQLSEISMDNSPNLA

SEQ ID NO: 90715 - protein, 19 aa, Severe acute respiratory syndrome coronavirus 2
SKIVQLSEISMDNSPNLAW

SEQ ID NO: 90716 - protein, 19 aa, Severe acute respiratory syndrome coronavirus 2
KIVQLSEISMDNSPNLAWP

SEQ ID NO: 90717 - protein, 19 aa, Severe acute respiratory syndrome coronavirus 2
IVQLSEISMDNSPNLAWPL

SEQ ID NO: 90718 - protein, 19 aa, Severe acute respiratory syndrome coronavirus 2
VQLSEISMDNSPNLAWPLI

SEQ ID NO: 90719 - protein, 19 aa, Severe acute respiratory syndrome coronavirus 2
QLSEISMDNSPNLAWPLIV

SEQ ID NO: 90720 - protein, 19 aa, Severe acute respiratory syndrome coronavirus 2
FVTDTPKGPKVKYLYFIKG

SEQ ID NO: 90721 - protein, 19 aa, Severe acute respiratory syndrome coronavirus 2
VTDTPKGPKVKYLYFIKGL

SEQ ID NO: 90722 - protein, 19 aa, Severe acute respiratory syndrome coronavirus 2
TDTPKGPKVKYLYFIKGLN

SEQ ID NO: 90723 - protein, 19 aa, Severe acute respiratory syndrome coronavirus 2
DTPKGPKVKYLYFIKGLNN

SEQ ID NO: 90724 - protein, 19 aa, Severe acute respiratory syndrome coronavirus 2
TPKGPKVKYLYFIKGLNNL

SEQ ID NO: 90725 - protein, 19 aa, Severe acute respiratory syndrome coronavirus 2
PKGPKVKYLYFIKGLNNLN

SEQ ID NO: 90726 - protein, 19 aa, Severe acute respiratory syndrome coronavirus 2
KGPKVKYLYFIKGLNNLNR

SEQ ID NO: 90727 - protein, 19 aa, Severe acute respiratory syndrome coronavirus 2
GPKVKYLYFIKGLNNLNRG

SEQ ID NO: 90728 - protein, 19 aa, Severe acute respiratory syndrome coronavirus 2
PKVKYLYFIKGLNNLNRGM

SEQ ID NO: 90729 - protein, 19 aa, Severe acute respiratory syndrome coronavirus 2
KVKYLYFIKGLNNLNRGMV

SEQ ID NO: 90730 - protein, 19 aa, Severe acute respiratory syndrome coronavirus 2
VKYLYFIKGLNNLNRGMVL

SEQ ID NO: 90731 - protein, 19 aa, Severe acute respiratory syndrome coronavirus 2
VLSFCAFAVDAAKAYKDYL

SEQ ID NO: 90732 - protein, 19 aa, Severe acute respiratory syndrome coronavirus 2
LSFCAFAVDAAKAYKDYLA

SEQ ID NO: 90733 - protein, 19 aa, Severe acute respiratory syndrome coronavirus 2
SFCAFAVDAAKAYKDYLAS

SEQ ID NO: 90734 - protein, 19 aa, Severe acute respiratory syndrome coronavirus 2
FCAFAVDAAKAYKDYLASG

SEQ ID NO: 90735 - protein, 19 aa, Severe acute respiratory syndrome coronavirus 2
CAFAVDAAKAYKDYLASGG

SEQ ID NO: 90736 - protein, 19 aa, Severe acute respiratory syndrome coronavirus 2
AFAVDAAKAYKDYLASGGQ

SEQ ID NO: 90737 - protein, 19 aa, Severe acute respiratory syndrome coronavirus 2
VDAAKAYKDYLASGGQPIT

SEQ ID NO: 90738 - protein, 19 aa, Severe acute respiratory syndrome coronavirus 2
DAAKAYKDYLASGGQPITN

SEQ ID NO: 90739 - protein, 19 aa, Severe acute respiratory syndrome coronavirus 2
AAKAYKDYLASGGQPITNC

SEQ ID NO: 90740 - protein, 19 aa, Severe acute respiratory syndrome coronavirus 2
AKAYKDYLASGGQPITNCV

SEQ ID NO: 90741 - protein, 19 aa, Severe acute respiratory syndrome coronavirus 2
KAYKDYLASGGQPITNCVK

SEQ ID NO: 90742 - protein, 19 aa, Severe acute respiratory syndrome coronavirus 2
AYKDYLASGGQPITNCVKM

SEQ ID NO: 90743 - protein, 19 aa, Severe acute respiratory syndrome coronavirus 2
YKDYLASGGQPITNCVKML

SEQ ID NO: 90744 - protein, 19 aa, Severe acute respiratory syndrome coronavirus 2
KDYLASGGQPITNCVKMLC

SEQ ID NO: 90745 - protein, 19 aa, Severe acute respiratory syndrome coronavirus 2
DYLASGGQPITNCVKMLCT

SEQ ID NO: 90746 - protein, 19 aa, Severe acute respiratory syndrome coronavirus 2
YLASGGQPITNCVKMLCTH

SEQ ID NO: 90747 - protein, 20 aa, Severe acute respiratory syndrome coronavirus 2
TCGLVEVEKGVLPQLEQPYV

SEQ ID NO: 90748 - protein, 20 aa, Severe acute respiratory syndrome coronavirus 2
CGLVEVEKGVLPQLEQPYVF

SEQ ID NO: 90749 - protein, 20 aa, Severe acute respiratory syndrome coronavirus 2
GLVEVEKGVLPQLEQPYVFI

SEQ ID NO: 90750 - protein, 20 aa, Severe acute respiratory syndrome coronavirus 2
LVEVEKGVLPQLEQPYVFIK

SEQ ID NO: 90751 - protein, 20 aa, Severe acute respiratory syndrome coronavirus 2
VEVEKGVLPQLEQPYVFIKR

SEQ ID NO: 90752 - protein, 20 aa, Severe acute respiratory syndrome coronavirus 2
VYCCREHEHEIAWYTERSEK

SEQ ID NO: 90753 - protein, 20 aa, Severe acute respiratory syndrome coronavirus 2
YCCREHEHEIAWYTERSEKS

SEQ ID NO: 90754 - protein, 20 aa, Severe acute respiratory syndrome coronavirus 2
CCREHEHEIAWYTERSEKSY

SEQ ID NO: 90755 - protein, 20 aa, Severe acute respiratory syndrome coronavirus 2
CREHEHEIAWYTERSEKSYE

SEQ ID NO: 90756 - protein, 20 aa, Severe acute respiratory syndrome coronavirus 2
REHEHEIAWYTERSEKSYEL

SEQ ID NO: 90757 - protein, 20 aa, Severe acute respiratory syndrome coronavirus 2
EHEHEIAWYTERSEKSYELQ

SEQ ID NO: 90758 - protein, 20 aa, Severe acute respiratory syndrome coronavirus 2
HEHEIAWYTERSEKSYELQT

SEQ ID NO: 90759 - protein, 20 aa, Severe acute respiratory syndrome coronavirus 2
EHEIAWYTERSEKSYELQTP

SEQ ID NO: 90760 - protein, 20 aa, Severe acute respiratory syndrome coronavirus 2
HEIAWYTERSEKSYELQTPF

SEQ ID NO: 90761 - protein, 20 aa, Severe acute respiratory syndrome coronavirus 2
EIAWYTERSEKSYELQTPFE

SEQ ID NO: 90762 - protein, 20 aa, Severe acute respiratory syndrome coronavirus 2
IAWYTERSEKSYELQTPFEI

SEQ ID NO: 90763 - protein, 20 aa, Severe acute respiratory syndrome coronavirus 2
AWYTERSEKSYELQTPFEIK

SEQ ID NO: 90764 - protein, 20 aa, Severe acute respiratory syndrome coronavirus 2
WYTERSEKSYELQTPFEIKL

SEQ ID NO: 90765 - protein, 20 aa, Severe acute respiratory syndrome coronavirus 2
YTERSEKSYELQTPFEIKLA

SEQ ID NO: 90766 - protein, 20 aa, Severe acute respiratory syndrome coronavirus 2
TERSEKSYELQTPFEIKLAK

SEQ ID NO: 90767 - protein, 20 aa, Severe acute respiratory syndrome coronavirus 2
ERSEKSYELQTPFEIKLAKK

SEQ ID NO: 90768 - protein, 20 aa, Severe acute respiratory syndrome coronavirus 2
RSEKSYELQTPFEIKLAKKF

SEQ ID NO: 90769 - protein, 20 aa, Severe acute respiratory syndrome coronavirus 2
SEKSYELQTPFEIKLAKKFD

SEQ ID NO: 90770 - protein, 20 aa, Severe acute respiratory syndrome coronavirus 2
FTSDLATNNLVVMAYITGGV

SEQ ID NO: 90771 - protein, 20 aa, Severe acute respiratory syndrome coronavirus 2
VLDWLEEKFKEGVEFLRDGW

SEQ ID NO: 90772 - protein, 20 aa, Severe acute respiratory syndrome coronavirus 2
LDWLEEKFKEGVEFLRDGWE

SEQ ID NO: 90773 - protein, 20 aa, Severe acute respiratory syndrome coronavirus 2
LEEKFKEGVEFLRDGWEIVK

SEQ ID NO: 90774 - protein, 20 aa, Severe acute respiratory syndrome coronavirus 2
EEKFKEGVEFLRDGWEIVKF

SEQ ID NO: 90775 - protein, 20 aa, Severe acute respiratory syndrome coronavirus 2
NKFLALCADSIIIGGAKLKA

SEQ ID NO: 90776 - protein, 20 aa, Severe acute respiratory syndrome coronavirus 2
KFLALCADSIIIGGAKLKAL

SEQ ID NO: 90777 - protein, 20 aa, Severe acute respiratory syndrome coronavirus 2
FLALCADSIIIGGAKLKALN

SEQ ID NO: 90778 - protein, 20 aa, Severe acute respiratory syndrome coronavirus 2
LALCADSIIIGGAKLKALNL

SEQ ID NO: 90779 - protein, 20 aa, Severe acute respiratory syndrome coronavirus 2
ALCADSIIIGGAKLKALNLG

SEQ ID NO: 90780 - protein, 20 aa, Severe acute respiratory syndrome coronavirus 2
LCADSIIIGGAKLKALNLGE

SEQ ID NO: 90781 - protein, 20 aa, Severe acute respiratory syndrome coronavirus 2
APLVGTPVCINGLMLLEIKD

SEQ ID NO: 90782 - protein, 20 aa, Severe acute respiratory syndrome coronavirus 2
PVCINGLMLLEIKDTEKYCA

SEQ ID NO: 90783 - protein, 20 aa, Severe acute respiratory syndrome coronavirus 2
VCINGLMLLEIKDTEKYCAL

SEQ ID NO: 90784 - protein, 20 aa, Severe acute respiratory syndrome coronavirus 2
CINGLMLLEIKDTEKYCALA

SEQ ID NO: 90785 - protein, 20 aa, Severe acute respiratory syndrome coronavirus 2
NVYLKHGGGVAGALNKATNN

SEQ ID NO: 90786 - protein, 20 aa, Severe acute respiratory syndrome coronavirus 2
VYLKHGGGVAGALNKATNNA

SEQ ID NO: 90787 - protein, 20 aa, Severe acute respiratory syndrome coronavirus 2
LKHGGGVAGALNKATNNAMQ

SEQ ID NO: 90788 - protein, 20 aa, Severe acute respiratory syndrome coronavirus 2
GSCVLSGHNLAKHCLHVVGP

SEQ ID NO: 90789 - protein, 20 aa, Severe acute respiratory syndrome coronavirus 2
SCVLSGHNLAKHCLHVVGPN

SEQ ID NO: 90790 - protein, 20 aa, Severe acute respiratory syndrome coronavirus 2
CVLSGHNLAKHCLHVVGPNV

SEQ ID NO: 90791 - protein, 20 aa, Severe acute respiratory syndrome coronavirus 2
VLSGHNLAKHCLHVVGPNVN

SEQ ID NO: 90792 - protein, 20 aa, Severe acute respiratory syndrome coronavirus 2
YITTYPGQGLNGYTVEEAKT

SEQ ID NO: 90793 - protein, 20 aa, Severe acute respiratory syndrome coronavirus 2
ITTYPGQGLNGYTVEEAKTV

SEQ ID NO: 90794 - protein, 20 aa, Severe acute respiratory syndrome coronavirus 2
TTYPGQGLNGYTVEEAKTVL

SEQ ID NO: 90795 - protein, 20 aa, Severe acute respiratory syndrome coronavirus 2
TYPGQGLNGYTVEEAKTVLK

SEQ ID NO: 90796 - protein, 20 aa, Severe acute respiratory syndrome coronavirus 2
YPGQGLNGYTVEEAKTVLKK

SEQ ID NO: 90797 - protein, 20 aa, Severe acute respiratory syndrome coronavirus 2
PGQGLNGYTVEEAKTVLKKC

SEQ ID NO: 90798 - protein, 20 aa, Severe acute respiratory syndrome coronavirus 2
GQGLNGYTVEEAKTVLKKCK

SEQ ID NO: 90799 - protein, 20 aa, Severe acute respiratory syndrome coronavirus 2
QGLNGYTVEEAKTVLKKCKS

SEQ ID NO: 90800 - protein, 20 aa, Severe acute respiratory syndrome coronavirus 2
FYILPSIISNEKQEILGTVS

SEQ ID NO: 90801 - protein, 20 aa, Severe acute respiratory syndrome coronavirus 2
YILPSIISNEKQEILGTVSW

SEQ ID NO: 90802 - protein, 20 aa, Severe acute respiratory syndrome coronavirus 2
ILPSIISNEKQEILGTVSWN

SEQ ID NO: 90803 - protein, 20 aa, Severe acute respiratory syndrome coronavirus 2
REMLAHAEETRKLMPVCVET

SEQ ID NO: 90804 - protein, 20 aa, Severe acute respiratory syndrome coronavirus 2
EMLAHAEETRKLMPVCVETK

SEQ ID NO: 90805 - protein, 20 aa, Severe acute respiratory syndrome coronavirus 2
MLAHAEETRKLMPVCVETKA

SEQ ID NO: 90806 - protein, 20 aa, Severe acute respiratory syndrome coronavirus 2
VSTIQRKYKGIKIQEGVVDY

SEQ ID NO: 90807 - protein, 20 aa, Severe acute respiratory syndrome coronavirus 2
STIQRKYKGIKIQEGVVDYG

SEQ ID NO: 90808 - protein, 20 aa, Severe acute respiratory syndrome coronavirus 2
TAYNGYLTSSSKTPEEHFIE

SEQ ID NO: 90809 - protein, 20 aa, Severe acute respiratory syndrome coronavirus 2
AYNGYLTSSSKTPEEHFIET

SEQ ID NO: 90810 - protein, 20 aa, Severe acute respiratory syndrome coronavirus 2
YLTSSSKTPEEHFIETISLA

SEQ ID NO: 90811 - protein, 20 aa, Severe acute respiratory syndrome coronavirus 2
LTSSSKTPEEHFIETISLAG

SEQ ID NO: 90812 - protein, 20 aa, Severe acute respiratory syndrome coronavirus 2
TSSSKTPEEHFIETISLAGS

SEQ ID NO: 90813 - protein, 20 aa, Severe acute respiratory syndrome coronavirus 2
SSSKTPEEHFIETISLAGSY

SEQ ID NO: 90814 - protein, 20 aa, Severe acute respiratory syndrome coronavirus 2
SSKTPEEHFIETISLAGSYK

SEQ ID NO: 90815 - protein, 20 aa, Severe acute respiratory syndrome coronavirus 2
SKTPEEHFIETISLAGSYKD

SEQ ID NO: 90816 - protein, 20 aa, Severe acute respiratory syndrome coronavirus 2
KTPEEHFIETISLAGSYKDW

SEQ ID NO: 90817 - protein, 20 aa, Severe acute respiratory syndrome coronavirus 2
KKWKYPQVNGLTSIKWADNN

SEQ ID NO: 90818 - protein, 20 aa, Severe acute respiratory syndrome coronavirus 2
KWKYPQVNGLTSIKWADNNC

SEQ ID NO: 90819 - protein, 20 aa, Severe acute respiratory syndrome coronavirus 2
WKYPQVNGLTSIKWADNNCY

SEQ ID NO: 90820 - protein, 20 aa, Severe acute respiratory syndrome coronavirus 2
KYPQVNGLTSIKWADNNCYL

SEQ ID NO: 90821 - protein, 20 aa, Severe acute respiratory syndrome coronavirus 2
YPQVNGLTSIKWADNNCYLA

SEQ ID NO: 90822 - protein, 20 aa, Severe acute respiratory syndrome coronavirus 2
PQVNGLTSIKWADNNCYLAT

SEQ ID NO: 90823 - protein, 20 aa, Severe acute respiratory syndrome coronavirus 2
ELKFNPPALQDAYYRARAGE

SEQ ID NO: 90824 - protein, 20 aa, Severe acute respiratory syndrome coronavirus 2
LKFNPPALQDAYYRARAGEA

SEQ ID NO: 90825 - protein, 20 aa, Severe acute respiratory syndrome coronavirus 2
KFNPPALQDAYYRARAGEAA

SEQ ID NO: 90826 - protein, 20 aa, Severe acute respiratory syndrome coronavirus 2
FNPPALQDAYYRARAGEAAN

SEQ ID NO: 90827 - protein, 20 aa, Severe acute respiratory syndrome coronavirus 2
NPPALQDAYYRARAGEAANF

SEQ ID NO: 90828 - protein, 20 aa, Severe acute respiratory syndrome coronavirus 2
PPALQDAYYRARAGEAANFC

SEQ ID NO: 90829 - protein, 20 aa, Severe acute respiratory syndrome coronavirus 2
PALQDAYYRARAGEAANFCA

SEQ ID NO: 90830 - protein, 20 aa, Severe acute respiratory syndrome coronavirus 2
ALQDAYYRARAGEAANFCAL

SEQ ID NO: 90831 - protein, 20 aa, Severe acute respiratory syndrome coronavirus 2
YYRARAGEAANFCALILAYC

SEQ ID NO: 90832 - protein, 20 aa, Severe acute respiratory syndrome coronavirus 2
LFQHANLDSCKRVLNVVCKT

SEQ ID NO: 90833 - protein, 20 aa, Severe acute respiratory syndrome coronavirus 2
FQHANLDSCKRVLNVVCKTC

SEQ ID NO: 90834 - protein, 20 aa, Severe acute respiratory syndrome coronavirus 2
HANLDSCKRVLNVVCKTCGQ

SEQ ID NO: 90835 - protein, 20 aa, Severe acute respiratory syndrome coronavirus 2
ANLDSCKRVLNVVCKTCGQQ

SEQ ID NO: 90836 - protein, 20 aa, Severe acute respiratory syndrome coronavirus 2
NLDSCKRVLNVVCKTCGQQQ

SEQ ID NO: 90837 - protein, 20 aa, Severe acute respiratory syndrome coronavirus 2
LDSCKRVLNVVCKTCGQQQT

SEQ ID NO: 90838 - protein, 20 aa, Severe acute respiratory syndrome coronavirus 2
DVFYKENSYTTTIKPVTYKL

SEQ ID NO: 90839 - protein, 20 aa, Severe acute respiratory syndrome coronavirus 2
VFYKENSYTTTIKPVTYKLD

SEQ ID NO: 90840 - protein, 20 aa, Severe acute respiratory syndrome coronavirus 2
FYKENSYTTTIKPVTYKLDG

SEQ ID NO: 90841 - protein, 20 aa, Severe acute respiratory syndrome coronavirus 2
YKENSYTTTIKPVTYKLDGV

SEQ ID NO: 90842 - protein, 20 aa, Severe acute respiratory syndrome coronavirus 2
KENSYTTTIKPVTYKLDGVV

SEQ ID NO: 90843 - protein, 20 aa, Severe acute respiratory syndrome coronavirus 2
ENSYTTTIKPVTYKLDGVVC

SEQ ID NO: 90844 - protein, 20 aa, Severe acute respiratory syndrome coronavirus 2
NSYTTTIKPVTYKLDGVVCT

SEQ ID NO: 90845 - protein, 20 aa, Severe acute respiratory syndrome coronavirus 2
SYTTTIKPVTYKLDGVVCTE

SEQ ID NO: 90846 - protein, 20 aa, Severe acute respiratory syndrome coronavirus 2
YTTTIKPVTYKLDGVVCTEI

SEQ ID NO: 90847 - protein, 20 aa, Severe acute respiratory syndrome coronavirus 2
TTTIKPVTYKLDGVVCTEID

SEQ ID NO: 90848 - protein, 20 aa, Severe acute respiratory syndrome coronavirus 2
TTIKPVTYKLDGVVCTEIDP

SEQ ID NO: 90849 - protein, 20 aa, Severe acute respiratory syndrome coronavirus 2
TIKPVTYKLDGVVCTEIDPK

SEQ ID NO: 90850 - protein, 20 aa, Severe acute respiratory syndrome coronavirus 2
IKPVTYKLDGVVCTEIDPKL

SEQ ID NO: 90851 - protein, 20 aa, Severe acute respiratory syndrome coronavirus 2
KPVTYKLDGVVCTEIDPKLD

SEQ ID NO: 90852 - protein, 20 aa, Severe acute respiratory syndrome coronavirus 2
PVTYKLDGVVCTEIDPKLDN

SEQ ID NO: 90853 - protein, 20 aa, Severe acute respiratory syndrome coronavirus 2
VTYKLDGVVCTEIDPKLDNY

SEQ ID NO: 90854 - protein, 20 aa, Severe acute respiratory syndrome coronavirus 2
TYKLDGVVCTEIDPKLDNYY

SEQ ID NO: 90855 - protein, 20 aa, Severe acute respiratory syndrome coronavirus 2
YKLDGVVCTEIDPKLDNYYK

SEQ ID NO: 90856 - protein, 20 aa, Severe acute respiratory syndrome coronavirus 2
TEIDPKLDNYYKKDNSYFTE

SEQ ID NO: 90857 - protein, 20 aa, Severe acute respiratory syndrome coronavirus 2
EIDPKLDNYYKKDNSYFTEQ

SEQ ID NO: 90858 - protein, 20 aa, Severe acute respiratory syndrome coronavirus 2
IDPKLDNYYKKDNSYFTEQP

SEQ ID NO: 90859 - protein, 20 aa, Severe acute respiratory syndrome coronavirus 2
DPKLDNYYKKDNSYFTEQPI

SEQ ID NO: 90860 - protein, 20 aa, Severe acute respiratory syndrome coronavirus 2
PKLDNYYKKDNSYFTEQPID

SEQ ID NO: 90861 - protein, 20 aa, Severe acute respiratory syndrome coronavirus 2
KLDNYYKKDNSYFTEQPIDL

SEQ ID NO: 90862 - protein, 20 aa, Severe acute respiratory syndrome coronavirus 2
LDNYYKKDNSYFTEQPIDLV

SEQ ID NO: 90863 - protein, 20 aa, Severe acute respiratory syndrome coronavirus 2
DNYYKKDNSYFTEQPIDLVP

SEQ ID NO: 90864 - protein, 20 aa, Severe acute respiratory syndrome coronavirus 2
NYYKKDNSYFTEQPIDLVPN

SEQ ID NO: 90865 - protein, 20 aa, Severe acute respiratory syndrome coronavirus 2
YYKKDNSYFTEQPIDLVPNQ

SEQ ID NO: 90866 - protein, 20 aa, Severe acute respiratory syndrome coronavirus 2
YKKDNSYFTEQPIDLVPNQP

SEQ ID NO: 90867 - protein, 20 aa, Severe acute respiratory syndrome coronavirus 2
KKDNSYFTEQPIDLVPNQPY

SEQ ID NO: 90868 - protein, 20 aa, Severe acute respiratory syndrome coronavirus 2
ASFDNFKFVCDNIKFADDLN

SEQ ID NO: 90869 - protein, 20 aa, Severe acute respiratory syndrome coronavirus 2
SFDNFKFVCDNIKFADDLNQ

SEQ ID NO: 90870 - protein, 20 aa, Severe acute respiratory syndrome coronavirus 2
FDNFKFVCDNIKFADDLNQL

SEQ ID NO: 90871 - protein, 20 aa, Severe acute respiratory syndrome coronavirus 2
DNFKFVCDNIKFADDLNQLT

SEQ ID NO: 90872 - protein, 20 aa, Severe acute respiratory syndrome coronavirus 2
NFKFVCDNIKFADDLNQLTG

SEQ ID NO: 90873 - protein, 20 aa, Severe acute respiratory syndrome coronavirus 2
FKFVCDNIKFADDLNQLTGY

SEQ ID NO: 90874 - protein, 20 aa, Severe acute respiratory syndrome coronavirus 2
KFVCDNIKFADDLNQLTGYK

SEQ ID NO: 90875 - protein, 20 aa, Severe acute respiratory syndrome coronavirus 2
FVCDNIKFADDLNQLTGYKK

SEQ ID NO: 90876 - protein, 20 aa, Severe acute respiratory syndrome coronavirus 2
VCDNIKFADDLNQLTGYKKP

SEQ ID NO: 90877 - protein, 20 aa, Severe acute respiratory syndrome coronavirus 2
CDNIKFADDLNQLTGYKKPA

SEQ ID NO: 90878 - protein, 20 aa, Severe acute respiratory syndrome coronavirus 2
DLNQLTGYKKPASRELKVTF

SEQ ID NO: 90879 - protein, 20 aa, Severe acute respiratory syndrome coronavirus 2
LNQLTGYKKPASRELKVTFF

SEQ ID NO: 90880 - protein, 20 aa, Severe acute respiratory syndrome coronavirus 2
NQLTGYKKPASRELKVTFFP

SEQ ID NO: 90881 - protein, 20 aa, Severe acute respiratory syndrome coronavirus 2
QLTGYKKPASRELKVTFFPD

SEQ ID NO: 90882 - protein, 20 aa, Severe acute respiratory syndrome coronavirus 2
LTGYKKPASRELKVTFFPDL

SEQ ID NO: 90883 - protein, 20 aa, Severe acute respiratory syndrome coronavirus 2
TGYKKPASRELKVTFFPDLN

SEQ ID NO: 90884 - protein, 20 aa, Severe acute respiratory syndrome coronavirus 2
GYKKPASRELKVTFFPDLNG

SEQ ID NO: 90885 - protein, 20 aa, Severe acute respiratory syndrome coronavirus 2
YKKPASRELKVTFFPDLNGD

SEQ ID NO: 90886 - protein, 20 aa, Severe acute respiratory syndrome coronavirus 2
KKPASRELKVTFFPDLNGDV

SEQ ID NO: 90887 - protein, 20 aa, Severe acute respiratory syndrome coronavirus 2
KPASRELKVTFFPDLNGDVV

SEQ ID NO: 90888 - protein, 20 aa, Severe acute respiratory syndrome coronavirus 2
PASRELKVTFFPDLNGDVVA

SEQ ID NO: 90889 - protein, 20 aa, Severe acute respiratory syndrome coronavirus 2
ASRELKVTFFPDLNGDVVAI

SEQ ID NO: 90890 - protein, 20 aa, Severe acute respiratory syndrome coronavirus 2
SRELKVTFFPDLNGDVVAID

SEQ ID NO: 90891 - protein, 20 aa, Severe acute respiratory syndrome coronavirus 2
RELKVTFFPDLNGDVVAIDY

SEQ ID NO: 90892 - protein, 20 aa, Severe acute respiratory syndrome coronavirus 2
ELKVTFFPDLNGDVVAIDYK

SEQ ID NO: 90893 - protein, 20 aa, Severe acute respiratory syndrome coronavirus 2
LKVTFFPDLNGDVVAIDYKH

SEQ ID NO: 90894 - protein, 20 aa, Severe acute respiratory syndrome coronavirus 2
KVTFFPDLNGDVVAIDYKHY

SEQ ID NO: 90895 - protein, 20 aa, Severe acute respiratory syndrome coronavirus 2
VTFFPDLNGDVVAIDYKHYT

SEQ ID NO: 90896 - protein, 20 aa, Severe acute respiratory syndrome coronavirus 2
TFFPDLNGDVVAIDYKHYTP

SEQ ID NO: 90897 - protein, 20 aa, Severe acute respiratory syndrome coronavirus 2
FFPDLNGDVVAIDYKHYTPS

SEQ ID NO: 90898 - protein, 20 aa, Severe acute respiratory syndrome coronavirus 2
TYCTGSIPCSVCLSGLDSLD

SEQ ID NO: 90899 - protein, 20 aa, Severe acute respiratory syndrome coronavirus 2
QITISSFKWDLTAFGLVAEW

SEQ ID NO: 90900 - protein, 20 aa, Severe acute respiratory syndrome coronavirus 2
ITISSFKWDLTAFGLVAEWF

SEQ ID NO: 90901 - protein, 20 aa, Severe acute respiratory syndrome coronavirus 2
TISSFKWDLTAFGLVAEWFL

SEQ ID NO: 90902 - protein, 20 aa, Severe acute respiratory syndrome coronavirus 2
ISSFKWDLTAFGLVAEWFLA

SEQ ID NO: 90903 - protein, 20 aa, Severe acute respiratory syndrome coronavirus 2
SSFKWDLTAFGLVAEWFLAY

SEQ ID NO: 90904 - protein, 20 aa, Severe acute respiratory syndrome coronavirus 2
SFKWDLTAFGLVAEWFLAYI

SEQ ID NO: 90905 - protein, 20 aa, Severe acute respiratory syndrome coronavirus 2
FKWDLTAFGLVAEWFLAYIL

SEQ ID NO: 90906 - protein, 20 aa, Severe acute respiratory syndrome coronavirus 2
KWDLTAFGLVAEWFLAYILF

SEQ ID NO: 90907 - protein, 20 aa, Severe acute respiratory syndrome coronavirus 2
WDLTAFGLVAEWFLAYILFT

SEQ ID NO: 90908 - protein, 20 aa, Severe acute respiratory syndrome coronavirus 2
DLTAFGLVAEWFLAYILFTR

SEQ ID NO: 90909 - protein, 20 aa, Severe acute respiratory syndrome coronavirus 2
LTAFGLVAEWFLAYILFTRF

SEQ ID NO: 90910 - protein, 20 aa, Severe acute respiratory syndrome coronavirus 2
TAFGLVAEWFLAYILFTRFF

SEQ ID NO: 90911 - protein, 20 aa, Severe acute respiratory syndrome coronavirus 2
AFGLVAEWFLAYILFTRFFY

SEQ ID NO: 90912 - protein, 20 aa, Severe acute respiratory syndrome coronavirus 2
FGLVAEWFLAYILFTRFFYV

SEQ ID NO: 90913 - protein, 20 aa, Severe acute respiratory syndrome coronavirus 2
GLVAEWFLAYILFTRFFYVL

SEQ ID NO: 90914 - protein, 20 aa, Severe acute respiratory syndrome coronavirus 2
LVAEWFLAYILFTRFFYVLG

SEQ ID NO: 90915 - protein, 20 aa, Severe acute respiratory syndrome coronavirus 2
VAEWFLAYILFTRFFYVLGL

SEQ ID NO: 90916 - protein, 20 aa, Severe acute respiratory syndrome coronavirus 2
AEWFLAYILFTRFFYVLGLA

SEQ ID NO: 90917 - protein, 20 aa, Severe acute respiratory syndrome coronavirus 2
EWFLAYILFTRFFYVLGLAA

SEQ ID NO: 90918 - protein, 20 aa, Severe acute respiratory syndrome coronavirus 2
WFLAYILFTRFFYVLGLAAI

SEQ ID NO: 90919 - protein, 20 aa, Severe acute respiratory syndrome coronavirus 2
FLAYILFTRFFYVLGLAAIM

SEQ ID NO: 90920 - protein, 20 aa, Severe acute respiratory syndrome coronavirus 2
LAYILFTRFFYVLGLAAIMQ

SEQ ID NO: 90921 - protein, 20 aa, Severe acute respiratory syndrome coronavirus 2
FFSYFAVHFISNSWLMWLII

SEQ ID NO: 90922 - protein, 20 aa, Severe acute respiratory syndrome coronavirus 2
FSYFAVHFISNSWLMWLIIN

SEQ ID NO: 90923 - protein, 20 aa, Severe acute respiratory syndrome coronavirus 2
SYFAVHFISNSWLMWLIINL

SEQ ID NO: 90924 - protein, 20 aa, Severe acute respiratory syndrome coronavirus 2
YFAVHFISNSWLMWLIINLV

SEQ ID NO: 90925 - protein, 20 aa, Severe acute respiratory syndrome coronavirus 2
FAVHFISNSWLMWLIINLVQ

SEQ ID NO: 90926 - protein, 20 aa, Severe acute respiratory syndrome coronavirus 2
AVHFISNSWLMWLIINLVQM

SEQ ID NO: 90927 - protein, 20 aa, Severe acute respiratory syndrome coronavirus 2
VHFISNSWLMWLIINLVQMA

SEQ ID NO: 90928 - protein, 20 aa, Severe acute respiratory syndrome coronavirus 2
AMVRMYIFFASFYYVWKSYV

SEQ ID NO: 90929 - protein, 20 aa, Severe acute respiratory syndrome coronavirus 2
MVRMYIFFASFYYVWKSYVH

SEQ ID NO: 90930 - protein, 20 aa, Severe acute respiratory syndrome coronavirus 2
VRMYIFFASFYYVWKSYVHV

SEQ ID NO: 90931 - protein, 20 aa, Severe acute respiratory syndrome coronavirus 2
RMYIFFASFYYVWKSYVHVV

SEQ ID NO: 90932 - protein, 20 aa, Severe acute respiratory syndrome coronavirus 2
MYIFFASFYYVWKSYVHVVD

SEQ ID NO: 90933 - protein, 20 aa, Severe acute respiratory syndrome coronavirus 2
SSTCMMCYKRNRATRVECTT

SEQ ID NO: 90934 - protein, 20 aa, Severe acute respiratory syndrome coronavirus 2
STCMMCYKRNRATRVECTTI

SEQ ID NO: 90935 - protein, 20 aa, Severe acute respiratory syndrome coronavirus 2
TCMMCYKRNRATRVECTTIV

SEQ ID NO: 90936 - protein, 20 aa, Severe acute respiratory syndrome coronavirus 2
CMMCYKRNRATRVECTTIVN

SEQ ID NO: 90937 - protein, 20 aa, Severe acute respiratory syndrome coronavirus 2
MMCYKRNRATRVECTTIVNG

SEQ ID NO: 90938 - protein, 20 aa, Severe acute respiratory syndrome coronavirus 2
MCYKRNRATRVECTTIVNGV

SEQ ID NO: 90939 - protein, 20 aa, Severe acute respiratory syndrome coronavirus 2
CYKRNRATRVECTTIVNGVR

SEQ ID NO: 90940 - protein, 20 aa, Severe acute respiratory syndrome coronavirus 2
SFYVYANGGKGFCKLHNWNC

SEQ ID NO: 90941 - protein, 20 aa, Severe acute respiratory syndrome coronavirus 2
FYVYANGGKGFCKLHNWNCV

SEQ ID NO: 90942 - protein, 20 aa, Severe acute respiratory syndrome coronavirus 2
YVYANGGKGFCKLHNWNCVN

SEQ ID NO: 90943 - protein, 20 aa, Severe acute respiratory syndrome coronavirus 2
VYANGGKGFCKLHNWNCVNC

SEQ ID NO: 90944 - protein, 20 aa, Severe acute respiratory syndrome coronavirus 2
YANGGKGFCKLHNWNCVNCD

SEQ ID NO: 90945 - protein, 20 aa, Severe acute respiratory syndrome coronavirus 2
ANGGKGFCKLHNWNCVNCDT

SEQ ID NO: 90946 - protein, 20 aa, Severe acute respiratory syndrome coronavirus 2
NGGKGFCKLHNWNCVNCDTF

SEQ ID NO: 90947 - protein, 20 aa, Severe acute respiratory syndrome coronavirus 2
GGKGFCKLHNWNCVNCDTFC

SEQ ID NO: 90948 - protein, 20 aa, Severe acute respiratory syndrome coronavirus 2
GKGFCKLHNWNCVNCDTFCA

SEQ ID NO: 90949 - protein, 20 aa, Severe acute respiratory syndrome coronavirus 2
KGFCKLHNWNCVNCDTFCAG

SEQ ID NO: 90950 - protein, 20 aa, Severe acute respiratory syndrome coronavirus 2
GFCKLHNWNCVNCDTFCAGS

SEQ ID NO: 90951 - protein, 20 aa, Severe acute respiratory syndrome coronavirus 2
FCKLHNWNCVNCDTFCAGST

SEQ ID NO: 90952 - protein, 20 aa, Severe acute respiratory syndrome coronavirus 2
LHNWNCVNCDTFCAGSTFIS

SEQ ID NO: 90953 - protein, 20 aa, Severe acute respiratory syndrome coronavirus 2
HNWNCVNCDTFCAGSTFISD

SEQ ID NO: 90954 - protein, 20 aa, Severe acute respiratory syndrome coronavirus 2
NWNCVNCDTFCAGSTFISDE

SEQ ID NO: 90955 - protein, 20 aa, Severe acute respiratory syndrome coronavirus 2
WNCVNCDTFCAGSTFISDEV

SEQ ID NO: 90956 - protein, 20 aa, Severe acute respiratory syndrome coronavirus 2
NCVNCDTFCAGSTFISDEVA

SEQ ID NO: 90957 - protein, 20 aa, Severe acute respiratory syndrome coronavirus 2
CVNCDTFCAGSTFISDEVAR

SEQ ID NO: 90958 - protein, 20 aa, Severe acute respiratory syndrome coronavirus 2
VNCDTFCAGSTFISDEVARD

SEQ ID NO: 90959 - protein, 20 aa, Severe acute respiratory syndrome coronavirus 2
NCDTFCAGSTFISDEVARDL

SEQ ID NO: 90960 - protein, 20 aa, Severe acute respiratory syndrome coronavirus 2
CDTFCAGSTFISDEVARDLS

SEQ ID NO: 90961 - protein, 20 aa, Severe acute respiratory syndrome coronavirus 2
DTFCAGSTFISDEVARDLSL

SEQ ID NO: 90962 - protein, 20 aa, Severe acute respiratory syndrome coronavirus 2
TFCAGSTFISDEVARDLSLQ

SEQ ID NO: 90963 - protein, 20 aa, Severe acute respiratory syndrome coronavirus 2
FCAGSTFISDEVARDLSLQF

SEQ ID NO: 90964 - protein, 20 aa, Severe acute respiratory syndrome coronavirus 2
CAGSTFISDEVARDLSLQFK

SEQ ID NO: 90965 - protein, 20 aa, Severe acute respiratory syndrome coronavirus 2
AGSTFISDEVARDLSLQFKR

SEQ ID NO: 90966 - protein, 20 aa, Severe acute respiratory syndrome coronavirus 2
GSTFISDEVARDLSLQFKRP

SEQ ID NO: 90967 - protein, 20 aa, Severe acute respiratory syndrome coronavirus 2
STFISDEVARDLSLQFKRPI

SEQ ID NO: 90968 - protein, 20 aa, Severe acute respiratory syndrome coronavirus 2
SASVYYSQLMCQPILLLDQA

SEQ ID NO: 90969 - protein, 20 aa, Severe acute respiratory syndrome coronavirus 2
ASVYYSQLMCQPILLLDQAL

SEQ ID NO: 90970 - protein, 20 aa, Severe acute respiratory syndrome coronavirus 2
SVYYSQLMCQPILLLDQALV

SEQ ID NO: 90971 - protein, 20 aa, Severe acute respiratory syndrome coronavirus 2
VYYSQLMCQPILLLDQALVS

SEQ ID NO: 90972 - protein, 20 aa, Severe acute respiratory syndrome coronavirus 2
YYSQLMCQPILLLDQALVSD

SEQ ID NO: 90973 - protein, 20 aa, Severe acute respiratory syndrome coronavirus 2
LDNVLSTFISAARQGFVDSD

SEQ ID NO: 90974 - protein, 20 aa, Severe acute respiratory syndrome coronavirus 2
DNVLSTFISAARQGFVDSDV

SEQ ID NO: 90975 - protein, 20 aa, Severe acute respiratory syndrome coronavirus 2
NVLSTFISAARQGFVDSDVE

SEQ ID NO: 90976 - protein, 20 aa, Severe acute respiratory syndrome coronavirus 2
VLSTFISAARQGFVDSDVET

SEQ ID NO: 90977 - protein, 20 aa, Severe acute respiratory syndrome coronavirus 2
LSTFISAARQGFVDSDVETK

SEQ ID NO: 90978 - protein, 20 aa, Severe acute respiratory syndrome coronavirus 2
STFISAARQGFVDSDVETKD

SEQ ID NO: 90979 - protein, 20 aa, Severe acute respiratory syndrome coronavirus 2
TFISAARQGFVDSDVETKDV

SEQ ID NO: 90980 - protein, 20 aa, Severe acute respiratory syndrome coronavirus 2
FISAARQGFVDSDVETKDVV

SEQ ID NO: 90981 - protein, 20 aa, Severe acute respiratory syndrome coronavirus 2
ISAARQGFVDSDVETKDVVE

SEQ ID NO: 90982 - protein, 20 aa, Severe acute respiratory syndrome coronavirus 2
SAARQGFVDSDVETKDVVEC

SEQ ID NO: 90983 - protein, 20 aa, Severe acute respiratory syndrome coronavirus 2
AARQGFVDSDVETKDVVECL

SEQ ID NO: 90984 - protein, 20 aa, Severe acute respiratory syndrome coronavirus 2
RQGFVDSDVETKDVVECLKL

SEQ ID NO: 90985 - protein, 20 aa, Severe acute respiratory syndrome coronavirus 2
QGFVDSDVETKDVVECLKLS

SEQ ID NO: 90986 - protein, 20 aa, Severe acute respiratory syndrome coronavirus 2
GFVDSDVETKDVVECLKLSH

SEQ ID NO: 90987 - protein, 20 aa, Severe acute respiratory syndrome coronavirus 2
FVDSDVETKDVVECLKLSHQ

SEQ ID NO: 90988 - protein, 20 aa, Severe acute respiratory syndrome coronavirus 2
VDSDVETKDVVECLKLSHQS

SEQ ID NO: 90989 - protein, 20 aa, Severe acute respiratory syndrome coronavirus 2
DSDVETKDVVECLKLSHQSD

SEQ ID NO: 90990 - protein, 20 aa, Severe acute respiratory syndrome coronavirus 2
SDVETKDVVECLKLSHQSDI

SEQ ID NO: 90991 - protein, 20 aa, Severe acute respiratory syndrome coronavirus 2
DVETKDVVECLKLSHQSDIE

SEQ ID NO: 90992 - protein, 20 aa, Severe acute respiratory syndrome coronavirus 2
VETKDVVECLKLSHQSDIEV

SEQ ID NO: 90993 - protein, 20 aa, Severe acute respiratory syndrome coronavirus 2
ETKDVVECLKLSHQSDIEVT

SEQ ID NO: 90994 - protein, 20 aa, Severe acute respiratory syndrome coronavirus 2
TKDVVECLKLSHQSDIEVTG

SEQ ID NO: 90995 - protein, 20 aa, Severe acute respiratory syndrome coronavirus 2
KDVVECLKLSHQSDIEVTGD

SEQ ID NO: 90996 - protein, 20 aa, Severe acute respiratory syndrome coronavirus 2
DVVECLKLSHQSDIEVTGDS

SEQ ID NO: 90997 - protein, 20 aa, Severe acute respiratory syndrome coronavirus 2
DIEVTGDSCNNYMLTYNKVE

SEQ ID NO: 90998 - protein, 20 aa, Severe acute respiratory syndrome coronavirus 2
SLSEQLRKQIRSAAKKNNLP

SEQ ID NO: 90999 - protein, 20 aa, Severe acute respiratory syndrome coronavirus 2
LSEQLRKQIRSAAKKNNLPF

SEQ ID NO: 91000 - protein, 20 aa, Severe acute respiratory syndrome coronavirus 2
SEQLRKQIRSAAKKNNLPFK

SEQ ID NO: 91001 - protein, 20 aa, Severe acute respiratory syndrome coronavirus 2
EQLRKQIRSAAKKNNLPFKL

SEQ ID NO: 91002 - protein, 20 aa, Severe acute respiratory syndrome coronavirus 2
QLRKQIRSAAKKNNLPFKLT

SEQ ID NO: 91003 - protein, 20 aa, Severe acute respiratory syndrome coronavirus 2
LRKQIRSAAKKNNLPFKLTC

SEQ ID NO: 91004 - protein, 20 aa, Severe acute respiratory syndrome coronavirus 2
QIRSAAKKNNLPFKLTCATT

SEQ ID NO: 91005 - protein, 20 aa, Severe acute respiratory syndrome coronavirus 2
IRSAAKKNNLPFKLTCATTR

SEQ ID NO: 91006 - protein, 20 aa, Severe acute respiratory syndrome coronavirus 2
RSAAKKNNLPFKLTCATTRQ

SEQ ID NO: 91007 - protein, 20 aa, Severe acute respiratory syndrome coronavirus 2
SAAKKNNLPFKLTCATTRQV

SEQ ID NO: 91008 - protein, 20 aa, Severe acute respiratory syndrome coronavirus 2
AAKKNNLPFKLTCATTRQVV

SEQ ID NO: 91009 - protein, 20 aa, Severe acute respiratory syndrome coronavirus 2
AKKNNLPFKLTCATTRQVVN

SEQ ID NO: 91010 - protein, 20 aa, Severe acute respiratory syndrome coronavirus 2
KKNNLPFKLTCATTRQVVNV

SEQ ID NO: 91011 - protein, 20 aa, Severe acute respiratory syndrome coronavirus 2
KNNLPFKLTCATTRQVVNVV

SEQ ID NO: 91012 - protein, 20 aa, Severe acute respiratory syndrome coronavirus 2
NNLPFKLTCATTRQVVNVVT

SEQ ID NO: 91013 - protein, 20 aa, Severe acute respiratory syndrome coronavirus 2
NLPFKLTCATTRQVVNVVTT

SEQ ID NO: 91014 - protein, 20 aa, Severe acute respiratory syndrome coronavirus 2
LPFKLTCATTRQVVNVVTTK

SEQ ID NO: 91015 - protein, 20 aa, Severe acute respiratory syndrome coronavirus 2
PFKLTCATTRQVVNVVTTKI

SEQ ID NO: 91016 - protein, 20 aa, Severe acute respiratory syndrome coronavirus 2
FKLTCATTRQVVNVVTTKIA

SEQ ID NO: 91017 - protein, 20 aa, Severe acute respiratory syndrome coronavirus 2
KLTCATTRQVVNVVTTKIAL

SEQ ID NO: 91018 - protein, 20 aa, Severe acute respiratory syndrome coronavirus 2
LTCATTRQVVNVVTTKIALK

SEQ ID NO: 91019 - protein, 20 aa, Severe acute respiratory syndrome coronavirus 2
TCATTRQVVNVVTTKIALKG

SEQ ID NO: 91020 - protein, 20 aa, Severe acute respiratory syndrome coronavirus 2
CATTRQVVNVVTTKIALKGG

SEQ ID NO: 91021 - protein, 20 aa, Severe acute respiratory syndrome coronavirus 2
KIVNNWLKQLIKVTLVFLFV

SEQ ID NO: 91022 - protein, 20 aa, Severe acute respiratory syndrome coronavirus 2
DTWFSQRGGSYTNDKACPLI

SEQ ID NO: 91023 - protein, 20 aa, Severe acute respiratory syndrome coronavirus 2
TWFSQRGGSYTNDKACPLIA

SEQ ID NO: 91024 - protein, 20 aa, Severe acute respiratory syndrome coronavirus 2
WFSQRGGSYTNDKACPLIAA

SEQ ID NO: 91025 - protein, 20 aa, Severe acute respiratory syndrome coronavirus 2
FSQRGGSYTNDKACPLIAAV

SEQ ID NO: 91026 - protein, 20 aa, Severe acute respiratory syndrome coronavirus 2
SQRGGSYTNDKACPLIAAVI

SEQ ID NO: 91027 - protein, 20 aa, Severe acute respiratory syndrome coronavirus 2
QRGGSYTNDKACPLIAAVIT

SEQ ID NO: 91028 - protein, 20 aa, Severe acute respiratory syndrome coronavirus 2
RGGSYTNDKACPLIAAVITR

SEQ ID NO: 91029 - protein, 20 aa, Severe acute respiratory syndrome coronavirus 2
GGSYTNDKACPLIAAVITRE

SEQ ID NO: 91030 - protein, 20 aa, Severe acute respiratory syndrome coronavirus 2
GSYTNDKACPLIAAVITREV

SEQ ID NO: 91031 - protein, 20 aa, Severe acute respiratory syndrome coronavirus 2
TTNGDFLHFLPRVFSAVGNI

SEQ ID NO: 91032 - protein, 20 aa, Severe acute respiratory syndrome coronavirus 2
TNGDFLHFLPRVFSAVGNIC

SEQ ID NO: 91033 - protein, 20 aa, Severe acute respiratory syndrome coronavirus 2
NGDFLHFLPRVFSAVGNICY

SEQ ID NO: 91034 - protein, 20 aa, Severe acute respiratory syndrome coronavirus 2
GDFLHFLPRVFSAVGNICYT

SEQ ID NO: 91035 - protein, 20 aa, Severe acute respiratory syndrome coronavirus 2
DFLHFLPRVFSAVGNICYTP

SEQ ID NO: 91036 - protein, 20 aa, Severe acute respiratory syndrome coronavirus 2
ATSACVLAAECTIFKDASGK

SEQ ID NO: 91037 - protein, 20 aa, Severe acute respiratory syndrome coronavirus 2
TSACVLAAECTIFKDASGKP

SEQ ID NO: 91038 - protein, 20 aa, Severe acute respiratory syndrome coronavirus 2
SACVLAAECTIFKDASGKPV

SEQ ID NO: 91039 - protein, 20 aa, Severe acute respiratory syndrome coronavirus 2
ACVLAAECTIFKDASGKPVP

SEQ ID NO: 91040 - protein, 20 aa, Severe acute respiratory syndrome coronavirus 2
CVLAAECTIFKDASGKPVPY

SEQ ID NO: 91041 - protein, 20 aa, Severe acute respiratory syndrome coronavirus 2
VLAAECTIFKDASGKPVPYC

SEQ ID NO: 91042 - protein, 20 aa, Severe acute respiratory syndrome coronavirus 2
LAAECTIFKDASGKPVPYCY

SEQ ID NO: 91043 - protein, 20 aa, Severe acute respiratory syndrome coronavirus 2
AAECTIFKDASGKPVPYCYD

SEQ ID NO: 91044 - protein, 20 aa, Severe acute respiratory syndrome coronavirus 2
AECTIFKDASGKPVPYCYDT

SEQ ID NO: 91045 - protein, 20 aa, Severe acute respiratory syndrome coronavirus 2
ECTIFKDASGKPVPYCYDTN

SEQ ID NO: 91046 - protein, 20 aa, Severe acute respiratory syndrome coronavirus 2
CTIFKDASGKPVPYCYDTNV

SEQ ID NO: 91047 - protein, 20 aa, Severe acute respiratory syndrome coronavirus 2
TIFKDASGKPVPYCYDTNVL

SEQ ID NO: 91048 - protein, 20 aa, Severe acute respiratory syndrome coronavirus 2
IFKDASGKPVPYCYDTNVLE

SEQ ID NO: 91049 - protein, 20 aa, Severe acute respiratory syndrome coronavirus 2
KDASGKPVPYCYDTNVLEGS

SEQ ID NO: 91050 - protein, 20 aa, Severe acute respiratory syndrome coronavirus 2
DASGKPVPYCYDTNVLEGSV

SEQ ID NO: 91051 - protein, 20 aa, Severe acute respiratory syndrome coronavirus 2
ASGKPVPYCYDTNVLEGSVA

SEQ ID NO: 91052 - protein, 20 aa, Severe acute respiratory syndrome coronavirus 2
SGKPVPYCYDTNVLEGSVAY

SEQ ID NO: 91053 - protein, 20 aa, Severe acute respiratory syndrome coronavirus 2
GKPVPYCYDTNVLEGSVAYE

SEQ ID NO: 91054 - protein, 20 aa, Severe acute respiratory syndrome coronavirus 2
KPVPYCYDTNVLEGSVAYES

SEQ ID NO: 91055 - protein, 20 aa, Severe acute respiratory syndrome coronavirus 2
PVPYCYDTNVLEGSVAYESL

SEQ ID NO: 91056 - protein, 20 aa, Severe acute respiratory syndrome coronavirus 2
VPYCYDTNVLEGSVAYESLR

SEQ ID NO: 91057 - protein, 20 aa, Severe acute respiratory syndrome coronavirus 2
PYCYDTNVLEGSVAYESLRP

SEQ ID NO: 91058 - protein, 20 aa, Severe acute respiratory syndrome coronavirus 2
YCYDTNVLEGSVAYESLRPD

SEQ ID NO: 91059 - protein, 20 aa, Severe acute respiratory syndrome coronavirus 2
CYDTNVLEGSVAYESLRPDT

SEQ ID NO: 91060 - protein, 20 aa, Severe acute respiratory syndrome coronavirus 2
YDTNVLEGSVAYESLRPDTR

SEQ ID NO: 91061 - protein, 20 aa, Severe acute respiratory syndrome coronavirus 2
DTNVLEGSVAYESLRPDTRY

SEQ ID NO: 91062 - protein, 20 aa, Severe acute respiratory syndrome coronavirus 2
TNVLEGSVAYESLRPDTRYV

SEQ ID NO: 91063 - protein, 20 aa, Severe acute respiratory syndrome coronavirus 2
NVLEGSVAYESLRPDTRYVL

SEQ ID NO: 91064 - protein, 20 aa, Severe acute respiratory syndrome coronavirus 2
VLEGSVAYESLRPDTRYVLM

SEQ ID NO: 91065 - protein, 20 aa, Severe acute respiratory syndrome coronavirus 2
LEGSVAYESLRPDTRYVLMD

SEQ ID NO: 91066 - protein, 20 aa, Severe acute respiratory syndrome coronavirus 2
YESLRPDTRYVLMDGSIIQF

SEQ ID NO: 91067 - protein, 20 aa, Severe acute respiratory syndrome coronavirus 2
GVCVSTSGRWVLNNDYYRSL

SEQ ID NO: 91068 - protein, 20 aa, Severe acute respiratory syndrome coronavirus 2
VCVSTSGRWVLNNDYYRSLP

SEQ ID NO: 91069 - protein, 20 aa, Severe acute respiratory syndrome coronavirus 2
CVSTSGRWVLNNDYYRSLPG

SEQ ID NO: 91070 - protein, 20 aa, Severe acute respiratory syndrome coronavirus 2
VSTSGRWVLNNDYYRSLPGV

SEQ ID NO: 91071 - protein, 20 aa, Severe acute respiratory syndrome coronavirus 2
STSGRWVLNNDYYRSLPGVF

SEQ ID NO: 91072 - protein, 20 aa, Severe acute respiratory syndrome coronavirus 2
TSGRWVLNNDYYRSLPGVFC

SEQ ID NO: 91073 - protein, 20 aa, Severe acute respiratory syndrome coronavirus 2
SGRWVLNNDYYRSLPGVFCG

SEQ ID NO: 91074 - protein, 20 aa, Severe acute respiratory syndrome coronavirus 2
GRWVLNNDYYRSLPGVFCGV

SEQ ID NO: 91075 - protein, 20 aa, Severe acute respiratory syndrome coronavirus 2
RWVLNNDYYRSLPGVFCGVD

SEQ ID NO: 91076 - protein, 20 aa, Severe acute respiratory syndrome coronavirus 2
PLIQPIGALDISASIVAGGI

SEQ ID NO: 91077 - protein, 20 aa, Severe acute respiratory syndrome coronavirus 2
FLPGVYSVIYLYLTFYLTND

SEQ ID NO: 91078 - protein, 20 aa, Severe acute respiratory syndrome coronavirus 2
LPGVYSVIYLYLTFYLTNDV

SEQ ID NO: 91079 - protein, 20 aa, Severe acute respiratory syndrome coronavirus 2
PGVYSVIYLYLTFYLTNDVS

SEQ ID NO: 91080 - protein, 20 aa, Severe acute respiratory syndrome coronavirus 2
GVYSVIYLYLTFYLTNDVSF

SEQ ID NO: 91081 - protein, 20 aa, Severe acute respiratory syndrome coronavirus 2
VYSVIYLYLTFYLTNDVSFL

SEQ ID NO: 91082 - protein, 20 aa, Severe acute respiratory syndrome coronavirus 2
YLYLTFYLTNDVSFLAHIQW

SEQ ID NO: 91083 - protein, 20 aa, Severe acute respiratory syndrome coronavirus 2
LYLTFYLTNDVSFLAHIQWM

SEQ ID NO: 91084 - protein, 20 aa, Severe acute respiratory syndrome coronavirus 2
YLTFYLTNDVSFLAHIQWMV

SEQ ID NO: 91085 - protein, 20 aa, Severe acute respiratory syndrome coronavirus 2
LTFYLTNDVSFLAHIQWMVM

SEQ ID NO: 91086 - protein, 20 aa, Severe acute respiratory syndrome coronavirus 2
YIICISTKHFYWFFSNYLKR

SEQ ID NO: 91087 - protein, 20 aa, Severe acute respiratory syndrome coronavirus 2
IICISTKHFYWFFSNYLKRR

SEQ ID NO: 91088 - protein, 20 aa, Severe acute respiratory syndrome coronavirus 2
ICISTKHFYWFFSNYLKRRV

SEQ ID NO: 91089 - protein, 20 aa, Severe acute respiratory syndrome coronavirus 2
CISTKHFYWFFSNYLKRRVV

SEQ ID NO: 91090 - protein, 20 aa, Severe acute respiratory syndrome coronavirus 2
ISTKHFYWFFSNYLKRRVVF

SEQ ID NO: 91091 - protein, 20 aa, Severe acute respiratory syndrome coronavirus 2
STKHFYWFFSNYLKRRVVFN

SEQ ID NO: 91092 - protein, 20 aa, Severe acute respiratory syndrome coronavirus 2
TKHFYWFFSNYLKRRVVFNG

SEQ ID NO: 91093 - protein, 20 aa, Severe acute respiratory syndrome coronavirus 2
KHFYWFFSNYLKRRVVFNGV

SEQ ID NO: 91094 - protein, 20 aa, Severe acute respiratory syndrome coronavirus 2
HFYWFFSNYLKRRVVFNGVS

SEQ ID NO: 91095 - protein, 20 aa, Severe acute respiratory syndrome coronavirus 2
FYWFFSNYLKRRVVFNGVSF

SEQ ID NO: 91096 - protein, 20 aa, Severe acute respiratory syndrome coronavirus 2
YWFFSNYLKRRVVFNGVSFS

SEQ ID NO: 91097 - protein, 20 aa, Severe acute respiratory syndrome coronavirus 2
WFFSNYLKRRVVFNGVSFST

SEQ ID NO: 91098 - protein, 20 aa, Severe acute respiratory syndrome coronavirus 2
FFSNYLKRRVVFNGVSFSTF

SEQ ID NO: 91099 - protein, 20 aa, Severe acute respiratory syndrome coronavirus 2
FSNYLKRRVVFNGVSFSTFE

SEQ ID NO: 91100 - protein, 20 aa, Severe acute respiratory syndrome coronavirus 2
SNYLKRRVVFNGVSFSTFEE

SEQ ID NO: 91101 - protein, 20 aa, Severe acute respiratory syndrome coronavirus 2
NYLKRRVVFNGVSFSTFEEA

SEQ ID NO: 91102 - protein, 20 aa, Severe acute respiratory syndrome coronavirus 2
YLKRRVVFNGVSFSTFEEAA

SEQ ID NO: 91103 - protein, 20 aa, Severe acute respiratory syndrome coronavirus 2
LKRRVVFNGVSFSTFEEAAL

SEQ ID NO: 91104 - protein, 20 aa, Severe acute respiratory syndrome coronavirus 2
KRRVVFNGVSFSTFEEAALC

SEQ ID NO: 91105 - protein, 20 aa, Severe acute respiratory syndrome coronavirus 2
RRVVFNGVSFSTFEEAALCT

SEQ ID NO: 91106 - protein, 20 aa, Severe acute respiratory syndrome coronavirus 2
RVVFNGVSFSTFEEAALCTF

SEQ ID NO: 91107 - protein, 20 aa, Severe acute respiratory syndrome coronavirus 2
VVFNGVSFSTFEEAALCTFL

SEQ ID NO: 91108 - protein, 20 aa, Severe acute respiratory syndrome coronavirus 2
VFNGVSFSTFEEAALCTFLL

SEQ ID NO: 91109 - protein, 20 aa, Severe acute respiratory syndrome coronavirus 2
FNGVSFSTFEEAALCTFLLN

SEQ ID NO: 91110 - protein, 20 aa, Severe acute respiratory syndrome coronavirus 2
NGVSFSTFEEAALCTFLLNK

SEQ ID NO: 91111 - protein, 20 aa, Severe acute respiratory syndrome coronavirus 2
GVSFSTFEEAALCTFLLNKE

SEQ ID NO: 91112 - protein, 20 aa, Severe acute respiratory syndrome coronavirus 2
VSFSTFEEAALCTFLLNKEM

SEQ ID NO: 91113 - protein, 20 aa, Severe acute respiratory syndrome coronavirus 2
SFSTFEEAALCTFLLNKEMY

SEQ ID NO: 91114 - protein, 20 aa, Severe acute respiratory syndrome coronavirus 2
FSTFEEAALCTFLLNKEMYL

SEQ ID NO: 91115 - protein, 20 aa, Severe acute respiratory syndrome coronavirus 2
STFEEAALCTFLLNKEMYLK

SEQ ID NO: 91116 - protein, 20 aa, Severe acute respiratory syndrome coronavirus 2
TFEEAALCTFLLNKEMYLKL

SEQ ID NO: 91117 - protein, 20 aa, Severe acute respiratory syndrome coronavirus 2
FEEAALCTFLLNKEMYLKLR

SEQ ID NO: 91118 - protein, 20 aa, Severe acute respiratory syndrome coronavirus 2
EEAALCTFLLNKEMYLKLRS

SEQ ID NO: 91119 - protein, 20 aa, Severe acute respiratory syndrome coronavirus 2
EAALCTFLLNKEMYLKLRSD

SEQ ID NO: 91120 - protein, 20 aa, Severe acute respiratory syndrome coronavirus 2
AALCTFLLNKEMYLKLRSDV

SEQ ID NO: 91121 - protein, 20 aa, Severe acute respiratory syndrome coronavirus 2
ALCTFLLNKEMYLKLRSDVL

SEQ ID NO: 91122 - protein, 20 aa, Severe acute respiratory syndrome coronavirus 2
LCTFLLNKEMYLKLRSDVLL

SEQ ID NO: 91123 - protein, 20 aa, Severe acute respiratory syndrome coronavirus 2
CTFLLNKEMYLKLRSDVLLP

SEQ ID NO: 91124 - protein, 20 aa, Severe acute respiratory syndrome coronavirus 2
LAKALNDFSNSGSDVLYQPP

SEQ ID NO: 91125 - protein, 20 aa, Severe acute respiratory syndrome coronavirus 2
AKALNDFSNSGSDVLYQPPQ

SEQ ID NO: 91126 - protein, 20 aa, Severe acute respiratory syndrome coronavirus 2
CMVQVTCGTTTLNGLWLDDV

SEQ ID NO: 91127 - protein, 20 aa, Severe acute respiratory syndrome coronavirus 2
MVQVTCGTTTLNGLWLDDVV

SEQ ID NO: 91128 - protein, 20 aa, Severe acute respiratory syndrome coronavirus 2
VQVTCGTTTLNGLWLDDVVY

SEQ ID NO: 91129 - protein, 20 aa, Severe acute respiratory syndrome coronavirus 2
QVTCGTTTLNGLWLDDVVYC

SEQ ID NO: 91130 - protein, 20 aa, Severe acute respiratory syndrome coronavirus 2
VTCGTTTLNGLWLDDVVYCP

SEQ ID NO: 91131 - protein, 20 aa, Severe acute respiratory syndrome coronavirus 2
TCGTTTLNGLWLDDVVYCPR

SEQ ID NO: 91132 - protein, 20 aa, Severe acute respiratory syndrome coronavirus 2
CGTTTLNGLWLDDVVYCPRH

SEQ ID NO: 91133 - protein, 20 aa, Severe acute respiratory syndrome coronavirus 2
GTTTLNGLWLDDVVYCPRHV

SEQ ID NO: 91134 - protein, 20 aa, Severe acute respiratory syndrome coronavirus 2
TTTLNGLWLDDVVYCPRHVI

SEQ ID NO: 91135 - protein, 20 aa, Severe acute respiratory syndrome coronavirus 2
TTLNGLWLDDVVYCPRHVIC

SEQ ID NO: 91136 - protein, 20 aa, Severe acute respiratory syndrome coronavirus 2
SFCYMHHMELPTGVHAGTDL

SEQ ID NO: 91137 - protein, 20 aa, Severe acute respiratory syndrome coronavirus 2
FCYMHHMELPTGVHAGTDLE

SEQ ID NO: 91138 - protein, 20 aa, Severe acute respiratory syndrome coronavirus 2
CYMHHMELPTGVHAGTDLEG

SEQ ID NO: 91139 - protein, 20 aa, Severe acute respiratory syndrome coronavirus 2
YMHHMELPTGVHAGTDLEGN

SEQ ID NO: 91140 - protein, 20 aa, Severe acute respiratory syndrome coronavirus 2
MHHMELPTGVHAGTDLEGNF

SEQ ID NO: 91141 - protein, 20 aa, Severe acute respiratory syndrome coronavirus 2
HHMELPTGVHAGTDLEGNFY

SEQ ID NO: 91142 - protein, 20 aa, Severe acute respiratory syndrome coronavirus 2
HMELPTGVHAGTDLEGNFYG

SEQ ID NO: 91143 - protein, 20 aa, Severe acute respiratory syndrome coronavirus 2
TITVNVLAWLYAAVINGDRW

SEQ ID NO: 91144 - protein, 20 aa, Severe acute respiratory syndrome coronavirus 2
ITVNVLAWLYAAVINGDRWF

SEQ ID NO: 91145 - protein, 20 aa, Severe acute respiratory syndrome coronavirus 2
TILGSALLEDEFTPFDVVRQ

SEQ ID NO: 91146 - protein, 20 aa, Severe acute respiratory syndrome coronavirus 2
ILGSALLEDEFTPFDVVRQC

SEQ ID NO: 91147 - protein, 20 aa, Severe acute respiratory syndrome coronavirus 2
LGSALLEDEFTPFDVVRQCS

SEQ ID NO: 91148 - protein, 20 aa, Severe acute respiratory syndrome coronavirus 2
GSALLEDEFTPFDVVRQCSG

SEQ ID NO: 91149 - protein, 20 aa, Severe acute respiratory syndrome coronavirus 2
SALLEDEFTPFDVVRQCSGV

SEQ ID NO: 91150 - protein, 20 aa, Severe acute respiratory syndrome coronavirus 2
LLEDEFTPFDVVRQCSGVTF

SEQ ID NO: 91151 - protein, 20 aa, Severe acute respiratory syndrome coronavirus 2
LEDEFTPFDVVRQCSGVTFQ

SEQ ID NO: 91152 - protein, 20 aa, Severe acute respiratory syndrome coronavirus 2
SAVKRTIKGTHHWLLLTILT

SEQ ID NO: 91153 - protein, 20 aa, Severe acute respiratory syndrome coronavirus 2
AVKRTIKGTHHWLLLTILTS

SEQ ID NO: 91154 - protein, 20 aa, Severe acute respiratory syndrome coronavirus 2
VKRTIKGTHHWLLLTILTSL

SEQ ID NO: 91155 - protein, 20 aa, Severe acute respiratory syndrome coronavirus 2
KRTIKGTHHWLLLTILTSLL

SEQ ID NO: 91156 - protein, 20 aa, Severe acute respiratory syndrome coronavirus 2
RTIKGTHHWLLLTILTSLLV

SEQ ID NO: 91157 - protein, 20 aa, Severe acute respiratory syndrome coronavirus 2
TIKGTHHWLLLTILTSLLVL

SEQ ID NO: 91158 - protein, 20 aa, Severe acute respiratory syndrome coronavirus 2
IKGTHHWLLLTILTSLLVLV

SEQ ID NO: 91159 - protein, 20 aa, Severe acute respiratory syndrome coronavirus 2
KGTHHWLLLTILTSLLVLVQ

SEQ ID NO: 91160 - protein, 20 aa, Severe acute respiratory syndrome coronavirus 2
GTHHWLLLTILTSLLVLVQS

SEQ ID NO: 91161 - protein, 20 aa, Severe acute respiratory syndrome coronavirus 2
THHWLLLTILTSLLVLVQST

SEQ ID NO: 91162 - protein, 20 aa, Severe acute respiratory syndrome coronavirus 2
HHWLLLTILTSLLVLVQSTQ

SEQ ID NO: 91163 - protein, 20 aa, Severe acute respiratory syndrome coronavirus 2
HWLLLTILTSLLVLVQSTQW

SEQ ID NO: 91164 - protein, 20 aa, Severe acute respiratory syndrome coronavirus 2
WLLLTILTSLLVLVQSTQWS

SEQ ID NO: 91165 - protein, 20 aa, Severe acute respiratory syndrome coronavirus 2
LLLTILTSLLVLVQSTQWSL

SEQ ID NO: 91166 - protein, 20 aa, Severe acute respiratory syndrome coronavirus 2
LLTILTSLLVLVQSTQWSLF

SEQ ID NO: 91167 - protein, 20 aa, Severe acute respiratory syndrome coronavirus 2
MGIIAMSAFAMMFVKHKHAF

SEQ ID NO: 91168 - protein, 20 aa, Severe acute respiratory syndrome coronavirus 2
GIIAMSAFAMMFVKHKHAFL

SEQ ID NO: 91169 - protein, 20 aa, Severe acute respiratory syndrome coronavirus 2
IIAMSAFAMMFVKHKHAFLC

SEQ ID NO: 91170 - protein, 20 aa, Severe acute respiratory syndrome coronavirus 2
IAMSAFAMMFVKHKHAFLCL

SEQ ID NO: 91171 - protein, 20 aa, Severe acute respiratory syndrome coronavirus 2
AMSAFAMMFVKHKHAFLCLF

SEQ ID NO: 91172 - protein, 20 aa, Severe acute respiratory syndrome coronavirus 2
MSAFAMMFVKHKHAFLCLFL

SEQ ID NO: 91173 - protein, 20 aa, Severe acute respiratory syndrome coronavirus 2
SAFAMMFVKHKHAFLCLFLL

SEQ ID NO: 91174 - protein, 20 aa, Severe acute respiratory syndrome coronavirus 2
AFAMMFVKHKHAFLCLFLLP

SEQ ID NO: 91175 - protein, 20 aa, Severe acute respiratory syndrome coronavirus 2
FAMMFVKHKHAFLCLFLLPS

SEQ ID NO: 91176 - protein, 20 aa, Severe acute respiratory syndrome coronavirus 2
TVAYFNMVYMPASWVMRIMT

SEQ ID NO: 91177 - protein, 20 aa, Severe acute respiratory syndrome coronavirus 2
VAYFNMVYMPASWVMRIMTW

SEQ ID NO: 91178 - protein, 20 aa, Severe acute respiratory syndrome coronavirus 2
AYFNMVYMPASWVMRIMTWL

SEQ ID NO: 91179 - protein, 20 aa, Severe acute respiratory syndrome coronavirus 2
MVDTSLSGFKLKDCVMYASA

SEQ ID NO: 91180 - protein, 20 aa, Severe acute respiratory syndrome coronavirus 2
VDTSLSGFKLKDCVMYASAV

SEQ ID NO: 91181 - protein, 20 aa, Severe acute respiratory syndrome coronavirus 2
DTSLSGFKLKDCVMYASAVV

SEQ ID NO: 91182 - protein, 20 aa, Severe acute respiratory syndrome coronavirus 2
TSLSGFKLKDCVMYASAVVL

SEQ ID NO: 91183 - protein, 20 aa, Severe acute respiratory syndrome coronavirus 2
SLSGFKLKDCVMYASAVVLL

SEQ ID NO: 91184 - protein, 20 aa, Severe acute respiratory syndrome coronavirus 2
LSGFKLKDCVMYASAVVLLI

SEQ ID NO: 91185 - protein, 20 aa, Severe acute respiratory syndrome coronavirus 2
SGFKLKDCVMYASAVVLLIL

SEQ ID NO: 91186 - protein, 20 aa, Severe acute respiratory syndrome coronavirus 2
GFKLKDCVMYASAVVLLILM

SEQ ID NO: 91187 - protein, 20 aa, Severe acute respiratory syndrome coronavirus 2
FKLKDCVMYASAVVLLILMT

SEQ ID NO: 91188 - protein, 20 aa, Severe acute respiratory syndrome coronavirus 2
CIMLVYCFLGYFCTCYFGLF

SEQ ID NO: 91189 - protein, 20 aa, Severe acute respiratory syndrome coronavirus 2
IMLVYCFLGYFCTCYFGLFC

SEQ ID NO: 91190 - protein, 20 aa, Severe acute respiratory syndrome coronavirus 2
MLVYCFLGYFCTCYFGLFCL

SEQ ID NO: 91191 - protein, 20 aa, Severe acute respiratory syndrome coronavirus 2
CYFGLFCLLNRYFRLTLGVY

SEQ ID NO: 91192 - protein, 20 aa, Severe acute respiratory syndrome coronavirus 2
YFGLFCLLNRYFRLTLGVYD

SEQ ID NO: 91193 - protein, 20 aa, Severe acute respiratory syndrome coronavirus 2
FGLFCLLNRYFRLTLGVYDY

SEQ ID NO: 91194 - protein, 20 aa, Severe acute respiratory syndrome coronavirus 2
GLFCLLNRYFRLTLGVYDYL

SEQ ID NO: 91195 - protein, 20 aa, Severe acute respiratory syndrome coronavirus 2
NRYFRLTLGVYDYLVSTQEF

SEQ ID NO: 91196 - protein, 20 aa, Severe acute respiratory syndrome coronavirus 2
RYFRLTLGVYDYLVSTQEFR

SEQ ID NO: 91197 - protein, 20 aa, Severe acute respiratory syndrome coronavirus 2
YFRLTLGVYDYLVSTQEFRY

SEQ ID NO: 91198 - protein, 20 aa, Severe acute respiratory syndrome coronavirus 2
FRLTLGVYDYLVSTQEFRYM

SEQ ID NO: 91199 - protein, 20 aa, Severe acute respiratory syndrome coronavirus 2
RLTLGVYDYLVSTQEFRYMN

SEQ ID NO: 91200 - protein, 20 aa, Severe acute respiratory syndrome coronavirus 2
LTLGVYDYLVSTQEFRYMNS

SEQ ID NO: 91201 - protein, 20 aa, Severe acute respiratory syndrome coronavirus 2
TLGVYDYLVSTQEFRYMNSQ

SEQ ID NO: 91202 - protein, 20 aa, Severe acute respiratory syndrome coronavirus 2
LGVYDYLVSTQEFRYMNSQG

SEQ ID NO: 91203 - protein, 20 aa, Severe acute respiratory syndrome coronavirus 2
GVYDYLVSTQEFRYMNSQGL

SEQ ID NO: 91204 - protein, 20 aa, Severe acute respiratory syndrome coronavirus 2
SKMSDVKCTSVVLLSVLQQL

SEQ ID NO: 91205 - protein, 20 aa, Severe acute respiratory syndrome coronavirus 2
KMSDVKCTSVVLLSVLQQLR

SEQ ID NO: 91206 - protein, 20 aa, Severe acute respiratory syndrome coronavirus 2
MSDVKCTSVVLLSVLQQLRV

SEQ ID NO: 91207 - protein, 20 aa, Severe acute respiratory syndrome coronavirus 2
SDVKCTSVVLLSVLQQLRVE

SEQ ID NO: 91208 - protein, 20 aa, Severe acute respiratory syndrome coronavirus 2
DVKCTSVVLLSVLQQLRVES

SEQ ID NO: 91209 - protein, 20 aa, Severe acute respiratory syndrome coronavirus 2
VQLHNDILLAKDTTEAFEKM

SEQ ID NO: 91210 - protein, 20 aa, Severe acute respiratory syndrome coronavirus 2
QLHNDILLAKDTTEAFEKMV

SEQ ID NO: 91211 - protein, 20 aa, Severe acute respiratory syndrome coronavirus 2
LHNDILLAKDTTEAFEKMVS

SEQ ID NO: 91212 - protein, 20 aa, Severe acute respiratory syndrome coronavirus 2
HNDILLAKDTTEAFEKMVSL

SEQ ID NO: 91213 - protein, 20 aa, Severe acute respiratory syndrome coronavirus 2
NDILLAKDTTEAFEKMVSLL

SEQ ID NO: 91214 - protein, 20 aa, Severe acute respiratory syndrome coronavirus 2
DILLAKDTTEAFEKMVSLLS

SEQ ID NO: 91215 - protein, 20 aa, Severe acute respiratory syndrome coronavirus 2
KMVSLLSVLLSMQGAVDINK

SEQ ID NO: 91216 - protein, 20 aa, Severe acute respiratory syndrome coronavirus 2
LLSMQGAVDINKLCEEMLDN

SEQ ID NO: 91217 - protein, 20 aa, Severe acute respiratory syndrome coronavirus 2
LSMQGAVDINKLCEEMLDNR

SEQ ID NO: 91218 - protein, 20 aa, Severe acute respiratory syndrome coronavirus 2
SMQGAVDINKLCEEMLDNRA

SEQ ID NO: 91219 - protein, 20 aa, Severe acute respiratory syndrome coronavirus 2
MQGAVDINKLCEEMLDNRAT

SEQ ID NO: 91220 - protein, 20 aa, Severe acute respiratory syndrome coronavirus 2
QGAVDINKLCEEMLDNRATL

SEQ ID NO: 91221 - protein, 20 aa, Severe acute respiratory syndrome coronavirus 2
GAVDINKLCEEMLDNRATLQ

SEQ ID NO: 91222 - protein, 20 aa, Severe acute respiratory syndrome coronavirus 2
AMQRKLEKMADQAMTQMYKQ

SEQ ID NO: 91223 - protein, 20 aa, Severe acute respiratory syndrome coronavirus 2
MQRKLEKMADQAMTQMYKQA

SEQ ID NO: 91224 - protein, 20 aa, Severe acute respiratory syndrome coronavirus 2
QRKLEKMADQAMTQMYKQAR

SEQ ID NO: 91225 - protein, 20 aa, Severe acute respiratory syndrome coronavirus 2
RKLEKMADQAMTQMYKQARS

SEQ ID NO: 91226 - protein, 20 aa, Severe acute respiratory syndrome coronavirus 2
KLEKMADQAMTQMYKQARSE

SEQ ID NO: 91227 - protein, 20 aa, Severe acute respiratory syndrome coronavirus 2
LEKMADQAMTQMYKQARSED

SEQ ID NO: 91228 - protein, 20 aa, Severe acute respiratory syndrome coronavirus 2
EKMADQAMTQMYKQARSEDK

SEQ ID NO: 91229 - protein, 20 aa, Severe acute respiratory syndrome coronavirus 2
KMADQAMTQMYKQARSEDKR

SEQ ID NO: 91230 - protein, 20 aa, Severe acute respiratory syndrome coronavirus 2
MADQAMTQMYKQARSEDKRA

SEQ ID NO: 91231 - protein, 20 aa, Severe acute respiratory syndrome coronavirus 2
ADQAMTQMYKQARSEDKRAK

SEQ ID NO: 91232 - protein, 20 aa, Severe acute respiratory syndrome coronavirus 2
DQAMTQMYKQARSEDKRAKV

SEQ ID NO: 91233 - protein, 20 aa, Severe acute respiratory syndrome coronavirus 2
QAMTQMYKQARSEDKRAKVT

SEQ ID NO: 91234 - protein, 20 aa, Severe acute respiratory syndrome coronavirus 2
AMTQMYKQARSEDKRAKVTS

SEQ ID NO: 91235 - protein, 20 aa, Severe acute respiratory syndrome coronavirus 2
MTQMYKQARSEDKRAKVTSA

SEQ ID NO: 91236 - protein, 20 aa, Severe acute respiratory syndrome coronavirus 2
TQMYKQARSEDKRAKVTSAM

SEQ ID NO: 91237 - protein, 20 aa, Severe acute respiratory syndrome coronavirus 2
QMYKQARSEDKRAKVTSAMQ

SEQ ID NO: 91238 - protein, 20 aa, Severe acute respiratory syndrome coronavirus 2
MYKQARSEDKRAKVTSAMQT

SEQ ID NO: 91239 - protein, 20 aa, Severe acute respiratory syndrome coronavirus 2
YKQARSEDKRAKVTSAMQTM

SEQ ID NO: 91240 - protein, 20 aa, Severe acute respiratory syndrome coronavirus 2
KQARSEDKRAKVTSAMQTML

SEQ ID NO: 91241 - protein, 20 aa, Severe acute respiratory syndrome coronavirus 2
QARSEDKRAKVTSAMQTMLF

SEQ ID NO: 91242 - protein, 20 aa, Severe acute respiratory syndrome coronavirus 2
ARSEDKRAKVTSAMQTMLFT

SEQ ID NO: 91243 - protein, 20 aa, Severe acute respiratory syndrome coronavirus 2
RSEDKRAKVTSAMQTMLFTM

SEQ ID NO: 91244 - protein, 20 aa, Severe acute respiratory syndrome coronavirus 2
SEDKRAKVTSAMQTMLFTML

SEQ ID NO: 91245 - protein, 20 aa, Severe acute respiratory syndrome coronavirus 2
EDKRAKVTSAMQTMLFTMLR

SEQ ID NO: 91246 - protein, 20 aa, Severe acute respiratory syndrome coronavirus 2
DKRAKVTSAMQTMLFTMLRK

SEQ ID NO: 91247 - protein, 20 aa, Severe acute respiratory syndrome coronavirus 2
KRAKVTSAMQTMLFTMLRKL

SEQ ID NO: 91248 - protein, 20 aa, Severe acute respiratory syndrome coronavirus 2
RAKVTSAMQTMLFTMLRKLD

SEQ ID NO: 91249 - protein, 20 aa, Severe acute respiratory syndrome coronavirus 2
AKVTSAMQTMLFTMLRKLDN

SEQ ID NO: 91250 - protein, 20 aa, Severe acute respiratory syndrome coronavirus 2
RKLDNDALNNIINNARDGCV

SEQ ID NO: 91251 - protein, 20 aa, Severe acute respiratory syndrome coronavirus 2
KLDNDALNNIINNARDGCVP

SEQ ID NO: 91252 - protein, 20 aa, Severe acute respiratory syndrome coronavirus 2
LDNDALNNIINNARDGCVPL

SEQ ID NO: 91253 - protein, 20 aa, Severe acute respiratory syndrome coronavirus 2
DNDALNNIINNARDGCVPLN

SEQ ID NO: 91254 - protein, 20 aa, Severe acute respiratory syndrome coronavirus 2
NDALNNIINNARDGCVPLNI

SEQ ID NO: 91255 - protein, 20 aa, Severe acute respiratory syndrome coronavirus 2
DALNNIINNARDGCVPLNII

SEQ ID NO: 91256 - protein, 20 aa, Severe acute respiratory syndrome coronavirus 2
ALNNIINNARDGCVPLNIIP

SEQ ID NO: 91257 - protein, 20 aa, Severe acute respiratory syndrome coronavirus 2
LNNIINNARDGCVPLNIIPL

SEQ ID NO: 91258 - protein, 20 aa, Severe acute respiratory syndrome coronavirus 2
NNIINNARDGCVPLNIIPLT

SEQ ID NO: 91259 - protein, 20 aa, Severe acute respiratory syndrome coronavirus 2
IQQVVDADSKIVQLSEISMD

SEQ ID NO: 91260 - protein, 20 aa, Severe acute respiratory syndrome coronavirus 2
VDADSKIVQLSEISMDNSPN

SEQ ID NO: 91261 - protein, 20 aa, Severe acute respiratory syndrome coronavirus 2
DADSKIVQLSEISMDNSPNL

SEQ ID NO: 91262 - protein, 20 aa, Severe acute respiratory syndrome coronavirus 2
ADSKIVQLSEISMDNSPNLA

SEQ ID NO: 91263 - protein, 20 aa, Severe acute respiratory syndrome coronavirus 2
DSKIVQLSEISMDNSPNLAW

SEQ ID NO: 91264 - protein, 20 aa, Severe acute respiratory syndrome coronavirus 2
SKIVQLSEISMDNSPNLAWP

SEQ ID NO: 91265 - protein, 20 aa, Severe acute respiratory syndrome coronavirus 2
KIVQLSEISMDNSPNLAWPL

SEQ ID NO: 91266 - protein, 20 aa, Severe acute respiratory syndrome coronavirus 2
IVQLSEISMDNSPNLAWPLI

SEQ ID NO: 91267 - protein, 20 aa, Severe acute respiratory syndrome coronavirus 2
VQLSEISMDNSPNLAWPLIV

SEQ ID NO: 91268 - protein, 20 aa, Severe acute respiratory syndrome coronavirus 2
RFVTDTPKGPKVKYLYFIKG

SEQ ID NO: 91269 - protein, 20 aa, Severe acute respiratory syndrome coronavirus 2
FVTDTPKGPKVKYLYFIKGL

SEQ ID NO: 91270 - protein, 20 aa, Severe acute respiratory syndrome coronavirus 2
VTDTPKGPKVKYLYFIKGLN

SEQ ID NO: 91271 - protein, 20 aa, Severe acute respiratory syndrome coronavirus 2
TDTPKGPKVKYLYFIKGLNN

SEQ ID NO: 91272 - protein, 20 aa, Severe acute respiratory syndrome coronavirus 2
DTPKGPKVKYLYFIKGLNNL

SEQ ID NO: 91273 - protein, 20 aa, Severe acute respiratory syndrome coronavirus 2
TPKGPKVKYLYFIKGLNNLN

SEQ ID NO: 91274 - protein, 20 aa, Severe acute respiratory syndrome coronavirus 2
PKGPKVKYLYFIKGLNNLNR

SEQ ID NO: 91275 - protein, 20 aa, Severe acute respiratory syndrome coronavirus 2
KGPKVKYLYFIKGLNNLNRG

SEQ ID NO: 91276 - protein, 20 aa, Severe acute respiratory syndrome coronavirus 2
GPKVKYLYFIKGLNNLNRGM

SEQ ID NO: 91277 - protein, 20 aa, Severe acute respiratory syndrome coronavirus 2
PKVKYLYFIKGLNNLNRGMV

SEQ ID NO: 91278 - protein, 20 aa, Severe acute respiratory syndrome coronavirus 2
KVKYLYFIKGLNNLNRGMVL

SEQ ID NO: 91279 - protein, 20 aa, Severe acute respiratory syndrome coronavirus 2
VLSFCAFAVDAAKAYKDYLA

SEQ ID NO: 91280 - protein, 20 aa, Severe acute respiratory syndrome coronavirus 2
LSFCAFAVDAAKAYKDYLAS

SEQ ID NO: 91281 - protein, 20 aa, Severe acute respiratory syndrome coronavirus 2
SFCAFAVDAAKAYKDYLASG

SEQ ID NO: 91282 - protein, 20 aa, Severe acute respiratory syndrome coronavirus 2
FCAFAVDAAKAYKDYLASGG

SEQ ID NO: 91283 - protein, 20 aa, Severe acute respiratory syndrome coronavirus 2
CAFAVDAAKAYKDYLASGGQ

SEQ ID NO: 91284 - protein, 20 aa, Severe acute respiratory syndrome coronavirus 2
VDAAKAYKDYLASGGQPITN

SEQ ID NO: 91285 - protein, 20 aa, Severe acute respiratory syndrome coronavirus 2
DAAKAYKDYLASGGQPITNC

SEQ ID NO: 91286 - protein, 20 aa, Severe acute respiratory syndrome coronavirus 2
AAKAYKDYLASGGQPITNCV

SEQ ID NO: 91287 - protein, 20 aa, Severe acute respiratory syndrome coronavirus 2
AKAYKDYLASGGQPITNCVK

SEQ ID NO: 91288 - protein, 20 aa, Severe acute respiratory syndrome coronavirus 2
KAYKDYLASGGQPITNCVKM

SEQ ID NO: 91289 - protein, 20 aa, Severe acute respiratory syndrome coronavirus 2
AYKDYLASGGQPITNCVKML

SEQ ID NO: 91290 - protein, 20 aa, Severe acute respiratory syndrome coronavirus 2
YKDYLASGGQPITNCVKMLC

SEQ ID NO: 91291 - protein, 20 aa, Severe acute respiratory syndrome coronavirus 2
KDYLASGGQPITNCVKMLCT

SEQ ID NO: 91292 - protein, 20 aa, Severe acute respiratory syndrome coronavirus 2
DYLASGGQPITNCVKMLCTH

SEQ ID NO: 91293 - protein, 21 aa, Severe acute respiratory syndrome coronavirus 2
TCGLVEVEKGVLPQLEQPYVF

SEQ ID NO: 91294 - protein, 21 aa, Severe acute respiratory syndrome coronavirus 2
CGLVEVEKGVLPQLEQPYVFI

SEQ ID NO: 91295 - protein, 21 aa, Severe acute respiratory syndrome coronavirus 2
GLVEVEKGVLPQLEQPYVFIK

SEQ ID NO: 91296 - protein, 21 aa, Severe acute respiratory syndrome coronavirus 2
LVEVEKGVLPQLEQPYVFIKR

SEQ ID NO: 91297 - protein, 21 aa, Severe acute respiratory syndrome coronavirus 2
VYCCREHEHEIAWYTERSEKS

SEQ ID NO: 91298 - protein, 21 aa, Severe acute respiratory syndrome coronavirus 2
YCCREHEHEIAWYTERSEKSY

SEQ ID NO: 91299 - protein, 21 aa, Severe acute respiratory syndrome coronavirus 2
CCREHEHEIAWYTERSEKSYE

SEQ ID NO: 91300 - protein, 21 aa, Severe acute respiratory syndrome coronavirus 2
CREHEHEIAWYTERSEKSYEL

SEQ ID NO: 91301 - protein, 21 aa, Severe acute respiratory syndrome coronavirus 2
REHEHEIAWYTERSEKSYELQ

SEQ ID NO: 91302 - protein, 21 aa, Severe acute respiratory syndrome coronavirus 2
EHEHEIAWYTERSEKSYELQT

SEQ ID NO: 91303 - protein, 21 aa, Severe acute respiratory syndrome coronavirus 2
HEHEIAWYTERSEKSYELQTP

SEQ ID NO: 91304 - protein, 21 aa, Severe acute respiratory syndrome coronavirus 2
EHEIAWYTERSEKSYELQTPF

SEQ ID NO: 91305 - protein, 21 aa, Severe acute respiratory syndrome coronavirus 2
HEIAWYTERSEKSYELQTPFE

SEQ ID NO: 91306 - protein, 21 aa, Severe acute respiratory syndrome coronavirus 2
EIAWYTERSEKSYELQTPFEI

SEQ ID NO: 91307 - protein, 21 aa, Severe acute respiratory syndrome coronavirus 2
IAWYTERSEKSYELQTPFEIK

SEQ ID NO: 91308 - protein, 21 aa, Severe acute respiratory syndrome coronavirus 2
AWYTERSEKSYELQTPFEIKL

SEQ ID NO: 91309 - protein, 21 aa, Severe acute respiratory syndrome coronavirus 2
WYTERSEKSYELQTPFEIKLA

SEQ ID NO: 91310 - protein, 21 aa, Severe acute respiratory syndrome coronavirus 2
YTERSEKSYELQTPFEIKLAK

SEQ ID NO: 91311 - protein, 21 aa, Severe acute respiratory syndrome coronavirus 2
TERSEKSYELQTPFEIKLAKK

SEQ ID NO: 91312 - protein, 21 aa, Severe acute respiratory syndrome coronavirus 2
ERSEKSYELQTPFEIKLAKKF

SEQ ID NO: 91313 - protein, 21 aa, Severe acute respiratory syndrome coronavirus 2
RSEKSYELQTPFEIKLAKKFD

SEQ ID NO: 91314 - protein, 21 aa, Severe acute respiratory syndrome coronavirus 2
VLDWLEEKFKEGVEFLRDGWE

SEQ ID NO: 91315 - protein, 21 aa, Severe acute respiratory syndrome coronavirus 2
LEEKFKEGVEFLRDGWEIVKF

SEQ ID NO: 91316 - protein, 21 aa, Severe acute respiratory syndrome coronavirus 2
NKFLALCADSIIIGGAKLKAL

SEQ ID NO: 91317 - protein, 21 aa, Severe acute respiratory syndrome coronavirus 2
KFLALCADSIIIGGAKLKALN

SEQ ID NO: 91318 - protein, 21 aa, Severe acute respiratory syndrome coronavirus 2
FLALCADSIIIGGAKLKALNL

SEQ ID NO: 91319 - protein, 21 aa, Severe acute respiratory syndrome coronavirus 2
LALCADSIIIGGAKLKALNLG

SEQ ID NO: 91320 - protein, 21 aa, Severe acute respiratory syndrome coronavirus 2
ALCADSIIIGGAKLKALNLGE

SEQ ID NO: 91321 - protein, 21 aa, Severe acute respiratory syndrome coronavirus 2
PVCINGLMLLEIKDTEKYCAL

SEQ ID NO: 91322 - protein, 21 aa, Severe acute respiratory syndrome coronavirus 2
VCINGLMLLEIKDTEKYCALA

SEQ ID NO: 91323 - protein, 21 aa, Severe acute respiratory syndrome coronavirus 2
NVYLKHGGGVAGALNKATNNA

SEQ ID NO: 91324 - protein, 21 aa, Severe acute respiratory syndrome coronavirus 2
GSCVLSGHNLAKHCLHVVGPN

SEQ ID NO: 91325 - protein, 21 aa, Severe acute respiratory syndrome coronavirus 2
SCVLSGHNLAKHCLHVVGPNV

SEQ ID NO: 91326 - protein, 21 aa, Severe acute respiratory syndrome coronavirus 2
CVLSGHNLAKHCLHVVGPNVN

SEQ ID NO: 91327 - protein, 21 aa, Severe acute respiratory syndrome coronavirus 2
YITTYPGQGLNGYTVEEAKTV

SEQ ID NO: 91328 - protein, 21 aa, Severe acute respiratory syndrome coronavirus 2
ITTYPGQGLNGYTVEEAKTVL

SEQ ID NO: 91329 - protein, 21 aa, Severe acute respiratory syndrome coronavirus 2
TTYPGQGLNGYTVEEAKTVLK

SEQ ID NO: 91330 - protein, 21 aa, Severe acute respiratory syndrome coronavirus 2
TYPGQGLNGYTVEEAKTVLKK

SEQ ID NO: 91331 - protein, 21 aa, Severe acute respiratory syndrome coronavirus 2
YPGQGLNGYTVEEAKTVLKKC

SEQ ID NO: 91332 - protein, 21 aa, Severe acute respiratory syndrome coronavirus 2
PGQGLNGYTVEEAKTVLKKCK

SEQ ID NO: 91333 - protein, 21 aa, Severe acute respiratory syndrome coronavirus 2
GQGLNGYTVEEAKTVLKKCKS

SEQ ID NO: 91334 - protein, 21 aa, Severe acute respiratory syndrome coronavirus 2
FYILPSIISNEKQEILGTVSW

SEQ ID NO: 91335 - protein, 21 aa, Severe acute respiratory syndrome coronavirus 2
YILPSIISNEKQEILGTVSWN

SEQ ID NO: 91336 - protein, 21 aa, Severe acute respiratory syndrome coronavirus 2
REMLAHAEETRKLMPVCVETK

SEQ ID NO: 91337 - protein, 21 aa, Severe acute respiratory syndrome coronavirus 2
EMLAHAEETRKLMPVCVETKA

SEQ ID NO: 91338 - protein, 21 aa, Severe acute respiratory syndrome coronavirus 2
VSTIQRKYKGIKIQEGVVDYG

SEQ ID NO: 91339 - protein, 21 aa, Severe acute respiratory syndrome coronavirus 2
GYLTSSSKTPEEHFIETISLA

SEQ ID NO: 91340 - protein, 21 aa, Severe acute respiratory syndrome coronavirus 2
YLTSSSKTPEEHFIETISLAG

SEQ ID NO: 91341 - protein, 21 aa, Severe acute respiratory syndrome coronavirus 2
LTSSSKTPEEHFIETISLAGS

SEQ ID NO: 91342 - protein, 21 aa, Severe acute respiratory syndrome coronavirus 2
TSSSKTPEEHFIETISLAGSY

SEQ ID NO: 91343 - protein, 21 aa, Severe acute respiratory syndrome coronavirus 2
SSSKTPEEHFIETISLAGSYK

SEQ ID NO: 91344 - protein, 21 aa, Severe acute respiratory syndrome coronavirus 2
SSKTPEEHFIETISLAGSYKD

SEQ ID NO: 91345 - protein, 21 aa, Severe acute respiratory syndrome coronavirus 2
SKTPEEHFIETISLAGSYKDW

SEQ ID NO: 91346 - protein, 21 aa, Severe acute respiratory syndrome coronavirus 2
KKWKYPQVNGLTSIKWADNNC

SEQ ID NO: 91347 - protein, 21 aa, Severe acute respiratory syndrome coronavirus 2
KWKYPQVNGLTSIKWADNNCY

SEQ ID NO: 91348 - protein, 21 aa, Severe acute respiratory syndrome coronavirus 2
WKYPQVNGLTSIKWADNNCYL

SEQ ID NO: 91349 - protein, 21 aa, Severe acute respiratory syndrome coronavirus 2
KYPQVNGLTSIKWADNNCYLA

SEQ ID NO: 91350 - protein, 21 aa, Severe acute respiratory syndrome coronavirus 2
YPQVNGLTSIKWADNNCYLAT

SEQ ID NO: 91351 - protein, 21 aa, Severe acute respiratory syndrome coronavirus 2
ELKFNPPALQDAYYRARAGEA

SEQ ID NO: 91352 - protein, 21 aa, Severe acute respiratory syndrome coronavirus 2
LKFNPPALQDAYYRARAGEAA

SEQ ID NO: 91353 - protein, 21 aa, Severe acute respiratory syndrome coronavirus 2
KFNPPALQDAYYRARAGEAAN

SEQ ID NO: 91354 - protein, 21 aa, Severe acute respiratory syndrome coronavirus 2
FNPPALQDAYYRARAGEAANF

SEQ ID NO: 91355 - protein, 21 aa, Severe acute respiratory syndrome coronavirus 2
NPPALQDAYYRARAGEAANFC

SEQ ID NO: 91356 - protein, 21 aa, Severe acute respiratory syndrome coronavirus 2
PPALQDAYYRARAGEAANFCA

SEQ ID NO: 91357 - protein, 21 aa, Severe acute respiratory syndrome coronavirus 2
PALQDAYYRARAGEAANFCAL

SEQ ID NO: 91358 - protein, 21 aa, Severe acute respiratory syndrome coronavirus 2
QHANLDSCKRVLNVVCKTCGQ

SEQ ID NO: 91359 - protein, 21 aa, Severe acute respiratory syndrome coronavirus 2
HANLDSCKRVLNVVCKTCGQQ

SEQ ID NO: 91360 - protein, 21 aa, Severe acute respiratory syndrome coronavirus 2
ANLDSCKRVLNVVCKTCGQQQ

SEQ ID NO: 91361 - protein, 21 aa, Severe acute respiratory syndrome coronavirus 2
NLDSCKRVLNVVCKTCGQQQT

SEQ ID NO: 91362 - protein, 21 aa, Severe acute respiratory syndrome coronavirus 2
DVFYKENSYTTTIKPVTYKLD

SEQ ID NO: 91363 - protein, 21 aa, Severe acute respiratory syndrome coronavirus 2
VFYKENSYTTTIKPVTYKLDG

SEQ ID NO: 91364 - protein, 21 aa, Severe acute respiratory syndrome coronavirus 2
FYKENSYTTTIKPVTYKLDGV

SEQ ID NO: 91365 - protein, 21 aa, Severe acute respiratory syndrome coronavirus 2
YKENSYTTTIKPVTYKLDGVV

SEQ ID NO: 91366 - protein, 21 aa, Severe acute respiratory syndrome coronavirus 2
KENSYTTTIKPVTYKLDGVVC

SEQ ID NO: 91367 - protein, 21 aa, Severe acute respiratory syndrome coronavirus 2
ENSYTTTIKPVTYKLDGVVCT

SEQ ID NO: 91368 - protein, 21 aa, Severe acute respiratory syndrome coronavirus 2
NSYTTTIKPVTYKLDGVVCTE

SEQ ID NO: 91369 - protein, 21 aa, Severe acute respiratory syndrome coronavirus 2
SYTTTIKPVTYKLDGVVCTEI

SEQ ID NO: 91370 - protein, 21 aa, Severe acute respiratory syndrome coronavirus 2
YTTTIKPVTYKLDGVVCTEID

SEQ ID NO: 91371 - protein, 21 aa, Severe acute respiratory syndrome coronavirus 2
TTTIKPVTYKLDGVVCTEIDP

SEQ ID NO: 91372 - protein, 21 aa, Severe acute respiratory syndrome coronavirus 2
TTIKPVTYKLDGVVCTEIDPK

SEQ ID NO: 91373 - protein, 21 aa, Severe acute respiratory syndrome coronavirus 2
TIKPVTYKLDGVVCTEIDPKL

SEQ ID NO: 91374 - protein, 21 aa, Severe acute respiratory syndrome coronavirus 2
IKPVTYKLDGVVCTEIDPKLD

SEQ ID NO: 91375 - protein, 21 aa, Severe acute respiratory syndrome coronavirus 2
KPVTYKLDGVVCTEIDPKLDN

SEQ ID NO: 91376 - protein, 21 aa, Severe acute respiratory syndrome coronavirus 2
PVTYKLDGVVCTEIDPKLDNY

SEQ ID NO: 91377 - protein, 21 aa, Severe acute respiratory syndrome coronavirus 2
EIDPKLDNYYKKDNSYFTEQP

SEQ ID NO: 91378 - protein, 21 aa, Severe acute respiratory syndrome coronavirus 2
IDPKLDNYYKKDNSYFTEQPI

SEQ ID NO: 91379 - protein, 21 aa, Severe acute respiratory syndrome coronavirus 2
DPKLDNYYKKDNSYFTEQPID

SEQ ID NO: 91380 - protein, 21 aa, Severe acute respiratory syndrome coronavirus 2
PKLDNYYKKDNSYFTEQPIDL

SEQ ID NO: 91381 - protein, 21 aa, Severe acute respiratory syndrome coronavirus 2
KLDNYYKKDNSYFTEQPIDLV

SEQ ID NO: 91382 - protein, 21 aa, Severe acute respiratory syndrome coronavirus 2
LDNYYKKDNSYFTEQPIDLVP

SEQ ID NO: 91383 - protein, 21 aa, Severe acute respiratory syndrome coronavirus 2
DNYYKKDNSYFTEQPIDLVPN

SEQ ID NO: 91384 - protein, 21 aa, Severe acute respiratory syndrome coronavirus 2
NYYKKDNSYFTEQPIDLVPNQ

SEQ ID NO: 91385 - protein, 21 aa, Severe acute respiratory syndrome coronavirus 2
YYKKDNSYFTEQPIDLVPNQP

SEQ ID NO: 91386 - protein, 21 aa, Severe acute respiratory syndrome coronavirus 2
YKKDNSYFTEQPIDLVPNQPY

SEQ ID NO: 91387 - protein, 21 aa, Severe acute respiratory syndrome coronavirus 2
ASFDNFKFVCDNIKFADDLNQ

SEQ ID NO: 91388 - protein, 21 aa, Severe acute respiratory syndrome coronavirus 2
SFDNFKFVCDNIKFADDLNQL

SEQ ID NO: 91389 - protein, 21 aa, Severe acute respiratory syndrome coronavirus 2
FDNFKFVCDNIKFADDLNQLT

SEQ ID NO: 91390 - protein, 21 aa, Severe acute respiratory syndrome coronavirus 2
DNFKFVCDNIKFADDLNQLTG

SEQ ID NO: 91391 - protein, 21 aa, Severe acute respiratory syndrome coronavirus 2
NFKFVCDNIKFADDLNQLTGY

SEQ ID NO: 91392 - protein, 21 aa, Severe acute respiratory syndrome coronavirus 2
FKFVCDNIKFADDLNQLTGYK

SEQ ID NO: 91393 - protein, 21 aa, Severe acute respiratory syndrome coronavirus 2
KFVCDNIKFADDLNQLTGYKK

SEQ ID NO: 91394 - protein, 21 aa, Severe acute respiratory syndrome coronavirus 2
FVCDNIKFADDLNQLTGYKKP

SEQ ID NO: 91395 - protein, 21 aa, Severe acute respiratory syndrome coronavirus 2
VCDNIKFADDLNQLTGYKKPA

SEQ ID NO: 91396 - protein, 21 aa, Severe acute respiratory syndrome coronavirus 2
DLNQLTGYKKPASRELKVTFF

SEQ ID NO: 91397 - protein, 21 aa, Severe acute respiratory syndrome coronavirus 2
LNQLTGYKKPASRELKVTFFP

SEQ ID NO: 91398 - protein, 21 aa, Severe acute respiratory syndrome coronavirus 2
NQLTGYKKPASRELKVTFFPD

SEQ ID NO: 91399 - protein, 21 aa, Severe acute respiratory syndrome coronavirus 2
QLTGYKKPASRELKVTFFPDL

SEQ ID NO: 91400 - protein, 21 aa, Severe acute respiratory syndrome coronavirus 2
LTGYKKPASRELKVTFFPDLN

SEQ ID NO: 91401 - protein, 21 aa, Severe acute respiratory syndrome coronavirus 2
TGYKKPASRELKVTFFPDLNG

SEQ ID NO: 91402 - protein, 21 aa, Severe acute respiratory syndrome coronavirus 2
GYKKPASRELKVTFFPDLNGD

SEQ ID NO: 91403 - protein, 21 aa, Severe acute respiratory syndrome coronavirus 2
YKKPASRELKVTFFPDLNGDV

SEQ ID NO: 91404 - protein, 21 aa, Severe acute respiratory syndrome coronavirus 2
KKPASRELKVTFFPDLNGDVV

SEQ ID NO: 91405 - protein, 21 aa, Severe acute respiratory syndrome coronavirus 2
KPASRELKVTFFPDLNGDVVA

SEQ ID NO: 91406 - protein, 21 aa, Severe acute respiratory syndrome coronavirus 2
PASRELKVTFFPDLNGDVVAI

SEQ ID NO: 91407 - protein, 21 aa, Severe acute respiratory syndrome coronavirus 2
ASRELKVTFFPDLNGDVVAID

SEQ ID NO: 91408 - protein, 21 aa, Severe acute respiratory syndrome coronavirus 2
SRELKVTFFPDLNGDVVAIDY

SEQ ID NO: 91409 - protein, 21 aa, Severe acute respiratory syndrome coronavirus 2
RELKVTFFPDLNGDVVAIDYK

SEQ ID NO: 91410 - protein, 21 aa, Severe acute respiratory syndrome coronavirus 2
ELKVTFFPDLNGDVVAIDYKH

SEQ ID NO: 91411 - protein, 21 aa, Severe acute respiratory syndrome coronavirus 2
LKVTFFPDLNGDVVAIDYKHY

SEQ ID NO: 91412 - protein, 21 aa, Severe acute respiratory syndrome coronavirus 2
KVTFFPDLNGDVVAIDYKHYT

SEQ ID NO: 91413 - protein, 21 aa, Severe acute respiratory syndrome coronavirus 2
VTFFPDLNGDVVAIDYKHYTP

SEQ ID NO: 91414 - protein, 21 aa, Severe acute respiratory syndrome coronavirus 2
TFFPDLNGDVVAIDYKHYTPS

SEQ ID NO: 91415 - protein, 21 aa, Severe acute respiratory syndrome coronavirus 2
QITISSFKWDLTAFGLVAEWF

SEQ ID NO: 91416 - protein, 21 aa, Severe acute respiratory syndrome coronavirus 2
ITISSFKWDLTAFGLVAEWFL

SEQ ID NO: 91417 - protein, 21 aa, Severe acute respiratory syndrome coronavirus 2
TISSFKWDLTAFGLVAEWFLA

SEQ ID NO: 91418 - protein, 21 aa, Severe acute respiratory syndrome coronavirus 2
ISSFKWDLTAFGLVAEWFLAY

SEQ ID NO: 91419 - protein, 21 aa, Severe acute respiratory syndrome coronavirus 2
SSFKWDLTAFGLVAEWFLAYI

SEQ ID NO: 91420 - protein, 21 aa, Severe acute respiratory syndrome coronavirus 2
SFKWDLTAFGLVAEWFLAYIL

SEQ ID NO: 91421 - protein, 21 aa, Severe acute respiratory syndrome coronavirus 2
FKWDLTAFGLVAEWFLAYILF

SEQ ID NO: 91422 - protein, 21 aa, Severe acute respiratory syndrome coronavirus 2
KWDLTAFGLVAEWFLAYILFT

SEQ ID NO: 91423 - protein, 21 aa, Severe acute respiratory syndrome coronavirus 2
WDLTAFGLVAEWFLAYILFTR

SEQ ID NO: 91424 - protein, 21 aa, Severe acute respiratory syndrome coronavirus 2
DLTAFGLVAEWFLAYILFTRF

SEQ ID NO: 91425 - protein, 21 aa, Severe acute respiratory syndrome coronavirus 2
LTAFGLVAEWFLAYILFTRFF

SEQ ID NO: 91426 - protein, 21 aa, Severe acute respiratory syndrome coronavirus 2
TAFGLVAEWFLAYILFTRFFY

SEQ ID NO: 91427 - protein, 21 aa, Severe acute respiratory syndrome coronavirus 2
FGLVAEWFLAYILFTRFFYVL

SEQ ID NO: 91428 - protein, 21 aa, Severe acute respiratory syndrome coronavirus 2
GLVAEWFLAYILFTRFFYVLG

SEQ ID NO: 91429 - protein, 21 aa, Severe acute respiratory syndrome coronavirus 2
LVAEWFLAYILFTRFFYVLGL

SEQ ID NO: 91430 - protein, 21 aa, Severe acute respiratory syndrome coronavirus 2
VAEWFLAYILFTRFFYVLGLA

SEQ ID NO: 91431 - protein, 21 aa, Severe acute respiratory syndrome coronavirus 2
AEWFLAYILFTRFFYVLGLAA

SEQ ID NO: 91432 - protein, 21 aa, Severe acute respiratory syndrome coronavirus 2
EWFLAYILFTRFFYVLGLAAI

SEQ ID NO: 91433 - protein, 21 aa, Severe acute respiratory syndrome coronavirus 2
WFLAYILFTRFFYVLGLAAIM

SEQ ID NO: 91434 - protein, 21 aa, Severe acute respiratory syndrome coronavirus 2
FLAYILFTRFFYVLGLAAIMQ

SEQ ID NO: 91435 - protein, 21 aa, Severe acute respiratory syndrome coronavirus 2
FFSYFAVHFISNSWLMWLIIN

SEQ ID NO: 91436 - protein, 21 aa, Severe acute respiratory syndrome coronavirus 2
FSYFAVHFISNSWLMWLIINL

SEQ ID NO: 91437 - protein, 21 aa, Severe acute respiratory syndrome coronavirus 2
SYFAVHFISNSWLMWLIINLV

SEQ ID NO: 91438 - protein, 21 aa, Severe acute respiratory syndrome coronavirus 2
YFAVHFISNSWLMWLIINLVQ

SEQ ID NO: 91439 - protein, 21 aa, Severe acute respiratory syndrome coronavirus 2
FAVHFISNSWLMWLIINLVQM

SEQ ID NO: 91440 - protein, 21 aa, Severe acute respiratory syndrome coronavirus 2
AVHFISNSWLMWLIINLVQMA

SEQ ID NO: 91441 - protein, 21 aa, Severe acute respiratory syndrome coronavirus 2
AMVRMYIFFASFYYVWKSYVH

SEQ ID NO: 91442 - protein, 21 aa, Severe acute respiratory syndrome coronavirus 2
MVRMYIFFASFYYVWKSYVHV

SEQ ID NO: 91443 - protein, 21 aa, Severe acute respiratory syndrome coronavirus 2
VRMYIFFASFYYVWKSYVHVV

SEQ ID NO: 91444 - protein, 21 aa, Severe acute respiratory syndrome coronavirus 2
RMYIFFASFYYVWKSYVHVVD

SEQ ID NO: 91445 - protein, 21 aa, Severe acute respiratory syndrome coronavirus 2
SSTCMMCYKRNRATRVECTTI

SEQ ID NO: 91446 - protein, 21 aa, Severe acute respiratory syndrome coronavirus 2
STCMMCYKRNRATRVECTTIV

SEQ ID NO: 91447 - protein, 21 aa, Severe acute respiratory syndrome coronavirus 2
TCMMCYKRNRATRVECTTIVN

SEQ ID NO: 91448 - protein, 21 aa, Severe acute respiratory syndrome coronavirus 2
CMMCYKRNRATRVECTTIVNG

SEQ ID NO: 91449 - protein, 21 aa, Severe acute respiratory syndrome coronavirus 2
MMCYKRNRATRVECTTIVNGV

SEQ ID NO: 91450 - protein, 21 aa, Severe acute respiratory syndrome coronavirus 2
MCYKRNRATRVECTTIVNGVR

SEQ ID NO: 91451 - protein, 21 aa, Severe acute respiratory syndrome coronavirus 2
SFYVYANGGKGFCKLHNWNCV

SEQ ID NO: 91452 - protein, 21 aa, Severe acute respiratory syndrome coronavirus 2
FYVYANGGKGFCKLHNWNCVN

SEQ ID NO: 91453 - protein, 21 aa, Severe acute respiratory syndrome coronavirus 2
YVYANGGKGFCKLHNWNCVNC

SEQ ID NO: 91454 - protein, 21 aa, Severe acute respiratory syndrome coronavirus 2
VYANGGKGFCKLHNWNCVNCD

SEQ ID NO: 91455 - protein, 21 aa, Severe acute respiratory syndrome coronavirus 2
YANGGKGFCKLHNWNCVNCDT

SEQ ID NO: 91456 - protein, 21 aa, Severe acute respiratory syndrome coronavirus 2
ANGGKGFCKLHNWNCVNCDTF

SEQ ID NO: 91457 - protein, 21 aa, Severe acute respiratory syndrome coronavirus 2
LHNWNCVNCDTFCAGSTFISD

SEQ ID NO: 91458 - protein, 21 aa, Severe acute respiratory syndrome coronavirus 2
HNWNCVNCDTFCAGSTFISDE

SEQ ID NO: 91459 - protein, 21 aa, Severe acute respiratory syndrome coronavirus 2
NWNCVNCDTFCAGSTFISDEV

SEQ ID NO: 91460 - protein, 21 aa, Severe acute respiratory syndrome coronavirus 2
WNCVNCDTFCAGSTFISDEVA

SEQ ID NO: 91461 - protein, 21 aa, Severe acute respiratory syndrome coronavirus 2
NCVNCDTFCAGSTFISDEVAR

SEQ ID NO: 91462 - protein, 21 aa, Severe acute respiratory syndrome coronavirus 2
CVNCDTFCAGSTFISDEVARD

SEQ ID NO: 91463 - protein, 21 aa, Severe acute respiratory syndrome coronavirus 2
VNCDTFCAGSTFISDEVARDL

SEQ ID NO: 91464 - protein, 21 aa, Severe acute respiratory syndrome coronavirus 2
NCDTFCAGSTFISDEVARDLS

SEQ ID NO: 91465 - protein, 21 aa, Severe acute respiratory syndrome coronavirus 2
CDTFCAGSTFISDEVARDLSL

SEQ ID NO: 91466 - protein, 21 aa, Severe acute respiratory syndrome coronavirus 2
DTFCAGSTFISDEVARDLSLQ

SEQ ID NO: 91467 - protein, 21 aa, Severe acute respiratory syndrome coronavirus 2
TFCAGSTFISDEVARDLSLQF

SEQ ID NO: 91468 - protein, 21 aa, Severe acute respiratory syndrome coronavirus 2
FCAGSTFISDEVARDLSLQFK

SEQ ID NO: 91469 - protein, 21 aa, Severe acute respiratory syndrome coronavirus 2
CAGSTFISDEVARDLSLQFKR

SEQ ID NO: 91470 - protein, 21 aa, Severe acute respiratory syndrome coronavirus 2
AGSTFISDEVARDLSLQFKRP

SEQ ID NO: 91471 - protein, 21 aa, Severe acute respiratory syndrome coronavirus 2
GSTFISDEVARDLSLQFKRPI

SEQ ID NO: 91472 - protein, 21 aa, Severe acute respiratory syndrome coronavirus 2
SASVYYSQLMCQPILLLDQAL

SEQ ID NO: 91473 - protein, 21 aa, Severe acute respiratory syndrome coronavirus 2
ASVYYSQLMCQPILLLDQALV

SEQ ID NO: 91474 - protein, 21 aa, Severe acute respiratory syndrome coronavirus 2
SVYYSQLMCQPILLLDQALVS

SEQ ID NO: 91475 - protein, 21 aa, Severe acute respiratory syndrome coronavirus 2
VYYSQLMCQPILLLDQALVSD

SEQ ID NO: 91476 - protein, 21 aa, Severe acute respiratory syndrome coronavirus 2
LDNVLSTFISAARQGFVDSDV

SEQ ID NO: 91477 - protein, 21 aa, Severe acute respiratory syndrome coronavirus 2
DNVLSTFISAARQGFVDSDVE

SEQ ID NO: 91478 - protein, 21 aa, Severe acute respiratory syndrome coronavirus 2
NVLSTFISAARQGFVDSDVET

SEQ ID NO: 91479 - protein, 21 aa, Severe acute respiratory syndrome coronavirus 2
VLSTFISAARQGFVDSDVETK

SEQ ID NO: 91480 - protein, 21 aa, Severe acute respiratory syndrome coronavirus 2
LSTFISAARQGFVDSDVETKD

SEQ ID NO: 91481 - protein, 21 aa, Severe acute respiratory syndrome coronavirus 2
STFISAARQGFVDSDVETKDV

SEQ ID NO: 91482 - protein, 21 aa, Severe acute respiratory syndrome coronavirus 2
TFISAARQGFVDSDVETKDVV

SEQ ID NO: 91483 - protein, 21 aa, Severe acute respiratory syndrome coronavirus 2
FISAARQGFVDSDVETKDVVE

SEQ ID NO: 91484 - protein, 21 aa, Severe acute respiratory syndrome coronavirus 2
SDVETKDVVECLKLSHQSDIE

SEQ ID NO: 91485 - protein, 21 aa, Severe acute respiratory syndrome coronavirus 2
DVETKDVVECLKLSHQSDIEV

SEQ ID NO: 91486 - protein, 21 aa, Severe acute respiratory syndrome coronavirus 2
VETKDVVECLKLSHQSDIEVT

SEQ ID NO: 91487 - protein, 21 aa, Severe acute respiratory syndrome coronavirus 2
ETKDVVECLKLSHQSDIEVTG

SEQ ID NO: 91488 - protein, 21 aa, Severe acute respiratory syndrome coronavirus 2
TKDVVECLKLSHQSDIEVTGD

SEQ ID NO: 91489 - protein, 21 aa, Severe acute respiratory syndrome coronavirus 2
KDVVECLKLSHQSDIEVTGDS

SEQ ID NO: 91490 - protein, 21 aa, Severe acute respiratory syndrome coronavirus 2
SLSEQLRKQIRSAAKKNNLPF

SEQ ID NO: 91491 - protein, 21 aa, Severe acute respiratory syndrome coronavirus 2
LSEQLRKQIRSAAKKNNLPFK

SEQ ID NO: 91492 - protein, 21 aa, Severe acute respiratory syndrome coronavirus 2
SEQLRKQIRSAAKKNNLPFKL

SEQ ID NO: 91493 - protein, 21 aa, Severe acute respiratory syndrome coronavirus 2
EQLRKQIRSAAKKNNLPFKLT

SEQ ID NO: 91494 - protein, 21 aa, Severe acute respiratory syndrome coronavirus 2
QLRKQIRSAAKKNNLPFKLTC

SEQ ID NO: 91495 - protein, 21 aa, Severe acute respiratory syndrome coronavirus 2
QIRSAAKKNNLPFKLTCATTR

SEQ ID NO: 91496 - protein, 21 aa, Severe acute respiratory syndrome coronavirus 2
IRSAAKKNNLPFKLTCATTRQ

SEQ ID NO: 91497 - protein, 21 aa, Severe acute respiratory syndrome coronavirus 2
RSAAKKNNLPFKLTCATTRQV

SEQ ID NO: 91498 - protein, 21 aa, Severe acute respiratory syndrome coronavirus 2
SAAKKNNLPFKLTCATTRQVV

SEQ ID NO: 91499 - protein, 21 aa, Severe acute respiratory syndrome coronavirus 2
AAKKNNLPFKLTCATTRQVVN

SEQ ID NO: 91500 - protein, 21 aa, Severe acute respiratory syndrome coronavirus 2
AKKNNLPFKLTCATTRQVVNV

SEQ ID NO: 91501 - protein, 21 aa, Severe acute respiratory syndrome coronavirus 2
KKNNLPFKLTCATTRQVVNVV

SEQ ID NO: 91502 - protein, 21 aa, Severe acute respiratory syndrome coronavirus 2
KNNLPFKLTCATTRQVVNVVT

SEQ ID NO: 91503 - protein, 21 aa, Severe acute respiratory syndrome coronavirus 2
NNLPFKLTCATTRQVVNVVTT

SEQ ID NO: 91504 - protein, 21 aa, Severe acute respiratory syndrome coronavirus 2
NLPFKLTCATTRQVVNVVTTK

SEQ ID NO: 91505 - protein, 21 aa, Severe acute respiratory syndrome coronavirus 2
LPFKLTCATTRQVVNVVTTKI

SEQ ID NO: 91506 - protein, 21 aa, Severe acute respiratory syndrome coronavirus 2
PFKLTCATTRQVVNVVTTKIA

SEQ ID NO: 91507 - protein, 21 aa, Severe acute respiratory syndrome coronavirus 2
FKLTCATTRQVVNVVTTKIAL

SEQ ID NO: 91508 - protein, 21 aa, Severe acute respiratory syndrome coronavirus 2
KLTCATTRQVVNVVTTKIALK

SEQ ID NO: 91509 - protein, 21 aa, Severe acute respiratory syndrome coronavirus 2
LTCATTRQVVNVVTTKIALKG

SEQ ID NO: 91510 - protein, 21 aa, Severe acute respiratory syndrome coronavirus 2
TCATTRQVVNVVTTKIALKGG

SEQ ID NO: 91511 - protein, 21 aa, Severe acute respiratory syndrome coronavirus 2
TWFSQRGGSYTNDKACPLIAA

SEQ ID NO: 91512 - protein, 21 aa, Severe acute respiratory syndrome coronavirus 2
WFSQRGGSYTNDKACPLIAAV

SEQ ID NO: 91513 - protein, 21 aa, Severe acute respiratory syndrome coronavirus 2
FSQRGGSYTNDKACPLIAAVI

SEQ ID NO: 91514 - protein, 21 aa, Severe acute respiratory syndrome coronavirus 2
SQRGGSYTNDKACPLIAAVIT

SEQ ID NO: 91515 - protein, 21 aa, Severe acute respiratory syndrome coronavirus 2
QRGGSYTNDKACPLIAAVITR

SEQ ID NO: 91516 - protein, 21 aa, Severe acute respiratory syndrome coronavirus 2
RGGSYTNDKACPLIAAVITRE

SEQ ID NO: 91517 - protein, 21 aa, Severe acute respiratory syndrome coronavirus 2
TTNGDFLHFLPRVFSAVGNIC

SEQ ID NO: 91518 - protein, 21 aa, Severe acute respiratory syndrome coronavirus 2
TNGDFLHFLPRVFSAVGNICY

SEQ ID NO: 91519 - protein, 21 aa, Severe acute respiratory syndrome coronavirus 2
NGDFLHFLPRVFSAVGNICYT

SEQ ID NO: 91520 - protein, 21 aa, Severe acute respiratory syndrome coronavirus 2
GDFLHFLPRVFSAVGNICYTP

SEQ ID NO: 91521 - protein, 21 aa, Severe acute respiratory syndrome coronavirus 2
ATSACVLAAECTIFKDASGKP

SEQ ID NO: 91522 - protein, 21 aa, Severe acute respiratory syndrome coronavirus 2
TSACVLAAECTIFKDASGKPV

SEQ ID NO: 91523 - protein, 21 aa, Severe acute respiratory syndrome coronavirus 2
SACVLAAECTIFKDASGKPVP

SEQ ID NO: 91524 - protein, 21 aa, Severe acute respiratory syndrome coronavirus 2
ACVLAAECTIFKDASGKPVPY

SEQ ID NO: 91525 - protein, 21 aa, Severe acute respiratory syndrome coronavirus 2
CVLAAECTIFKDASGKPVPYC

SEQ ID NO: 91526 - protein, 21 aa, Severe acute respiratory syndrome coronavirus 2
VLAAECTIFKDASGKPVPYCY

SEQ ID NO: 91527 - protein, 21 aa, Severe acute respiratory syndrome coronavirus 2
KDASGKPVPYCYDTNVLEGSV

SEQ ID NO: 91528 - protein, 21 aa, Severe acute respiratory syndrome coronavirus 2
DASGKPVPYCYDTNVLEGSVA

SEQ ID NO: 91529 - protein, 21 aa, Severe acute respiratory syndrome coronavirus 2
ASGKPVPYCYDTNVLEGSVAY

SEQ ID NO: 91530 - protein, 21 aa, Severe acute respiratory syndrome coronavirus 2
SGKPVPYCYDTNVLEGSVAYE

SEQ ID NO: 91531 - protein, 21 aa, Severe acute respiratory syndrome coronavirus 2
GKPVPYCYDTNVLEGSVAYES

SEQ ID NO: 91532 - protein, 21 aa, Severe acute respiratory syndrome coronavirus 2
KPVPYCYDTNVLEGSVAYESL

SEQ ID NO: 91533 - protein, 21 aa, Severe acute respiratory syndrome coronavirus 2
PVPYCYDTNVLEGSVAYESLR

SEQ ID NO: 91534 - protein, 21 aa, Severe acute respiratory syndrome coronavirus 2
VPYCYDTNVLEGSVAYESLRP

SEQ ID NO: 91535 - protein, 21 aa, Severe acute respiratory syndrome coronavirus 2
PYCYDTNVLEGSVAYESLRPD

SEQ ID NO: 91536 - protein, 21 aa, Severe acute respiratory syndrome coronavirus 2
YCYDTNVLEGSVAYESLRPDT

SEQ ID NO: 91537 - protein, 21 aa, Severe acute respiratory syndrome coronavirus 2
CYDTNVLEGSVAYESLRPDTR

SEQ ID NO: 91538 - protein, 21 aa, Severe acute respiratory syndrome coronavirus 2
YDTNVLEGSVAYESLRPDTRY

SEQ ID NO: 91539 - protein, 21 aa, Severe acute respiratory syndrome coronavirus 2
DTNVLEGSVAYESLRPDTRYV

SEQ ID NO: 91540 - protein, 21 aa, Severe acute respiratory syndrome coronavirus 2
TNVLEGSVAYESLRPDTRYVL

SEQ ID NO: 91541 - protein, 21 aa, Severe acute respiratory syndrome coronavirus 2
NVLEGSVAYESLRPDTRYVLM

SEQ ID NO: 91542 - protein, 21 aa, Severe acute respiratory syndrome coronavirus 2
VLEGSVAYESLRPDTRYVLMD

SEQ ID NO: 91543 - protein, 21 aa, Severe acute respiratory syndrome coronavirus 2
GVCVSTSGRWVLNNDYYRSLP

SEQ ID NO: 91544 - protein, 21 aa, Severe acute respiratory syndrome coronavirus 2
VCVSTSGRWVLNNDYYRSLPG

SEQ ID NO: 91545 - protein, 21 aa, Severe acute respiratory syndrome coronavirus 2
CVSTSGRWVLNNDYYRSLPGV

SEQ ID NO: 91546 - protein, 21 aa, Severe acute respiratory syndrome coronavirus 2
VSTSGRWVLNNDYYRSLPGVF

SEQ ID NO: 91547 - protein, 21 aa, Severe acute respiratory syndrome coronavirus 2
STSGRWVLNNDYYRSLPGVFC

SEQ ID NO: 91548 - protein, 21 aa, Severe acute respiratory syndrome coronavirus 2
TSGRWVLNNDYYRSLPGVFCG

SEQ ID NO: 91549 - protein, 21 aa, Severe acute respiratory syndrome coronavirus 2
SGRWVLNNDYYRSLPGVFCGV

SEQ ID NO: 91550 - protein, 21 aa, Severe acute respiratory syndrome coronavirus 2
GRWVLNNDYYRSLPGVFCGVD

SEQ ID NO: 91551 - protein, 21 aa, Severe acute respiratory syndrome coronavirus 2
FLPGVYSVIYLYLTFYLTNDV

SEQ ID NO: 91552 - protein, 21 aa, Severe acute respiratory syndrome coronavirus 2
LPGVYSVIYLYLTFYLTNDVS

SEQ ID NO: 91553 - protein, 21 aa, Severe acute respiratory syndrome coronavirus 2
PGVYSVIYLYLTFYLTNDVSF

SEQ ID NO: 91554 - protein, 21 aa, Severe acute respiratory syndrome coronavirus 2
GVYSVIYLYLTFYLTNDVSFL

SEQ ID NO: 91555 - protein, 21 aa, Severe acute respiratory syndrome coronavirus 2
YLYLTFYLTNDVSFLAHIQWM

SEQ ID NO: 91556 - protein, 21 aa, Severe acute respiratory syndrome coronavirus 2
LYLTFYLTNDVSFLAHIQWMV

SEQ ID NO: 91557 - protein, 21 aa, Severe acute respiratory syndrome coronavirus 2
YLTFYLTNDVSFLAHIQWMVM

SEQ ID NO: 91558 - protein, 21 aa, Severe acute respiratory syndrome coronavirus 2
YIICISTKHFYWFFSNYLKRR

SEQ ID NO: 91559 - protein, 21 aa, Severe acute respiratory syndrome coronavirus 2
IICISTKHFYWFFSNYLKRRV

SEQ ID NO: 91560 - protein, 21 aa, Severe acute respiratory syndrome coronavirus 2
ICISTKHFYWFFSNYLKRRVV

SEQ ID NO: 91561 - protein, 21 aa, Severe acute respiratory syndrome coronavirus 2
CISTKHFYWFFSNYLKRRVVF

SEQ ID NO: 91562 - protein, 21 aa, Severe acute respiratory syndrome coronavirus 2
ISTKHFYWFFSNYLKRRVVFN

SEQ ID NO: 91563 - protein, 21 aa, Severe acute respiratory syndrome coronavirus 2
STKHFYWFFSNYLKRRVVFNG

SEQ ID NO: 91564 - protein, 21 aa, Severe acute respiratory syndrome coronavirus 2
TKHFYWFFSNYLKRRVVFNGV

SEQ ID NO: 91565 - protein, 21 aa, Severe acute respiratory syndrome coronavirus 2
KHFYWFFSNYLKRRVVFNGVS

SEQ ID NO: 91566 - protein, 21 aa, Severe acute respiratory syndrome coronavirus 2
HFYWFFSNYLKRRVVFNGVSF

SEQ ID NO: 91567 - protein, 21 aa, Severe acute respiratory syndrome coronavirus 2
FYWFFSNYLKRRVVFNGVSFS

SEQ ID NO: 91568 - protein, 21 aa, Severe acute respiratory syndrome coronavirus 2
YWFFSNYLKRRVVFNGVSFST

SEQ ID NO: 91569 - protein, 21 aa, Severe acute respiratory syndrome coronavirus 2
WFFSNYLKRRVVFNGVSFSTF

SEQ ID NO: 91570 - protein, 21 aa, Severe acute respiratory syndrome coronavirus 2
FFSNYLKRRVVFNGVSFSTFE

SEQ ID NO: 91571 - protein, 21 aa, Severe acute respiratory syndrome coronavirus 2
FSNYLKRRVVFNGVSFSTFEE

SEQ ID NO: 91572 - protein, 21 aa, Severe acute respiratory syndrome coronavirus 2
SNYLKRRVVFNGVSFSTFEEA

SEQ ID NO: 91573 - protein, 21 aa, Severe acute respiratory syndrome coronavirus 2
NYLKRRVVFNGVSFSTFEEAA

SEQ ID NO: 91574 - protein, 21 aa, Severe acute respiratory syndrome coronavirus 2
YLKRRVVFNGVSFSTFEEAAL

SEQ ID NO: 91575 - protein, 21 aa, Severe acute respiratory syndrome coronavirus 2
LKRRVVFNGVSFSTFEEAALC

SEQ ID NO: 91576 - protein, 21 aa, Severe acute respiratory syndrome coronavirus 2
KRRVVFNGVSFSTFEEAALCT

SEQ ID NO: 91577 - protein, 21 aa, Severe acute respiratory syndrome coronavirus 2
RRVVFNGVSFSTFEEAALCTF

SEQ ID NO: 91578 - protein, 21 aa, Severe acute respiratory syndrome coronavirus 2
RVVFNGVSFSTFEEAALCTFL

SEQ ID NO: 91579 - protein, 21 aa, Severe acute respiratory syndrome coronavirus 2
VVFNGVSFSTFEEAALCTFLL

SEQ ID NO: 91580 - protein, 21 aa, Severe acute respiratory syndrome coronavirus 2
VFNGVSFSTFEEAALCTFLLN

SEQ ID NO: 91581 - protein, 21 aa, Severe acute respiratory syndrome coronavirus 2
FNGVSFSTFEEAALCTFLLNK

SEQ ID NO: 91582 - protein, 21 aa, Severe acute respiratory syndrome coronavirus 2
NGVSFSTFEEAALCTFLLNKE

SEQ ID NO: 91583 - protein, 21 aa, Severe acute respiratory syndrome coronavirus 2
GVSFSTFEEAALCTFLLNKEM

SEQ ID NO: 91584 - protein, 21 aa, Severe acute respiratory syndrome coronavirus 2
VSFSTFEEAALCTFLLNKEMY

SEQ ID NO: 91585 - protein, 21 aa, Severe acute respiratory syndrome coronavirus 2
SFSTFEEAALCTFLLNKEMYL

SEQ ID NO: 91586 - protein, 21 aa, Severe acute respiratory syndrome coronavirus 2
FSTFEEAALCTFLLNKEMYLK

SEQ ID NO: 91587 - protein, 21 aa, Severe acute respiratory syndrome coronavirus 2
STFEEAALCTFLLNKEMYLKL

SEQ ID NO: 91588 - protein, 21 aa, Severe acute respiratory syndrome coronavirus 2
TFEEAALCTFLLNKEMYLKLR

SEQ ID NO: 91589 - protein, 21 aa, Severe acute respiratory syndrome coronavirus 2
FEEAALCTFLLNKEMYLKLRS

SEQ ID NO: 91590 - protein, 21 aa, Severe acute respiratory syndrome coronavirus 2
EEAALCTFLLNKEMYLKLRSD

SEQ ID NO: 91591 - protein, 21 aa, Severe acute respiratory syndrome coronavirus 2
EAALCTFLLNKEMYLKLRSDV

SEQ ID NO: 91592 - protein, 21 aa, Severe acute respiratory syndrome coronavirus 2
AALCTFLLNKEMYLKLRSDVL

SEQ ID NO: 91593 - protein, 21 aa, Severe acute respiratory syndrome coronavirus 2
ALCTFLLNKEMYLKLRSDVLL

SEQ ID NO: 91594 - protein, 21 aa, Severe acute respiratory syndrome coronavirus 2
LCTFLLNKEMYLKLRSDVLLP

SEQ ID NO: 91595 - protein, 21 aa, Severe acute respiratory syndrome coronavirus 2
LAKALNDFSNSGSDVLYQPPQ

SEQ ID NO: 91596 - protein, 21 aa, Severe acute respiratory syndrome coronavirus 2
CMVQVTCGTTTLNGLWLDDVV

SEQ ID NO: 91597 - protein, 21 aa, Severe acute respiratory syndrome coronavirus 2
MVQVTCGTTTLNGLWLDDVVY

SEQ ID NO: 91598 - protein, 21 aa, Severe acute respiratory syndrome coronavirus 2
VQVTCGTTTLNGLWLDDVVYC

SEQ ID NO: 91599 - protein, 21 aa, Severe acute respiratory syndrome coronavirus 2
QVTCGTTTLNGLWLDDVVYCP

SEQ ID NO: 91600 - protein, 21 aa, Severe acute respiratory syndrome coronavirus 2
VTCGTTTLNGLWLDDVVYCPR

SEQ ID NO: 91601 - protein, 21 aa, Severe acute respiratory syndrome coronavirus 2
TCGTTTLNGLWLDDVVYCPRH

SEQ ID NO: 91602 - protein, 21 aa, Severe acute respiratory syndrome coronavirus 2
CGTTTLNGLWLDDVVYCPRHV

SEQ ID NO: 91603 - protein, 21 aa, Severe acute respiratory syndrome coronavirus 2
GTTTLNGLWLDDVVYCPRHVI

SEQ ID NO: 91604 - protein, 21 aa, Severe acute respiratory syndrome coronavirus 2
TTTLNGLWLDDVVYCPRHVIC

SEQ ID NO: 91605 - protein, 21 aa, Severe acute respiratory syndrome coronavirus 2
SFCYMHHMELPTGVHAGTDLE

SEQ ID NO: 91606 - protein, 21 aa, Severe acute respiratory syndrome coronavirus 2
FCYMHHMELPTGVHAGTDLEG

SEQ ID NO: 91607 - protein, 21 aa, Severe acute respiratory syndrome coronavirus 2
TITVNVLAWLYAAVINGDRWF

SEQ ID NO: 91608 - protein, 21 aa, Severe acute respiratory syndrome coronavirus 2
TILGSALLEDEFTPFDVVRQC

SEQ ID NO: 91609 - protein, 21 aa, Severe acute respiratory syndrome coronavirus 2
ILGSALLEDEFTPFDVVRQCS

SEQ ID NO: 91610 - protein, 21 aa, Severe acute respiratory syndrome coronavirus 2
LGSALLEDEFTPFDVVRQCSG

SEQ ID NO: 91611 - protein, 21 aa, Severe acute respiratory syndrome coronavirus 2
GSALLEDEFTPFDVVRQCSGV

SEQ ID NO: 91612 - protein, 21 aa, Severe acute respiratory syndrome coronavirus 2
LLEDEFTPFDVVRQCSGVTFQ

SEQ ID NO: 91613 - protein, 21 aa, Severe acute respiratory syndrome coronavirus 2
SAVKRTIKGTHHWLLLTILTS

SEQ ID NO: 91614 - protein, 21 aa, Severe acute respiratory syndrome coronavirus 2
AVKRTIKGTHHWLLLTILTSL

SEQ ID NO: 91615 - protein, 21 aa, Severe acute respiratory syndrome coronavirus 2
VKRTIKGTHHWLLLTILTSLL

SEQ ID NO: 91616 - protein, 21 aa, Severe acute respiratory syndrome coronavirus 2
KRTIKGTHHWLLLTILTSLLV

SEQ ID NO: 91617 - protein, 21 aa, Severe acute respiratory syndrome coronavirus 2
RTIKGTHHWLLLTILTSLLVL

SEQ ID NO: 91618 - protein, 21 aa, Severe acute respiratory syndrome coronavirus 2
TIKGTHHWLLLTILTSLLVLV

SEQ ID NO: 91619 - protein, 21 aa, Severe acute respiratory syndrome coronavirus 2
IKGTHHWLLLTILTSLLVLVQ

SEQ ID NO: 91620 - protein, 21 aa, Severe acute respiratory syndrome coronavirus 2
KGTHHWLLLTILTSLLVLVQS

SEQ ID NO: 91621 - protein, 21 aa, Severe acute respiratory syndrome coronavirus 2
GTHHWLLLTILTSLLVLVQST

SEQ ID NO: 91622 - protein, 21 aa, Severe acute respiratory syndrome coronavirus 2
THHWLLLTILTSLLVLVQSTQ

SEQ ID NO: 91623 - protein, 21 aa, Severe acute respiratory syndrome coronavirus 2
HHWLLLTILTSLLVLVQSTQW

SEQ ID NO: 91624 - protein, 21 aa, Severe acute respiratory syndrome coronavirus 2
HWLLLTILTSLLVLVQSTQWS

SEQ ID NO: 91625 - protein, 21 aa, Severe acute respiratory syndrome coronavirus 2
WLLLTILTSLLVLVQSTQWSL

SEQ ID NO: 91626 - protein, 21 aa, Severe acute respiratory syndrome coronavirus 2
LLLTILTSLLVLVQSTQWSLF

SEQ ID NO: 91627 - protein, 21 aa, Severe acute respiratory syndrome coronavirus 2
MGIIAMSAFAMMFVKHKHAFL

SEQ ID NO: 91628 - protein, 21 aa, Severe acute respiratory syndrome coronavirus 2
GIIAMSAFAMMFVKHKHAFLC

SEQ ID NO: 91629 - protein, 21 aa, Severe acute respiratory syndrome coronavirus 2
IIAMSAFAMMFVKHKHAFLCL

SEQ ID NO: 91630 - protein, 21 aa, Severe acute respiratory syndrome coronavirus 2
IAMSAFAMMFVKHKHAFLCLF

SEQ ID NO: 91631 - protein, 21 aa, Severe acute respiratory syndrome coronavirus 2
AMSAFAMMFVKHKHAFLCLFL

SEQ ID NO: 91632 - protein, 21 aa, Severe acute respiratory syndrome coronavirus 2
MSAFAMMFVKHKHAFLCLFLL

SEQ ID NO: 91633 - protein, 21 aa, Severe acute respiratory syndrome coronavirus 2
SAFAMMFVKHKHAFLCLFLLP

SEQ ID NO: 91634 - protein, 21 aa, Severe acute respiratory syndrome coronavirus 2
AFAMMFVKHKHAFLCLFLLPS

SEQ ID NO: 91635 - protein, 21 aa, Severe acute respiratory syndrome coronavirus 2
TVAYFNMVYMPASWVMRIMTW

SEQ ID NO: 91636 - protein, 21 aa, Severe acute respiratory syndrome coronavirus 2
VAYFNMVYMPASWVMRIMTWL

SEQ ID NO: 91637 - protein, 21 aa, Severe acute respiratory syndrome coronavirus 2
MVDTSLSGFKLKDCVMYASAV

SEQ ID NO: 91638 - protein, 21 aa, Severe acute respiratory syndrome coronavirus 2
VDTSLSGFKLKDCVMYASAVV

SEQ ID NO: 91639 - protein, 21 aa, Severe acute respiratory syndrome coronavirus 2
DTSLSGFKLKDCVMYASAVVL

SEQ ID NO: 91640 - protein, 21 aa, Severe acute respiratory syndrome coronavirus 2
TSLSGFKLKDCVMYASAVVLL

SEQ ID NO: 91641 - protein, 21 aa, Severe acute respiratory syndrome coronavirus 2
SLSGFKLKDCVMYASAVVLLI

SEQ ID NO: 91642 - protein, 21 aa, Severe acute respiratory syndrome coronavirus 2
LSGFKLKDCVMYASAVVLLIL

SEQ ID NO: 91643 - protein, 21 aa, Severe acute respiratory syndrome coronavirus 2
SGFKLKDCVMYASAVVLLILM

SEQ ID NO: 91644 - protein, 21 aa, Severe acute respiratory syndrome coronavirus 2
GFKLKDCVMYASAVVLLILMT

SEQ ID NO: 91645 - protein, 21 aa, Severe acute respiratory syndrome coronavirus 2
CIMLVYCFLGYFCTCYFGLFC

SEQ ID NO: 91646 - protein, 21 aa, Severe acute respiratory syndrome coronavirus 2
IMLVYCFLGYFCTCYFGLFCL

SEQ ID NO: 91647 - protein, 21 aa, Severe acute respiratory syndrome coronavirus 2
CYFGLFCLLNRYFRLTLGVYD

SEQ ID NO: 91648 - protein, 21 aa, Severe acute respiratory syndrome coronavirus 2
YFGLFCLLNRYFRLTLGVYDY

SEQ ID NO: 91649 - protein, 21 aa, Severe acute respiratory syndrome coronavirus 2
FGLFCLLNRYFRLTLGVYDYL

SEQ ID NO: 91650 - protein, 21 aa, Severe acute respiratory syndrome coronavirus 2
NRYFRLTLGVYDYLVSTQEFR

SEQ ID NO: 91651 - protein, 21 aa, Severe acute respiratory syndrome coronavirus 2
RYFRLTLGVYDYLVSTQEFRY

SEQ ID NO: 91652 - protein, 21 aa, Severe acute respiratory syndrome coronavirus 2
YFRLTLGVYDYLVSTQEFRYM

SEQ ID NO: 91653 - protein, 21 aa, Severe acute respiratory syndrome coronavirus 2
FRLTLGVYDYLVSTQEFRYMN

SEQ ID NO: 91654 - protein, 21 aa, Severe acute respiratory syndrome coronavirus 2
RLTLGVYDYLVSTQEFRYMNS

SEQ ID NO: 91655 - protein, 21 aa, Severe acute respiratory syndrome coronavirus 2
LTLGVYDYLVSTQEFRYMNSQ

SEQ ID NO: 91656 - protein, 21 aa, Severe acute respiratory syndrome coronavirus 2
TLGVYDYLVSTQEFRYMNSQG

SEQ ID NO: 91657 - protein, 21 aa, Severe acute respiratory syndrome coronavirus 2
LGVYDYLVSTQEFRYMNSQGL

SEQ ID NO: 91658 - protein, 21 aa, Severe acute respiratory syndrome coronavirus 2
SKMSDVKCTSVVLLSVLQQLR

SEQ ID NO: 91659 - protein, 21 aa, Severe acute respiratory syndrome coronavirus 2
KMSDVKCTSVVLLSVLQQLRV

SEQ ID NO: 91660 - protein, 21 aa, Severe acute respiratory syndrome coronavirus 2
MSDVKCTSVVLLSVLQQLRVE

SEQ ID NO: 91661 - protein, 21 aa, Severe acute respiratory syndrome coronavirus 2
SDVKCTSVVLLSVLQQLRVES

SEQ ID NO: 91662 - protein, 21 aa, Severe acute respiratory syndrome coronavirus 2
VQLHNDILLAKDTTEAFEKMV

SEQ ID NO: 91663 - protein, 21 aa, Severe acute respiratory syndrome coronavirus 2
QLHNDILLAKDTTEAFEKMVS

SEQ ID NO: 91664 - protein, 21 aa, Severe acute respiratory syndrome coronavirus 2
LHNDILLAKDTTEAFEKMVSL

SEQ ID NO: 91665 - protein, 21 aa, Severe acute respiratory syndrome coronavirus 2
HNDILLAKDTTEAFEKMVSLL

SEQ ID NO: 91666 - protein, 21 aa, Severe acute respiratory syndrome coronavirus 2
NDILLAKDTTEAFEKMVSLLS

SEQ ID NO: 91667 - protein, 21 aa, Severe acute respiratory syndrome coronavirus 2
LLSMQGAVDINKLCEEMLDNR

SEQ ID NO: 91668 - protein, 21 aa, Severe acute respiratory syndrome coronavirus 2
LSMQGAVDINKLCEEMLDNRA

SEQ ID NO: 91669 - protein, 21 aa, Severe acute respiratory syndrome coronavirus 2
SMQGAVDINKLCEEMLDNRAT

SEQ ID NO: 91670 - protein, 21 aa, Severe acute respiratory syndrome coronavirus 2
MQGAVDINKLCEEMLDNRATL

SEQ ID NO: 91671 - protein, 21 aa, Severe acute respiratory syndrome coronavirus 2
QGAVDINKLCEEMLDNRATLQ

SEQ ID NO: 91672 - protein, 21 aa, Severe acute respiratory syndrome coronavirus 2
AMQRKLEKMADQAMTQMYKQA

SEQ ID NO: 91673 - protein, 21 aa, Severe acute respiratory syndrome coronavirus 2
MQRKLEKMADQAMTQMYKQAR

SEQ ID NO: 91674 - protein, 21 aa, Severe acute respiratory syndrome coronavirus 2
QRKLEKMADQAMTQMYKQARS

SEQ ID NO: 91675 - protein, 21 aa, Severe acute respiratory syndrome coronavirus 2
RKLEKMADQAMTQMYKQARSE

SEQ ID NO: 91676 - protein, 21 aa, Severe acute respiratory syndrome coronavirus 2
KLEKMADQAMTQMYKQARSED

SEQ ID NO: 91677 - protein, 21 aa, Severe acute respiratory syndrome coronavirus 2
LEKMADQAMTQMYKQARSEDK

SEQ ID NO: 91678 - protein, 21 aa, Severe acute respiratory syndrome coronavirus 2
EKMADQAMTQMYKQARSEDKR

SEQ ID NO: 91679 - protein, 21 aa, Severe acute respiratory syndrome coronavirus 2
KMADQAMTQMYKQARSEDKRA

SEQ ID NO: 91680 - protein, 21 aa, Severe acute respiratory syndrome coronavirus 2
MADQAMTQMYKQARSEDKRAK

SEQ ID NO: 91681 - protein, 21 aa, Severe acute respiratory syndrome coronavirus 2
ADQAMTQMYKQARSEDKRAKV

SEQ ID NO: 91682 - protein, 21 aa, Severe acute respiratory syndrome coronavirus 2
DQAMTQMYKQARSEDKRAKVT

SEQ ID NO: 91683 - protein, 21 aa, Severe acute respiratory syndrome coronavirus 2
QAMTQMYKQARSEDKRAKVTS

SEQ ID NO: 91684 - protein, 21 aa, Severe acute respiratory syndrome coronavirus 2
MYKQARSEDKRAKVTSAMQTM

SEQ ID NO: 91685 - protein, 21 aa, Severe acute respiratory syndrome coronavirus 2
YKQARSEDKRAKVTSAMQTML

SEQ ID NO: 91686 - protein, 21 aa, Severe acute respiratory syndrome coronavirus 2
KQARSEDKRAKVTSAMQTMLF

SEQ ID NO: 91687 - protein, 21 aa, Severe acute respiratory syndrome coronavirus 2
QARSEDKRAKVTSAMQTMLFT

SEQ ID NO: 91688 - protein, 21 aa, Severe acute respiratory syndrome coronavirus 2
ARSEDKRAKVTSAMQTMLFTM

SEQ ID NO: 91689 - protein, 21 aa, Severe acute respiratory syndrome coronavirus 2
RSEDKRAKVTSAMQTMLFTML

SEQ ID NO: 91690 - protein, 21 aa, Severe acute respiratory syndrome coronavirus 2
SEDKRAKVTSAMQTMLFTMLR

SEQ ID NO: 91691 - protein, 21 aa, Severe acute respiratory syndrome coronavirus 2
EDKRAKVTSAMQTMLFTMLRK

SEQ ID NO: 91692 - protein, 21 aa, Severe acute respiratory syndrome coronavirus 2
DKRAKVTSAMQTMLFTMLRKL

SEQ ID NO: 91693 - protein, 21 aa, Severe acute respiratory syndrome coronavirus 2
KRAKVTSAMQTMLFTMLRKLD

SEQ ID NO: 91694 - protein, 21 aa, Severe acute respiratory syndrome coronavirus 2
RAKVTSAMQTMLFTMLRKLDN

SEQ ID NO: 91695 - protein, 21 aa, Severe acute respiratory syndrome coronavirus 2
RKLDNDALNNIINNARDGCVP

SEQ ID NO: 91696 - protein, 21 aa, Severe acute respiratory syndrome coronavirus 2
KLDNDALNNIINNARDGCVPL

SEQ ID NO: 91697 - protein, 21 aa, Severe acute respiratory syndrome coronavirus 2
LDNDALNNIINNARDGCVPLN

SEQ ID NO: 91698 - protein, 21 aa, Severe acute respiratory syndrome coronavirus 2
DNDALNNIINNARDGCVPLNI

SEQ ID NO: 91699 - protein, 21 aa, Severe acute respiratory syndrome coronavirus 2
NDALNNIINNARDGCVPLNII

SEQ ID NO: 91700 - protein, 21 aa, Severe acute respiratory syndrome coronavirus 2
DALNNIINNARDGCVPLNIIP

SEQ ID NO: 91701 - protein, 21 aa, Severe acute respiratory syndrome coronavirus 2
ALNNIINNARDGCVPLNIIPL

SEQ ID NO: 91702 - protein, 21 aa, Severe acute respiratory syndrome coronavirus 2
LNNIINNARDGCVPLNIIPLT

SEQ ID NO: 91703 - protein, 21 aa, Severe acute respiratory syndrome coronavirus 2
VDADSKIVQLSEISMDNSPNL

SEQ ID NO: 91704 - protein, 21 aa, Severe acute respiratory syndrome coronavirus 2
DADSKIVQLSEISMDNSPNLA

SEQ ID NO: 91705 - protein, 21 aa, Severe acute respiratory syndrome coronavirus 2
ADSKIVQLSEISMDNSPNLAW

SEQ ID NO: 91706 - protein, 21 aa, Severe acute respiratory syndrome coronavirus 2
DSKIVQLSEISMDNSPNLAWP

SEQ ID NO: 91707 - protein, 21 aa, Severe acute respiratory syndrome coronavirus 2
SKIVQLSEISMDNSPNLAWPL

SEQ ID NO: 91708 - protein, 21 aa, Severe acute respiratory syndrome coronavirus 2
KIVQLSEISMDNSPNLAWPLI

SEQ ID NO: 91709 - protein, 21 aa, Severe acute respiratory syndrome coronavirus 2
IVQLSEISMDNSPNLAWPLIV

SEQ ID NO: 91710 - protein, 21 aa, Severe acute respiratory syndrome coronavirus 2
CRFVTDTPKGPKVKYLYFIKG

SEQ ID NO: 91711 - protein, 21 aa, Severe acute respiratory syndrome coronavirus 2
RFVTDTPKGPKVKYLYFIKGL

SEQ ID NO: 91712 - protein, 21 aa, Severe acute respiratory syndrome coronavirus 2
FVTDTPKGPKVKYLYFIKGLN

SEQ ID NO: 91713 - protein, 21 aa, Severe acute respiratory syndrome coronavirus 2
VTDTPKGPKVKYLYFIKGLNN

SEQ ID NO: 91714 - protein, 21 aa, Severe acute respiratory syndrome coronavirus 2
TDTPKGPKVKYLYFIKGLNNL

SEQ ID NO: 91715 - protein, 21 aa, Severe acute respiratory syndrome coronavirus 2
DTPKGPKVKYLYFIKGLNNLN

SEQ ID NO: 91716 - protein, 21 aa, Severe acute respiratory syndrome coronavirus 2
TPKGPKVKYLYFIKGLNNLNR

SEQ ID NO: 91717 - protein, 21 aa, Severe acute respiratory syndrome coronavirus 2
PKGPKVKYLYFIKGLNNLNRG

SEQ ID NO: 91718 - protein, 21 aa, Severe acute respiratory syndrome coronavirus 2
KGPKVKYLYFIKGLNNLNRGM

SEQ ID NO: 91719 - protein, 21 aa, Severe acute respiratory syndrome coronavirus 2
GPKVKYLYFIKGLNNLNRGMV

SEQ ID NO: 91720 - protein, 21 aa, Severe acute respiratory syndrome coronavirus 2
PKVKYLYFIKGLNNLNRGMVL

SEQ ID NO: 91721 - protein, 21 aa, Severe acute respiratory syndrome coronavirus 2
VLSFCAFAVDAAKAYKDYLAS

SEQ ID NO: 91722 - protein, 21 aa, Severe acute respiratory syndrome coronavirus 2
LSFCAFAVDAAKAYKDYLASG

SEQ ID NO: 91723 - protein, 21 aa, Severe acute respiratory syndrome coronavirus 2
SFCAFAVDAAKAYKDYLASGG

SEQ ID NO: 91724 - protein, 21 aa, Severe acute respiratory syndrome coronavirus 2
FCAFAVDAAKAYKDYLASGGQ

SEQ ID NO: 91725 - protein, 21 aa, Severe acute respiratory syndrome coronavirus 2
VDAAKAYKDYLASGGQPITNC

SEQ ID NO: 91726 - protein, 21 aa, Severe acute respiratory syndrome coronavirus 2
DAAKAYKDYLASGGQPITNCV

SEQ ID NO: 91727 - protein, 21 aa, Severe acute respiratory syndrome coronavirus 2
AAKAYKDYLASGGQPITNCVK

SEQ ID NO: 91728 - protein, 21 aa, Severe acute respiratory syndrome coronavirus 2
AKAYKDYLASGGQPITNCVKM

SEQ ID NO: 91729 - protein, 21 aa, Severe acute respiratory syndrome coronavirus 2
KAYKDYLASGGQPITNCVKML

SEQ ID NO: 91730 - protein, 21 aa, Severe acute respiratory syndrome coronavirus 2
AYKDYLASGGQPITNCVKMLC

SEQ ID NO: 91731 - protein, 21 aa, Severe acute respiratory syndrome coronavirus 2
YKDYLASGGQPITNCVKMLCT

SEQ ID NO: 91732 - protein, 21 aa, Severe acute respiratory syndrome coronavirus 2
KDYLASGGQPITNCVKMLCTH

SEQ ID NO: 91733 - protein, 22 aa, Severe acute respiratory syndrome coronavirus 2
TCGLVEVEKGVLPQLEQPYVFI

SEQ ID NO: 91734 - protein, 22 aa, Severe acute respiratory syndrome coronavirus 2
CGLVEVEKGVLPQLEQPYVFIK

SEQ ID NO: 91735 - protein, 22 aa, Severe acute respiratory syndrome coronavirus 2
GLVEVEKGVLPQLEQPYVFIKR

SEQ ID NO: 91736 - protein, 22 aa, Severe acute respiratory syndrome coronavirus 2
VYCCREHEHEIAWYTERSEKSY

SEQ ID NO: 91737 - protein, 22 aa, Severe acute respiratory syndrome coronavirus 2
YCCREHEHEIAWYTERSEKSYE

SEQ ID NO: 91738 - protein, 22 aa, Severe acute respiratory syndrome coronavirus 2
CCREHEHEIAWYTERSEKSYEL

SEQ ID NO: 91739 - protein, 22 aa, Severe acute respiratory syndrome coronavirus 2
CREHEHEIAWYTERSEKSYELQ

SEQ ID NO: 91740 - protein, 22 aa, Severe acute respiratory syndrome coronavirus 2
REHEHEIAWYTERSEKSYELQT

SEQ ID NO: 91741 - protein, 22 aa, Severe acute respiratory syndrome coronavirus 2
EHEHEIAWYTERSEKSYELQTP

SEQ ID NO: 91742 - protein, 22 aa, Severe acute respiratory syndrome coronavirus 2
HEHEIAWYTERSEKSYELQTPF

SEQ ID NO: 91743 - protein, 22 aa, Severe acute respiratory syndrome coronavirus 2
EHEIAWYTERSEKSYELQTPFE

SEQ ID NO: 91744 - protein, 22 aa, Severe acute respiratory syndrome coronavirus 2
HEIAWYTERSEKSYELQTPFEI

SEQ ID NO: 91745 - protein, 22 aa, Severe acute respiratory syndrome coronavirus 2
EIAWYTERSEKSYELQTPFEIK

SEQ ID NO: 91746 - protein, 22 aa, Severe acute respiratory syndrome coronavirus 2
IAWYTERSEKSYELQTPFEIKL

SEQ ID NO: 91747 - protein, 22 aa, Severe acute respiratory syndrome coronavirus 2
AWYTERSEKSYELQTPFEIKLA

SEQ ID NO: 91748 - protein, 22 aa, Severe acute respiratory syndrome coronavirus 2
WYTERSEKSYELQTPFEIKLAK

SEQ ID NO: 91749 - protein, 22 aa, Severe acute respiratory syndrome coronavirus 2
YTERSEKSYELQTPFEIKLAKK

SEQ ID NO: 91750 - protein, 22 aa, Severe acute respiratory syndrome coronavirus 2
TERSEKSYELQTPFEIKLAKKF

SEQ ID NO: 91751 - protein, 22 aa, Severe acute respiratory syndrome coronavirus 2
ERSEKSYELQTPFEIKLAKKFD

SEQ ID NO: 91752 - protein, 22 aa, Severe acute respiratory syndrome coronavirus 2
NKFLALCADSIIIGGAKLKALN

SEQ ID NO: 91753 - protein, 22 aa, Severe acute respiratory syndrome coronavirus 2
KFLALCADSIIIGGAKLKALNL

SEQ ID NO: 91754 - protein, 22 aa, Severe acute respiratory syndrome coronavirus 2
FLALCADSIIIGGAKLKALNLG

SEQ ID NO: 91755 - protein, 22 aa, Severe acute respiratory syndrome coronavirus 2
LALCADSIIIGGAKLKALNLGE

SEQ ID NO: 91756 - protein, 22 aa, Severe acute respiratory syndrome coronavirus 2
PVCINGLMLLEIKDTEKYCALA

SEQ ID NO: 91757 - protein, 22 aa, Severe acute respiratory syndrome coronavirus 2
GSCVLSGHNLAKHCLHVVGPNV

SEQ ID NO: 91758 - protein, 22 aa, Severe acute respiratory syndrome coronavirus 2
SCVLSGHNLAKHCLHVVGPNVN

SEQ ID NO: 91759 - protein, 22 aa, Severe acute respiratory syndrome coronavirus 2
YITTYPGQGLNGYTVEEAKTVL

SEQ ID NO: 91760 - protein, 22 aa, Severe acute respiratory syndrome coronavirus 2
ITTYPGQGLNGYTVEEAKTVLK

SEQ ID NO: 91761 - protein, 22 aa, Severe acute respiratory syndrome coronavirus 2
TTYPGQGLNGYTVEEAKTVLKK

SEQ ID NO: 91762 - protein, 22 aa, Severe acute respiratory syndrome coronavirus 2
TYPGQGLNGYTVEEAKTVLKKC

SEQ ID NO: 91763 - protein, 22 aa, Severe acute respiratory syndrome coronavirus 2
YPGQGLNGYTVEEAKTVLKKCK

SEQ ID NO: 91764 - protein, 22 aa, Severe acute respiratory syndrome coronavirus 2
PGQGLNGYTVEEAKTVLKKCKS

SEQ ID NO: 91765 - protein, 22 aa, Severe acute respiratory syndrome coronavirus 2
FYILPSIISNEKQEILGTVSWN

SEQ ID NO: 91766 - protein, 22 aa, Severe acute respiratory syndrome coronavirus 2
REMLAHAEETRKLMPVCVETKA

SEQ ID NO: 91767 - protein, 22 aa, Severe acute respiratory syndrome coronavirus 2
TAYNGYLTSSSKTPEEHFIETI

SEQ ID NO: 91768 - protein, 22 aa, Severe acute respiratory syndrome coronavirus 2
NGYLTSSSKTPEEHFIETISLA

SEQ ID NO: 91769 - protein, 22 aa, Severe acute respiratory syndrome coronavirus 2
GYLTSSSKTPEEHFIETISLAG

SEQ ID NO: 91770 - protein, 22 aa, Severe acute respiratory syndrome coronavirus 2
YLTSSSKTPEEHFIETISLAGS

SEQ ID NO: 91771 - protein, 22 aa, Severe acute respiratory syndrome coronavirus 2
LTSSSKTPEEHFIETISLAGSY

SEQ ID NO: 91772 - protein, 22 aa, Severe acute respiratory syndrome coronavirus 2
TSSSKTPEEHFIETISLAGSYK

SEQ ID NO: 91773 - protein, 22 aa, Severe acute respiratory syndrome coronavirus 2
SSSKTPEEHFIETISLAGSYKD

SEQ ID NO: 91774 - protein, 22 aa, Severe acute respiratory syndrome coronavirus 2
SSKTPEEHFIETISLAGSYKDW

SEQ ID NO: 91775 - protein, 22 aa, Severe acute respiratory syndrome coronavirus 2
KKWKYPQVNGLTSIKWADNNCY

SEQ ID NO: 91776 - protein, 22 aa, Severe acute respiratory syndrome coronavirus 2
KWKYPQVNGLTSIKWADNNCYL

SEQ ID NO: 91777 - protein, 22 aa, Severe acute respiratory syndrome coronavirus 2
WKYPQVNGLTSIKWADNNCYLA

SEQ ID NO: 91778 - protein, 22 aa, Severe acute respiratory syndrome coronavirus 2
KYPQVNGLTSIKWADNNCYLAT

SEQ ID NO: 91779 - protein, 22 aa, Severe acute respiratory syndrome coronavirus 2
ELKFNPPALQDAYYRARAGEAA

SEQ ID NO: 91780 - protein, 22 aa, Severe acute respiratory syndrome coronavirus 2
LKFNPPALQDAYYRARAGEAAN

SEQ ID NO: 91781 - protein, 22 aa, Severe acute respiratory syndrome coronavirus 2
KFNPPALQDAYYRARAGEAANF

SEQ ID NO: 91782 - protein, 22 aa, Severe acute respiratory syndrome coronavirus 2
FNPPALQDAYYRARAGEAANFC

SEQ ID NO: 91783 - protein, 22 aa, Severe acute respiratory syndrome coronavirus 2
NPPALQDAYYRARAGEAANFCA

SEQ ID NO: 91784 - protein, 22 aa, Severe acute respiratory syndrome coronavirus 2
PPALQDAYYRARAGEAANFCAL

SEQ ID NO: 91785 - protein, 22 aa, Severe acute respiratory syndrome coronavirus 2
FQHANLDSCKRVLNVVCKTCGQ

SEQ ID NO: 91786 - protein, 22 aa, Severe acute respiratory syndrome coronavirus 2
QHANLDSCKRVLNVVCKTCGQQ

SEQ ID NO: 91787 - protein, 22 aa, Severe acute respiratory syndrome coronavirus 2
HANLDSCKRVLNVVCKTCGQQQ

SEQ ID NO: 91788 - protein, 22 aa, Severe acute respiratory syndrome coronavirus 2
ANLDSCKRVLNVVCKTCGQQQT

SEQ ID NO: 91789 - protein, 22 aa, Severe acute respiratory syndrome coronavirus 2
DVFYKENSYTTTIKPVTYKLDG

SEQ ID NO: 91790 - protein, 22 aa, Severe acute respiratory syndrome coronavirus 2
VFYKENSYTTTIKPVTYKLDGV

SEQ ID NO: 91791 - protein, 22 aa, Severe acute respiratory syndrome coronavirus 2
FYKENSYTTTIKPVTYKLDGVV

SEQ ID NO: 91792 - protein, 22 aa, Severe acute respiratory syndrome coronavirus 2
YKENSYTTTIKPVTYKLDGVVC

SEQ ID NO: 91793 - protein, 22 aa, Severe acute respiratory syndrome coronavirus 2
KENSYTTTIKPVTYKLDGVVCT

SEQ ID NO: 91794 - protein, 22 aa, Severe acute respiratory syndrome coronavirus 2
ENSYTTTIKPVTYKLDGVVCTE

SEQ ID NO: 91795 - protein, 22 aa, Severe acute respiratory syndrome coronavirus 2
NSYTTTIKPVTYKLDGVVCTEI

SEQ ID NO: 91796 - protein, 22 aa, Severe acute respiratory syndrome coronavirus 2
SYTTTIKPVTYKLDGVVCTEID

SEQ ID NO: 91797 - protein, 22 aa, Severe acute respiratory syndrome coronavirus 2
YTTTIKPVTYKLDGVVCTEIDP

SEQ ID NO: 91798 - protein, 22 aa, Severe acute respiratory syndrome coronavirus 2
TTTIKPVTYKLDGVVCTEIDPK

SEQ ID NO: 91799 - protein, 22 aa, Severe acute respiratory syndrome coronavirus 2
TTIKPVTYKLDGVVCTEIDPKL

SEQ ID NO: 91800 - protein, 22 aa, Severe acute respiratory syndrome coronavirus 2
TIKPVTYKLDGVVCTEIDPKLD

SEQ ID NO: 91801 - protein, 22 aa, Severe acute respiratory syndrome coronavirus 2
IKPVTYKLDGVVCTEIDPKLDN

SEQ ID NO: 91802 - protein, 22 aa, Severe acute respiratory syndrome coronavirus 2
KPVTYKLDGVVCTEIDPKLDNY

SEQ ID NO: 91803 - protein, 22 aa, Severe acute respiratory syndrome coronavirus 2
PVTYKLDGVVCTEIDPKLDNYY

SEQ ID NO: 91804 - protein, 22 aa, Severe acute respiratory syndrome coronavirus 2
VTYKLDGVVCTEIDPKLDNYYK

SEQ ID NO: 91805 - protein, 22 aa, Severe acute respiratory syndrome coronavirus 2
TEIDPKLDNYYKKDNSYFTEQP

SEQ ID NO: 91806 - protein, 22 aa, Severe acute respiratory syndrome coronavirus 2
EIDPKLDNYYKKDNSYFTEQPI

SEQ ID NO: 91807 - protein, 22 aa, Severe acute respiratory syndrome coronavirus 2
IDPKLDNYYKKDNSYFTEQPID

SEQ ID NO: 91808 - protein, 22 aa, Severe acute respiratory syndrome coronavirus 2
DPKLDNYYKKDNSYFTEQPIDL

SEQ ID NO: 91809 - protein, 22 aa, Severe acute respiratory syndrome coronavirus 2
PKLDNYYKKDNSYFTEQPIDLV

SEQ ID NO: 91810 - protein, 22 aa, Severe acute respiratory syndrome coronavirus 2
KLDNYYKKDNSYFTEQPIDLVP

SEQ ID NO: 91811 - protein, 22 aa, Severe acute respiratory syndrome coronavirus 2
LDNYYKKDNSYFTEQPIDLVPN

SEQ ID NO: 91812 - protein, 22 aa, Severe acute respiratory syndrome coronavirus 2
DNYYKKDNSYFTEQPIDLVPNQ

SEQ ID NO: 91813 - protein, 22 aa, Severe acute respiratory syndrome coronavirus 2
NYYKKDNSYFTEQPIDLVPNQP

SEQ ID NO: 91814 - protein, 22 aa, Severe acute respiratory syndrome coronavirus 2
YYKKDNSYFTEQPIDLVPNQPY

SEQ ID NO: 91815 - protein, 22 aa, Severe acute respiratory syndrome coronavirus 2
ASFDNFKFVCDNIKFADDLNQL

SEQ ID NO: 91816 - protein, 22 aa, Severe acute respiratory syndrome coronavirus 2
SFDNFKFVCDNIKFADDLNQLT

SEQ ID NO: 91817 - protein, 22 aa, Severe acute respiratory syndrome coronavirus 2
FDNFKFVCDNIKFADDLNQLTG

SEQ ID NO: 91818 - protein, 22 aa, Severe acute respiratory syndrome coronavirus 2
DNFKFVCDNIKFADDLNQLTGY

SEQ ID NO: 91819 - protein, 22 aa, Severe acute respiratory syndrome coronavirus 2
NFKFVCDNIKFADDLNQLTGYK

SEQ ID NO: 91820 - protein, 22 aa, Severe acute respiratory syndrome coronavirus 2
FKFVCDNIKFADDLNQLTGYKK

SEQ ID NO: 91821 - protein, 22 aa, Severe acute respiratory syndrome coronavirus 2
KFVCDNIKFADDLNQLTGYKKP

SEQ ID NO: 91822 - protein, 22 aa, Severe acute respiratory syndrome coronavirus 2
FVCDNIKFADDLNQLTGYKKPA

SEQ ID NO: 91823 - protein, 22 aa, Severe acute respiratory syndrome coronavirus 2
DLNQLTGYKKPASRELKVTFFP

SEQ ID NO: 91824 - protein, 22 aa, Severe acute respiratory syndrome coronavirus 2
LNQLTGYKKPASRELKVTFFPD

SEQ ID NO: 91825 - protein, 22 aa, Severe acute respiratory syndrome coronavirus 2
NQLTGYKKPASRELKVTFFPDL

SEQ ID NO: 91826 - protein, 22 aa, Severe acute respiratory syndrome coronavirus 2
QLTGYKKPASRELKVTFFPDLN

SEQ ID NO: 91827 - protein, 22 aa, Severe acute respiratory syndrome coronavirus 2
LTGYKKPASRELKVTFFPDLNG

SEQ ID NO: 91828 - protein, 22 aa, Severe acute respiratory syndrome coronavirus 2
TGYKKPASRELKVTFFPDLNGD

SEQ ID NO: 91829 - protein, 22 aa, Severe acute respiratory syndrome coronavirus 2
GYKKPASRELKVTFFPDLNGDV

SEQ ID NO: 91830 - protein, 22 aa, Severe acute respiratory syndrome coronavirus 2
YKKPASRELKVTFFPDLNGDVV

SEQ ID NO: 91831 - protein, 22 aa, Severe acute respiratory syndrome coronavirus 2
KKPASRELKVTFFPDLNGDVVA

SEQ ID NO: 91832 - protein, 22 aa, Severe acute respiratory syndrome coronavirus 2
KPASRELKVTFFPDLNGDVVAI

SEQ ID NO: 91833 - protein, 22 aa, Severe acute respiratory syndrome coronavirus 2
PASRELKVTFFPDLNGDVVAID

SEQ ID NO: 91834 - protein, 22 aa, Severe acute respiratory syndrome coronavirus 2
ASRELKVTFFPDLNGDVVAIDY

SEQ ID NO: 91835 - protein, 22 aa, Severe acute respiratory syndrome coronavirus 2
SRELKVTFFPDLNGDVVAIDYK

SEQ ID NO: 91836 - protein, 22 aa, Severe acute respiratory syndrome coronavirus 2
RELKVTFFPDLNGDVVAIDYKH

SEQ ID NO: 91837 - protein, 22 aa, Severe acute respiratory syndrome coronavirus 2
ELKVTFFPDLNGDVVAIDYKHY

SEQ ID NO: 91838 - protein, 22 aa, Severe acute respiratory syndrome coronavirus 2
LKVTFFPDLNGDVVAIDYKHYT

SEQ ID NO: 91839 - protein, 22 aa, Severe acute respiratory syndrome coronavirus 2
KVTFFPDLNGDVVAIDYKHYTP

SEQ ID NO: 91840 - protein, 22 aa, Severe acute respiratory syndrome coronavirus 2
VTFFPDLNGDVVAIDYKHYTPS

SEQ ID NO: 91841 - protein, 22 aa, Severe acute respiratory syndrome coronavirus 2
QITISSFKWDLTAFGLVAEWFL

SEQ ID NO: 91842 - protein, 22 aa, Severe acute respiratory syndrome coronavirus 2
ITISSFKWDLTAFGLVAEWFLA

SEQ ID NO: 91843 - protein, 22 aa, Severe acute respiratory syndrome coronavirus 2
TISSFKWDLTAFGLVAEWFLAY

SEQ ID NO: 91844 - protein, 22 aa, Severe acute respiratory syndrome coronavirus 2
ISSFKWDLTAFGLVAEWFLAYI

SEQ ID NO: 91845 - protein, 22 aa, Severe acute respiratory syndrome coronavirus 2
SSFKWDLTAFGLVAEWFLAYIL

SEQ ID NO: 91846 - protein, 22 aa, Severe acute respiratory syndrome coronavirus 2
SFKWDLTAFGLVAEWFLAYILF

SEQ ID NO: 91847 - protein, 22 aa, Severe acute respiratory syndrome coronavirus 2
FKWDLTAFGLVAEWFLAYILFT

SEQ ID NO: 91848 - protein, 22 aa, Severe acute respiratory syndrome coronavirus 2
KWDLTAFGLVAEWFLAYILFTR

SEQ ID NO: 91849 - protein, 22 aa, Severe acute respiratory syndrome coronavirus 2
WDLTAFGLVAEWFLAYILFTRF

SEQ ID NO: 91850 - protein, 22 aa, Severe acute respiratory syndrome coronavirus 2
DLTAFGLVAEWFLAYILFTRFF

SEQ ID NO: 91851 - protein, 22 aa, Severe acute respiratory syndrome coronavirus 2
LTAFGLVAEWFLAYILFTRFFY

SEQ ID NO: 91852 - protein, 22 aa, Severe acute respiratory syndrome coronavirus 2
FGLVAEWFLAYILFTRFFYVLG

SEQ ID NO: 91853 - protein, 22 aa, Severe acute respiratory syndrome coronavirus 2
GLVAEWFLAYILFTRFFYVLGL

SEQ ID NO: 91854 - protein, 22 aa, Severe acute respiratory syndrome coronavirus 2
LVAEWFLAYILFTRFFYVLGLA

SEQ ID NO: 91855 - protein, 22 aa, Severe acute respiratory syndrome coronavirus 2
VAEWFLAYILFTRFFYVLGLAA

SEQ ID NO: 91856 - protein, 22 aa, Severe acute respiratory syndrome coronavirus 2
AEWFLAYILFTRFFYVLGLAAI

SEQ ID NO: 91857 - protein, 22 aa, Severe acute respiratory syndrome coronavirus 2
EWFLAYILFTRFFYVLGLAAIM

SEQ ID NO: 91858 - protein, 22 aa, Severe acute respiratory syndrome coronavirus 2
WFLAYILFTRFFYVLGLAAIMQ

SEQ ID NO: 91859 - protein, 22 aa, Severe acute respiratory syndrome coronavirus 2
FFSYFAVHFISNSWLMWLIINL

SEQ ID NO: 91860 - protein, 22 aa, Severe acute respiratory syndrome coronavirus 2
FSYFAVHFISNSWLMWLIINLV

SEQ ID NO: 91861 - protein, 22 aa, Severe acute respiratory syndrome coronavirus 2
SYFAVHFISNSWLMWLIINLVQ

SEQ ID NO: 91862 - protein, 22 aa, Severe acute respiratory syndrome coronavirus 2
YFAVHFISNSWLMWLIINLVQM

SEQ ID NO: 91863 - protein, 22 aa, Severe acute respiratory syndrome coronavirus 2
FAVHFISNSWLMWLIINLVQMA

SEQ ID NO: 91864 - protein, 22 aa, Severe acute respiratory syndrome coronavirus 2
AMVRMYIFFASFYYVWKSYVHV

SEQ ID NO: 91865 - protein, 22 aa, Severe acute respiratory syndrome coronavirus 2
MVRMYIFFASFYYVWKSYVHVV

SEQ ID NO: 91866 - protein, 22 aa, Severe acute respiratory syndrome coronavirus 2
VRMYIFFASFYYVWKSYVHVVD

SEQ ID NO: 91867 - protein, 22 aa, Severe acute respiratory syndrome coronavirus 2
SSTCMMCYKRNRATRVECTTIV

SEQ ID NO: 91868 - protein, 22 aa, Severe acute respiratory syndrome coronavirus 2
STCMMCYKRNRATRVECTTIVN

SEQ ID NO: 91869 - protein, 22 aa, Severe acute respiratory syndrome coronavirus 2
TCMMCYKRNRATRVECTTIVNG

SEQ ID NO: 91870 - protein, 22 aa, Severe acute respiratory syndrome coronavirus 2
CMMCYKRNRATRVECTTIVNGV

SEQ ID NO: 91871 - protein, 22 aa, Severe acute respiratory syndrome coronavirus 2
MMCYKRNRATRVECTTIVNGVR

SEQ ID NO: 91872 - protein, 22 aa, Severe acute respiratory syndrome coronavirus 2
SFYVYANGGKGFCKLHNWNCVN

SEQ ID NO: 91873 - protein, 22 aa, Severe acute respiratory syndrome coronavirus 2
FYVYANGGKGFCKLHNWNCVNC

SEQ ID NO: 91874 - protein, 22 aa, Severe acute respiratory syndrome coronavirus 2
YVYANGGKGFCKLHNWNCVNCD

SEQ ID NO: 91875 - protein, 22 aa, Severe acute respiratory syndrome coronavirus 2
VYANGGKGFCKLHNWNCVNCDT

SEQ ID NO: 91876 - protein, 22 aa, Severe acute respiratory syndrome coronavirus 2
YANGGKGFCKLHNWNCVNCDTF

SEQ ID NO: 91877 - protein, 22 aa, Severe acute respiratory syndrome coronavirus 2
ANGGKGFCKLHNWNCVNCDTFC

SEQ ID NO: 91878 - protein, 22 aa, Severe acute respiratory syndrome coronavirus 2
NGGKGFCKLHNWNCVNCDTFCA

SEQ ID NO: 91879 - protein, 22 aa, Severe acute respiratory syndrome coronavirus 2
KLHNWNCVNCDTFCAGSTFISD

SEQ ID NO: 91880 - protein, 22 aa, Severe acute respiratory syndrome coronavirus 2
LHNWNCVNCDTFCAGSTFISDE

SEQ ID NO: 91881 - protein, 22 aa, Severe acute respiratory syndrome coronavirus 2
HNWNCVNCDTFCAGSTFISDEV

SEQ ID NO: 91882 - protein, 22 aa, Severe acute respiratory syndrome coronavirus 2
NWNCVNCDTFCAGSTFISDEVA

SEQ ID NO: 91883 - protein, 22 aa, Severe acute respiratory syndrome coronavirus 2
WNCVNCDTFCAGSTFISDEVAR

SEQ ID NO: 91884 - protein, 22 aa, Severe acute respiratory syndrome coronavirus 2
NCVNCDTFCAGSTFISDEVARD

SEQ ID NO: 91885 - protein, 22 aa, Severe acute respiratory syndrome coronavirus 2
CVNCDTFCAGSTFISDEVARDL

SEQ ID NO: 91886 - protein, 22 aa, Severe acute respiratory syndrome coronavirus 2
VNCDTFCAGSTFISDEVARDLS

SEQ ID NO: 91887 - protein, 22 aa, Severe acute respiratory syndrome coronavirus 2
NCDTFCAGSTFISDEVARDLSL

SEQ ID NO: 91888 - protein, 22 aa, Severe acute respiratory syndrome coronavirus 2
CDTFCAGSTFISDEVARDLSLQ

SEQ ID NO: 91889 - protein, 22 aa, Severe acute respiratory syndrome coronavirus 2
DTFCAGSTFISDEVARDLSLQF

SEQ ID NO: 91890 - protein, 22 aa, Severe acute respiratory syndrome coronavirus 2
TFCAGSTFISDEVARDLSLQFK

SEQ ID NO: 91891 - protein, 22 aa, Severe acute respiratory syndrome coronavirus 2
FCAGSTFISDEVARDLSLQFKR

SEQ ID NO: 91892 - protein, 22 aa, Severe acute respiratory syndrome coronavirus 2
CAGSTFISDEVARDLSLQFKRP

SEQ ID NO: 91893 - protein, 22 aa, Severe acute respiratory syndrome coronavirus 2
AGSTFISDEVARDLSLQFKRPI

SEQ ID NO: 91894 - protein, 22 aa, Severe acute respiratory syndrome coronavirus 2
SASVYYSQLMCQPILLLDQALV

SEQ ID NO: 91895 - protein, 22 aa, Severe acute respiratory syndrome coronavirus 2
ASVYYSQLMCQPILLLDQALVS

SEQ ID NO: 91896 - protein, 22 aa, Severe acute respiratory syndrome coronavirus 2
LDNVLSTFISAARQGFVDSDVE

SEQ ID NO: 91897 - protein, 22 aa, Severe acute respiratory syndrome coronavirus 2
DNVLSTFISAARQGFVDSDVET

SEQ ID NO: 91898 - protein, 22 aa, Severe acute respiratory syndrome coronavirus 2
NVLSTFISAARQGFVDSDVETK

SEQ ID NO: 91899 - protein, 22 aa, Severe acute respiratory syndrome coronavirus 2
VLSTFISAARQGFVDSDVETKD

SEQ ID NO: 91900 - protein, 22 aa, Severe acute respiratory syndrome coronavirus 2
LSTFISAARQGFVDSDVETKDV

SEQ ID NO: 91901 - protein, 22 aa, Severe acute respiratory syndrome coronavirus 2
STFISAARQGFVDSDVETKDVV

SEQ ID NO: 91902 - protein, 22 aa, Severe acute respiratory syndrome coronavirus 2
TFISAARQGFVDSDVETKDVVE

SEQ ID NO: 91903 - protein, 22 aa, Severe acute respiratory syndrome coronavirus 2
FISAARQGFVDSDVETKDVVEC

SEQ ID NO: 91904 - protein, 22 aa, Severe acute respiratory syndrome coronavirus 2
ISAARQGFVDSDVETKDVVECL

SEQ ID NO: 91905 - protein, 22 aa, Severe acute respiratory syndrome coronavirus 2
VDSDVETKDVVECLKLSHQSDI

SEQ ID NO: 91906 - protein, 22 aa, Severe acute respiratory syndrome coronavirus 2
DSDVETKDVVECLKLSHQSDIE

SEQ ID NO: 91907 - protein, 22 aa, Severe acute respiratory syndrome coronavirus 2
SDVETKDVVECLKLSHQSDIEV

SEQ ID NO: 91908 - protein, 22 aa, Severe acute respiratory syndrome coronavirus 2
DVETKDVVECLKLSHQSDIEVT

SEQ ID NO: 91909 - protein, 22 aa, Severe acute respiratory syndrome coronavirus 2
VETKDVVECLKLSHQSDIEVTG

SEQ ID NO: 91910 - protein, 22 aa, Severe acute respiratory syndrome coronavirus 2
ETKDVVECLKLSHQSDIEVTGD

SEQ ID NO: 91911 - protein, 22 aa, Severe acute respiratory syndrome coronavirus 2
TKDVVECLKLSHQSDIEVTGDS

SEQ ID NO: 91912 - protein, 22 aa, Severe acute respiratory syndrome coronavirus 2
SLSEQLRKQIRSAAKKNNLPFK

SEQ ID NO: 91913 - protein, 22 aa, Severe acute respiratory syndrome coronavirus 2
LSEQLRKQIRSAAKKNNLPFKL

SEQ ID NO: 91914 - protein, 22 aa, Severe acute respiratory syndrome coronavirus 2
SEQLRKQIRSAAKKNNLPFKLT

SEQ ID NO: 91915 - protein, 22 aa, Severe acute respiratory syndrome coronavirus 2
EQLRKQIRSAAKKNNLPFKLTC

SEQ ID NO: 91916 - protein, 22 aa, Severe acute respiratory syndrome coronavirus 2
QIRSAAKKNNLPFKLTCATTRQ

SEQ ID NO: 91917 - protein, 22 aa, Severe acute respiratory syndrome coronavirus 2
IRSAAKKNNLPFKLTCATTRQV

SEQ ID NO: 91918 - protein, 22 aa, Severe acute respiratory syndrome coronavirus 2
RSAAKKNNLPFKLTCATTRQVV

SEQ ID NO: 91919 - protein, 22 aa, Severe acute respiratory syndrome coronavirus 2
SAAKKNNLPFKLTCATTRQVVN

SEQ ID NO: 91920 - protein, 22 aa, Severe acute respiratory syndrome coronavirus 2
AAKKNNLPFKLTCATTRQVVNV

SEQ ID NO: 91921 - protein, 22 aa, Severe acute respiratory syndrome coronavirus 2
AKKNNLPFKLTCATTRQVVNVV

SEQ ID NO: 91922 - protein, 22 aa, Severe acute respiratory syndrome coronavirus 2
KKNNLPFKLTCATTRQVVNVVT

SEQ ID NO: 91923 - protein, 22 aa, Severe acute respiratory syndrome coronavirus 2
KNNLPFKLTCATTRQVVNVVTT

SEQ ID NO: 91924 - protein, 22 aa, Severe acute respiratory syndrome coronavirus 2
NNLPFKLTCATTRQVVNVVTTK

SEQ ID NO: 91925 - protein, 22 aa, Severe acute respiratory syndrome coronavirus 2
NLPFKLTCATTRQVVNVVTTKI

SEQ ID NO: 91926 - protein, 22 aa, Severe acute respiratory syndrome coronavirus 2
LPFKLTCATTRQVVNVVTTKIA

SEQ ID NO: 91927 - protein, 22 aa, Severe acute respiratory syndrome coronavirus 2
PFKLTCATTRQVVNVVTTKIAL

SEQ ID NO: 91928 - protein, 22 aa, Severe acute respiratory syndrome coronavirus 2
FKLTCATTRQVVNVVTTKIALK

SEQ ID NO: 91929 - protein, 22 aa, Severe acute respiratory syndrome coronavirus 2
KLTCATTRQVVNVVTTKIALKG

SEQ ID NO: 91930 - protein, 22 aa, Severe acute respiratory syndrome coronavirus 2
LTCATTRQVVNVVTTKIALKGG

SEQ ID NO: 91931 - protein, 22 aa, Severe acute respiratory syndrome coronavirus 2
DTWFSQRGGSYTNDKACPLIAA

SEQ ID NO: 91932 - protein, 22 aa, Severe acute respiratory syndrome coronavirus 2
TWFSQRGGSYTNDKACPLIAAV

SEQ ID NO: 91933 - protein, 22 aa, Severe acute respiratory syndrome coronavirus 2
WFSQRGGSYTNDKACPLIAAVI

SEQ ID NO: 91934 - protein, 22 aa, Severe acute respiratory syndrome coronavirus 2
FSQRGGSYTNDKACPLIAAVIT

SEQ ID NO: 91935 - protein, 22 aa, Severe acute respiratory syndrome coronavirus 2
SQRGGSYTNDKACPLIAAVITR

SEQ ID NO: 91936 - protein, 22 aa, Severe acute respiratory syndrome coronavirus 2
QRGGSYTNDKACPLIAAVITRE

SEQ ID NO: 91937 - protein, 22 aa, Severe acute respiratory syndrome coronavirus 2
TTNGDFLHFLPRVFSAVGNICY

SEQ ID NO: 91938 - protein, 22 aa, Severe acute respiratory syndrome coronavirus 2
TNGDFLHFLPRVFSAVGNICYT

SEQ ID NO: 91939 - protein, 22 aa, Severe acute respiratory syndrome coronavirus 2
NGDFLHFLPRVFSAVGNICYTP

SEQ ID NO: 91940 - protein, 22 aa, Severe acute respiratory syndrome coronavirus 2
ATSACVLAAECTIFKDASGKPV

SEQ ID NO: 91941 - protein, 22 aa, Severe acute respiratory syndrome coronavirus 2
TSACVLAAECTIFKDASGKPVP

SEQ ID NO: 91942 - protein, 22 aa, Severe acute respiratory syndrome coronavirus 2
SACVLAAECTIFKDASGKPVPY

SEQ ID NO: 91943 - protein, 22 aa, Severe acute respiratory syndrome coronavirus 2
ACVLAAECTIFKDASGKPVPYC

SEQ ID NO: 91944 - protein, 22 aa, Severe acute respiratory syndrome coronavirus 2
CVLAAECTIFKDASGKPVPYCY

SEQ ID NO: 91945 - protein, 22 aa, Severe acute respiratory syndrome coronavirus 2
VLAAECTIFKDASGKPVPYCYD

SEQ ID NO: 91946 - protein, 22 aa, Severe acute respiratory syndrome coronavirus 2
LAAECTIFKDASGKPVPYCYDT

SEQ ID NO: 91947 - protein, 22 aa, Severe acute respiratory syndrome coronavirus 2
FKDASGKPVPYCYDTNVLEGSV

SEQ ID NO: 91948 - protein, 22 aa, Severe acute respiratory syndrome coronavirus 2
KDASGKPVPYCYDTNVLEGSVA

SEQ ID NO: 91949 - protein, 22 aa, Severe acute respiratory syndrome coronavirus 2
DASGKPVPYCYDTNVLEGSVAY

SEQ ID NO: 91950 - protein, 22 aa, Severe acute respiratory syndrome coronavirus 2
ASGKPVPYCYDTNVLEGSVAYE

SEQ ID NO: 91951 - protein, 22 aa, Severe acute respiratory syndrome coronavirus 2
SGKPVPYCYDTNVLEGSVAYES

SEQ ID NO: 91952 - protein, 22 aa, Severe acute respiratory syndrome coronavirus 2
GKPVPYCYDTNVLEGSVAYESL

SEQ ID NO: 91953 - protein, 22 aa, Severe acute respiratory syndrome coronavirus 2
KPVPYCYDTNVLEGSVAYESLR

SEQ ID NO: 91954 - protein, 22 aa, Severe acute respiratory syndrome coronavirus 2
PVPYCYDTNVLEGSVAYESLRP

SEQ ID NO: 91955 - protein, 22 aa, Severe acute respiratory syndrome coronavirus 2
VPYCYDTNVLEGSVAYESLRPD

SEQ ID NO: 91956 - protein, 22 aa, Severe acute respiratory syndrome coronavirus 2
PYCYDTNVLEGSVAYESLRPDT

SEQ ID NO: 91957 - protein, 22 aa, Severe acute respiratory syndrome coronavirus 2
YCYDTNVLEGSVAYESLRPDTR

SEQ ID NO: 91958 - protein, 22 aa, Severe acute respiratory syndrome coronavirus 2
CYDTNVLEGSVAYESLRPDTRY

SEQ ID NO: 91959 - protein, 22 aa, Severe acute respiratory syndrome coronavirus 2
YDTNVLEGSVAYESLRPDTRYV

SEQ ID NO: 91960 - protein, 22 aa, Severe acute respiratory syndrome coronavirus 2
DTNVLEGSVAYESLRPDTRYVL

SEQ ID NO: 91961 - protein, 22 aa, Severe acute respiratory syndrome coronavirus 2
TNVLEGSVAYESLRPDTRYVLM

SEQ ID NO: 91962 - protein, 22 aa, Severe acute respiratory syndrome coronavirus 2
NVLEGSVAYESLRPDTRYVLMD

SEQ ID NO: 91963 - protein, 22 aa, Severe acute respiratory syndrome coronavirus 2
GVCVSTSGRWVLNNDYYRSLPG

SEQ ID NO: 91964 - protein, 22 aa, Severe acute respiratory syndrome coronavirus 2
VCVSTSGRWVLNNDYYRSLPGV

SEQ ID NO: 91965 - protein, 22 aa, Severe acute respiratory syndrome coronavirus 2
CVSTSGRWVLNNDYYRSLPGVF

SEQ ID NO: 91966 - protein, 22 aa, Severe acute respiratory syndrome coronavirus 2
VSTSGRWVLNNDYYRSLPGVFC

SEQ ID NO: 91967 - protein, 22 aa, Severe acute respiratory syndrome coronavirus 2
STSGRWVLNNDYYRSLPGVFCG

SEQ ID NO: 91968 - protein, 22 aa, Severe acute respiratory syndrome coronavirus 2
TSGRWVLNNDYYRSLPGVFCGV

SEQ ID NO: 91969 - protein, 22 aa, Severe acute respiratory syndrome coronavirus 2
SGRWVLNNDYYRSLPGVFCGVD

SEQ ID NO: 91970 - protein, 22 aa, Severe acute respiratory syndrome coronavirus 2
FLPGVYSVIYLYLTFYLTNDVS

SEQ ID NO: 91971 - protein, 22 aa, Severe acute respiratory syndrome coronavirus 2
LPGVYSVIYLYLTFYLTNDVSF

SEQ ID NO: 91972 - protein, 22 aa, Severe acute respiratory syndrome coronavirus 2
PGVYSVIYLYLTFYLTNDVSFL

SEQ ID NO: 91973 - protein, 22 aa, Severe acute respiratory syndrome coronavirus 2
YLYLTFYLTNDVSFLAHIQWMV

SEQ ID NO: 91974 - protein, 22 aa, Severe acute respiratory syndrome coronavirus 2
LYLTFYLTNDVSFLAHIQWMVM

SEQ ID NO: 91975 - protein, 22 aa, Severe acute respiratory syndrome coronavirus 2
YIICISTKHFYWFFSNYLKRRV

SEQ ID NO: 91976 - protein, 22 aa, Severe acute respiratory syndrome coronavirus 2
IICISTKHFYWFFSNYLKRRVV

SEQ ID NO: 91977 - protein, 22 aa, Severe acute respiratory syndrome coronavirus 2
ICISTKHFYWFFSNYLKRRVVF

SEQ ID NO: 91978 - protein, 22 aa, Severe acute respiratory syndrome coronavirus 2
CISTKHFYWFFSNYLKRRVVFN

SEQ ID NO: 91979 - protein, 22 aa, Severe acute respiratory syndrome coronavirus 2
ISTKHFYWFFSNYLKRRVVFNG

SEQ ID NO: 91980 - protein, 22 aa, Severe acute respiratory syndrome coronavirus 2
STKHFYWFFSNYLKRRVVFNGV

SEQ ID NO: 91981 - protein, 22 aa, Severe acute respiratory syndrome coronavirus 2
TKHFYWFFSNYLKRRVVFNGVS

SEQ ID NO: 91982 - protein, 22 aa, Severe acute respiratory syndrome coronavirus 2
KHFYWFFSNYLKRRVVFNGVSF

SEQ ID NO: 91983 - protein, 22 aa, Severe acute respiratory syndrome coronavirus 2
HFYWFFSNYLKRRVVFNGVSFS

SEQ ID NO: 91984 - protein, 22 aa, Severe acute respiratory syndrome coronavirus 2
FYWFFSNYLKRRVVFNGVSFST

SEQ ID NO: 91985 - protein, 22 aa, Severe acute respiratory syndrome coronavirus 2
YWFFSNYLKRRVVFNGVSFSTF

SEQ ID NO: 91986 - protein, 22 aa, Severe acute respiratory syndrome coronavirus 2
WFFSNYLKRRVVFNGVSFSTFE

SEQ ID NO: 91987 - protein, 22 aa, Severe acute respiratory syndrome coronavirus 2
FFSNYLKRRVVFNGVSFSTFEE

SEQ ID NO: 91988 - protein, 22 aa, Severe acute respiratory syndrome coronavirus 2
FSNYLKRRVVFNGVSFSTFEEA

SEQ ID NO: 91989 - protein, 22 aa, Severe acute respiratory syndrome coronavirus 2
SNYLKRRVVFNGVSFSTFEEAA

SEQ ID NO: 91990 - protein, 22 aa, Severe acute respiratory syndrome coronavirus 2
NYLKRRVVFNGVSFSTFEEAAL

SEQ ID NO: 91991 - protein, 22 aa, Severe acute respiratory syndrome coronavirus 2
YLKRRVVFNGVSFSTFEEAALC

SEQ ID NO: 91992 - protein, 22 aa, Severe acute respiratory syndrome coronavirus 2
LKRRVVFNGVSFSTFEEAALCT

SEQ ID NO: 91993 - protein, 22 aa, Severe acute respiratory syndrome coronavirus 2
KRRVVFNGVSFSTFEEAALCTF

SEQ ID NO: 91994 - protein, 22 aa, Severe acute respiratory syndrome coronavirus 2
RRVVFNGVSFSTFEEAALCTFL

SEQ ID NO: 91995 - protein, 22 aa, Severe acute respiratory syndrome coronavirus 2
RVVFNGVSFSTFEEAALCTFLL

SEQ ID NO: 91996 - protein, 22 aa, Severe acute respiratory syndrome coronavirus 2
VVFNGVSFSTFEEAALCTFLLN

SEQ ID NO: 91997 - protein, 22 aa, Severe acute respiratory syndrome coronavirus 2
VFNGVSFSTFEEAALCTFLLNK

SEQ ID NO: 91998 - protein, 22 aa, Severe acute respiratory syndrome coronavirus 2
FNGVSFSTFEEAALCTFLLNKE

SEQ ID NO: 91999 - protein, 22 aa, Severe acute respiratory syndrome coronavirus 2
NGVSFSTFEEAALCTFLLNKEM

SEQ ID NO: 92000 - protein, 22 aa, Severe acute respiratory syndrome coronavirus 2
GVSFSTFEEAALCTFLLNKEMY

SEQ ID NO: 92001 - protein, 22 aa, Severe acute respiratory syndrome coronavirus 2
VSFSTFEEAALCTFLLNKEMYL

SEQ ID NO: 92002 - protein, 22 aa, Severe acute respiratory syndrome coronavirus 2
SFSTFEEAALCTFLLNKEMYLK

SEQ ID NO: 92003 - protein, 22 aa, Severe acute respiratory syndrome coronavirus 2
FSTFEEAALCTFLLNKEMYLKL

SEQ ID NO: 92004 - protein, 22 aa, Severe acute respiratory syndrome coronavirus 2
STFEEAALCTFLLNKEMYLKLR

SEQ ID NO: 92005 - protein, 22 aa, Severe acute respiratory syndrome coronavirus 2
TFEEAALCTFLLNKEMYLKLRS

SEQ ID NO: 92006 - protein, 22 aa, Severe acute respiratory syndrome coronavirus 2
FEEAALCTFLLNKEMYLKLRSD

SEQ ID NO: 92007 - protein, 22 aa, Severe acute respiratory syndrome coronavirus 2
EEAALCTFLLNKEMYLKLRSDV

SEQ ID NO: 92008 - protein, 22 aa, Severe acute respiratory syndrome coronavirus 2
EAALCTFLLNKEMYLKLRSDVL

SEQ ID NO: 92009 - protein, 22 aa, Severe acute respiratory syndrome coronavirus 2
AALCTFLLNKEMYLKLRSDVLL

SEQ ID NO: 92010 - protein, 22 aa, Severe acute respiratory syndrome coronavirus 2
ALCTFLLNKEMYLKLRSDVLLP

SEQ ID NO: 92011 - protein, 22 aa, Severe acute respiratory syndrome coronavirus 2
CMVQVTCGTTTLNGLWLDDVVY

SEQ ID NO: 92012 - protein, 22 aa, Severe acute respiratory syndrome coronavirus 2
MVQVTCGTTTLNGLWLDDVVYC

SEQ ID NO: 92013 - protein, 22 aa, Severe acute respiratory syndrome coronavirus 2
VQVTCGTTTLNGLWLDDVVYCP

SEQ ID NO: 92014 - protein, 22 aa, Severe acute respiratory syndrome coronavirus 2
QVTCGTTTLNGLWLDDVVYCPR

SEQ ID NO: 92015 - protein, 22 aa, Severe acute respiratory syndrome coronavirus 2
VTCGTTTLNGLWLDDVVYCPRH
